United States Patent Application Publication US 2012/0159672 A1 - sequence listing, part 5

SEQ ID NO: 9058 - DNA, 1725 bp, Glycine max
  misc_feature (1)..(1725): Ceres Seq. ID no. 15171693
atattccgataaacagaaacaccaccgttgaatttgagaatcccggcgaggcatgttcttgctccgagtccactcggtggaagaggaccaccctctggatccccaaaccatcttccaatcccaatcccaatcccaatcccaatcccaatccaacaaccctaaattcagcgaacgcagaggcgcactccacttgttccgaacctcttcccattcctcgctcccaacccagacctctctttcttctctcctcttcatcctcgccgtccccaactacctctccttccacgacttcattcccttctgtggaccccacctcgaccgtttccaccaccttctcttcatcagaaacgacggcaccgaagatcgctatagcgtcctcatcgagttcgccgatcactttgccgccgacgcattttttaccaatttcaatgccaagaagttttctcctgccgaggcagaggtgtgccatattttgtttctgcaatccgtggagtattctgaatatgcagaagttgctgggactccgcctcctggttgtacggaaataccaacttgtcctgtttgtcttgagaggttggacccagatacgagtgggattctcacaacactttgcgaccactcatttgattgcccttgtgtttcaaagtggacgtacttgtcttgccaggtttgtcaattctgtcagcaacaggatgagaagccaacctgttttatttgtggaacattagatgatctctgggtttgtatgatttgtggatttgttggatgtggaagatataaagaaggacatgccattcagcattggaaagatactcagcattgctattctcttgattttaaaacacagcaaatttgggattatgtgggtgacagttatgtccatcgactgaaccaggaccagtctaaaattgatggcaagttggaggagatgaattttcgctgtatgtcactggaaggagattgtggtatgtgcgaatgccgtgaagatttgggaattaatggggcccttttcaacagcaaagttgaaacgattgtggatgaatacaaccgtcttcttacatctcagttggagacacaaagacaatattatgaatctttactagtggaggcaaaaagtaaaatggaaagttccatgtctgaagcagtggagaaagctgcagcttctgaaatgcaggatatccaaaatgaactggaaaagtgtacagaagaaagaaatgccattgctgaggtcaatcagaaactcataaaaaatcaagagatttggcggaagaagtttaaagaagctgaagagagggaagctaaatcaattaaattgatgaatgagaggataattgatttggaggaacagattagagatatcaagatttttctagaagcacaaaaaacaattgataaaatgtcagattcaaatgggatcaaggagggaacagtcctgccggtggcttatgagcaatcttctccaggccacagtaagagaaacaaaaagtctggccgaaggaggaattagttgcaacctcaaccagaacacaatattcgaacttatgggtagtctgctttttaggagggaaggacactgcttctgattattacactgatacttgttgatatatagaggcagttccaactcgtggccatggattgctgtctgcatattttagatgttgtatagtttattcttgtaaacagttagtttaacgaatttcgtggtcctaaccctttcctctc

SEQ ID NO: 9059 - protein, 484 aa, Glycine max
  peptide (1)..(484): Ceres Seq. ID no. 15171694
  misc_feature (219)..(292): Pfam Name: Pfam Description:  Zn-finger in ubiquitin-hydrolases and other protein
  misc_feature (1)..(483): NCBI GI NO: 15227893 NR Description: expressed protein [Arabidopsis thaliana]
  misc_feature (66)..(484): NCBI GI NO: 38345493 NR Description: OSJNBa0010D21.6
  misc_feature (33)..(483): NCBI GI NO: 15225236 NR Description: hypothetical protein [Arabidopsis thaliana]
  misc_feature (33)..(483): NCBI GI NO: 24637027 NR Description: BRAP2 [Squalus acanthias]
  misc_feature (33)..(483): NCBI GI NO: 10800417 NR Description: BRCA1 associated protein [Homo sapiens]
  misc_feature (33)..(482): NCBI GI NO: 13492093 NR Description: BRAP2 variant 1 [Mus musculus]
  misc_feature (33)..(482): NCBI GI NO: 13492095 NR Description: BRAP2 variant 2 [Mus musculus]
  misc_feature (33)..(449): NCBI GI NO: 3252872 NR Description: BRCA1-associated protein 2 [Homo sapiens]
  misc_feature (45)..(482): NCBI GI NO: 17998683 NR Description: BRCA1 associated protein [Mus musculus]
  misc_feature (33)..(478): NCBI GI NO: 21356581 NR Description: CG5555-PA [Drosophila melanogaster]
MFLLRVHSVEEDHPLDPQTIFQSQSQSQSQSQSNNPKFSERRGALHLFRTSSHSSLPTQTSLSSLLFILAVPNYLSFHDFIPFCGPHLDRFHHLLFIRNDGTEDRYSVLIEFADHFAADAFFTNFNAKKFSPAEAEVCHILFLQSVEYSEYAEVAGTPPPGCTEIPTCPVCLERLDPDTSGILTTLCDHSFDCPCVSKWTYLSCQVCQFCQQQDEKPTCFICGTLDDLWVCMICGFVGCGRYKEGHAIQHWKDTQHCYSLDFKTQQIWDYVGDSYVHRLNQDQSKIDGKLEEMNFRCMSLEGDCGMCECREDLGINGALFNSKVETIVDEYNRLLTSQLETQRQYYESLLVEAKSKMESSMSEAVEKAAASEMQDIQNELEKCTEERNAIAEVNQKLIKNQEIWRKKFKEAEEREAKSIKLMNERIIDLEEQIRDIKIFLEAQKTIDKMSDSNGIKEGTVLPVAYEQSSPGHSKRNKKSGRRRN

SEQ ID NO: 9060 - protein, 253 aa, Glycine max
  peptide (1)..(253): Ceres Seq. ID no. 15171695
  misc_feature (1)..(61): Pfam Name: Pfam Description:  Zn-finger in ubiquitin-hydrolases and other protein
  misc_feature (1)..(252): NCBI GI NO: 15227893 NR Description: expressed protein [Arabidopsis thaliana]
  misc_feature (1)..(253): NCBI GI NO: 38345493 NR Description: OSJNBa0010D21.6
  misc_feature (1)..(252): NCBI GI NO: 15225236 NR Description: hypothetical protein [Arabidopsis thaliana]
  misc_feature (1)..(252): NCBI GI NO: 24637027 NR Description: BRAP2 [Squalus acanthias]
  misc_feature (1)..(252): NCBI GI NO: 10800417 NR Description: BRCA1 associated protein [Homo sapiens]
  misc_feature (1)..(251): NCBI GI NO: 13492093 NR Description: BRAP2 variant 1 [Mus musculus]
  misc_feature (1)..(251): NCBI GI NO: 13492095 NR Description: BRAP2 variant 2 [Mus musculus]
  misc_feature (1)..(218): NCBI GI NO: 3252872 NR Description: BRCA1-associated protein 2 [Homo sapiens]
  misc_feature (1)..(251): NCBI GI NO: 17998683 NR Description: BRCA1 associated protein [Mus musculus]
  misc_feature (1)..(247): NCBI GI NO: 21356581 NR Description: CG5555-PA [Drosophila melanogaster]
MICGFVGCGRYKEGHAIQHWKDTQHCYSLDFKTQQIWDYVGDSYVHRLNQDQSKIDGKLEEMNFRCMSLEGDCGMCECREDLGINGALFNSKVETIVDEYNRLLTSQLETQRQYYESLLVEAKSKMESSMSEAVEKAAASEMQDIQNELEKCTEERNAIAEVNQKLIKNQEIWRKKFKEAEEREAKSIKLMNERIIDLEEQIRDIKIFLEAQKTIDKMSDSNGIKEGTVLPVAYEQSSPGHSKRNKKSGRRRN

SEQ ID NO: 9061 - DNA, 1142 bp, Glycine max
  misc_feature (1)..(1142): Ceres Seq. ID no. 12608276
  misc_feature (463)..(463): n is a, c, t, g, unknown, or other
gtttccaagtgtaatggattcgagttccattaacagcaacagtaaggagataaccatggagattccaagcttggttcgactttacaaggatggcaccattgaacgcctccaaaactcaccaattgtgccacccacgcttcaagatccaacttcttccaaagacgtcgtcatctctggtgaccccctcatctctgctcgtcttttccttccaaaccggattcgatcccagcaagagggtcataaagtccccatcttggtctactttcatggtggaggtttcttctttgaatctgccttcaaccaactccaccataactatttcaacaagtttgtctccgtagcagatgttttagtcgtttccgtcgagtataggttggctccagagacccttcttcctgcagcttatgatgactgctgggatgctcttaaatgggtcgccaccaacaccgaaccatggcttgtncaacacggtgatttcaacagagtcttcattggaggtgacagcgctggtgctaatatagttcataacattgccatgcgtgctggggctgaagctttacctggtggtgtcaaactcttgggtgcttttctttctcattcctacttctacggttcaaagccaattggatcggaacctgttgcagggcaccaacagagcgtgccctatttggtatgggattttgtttatccatctgcgcctggagggattgacaaccctatgatcaatccaatggttactggggcgcctagcttggctggacttgggtgttctaagattctggtttgcgttgctgaaaaggatctgataaaggatagaggggttgcgtactatgaggctgtgaagaagagtggctggcaaggtgaagcggaactgttcgaagtggagggcgaggatcatgctttccacatccacaatccacaaacccagaatgccatgaaaatgatcaaacgcctctcggattttctcctccactaaaacacataccctgaggattctgagttttaatgtctcatggatgtaatctaatgtaatgcttcaactctgcttattattattaagcaaataaaatttggaaatcagaagccagtgtagctggcctagttcgtgtgatctaaagtctaataatattctctattatgct

SEQ ID NO: 9062 - protein, 324 aa, Glycine max
  peptide (1)..(324): Ceres Seq. ID no. 12608277
  misc_feature (75)..(127): Pfam Name: Pfam Description:  Carboxylesterase
  misc_feature (16)..(322): NCBI GI NO: 15228425 NR Description: putative protein; protein id: At3g48690
  misc_feature (16)..(323): NCBI GI NO: 15222791 NR Description: hypothetical protein; protein id: At1g49640.1
  misc_feature (13)..(322): NCBI GI NO: 21537287 NR Description: putative esterase [Arabidopsis thaliana]
  misc_feature (16)..(322): NCBI GI NO: 18086341 NR Description: AT3g48690/T8P19_200 [Arabidopsis thaliana]
  misc_feature (10)..(322): NCBI GI NO: 18401743 NR Description: expressed protein; protein id: At1g47480
  misc_feature (13)..(322): NCBI GI NO: 18402731 NR Description: expressed protein; protein id: At1g49650
  misc_feature (10)..(322): NCBI GI NO: 21536771 NR Description: unknown [Arabidopsis thaliana]
  misc_feature (16)..(323): NCBI GI NO: 15222795 NR Description: unknown protein; protein id: At1g49660.1
  misc_feature (8)..(322): NCBI GI NO: 38344841 NR Description: OSJNBa0064H22.22
  misc_feature (17)..(322): NCBI GI NO: 15227669 NR Description: putative esterase; protein id: At2g03550.1
  misc_feature (154)..(154): Xaa is any aa, unknown or other
FPSVMDSSSINSNSKEITMEIPSLVRLYKDGTIERLQNSPIVPPTLQDPTSSKDVVISGDPLISARLFLPNRIRSQQEGHKVPILVYFHGGGFFFESAFNQLHHNYFNKFVSVADVLVVSVEYRLAPETLLPAAYDDCWDALKWVATNTEPWLXQHGDFNRVFIGGDSAGANIVHNIAMRAGAEALPGGVKLLGAFLSHSYFYGSKPIGSEPVAGHQQSVPYLVWDFVYPSAPGGIDNPMINPMVTGAPSLAGLGCSKILVCVAEKDLIKDRGVAYYEAVKKSGWQGEAELFEVEGEDHAFHIHNPQTQNAMKMIKRLSDFLLH

SEQ ID NO: 9063 - protein, 320 aa, Glycine max
  peptide (1)..(320): Ceres Seq. ID no. 12608278
  misc_feature (71)..(123): Pfam Name: Pfam Description:  Carboxylesterase
  misc_feature (12)..(318): NCBI GI NO: 15228425 NR Description: putative protein; protein id: At3g48690
  misc_feature (12)..(319): NCBI GI NO: 15222791 NR Description: hypothetical protein; protein id: At1g49640.1
  misc_feature (9)..(318): NCBI GI NO: 21537287 NR Description: putative esterase [Arabidopsis thaliana]
  misc_feature (12)..(318): NCBI GI NO: 18086341 NR Description: AT3g48690/T8P19_200 [Arabidopsis thaliana]
  misc_feature (6)..(318): NCBI GI NO: 18401743 NR Description: expressed protein; protein id: At1g47480
  misc_feature (9)..(318): NCBI GI NO: 18402731 NR Description: expressed protein; protein id: At1g49650
  misc_feature (6)..(318): NCBI GI NO: 21536771 NR Description: unknown [Arabidopsis thaliana]
  misc_feature (12)..(319): NCBI GI NO: 15222795 NR Description: unknown protein; protein id: At1g49660.1
  misc_feature (4)..(318): NCBI GI NO: 38344841 NR Description: OSJNBa0064H22.22
  misc_feature (13)..(318): NCBI GI NO: 15227669 NR Description: putative esterase; protein id: At2g03550.1
  misc_feature (150)..(150): Xaa is any aa, unknown or other
MDSSSINSNSKEITMEIPSLVRLYKDGTIERLQNSPIVPPTLQDPTSSKDVVISGDPLISARLFLPNRIRSQQEGHKVPILVYFHGGGFFFESAFNQLHHNYFNKFVSVADVLVVSVEYRLAPETLLPAAYDDCWDALKWVATNTEPWLXQHGDFNRVFIGGDSAGANIVHNIAMRAGAEALPGGVKLLGAFLSHSYFYGSKPIGSEPVAGHQQSVPYLVWDFVYPSAPGGIDNPMINPMVTGAPSLAGLGCSKILVCVAEKDLIKDRGVAYYEAVKKSGWQGEAELFEVEGEDHAFHIHNPQTQNAMKMIKRLSDFLLH

SEQ ID NO: 9064 - protein, 306 aa, Glycine max
  peptide (1)..(306): Ceres Seq. ID no. 12608279
  misc_feature (57)..(109): Pfam Name: Pfam Description:  Carboxylesterase
  misc_feature (1)..(304): NCBI GI NO: 15228425 NR Description: putative protein; protein id: At3g48690
  misc_feature (1)..(305): NCBI GI NO: 15222791 NR Description: hypothetical protein; protein id: At1g49640.1
  misc_feature (1)..(304): NCBI GI NO: 21537287 NR Description: putative esterase [Arabidopsis thaliana]
  misc_feature (1)..(304): NCBI GI NO: 18086341 NR Description: AT3g48690/T8P19_200 [Arabidopsis thaliana]
  misc_feature (1)..(304): NCBI GI NO: 18401743 NR Description: expressed protein; protein id: At1g47480
  misc_feature (1)..(304): NCBI GI NO: 18402731 NR Description: expressed protein; protein id: At1g49650
  misc_feature (1)..(304): NCBI GI NO: 21536771 NR Description: unknown [Arabidopsis thaliana]
  misc_feature (1)..(305): NCBI GI NO: 15222795 NR Description: unknown protein; protein id: At1g49660.1
  misc_feature (1)..(304): NCBI GI NO: 38344841 NR Description: OSJNBa0064H22.22
  misc_feature (1)..(304): NCBI GI NO: 15227669 NR Description: putative esterase; protein id: At2g03550.1
  misc_feature (136)..(136): Xaa is any aa, unknown or other
MEIPSLVRLYKDGTIERLQNSPIVPPTLQDPTSSKDVVISGDPLISARLFLPNRIRSQQEGHKVPILVYFHGGGFFFESAFNQLHHNYFNKFVSVADVLVVSVEYRLAPETLLPAAYDDCWDALKWVATNTEPWLXQHGDFNRVFIGGDSAGANIVHNIAMRAGAEALPGGVKLLGAFLSHSYFYGSKPIGSEPVAGHQQSVPYLVWDFVYPSAPGGIDNPMINPMVTGAPSLAGLGCSKILVCVAEKDLIKDRGVAYYEAVKKSGWQGEAELFEVEGEDHAFHIHNPQTQNAMKMIKRLSDFLLH

SEQ ID NO: 9065 - DNA, 1199 bp, Glycine max
  misc_feature (1)..(1199): Ceres Seq. ID no. 15175723
actcttttattcttattttgttttttaaactttcttaacgcaacaaacacatagccacatcttctctttctcttcccatggcattctgactcatacccaaatcattgattgtttgtctatcgaatcggtgagaaaatggcagtggagctgatggggttcccccaaatgggcgaacagaaggcaattgaagaagcagccgccgaaggcctcaagggcatggaacacctcctccgtctcctctcccatcaaccttcccacctccgcactcaccacaccgacgccaccgtttccaacttcaaaaaactcatctcccttctcaaccgccgcaccggccatgcccgtttccgccgcgcacccctcccttccacttccaactctctcgccccatcccctccaccggctaacccggtcaccttcgccccttcgcagtcacagagtctaaccctcgatttctcaaaacctaacatgttcaacaccaccaacgccaaatccatggacctcgagttctctaaagaaaccttcagcgtctcctccaactcctccttcatgtcctccgctatcaccggcgacggtagcgtctccaatggcaaactaggatcctccctcttcctcactcctccgccagtctccgccggaaaacctcctctctcgtttgctccgatcaagaagaggtgccacgaccaccgcgagcactccgacgacatctccgggaaactctccggctccagcaagtgccactgcatcaagagaaggaagaatcgtgtgaagaaaacggttagagttccggcgattagttcgaaggtcgccgatattccgccggatgagtactcgtggaggaagtacggacagaagccgatcaagggatcaccgtacccgagggggtattacaagtgcagtaccgtgagagggtgcccggcgaggaaacacgtggagcgtgcttcggacgatccgacgatgttgattgtaacgtacgagggggagcaccgacactcgattcagaccgcgatgcaggagaacatttccgggggagtgggtttggtattcgagtcaacgtgagtgtggaattaaagaaaggggaactgttggggggctttttttttgtagtaggaaaaaaaaaagaggtgaataggaaaattgaattaaggtggtggttgcaatgtaaatctgaccttattgaaagaaaatattattgtgctgct

SEQ ID NO: 9066 - protein, 306 aa, Glycine max
  peptide (1)..(306): Ceres Seq. ID no. 15175724
  misc_feature (227)..(287): Pfam Name: Pfam Description:  WRKY DNA -binding domain
  misc_feature (1)..(305): NCBI GI NO: 18400580 NR Description: WRKY family transcription factor
  misc_feature (1)..(296): NCBI GI NO: 25348152 NR Description: probable WRKY-type DNA binding protein
  misc_feature (47)..(305): NCBI GI NO: 30689072 NR Description: WRKY family transcription factor
  misc_feature (47)..(305): NCBI GI NO: 22329054 NR Description: WRKY family transcription factor
  misc_feature (47)..(305): NCBI GI NO: 16604573 NR Description: putative putaive DNA-binding protein
  misc_feature (47)..(305): NCBI GI NO: 21537078 NR Description: putaive DNA-binding protein [Arabidopsis thaliana]
  misc_feature (38)..(306): NCBI GI NO: 4760596 NR Description: DNA-binding protein NtWRKY3 [Nicotiana tabacum]
  misc_feature (1)..(286): NCBI GI NO: 4894963 NR Description: DNA-binding protein WRKY3 [Avena sativa]
  misc_feature (47)..(294): NCBI GI NO: 38568048 NR Description: OSJNBa0065J03.18
  misc_feature (47)..(296): NCBI GI NO: 7488950 NR Description: DNA-binding protein WRKY3 - parsley
MAVELMGFPQMGEQKAIEEAAAEGLKGMEHLLRLLSHQPSHLRTHHTDATVSNFKKLISLLNRRTGHARFRRAPLPSTSNSLAPSPPPANPVTFAPSQSQSLTLDFSKPNMFNTTNAKSMDLEFSKETFSVSSNSSFMSSAITGDGSVSNGKLGSSLFLTPPPVSAGKPPLSFAPIKKRCHDHREHSDDISGKLSGSSKCHCIKRRKNRVKKTVRVPAISSKVADIPPDEYSWRKYGQKPIKGSPYPRGYYKCSTVRGCPARKHVERASDDPTMLIVTYEGEHRHSIQTAMQENISGGVGLVFEST

SEQ ID NO: 9067 - protein, 301 aa, Glycine max
  peptide (1)..(301): Ceres Seq. ID no. 15175725
  misc_feature (222)..(282): Pfam Name: Pfam Description:  WRKY DNA -binding domain
  misc_feature (1)..(300): NCBI GI NO: 18400580 NR Description: WRKY family transcription factor
  misc_feature (1)..(291): NCBI GI NO: 25348152 NR Description: probable WRKY-type DNA binding protein
  misc_feature (42)..(300): NCBI GI NO: 30689072 NR Description: WRKY family transcription factor
  misc_feature (42)..(300): NCBI GI NO: 22329054 NR Description: WRKY family transcription factor
  misc_feature (42)..(300): NCBI GI NO: 16604573 NR Description: putative putaive DNA-binding protein
  misc_feature (42)..(300): NCBI GI NO: 21537078 NR Description: putaive DNA-binding protein [Arabidopsis thaliana]
  misc_feature (33)..(301): NCBI GI NO: 4760596 NR Description: DNA-binding protein NtWRKY3 [Nicotiana tabacum]
  misc_feature (1)..(281): NCBI GI NO: 4894963 NR Description: DNA-binding protein WRKY3 [Avena sativa]
  misc_feature (42)..(289): NCBI GI NO: 38568048 NR Description: OSJNBa0065J03.18
  misc_feature (42)..(291): NCBI GI NO: 7488950 NR Description: DNA-binding protein WRKY3 - parsley
MGFPQMGEQKAIEEAAAEGLKGMEHLLRLLSHQPSHLRTHHTDATVSNFKKLISLLNRRTGHARFRRAPLPSTSNSLAPSPPPANPVTFAPSQSQSLTLDFSKPNMFNTTNAKSMDLEFSKETFSVSSNSSFMSSAITGDGSVSNGKLGSSLFLTPPPVSAGKPPLSFAPIKKRCHDHREHSDDISGKLSGSSKCHCIKRRKNRVKKTVRVPAISSKVADIPPDEYSWRKYGQKPIKGSPYPRGYYKCSTVRGCPARKHVERASDDPTMLIVTYEGEHRHSIQTAMQENISGGVGLVFEST

SEQ ID NO: 9068 - protein, 296 aa, Glycine max
  peptide (1)..(296): Ceres Seq. ID no. 15175726
  misc_feature (217)..(277): Pfam Name: Pfam Description:  WRKY DNA -binding domain
  misc_feature (1)..(295): NCBI GI NO: 18400580 NR Description: WRKY family transcription factor
  misc_feature (1)..(286): NCBI GI NO: 25348152 NR Description: probable WRKY-type DNA binding protein
  misc_feature (37)..(295): NCBI GI NO: 30689072 NR Description: WRKY family transcription factor
  misc_feature (37)..(295): NCBI GI NO: 22329054 NR Description: WRKY family transcription factor
  misc_feature (37)..(295): NCBI GI NO: 16604573 NR Description: putative putaive DNA-binding protein
  misc_feature (37)..(295): NCBI GI NO: 21537078 NR Description: putaive DNA-binding protein [Arabidopsis thaliana]
  misc_feature (28)..(296): NCBI GI NO: 4760596 NR Description: DNA-binding protein NtWRKY3 [Nicotiana tabacum]
  misc_feature (1)..(276): NCBI GI NO: 4894963 NR Description: DNA-binding protein WRKY3 [Avena sativa]
  misc_feature (37)..(284): NCBI GI NO: 38568048 NR Description: OSJNBa0065J03.18
  misc_feature (37)..(286): NCBI GI NO: 7488950 NR Description: DNA-binding protein WRKY3 - parsley
MGEQKAIEEAAAEGLKGMEHLLRLLSHQPSHLRTHHTDATVSNFKKLISLLNRRTGHARFRRAPLPSTSNSLAPSPPPANPVTFAPSQSQSLTLDFSKPNMFNTTNAKSMDLEFSKETFSVSSNSSFMSSAITGDGSVSNGKLGSSLFLTPPPVSAGKPPLSFAPIKKRCHDHREHSDDISGKLSGSSKCHCIKRRKNRVKKTVRVPAISSKVADIPPDEYSWRKYGQKPIKGSPYPRGYYKCSTVRGCPARKHVERASDDPTMLIVTYEGEHRHSIQTAMQENISGGVGLVFEST

SEQ ID NO: 9069 - DNA, 750 bp, Glycine max
  misc_feature (1)..(750): Ceres Seq. ID no. 15175191
atttctctctctctctctctctcttctccgtcaatgccttctcctctcacagtcacagggtctgtttgttagggtttcctttttttccatttcccccctttctcccacactatctctttccgcattttcccaattaggatgtgtcattgagacagaagaagaagaagaaattggagggggtgtgtgatcgggtcctcaggtgaagatctgaggctgttggtgtctcttttcttttctccgagttccaaagatgagcgcttctaggttcatcaagtgcgtcactgttggggatggtgctgtgggcaaaacctgtttgcttatttcctacaccagcagtgacgcacttgatgaaccttgaagctcagctgagaaaaattgaggaacaactagagaaaaagaaagcagaatatggtgaaaaaatgaaaaacaaaatagccttagttcacaagcaagcagaggagaagagagcaatggttgaagccaagcgtggtgaagaaattctcaaggcagaggaaatagctgcaaaacaccgtgcaactggaacctctccaaagaaggcctttggatgcttttaaatttttattcctttttttgttgttgtgcttttgtgcctgatgtcatagcaataatgaaatttttgtctataatattttcatgtttgttttttaaatgttgtttatgtgtgtacgaaatggaaagggggacactatgaagtttgtgacatacagaacagcctctagatctttttgt

SEQ ID NO: 9070 - protein, 94 aa, Glycine max
  peptide (1)..(94): Ceres Seq. ID no. 15175192
  misc_feature (21)..(89): Pfam Name: Pfam Description:  Remorin, C-terminal region
  misc_feature (17)..(94): NCBI GI NO: 32489830 NR Description: OSJNBb0039L24.13
  misc_feature (21)..(94): NCBI GI NO: 34925093 NR Description: Remorin (pp34)
  misc_feature (22)..(93): NCBI GI NO: 15237822 NR Description: expressed protein [Arabidopsis thaliana]
  misc_feature (22)..(93): NCBI GI NO: 21555669 NR Description: remorin [Arabidopsis thaliana]
  misc_feature (21)..(94): NCBI GI NO: 4731573 NR Description: remorin 1 [Lycopersicon esculentum]
  misc_feature (22)..(94): NCBI GI NO: 15225899 NR Description: remorin [Arabidopsis thaliana]
  misc_feature (22)..(94): NCBI GI NO: 15233068 NR Description: DNA-binding protein -related
  misc_feature (22)..(94): NCBI GI NO: 601843 NR Description: DNA-binding protein
  misc_feature (17)..(93): NCBI GI NO: 4883530 NR Description: remorin 2 [Lycopersicon esculentum]
  misc_feature (21)..(94): NCBI GI NO: 15229057 NR Description: remorin -related protein [Arabidopsis thaliana]
MVLWAKPVCLFPTPAVTHLMNLEAQLRKIEEQLEKKKAEYGEKMKNKIALVHKQAEEKRAMVEAKRGEEILKAEEIAAKHRATGTSPKKAFGCF

SEQ ID NO: 9071 - protein, 75 aa, Glycine max
  peptide (1)..(75): Ceres Seq. ID no. 15175193
  misc_feature (2)..(70): Pfam Name: Pfam Description:  Remorin, C-terminal region
  misc_feature (1)..(75): NCBI GI NO: 32489830 NR Description: OSJNBb0039L24.13
  misc_feature (2)..(75): NCBI GI NO: 34925093 NR Description: Remorin (pp34)
  misc_feature (3)..(74): NCBI GI NO: 15237822 NR Description: expressed protein [Arabidopsis thaliana]
  misc_feature (3)..(74): NCBI GI NO: 21555669 NR Description: remorin [Arabidopsis thaliana]
  misc_feature (2)..(75): NCBI GI NO: 4731573 NR Description: remorin 1 [Lycopersicon esculentum]
  misc_feature (3)..(75): NCBI GI NO: 15225899 NR Description: remorin [Arabidopsis thaliana]
  misc_feature (3)..(75): NCBI GI NO: 15233068 NR Description: DNA-binding protein -related
  misc_feature (3)..(75): NCBI GI NO: 601843 NR Description: DNA-binding protein
  misc_feature (1)..(74): NCBI GI NO: 4883530 NR Description: remorin 2 [Lycopersicon esculentum]
  misc_feature (2)..(75): NCBI GI NO: 15229057 NR Description: remorin -related protein [Arabidopsis thaliana]
MNLEAQLRKIEEQLEKKKAEYGEKMKNKIALVHKQAEEKRAMVEAKRGEEILKAEEIAAKHRATGTSPKKAFGCF

SEQ ID NO: 9072 - protein, 61 aa, Glycine max
  peptide (1)..(61): Ceres Seq. ID no. 15175194
FLSLSLSLLRQCLLLSQSQGLFVRVSFFSISPLSPTLSLSAFSQLGCVIETEEEEEIGGGV

SEQ ID NO: 9073 - DNA, 1480 bp, Glycine max
  misc_feature (1)..(1480): Ceres Seq. ID no. 15168421
acacagaaaaacaaatccttcaaacatcgttttatttttcttctctctaaactaaaaaaaatgaagggcaccatagttctacaccctgccatgagtaggggacacctagtccccatggtagaacttggcaagttcatatacactcaccaccaccaaaacctccccatcaaaatcctcctcccttcgccgcccaactccaccacccttcaatacatcgccgccgtctccgccaccacgccttcgatcaccttccaccacctctcaccctcacaacacttactccacgtcctccaaaccctcatctcccaatcttccaaacccaaagccttcatcctagacttcttcaaccactccgctgctgatgtcacacgaaccctaaaaatccccacctactattacttccccaactccgcgagttgcgtcgctctcttcctttacaccccaaccatccactacaacaccaagaaaggcttttccagttacagcgacacgcttcgccgcatccccggtttgccgccactgtcgccggaggacatgcccacctccctcctcgaccgccggagcttcgagtccttcgccaacatgtcgattcaaatgagaaaaacagatggaataatcgttaacacgttcgagaagcttgagaataaagctttcttcgcgttgaagaatgggatctgcatgtcattagaaacacataagtctcattcttcaacgccagaaacacgtaacccacgtgtcttttgcatgggcccacttgtttctaacggtggaggtgaacatgataatgatgatagtggttgcatgagttggctcgactcgcaaccgagtcgaaccgttgtgtttttaagctttggaagctacggaaggttctcgaagagtcagataagggagatagcgttagggttagagaggagtggacaaaggtttttgtgggttatgaggaacccatatgagagaagtgaattgattttggaggaattgttgccaaaagggtttttggaaagaactaaagagaggggaatggtgatgaagaattgggcgccacaagttaagattctgagtcatgactcggtgggtgggttcgtgactcactgcgggtggaactcggtgttggaagcggtctcttggggtgtgcctatggtgtcgtggcctttgtatgcggaacaaaggttgaatagggtggttatggttgaggagatgaaggtggctttggcgttgaaggagaacgaagatgggtttgttagggctagtgagttggaagagcgagttagggagcttatggactcggagagagggagagggaaagaggttagagagagagttttgagcgcgagatatgatgctgtagctgcactcagcgatggtggatcttcacgggttgagttgaatgacttggttgagttgtggatgcaatgatgcttaaaagagtattattttttttcctgcttttattttaagtcaactgggtcaaccagttcac

SEQ ID NO: 9074 - protein, 471 aa, Glycine max
  peptide (1)..(471): Ceres Seq. ID no. 15168422
  misc_feature (90)..(471): NCBI GI NO: 19911185 NR Description: glucosyltransferase-1 [Vigna angularis]
  misc_feature (21)..(469): NCBI GI NO: 19911193 NR Description: glucosyltransferase-5 [Vigna angularis]
  misc_feature (25)..(469): NCBI GI NO: 21593785 NR Description: putative glucosyltransferase
  misc_feature (66)..(469): NCBI GI NO: 19911189 NR Description: glucosyltransferase-3 [Vigna angularis]
  misc_feature (25)..(469): NCBI GI NO: 18401158 NR Description: glycosyltransferase family [Arabidopsis thaliana]
  misc_feature (25)..(454): NCBI GI NO: 18401155 NR Description: glycosyltransferase family [Arabidopsis thaliana]
  misc_feature (25)..(454): NCBI GI NO: 30684106 NR Description: glycosyltransferase family [Arabidopsis thaliana]
  misc_feature (105)..(471): NCBI GI NO: 22535568 NR Description: putative glucosyltransferase
  misc_feature (25)..(87): NCBI GI NO: 22535568 NR Description: putative glucosyltransferase
  misc_feature (109)..(467): NCBI GI NO: 34910204 NR Description: putative flavonol glucosyltransferase
TQKNKSFKHRFIFLLSKLKKMKGTIVLHPAMSRGHLVPMVELGKFIYTHHHQNLPIKILLPSPPNSTTLQYIAAVSATTPSITFHHLSPSQHLLHVLQTLISQSSKPKAFILDFFNHSAADVTRTLKIPTYYYFPNSASCVALFLYTPTIHYNTKKGFSSYSDTLRRIPGLPPLSPEDMPTSLLDRRSFESFANMSIQMRKTDGIIVNTFEKLENKAFFALKNGICMSLETHKSHSSTPETRNPRVFCMGPLVSNGGGEHDNDDSGCMSWLDSQPSRTVVFLSFGSYGRFSKSQIREIALGLERSGQRFLWVMRNPYERSELILEELLPKGFLERTKERGMVMKNWAPQVKILSHDSVGGFVTHCGWNSVLEAVSWGVPMVSWPLYAEQRLNRVVMVEEMKVALALKENEDGFVRASELEERVRELMDSERGRGKEVRERVLSARYDAVAALSDGGSSRVELNDLVELWMQ

SEQ ID NO: 9075 - protein, 451 aa, Glycine max
  peptide (1)..(451): Ceres Seq. ID no. 15168423
  misc_feature (70)..(451): NCBI GI NO: 19911185 NR Description: glucosyltransferase-1 [Vigna angularis]
  misc_feature (1)..(449): NCBI GI NO: 19911193 NR Description: glucosyltransferase-5 [Vigna angularis]
  misc_feature (5)..(449): NCBI GI NO: 21593785 NR Description: putative glucosyltransferase
  misc_feature (46)..(449): NCBI GI NO: 19911189 NR Description: glucosyltransferase-3 [Vigna angularis]
  misc_feature (5)..(449): NCBI GI NO: 18401158 NR Description: glycosyltransferase family [Arabidopsis thaliana]
  misc_feature (5)..(434): NCBI GI NO: 18401155 NR Description: glycosyltransferase family [Arabidopsis thaliana]
  misc_feature (5)..(434): NCBI GI NO: 30684106 NR Description: glycosyltransferase family [Arabidopsis thaliana]
  misc_feature (85)..(451): NCBI GI NO: 22535568 NR Description: putative glucosyltransferase
  misc_feature (5)..(67): NCBI GI NO: 22535568 NR Description: putative glucosyltransferase
  misc_feature (89)..(447): NCBI GI NO: 34910204 NR Description: putative flavonol glucosyltransferase
MKGTIVLHPAMSRGHLVPMVELGKFIYTHHHQNLPIKILLPSPPNSTTLQYIAAVSATTPSITFHHLSPSQHLLHVLQTLISQSSKPKAFILDFFNHSAADVTRTLKIPTYYYFPNSASCVALFLYTPTIHYNTKKGFSSYSDTLRRIPGLPPLSPEDMPTSLLDRRSFESFANMSIQMRKTDGIIVNTFEKLENKAFFALKNGICMSLETHKSHSSTPETRNPRVFCMGPLVSNGGGEHDNDDSGCMSWLDSQPSRTVVFLSFGSYGRFSKSQIREIALGLERSGQRFLWVMRNPYERSELILEELLPKGFLERTKERGMVMKNWAPQVKILSHDSVGGFVTHCGWNSVLEAVSWGVPMVSWPLYAEQRLNRVVMVEEMKVALALKENEDGFVRASELEERVRELMDSERGRGKEVRERVLSARYDAVAALSDGGSSRVELNDLVELWMQ

SEQ ID NO: 9076 - protein, 441 aa, Glycine max
  peptide (1)..(441): Ceres Seq. ID no. 15168424
  misc_feature (60)..(441): NCBI GI NO: 19911185 NR Description: glucosyltransferase-1 [Vigna angularis]
  misc_feature (1)..(439): NCBI GI NO: 19911193 NR Description: glucosyltransferase-5 [Vigna angularis]
  misc_feature (1)..(439): NCBI GI NO: 21593785 NR Description: putative glucosyltransferase
  misc_feature (36)..(439): NCBI GI NO: 19911189 NR Description: glucosyltransferase-3 [Vigna angularis]
  misc_feature (1)..(439): NCBI GI NO: 18401158 NR Description: glycosyltransferase family [Arabidopsis thaliana]
  misc_feature (1)..(424): NCBI GI NO: 18401155 NR Description: glycosyltransferase family [Arabidopsis thaliana]
  misc_feature (1)..(424): NCBI GI NO: 30684106 NR Description: glycosyltransferase family [Arabidopsis thaliana]
  misc_feature (75)..(441): NCBI GI NO: 22535568 NR Description: putative glucosyltransferase
  misc_feature (1)..(57): NCBI GI NO: 22535568 NR Description: putative glucosyltransferase
  misc_feature (79)..(437): NCBI GI NO: 34910204 NR Description: putative flavonol glucosyltransferase
MSRGHLVPMVELGKFIYTHHHQNLPIKILLPSPPNSTTLQYIAAVSATTPSITFHHLSPSQHLLHVLQTLISQSSKPKAFILDFFNHSAADVTRTLKIPTYYYFPNSASCVALFLYTPTIHYNTKKGFSSYSDTLRRIPGLPPLSPEDMPTSLLDRRSFESFANMSIQMRKTDGIIVNTFEKLENKAFFALKNGICMSLETHKSHSSTPETRNPRVFCMGPLVSNGGGEHDNDDSGCMSWLDSQPSRTVVFLSFGSYGRFSKSQIREIALGLERSGQRFLWVMRNPYERSELILEELLPKGFLERTKERGMVMKNWAPQVKILSHDSVGGFVTHCGWNSVLEAVSWGVPMVSWPLYAEQRLNRVVMVEEMKVALALKENEDGFVRASELEERVRELMDSERGRGKEVRERVLSARYDAVAALSDGGSSRVELNDLVELWMQ

SEQ ID NO: 9077 - DNA, 1405 bp, Glycine max
  misc_feature (1)..(1405): Ceres Seq. ID no. 14304140
aaaacaatacttctactattagctttgtgagtgcaaccattcgcatcttcattcccagatttaaccaaacctctgaatgttcaaagcttccttgcctataatagcaaaaatccacacaaagcactcaccaaactcttaagaatctatggacctcttatgactttgaaatcaggcagcataagcaccatagttatttcctctcctcaagtagcaaaacgagtgctgcatgaaaatattctccccacaaatggaggaaccttagaagagtttgtgccacaaaaatattctccccacaagtgctcgactccactcaaatccttcgccaacaaaagcttcgggatttattggattttgtgaaagaaagttgcaagaaaggtgaggttgtggacattggtgcggttgtctttgcaacaatacttaattccatttcaaccacttagaaaagcctcaagagttcaagaacattattcggggtatgatggaagaagctggaaggcctaatgttgcagatttctttcccattcttcgtccacttgaccctcaacgtgtccttgcaaggaggagcatttatattaagaagttgtttgagattatcgatggaattattgaagagtgtgttcaagagcttcaaaaactgactccatggatgtattggattcacttcttaacaacaatgaagaaactggttctctgttgagtcgcgatgagacgatacacttgttcatgctcactaaacctatctcagaaaaacaaagatctcagactcattcaccattggatcgtcgtgaaatttaaacaccaagttcacaacccagttccgagcattctcaccgttgggaatttcaaaatcatgtctgagcttataggaaaatcattcgcattgtagccttttaatttcccgcagaaacccaaaactgtctcgataaaactatgatcccggtttcgttaaccgttggattttcatgaaatttggatatgttgttcgaaattcaattgcgcacacttgaaccgttgggatttgcgagataatattcgtgagggagaaaaatgaatcacatgaagacagtacaagtggaggtttcaatttcttcttcatctctctgacgtttgggaattctatcggagcaatcggaggaataactgaaggaatctcaggggaccgctagagatgctgctatcgctggctaaagacacgtgagtcctctcagaggtaagagatgagttattcacaattgagaattagcgaaaaaatgtgtacagatccttagagatatcaactgaaataagttttggggtatttttccaattttcattttattcttataattattacagtgaattatatatgtttgacagaccaatttttgtgaaattgatatgctattgtgttgagcgtgaaccctat

SEQ ID NO: 9078 - protein, 73 aa, Glycine max
  peptide (1)..(73): Ceres Seq. ID no. 14304141
  misc_feature (1)..(54): Pfam Name: Pfam Description:  Cytochrome P450
  misc_feature (1)..(46): NCBI GI NO: 4651206 NR Description: cytochrome P450 hydroxylase [Cicer arietinum]
  misc_feature (1)..(54): NCBI GI NO: 7406712 NR Description: putative ripening-related P-450 enzyme
  misc_feature (1)..(46): NCBI GI NO: 6009458 NR Description: cytochrome P450 [Cicer arietinum]
  misc_feature (1)..(50): NCBI GI NO: 17065916 NR Description: geraniol 10-hydroxylase [Catharanthus roseus]
  misc_feature (1)..(38): NCBI GI NO: 37531380 NR Description: putative Cytochrome P450
  misc_feature (1)..(50): NCBI GI NO: 30690065 NR Description: cytochrome P450 family [Arabidopsis thaliana]
  misc_feature (1)..(46): NCBI GI NO: 33320161 NR Description: cytochrome P450 [Pastinaca sativa]
  misc_feature (1)..(50): NCBI GI NO: 15225510 NR Description: cytochrome p450 family [Arabidopsis thaliana]
  misc_feature (1)..(50): NCBI GI NO: 25282599 NR Description: cytochrome P450 monooxygenase
  misc_feature (1)..(50): NCBI GI NO: 30690062 NR Description: cytochrome P450 family [Arabidopsis thaliana]
MMEEAGRPNVADFFPILRPLDPQRVLARRSIYIKKLFEIIDGIIEECVQELQKLTPWMYWIHFLTTMKKLVLC

SEQ ID NO: 9079 - protein, 72 aa, Glycine max
  peptide (1)..(72): Ceres Seq. ID no. 14304142
  misc_feature (1)..(53): Pfam Name: Pfam Description:  Cytochrome P450
  misc_feature (1)..(45): NCBI GI NO: 4651206 NR Description: cytochrome P450 hydroxylase [Cicer arietinum]
  misc_feature (1)..(53): NCBI GI NO: 7406712 NR Description: putative ripening-related P-450 enzyme
  misc_feature (1)..(45): NCBI GI NO: 6009458 NR Description: cytochrome P450 [Cicer arietinum]
  misc_feature (1)..(49): NCBI GI NO: 17065916 NR Description: geraniol 10-hydroxylase [Catharanthus roseus]
  misc_feature (1)..(37): NCBI GI NO: 37531380 NR Description: putative Cytochrome P450
  misc_feature (1)..(49): NCBI GI NO: 30690065 NR Description: cytochrome P450 family [Arabidopsis thaliana]
  misc_feature (1)..(45): NCBI GI NO: 33320161 NR Description: cytochrome P450 [Pastinaca sativa]
  misc_feature (1)..(49): NCBI GI NO: 15225510 NR Description: cytochrome p450 family [Arabidopsis thaliana]
  misc_feature (1)..(49): NCBI GI NO: 25282599 NR Description: cytochrome P450 monooxygenase
  misc_feature (1)..(49): NCBI GI NO: 30690062 NR Description: cytochrome P450 family [Arabidopsis thaliana]
MEEAGRPNVADFFPILRPLDPQRVLARRSIYIKKLFEIIDGIIEECVQELQKLTPWMYWIHFLTTMKKLVLC

SEQ ID NO: 9080 - protein, 66 aa, Glycine max
  peptide (1)..(66): Ceres Seq. ID no. 14304143
  misc_feature (1)..(28): NCBI GI NO: 7406712 NR Description: putative ripening-related P-450 enzyme
  misc_feature (1)..(28): NCBI GI NO: 17065916 NR Description: geraniol 10-hydroxylase [Catharanthus roseus]
  misc_feature (1)..(26): NCBI GI NO: 37531380 NR Description: putative Cytochrome P450
  misc_feature (1)..(31): NCBI GI NO: 30690065 NR Description: cytochrome P450 family [Arabidopsis thaliana]
  misc_feature (1)..(25): NCBI GI NO: 33320161 NR Description: cytochrome P450 [Pastinaca sativa]
  misc_feature (1)..(28): NCBI GI NO: 15225510 NR Description: cytochrome p450 family [Arabidopsis thaliana]
  misc_feature (1)..(31): NCBI GI NO: 25282599 NR Description: cytochrome P450 monooxygenase
  misc_feature (1)..(31): NCBI GI NO: 30690062 NR Description: cytochrome P450 family [Arabidopsis thaliana]
  misc_feature (1)..(34): NCBI GI NO: 13122290 NR Description: cytochrome P450 (CYP76C2) [Arabidopsis thaliana]
  misc_feature (1)..(30): NCBI GI NO: 37531420 NR Description: putative cytochrome P450
MTLKSGSISTIVISSPQVAKRVLHENILPTNGGTLEEFVPQKYSPHKCSTPLKSFANKSFGIYWIL

SEQ ID NO: 9081 - DNA, 2139 bp, Glycine max
  misc_feature (1)..(2139): Ceres Seq. ID no. 15170362
attcaagtcctaaaataccaaaaacccattcacttttccacaagccttagttcttctcatttattctctttttcaaaatactttcactctctctaaccttccagttctcactaaacctcgtgaagctcgtgatggacaccaagataggttcactagacgcgcccaagcccaacagcaacgacgtcgtatcatgcaacctcaccagcagcgccgccatccagccctgcttgccggcgacggtgatcaacggcgccggctgtagtgactccaccttgggcggccacctggcccgccggctggtggaaatcggcgtcaccgacgtgttctccgttcccggggacttcaacctgacgctgctggaccacctcatcgcggagccggcgctgcacctggtcgggtgctgcaacgagctcaacgccgggtacgccgccgacggctacgcgcgcgccaggggagtcggcgcgtgcgtggtgacgttcaccgtcggcggcctcagcgtgctcaacgccatcgccggagcgtacagcgagaacttgccgctaatttgcatcgtcggtgggcccaactccaacgactacggcaccagtcggatcctccatcacaccatcgggttacccgatttcagccaggagctaaggtgctttcagaccattacttgcttccaggctgtggtgaataacttggaagatgctcatgagttgattgatacagcaatctcaactgcgctgaaagaaagcaaacctgtgtatataagcattagctgtaacttgcctgggattcctcaccccactttcagtcgtgaccctgttcgtttttcattgtctccaagattgagtaataagatggggttggaggccgcagtggaggcagcggcggaattccttaacaaggcagtgaaaccagtgctggtaggtggtcctaaactgagggtggcaacagcatctgatgcctttgtcgaactggctgatgcgtgtggttatgcgcttgctgtgatgccgtcggctaaagggcaggttccagagcaccatccccattttatcggaacttattggggtgctgtgagcactgccttctgtgctgagattgtggagtctgcggatgcatacttgtttgctggtccaatttttaatgactacagctctgtggggtattcacttcttctcaagaaggagaaggcgatcattgtgcagcctgatcgggttgtgatcgcgaatggacctgcttttgggtgtgtgctgatgaaggatttcctcaaggcactcgcaaagcgcctcaagcacaacaatactgcatatgaaaattaccacaggatatttgtccctgatgggcatcctttgaaggctgcacccagagagcctttgagggttaatgttctgttccaacatatacaaaatatgctgtctggtgaaactgctgtaattgctgagacaggggactcctggtttaattgccaaaagctgaaattgccaaaggcatgtgggtatgagttccaaatgcaatatggttcaattggatggtctgttggtgctactctgggttatgctcaagccgttcctgagaagcgagtgattgcctgcattggtgatggaagttttcaggtgactgcccaagatgtatcgacaatgttacggtgcgggcaaaaaaccatcatctttctgatcaacaatggtggatacaccatcgaggttgaaattcatgatgggccgtacaatgtgattaagaactggaattacactgggttgattgatgcaatccacaatggtgaagggaaatgctggactgccaaggtgttctgtgaagaggagctagttgaagcaattgccacagccacaggacccaagaaagactccttatgcttcattgaggtgattgttcataaggatgacaccagtaaagaattgcttgaatggggctcaagggtttctgctgccaatagccgtcctcccaatcctcagtaatcttcagaatttatcctatgactaaattgctgcagttgccctttagctctatgaaagtgagaatcatttgagatgatgcccttgtagggaatttacctttgttaatggcttgaaacatttatgctaaactgactccccacttgtttgtgtaaattctttcacttttgttcacctttgtttg

SEQ ID NO: 9082 - protein, 608 aa, Glycine max
  peptide (1)..(608): Ceres Seq. ID no. 15170363
  misc_feature (243)..(392): Pfam Name: Pfam Description:  Thiamine pyrophosphate enzyme, central domain
  misc_feature (1)..(608): NCBI GI NO: 29373077 NR Description: pyruvate decarboxylase 1 [Lotus corniculatus]
  misc_feature (1)..(608): NCBI GI NO: 10121330 NR Description: pyruvate decarboxylase [Fragaria x ananassa]
  misc_feature (1)..(608): NCBI GI NO: 17225598 NR Description: pyruvate decarboxylase [Fragaria x ananassa]
  misc_feature (12)..(608): NCBI GI NO: 24745919 NR Description: pyruvate decarboxylase [Solanum tuberosum]
  misc_feature (1)..(608): NCBI GI NO: 15240423 NR Description: pyruvate decarboxylase (gb|AAB16855.1)
  misc_feature (1)..(608): NCBI GI NO: 15234062 NR Description: pyruvate decarboxylase-1 (Pdc1)
  misc_feature (1)..(608): NCBI GI NO: 1616787 NR Description: pyruvate decarboxylase [Arabidopsis thaliana]
  misc_feature (44)..(608): NCBI GI NO: 10732644 NR Description: pyruvate decarboxylase 1 [Vitis vinifera]
  misc_feature (1)..(608): NCBI GI NO: 15240950 NR Description: pyruvate decarboxylase-related protein
  misc_feature (26)..(451): NCBI GI NO: 1706330 NR Description: Pyruvate decarboxylase isozyme 2 (PDC)
MDTKIGSLDAPKPNSNDVVSCNLTSSAAIQPCLPATVINGAGCSDSTLGGHLARRLVEIGVTDVFSVPGDFNLTLLDHLIAEPALHLVGCCNELNAGYAADGYARARGVGACVVTFTVGGLSVLNAIAGAYSENLPLICIVGGPNSNDYGTSRILHHTIGLPDFSQELRCFQTITCFQAVVNNLEDAHELIDTAISTALKESKPVYISISCNLPGIPHPTFSRDPVRFSLSPRLSNKMGLEAAVEAAAEFLNKAVKPVLVGGPKLRVATASDAFVELADACGYALAVMPSAKGQVPEHHPHFIGTYWGAVSTAFCAEIVESADAYLFAGPIFNDYSSVGYSLLLKKEKAIIVQPDRVVIANGPAFGCVLMKDFLKALAKRLKHNNTAYENYHRIFVPDGHPLKAAPREPLRVNVLFQHIQNMLSGETAVIAETGDSWFNCQKLKLPKACGYEFQMQYGSIGWSVGATLGYAQAVPEKRVIACIGDGSFQVTAQDVSTMLRCGQKTIIFLINNGGYTIEVEIHDGPYNVIKNWNYTGLIDAIHNGEGKCWTAKVFCEEELVEAIATATGPKKDSLCFIEVIVHKDDTSKELLEWGSRVSAANSRPPNPQ

SEQ ID NO: 9083 - protein, 371 aa, Glycine max
  peptide (1)..(371): Ceres Seq. ID no. 15170364
  misc_feature (6)..(155): Pfam Name: Pfam Description:  Thiamine pyrophosphate enzyme, central domain
  misc_feature (1)..(371): NCBI GI NO: 29373077 NR Description: pyruvate decarboxylase 1 [Lotus corniculatus]
  misc_feature (1)..(371): NCBI GI NO: 10121330 NR Description: pyruvate decarboxylase [Fragaria x ananassa]
  misc_feature (1)..(371): NCBI GI NO: 17225598 NR Description: pyruvate decarboxylase [Fragaria x ananassa]
  misc_feature (1)..(371): NCBI GI NO: 24745919 NR Description: pyruvate decarboxylase [Solanum tuberosum]
  misc_feature (1)..(371): NCBI GI NO: 15240423 NR Description: pyruvate decarboxylase (gb|AAB16855.1)
  misc_feature (1)..(371): NCBI GI NO: 15234062 NR Description: pyruvate decarboxylase-1 (Pdc1)
  misc_feature (1)..(371): NCBI GI NO: 1616787 NR Description: pyruvate decarboxylase [Arabidopsis thaliana]
  misc_feature (1)..(371): NCBI GI NO: 10732644 NR Description: pyruvate decarboxylase 1 [Vitis vinifera]
  misc_feature (1)..(371): NCBI GI NO: 15240950 NR Description: pyruvate decarboxylase-related protein
  misc_feature (1)..(214): NCBI GI NO: 1706330 NR Description: Pyruvate decarboxylase isozyme 2 (PDC)
MGLEAAVEAAAEFLNKAVKPVLVGGPKLRVATASDAFVELADACGYALAVMPSAKGQVPEHHPHFIGTYWGAVSTAFCAEIVESADAYLFAGPIFNDYSSVGYSLLLKKEKAIIVQPDRVVIANGPAFGCVLMKDFLKALAKRLKHNNTAYENYHRIFVPDGHPLKAAPREPLRVNVLFQHIQNMLSGETAVIAETGDSWFNCQKLKLPKACGYEFQMQYGSIGWSVGATLGYAQAVPEKRVIACIGDGSFQVTAQDVSTMLRCGQKTIIFLINNGGYTIEVEIHDGPYNVIKNWNYTGLIDAIHNGEGKCWTAKVFCEEELVEAIATATGPKKDSLCFIEVIVHKDDTSKELLEWGSRVSAANSRPPNPQ

SEQ ID NO: 9084 - protein, 321 aa, Glycine max
  peptide (1)..(321): Ceres Seq. ID no. 15170365
  misc_feature (1)..(105): Pfam Name: Pfam Description:  Thiamine pyrophosphate enzyme, central domain
  misc_feature (1)..(321): NCBI GI NO: 29373077 NR Description: pyruvate decarboxylase 1 [Lotus corniculatus]
  misc_feature (1)..(321): NCBI GI NO: 10121330 NR Description: pyruvate decarboxylase [Fragaria x ananassa]
  misc_feature (1)..(321): NCBI GI NO: 17225598 NR Description: pyruvate decarboxylase [Fragaria x ananassa]
  misc_feature (1)..(321): NCBI GI NO: 24745919 NR Description: pyruvate decarboxylase [Solanum tuberosum]
  misc_feature (1)..(321): NCBI GI NO: 15240423 NR Description: pyruvate decarboxylase (gb|AAB16855.1)
  misc_feature (1)..(321): NCBI GI NO: 15234062 NR Description: pyruvate decarboxylase-1 (Pdc1)
  misc_feature (1)..(321): NCBI GI NO: 1616787 NR Description: pyruvate decarboxylase [Arabidopsis thaliana]
  misc_feature (1)..(321): NCBI GI NO: 10732644 NR Description: pyruvate decarboxylase 1 [Vitis vinifera]
  misc_feature (1)..(321): NCBI GI NO: 15240950 NR Description: pyruvate decarboxylase-related protein
  misc_feature (1)..(164): NCBI GI NO: 1706330 NR Description: Pyruvate decarboxylase isozyme 2 (PDC)
MPSAKGQVPEHHPHFIGTYWGAVSTAFCAEIVESADAYLFAGPIFNDYSSVGYSLLLKKEKAIIVQPDRVVIANGPAFGCVLMKDFLKALAKRLKHNNTAYENYHRIFVPDGHPLKAAPREPLRVNVLFQHIQNMLSGETAVIAETGDSWFNCQKLKLPKACGYEFQMQYGSIGWSVGATLGYAQAVPEKRVIACIGDGSFQVTAQDVSTMLRCGQKTIIFLINNGGYTIEVEIHDGPYNVIKNWNYTGLIDAIHNGEGKCWTAKVFCEEELVEAIATATGPKKDSLCFIEVIVHKDDTSKELLEWGSRVSAANSRPPNPQ

SEQ ID NO: 9085 - DNA, 1253 bp, Glycine max
  misc_feature (1)..(1253): Ceres Seq. ID no. 14316365
tccacaacctcgtatttctattctctcctctttctctctctatggcttccttgctttaatcgcaattttactcttttttttaatcggccgatcattcgattggatctgatttcatattaaaatcttatctttttgctaattgtcgctttcccaattcgtaattatctgaagtttggatttgggtgctttctttgcccctttatcgttgattgaatggttttgatccgggactgtgatttacgctctatcggggcagttgctggtcttgctgttgcaattgttttcacatggaggctcttgagatctccttctgggtctcaacggaggcaacagaaacggcaaggtccttcatctagtaatcctggagtcggtacaaattcaaattcaaatgcgtcggtggttccttcggatgcttgttcaccctcagatgattcaagggcgcaaaatgttgttgatgagttctttcagccagtcaagccaaccttggggcagatagttaggcagaagttgagtgaaggaagaaaggtaacttgtcgccttcttggagtgatccttgaggaaagtagtccagaggagctgcagaaacaagctactgtgaggtcctctgtgctagaagtactattggaagtaacaaaattttgtgatttatatctcatggaacgagttctggatgatgaaagcgagaaaagagttcttgtagcattggaagaagcaggggtattcacttcaggtggtctggtcaaggacaaggttctgttctgcagcacagagaatgggcggtcatcgtttgttcggcaattggaacctgattggcatattgattcaaatcctgaaattgtcactcagttggctaggtttatcaagtatcaacttcatgtatctccttacaaaactgaaagaactgctgcaaatgtgttcagtgctccatctctggaacagttctttggatccatatgaaactaaaaccactacaaatcagatgttattcataaatatctcctagtttatttctatgtgcatcttggtttccacattcaccatatgttttttttccagcttttctagatgtatgagaacaaggttagattttttttgaagttttaaggttctcactctaggtaggtgaaagaccttatgtgtatgatgctttgaagaagttttactattttcttttttcttctttgttttgaaatttgtgcattacattgtatcccatccagacattttaaactggcaaggtgacaatttttatt

SEQ ID NO: 9086 - protein, 247 aa, Glycine max
  peptide (1)..(247): Ceres Seq. ID no. 14316366
  misc_feature (4)..(247): NCBI GI NO: 17381010 NR Description: unknown protein [Arabidopsis thaliana]
  misc_feature (97)..(247): NCBI GI NO: 21618311 NR Description: unknown [Arabidopsis thaliana]
  misc_feature (73)..(244): NCBI GI NO: 38345629 NR Description: OSJNBb0004A17.10
  misc_feature (103)..(221): NCBI GI NO: 39546241 NR Description: OSJNBa0089N06.11
  misc_feature (148)..(247): NCBI GI NO: 18403177 NR Description: expressed protein [Arabidopsis thaliana]
  misc_feature (109)..(243): NCBI GI NO: 23481990 NR Description: hypothetical protein [Plasmodium yoelii yoelii]
  misc_feature (90)..(243): NCBI GI NO: 23508674 NR Description: hypothetical protein [Plasmodium falciparum 3D7]
MVLIRDCDLRSIGAVAGLAVAIVFTWRLLRSPSGSQRRQQKRQGPSSSNPGVGTNSNSNASVVPSDACSPSDDSRAQNVVDEFFQPVKPTLGQIVRQKLSEGRKVTCRLLGVILEESSPEELQKQATVRSSVLEVLLEVTKFCDLYLMERVLDDESEKRVLVALEEAGVFTSGGLVKDKVLFCSTENGRSSFVRQLEPDWHIDSNPEIVTQLARFIKYQLHVSPYKTERTAANVFSAPSLEQFFGSI

SEQ ID NO: 9087 - DNA, 759 bp, Glycine max
  misc_feature (1)..(759): Ceres Seq. ID no. 15168440
aaaaagagaagattggattggggattaggaaaaaatggcgtgcaggggtatgcttcgttccaccattctcatagaacccagcctactccgttctttaaatttcaattctaacaaacatcacatagcttcactcaaccaatggtcttgccggtttcattctccaaaacccccttattcttcctctcagaacgaaacgccgttgtctcaggaccctgtcttgaaggccatttcagagatttccaaaggcgaagggagggttggccaaacaacaaacgtaattattggaagcactgctgccgatgattctaacaatgaatggttggctttggaccagaaggtgaactcgtacccaaccgatcgaggatttaccgccattggaactggaggtgaggattttgtgcaagccatggttgttgctgtcgaatctgtaatccaacaaccaattcctcagggatatgtgaagcaaaagttatcgtcggggggcaaatatgtatctgtaaatattgggcccattcaagttgtttctagtgaacaggtccaagctgtatataatgccatgaggacagacaaccgggtgaaatattttttataatctgtcacattgttttgtagagaacaccacgattgcaaggtatgtaccaacatggtttttttactacctaagcattaattaacccatgatatcattctaatcagagtaatcatggtgcaatttggatttcttttgtaatccctgaagatgtaacatcatgatttgtt

SEQ ID NO: 9088 - protein, 185 aa, Glycine max
  peptide (1)..(185): Ceres Seq. ID no. 15168441
  misc_feature (94)..(185): Pfam Name: DUF493 Pfam Description: Protein of unknown function
  misc_feature (49)..(185): NCBI GI NO: 18396311 NR Description: expressed protein [Arabidopsis thaliana]
  misc_feature (58)..(143): NCBI GI NO: 38347226 NR Description: OSJNBa0044M19.8
MACRGMLRSTILIEPSLLRSLNFNSNKHHIASLNQWSCRFHSPKPPYSSSQNETPLSQDPVLKAISEISKGEGRVGQTTNVIIGSTAADDSNNEWLALDQKVNSYPTDRGFTAIGTGGEDFVQAMVVAVESVIQQPIPQGYVKQKLSSGGKYVSVNIGPIQVVSSEQVQAVYNAMRTDNRVKYFL

SEQ ID NO: 9089 - protein, 180 aa, Glycine max
  peptide (1)..(180): Ceres Seq. ID no. 15168442
  misc_feature (89)..(180): Pfam Name: DUF493 Pfam Description: Protein of unknown function
  misc_feature (44)..(180): NCBI GI NO: 18396311 NR Description: expressed protein [Arabidopsis thaliana]
  misc_feature (53)..(138): NCBI GI NO: 38347226 NR Description: OSJNBa0044M19.8
MLRSTILIEPSLLRSLNFNSNKHHIASLNQWSCRFHSPKPPYSSSQNETPLSQDPVLKAISEISKGEGRVGQTTNVIIGSTAADDSNNEWLALDQKVNSYPTDRGFTAIGTGGEDFVQAMVVAVESVIQQPIPQGYVKQKLSSGGKYVSVNIGPIQVVSSEQVQAVYNAMRTDNRVKYFL

SEQ ID NO: 9090 - DNA, 428 bp, Glycine max
  misc_feature (1)..(428): Ceres Seq. ID no. 15225482
aaggaatgaagcagtaagcttttgtgaagggtggaaatggagtctcaaaaatctcaaaatcatgctaaaaaggcaaacaagtacattattatggaagttaccaagcgcaacatagcaccatgtagcaaaaactgcctaccgccagcatcaaatccttacaacagaggatgctccaggatatgcaaatgcagaaaatgaagtcttcagttcgttcaatgggaagaataaggaaatcatatacctatttttcatcttttatatttatgcagtcgtctatgatgaattgatgagtgttttcctggccatgtgtgttgttttggcttctgctttgtaaacacaagataataatacaggcacaataataaactgtataatgacatgaagatcaatatctttctttgaagctaagaaaaattgttatagcatgc

SEQ ID NO: 9091 - protein, 53 aa, Glycine max
  peptide (1)..(53): Ceres Seq. ID no. 15225483
  misc_feature (1)..(52): Pfam Name: RALF Pfam Description: Rapid ALkalinization Factor
MESQKSQNHAKKANKYIIMEVTKRNIAPCSKNCLPPASNPYNRGCSRICKCRK

SEQ ID NO: 9092 - protein, 39 aa, Glycine max
  peptide (1)..(39): Ceres Seq. ID no. 15225484
MLQDMQMQKMKSSVRSMGRIRKSYTYFSSFIFMQSSMMN

SEQ ID NO: 9093 - protein, 37 aa, Glycine max
  peptide (1)..(37): Ceres Seq. ID no. 15225485
RNEAVSFCEGWKWSLKNLKIMLKRQTSTLLWKLPSAT

SEQ ID NO: 9094 - DNA, 566 bp, Glycine max
  misc_feature (1)..(566): Ceres Seq. ID no. 13594336
aatttgtctcttttattcgacctcaactcagtctccttcactccatatccatatcttcctctctcacactctctaagtgatggctttcaattccaaaagggcaccgatctcaagttcaaaagccatagctgatgcagcctcatggtgctgtgcatgttttcttgtgtccctcttattgctatgcatattcagagacatctctgcccttcatgatgatcaagggaacttgatgatgagaagcagccatgtcttgtccaagccatcatgtgatgaaatatatgtggttggagaaggtgagacacttcatacaatcagtgacaagtgtggtgatccctttattgtggaaaagaaccctcatatccatgaccctgatgatgtcttcccaggacttgttctcaagattacacgctcacaaacaacatagcttgaataattgaaagttaattcctatacatgtatgtatctttcttcaatatagaacaaggaaaaaaaacttccttatgggcatcctctaaagtttttagttttggtttgcttgttgtatgtactacactttgcctagcaag

SEQ ID NO: 9095 - protein, 114 aa, Glycine max
  peptide (1)..(114): Ceres Seq. ID no. 13594337
  misc_feature (67)..(108): Pfam Name: Pfam Description:  LysM domain
  misc_feature (15)..(112): NCBI GI NO: 27452901 NR Description: Putative dihydrodipicolinate reductase-like protein
  misc_feature (6)..(108): NCBI GI NO: 38605944 NR Description: OSJNBa0019K04.5
  misc_feature (17)..(108): NCBI GI NO: 15241722 NR Description: expressed protein [Arabidopsis thaliana]
  misc_feature (14)..(109): NCBI GI NO: 37536226 NR Description: unknown protein
  misc_feature (11)..(111): NCBI GI NO: 15231684 NR Description: expressed protein [Arabidopsis thaliana]
  misc_feature (7)..(108): NCBI GI NO: 22328924 NR Description: hypothetical protein [Arabidopsis thaliana]
MAFNSKRAPISSSKAIADAASWCCACFLVSLLLLCIFRDISALHDDQGNLMMRSSHVLSKPSCDEIYVVGEGETLHTISDKCGDPFIVEKNPHIHDPDDVFPGLVLKITRSQTT

SEQ ID NO: 9096 - protein, 64 aa, Glycine max
  peptide (1)..(64): Ceres Seq. ID no. 13594338
  misc_feature (17)..(58): Pfam Name: Pfam Description:  LysM domain
  misc_feature (1)..(62): NCBI GI NO: 27452901 NR Description: Putative dihydrodipicolinate reductase-like protein
  misc_feature (1)..(58): NCBI GI NO: 38605944 NR Description: OSJNBa0019K04.5
  misc_feature (1)..(58): NCBI GI NO: 15241722 NR Description: expressed protein [Arabidopsis thaliana]
  misc_feature (1)..(59): NCBI GI NO: 37536226 NR Description: unknown protein
  misc_feature (1)..(61): NCBI GI NO: 15231684 NR Description: expressed protein [Arabidopsis thaliana]
  misc_feature (1)..(58): NCBI GI NO: 22328924 NR Description: hypothetical protein [Arabidopsis thaliana]
MMRSSHVLSKPSCDEIYVVGEGETLHTISDKCGDPFIVEKNPHIHDPDDVFPGLVLKITRSQTT

SEQ ID NO: 9097 - protein, 63 aa, Glycine max
  peptide (1)..(63): Ceres Seq. ID no. 13594339
  misc_feature (16)..(57): Pfam Name: Pfam Description:  LysM domain
  misc_feature (1)..(61): NCBI GI NO: 27452901 NR Description: Putative dihydrodipicolinate reductase-like protein
  misc_feature (1)..(57): NCBI GI NO: 38605944 NR Description: OSJNBa0019K04.5
  misc_feature (1)..(57): NCBI GI NO: 15241722 NR Description: expressed protein [Arabidopsis thaliana]
  misc_feature (1)..(58): NCBI GI NO: 37536226 NR Description: unknown protein
  misc_feature (1)..(60): NCBI GI NO: 15231684 NR Description: expressed protein [Arabidopsis thaliana]
  misc_feature (1)..(57): NCBI GI NO: 22328924 NR Description: hypothetical protein [Arabidopsis thaliana]
MRSSHVLSKPSCDEIYVVGEGETLHTISDKCGDPFIVEKNPHIHDPDDVFPGLVLKITRSQTT

SEQ ID NO: 9098 - DNA, 981 bp, Glycine max
  misc_feature (1)..(981): Ceres Seq. ID no. 15173454
agacgccattctgcaccgagattcattcttcaccaaaacttcgcaaagaaacactacacatccatggcaactgctggcgtgcaagaagttcgtgttccccctctaacttccacctctgagccaccttctctctttgacggaaccaccaggttgtacatcagttatatttgtccctatgcgcagcgtgtttggatcactcggaactataagggactacaagacaagatcaaactggttcctattgacctacaaaacaggcctgcttggtataaggagaaagtctaccctgaaaacaaggtgccatcattggagcacaatggaaaggtcttgggtgaaagtctcgatttggtcaaatacatagatgacaactttgaagggccgtctctagttcccagtgatcctgccaagaaagagtttggtgaggagttgatttcccatgttgatacattcaccaaagagctgtattctgcattgaaaggagatccaatacatcaagccggtcctgcctttgattacttagagaatgctcttggtaaatttggtgatgggccattctttcttggtcaattcagctgggtggatattgcttatgttccatttgttgaaagattccagctcgtctttgctgatgtgttcaagcatgatataactgaaggaagacctaaacttgcaacatggattgaggaagtgaacaagattagtgcttatacacagacaagagctgatccaaaggaaatcgttgatcttttcaagaaacgttttttggctcaacagtgaaaatttggttgcagtgggtatcctctaagttgtagattgttgtcaataaagtgttgtgtgtttatcggatgcttctttagtcacatgttgttttgtcactttgtctgctagagctgcaaataatttgatttcagggtcggtgatgtttatgtaccagcttgtctgatgtcagactaataaaatgatgcttgtgtatcggctttt

SEQ ID NO: 9099 - protein, 258 aa, Glycine max
  peptide (1)..(258): Ceres Seq. ID no. 15173455
  misc_feature (49)..(122): Pfam Name: Pfam Description:  Glutathione S-transferase, N-terminal domain
  misc_feature (22)..(258): NCBI GI NO: 11385579 NR Description: In2-1 protein [Glycine max]
  misc_feature (30)..(258): NCBI GI NO: 37051105 NR Description: glutathione S-transferase [Pisum sativum]
  misc_feature (29)..(255): NCBI GI NO: 15241956 NR Description: In2-1 protein, putative [Arabidopsis thaliana]
  misc_feature (29)..(255): NCBI GI NO: 21537338 NR Description: In2-1 protein [Arabidopsis thaliana]
  misc_feature (29)..(255): NCBI GI NO: 11357919 NR Description: hypothetical protein F9G14
  misc_feature (29)..(255): NCBI GI NO: 30679765 NR Description: In2-1 protein, putative [Arabidopsis thaliana]
  misc_feature (12)..(257): NCBI GI NO: 15233164 NR Description: In2-1 protein, putative [Arabidopsis thaliana]
  misc_feature (28)..(253): NCBI GI NO: 24796806 NR Description: putative glutathione S-transferase
  misc_feature (35)..(257): NCBI GI NO: 24796810 NR Description: putative glutathione S-transferase
  misc_feature (35)..(251): NCBI GI NO: 7939638 NR Description: XIG [Oryza sativa]
RRHSAPRFILHQNFAKKHYTSMATAGVQEVRVPPLTSTSEPPSLFDGTTRLYISYICPYAQRVWITRNYKGLQDKIKLVPIDLQNRPAWYKEKVYPENKVPSLEHNGKVLGESLDLVKYIDDNFEGPSLVPSDPAKKEFGEELISHVDTFTKELYSALKGDPIHQAGPAFDYLENALGKFGDGPFFLGQFSWVDIAYVPFVERFQLVFADVFKHDITEGRPKLATWIEEVNKISAYTQTRADPKEIVDLFKKRFLAQQ

SEQ ID NO: 9100 - protein, 237 aa, Glycine max
  peptide (1)..(237): Ceres Seq. ID no. 15173456
  misc_feature (28)..(101): Pfam Name: Pfam Description:  Glutathione S-transferase, N-terminal domain
  misc_feature (1)..(237): NCBI GI NO: 11385579 NR Description: In2-1 protein [Glycine max]
  misc_feature (9)..(237): NCBI GI NO: 37051105 NR Description: glutathione S-transferase [Pisum sativum]
  misc_feature (8)..(234): NCBI GI NO: 15241956 NR Description: In2-1 protein, putative [Arabidopsis thaliana]
  misc_feature (8)..(234): NCBI GI NO: 21537338 NR Description: In2-1 protein [Arabidopsis thaliana]
  misc_feature (8)..(234): NCBI GI NO: 11357919 NR Description: hypothetical protein F9G14
  misc_feature (8)..(234): NCBI GI NO: 30679765 NR Description: In2-1 protein, putative [Arabidopsis thaliana]
  misc_feature (1)..(236): NCBI GI NO: 15233164 NR Description: In2-1 protein, putative [Arabidopsis thaliana]
  misc_feature (7)..(232): NCBI GI NO: 24796806 NR Description: putative glutathione S-transferase
  misc_feature (14)..(236): NCBI GI NO: 24796810 NR Description: putative glutathione S-transferase
  misc_feature (14)..(230): NCBI GI NO: 7939638 NR Description: XIG [Oryza sativa]
MATAGVQEVRVPPLTSTSEPPSLFDGTTRLYISYICPYAQRVWITRNYKGLQDKIKLVPIDLQNRPAWYKEKVYPENKVPSLEHNGKVLGESLDLVKYIDDNFEGPSLVPSDPAKKEFGEELISHVDTFTKELYSALKGDPIHQAGPAFDYLENALGKFGDGPFFLGQFSWVDIAYVPFVERFQLVFADVFKHDITEGRPKLATWIEEVNKISAYTQTRADPKEIVDLFKKRFLAQQ

SEQ ID NO: 9101 - DNA, 859 bp, Glycine max
  misc_feature (1)..(859): Ceres Seq. ID no. 15170341
acagcatcaaaacaaacaaacaacacagtttttcttgtctctatattcttccggccaccgcagatggcggcggagcacgacagctgctgctcgcgctgtgtcaccttcctaataaccataggcctcacagcgctcttcctatggctgagtctccgcgttgacgaaccaaaatgctacctcgactacatttacgttcctgccctcaacaaaaccctaaattccaattccactcacaacaaaaacaccacaatactcttcgctctcaagctcaccaacgggaacaaggacaaaggcatccaatacgacgacgttctcctctccttcagagtcttcgagagcgtcaacctcacgcgcccactcggcaacgccaccgtgcaaaggttctaccagggccaccagaagaaggccaccaagcacggaaacttcagcggcggcggcggaaacctcaccgcggcggtggctgggagaatgtggtaccgtgtggactatgctactgcggtgaagtacaagattctcttctggtacacgaaacggcaccgtttatggggaggggcaaatgtggaaattggcgattcgggaatgaaggtgtatcgtaaagccgttaggcttggagggaagaaccccgtggtgatcgagtccggcgcatctaagctcagtggacgctatcgtgcgcttcttctttcccttcttctccctttttgtggcttgtgggtttagttgacttgactttttcacttcacccacttttgtgtgtattgttattattttatttttgtaatttgtattgtgacttttctttttgtctagttccaattcaaagattagagatgattatattcgattacacgagtttgaatcc

SEQ ID NO: 9102 - protein, 238 aa, Glycine max
  peptide (1)..(238): Ceres Seq. ID no. 15170342
  misc_feature (26)..(199): NCBI GI NO: 38489222 NR Description: NDR1-like protein [Nicotiana benthamiana]
  misc_feature (28)..(203): NCBI GI NO: 15232308 NR Description: non-race specific disease resistance protein
  misc_feature (29)..(207): NCBI GI NO: 22331213 NR Description: non-race specific disease resistance protein -related
  misc_feature (34)..(193): NCBI GI NO: 22331216 NR Description: ndr1-related protein [Arabidopsis thaliana]
  misc_feature (28)..(108): NCBI GI NO: 24417466 NR Description: unknown [Arabidopsis thaliana]
TASKQTNNTVFLVSIFFRPPQMAAEHDSCCSRCVTFLITIGLTALFLWLSLRVDEPKCYLDYIYVPALNKTLNSNSTHNKNTTILFALKLTNGNKDKGIQYDDVLLSFRVFESVNLTRPLGNATVQRFYQGHQKKATKHGNFSGGGGNLTAAVAGRMWYRVDYATAVKYKILFWYTKRHRLWGGANVEIGDSGMKVYRKAVRLGGKNPVVIESGASKLSGRYRALLLSLLLPFCGLWV

SEQ ID NO: 9103 - protein, 217 aa, Glycine max
  peptide (1)..(217): Ceres Seq. ID no. 15170343
  misc_feature (5)..(178): NCBI GI NO: 38489222 NR Description: NDR1-like protein [Nicotiana benthamiana]
  misc_feature (7)..(182): NCBI GI NO: 15232308 NR Description: non-race specific disease resistance protein
  misc_feature (8)..(186): NCBI GI NO: 22331213 NR Description: non-race specific disease resistance protein -related
  misc_feature (13)..(172): NCBI GI NO: 22331216 NR Description: ndr1-related protein [Arabidopsis thaliana]
  misc_feature (7)..(87): NCBI GI NO: 24417466 NR Description: unknown [Arabidopsis thaliana]
MAAEHDSCCSRCVTFLITIGLTALFLWLSLRVDEPKCYLDYIYVPALNKTLNSNSTHNKNTTILFALKLTNGNKDKGIQYDDVLLSFRVFESVNLTRPLGNATVQRFYQGHQKKATKHGNFSGGGGNLTAAVAGRMWYRVDYATAVKYKILFWYTKRHRLWGGANVEIGDSGMKVYRKAVRLGGKNPVVIESGASKLSGRYRALLLSLLLPFCGLWV

SEQ ID NO: 9104 - protein, 141 aa, Glycine max
  peptide (1)..(141): Ceres Seq. ID no. 15170344
MLPRLHLRSCPQQNPKFQFHSQQKHHNTLRSQAHQREQGQRHPIRRRSPLLQSLRERQPHAPTRQRHRAKVLPGPPEEGHQARKLQRRRRKPHRGGGWENVVPCGLCYCGEVQDSLLVHETAPFMGRGKCGNWRFGNEGVS

SEQ ID NO: 9105 - DNA, 585 bp, Glycine max
  misc_feature (1)..(585): Ceres Seq. ID no. 15175285
aaaaagggcaatggcctcttggaagaagaccatcacaactccattcaaaaaggcttgcactttctttaaccagcaaccaacatctgcaagggatcaaaagaagtctcaaacagagcaagagaggcaagtaatggatctgcacggggaagtgatggcatgtgggtatgaagatgttcaagtgatgtggtctattctggataagtcgaaatccacaaactgcaatataacctcttcaacctgacccaataaaaaaacaagaaagtggcacttcagcaattagcggatgtttttgtatgctaatgtttaaggtcataattgcatcatactaacatatctatttggtatgaatgtaattctcattctcatagtagaaaatgaaaaatgatgtgtagtgtgtaggtgtttgatatggtaggatttaacgaggtgaagagaagagaagacggtgacggtgtgttgtaattgtaagtcaaaatgtgtagggaatccccatgattgatgagagaaaatcatggcgagattatgatatgaagaaatattagatttgattctctcaatagtcaatgttaaaatctcgagacttgc

SEQ ID NO: 9106 - protein, 79 aa, Glycine max
  peptide (1)..(79): Ceres Seq. ID no. 15175286
  misc_feature (4)..(77): NCBI GI NO: 15221150 NR Description: expressed protein [Arabidopsis thaliana]
  misc_feature (4)..(77): NCBI GI NO: 15229072 NR Description: hypothetical protein [Arabidopsis thaliana]
  misc_feature (6)..(72): NCBI GI NO: 34894274 NR Description: unnamed protein product
KRAMASWKKTITTPFKKACTFFNQQPTSARDQKKSQTEQERQVMDLHGEVMACGYEDVQVMWSILDKSKSTNCNITSST

SEQ ID NO: 9107 - protein, 76 aa, Glycine max
  peptide (1)..(76): Ceres Seq. ID no. 15175287
  misc_feature (1)..(74): NCBI GI NO: 15221150 NR Description: expressed protein [Arabidopsis thaliana]
  misc_feature (1)..(74): NCBI GI NO: 15229072 NR Description: hypothetical protein [Arabidopsis thaliana]
  misc_feature (3)..(69): NCBI GI NO: 34894274 NR Description: unnamed protein product
MASWKKTITTPFKKACTFFNQQPTSARDQKKSQTEQERQVMDLHGEVMACGYEDVQVMWSILDKSKSTNCNITSST

SEQ ID NO: 9108 - protein, 42 aa, Glycine max
  peptide (1)..(42): Ceres Seq. ID no. 15175288
KGQWPLGRRPSQLHSKRLALSLTSNQHLQGIKRSLKQSKRGK

SEQ ID NO: 9109 - DNA, 1326 bp, Glycine max
  misc_feature (1)..(1326): Ceres Seq. ID no. 15168509
aacaccaccaaaaccagcaccacccccctctctatctcttttctcccttgttgccgttgaacttccttaacctaaaaatgtccaattctatctccgacccgacccgaataattcactctcaggatccgaataccaccgcggaccctcaggttccgcttcggaacctttcccaggttcggaacagaatggattctctacaacacttcctatctcaatccatcaataccaacactcccctcaccgtcgatcaaatcgccatggtctccagccagatcctctcctccatccaccaagtcatcgtcaacggcgccgccctcgtctcttactctcagaattccatcgccgccggagcaccggatccaccgccgtatccgaagaagccgaagccggaaccttcagttgccgataaagcgaagcaaacactcgattccaaactcgagcctctcgaaggcgacgacagcgaaatcgtggagctcgacgccgtcgaaatcctcgcggagcacatgcacttttgcgagatctgcgggaaaggcttccggcgcgacgcgaacctccgcatgcacatgcgcgcgcacggagaacagttcaagacggcggaggcgctggcgaagccttcggagaaagcctcgtggctgcgtgcgacgcggttctcgtgtccgttcgtaggctgcaaccggaacaagctccaccggcggttccggccgctgaaatcggtgatttgcgtgaagaaccacttcaagcgaagccactgcccgaagatgtacacgtgcgagcggtgtcgcaagaagcacttctcggtgctctcggatttgaggagccacttgaagcattgcggaggagaggccaggtggaagtgcacgtgcgggaccacgttctcaaggaaagacaagttgtttggccacattgcgctgtttgagggccacgcgcctgcgctcgcgtgtgacgaagagggtaaagggaaacaaatggtggaggacgacgaagatccaatgttgatgagtgaaagtggatttgaattggatgattgttttttggatcaagagtttcccgaaggcttctttgatgattttgggtccattgatgactactgttaaggtaagtgttttagggtttcctagtaatagactttgattatgtatgtgtatttagggaatattcatattcaattgctagatttgtatttatgtccctatgttattgaaggattaaaattaaacagtgtttataacacaggatggaaataaacgattaattttatttttgtgtctgaaataatattgaaaaaaaattcaaataaattaacacataaagatatttatttggtgt

SEQ ID NO: 9110 - protein, 363 aa, Glycine max
  peptide (1)..(363): Ceres Seq. ID no. 15168510
  misc_feature (169)..(191): Pfam Name: Pfam Description:  Zinc finger, C2H2 type
  misc_feature (128)..(362): NCBI GI NO: 34908682 NR Description: putative zinc finger protein
  misc_feature (101)..(315): NCBI GI NO: 15218606 NR Description: zinc finger protein -related
  misc_feature (101)..(315): NCBI GI NO: 21593564 NR Description: zinc finger protein, putative
  misc_feature (90)..(311): NCBI GI NO: 28376689 NR Description: putative zinc finger protein
  misc_feature (72)..(310): NCBI GI NO: 30688719 NR Description: expressed protein [Arabidopsis thaliana]
  misc_feature (146)..(310): NCBI GI NO: 10177236 NR Description: contains similarity to C2H2-type zinc fingerprotein~gene_id:MRN17
  misc_feature (149)..(315): NCBI GI NO: 10241636 NR Description: putative zinc finger protein
  misc_feature (149)..(315): NCBI GI NO: 38346456 NR Description: OSJNBa0019G23.4
  misc_feature (162)..(341): NCBI GI NO: 15222242 NR Description: zinc finger protein -related
  misc_feature (104)..(308): NCBI GI NO: 34907180 NR Description: putative zinc finger protein
HHQNQHHPPLYLFSPLLPLNFLNLKMSNSISDPTRIIHSQDPNTTADPQVPLRNLSQVRNRMDSLQHFLSQSINTNTPLTVDQIAMVSSQILSSIHQVIVNGAALVSYSQNSIAAGAPDPPPYPKKPKPEPSVADKAKQTLDSKLEPLEGDDSEIVELDAVEILAEHMHFCEICGKGFRRDANLRMHMRAHGEQFKTAEALAKPSEKASWLRATRFSCPFVGCNRNKLHRRFRPLKSVICVKNHFKRSHCPKMYTCERCRKKHFSVLSDLRSHLKHCGGEARWKCTCGTTFSRKDKLFGHIALFEGHAPALACDEEGKGKQMVEDDEDPMLMSESGFELDDCFLDQEFPEGFFDDFGSIDDYC

SEQ ID NO: 9111 - protein, 338 aa, Glycine max
  peptide (1)..(338): Ceres Seq. ID no. 15168511
  misc_feature (144)..(166): Pfam Name: Pfam Description:  Zinc finger, C2H2 type
  misc_feature (103)..(337): NCBI GI NO: 34908682 NR Description: putative zinc finger protein
  misc_feature (76)..(290): NCBI GI NO: 15218606 NR Description: zinc finger protein -related
  misc_feature (76)..(290): NCBI GI NO: 21593564 NR Description: zinc finger protein, putative
  misc_feature (65)..(286): NCBI GI NO: 28376689 NR Description: putative zinc finger protein
  misc_feature (47)..(285): NCBI GI NO: 30688719 NR Description: expressed protein [Arabidopsis thaliana]
  misc_feature (121)..(285): NCBI GI NO: 10177236 NR Description: contains similarity to C2H2-type zinc fingerprotein~gene_id:MRN17
  misc_feature (124)..(290): NCBI GI NO: 10241636 NR Description: putative zinc finger protein
  misc_feature (124)..(290): NCBI GI NO: 38346456 NR Description: OSJNBa0019G23.4
  misc_feature (137)..(316): NCBI GI NO: 15222242 NR Description: zinc finger protein -related
  misc_feature (79)..(283): NCBI GI NO: 34907180 NR Description: putative zinc finger protein
MSNSISDPTRIIHSQDPNTTADPQVPLRNLSQVRNRMDSLQHFLSQSINTNTPLTVDQIAMVSSQILSSIHQVIVNGAALVSYSQNSIAAGAPDPPPYPKKPKPEPSVADKAKQTLDSKLEPLEGDDSEIVELDAVEILAEHMHFCEICGKGFRRDANLRMHMRAHGEQFKTAEALAKPSEKASWLRATRFSCPFVGCNRNKLHRRFRPLKSVICVKNHFKRSHCPKMYTCERCRKKHFSVLSDLRSHLKHCGGEARWKCTCGTTFSRKDKLFGHIALFEGHAPALACDEEGKGKQMVEDDEDPMLMSESGFELDDCFLDQEFPEGFFDDFGSIDDYC

SEQ ID NO: 9112 - protein, 302 aa, Glycine max
  peptide (1)..(302): Ceres Seq. ID no. 15168512
  misc_feature (108)..(130): Pfam Name: Pfam Description:  Zinc finger, C2H2 type
  misc_feature (67)..(301): NCBI GI NO: 34908682 NR Description: putative zinc finger protein
  misc_feature (40)..(254): NCBI GI NO: 15218606 NR Description: zinc finger protein -related
  misc_feature (40)..(254): NCBI GI NO: 21593564 NR Description: zinc finger protein, putative
  misc_feature (29)..(250): NCBI GI NO: 28376689 NR Description: putative zinc finger protein
  misc_feature (11)..(249): NCBI GI NO: 30688719 NR Description: expressed protein [Arabidopsis thaliana]
  misc_feature (85)..(249): NCBI GI NO: 10177236 NR Description: contains similarity to C2H2-type zinc fingerprotein~gene_id:MRN17
  misc_feature (88)..(254): NCBI GI NO: 10241636 NR Description: putative zinc finger protein
  misc_feature (88)..(254): NCBI GI NO: 38346456 NR Description: OSJNBa0019G23.4
  misc_feature (101)..(280): NCBI GI NO: 15222242 NR Description: zinc finger protein -related
  misc_feature (43)..(247): NCBI GI NO: 34907180 NR Description: putative zinc finger protein
MDSLQHFLSQSINTNTPLTVDQIAMVSSQILSSIHQVIVNGAALVSYSQNSIAAGAPDPPPYPKKPKPEPSVADKAKQTLDSKLEPLEGDDSEIVELDAVEILAEHMHFCEICGKGFRRDANLRMHMRAHGEQFKTAEALAKPSEKASWLRATRFSCPFVGCNRNKLHRRFRPLKSVICVKNHFKRSHCPKMYTCERCRKKHFSVLSDLRSHLKHCGGEARWKCTCGTTFSRKDKLFGHIALFEGHAPALACDEEGKGKQMVEDDEDPMLMSESGFELDDCFLDQEFPEGFFDDFGSIDDYC

SEQ ID NO: 9113 - DNA, 920 bp, Glycine max
  misc_feature (1)..(920): Ceres Seq. ID no. 13581682
aaatcacaactatcgtactagtattttacatttaagtgaaatatgcatatatcaataaaaaaaaaaccataaattaaaaaaagatgcatagttgattcatttataatcttaaaaataagaatgacattttccaaaaaaaaaaaaattgattacggatgggaagagggtgaggccaaggtgaaaaaaaagggtagtgtacaggtccatgtatctatataacgcagcttgttcttgttcactttccccaattttctcttgacgcagaaagaaagaaatctctttgatgggtttcccagtggggtactcggagctcctgttcccgaagcttctccttcacatcctctccctcttgggcctcctcaggaagctgatttgcagcctcctccgcttcatgggcctccacgacttcctcgagcccgacattgccgcctggcccgaaacccgaatgcccgaagaattcgagtccgtgtcggccacgctcatccgggaaatcctgccggtggtgaagttccgggagctggtggaccccccggagacgtgcgcggtgtgtctgagcgagttcgaggaaaacgatgagatcagacagctggcgaattgtcgccacatattccaccgaggatgtttggaccgttggatggggtacgatcagagaacatgccctctctgcagaatgccctttatacccgacgaaatgcaaggtgcttttattgagagactctgggctgcctctggtatcgctgaatatccgcatgttgctcctttctagtatcattcatatttccttattttacttttttggggaagggatatcaaaagccataaccagaagaggttcttttgatttcgtggttttttttttgtgtatgtgtatatatacagagacctctatcaattgtatatcgatttctcttagatgatgg

SEQ ID NO: 9114 - protein, 160 aa, Glycine max
  peptide (1)..(160): Ceres Seq. ID no. 13581683
  misc_feature (86)..(128): Pfam Name: RING finger Pfam Description: Zinc finger, C3HC4 type
  misc_feature (1)..(154): NCBI GI NO: 15233117 NR Description: BRH1 RING finger protein [Arabidopsis thaliana]
  misc_feature (1)..(149): NCBI GI NO: 15222553 NR Description: RING-H2 finger protein, putative
  misc_feature (59)..(149): NCBI GI NO: 15238072 NR Description: RING-H2 zinc finger protein, putative
  misc_feature (59)..(149): NCBI GI NO: 21554155 NR Description: RING zinc finger protein-like
  misc_feature (1)..(141): NCBI GI NO: 11358777 NR Description: RING-H2 finger protein RHA1b
  misc_feature (1)..(136): NCBI GI NO: 11358776 NR Description: RING-H2 finger protein RHA1a
  misc_feature (1)..(136): NCBI GI NO: 15233352 NR Description: RING-H2 finger protein, putative
  misc_feature (1)..(141): NCBI GI NO: 15233350 NR Description: RING-H2 finger protein RHA1b
  misc_feature (1)..(134): NCBI GI NO: 34897812 NR Description: P0514G12.26
  misc_feature (39)..(135): NCBI GI NO: 18411282 NR Description: zinc finger
MGFPVGYSELLFPKLLLHILSLLGLLRKLICSLLRFMGLHDFLEPDIAAWPETRMPEEFESVSATLIREILPVVKFRELVDPPETCAVCLSEFEENDEIRQLANCRHIFHRGCLDRWMGYDQRTCPLCRMPFIPDEMQGAFIERLWAASGIAEYPHVAPF

SEQ ID NO: 9115 - protein, 124 aa, Glycine max
  peptide (1)..(124): Ceres Seq. ID no. 13581684
  misc_feature (50)..(92): Pfam Name: RING finger Pfam Description: Zinc finger, C3HC4 type
  misc_feature (1)..(118): NCBI GI NO: 15233117 NR Description: BRH1 RING finger protein [Arabidopsis thaliana]
  misc_feature (1)..(113): NCBI GI NO: 15222553 NR Description: RING-H2 finger protein, putative
  misc_feature (23)..(113): NCBI GI NO: 15238072 NR Description: RING-H2 zinc finger protein, putative
  misc_feature (23)..(113): NCBI GI NO: 21554155 NR Description: RING zinc finger protein-like
  misc_feature (1)..(105): NCBI GI NO: 11358777 NR Description: RING-H2 finger protein RHA1b
  misc_feature (1)..(100): NCBI GI NO: 11358776 NR Description: RING-H2 finger protein RHA1a
  misc_feature (1)..(100): NCBI GI NO: 15233352 NR Description: RING-H2 finger protein, putative
  misc_feature (1)..(105): NCBI GI NO: 15233350 NR Description: RING-H2 finger protein RHA1b
  misc_feature (1)..(98): NCBI GI NO: 34897812 NR Description: P0514G12.26
  misc_feature (3)..(99): NCBI GI NO: 18411282 NR Description: zinc finger
MGLHDFLEPDIAAWPETRMPEEFESVSATLIREILPVVKFRELVDPPETCAVCLSEFEENDEIRQLANCRHIFHRGCLDRWMGYDQRTCPLCRMPFIPDEMQGAFIERLWAASGIAEYPHVAPF

SEQ ID NO: 9116 - protein, 114 aa, Glycine max
  peptide (1)..(114): Ceres Seq. ID no. 13581685
MRSDSWRIVATYSTEDVWTVGWGTIREHALSAECPLYPTKCKVLLLRDSGLPLVSLNIRMLLLSSIIHISLFYFFGEGISKAITRRGSFDFVVFFLCMCIYTETSINCISISLR

SEQ ID NO: 9117 - DNA, 914 bp, Glycine max
  misc_feature (1)..(914): Ceres Seq. ID no. 13594341
acccagttgcttccttttattcctgtaatccatgaaataaaattgctagcttaatagtgatccgtatagaagactagggaacttgtttgctatggcaactctgagcaattcaactaatatcttttggcaagattgtcaaataggaaggcctgaaaggcagaagctacttaaccaaaagggatgtgttgtatggattactggactcagcggatcaggaaaaagcacattggcatgctccctaagcagagaactgcactcaaggggaaagttatcttatgtccttgatggagataaccttcggcatggactaaacaaggatcttggttttaaagctgaagatcgcactgaaaatattcgcagaactggagaagtggcaaaactcttcgctgatgctggtttaatatgtgttgctagtctgatatctccttacagaagagatcgagacacttgccgtgccatgttacctgatgcaaattttattgaggttttcatgaacatgcctctagaattgtgcgaggcacgagatccaaaaggcctctataagcttgctcgtgcagggaaaatcaaaggttttaccggcattgatgatccttatgaaccgcccataaattgtgagattgaaataaagcaggaaaatgggaattgtccaacacctactatgatggctggacaagtagttacttacttggagaataaaggatttcttgaatcttagagtttttaagtttaattattctctaataatggtgtttcttctaaatgaagttaaaaaggaatcctaggaagtgcaggtaggagagtggtgagaggataaatggacttgtaaagttcatcaagtataaataataattaataattgttgcaattcattctataggttgatcaagaatttcagtatattttatcggcgtttg

SEQ ID NO: 9118 - protein, 207 aa, Glycine max
  peptide (1)..(207): Ceres Seq. ID no. 15221336
  misc_feature (29)..(183): Pfam Name: Pfam Description:  Adenylylsulphate kinase
  misc_feature (1)..(207): NCBI GI NO: 15228666 NR Description: adenylylsulfate kinase -related
  misc_feature (7)..(205): NCBI GI NO: 34393551 NR Description: putative adenosine-5'-phosphosulfate kinase
  misc_feature (1)..(205): NCBI GI NO: 6563285 NR Description: adenosine-5'-phosphosulfate kinase [Zea mays]
  misc_feature (1)..(207): NCBI GI NO: 15225999 NR Description: adenosine phosphosulfate kinase -related
  misc_feature (1)..(207): NCBI GI NO: 21553403 NR Description: putative adenosine phosphosulfate kinase
  misc_feature (1)..(207): NCBI GI NO: 7387809 NR Description: Adenylylsulfate kinase, chloroplast precursor
  misc_feature (9)..(206): NCBI GI NO: 15236087 NR Description: adenosine-5-phosphosulfate-kinase
  misc_feature (9)..(206): NCBI GI NO: 9757873 NR Description: adenylylsulfate kinase-like protein
  misc_feature (9)..(206): NCBI GI NO: 18425199 NR Description: adenylylsulfate kinase-related protein
  misc_feature (9)..(206): NCBI GI NO: 21537248 NR Description: adenylylsulfate kinase-like protein
MATLSNSTNIFWQDCQIGRPERQKLLNQKGCVVWITGLSGSGKSTLACSLSRELHSRGKLSYVLDGDNLRHGLNKDLGFKAEDRTENIRRTGEVAKLFADAGLICVASLISPYRRDRDTCRAMLPDANFIEVFMNMPLELCEARDPKGLYKLARAGKIKGFTGIDDPYEPPINCEIEIKQENGNCPTPTMMAGQVVTYLENKGFLES

SEQ ID NO: 9119 - DNA, 820 bp, Glycine max
  misc_feature (1)..(820): Ceres Seq. ID no. 15178436
atgataatttcaaacattgttgttgttgttgcatcaaaccttttgcaaaatgtccatagcagaggaggagagtccaagtgtgatgccaaaagtgatcactttcctctgctctcttcttgagagggtggctgagtcaaatgatcacaaccaacacctccaacagcaccagaagatctcagtgttccatggcctgacaaggccaaacatctcaattcagtgctatcttgagagaatcttcaagtacgcgaattgcagcccttcatgcttcgtcgtcgcctacgtctacctcgatcgattcactcagagacaaccctctttgcccatcaactccttcaacgtgcaccgtttactgatcactagtgtcatggtagctgccaagttcatggatgacatgttctacaacaatgctcactatgccaaagttggaggaatcaccaaagtagagatgaattttcttgagttggatttcctctttggtttgggtttccatttaaatgtgaccccaggcaccttccaagcctattgtgtccatctccaaagagaaatgttgttgatccaacctctaaatttttcagattccaccctaaatttaggacaatcactaaaggctcacttgtgcttcaatgaggatgaatgttctcatcaaaagcagaaacaacaacaacagctagctgtttgattccttgcattttctcagtgcatgtgtagtatggttgactagttgtaaatgtagtgattctattacagactggcaagtaaactacttttccttgtgcaatccgcttgctccttttttattctaattctttctactttttcc

SEQ ID NO: 9120 - protein, 209 aa, Glycine max
  peptide (1)..(209): Ceres Seq. ID no. 15178437
  misc_feature (18)..(149): Pfam Name: Pfam Description:  Cyclin, N-terminal domain
  misc_feature (3)..(209): NCBI GI NO: 15224950 NR Description: cyclin family [Arabidopsis thaliana]
  misc_feature (5)..(203): NCBI GI NO: 15240306 NR Description: cyclin family [Arabidopsis thaliana]
  misc_feature (1)..(168): NCBI GI NO: 15240794 NR Description: cyclin family [Arabidopsis thaliana]
  misc_feature (7)..(206): NCBI GI NO: 37536902 NR Description: hypothetical protein
  misc_feature (1)..(167): NCBI GI NO: 25493992 NR Description: PREG-like protein
  misc_feature (3)..(208): NCBI GI NO: 32488963 NR Description: OSJNBb0038F03.8
  misc_feature (6)..(167): NCBI GI NO: 14140116 NR Description: PREG-like protein [Oryza sativa]
  misc_feature (5)..(168): NCBI GI NO: 15233185 NR Description: cyclin family [Arabidopsis thaliana]
  misc_feature (2)..(201): NCBI GI NO: 15225402 NR Description: cyclin family [Arabidopsis thaliana]
  misc_feature (1)..(165): NCBI GI NO: 6729043 NR Description: hypothetical protein [Arabidopsis thaliana]
MSIAEEESPSVMPKVITFLCSLLERVAESNDHNQHLQQHQKISVFHGLTRPNISIQCYLERIFKYANCSPSCFVVAYVYLDRFTQRQPSLPINSFNVHRLLITSVMVAAKFMDDMFYNNAHYAKVGGITKVEMNFLELDFLFGLGFHLNVTPGTFQAYCVHLQREMLLIQPLNFSDSTLNLGQSLKAHLCFNEDECSHQKQKQQQQLAV

SEQ ID NO: 9121 - protein, 198 aa, Glycine max
  peptide (1)..(198): Ceres Seq. ID no. 15178438
  misc_feature (7)..(138): Pfam Name: Pfam Description:  Cyclin, N-terminal domain
  misc_feature (1)..(198): NCBI GI NO: 15224950 NR Description: cyclin family [Arabidopsis thaliana]
  misc_feature (1)..(192): NCBI GI NO: 15240306 NR Description: cyclin family [Arabidopsis thaliana]
  misc_feature (1)..(157): NCBI GI NO: 15240794 NR Description: cyclin family [Arabidopsis thaliana]
  misc_feature (1)..(195): NCBI GI NO: 37536902 NR Description: hypothetical protein
  misc_feature (1)..(156): NCBI GI NO: 25493992 NR Description: PREG-like protein
  misc_feature (1)..(197): NCBI GI NO: 32488963 NR Description: OSJNBb0038F03.8
  misc_feature (1)..(156): NCBI GI NO: 14140116 NR Description: PREG-like protein [Oryza sativa]
  misc_feature (1)..(157): NCBI GI NO: 15233185 NR Description: cyclin family [Arabidopsis thaliana]
  misc_feature (1)..(190): NCBI GI NO: 15225402 NR Description: cyclin family [Arabidopsis thaliana]
  misc_feature (1)..(154): NCBI GI NO: 6729043 NR Description: hypothetical protein [Arabidopsis thaliana]
MPKVITFLCSLLERVAESNDHNQHLQQHQKISVFHGLTRPNISIQCYLERIFKYANCSPSCFVVAYVYLDRFTQRQPSLPINSFNVHRLLITSVMVAAKFMDDMFYNNAHYAKVGGITKVEMNFLELDFLFGLGFHLNVTPGTFQAYCVHLQREMLLIQPLNFSDSTLNLGQSLKAHLCFNEDECSHQKQKQQQQLAV

SEQ ID NO: 9122 - protein, 104 aa, Glycine max
  peptide (1)..(104): Ceres Seq. ID no. 15178439
  misc_feature (1)..(104): NCBI GI NO: 15224950 NR Description: cyclin family [Arabidopsis thaliana]
  misc_feature (1)..(98): NCBI GI NO: 15240306 NR Description: cyclin family [Arabidopsis thaliana]
  misc_feature (1)..(63): NCBI GI NO: 15240794 NR Description: cyclin family [Arabidopsis thaliana]
  misc_feature (1)..(101): NCBI GI NO: 37536902 NR Description: hypothetical protein
  misc_feature (1)..(62): NCBI GI NO: 25493992 NR Description: PREG-like protein
  misc_feature (1)..(103): NCBI GI NO: 32488963 NR Description: OSJNBb0038F03.8
  misc_feature (1)..(62): NCBI GI NO: 14140116 NR Description: PREG-like protein [Oryza sativa]
  misc_feature (1)..(63): NCBI GI NO: 15233185 NR Description: cyclin family [Arabidopsis thaliana]
  misc_feature (1)..(96): NCBI GI NO: 15225402 NR Description: cyclin family [Arabidopsis thaliana]
  misc_feature (1)..(60): NCBI GI NO: 6729043 NR Description: hypothetical protein [Arabidopsis thaliana]
MVAAKFMDDMFYNNAHYAKVGGITKVEMNFLELDFLFGLGFHLNVTPGTFQAYCVHLQREMLLIQPLNFSDSTLNLGQSLKAHLCFNEDECSHQKQKQQQQLAV

SEQ ID NO: 9123 - DNA, 882 bp, Glycine max
  misc_feature (1)..(882): Ceres Seq. ID no. 15173213
ttccctctgatgaatgctctactctactctgactctcacacatcgttttatccgaaagcaagcattatcagaagcagaaagaaagaataagaggttgcagcaacaatggcagccatggctgcgcttcagagctcaatggtcggtctctccctctcctccaactctttcttaggccaacgcctttctcccatcaccctcccctctcttcttccgggtaagtcaacagagaagcaatgtcctattgtaatgaggcttaaacgatgggaacggaaggagtgtaaaccaaacagccttcctatcttgcacaaaatgcatgttaaacttggagatacggtgcaagtcatatctggacgtgaaaggggtaaagttggggagattactaaaatcttcaagcataacagcactgttatagtgaaagatttaaatttgaagacaaagcatgtgaagagtagagaagagggggaaccagggcaaattattaagattgaaggtcctatccacagctcaaatgtgatgctctactccaaagatcagaaggtagcaagccgtgtggggcataaagtccttgataatggtaaaaaagtccgctaccttataaaaactggtgaaataattgatagtgcagagaactggaagaaactgaaggaggctactaagcaaactgaagaagctactgctgctgctgcctagttttacctacgtaattcattcattcactagtaatgtaactctagcagtacttgttgtgatctctcttccattttgttatctaatgtatatttttggtctgtctattgatctccatataatgaaacctgggtgatcaaatttgtctattgcttattgagcaattgagattttttgaagaactattgttcatac

SEQ ID NO: 9124 - protein, 194 aa, Glycine max
  peptide (1)..(194): Ceres Seq. ID no. 15173214
  misc_feature (71)..(104): Pfam Name: Pfam Description:  KOW motif
  misc_feature (3)..(191): NCBI GI NO: 132819 NR Description: 50S RIBOSOMAL PROTEIN L24, CHLOROPLAST PRECURSOR
  misc_feature (4)..(194): NCBI GI NO: 400989 NR Description: 50S RIBOSOMAL PROTEIN L24, CHLOROPLAST PRECURSOR
  misc_feature (1)..(194): NCBI GI NO: 30696483 NR Description: 50S ribosomal protein L24, chloroplast precursor
  misc_feature (1)..(194): NCBI GI NO: 1694974 NR Description: plastid ribosomal protein [Arabidopsis thaliana]
  misc_feature (1)..(194): NCBI GI NO: 132821 NR Description: 50S RIBOSOMAL PROTEIN L24, CHLOROPLAST PRECURSOR
  misc_feature (1)..(101): NCBI GI NO: 30696487 NR Description: 50S ribosomal protein L24, chloroplast precursor
  misc_feature (121)..(194): NCBI GI NO: 30696487 NR Description: 50S ribosomal protein L24, chloroplast precursor
  misc_feature (64)..(171): NCBI GI NO: 23042779 NR Description: hypothetical protein
  misc_feature (59)..(171): NCBI GI NO: 16329930 NR Description: 50S ribosomal protein L24
  misc_feature (59)..(171): NCBI GI NO: 22297636 NR Description: 50S ribosomal protein L24
MAAMAALQSSMVGLSLSSNSFLGQRLSPITLPSLLPGKSTEKQCPIVMRLKRWERKECKPNSLPILHKMHVKLGDTVQVISGRERGKVGEITKIFKHNSTVIVKDLNLKTKHVKSREEGEPGQIIKIEGPIHSSNVMLYSKDQKVASRVGHKVLDNGKKVRYLIKTGEIIDSAENWKKLKEATKQTEEATAAAA

SEQ ID NO: 9125 - protein, 191 aa, Glycine max
  peptide (1)..(191): Ceres Seq. ID no. 15173215
  misc_feature (68)..(101): Pfam Name: Pfam Description:  KOW motif
  misc_feature (1)..(188): NCBI GI NO: 132819 NR Description: 50S RIBOSOMAL PROTEIN L24, CHLOROPLAST PRECURSOR
  misc_feature (1)..(191): NCBI GI NO: 400989 NR Description: 50S RIBOSOMAL PROTEIN L24, CHLOROPLAST PRECURSOR
  misc_feature (1)..(191): NCBI GI NO: 30696483 NR Description: 50S ribosomal protein L24, chloroplast precursor
  misc_feature (1)..(191): NCBI GI NO: 1694974 NR Description: plastid ribosomal protein [Arabidopsis thaliana]
  misc_feature (1)..(191): NCBI GI NO: 132821 NR Description: 50S RIBOSOMAL PROTEIN L24, CHLOROPLAST PRECURSOR
  misc_feature (1)..(98): NCBI GI NO: 30696487 NR Description: 50S ribosomal protein L24, chloroplast precursor
  misc_feature (118)..(191): NCBI GI NO: 30696487 NR Description: 50S ribosomal protein L24, chloroplast precursor
  misc_feature (61)..(168): NCBI GI NO: 23042779 NR Description: hypothetical protein
  misc_feature (56)..(168): NCBI GI NO: 16329930 NR Description: 50S ribosomal protein L24
  misc_feature (56)..(168): NCBI GI NO: 22297636 NR Description: 50S ribosomal protein L24
MAALQSSMVGLSLSSNSFLGQRLSPITLPSLLPGKSTEKQCPIVMRLKRWERKECKPNSLPILHKMHVKLGDTVQVISGRERGKVGEITKIFKHNSTVIVKDLNLKTKHVKSREEGEPGQIIKIEGPIHSSNVMLYSKDQKVASRVGHKVLDNGKKVRYLIKTGEIIDSAENWKKLKEATKQTEEATAAAA

SEQ ID NO: 9126 - protein, 184 aa, Glycine max
  peptide (1)..(184): Ceres Seq. ID no. 15173216
  misc_feature (61)..(94): Pfam Name: Pfam Description:  KOW motif
  misc_feature (1)..(181): NCBI GI NO: 132819 NR Description: 50S RIBOSOMAL PROTEIN L24, CHLOROPLAST PRECURSOR
  misc_feature (1)..(184): NCBI GI NO: 400989 NR Description: 50S RIBOSOMAL PROTEIN L24, CHLOROPLAST PRECURSOR
  misc_feature (1)..(184): NCBI GI NO: 30696483 NR Description: 50S ribosomal protein L24, chloroplast precursor
  misc_feature (1)..(184): NCBI GI NO: 1694974 NR Description: plastid ribosomal protein [Arabidopsis thaliana]
  misc_feature (1)..(184): NCBI GI NO: 132821 NR Description: 50S RIBOSOMAL PROTEIN L24, CHLOROPLAST PRECURSOR
  misc_feature (1)..(91): NCBI GI NO: 30696487 NR Description: 50S ribosomal protein L24, chloroplast precursor
  misc_feature (111)..(184): NCBI GI NO: 30696487 NR Description: 50S ribosomal protein L24, chloroplast precursor
  misc_feature (54)..(161): NCBI GI NO: 23042779 NR Description: hypothetical protein
  misc_feature (49)..(161): NCBI GI NO: 16329930 NR Description: 50S ribosomal protein L24
  misc_feature (49)..(161): NCBI GI NO: 22297636 NR Description: 50S ribosomal protein L24
MVGLSLSSNSFLGQRLSPITLPSLLPGKSTEKQCPIVMRLKRWERKECKPNSLPILHKMHVKLGDTVQVISGRERGKVGEITKIFKHNSTVIVKDLNLKTKHVKSREEGEPGQIIKIEGPIHSSNVMLYSKDQKVASRVGHKVLDNGKKVRYLIKTGEIIDSAENWKKLKEATKQTEEATAAAA

SEQ ID NO: 9127 - DNA, 1148 bp, Glycine max
  misc_feature (1)..(1148): Ceres Seq. ID no. 15168480
acacaaacatctctctctctctctctctctctcatctctctctctctctctctctaagacacacaaacactacacatcacaatctcacattgttctcaagtttcaacactttctagttctaccatggcggtaggactctccgccgccataaccatgaagtccctcctccgtttccaccaacctcacctgaacctccccaaatcaatcccaacaacactccctttctcccccatgagaattttccaccacacagcatcaccaagaacccaaaaagtttcaactttcaccgtttgtgtcctcatgcaggacccaaaacaaggcacccacatggaaattgagccacaagaacaacctcctcctcctcctcctcctcccgctcaacaagttctgtcaccaaagttggctgagaaattggccagaaaagagtctgagaggttcacttaccttgttgctgctgtcatgtctagcttcggcatcacatccatggcagtgttcgctgtttattgcagattctcgtggcaaatggagggtggagaagtgccttggtctgaaatgtttggcacatttgctctatcagtgggagctgctgtgggtatggaattttgggctagatgggctcatagggctctctggcatgcttcgctgtggcacatgcatgagtcccaccatcgaccaagagaaggacccttcgagcttaacgatgtatttgcaataatcaacgctgtccctgccatcgctctcctttcctatggtttctttaacaagggactggtccctggcctttgctttggtgcgggtcttggaattacggtctttgggatggcctacatgtttgtacacgatggattggttcataagagattcccggtgggccccattgcaaacgtgccctatctcagaagggtggcctctgctcaccaacttcaccattcggaaaaattcaatggagtgccatatgggctgtttttgggacccaaggaaattgaagaggtgggagggctagaagagctggagaaagagataagtaggagagcaagatcatacaaaatagctaatgagaacaactaatacaaatcaagaatgtttcgaagaattatcagtgtaaatcagaaatatgaaataaaatgatccaaaaattttgcttgcac

SEQ ID NO: 9128 - protein, 314 aa, Glycine max
  peptide (1)..(314): Ceres Seq. ID no. 15168481
  misc_feature (145)..(303): Pfam Name: Pfam Description:  Carotene hydroxylase
  misc_feature (1)..(307): NCBI GI NO: 9988836 NR Description: beta-carotene hydroxylase [Citrus unshiu]
  misc_feature (1)..(307): NCBI GI NO: 11245486 NR Description: beta-carotene hydroxylase [Citrus unshiu]
  misc_feature (5)..(308): NCBI GI NO: 2956717 NR Description: beta-carotene hydroxylase 2 [Capsicum annuum]
  misc_feature (2)..(308): NCBI GI NO: 5870598 NR Description: beta-carotene hydroxylase
  misc_feature (1)..(311): NCBI GI NO: 15235959 NR Description: beta-carotene hydroxylase [Arabidopsis thaliana]
  misc_feature (5)..(308): NCBI GI NO: 5870600 NR Description: beta-carotene hydroxylase
  misc_feature (45)..(311): NCBI GI NO: 1575296 NR Description: beta-carotene hydroxylase [Arabidopsis thaliana]
  misc_feature (1)..(307): NCBI GI NO: 15237204 NR Description: beta-carotene hydroxylase, putative
  misc_feature (25)..(307): NCBI GI NO: 9971820 NR Description: beta hydroxylase [Tagetes erecta]
  misc_feature (1)..(306): NCBI GI NO: 32488500 NR Description: OSJNBa0011J08.7
MAVGLSAAITMKSLLRFHQPHLNLPKSIPTTLPFSPMRIFHHTASPRTQKVSTFTVCVLMQDPKQGTHMEIEPQEQPPPPPPPPAQQVLSPKLAEKLARKESERFTYLVAAVMSSFGITSMAVFAVYCRFSWQMEGGEVPWSEMFGTFALSVGAAVGMEFWARWAHRALWHASLWHMHESHHRPREGPFELNDVFAIINAVPAIALLSYGFFNKGLVPGLCFGAGLGITVFGMAYMFVHDGLVHKRFPVGPIANVPYLRRVASAHQLHHSEKFNGVPYGLFLGPKEIEEVGGLEELEKEISRRARSYKIANENN

SEQ ID NO: 9129 - protein, 304 aa, Glycine max
  peptide (1)..(304): Ceres Seq. ID no. 15168482
  misc_feature (135)..(293): Pfam Name: Pfam Description:  Carotene hydroxylase
  misc_feature (1)..(297): NCBI GI NO: 9988836 NR Description: beta-carotene hydroxylase [Citrus unshiu]
  misc_feature (1)..(297): NCBI GI NO: 11245486 NR Description: beta-carotene hydroxylase [Citrus unshiu]
  misc_feature (1)..(298): NCBI GI NO: 2956717 NR Description: beta-carotene hydroxylase 2 [Capsicum annuum]
  misc_feature (1)..(298): NCBI GI NO: 5870598 NR Description: beta-carotene hydroxylase
  misc_feature (1)..(301): NCBI GI NO: 15235959 NR Description: beta-carotene hydroxylase [Arabidopsis thaliana]
  misc_feature (1)..(298): NCBI GI NO: 5870600 NR Description: beta-carotene hydroxylase
  misc_feature (35)..(301): NCBI GI NO: 1575296 NR Description: beta-carotene hydroxylase [Arabidopsis thaliana]
  misc_feature (1)..(297): NCBI GI NO: 15237204 NR Description: beta-carotene hydroxylase, putative
  misc_feature (15)..(297): NCBI GI NO: 9971820 NR Description: beta hydroxylase [Tagetes erecta]
  misc_feature (1)..(296): NCBI GI NO: 32488500 NR Description: OSJNBa0011J08.7
MKSLLRFHQPHLNLPKSIPTTLPFSPMRIFHHTASPRTQKVSTFTVCVLMQDPKQGTHMEIEPQEQPPPPPPPPAQQVLSPKLAEKLARKESERFTYLVAAVMSSFGITSMAVFAVYCRFSWQMEGGEVPWSEMFGTFALSVGAAVGMEFWARWAHRALWHASLWHMHESHHRPREGPFELNDVFAIINAVPAIALLSYGFFNKGLVPGLCFGAGLGITVFGMAYMFVHDGLVHKRFPVGPIANVPYLRRVASAHQLHHSEKFNGVPYGLFLGPKEIEEVGGLEELEKEISRRARSYKIANENN

SEQ ID NO: 9130 - protein, 278 aa, Glycine max
  peptide (1)..(278): Ceres Seq. ID no. 15168483
  misc_feature (109)..(267): Pfam Name: Pfam Description:  Carotene hydroxylase
  misc_feature (1)..(271): NCBI GI NO: 9988836 NR Description: beta-carotene hydroxylase [Citrus unshiu]
  misc_feature (1)..(271): NCBI GI NO: 11245486 NR Description: beta-carotene hydroxylase [Citrus unshiu]
  misc_feature (1)..(272): NCBI GI NO: 2956717 NR Description: beta-carotene hydroxylase 2 [Capsicum annuum]
  misc_feature (1)..(272): NCBI GI NO: 5870598 NR Description: beta-carotene hydroxylase
  misc_feature (1)..(275): NCBI GI NO: 15235959 NR Description: beta-carotene hydroxylase [Arabidopsis thaliana]
  misc_feature (1)..(272): NCBI GI NO: 5870600 NR Description: beta-carotene hydroxylase
  misc_feature (9)..(275): NCBI GI NO: 1575296 NR Description: beta-carotene hydroxylase [Arabidopsis thaliana]
  misc_feature (1)..(271): NCBI GI NO: 15237204 NR Description: beta-carotene hydroxylase, putative
  misc_feature (1)..(271): NCBI GI NO: 9971820 NR Description: beta hydroxylase [Tagetes erecta]
  misc_feature (1)..(270): NCBI GI NO: 32488500 NR Description: OSJNBa0011J08.7
MRIFHHTASPRTQKVSTFTVCVLMQDPKQGTHMEIEPQEQPPPPPPPPAQQVLSPKLAEKLARKESERFTYLVAAVMSSFGITSMAVFAVYCRFSWQMEGGEVPWSEMFGTFALSVGAAVGMEFWARWAHRALWHASLWHMHESHHRPREGPFELNDVFAIINAVPAIALLSYGFFNKGLVPGLCFGAGLGITVFGMAYMFVHDGLVHKRFPVGPIANVPYLRRVASAHQLHHSEKFNGVPYGLFLGPKEIEEVGGLEELEKEISRRARSYKIANENN

SEQ ID NO: 9131 - DNA, 707 bp, Glycine max
  misc_feature (1)..(707): Ceres Seq. ID no. 15168561
ataaccaaaaccaaacattcttgggggaaaatggggtcactaatggcctctgcttctatcactcttgcattagccataatccttttcagcctcccatctgaaatctcagcaaacaactacatctactcctctcctccaccacccaaaaagccttaccgctatccatctcctcctcctccagttccttcaccacctccaccaaaggccctccaccaccaaccaagtctccaccaccaccagtttacatttatgcttcccctccaccacccatctacaagtaagcttggaattaagaagcagcaacaataataagtcatgttctagtattcattgtggaataaatttccgttccatttggagcagagttaagcatataatttgttatacaagttctttgaataagagtctgagtgtatcacctctaagctacgatcttcatgactcatatgaggttgcttctatttatttggtggccatttttcaagtgttgttcttactaagttcaaggaagcgacaaatcaaaaagattcaagacaaggaagcaagattagaaatgttgatatcaattcaggctgcttttagagctttcttatttgtttctttgtagattaatatggttgattgtgtatgatttcattcaaattattgtgaaattcttttaatatatctttttgtgttgtttgcaataaatttgtcaatatttgcat

SEQ ID NO: 9132 - protein, 102 aa, Glycine max
  peptide (1)..(102): Ceres Seq. ID no. 15168562
  misc_feature (11)..(67): NCBI GI NO: 8132441 NR Description: extensin [Pisum sativum]
  misc_feature (9)..(74): NCBI GI NO: 2129943 NR Description: extensin precursor (clone 6PExt1.2) - wood tobacco
  misc_feature (10)..(74): NCBI GI NO: 11121504 NR Description: extensin [Nicotiana sylvestris]
  misc_feature (21)..(74): NCBI GI NO: 1165128 NR Description: extensin [Nicotiana sylvestris]
  misc_feature (35)..(67): NCBI GI NO: 37051101 NR Description: hydroxyproline-rich glycoprotein-2 [Pisum sativum]
  misc_feature (10)..(74): NCBI GI NO: 11121502 NR Description: putative extensin [Nicotiana sylvestris]
  misc_feature (32)..(67): NCBI GI NO: 7488674 NR Description: extensin homolog HRGP2 - soybean (fragment)
  misc_feature (11)..(89): NCBI GI NO: 15021744 NR Description: root nodule extensin [Pisum sativum]
  misc_feature (32)..(67): NCBI GI NO: 81870 NR Description: hydroxyproline-rich glycoprotein (clone Hyp3
  misc_feature (32)..(67): NCBI GI NO: 81870 NR Description: hydroxyproline-rich glycoprotein (clone Hyp3
ITKTKHSWGKMGSLMASASITLALAIILFSLPSEISANNYIYSSPPPPKKPYRYPSPPPPVPSPPPPKALHHQPSLHHHQFTFMLPLHHPSTSKLGIKKQQQ

SEQ ID NO: 9133 - protein, 92 aa, Glycine max
  peptide (1)..(92): Ceres Seq. ID no. 15168563
  misc_feature (1)..(57): NCBI GI NO: 8132441 NR Description: extensin [Pisum sativum]
  misc_feature (1)..(64): NCBI GI NO: 2129943 NR Description: extensin precursor (clone 6PExt1.2) - wood tobacco
  misc_feature (1)..(64): NCBI GI NO: 11121504 NR Description: extensin [Nicotiana sylvestris]
  misc_feature (11)..(64): NCBI GI NO: 1165128 NR Description: extensin [Nicotiana sylvestris]
  misc_feature (25)..(57): NCBI GI NO: 37051101 NR Description: hydroxyproline-rich glycoprotein-2 [Pisum sativum]
  misc_feature (1)..(64): NCBI GI NO: 11121502 NR Description: putative extensin [Nicotiana sylvestris]
  misc_feature (22)..(57): NCBI GI NO: 7488674 NR Description: extensin homolog HRGP2 - soybean (fragment)
  misc_feature (1)..(79): NCBI GI NO: 15021744 NR Description: root nodule extensin [Pisum sativum]
  misc_feature (22)..(57): NCBI GI NO: 81870 NR Description: hydroxyproline-rich glycoprotein (clone Hyp3
  misc_feature (22)..(57): NCBI GI NO: 81870 NR Description: hydroxyproline-rich glycoprotein (clone Hyp3
MGSLMASASITLALAIILFSLPSEISANNYIYSSPPPPKKPYRYPSPPPPVPSPPPPKALHHQPSLHHHQFTFMLPLHHPSTSKLGIKKQQQ

SEQ ID NO: 9134 - protein, 88 aa, Glycine max
  peptide (1)..(88): Ceres Seq. ID no. 15168564
  misc_feature (1)..(53): NCBI GI NO: 8132441 NR Description: extensin [Pisum sativum]
  misc_feature (1)..(60): NCBI GI NO: 2129943 NR Description: extensin precursor (clone 6PExt1.2) - wood tobacco
  misc_feature (1)..(60): NCBI GI NO: 11121504 NR Description: extensin [Nicotiana sylvestris]
  misc_feature (7)..(60): NCBI GI NO: 1165128 NR Description: extensin [Nicotiana sylvestris]
  misc_feature (21)..(53): NCBI GI NO: 37051101 NR Description: hydroxyproline-rich glycoprotein-2 [Pisum sativum]
  misc_feature (1)..(60): NCBI GI NO: 11121502 NR Description: putative extensin [Nicotiana sylvestris]
  misc_feature (18)..(53): NCBI GI NO: 7488674 NR Description: extensin homolog HRGP2 - soybean (fragment)
  misc_feature (1)..(75): NCBI GI NO: 15021744 NR Description: root nodule extensin [Pisum sativum]
  misc_feature (18)..(53): NCBI GI NO: 81870 NR Description: hydroxyproline-rich glycoprotein (clone Hyp3
  misc_feature (18)..(53): NCBI GI NO: 81870 NR Description: hydroxyproline-rich glycoprotein (clone Hyp3
MASASITLALAIILFSLPSEISANNYIYSSPPPPKKPYRYPSPPPPVPSPPPPKALHHQPSLHHHQFTFMLPLHHPSTSKLGIKKQQQ

SEQ ID NO: 9135 - DNA, 1166 bp, Glycine max
  misc_feature (1)..(1166): Ceres Seq. ID no. 15177746
attttagttccttttcctctttaattcattcatttctctgcaatcccatgggcaagaaaatgaagctcccttccctactacacaacaaaccctcttcttcttcttggccctgccaccaaccgcgaaccctctctttccgaacccaaaacgacgccgcattcaaaaccatcaacgccgcttacttggacacgctggagagctccgaaacttccttcttcacagtctcccctgactccggaagcttctcaactgcctcagaacaagattctagaagaccccactcactagactccgtcattcgcggcttgcgttccgaccgcttattcttcgagccagacgagacaagctccatattagaggccaaaccaccaccaccaccaccaccaccaccatcaccaccaccaccaccaacaacaacaacaacgttgccgttcaaagacagcgttgtcatgtccgtggactctcaggacccttacgtcgatttccgcaggtccatggaggagatggtggaggcgcagtgcgtcaaggactgggagggtctccaagagcttctgtgttggtatttgaaagtcaatggaaaaaccaaccatggctatattgttggcgctttcgtcgatttattggtcgcttcttcttcttcttcttcctcttcctctttctcggtttcttcttcttctaataataataacaactcccaaatagtatctccttcttcccctttatctttttatagctcttctctctcttcctcttgcagcactcgctgtgtttcttgtttggaagctgaggtcgtcgaggttcataatgatatagccactagtactcctacttcttctttcttgttacaacaagttagggaagaccagccatcatcttcttcttcttcctatttgaattaaatattacttttttttttatttgaacctaagggaaatcagttatttttaattgtaatatttgttctgtattatatacttagtagtttataattagtagttgcatttttgtttcatatatggcgcgcgagcttccatggctctgttaatggaggaaattaatactgcaaccgtacgtgagagagagagagagagagagagattgtcaatttttgtttcctttatcccatgggaagccaacaaggagtaaaaatttctatatttgtcttg

SEQ ID NO: 9136 - protein, 298 aa, Glycine max
  peptide (1)..(298): Ceres Seq. ID no. 15177747
  misc_feature (154)..(213): Pfam Name: Pfam Description:  Protein of unknown function, DUF623
  misc_feature (18)..(246): NCBI GI NO: 15238336 NR Description: expressed protein [Arabidopsis thaliana]
  misc_feature (35)..(231): NCBI GI NO: 38637034 NR Description: hypothetical protein
  misc_feature (35)..(225): NCBI GI NO: 34908538 NR Description: P0423B08.18
  misc_feature (31)..(223): NCBI GI NO: 32488711 NR Description: OSJNBa0088H09.12
  misc_feature (147)..(224): NCBI GI NO: 32479730 NR Description: OJ991214_12.6
  misc_feature (94)..(297): NCBI GI NO: 26452010 NR Description: unknown protein [Arabidopsis thaliana]
  misc_feature (94)..(297): NCBI GI NO: 18404030 NR Description: expressed protein [Arabidopsis thaliana]
  misc_feature (148)..(295): NCBI GI NO: 18409629 NR Description: expressed protein [Arabidopsis thaliana]
  misc_feature (148)..(295): NCBI GI NO: 21618162 NR Description: unknown [Arabidopsis thaliana]
  misc_feature (100)..(203): NCBI GI NO: 34907848 NR Description: P0031D02.11
FSSFSSLIHSFLCNPMGKKMKLPSLLHNKPSSSSWPCHQPRTLSFRTQNDAAFKTINAAYLDTLESSETSFFTVSPDSGSFSTASEQDSRRPHSLDSVIRGLRSDRLFFEPDETSSILEAKPPPPPPPPPSPPPPPTTTTTLPFKDSVVMSVDSQDPYVDFRRSMEEMVEAQCVKDWEGLQELLCWYLKVNGKTNHGYIVGAFVDLLVASSSSSSSSSFSVSSSSNNNNNSQIVSPSSPLSFYSSSLSSSCSTRCVSCLEAEVVEVHNDIATSTPTSSFLLQQVREDQPSSSSSSYLN

SEQ ID NO: 9137 - protein, 283 aa, Glycine max
  peptide (1)..(283): Ceres Seq. ID no. 15177748
  misc_feature (139)..(198): Pfam Name: Pfam Description:  Protein of unknown function, DUF623
  misc_feature (3)..(231): NCBI GI NO: 15238336 NR Description: expressed protein [Arabidopsis thaliana]
  misc_feature (20)..(216): NCBI GI NO: 38637034 NR Description: hypothetical protein
  misc_feature (20)..(210): NCBI GI NO: 34908538 NR Description: P0423B08.18
  misc_feature (16)..(208): NCBI GI NO: 32488711 NR Description: OSJNBa0088H09.12
  misc_feature (132)..(209): NCBI GI NO: 32479730 NR Description: OJ991214_12.6
  misc_feature (79)..(282): NCBI GI NO: 26452010 NR Description: unknown protein [Arabidopsis thaliana]
  misc_feature (79)..(282): NCBI GI NO: 18404030 NR Description: expressed protein [Arabidopsis thaliana]
  misc_feature (133)..(280): NCBI GI NO: 18409629 NR Description: expressed protein [Arabidopsis thaliana]
  misc_feature (133)..(280): NCBI GI NO: 21618162 NR Description: unknown [Arabidopsis thaliana]
  misc_feature (85)..(188): NCBI GI NO: 34907848 NR Description: P0031D02.11
MGKKMKLPSLLHNKPSSSSWPCHQPRTLSFRTQNDAAFKTINAAYLDTLESSETSFFTVSPDSGSFSTASEQDSRRPHSLDSVIRGLRSDRLFFEPDETSSILEAKPPPPPPPPPSPPPPPTTTTTLPFKDSVVMSVDSQDPYVDFRRSMEEMVEAQCVKDWEGLQELLCWYLKVNGKTNHGYIVGAFVDLLVASSSSSSSSSFSVSSSSNNNNNSQIVSPSSPLSFYSSSLSSSCSTRCVSCLEAEVVEVHNDIATSTPTSSFLLQQVREDQPSSSSSSYLN

SEQ ID NO: 9138 - protein, 279 aa, Glycine max
  peptide (1)..(279): Ceres Seq. ID no. 15177749
  misc_feature (135)..(194): Pfam Name: Pfam Description:  Protein of unknown function, DUF623
  misc_feature (1)..(227): NCBI GI NO: 15238336 NR Description: expressed protein [Arabidopsis thaliana]
  misc_feature (16)..(212): NCBI GI NO: 38637034 NR Description: hypothetical protein
  misc_feature (16)..(206): NCBI GI NO: 34908538 NR Description: P0423B08.18
  misc_feature (12)..(204): NCBI GI NO: 32488711 NR Description: OSJNBa0088H09.12
  misc_feature (128)..(205): NCBI GI NO: 32479730 NR Description: OJ991214_12.6
  misc_feature (75)..(278): NCBI GI NO: 26452010 NR Description: unknown protein [Arabidopsis thaliana]
  misc_feature (75)..(278): NCBI GI NO: 18404030 NR Description: expressed protein [Arabidopsis thaliana]
  misc_feature (129)..(276): NCBI GI NO: 18409629 NR Description: expressed protein [Arabidopsis thaliana]
  misc_feature (129)..(276): NCBI GI NO: 21618162 NR Description: unknown [Arabidopsis thaliana]
  misc_feature (81)..(184): NCBI GI NO: 34907848 NR Description: P0031D02.11
MKLPSLLHNKPSSSSWPCHQPRTLSFRTQNDAAFKTINAAYLDTLESSETSFFTVSPDSGSFSTASEQDSRRPHSLDSVIRGLRSDRLFFEPDETSSILEAKPPPPPPPPPSPPPPPTTTTTLPFKDSVVMSVDSQDPYVDFRRSMEEMVEAQCVKDWEGLQELLCWYLKVNGKTNHGYIVGAFVDLLVASSSSSSSSSFSVSSSSNNNNNSQIVSPSSPLSFYSSSLSSSCSTRCVSCLEAEVVEVHNDIATSTPTSSFLLQQVREDQPSSSSSSYLN

SEQ ID NO: 9139 - DNA, 763 bp, Glycine max
  misc_feature (1)..(763): Ceres Seq. ID no. 15172788
attgtttcctttccattgctgatatatgacaaaacacccgtagccatccaataagaccaccacacacacacacacacacatttcttcaaactcactcctttctttccattccctcactttcacacccacaagtcacacccacttggttccttcctccaccccattatttttttctctttttttgatccaaacatgtcctccacacacccaaaaaacccagcaacgacaacaacatccactactctcatcgtgctctcaattatactcctttgttttccgacaaccgcaaaaaccgacaaccctccatgcccttatccgtgttacccaccacccattggaacggttactcccaccactccttcaggtggttccactgttccaccagcaccacctcaacccggattactatatccaccaccttctgggaattacccttattaccccacaccaccttacggcggcggcggtcgtgttggcagcaacgacggtagcggtagcggtagtggtggttttggcagcccaccaccaccggaccctattctaccctactttccattctactacagaaagcctcctcacaagccagaagacaattcagcatcaacaaccactatgtacaaatggacagggatggttggtattactagtctattatcttcatctttgcttcttctctttgtataactctcatgaatcatgatcaaaatcttcatgtaatatctaaacagttaatttaatgcttgttaatttaatggtatttttt

SEQ ID NO: 9140 - protein, 163 aa, Glycine max
  peptide (1)..(163): Ceres Seq. ID no. 15172789
  misc_feature (53)..(107): Pfam Name: Pfam Description:  TT viral ORF2
  misc_feature (16)..(163): NCBI GI NO: 15220010 NR Description: expressed protein [Arabidopsis thaliana]
  misc_feature (25)..(162): NCBI GI NO: 18409730 NR Description: proline-rich protein family [Arabidopsis thaliana]
  misc_feature (18)..(162): NCBI GI NO: 34894212 NR Description: P0439B06.27
  misc_feature (35)..(128): NCBI GI NO: 18423010 NR Description: proline-rich protein family [Arabidopsis thaliana]
  misc_feature (38)..(163): NCBI GI NO: 34894480 NR Description: OJ1116_C07.3
  misc_feature (13)..(158): NCBI GI NO: 15234820 NR Description: proline-rich protein family [Arabidopsis thaliana]
  misc_feature (35)..(128): NCBI GI NO: 18397707 NR Description: proline-rich protein family [Arabidopsis thaliana]
  misc_feature (36)..(109): NCBI GI NO: 15240573 NR Description: proline-rich protein family [Arabidopsis thaliana]
  misc_feature (34)..(121): NCBI GI NO: 15608218 NR Description: pra [Mycobacterium tuberculosis H37Rv]
  misc_feature (34)..(121): NCBI GI NO: 31792269 NR Description: Probable Proline-rich antigen homolog pra
MSSTHPKNPATTTTSTTLIVLSIILLCFPTTAKTDNPPCPYPCYPPPIGTVTPTTPSGGSTVPPAPPQPGLLYPPPSGNYPYYPTPPYGGGGRVGSNDGSGSGSGGFGSPPPPDPILPYFPFYYRKPPHKPEDNSASTTTMYKWTGMVGITSLLSSSLLLLFV

SEQ ID NO: 9141 - DNA, 660 bp, Glycine max
  misc_feature (1)..(660): Ceres Seq. ID no. 15172800
atccccaaatgccccatccaaaacgagacactgaacactgatactctcttcactctcagtgctatcagcaaggaaaaccagagtacccaaagaaaaactaatgatttcactacgaccctataacacatgtcttgaaacaacaacgtttctcttcaacccttcaaagcttggaatctctagacaaacccaaacatgcatgatagcacaaaggaaagcaacaccacgtagaatagaagtcaaatgcagtggtgcagaaaataagggtgagagaacgtttttgacactggaggaagctggtttggttgagatatcaggcttgagcacacatgaacgctttctatgccgtttaacgatatcgtcgttgaacttgctaagagtgatatcggagcaagaagggtgtccaattgaggagctcaatgctgccaagatatgtgattggttcctcaaagataagctcaaaagagaacagaacttaggctctgcggttcttcaatgggatgataattccgactacaaattttaattttctatttactacttgtttctttcttaagtcacgagttttctaggattatgttaatcgagaaaggggtgacaccttttttcggtattggattctaaaattcttatggtaaatgattcggattgttgacgctgctc

SEQ ID NO: 9142 - protein, 140 aa, Glycine max
  peptide (1)..(140): Ceres Seq. ID no. 15172801
  misc_feature (21)..(134): NCBI GI NO: 38344806 NR Description: OSJNBa0043L09.26
  misc_feature (18)..(140): NCBI GI NO: 22328854 NR Description: receptor-interacting protein (PRIP) -related
  misc_feature (59)..(132): NCBI GI NO: 17229982 NR Description: hypothetical protein [Nostoc sp. PCC 7120]
  misc_feature (59)..(132): NCBI GI NO: 23129621 NR Description: hypothetical protein [Nostoc punctiforme]
  misc_feature (59)..(132): NCBI GI NO: 16332247 NR Description: unknown protein [Synechocystis sp. PCC 6803]
MISLRPYNTCLETTTFLFNPSKLGISRQTQTCMIAQRKATPRRIEVKCSGAENKGERTFLTLEEAGLVEISGLSTHERFLCRLTISSLNLLRVISEQEGCPIEELNAAKICDWFLKDKLKREQNLGSAVLQWDDNSDYKF

SEQ ID NO: 9143 - protein, 108 aa, Glycine max
  peptide (1)..(108): Ceres Seq. ID no. 15172802
  misc_feature (1)..(102): NCBI GI NO: 38344806 NR Description: OSJNBa0043L09.26
  misc_feature (1)..(108): NCBI GI NO: 22328854 NR Description: receptor-interacting protein (PRIP) -related
  misc_feature (27)..(100): NCBI GI NO: 17229982 NR Description: hypothetical protein [Nostoc sp. PCC 7120]
  misc_feature (27)..(100): NCBI GI NO: 23129621 NR Description: hypothetical protein [Nostoc punctiforme]
  misc_feature (27)..(100): NCBI GI NO: 16332247 NR Description: unknown protein [Synechocystis sp. PCC 6803]
MIAQRKATPRRIEVKCSGAENKGERTFLTLEEAGLVEISGLSTHERFLCRLTISSLNLLRVISEQEGCPIEELNAAKICDWFLKDKLKREQNLGSAVLQWDDNSDYKF

SEQ ID NO: 9144 - DNA, 898 bp, Glycine max
  misc_feature (1)..(898): Ceres Seq. ID no. 14316400
  misc_feature (583)..(583): n is a, c, t, g, unknown, or other
accaaaggcagtagtgtgttcaccgtggaactgttcttctctctcataacatgccctctgcccaggatccattttacgttgtcaaggccgagattcaagattctattgataagctgcaatctacttttcaccaatgggaaagcaagtccggtgctgcggaacaaggacatcttacaaaggaggttcttgctggatgcgaaagcatagagtggcaggtggatgaattggataaggcaattgctatagcatctagagatccttcttggtatgggatagatgaagctgaggtcgaaagccgaaggagatggacaagtaacactcgttctcaggttggcacaatgaagaaagcagtggaatctggcaagggctcaagtaccacaagccatgctagtgttaatgggatgcgccgagaactaatgaggctaccaaattctcatcaaactgatagctctaaccagtatgctgcccgagataatgatgatttcatactatcagaatcagatagacaaacacttcttataaagagacaggatgaggggtgggatgagcttagtgaaagtgtacgaagaatcggaggtgttgnacttacaatacatgatgaactcactgcacaggaaaagattctagatgaacttggttccgagatggacagtacaacaaatcgtcttgattttgtccaaaaaaaagtggcgatggttatgaaaaaggctagtgcaaagggtcagatcatgatgatattgggtttgttggccctgttcatcttcctctttatcttagtattcttcacctagtcattgagatgggaccagtctctgtgctgtttgtacatgaaaagagatctaatatttttttgttcagattcaagagtaataatagacatgcatttaactattcagtt

SEQ ID NO: 9145 - protein, 246 aa, Glycine max
  peptide (1)..(246): Ceres Seq. ID no. 14316401
  misc_feature (159)..(220): Pfam Name: Pfam Description:  SNARE domain
  misc_feature (1)..(246): NCBI GI NO: 18175840 NR Description: unknown protein [Arabidopsis thaliana]
  misc_feature (1)..(246): NCBI GI NO: 18396813 NR Description: syntaxin SYP6 family [Arabidopsis thaliana]
  misc_feature (54)..(246): NCBI GI NO: 34905840 NR Description: putative syntaxin
  misc_feature (1)..(55): NCBI GI NO: 34905840 NR Description: putative syntaxin
  misc_feature (13)..(210): NCBI GI NO: 6560768 NR Description: F3M18.7 [Arabidopsis thaliana]
  misc_feature (1)..(191): NCBI GI NO: 498040 NR Description: ORF
  misc_feature (3)..(243): NCBI GI NO: 13928922 NR Description: syntaxin 6 [Rattus norvegicus]
  misc_feature (3)..(242): NCBI GI NO: 10946800 NR Description: syntaxin 6 [Mus musculus]
  misc_feature (3)..(242): NCBI GI NO: 12857762 NR Description: unnamed protein product [Mus musculus]
  misc_feature (3)..(242): NCBI GI NO: 5032131 NR Description: syntaxin 6 [Homo sapiens]
  misc_feature (178)..(178): Xaa is any aa, unknown or other
MPSAQDPFYVVKAEIQDSIDKLQSTFHQWESKSGAAEQGHLTKEVLAGCESIEWQVDELDKAIAIASRDPSWYGIDEAEVESRRRWTSNTRSQVGTMKKAVESGKGSSTTSHASVNGMRRELMRLPNSHQTDSSNQYAARDNDDFILSESDRQTLLIKRQDEGWDELSESVRRIGGVXLTIHDELTAQEKILDELGSEMDSTTNRLDFVQKKVAMVMKKASAKGQIMMILGLLALFIFLFILVFFT

SEQ ID NO: 9146 - protein, 150 aa, Glycine max
  peptide (1)..(150): Ceres Seq. ID no. 14316402
  misc_feature (63)..(124): Pfam Name: Pfam Description:  SNARE domain
  misc_feature (1)..(150): NCBI GI NO: 18175840 NR Description: unknown protein [Arabidopsis thaliana]
  misc_feature (1)..(150): NCBI GI NO: 18396813 NR Description: syntaxin SYP6 family [Arabidopsis thaliana]
  misc_feature (1)..(150): NCBI GI NO: 34905840 NR Description: putative syntaxin
  misc_feature (1)..(114): NCBI GI NO: 6560768 NR Description: F3M18.7 [Arabidopsis thaliana]
  misc_feature (1)..(95): NCBI GI NO: 498040 NR Description: ORF
  misc_feature (1)..(147): NCBI GI NO: 13928922 NR Description: syntaxin 6 [Rattus norvegicus]
  misc_feature (1)..(146): NCBI GI NO: 10946800 NR Description: syntaxin 6 [Mus musculus]
  misc_feature (1)..(146): NCBI GI NO: 12857762 NR Description: unnamed protein product [Mus musculus]
  misc_feature (1)..(146): NCBI GI NO: 5032131 NR Description: syntaxin 6 [Homo sapiens]
  misc_feature (1)..(142): NCBI GI NO: 12844640 NR Description: unnamed protein product [Mus musculus]
  misc_feature (82)..(82): Xaa is any aa, unknown or other
MKKAVESGKGSSTTSHASVNGMRRELMRLPNSHQTDSSNQYAARDNDDFILSESDRQTLLIKRQDEGWDELSESVRRIGGVXLTIHDELTAQEKILDELGSEMDSTTNRLDFVQKKVAMVMKKASAKGQIMMILGLLALFIFLFILVFFT

SEQ ID NO: 9147 - protein, 129 aa, Glycine max
  peptide (1)..(129): Ceres Seq. ID no. 14316403
  misc_feature (42)..(103): Pfam Name: Pfam Description:  SNARE domain
  misc_feature (1)..(129): NCBI GI NO: 18175840 NR Description: unknown protein [Arabidopsis thaliana]
  misc_feature (1)..(129): NCBI GI NO: 18396813 NR Description: syntaxin SYP6 family [Arabidopsis thaliana]
  misc_feature (1)..(129): NCBI GI NO: 34905840 NR Description: putative syntaxin
  misc_feature (1)..(93): NCBI GI NO: 6560768 NR Description: F3M18.7 [Arabidopsis thaliana]
  misc_feature (1)..(74): NCBI GI NO: 498040 NR Description: ORF
  misc_feature (1)..(126): NCBI GI NO: 13928922 NR Description: syntaxin 6 [Rattus norvegicus]
  misc_feature (1)..(125): NCBI GI NO: 10946800 NR Description: syntaxin 6 [Mus musculus]
  misc_feature (1)..(125): NCBI GI NO: 12857762 NR Description: unnamed protein product [Mus musculus]
  misc_feature (1)..(125): NCBI GI NO: 5032131 NR Description: syntaxin 6 [Homo sapiens]
  misc_feature (1)..(121): NCBI GI NO: 12844640 NR Description: unnamed protein product [Mus musculus]
  misc_feature (61)..(61): Xaa is any aa, unknown or other
MRRELMRLPNSHQTDSSNQYAARDNDDFILSESDRQTLLIKRQDEGWDELSESVRRIGGVXLTIHDELTAQEKILDELGSEMDSTTNRLDFVQKKVAMVMKKASAKGQIMMILGLLALFIFLFILVFFT

SEQ ID NO: 9148 - DNA, 902 bp, Glycine max
  misc_feature (1)..(902): Ceres Seq. ID no. 15177754
atcaacaccttttggtttccacggatatttggagacaacacagggcaatataggttactaataatggttaccaaggtttacattgtttattattctacgtatggacacattgagaagctagctagagagattgaaaaaggtgctgcttccgtggagggagtagaagcaaaactgtggcaggtacctgaaacactgtctgaagaagtccttgtgaagaagggagcacctccaaagagtgatgatgttcctattattaaaccccgtgagcttgccgatgccgatggctttctgttcggttttccaacaacatttggaaccatggcttctcaattcaaagcatttttagaaggcactatagggctgtggcatacacaggcactagcaggaaaacctgcagggttcttctctagcactagttctcaaggaggtggacaagaagagaccccgttgacctctgtcactcagcttgttcaccatggaatgatttttgttccggttgggtacacatttggagatggcatgtatgagatggagaaggtcaaaggtgggtccccttatggctcaggaactgttgtcggggatggctcaaggcaacctagtgacttggaattggctcaagcttttcatcagggtaaatactttgcagccattgcaaaaaagctcaagggatagataagatacatctcattcatctatctcccacactatactctctctccagttaccctattattaatatcaaaccagaataaggtcatgttagtagaaaaaataaaagtacgtacgtgtgagataatgatgaattaatacttcatcttcgatacaattgttgtcacttaattgtcataatatatgtatcctgtaatgcagtgtttgttgtcaataacaagaatttggtgatt

SEQ ID NO: 9149 - protein, 223 aa, Glycine max
  peptide (1)..(223): Ceres Seq. ID no. 15177755
  misc_feature (24)..(223): NCBI GI NO: 21068664 NR Description: putative quinone oxidoreductase [Cicer arietinum]
  misc_feature (22)..(223): NCBI GI NO: 30687535 NR Description: quinone reductase family [Arabidopsis thaliana]
  misc_feature (22)..(223): NCBI GI NO: 5031275 NR Description: unknown [Prunus armeniaca]
  misc_feature (22)..(223): NCBI GI NO: 15239652 NR Description: quinone reductase, putative [Arabidopsis thaliana]
  misc_feature (22)..(223): NCBI GI NO: 38636776 NR Description: putative quinone-oxidoreductase QR2
  misc_feature (22)..(223): NCBI GI NO: 7445353 NR Description: hypothetical protein M4I22
  misc_feature (22)..(222): NCBI GI NO: 12484052 NR Description: quinone-oxidoreductase QR2
  misc_feature (22)..(223): NCBI GI NO: 34910128 NR Description: putative 1,4-benzoquinone reductase
  misc_feature (23)..(222): NCBI GI NO: 22327957 NR Description: quinone reductase family [Arabidopsis thaliana]
  misc_feature (25)..(221): NCBI GI NO: 15234512 NR Description: quinone reductase family [Arabidopsis thaliana]
INTFWFPRIFGDNTGQYRLLIMVTKVYIVYYSTYGHIEKLAREIEKGAASVEGVEAKLWQVPETLSEEVLVKKGAPPKSDDVPIIKPRELADADGFLFGFPTTFGTMASQFKAFLEGTIGLWHTQALAGKPAGFFSSTSSQGGGQEETPLTSVTQLVHHGMIFVPVGYTFGDGMYEMEKVKGGSPYGSGTVVGDGSRQPSDLELAQAFHQGKYFAAIAKKLKG

SEQ ID NO: 9150 - protein, 202 aa, Glycine max
  peptide (1)..(202): Ceres Seq. ID no. 15177756
  misc_feature (3)..(202): NCBI GI NO: 21068664 NR Description: putative quinone oxidoreductase [Cicer arietinum]
  misc_feature (1)..(202): NCBI GI NO: 30687535 NR Description: quinone reductase family [Arabidopsis thaliana]
  misc_feature (1)..(202): NCBI GI NO: 5031275 NR Description: unknown [Prunus armeniaca]
  misc_feature (1)..(202): NCBI GI NO: 15239652 NR Description: quinone reductase, putative [Arabidopsis thaliana]
  misc_feature (1)..(202): NCBI GI NO: 38636776 NR Description: putative quinone-oxidoreductase QR2
  misc_feature (1)..(202): NCBI GI NO: 7445353 NR Description: hypothetical protein M4I22
  misc_feature (1)..(201): NCBI GI NO: 12484052 NR Description: quinone-oxidoreductase QR2
  misc_feature (1)..(202): NCBI GI NO: 34910128 NR Description: putative 1,4-benzoquinone reductase
  misc_feature (2)..(201): NCBI GI NO: 22327957 NR Description: quinone reductase family [Arabidopsis thaliana]
  misc_feature (4)..(200): NCBI GI NO: 15234512 NR Description: quinone reductase family [Arabidopsis thaliana]
MVTKVYIVYYSTYGHIEKLAREIEKGAASVEGVEAKLWQVPETLSEEVLVKKGAPPKSDDVPIIKPRELADADGFLFGFPTTFGTMASQFKAFLEGTIGLWHTQALAGKPAGFFSSTSSQGGGQEETPLTSVTQLVHHGMIFVPVGYTFGDGMYEMEKVKGGSPYGSGTVVGDGSRQPSDLELAQAFHQGKYFAAIAKKLKG

SEQ ID NO: 9151 - protein, 117 aa, Glycine max
  peptide (1)..(117): Ceres Seq. ID no. 15177757
  misc_feature (1)..(117): NCBI GI NO: 21068664 NR Description: putative quinone oxidoreductase [Cicer arietinum]
  misc_feature (1)..(117): NCBI GI NO: 30687535 NR Description: quinone reductase family [Arabidopsis thaliana]
  misc_feature (1)..(117): NCBI GI NO: 5031275 NR Description: unknown [Prunus armeniaca]
  misc_feature (1)..(117): NCBI GI NO: 15239652 NR Description: quinone reductase, putative [Arabidopsis thaliana]
  misc_feature (1)..(117): NCBI GI NO: 38636776 NR Description: putative quinone-oxidoreductase QR2
  misc_feature (1)..(117): NCBI GI NO: 7445353 NR Description: hypothetical protein M4I22
  misc_feature (1)..(116): NCBI GI NO: 12484052 NR Description: quinone-oxidoreductase QR2
  misc_feature (1)..(117): NCBI GI NO: 34910128 NR Description: putative 1,4-benzoquinone reductase
  misc_feature (1)..(116): NCBI GI NO: 22327957 NR Description: quinone reductase family [Arabidopsis thaliana]
  misc_feature (1)..(115): NCBI GI NO: 15234512 NR Description: quinone reductase family [Arabidopsis thaliana]
MASQFKAFLEGTIGLWHTQALAGKPAGFFSSTSSQGGGQEETPLTSVTQLVHHGMIFVPVGYTFGDGMYEMEKVKGGSPYGSGTVVGDGSRQPSDLELAQAFHQGKYFAAIAKKLKG

SEQ ID NO: 9152 - DNA, 888 bp, Glycine max
  misc_feature (1)..(888): Ceres Seq. ID no. 12612244
gtcgctggcaagtttcgatatcccacgcaacggtatctccttattcgtgttttttaaaaatttgagctggtttttttgtcgcgtttgtttataacgttggtgtttcttgactcgtgtactagtactagtactacccccaacacaacactcaccaaaccacgctccgattcaaattccaactccgaatcaaaccctagtacaacaatccaacgaaaccttcttcttctcaattctccgatcccatcctcaatggaaaacccggattcctctcttcctctctccatcaagaaggagaacgtcactcccattacctctaaaatcgcggaacttaatgaatcgagatcggagcttctgggcagagttcagagtttgaaacaggatttgcaaagttggaggtcgaagttagatacacaagtcaaggtctatcgcgacgagctgtcagaacttaagaaaacacttaatgttgaagtggaccaacttcgagcagaatttcaagatctgaggactacccttcagcagcaacaagaggatgtcactgctagcttaagaaacttggggcttcaggatgcctcagatgtcaagcatgctccgtcgcaggagacaaagattgaaaaaattgtcaaggaagaacaggtggtggtacctgaagaagataatagcagcaaagtagctgaaacttaaatagctttttaatttgagtatttgctgctcgctgtgtacaccctagagaagctgaatgactctgtattatggtagatatttgatgtgtttgattactactgttgggtataatgcgggacttaagaatcaatggtaaatttcccgttacccttcctcgggtataatcgatattaattgaacaaattatggtatgctttcatttcttcc

SEQ ID NO: 9153 - protein, 143 aa, Glycine max
  peptide (1)..(143): Ceres Seq. ID no. 12612245
  misc_feature (7)..(142): NCBI GI NO: 18175846 NR Description: unknown protein [Arabidopsis thaliana]
  misc_feature (7)..(142): NCBI GI NO: 30683404 NR Description: expressed protein [Arabidopsis thaliana]
  misc_feature (7)..(142): NCBI GI NO: 21592347 NR Description: unknown [Arabidopsis thaliana]
  misc_feature (1)..(109): NCBI GI NO: 29370843 NR Description: unknown [Oryza sativa (japonica cultivar-group)]
  misc_feature (7)..(112): NCBI GI NO: 7485072 NR Description: hypothetical protein - Arabidopsis thaliana
  misc_feature (20)..(114): NCBI GI NO: 22831125 NR Description: contains ESTsD41314
MENPDSSLPLSIKKENVTPITSKIAELNESRSELLGRVQSLKQDLQSWRSKLDTQVKVYRDELSELKKTLNVEVDQLRAEFQDLRTTLQQQQEDVTASLRNLGLQDASDVKHAPSQETKIEKIVKEEQVVVPEEDNSSKVAET

SEQ ID NO: 9154 - DNA, 757 bp, Glycine max
  misc_feature (1)..(757): Ceres Seq. ID no. 13639656
aacaaacatgggaagcaagaaaacctacgaggaagaagaaagcacggctctattttcccattcccaaacacaaacagacttgctgttacccttcaacgagaacgacccacaggacatggtcatataccaagtcctccacgaagccaatgctctcaccaacacattcctccctcagcccaccagaaacataacaaagaagcactacagaggagtccgccgccgtccttggggaaaatacgccgctgagattcgcgactcggcgcgccacggcgccaggatatggctcggcaccttccaaaccgctgaagaggctgccatggcttatgaccgagccgcgttcaagatgaggggctccaaggctttgctcaatttcccagctgaaattgttgctgctgctactgcaacagagttatctttcaaaagtagtagtaataataataataataataataataacaatcccgatgctgtttctgattccagtgctggtagctcttgcacgaacaattccacttgggtaaataggaatcagtcagaaatcacaagtggcacaggttagctaaatggtgttgaagttgaacaattaattgtagaaatctttttttgtttctttttctcaatcgttttggtttgttataactattataattatttgtatctgtctgtccaactggacaacaaaaattaattaattgaatgtgataccatgatcatgcatgggttaaaattataatggttagtgatttttcttcttctt

SEQ ID NO: 9155 - protein, 185 aa, Glycine max
  peptide (1)..(185): Ceres Seq. ID no. 13639657
  misc_feature (66)..(129): Pfam Name: Pfam Description:  AP2 domain
  misc_feature (24)..(161): NCBI GI NO: 7531180 NR Description: PATHOGENESIS-RELATED GENES TRANSCRIPTIONALACTIVATOR PTI5
  misc_feature (66)..(147): NCBI GI NO: 34909594 NR Description: P0046E05.31
  misc_feature (14)..(51): NCBI GI NO: 34909594 NR Description: P0046E05.31
  misc_feature (4)..(129): NCBI GI NO: 21554205 NR Description: ethylene response factor ERF1
  misc_feature (4)..(129): NCBI GI NO: 15229405 NR Description: ethylene response factor 1 (ERF1)
  misc_feature (66)..(165): NCBI GI NO: 14140141 NR Description: putative AP2-related transcription factor
  misc_feature (47)..(159): NCBI GI NO: 12003376 NR Description: Avr9/Cf-9 rapidly elicited protein 1
  misc_feature (66)..(171): NCBI GI NO: 38346167 NR Description: OSJNBa0079A21.14
  misc_feature (7)..(127): NCBI GI NO: 40060531 NR Description: putative ethylene response factor 4
  misc_feature (66)..(183): NCBI GI NO: 18414897 NR Description: ethylene responsive element binding factor 1
TNMGSKKTYEEEESTALFSHSQTQTDLLLPFNENDPQDMVIYQVLHEANALTNTFLPQPTRNITKKHYRGVRRRPWGKYAAEIRDSARHGARIWLGTFQTAEEAAMAYDRAAFKMRGSKALLNFPAEIVAAATATELSFKSSSNNNNNNNNNNPDAVSDSSAGSSCTNNSTWVNRNQSEITSGTG

SEQ ID NO: 9156 - protein, 183 aa, Glycine max
  peptide (1)..(183): Ceres Seq. ID no. 13639658
  misc_feature (64)..(127): Pfam Name: Pfam Description:  AP2 domain
  misc_feature (22)..(159): NCBI GI NO: 7531180 NR Description: PATHOGENESIS-RELATED GENES TRANSCRIPTIONALACTIVATOR PTI5
  misc_feature (64)..(145): NCBI GI NO: 34909594 NR Description: P0046E05.31
  misc_feature (12)..(49): NCBI GI NO: 34909594 NR Description: P0046E05.31
  misc_feature (2)..(127): NCBI GI NO: 21554205 NR Description: ethylene response factor ERF1
  misc_feature (2)..(127): NCBI GI NO: 15229405 NR Description: ethylene response factor 1 (ERF1)
  misc_feature (64)..(163): NCBI GI NO: 14140141 NR Description: putative AP2-related transcription factor
  misc_feature (45)..(157): NCBI GI NO: 12003376 NR Description: Avr9/Cf-9 rapidly elicited protein 1
  misc_feature (64)..(169): NCBI GI NO: 38346167 NR Description: OSJNBa0079A21.14
  misc_feature (5)..(125): NCBI GI NO: 40060531 NR Description: putative ethylene response factor 4
  misc_feature (64)..(181): NCBI GI NO: 18414897 NR Description: ethylene responsive element binding factor 1
MGSKKTYEEEESTALFSHSQTQTDLLLPFNENDPQDMVIYQVLHEANALTNTFLPQPTRNITKKHYRGVRRRPWGKYAAEIRDSARHGARIWLGTFQTAEEAAMAYDRAAFKMRGSKALLNFPAEIVAAATATELSFKSSSNNNNNNNNNNPDAVSDSSAGSSCTNNSTWVNRNQSEITSGTG

SEQ ID NO: 9157 - protein, 147 aa, Glycine max
  peptide (1)..(147): Ceres Seq. ID no. 13639659
  misc_feature (28)..(91): Pfam Name: Pfam Description:  AP2 domain
  misc_feature (1)..(123): NCBI GI NO: 7531180 NR Description: PATHOGENESIS-RELATED GENES TRANSCRIPTIONALACTIVATOR PTI5
  misc_feature (28)..(109): NCBI GI NO: 34909594 NR Description: P0046E05.31
  misc_feature (1)..(13): NCBI GI NO: 34909594 NR Description: P0046E05.31
  misc_feature (1)..(91): NCBI GI NO: 21554205 NR Description: ethylene response factor ERF1
  misc_feature (1)..(91): NCBI GI NO: 15229405 NR Description: ethylene response factor 1 (ERF1)
  misc_feature (28)..(127): NCBI GI NO: 14140141 NR Description: putative AP2-related transcription factor
  misc_feature (9)..(121): NCBI GI NO: 12003376 NR Description: Avr9/Cf-9 rapidly elicited protein 1
  misc_feature (28)..(133): NCBI GI NO: 38346167 NR Description: OSJNBa0079A21.14
  misc_feature (1)..(89): NCBI GI NO: 40060531 NR Description: putative ethylene response factor 4
  misc_feature (28)..(145): NCBI GI NO: 18414897 NR Description: ethylene responsive element binding factor 1
MVIYQVLHEANALTNTFLPQPTRNITKKHYRGVRRRPWGKYAAEIRDSARHGARIWLGTFQTAEEAAMAYDRAAFKMRGSKALLNFPAEIVAAATATELSFKSSSNNNNNNNNNNPDAVSDSSAGSSCTNNSTWVNRNQSEITSGTG

SEQ ID NO: 9158 - DNA, 1017 bp, Glycine max
  misc_feature (1)..(1017): Ceres Seq. ID no. 15168314
actcttgtactgtcttagatctcgtttctctcttcgactcgtccacactttgtcgtcgttcccaatcgcaggccatatcgccgggggcattcccgccgtatcatccttgcctcttaccgaacactgaaacggggaattactcaggagagcttcgcaatcccactaacagctgctacccgcggttttggttttttcgctagtatcaatctattcttcatccctgttgatcaagaatgcaattctttggggggtctgagattagtccttcacctcctgctccgacagcttcaggaaacaatggccatatgatgtatgtgttcaataggaatggtgtgtgcctgctctatagggagtggaatcgtcccttgcggacattggatgcccagcaagaccaaaagttaatgtttggtctacttttctctctgaagtcattaactgccaagatggaccccactagtgctgttgagaaaggaaaccttggtatgccacagttacctggccaaggttgttcatttcacagtttccgcactaatacgtacaaacttagtttcatggaaagtccttctggaataaagatcatcttggtgactcatcctagaactggtgatctacgggaatccttaaagtatatctacaatttgtatgttgaatatgttgtcaagaatccgctctatacacctggatctcctattaggtgtgagctgttcaatacaacgttggaccagtatgtgagaggcatttcatagatgctgagttgtttccaatcaatagtgtggtttttacgccttgttttgcatggtgtatgtgagaggcattgcatagaagccgagttgtttccattcaacactattgatgacttgtgtggtgtaacgccttgtttgtcatggtggtcactacattgttgttagtcagaaacttttagggagttttcttaagcttgagctgtaccttttttgttacagataacactagtgatactccattttaattgaatcctacaatttatgttgccctgtt

SEQ ID NO: 9159 - protein, 170 aa, Glycine max
  peptide (1)..(170): Ceres Seq. ID no. 15168315
  misc_feature (24)..(169): Pfam Name: Pfam Description:  Sybindin-like family
  misc_feature (1)..(170): NCBI GI NO: 15223752 NR Description: expressed protein [Arabidopsis thaliana]
  misc_feature (8)..(167): NCBI GI NO: 34914656 NR Description: P0504D03.19
  misc_feature (24)..(169): NCBI GI NO: 20881775 NR Description: similar to MUM2 protein
  misc_feature (24)..(169): NCBI GI NO: 10864021 NR Description: MUM2 protein [Homo sapiens]
  misc_feature (26)..(167): NCBI GI NO: 24651330 NR Description: CG1359-PA [Drosophila melanogaster]
  misc_feature (52)..(167): NCBI GI NO: 28828451 NR Description: similar to Homo sapiens (Human). MUM2 protein
  misc_feature (24)..(170): NCBI GI NO: 19114985 NR Description: hypothetical protein [Schizosaccharomyces pombe]
  misc_feature (94)..(170): NCBI GI NO: 19115000 NR Description: conserved hypothetical protein
  misc_feature (13)..(134): NCBI GI NO: 31200485 NR Description: ENSANGP00000018747 [Anopheles gambiae]
  misc_feature (53)..(166): NCBI GI NO: 40740926 NR Description: hypothetical protein AN8828.2
MQFFGGSEISPSPPAPTASGNNGHMMYVFNRNGVCLLYREWNRPLRTLDAQQDQKLMFGLLFSLKSLTAKMDPTSAVEKGNLGMPQLPGQGCSFHSFRTNTYKLSFMESPSGIKIILVTHPRTGDLRESLKYIYNLYVEYVVKNPLYTPGSPIRCELFNTTLDQYVRGIS

SEQ ID NO: 9160 - protein, 146 aa, Glycine max
  peptide (1)..(146): Ceres Seq. ID no. 15168316
  misc_feature (1)..(145): Pfam Name: Pfam Description:  Sybindin-like family
  misc_feature (1)..(146): NCBI GI NO: 15223752 NR Description: expressed protein [Arabidopsis thaliana]
  misc_feature (1)..(143): NCBI GI NO: 34914656 NR Description: P0504D03.19
  misc_feature (1)..(145): NCBI GI NO: 20881775 NR Description: similar to MUM2 protein
  misc_feature (1)..(145): NCBI GI NO: 10864021 NR Description: MUM2 protein [Homo sapiens]
  misc_feature (2)..(143): NCBI GI NO: 24651330 NR Description: CG1359-PA [Drosophila melanogaster]
  misc_feature (28)..(143): NCBI GI NO: 28828451 NR Description: similar to Homo sapiens (Human). MUM2 protein
  misc_feature (1)..(146): NCBI GI NO: 19114985 NR Description: hypothetical protein [Schizosaccharomyces pombe]
  misc_feature (70)..(146): NCBI GI NO: 19115000 NR Description: conserved hypothetical protein
  misc_feature (1)..(110): NCBI GI NO: 31200485 NR Description: ENSANGP00000018747 [Anopheles gambiae]
  misc_feature (29)..(142): NCBI GI NO: 40740926 NR Description: hypothetical protein AN8828.2
MMYVFNRNGVCLLYREWNRPLRTLDAQQDQKLMFGLLFSLKSLTAKMDPTSAVEKGNLGMPQLPGQGCSFHSFRTNTYKLSFMESPSGIKIILVTHPRTGDLRESLKYIYNLYVEYVVKNPLYTPGSPIRCELFNTTLDQYVRGIS

SEQ ID NO: 9161 - protein, 145 aa, Glycine max
  peptide (1)..(145): Ceres Seq. ID no. 15168317
  misc_feature (1)..(144): Pfam Name: Pfam Description:  Sybindin-like family
  misc_feature (1)..(145): NCBI GI NO: 15223752 NR Description: expressed protein [Arabidopsis thaliana]
  misc_feature (1)..(142): NCBI GI NO: 34914656 NR Description: P0504D03.19
  misc_feature (1)..(144): NCBI GI NO: 20881775 NR Description: similar to MUM2 protein
  misc_feature (1)..(144): NCBI GI NO: 10864021 NR Description: MUM2 protein [Homo sapiens]
  misc_feature (1)..(142): NCBI GI NO: 24651330 NR Description: CG1359-PA [Drosophila melanogaster]
  misc_feature (27)..(142): NCBI GI NO: 28828451 NR Description: similar to Homo sapiens (Human). MUM2 protein
  misc_feature (1)..(145): NCBI GI NO: 19114985 NR Description: hypothetical protein [Schizosaccharomyces pombe]
  misc_feature (69)..(145): NCBI GI NO: 19115000 NR Description: conserved hypothetical protein
  misc_feature (1)..(109): NCBI GI NO: 31200485 NR Description: ENSANGP00000018747 [Anopheles gambiae]
  misc_feature (28)..(141): NCBI GI NO: 40740926 NR Description: hypothetical protein AN8828.2
MYVFNRNGVCLLYREWNRPLRTLDAQQDQKLMFGLLFSLKSLTAKMDPTSAVEKGNLGMPQLPGQGCSFHSFRTNTYKLSFMESPSGIKIILVTHPRTGDLRESLKYIYNLYVEYVVKNPLYTPGSPIRCELFNTTLDQYVRGIS

SEQ ID NO: 9162 - DNA, 741 bp, Glycine max
  misc_feature (1)..(741): Ceres Seq. ID no. 15172821
aaacccatcatcgctcccagaaagttgtatcggtttctcttcttaagttttcttcaccatctcaagattaagctttttgggttcattacaggaaaatgttgaaattcttgtcgagagtgaaaatcgagttcaacgcgttggacccgcgaacggcgtcgtgtatggagtttctggcgcaatgcaactcgcggaaggcgaaggagtcgaacccggcgtgcgaagtggaggtgaagcgcgtgagggaagagcgcgcgccgcagataacggtgacgttcgttaacggcgttgaggaagtgttcgacgcgacggcgacgccggctcagagcatacgaaacttgattctggaaaagggtcagcacctcgagacggagcagatgttccgcgaagctggggaaccctggcccgttgtcatccccgacgaggagctctcgcaaatcgcaccccctaccaaaccaaggaaagcagaagacaagaagcaataggcaatagctgaatattgttgagcttattaacggctatggattcttctgggttttgtcaccctttctcttgtttctttttggtgggagatatggcatctgattcctgctgttggtgctgcataccttgctgtatttcagcacttaattattgaatgcataactatgtatgagttgcacaataatgtaaggctctgaattgctaattttgaaactgtaatcttgtcatgattgtttttgcttagtttggtttccagaggat

SEQ ID NO: 9163 - protein, 128 aa, Glycine max
  peptide (1)..(128): Ceres Seq. ID no. 15172822
  misc_feature (1)..(128): NCBI GI NO: 27450530 NR Description: hypothetical protein [Prunus persica]
  misc_feature (1)..(127): NCBI GI NO: 15241817 NR Description: expressed protein [Arabidopsis thaliana]
  misc_feature (1)..(119): NCBI GI NO: 9758335 NR Description: gene_id:MIJ24.9~unknown protein
MLKFLSRVKIEFNALDPRTASCMEFLAQCNSRKAKESNPACEVEVKRVREERAPQITVTFVNGVEEVFDATATPAQSIRNLILEKGQHLETEQMFREAGEPWPVVIPDEELSQIAPPTKPRKAEDKKQ

SEQ ID NO: 9164 - protein, 106 aa, Glycine max
  peptide (1)..(106): Ceres Seq. ID no. 15172823
  misc_feature (1)..(106): NCBI GI NO: 27450530 NR Description: hypothetical protein [Prunus persica]
  misc_feature (1)..(105): NCBI GI NO: 15241817 NR Description: expressed protein [Arabidopsis thaliana]
  misc_feature (1)..(97): NCBI GI NO: 9758335 NR Description: gene_id:MIJ24.9~unknown protein
MEFLAQCNSRKAKESNPACEVEVKRVREERAPQITVTFVNGVEEVFDATATPAQSIRNLILEKGQHLETEQMFREAGEPWPVVIPDEELSQIAPPTKPRKAEDKKQ

SEQ ID NO: 9165 - DNA, 1168 bp, Glycine max
  misc_feature (1)..(1168): Ceres Seq. ID no. 14316451
aactatcccttcttcctttctctcttctattctcattcgcatttcgcaccaagtcaatggcttccaccaccactctctccttccacttcccatatccaacaacatcgctctcttctcactctcaactttcgccctctccgcaaccttccccattcaaaccctgcaccgttgcttcccgccaaaacctctgcacctccaacaccctctctgtctctgcttccagaaaaaactcaacctctccaatttttctcgctacggcttctggcaaatctgagcctatgctccctcctttcaacgttttgattactggctcaaccaaaggaatagggtatgcgttggcgaaagagtttttaaaagctggtgacaacgtcctgatttgctcaagatcagatgaaagggtaaagactgctgtccagaacttgagagtagaatttggggagcagcatgtgtggggaactaaatgtgatgtaaaaaatgcagaggatgtgaagaatttagtttcatttgctcaagaaaaaatgaaatacattgatatatggataaacaatgctggatcaaatgcatatagctataagccacttgttgaggcttcagatgaagatcttattgaggtggttacaacaaatacacttggcttgatgatatgttgtcgagaggcaatcaagatgatggtgaaccaacctcgtggaggtcatattttcaatatagacggggcaggttcagatggaagaccaactcctaggtttgctgcatatggagcaacaaagagaagtgtggtgcatttaacaaagtcattacaggcagaattgcggatgcaagatgttaaaaacgttgtggtgcataatctttcgccaggaatggttacaacggatcttctcatgtctggtgttaatacaaagcaggcaaagtttttcattaatgtcttggcagaaccagctgaagtggttgcagaatacttagttccaaacattagatctgtccctgcaaatggatcaatgaaaccaacatacattcgattcctcacgggtttgaaagcctattcccagatattttcaagattggcattcggcgcaagaaggaatcgatacattcttgaagattgaactgcataaatatttgtgctatgtgcaacttttatttcttgttttaaatatctattcatcccccc

SEQ ID NO: 9166 - protein, 366 aa, Glycine max
  peptide (1)..(366): Ceres Seq. ID no. 14316452
  misc_feature (37)..(366): NCBI GI NO: 18414726 NR Description: short-chain dehydrogenase/reductase family protein
  misc_feature (93)..(366): NCBI GI NO: 29244639 NR Description: putative oxidoreductase protein
  misc_feature (37)..(351): NCBI GI NO: 10178029 NR Description: gene_id:MUG13
  misc_feature (96)..(330): NCBI GI NO: 18413962 NR Description: short-chain dehydrogenase/reductase family protein
  misc_feature (93)..(362): NCBI GI NO: 21673969 NR Description: oxidoreductase
  misc_feature (96)..(366): NCBI GI NO: 34904226 NR Description: P0443E07.30
  misc_feature (131)..(330): NCBI GI NO: 7485669 NR Description: hypothetical protein F17N18
  misc_feature (94)..(332): NCBI GI NO: 22971619 NR Description: hypothetical protein [Chloroflexus aurantiacus]
  misc_feature (100)..(300): NCBI GI NO: 31213111 NR Description: ENSANGP00000021713 [Anopheles gambiae]
  misc_feature (100)..(314): NCBI GI NO: 14521852 NR Description: 3-OXOACYL-
LSLLPFSLLFSFAFRTKSMASTTTLSFHFPYPTTSLSSHSQLSPSPQPSPFKPCTVASRQNLCTSNTLSVSASRKNSTSPIFLATASGKSEPMLPPFNVLITGSTKGIGYALAKEFLKAGDNVLICSRSDERVKTAVQNLRVEFGEQHVWGTKCDVKNAEDVKNLVSFAQEKMKYIDIWINNAGSNAYSYKPLVEASDEDLIEVVTTNTLGLMICCREAIKMMVNQPRGGHIFNIDGAGSDGRPTPRFAAYGATKRSVVHLTKSLQAELRMQDVKNVVVHNLSPGMVTTDLLMSGVNTKQAKFFINVLAEPAEVVAEYLVPNIRSVPANGSMKPTYIRFLTGLKAYSQIFSRLAFGARRNRYILED

SEQ ID NO: 9167 - protein, 348 aa, Glycine max
  peptide (1)..(348): Ceres Seq. ID no. 14316453
  misc_feature (19)..(348): NCBI GI NO: 18414726 NR Description: short-chain dehydrogenase/reductase family protein
  misc_feature (75)..(348): NCBI GI NO: 29244639 NR Description: putative oxidoreductase protein
  misc_feature (19)..(333): NCBI GI NO: 10178029 NR Description: gene_id:MUG13
  misc_feature (78)..(312): NCBI GI NO: 18413962 NR Description: short-chain dehydrogenase/reductase family protein
  misc_feature (75)..(344): NCBI GI NO: 21673969 NR Description: oxidoreductase
  misc_feature (78)..(348): NCBI GI NO: 34904226 NR Description: P0443E07.30
  misc_feature (113)..(312): NCBI GI NO: 7485669 NR Description: hypothetical protein F17N18
  misc_feature (76)..(314): NCBI GI NO: 22971619 NR Description: hypothetical protein [Chloroflexus aurantiacus]
  misc_feature (82)..(282): NCBI GI NO: 31213111 NR Description: ENSANGP00000021713 [Anopheles gambiae]
  misc_feature (82)..(296): NCBI GI NO: 14521852 NR Description: 3-OXOACYL-
MASTTTLSFHFPYPTTSLSSHSQLSPSPQPSPFKPCTVASRQNLCTSNTLSVSASRKNSTSPIFLATASGKSEPMLPPFNVLITGSTKGIGYALAKEFLKAGDNVLICSRSDERVKTAVQNLRVEFGEQHVWGTKCDVKNAEDVKNLVSFAQEKMKYIDIWINNAGSNAYSYKPLVEASDEDLIEVVTTNTLGLMICCREAIKMMVNQPRGGHIFNIDGAGSDGRPTPRFAAYGATKRSVVHLTKSLQAELRMQDVKNVVVHNLSPGMVTTDLLMSGVNTKQAKFFINVLAEPAEVVAEYLVPNIRSVPANGSMKPTYIRFLTGLKAYSQIFSRLAFGARRNRYILED

SEQ ID NO: 9168 - protein, 274 aa, Glycine max
  peptide (1)..(274): Ceres Seq. ID no. 14316454
  misc_feature (1)..(274): NCBI GI NO: 18414726 NR Description: short-chain dehydrogenase/reductase family protein
  misc_feature (1)..(274): NCBI GI NO: 29244639 NR Description: putative oxidoreductase protein
  misc_feature (1)..(259): NCBI GI NO: 10178029 NR Description: gene_id:MUG13
  misc_feature (4)..(238): NCBI GI NO: 18413962 NR Description: short-chain dehydrogenase/reductase family protein
  misc_feature (1)..(270): NCBI GI NO: 21673969 NR Description: oxidoreductase
  misc_feature (4)..(274): NCBI GI NO: 34904226 NR Description: P0443E07.30
  misc_feature (39)..(238): NCBI GI NO: 7485669 NR Description: hypothetical protein F17N18
  misc_feature (2)..(240): NCBI GI NO: 22971619 NR Description: hypothetical protein [Chloroflexus aurantiacus]
  misc_feature (8)..(208): NCBI GI NO: 31213111 NR Description: ENSANGP00000021713 [Anopheles gambiae]
  misc_feature (8)..(222): NCBI GI NO: 14521852 NR Description: 3-OXOACYL-
MLPPFNVLITGSTKGIGYALAKEFLKAGDNVLICSRSDERVKTAVQNLRVEFGEQHVWGTKCDVKNAEDVKNLVSFAQEKMKYIDIWINNAGSNAYSYKPLVEASDEDLIEVVTTNTLGLMICCREAIKMMVNQPRGGHIFNIDGAGSDGRPTPRFAAYGATKRSVVHLTKSLQAELRMQDVKNVVVHNLSPGMVTTDLLMSGVNTKQAKFFINVLAEPAEVVAEYLVPNIRSVPANGSMKPTYIRFLTGLKAYSQIFSRLAFGARRNRYILED

SEQ ID NO: 9169 - DNA, 1058 bp, Glycine max
  misc_feature (1)..(1058): Ceres Seq. ID no. 15168326
accaaacaacacatcaacagagaagccatgaaaactctgatttgtgcaccaaacgcagccttcaatctctcaaaactttctccatggaaaccaaacttccaagcttatcatcatcaccctacacacaaactcaactaccccttcaccacattaaagccacgtgctagtgccaaaggcttttcttccacggggcctccaactgttgcaagtgataatgccaatactactaagaagcccatgagaagaaaaaacaatgatgatgatgatgatgagcttccccaggaagttatgtacaggctaataggtaggatcttgttctctgttggggtgccaatggggttgggtttggccttgttgggcctttttggagagctcaaggaaaagcatgtgtgggatgcaccactgtggttaccctttttgacaacactcttgacttttggagcttcctctcttgggattgcgtatggagcactttccacaagtttggatgctgaaaaggaaggttcttttcttggggtggaacagcttcagaaaaattgggtagagatgtggcaggagaaacaagaggatgaaaactaggcagcctaatcaaggagaaattattagctaggtagtctccgaccaccatcacgtgtttatggcccccaccaatctctacatggcacacatgacacgagtttttcaatttatatgaaagaattaatagcattgaattatgtgttatgtgatgattagttgagattatgatggtccccgaggatgtagtaattcctgcttaatagtgataattttgcaaatgccaaatgggttcatgatgttgcatgagataaattagttctgtacatcaacatacccaagtggtaattttgcaccatataagaagtcagaaccataattattgttgtagttgttattataagtggtgaaagatttgagtagtttgtactaggtcttaggtttaaactttgttgctatcattgcataaaagaaaattgctcttctaagtgaaaatagattgtagtattggtctaccttgccatacgacaattttattcaat

SEQ ID NO: 9170 - protein, 192 aa, Glycine max
  peptide (1)..(192): Ceres Seq. ID no. 15168327
  misc_feature (10)..(188): NCBI GI NO: 15237263 NR Description: expressed protein [Arabidopsis thaliana]
  misc_feature (86)..(189): NCBI GI NO: 37536396 NR Description: hypothetical protein
  misc_feature (56)..(185): NCBI GI NO: 7487141 NR Description: hypothetical protein T18B16
  misc_feature (40)..(189): NCBI GI NO: 16329473 NR Description: unknown protein [Synechocystis sp. PCC 6803]
  misc_feature (47)..(186): NCBI GI NO: 23041124 NR Description: hypothetical protein
  misc_feature (47)..(189): NCBI GI NO: 17228243 NR Description: hypothetical protein [Nostoc sp. PCC 7120]
  misc_feature (92)..(189): NCBI GI NO: 23127194 NR Description: hypothetical protein [Nostoc punctiforme]
TKQHINREAMKTLICAPNAAFNLSKLSPWKPNFQAYHHHPTHKLNYPFTTLKPRASAKGFSSTGPPTVASDNANTTKKPMRRKNNDDDDDELPQEVMYRLIGRILFSVGVPMGLGLALLGLFGELKEKHVWDAPLWLPFLTTLLTFGASSLGIAYGALSTSLDAEKEGSFLGVEQLQKNWVEMWQEKQEDEN

SEQ ID NO: 9171 - protein, 183 aa, Glycine max
  peptide (1)..(183): Ceres Seq. ID no. 15168328
  misc_feature (1)..(179): NCBI GI NO: 15237263 NR Description: expressed protein [Arabidopsis thaliana]
  misc_feature (77)..(180): NCBI GI NO: 37536396 NR Description: hypothetical protein
  misc_feature (47)..(176): NCBI GI NO: 7487141 NR Description: hypothetical protein T18B16
  misc_feature (31)..(180): NCBI GI NO: 16329473 NR Description: unknown protein [Synechocystis sp. PCC 6803]
  misc_feature (38)..(177): NCBI GI NO: 23041124 NR Description: hypothetical protein
  misc_feature (38)..(180): NCBI GI NO: 17228243 NR Description: hypothetical protein [Nostoc sp. PCC 7120]
  misc_feature (83)..(180): NCBI GI NO: 23127194 NR Description: hypothetical protein [Nostoc punctiforme]
MKTLICAPNAAFNLSKLSPWKPNFQAYHHHPTHKLNYPFTTLKPRASAKGFSSTGPPTVASDNANTTKKPMRRKNNDDDDDELPQEVMYRLIGRILFSVGVPMGLGLALLGLFGELKEKHVWDAPLWLPFLTTLLTFGASSLGIAYGALSTSLDAEKEGSFLGVEQLQKNWVEMWQEKQEDEN

SEQ ID NO: 9172 - protein, 113 aa, Glycine max
  peptide (1)..(113): Ceres Seq. ID no. 15168329
  misc_feature (1)..(109): NCBI GI NO: 15237263 NR Description: expressed protein [Arabidopsis thaliana]
  misc_feature (7)..(110): NCBI GI NO: 37536396 NR Description: hypothetical protein
  misc_feature (1)..(106): NCBI GI NO: 7487141 NR Description: hypothetical protein T18B16
  misc_feature (1)..(110): NCBI GI NO: 16329473 NR Description: unknown protein [Synechocystis sp. PCC 6803]
  misc_feature (1)..(107): NCBI GI NO: 23041124 NR Description: hypothetical protein
  misc_feature (1)..(110): NCBI GI NO: 17228243 NR Description: hypothetical protein [Nostoc sp. PCC 7120]
  misc_feature (13)..(110): NCBI GI NO: 23127194 NR Description: hypothetical protein [Nostoc punctiforme]
MRRKNNDDDDDELPQEVMYRLIGRILFSVGVPMGLGLALLGLFGELKEKHVWDAPLWLPFLTTLLTFGASSLGIAYGALSTSLDAEKEGSFLGVEQLQKNWVEMWQEKQEDEN

SEQ ID NO: 9173 - DNA, 765 bp, Glycine max
  misc_feature (1)..(765): Ceres Seq. ID no. 14316428
acaatctctcatcccttgtttgtttccatttcttgcttctattatttacttgtttttctctagtattcatggtgctcgctggtaaacttagtactgaacttggggtgaaagcatccgctaccaaatggttcaacctcttaaccacgcaacttcaccatgttcagaacctttgtgaaagagtgcatgaaaccaagctgcatgatggtgatgactggcacggtgttggtaattcggttaaacactggacttatgtcatagacggcaaggtacacacatgtcaggagagtattgaagccattgatgaagagaacaaaacaatcaaattcatgctcttcggtggagatattagtcagcactacaagagctttaagctgatctttgaagtgactgataagaacgatggcggtgctgctgttaaatggactcttgaatatgagaagatcaaagagaatattgatcctccacatggctacatggactactttgacaaatccactaaagagatggatgcttatcttgtcaaggcatagctcctaaaattatcaagaaaataacaacaaaggagtaatggatttggctttgaggatatatatatatatatatatatatatatatatatatatatatatatatatatataagtgttttatctatatagttattgtgatgtttgaaatgtagaataaaattataatatgcgtgtttgcttctgtccatccttcgtttctgtcgaataaatgcaggttggtggattgaagtatatgt

SEQ ID NO: 9174 - protein, 175 aa, Glycine max
  peptide (1)..(175): Ceres Seq. ID no. 14316429
  misc_feature (24)..(175): Pfam Name: Pfam Description:  Pathogenesis-related protein Bet v I family
  misc_feature (23)..(175): NCBI GI NO: 20975622 NR Description: putative ripening related protein
  misc_feature (23)..(175): NCBI GI NO: 5739198 NR Description: ripening related protein [Glycine max]
  misc_feature (23)..(174): NCBI GI NO: 34452233 NR Description: ripening-related protein [Pisum sativum]
  misc_feature (23)..(173): NCBI GI NO: 7406710 NR Description: putative ripening-related protein [Vitis vinifera]
  misc_feature (25)..(173): NCBI GI NO: 15241110 NR Description: Bet v I allergen family [Arabidopsis thaliana]
  misc_feature (27)..(175): NCBI GI NO: 13172242 NR Description: major latex-like protein [Prunus persica]
  misc_feature (23)..(175): NCBI GI NO: 3164115 NR Description: major latex-like protein [Rubus idaeus]
  misc_feature (25)..(173): NCBI GI NO: 15223275 NR Description: major latex protein (MLP)-related
  misc_feature (25)..(173): NCBI GI NO: 21542137 NR Description: MLP-like protein 31
  misc_feature (25)..(173): NCBI GI NO: 25317068 NR Description: hypothetical protein F15H11.9
NLSSLVCFHFLLLLFTCFSLVFMVLAGKLSTELGVKASATKWFNLLTTQLHHVQNLCERVHETKLHDGDDWHGVGNSVKHWTYVIDGKVHTCQESIEAIDEENKTIKFMLFGGDISQHYKSFKLIFEVTDKNDGGAAVKWTLEYEKIKENIDPPHGYMDYFDKSTKEMDAYLVKA

SEQ ID NO: 9175 - protein, 153 aa, Glycine max
  peptide (1)..(153): Ceres Seq. ID no. 14316430
  misc_feature (2)..(153): Pfam Name: Pfam Description:  Pathogenesis-related protein Bet v I family
  misc_feature (1)..(153): NCBI GI NO: 20975622 NR Description: putative ripening related protein
  misc_feature (1)..(153): NCBI GI NO: 5739198 NR Description: ripening related protein [Glycine max]
  misc_feature (1)..(152): NCBI GI NO: 34452233 NR Description: ripening-related protein [Pisum sativum]
  misc_feature (1)..(151): NCBI GI NO: 7406710 NR Description: putative ripening-related protein [Vitis vinifera]
  misc_feature (3)..(151): NCBI GI NO: 15241110 NR Description: Bet v I allergen family [Arabidopsis thaliana]
  misc_feature (5)..(153): NCBI GI NO: 13172242 NR Description: major latex-like protein [Prunus persica]
  misc_feature (1)..(153): NCBI GI NO: 3164115 NR Description: major latex-like protein [Rubus idaeus]
  misc_feature (3)..(151): NCBI GI NO: 15223275 NR Description: major latex protein (MLP)-related
  misc_feature (3)..(151): NCBI GI NO: 21542137 NR Description: MLP-like protein 31
  misc_feature (3)..(151): NCBI GI NO: 25317068 NR Description: hypothetical protein F15H11.9
MVLAGKLSTELGVKASATKWFNLLTTQLHHVQNLCERVHETKLHDGDDWHGVGNSVKHWTYVIDGKVHTCQESIEAIDEENKTIKFMLFGGDISQHYKSFKLIFEVTDKNDGGAAVKWTLEYEKIKENIDPPHGYMDYFDKSTKEMDAYLVKA

SEQ ID NO: 9176 - DNA, 958 bp, Glycine max
  misc_feature (1)..(958): Ceres Seq. ID no. 14306809
cattactttcaggtttcatttcaaaatattctctctctcctcttaaagcaaaacccttaattattaccaacgaccacacaccacagccactttcatcaatttccttaatccccacctccacataacaacaacaacgaactaacgccaccacattcattctttccttctttgtgcctacaatactactactactactactaattctacatggatggcaactcttttggaaacgtgccacccccaccaatacaagttcctgataacttggctatctcctcctcctcttcgccaactcccacgacatcatctccgtctccgacaccctctggaggctttcggtaccgcgggacgcggtgccggagcggaaagtgggtgtcggagataagggagccacgtaaaacgaatcgcatttggctggggacttacccgacagcggaaatggctgcggcggcatatgatgtcgccgcactcgcgttgaagggtcccgacacgcccgtcaacttccctaattcgatactgtcgtaccctattcctgcttcattgtcctccacggacattcgcgccgcggctgcggccgcggcgcaggctaggatcgtgagggcgccgcaggagagtgaggaaacggtaaaccctgatgatggcgggcaagggttatcggagaggcgtgaggagtacatttatgaggatgagttgttgaacatgccgaatttgctcgatgaaatggccagaggaatgcaggttagtccccttaggatcacttcctattcttcagatgattcgcctgggaattctgatggagataacctttggagttataccctttgatcactgatttgttgtttgttcagtgagtgagtatggtaatttgttttgtgtttgtttgaaagttcgagtcttgattatgtatgttcaaccttgttaaatatttgaaaggagggctttataacgggattgtggg

SEQ ID NO: 9177 - protein, 205 aa, Glycine max
  peptide (1)..(205): Ceres Seq. ID no. 14306810
  misc_feature (45)..(103): Pfam Name: Pfam Description:  AP2 domain
  misc_feature (45)..(203): NCBI GI NO: 25404394 NR Description: hypothetical protein F16M19.1
  misc_feature (12)..(203): NCBI GI NO: 15242262 NR Description: C-repeat/DRE binding protein, putative
  misc_feature (45)..(203): NCBI GI NO: 15222031 NR Description: C-repeat/DRE binding protein, putative
  misc_feature (45)..(192): NCBI GI NO: 8493594 NR Description: Contains similarity to transcriptional activatorCBF1 from Arabidopsis thaliana gb| U77378 and an AP2 PF|00847domain
  misc_feature (45)..(203): NCBI GI NO: 15227980 NR Description: C-repeat/DRE binding protein, putative
  misc_feature (45)..(204): NCBI GI NO: 37536218 NR Description: putative transcription factor
  misc_feature (26)..(193): NCBI GI NO: 38605844 NR Description: OSJNBb0034G17.2
  misc_feature (6)..(203): NCBI GI NO: 15242244 NR Description: C-repeat/DRE binding protein, putative
  misc_feature (28)..(203): NCBI GI NO: 1899058 NR Description: transcriptional activator CBF1
  misc_feature (1)..(197): NCBI GI NO: 14140163 NR Description: putative AP2 domain containing protein
MDGNSFGNVPPPPIQVPDNLAISSSSSPTPTTSSPSPTPSGGFRYRGTRCRSGKWVSEIREPRKTNRIWLGTYPTAEMAAAAYDVAALALKGPDTPVNFPNSILSYPIPASLSSTDIRAAAAAAAQARIVRAPQESEETVNPDDGGQGLSERREEYIYEDELLNMPNLLDEMARGMQVSPLRITSYSSDDSPGNSDGDNLWSYTL

SEQ ID NO: 9178 - protein, 128 aa, Glycine max
  peptide (1)..(128): Ceres Seq. ID no. 14306811
  misc_feature (1)..(126): NCBI GI NO: 25404394 NR Description: hypothetical protein F16M19.1
  misc_feature (1)..(126): NCBI GI NO: 15242262 NR Description: C-repeat/DRE binding protein, putative
  misc_feature (1)..(126): NCBI GI NO: 15222031 NR Description: C-repeat/DRE binding protein, putative
  misc_feature (1)..(115): NCBI GI NO: 8493594 NR Description: Contains similarity to transcriptional activatorCBF1 from Arabidopsis thaliana gb| U77378 and an AP2 PF|00847domain
  misc_feature (1)..(126): NCBI GI NO: 15227980 NR Description: C-repeat/DRE binding protein, putative
  misc_feature (1)..(127): NCBI GI NO: 37536218 NR Description: putative transcription factor
  misc_feature (1)..(116): NCBI GI NO: 38605844 NR Description: OSJNBb0034G17.2
  misc_feature (1)..(126): NCBI GI NO: 15242244 NR Description: C-repeat/DRE binding protein, putative
  misc_feature (1)..(126): NCBI GI NO: 1899058 NR Description: transcriptional activator CBF1
  misc_feature (1)..(120): NCBI GI NO: 14140163 NR Description: putative AP2 domain containing protein
MAAAAYDVAALALKGPDTPVNFPNSILSYPIPASLSSTDIRAAAAAAAQARIVRAPQESEETVNPDDGGQGLSERREEYIYEDELLNMPNLLDEMARGMQVSPLRITSYSSDDSPGNSDGDNLWSYTL

SEQ ID NO: 9179 - DNA, 809 bp, Glycine max
  misc_feature (1)..(809): Ceres Seq. ID no. 15175411
aatttctggtctatttggttacgatggaatatcaattccaccatagtttaggttcgaacgccgttgccaaaaaatagatacttgtttcttattcacgtagtattttaatacttagtcaaacacgatagcatgaacccaaaatttttgacaattgtttctcaacaagagagattttgattttagcagaaaagcaatggcaagtgcgttgggtagcagagttgaatctgttcgaaactctcacttactaagcttttcgctcaactccattagatccttgagttcttcttcttcatccgccgtttcttctgctcagaaccctaagactaagaaatcgaagcgaagaaagaagaacttgttcgatgtggctcagttcttacctaactggggaatcggctaccacatggccaagactcactggaatgaagtttcttacgaaatcactaaaatcaatctctacaaggatggaagacatggaaaagcatggggggttgcttttaaaaatggcttgccattagcagatgctccaaaaaaaattagtggagttcacaagcgctgttggagatacctaccaaatgtagtaaaagaattagaaagttcaacaaacttaatgagttccgcagacagtgactttgggtttttaggtcatcgacattagcccgtccatgtcttttcaatttggcttagttgttttcgataatggtatcgtttcttagtagatcatgtaatattccttacgcattcatgcaaggtgcttaattaagtttctttctttttgatttttaattagataaatgaactctcgaccatgc

SEQ ID NO: 9180 - protein, 153 aa, Glycine max
  peptide (1)..(153): Ceres Seq. ID no. 15175412
  misc_feature (7)..(136): NCBI GI NO: 15237795 NR Description: expressed protein [Arabidopsis thaliana]
  misc_feature (7)..(137): NCBI GI NO: 18423383 NR Description: expressed protein [Arabidopsis thaliana]
MASALGSRVESVRNSHLLSFSLNSIRSLSSSSSSAVSSAQNPKTKKSKRRKKNLFDVAQFLPNWGIGYHMAKTHWNEVSYEITKINLYKDGRHGKAWGVAFKNGLPLADAPKKISGVHKRCWRYLPNVVKELESSTNLMSSADSDFGFLGHRH

SEQ ID NO: 9181 - protein, 84 aa, Glycine max
  peptide (1)..(84): Ceres Seq. ID no. 15175413
  misc_feature (1)..(67): NCBI GI NO: 15237795 NR Description: expressed protein [Arabidopsis thaliana]
  misc_feature (1)..(68): NCBI GI NO: 18423383 NR Description: expressed protein [Arabidopsis thaliana]
MAKTHWNEVSYEITKINLYKDGRHGKAWGVAFKNGLPLADAPKKISGVHKRCWRYLPNVVKELESSTNLMSSADSDFGFLGHRH

SEQ ID NO: 9182 - DNA, 843 bp, Glycine max
  misc_feature (1)..(843): Ceres Seq. ID no. 15175208
ttattcatttcattgttcatactcactcgcacctaactccgccatggcttctcttcccaccactttcgctataaccaaatctgggttttcaaattctggtttctgccttaacgatgtcagtgtttcaaaaatcatcctccataaacaaggtggaccactctctggtcaagatcaaaccatacaacttctctctcaatctaaatcgtcaagggaccatgcaaacatctttaaccagaaggcctctaacaattcaagctacgtatagtgatggtggaaggcccagcagtgctagtgtatttgttggtgggtttctcttgggaggattaatagttggtactcttggttgcgtgtatgcacctcagatcagcaaggccctagctggagctgacaggaaggagttaatgagaaaattgccaaagtttatatatgatgaagaaaaggctttagagaaaacccggaaagtactggctgagaagattgaacaactgaatgctgccatagatgatgtttctgctcagctaaggtcagaggaggcctcaaatggagtagctgtgaactctgatgaaattgaagctgccacatgagactgctgcagtgatgtcatggtacacaatcggctattactctgtccagtaaaaatcttgttggtacaaaatgtatttgaatttcttgtaatatctttctatttcttcttaataataaactaagttgttttctgtttttggccaccgctactgtgggtatatagtcgtactgtttttatggctgatttcttgtgttctattggccatttagttatagtgaaaagtttccatgattggcataatactggaatttctagtt

SEQ ID NO: 9183 - protein, 156 aa, Glycine max
  peptide (1)..(156): Ceres Seq. ID no. 15175209
  misc_feature (24)..(154): NCBI GI NO: 18400762 NR Description: expressed protein [Arabidopsis thaliana]
  misc_feature (42)..(156): NCBI GI NO: 10176975 NR Description: protein; similar to unknown protein
  misc_feature (42)..(156): NCBI GI NO: 17065406 NR Description: Unknown protein [Arabidopsis thaliana]
  misc_feature (42)..(156): NCBI GI NO: 22326856 NR Description: protein; similar to unknown protein (gb|AAF26969
  misc_feature (34)..(156): NCBI GI NO: 15233017 NR Description: expressed protein [Arabidopsis thaliana]
MSVFQKSSSINKVDHSLVKIKPYNFSLNLNRQGTMQTSLTRRPLTIQATYSDGGRPSSASVFVGGFLLGGLIVGTLGCVYAPQISKALAGADRKELMRKLPKFIYDEEKALEKTRKVLAEKIEQLNAAIDDVSAQLRSEEASNGVAVNSDEIEAAT

SEQ ID NO: 9184 - protein, 122 aa, Glycine max
  peptide (1)..(122): Ceres Seq. ID no. 15175210
  misc_feature (1)..(120): NCBI GI NO: 18400762 NR Description: expressed protein [Arabidopsis thaliana]
  misc_feature (8)..(122): NCBI GI NO: 10176975 NR Description: protein; similar to unknown protein
  misc_feature (8)..(122): NCBI GI NO: 17065406 NR Description: Unknown protein [Arabidopsis thaliana]
  misc_feature (8)..(122): NCBI GI NO: 22326856 NR Description: protein; similar to unknown protein (gb|AAF26969
  misc_feature (1)..(122): NCBI GI NO: 15233017 NR Description: expressed protein [Arabidopsis thaliana]
MQTSLTRRPLTIQATYSDGGRPSSASVFVGGFLLGGLIVGTLGCVYAPQISKALAGADRKELMRKLPKFIYDEEKALEKTRKVLAEKIEQLNAAIDDVSAQLRSEEASNGVAVNSDEIEAAT

SEQ ID NO: 9185 - protein, 87 aa, Glycine max
  peptide (1)..(87): Ceres Seq. ID no. 15175211
YSFHCSYSLAPNSAMASLPTTFAITKSGFSNSGFCLNDVSVSKIILHKQGGPLSGQDQTIQLLSQSKSSRDHANIFNQKASNNSSYV

SEQ ID NO: 9186 - DNA, 805 bp, Glycine max
  misc_feature (1)..(805): Ceres Seq. ID no. 13594418
agaaaatgtaaagatttcttaatggagaagtgagcggtgagaggaaacagaagagagaagagcaatcggtgagtgaatggaatggattcaggtcctccggcgaacgatttgtgttcagtgtgccatggcaactttcatattccatgccaagccaattgttctcactggttttgcggaaattgcataatgcttgtgtggcagcacggatcagtgggttgttcatgcaagtgcccactgtgtcgtcgagccatcagtctcttagtccccacagaagagtctctgaggcaacagcaggaccccgaagtttcccagattctgtcaaagattcatgcctataaccgtttcttcggtggccaacccaccactctctatcagagactgcgagatcttccctttctcttgcacaggctgctcagggaattcctccaccctcacagatcccttcctcttctcattcgcgctcgcgtctttgttgttatgatagcgagtgttatatacctcttcagccctattgacatcattcctgaagggatattaggagtagttggtttcttagatgatctcctaattgtgctcatctgcttcctacatgttgctgccctttatagatcagtactctacctccgtcatgggggttcctgaacatgttctacaattttacaggtaaaatgagatgatgatgcctagataggtgccggatatggatagtgggcattattctttcattttcaaaattgaactactttgttttctatgtacatagacaagttcaatttcaaatagtggaattagtaatggaaattac

SEQ ID NO: 9187 - protein, 186 aa, Glycine max
  peptide (1)..(186): Ceres Seq. ID no. 13594419
  misc_feature (11)..(53): Pfam Name: RING finger Pfam Description: Zinc finger, C3HC4 type
  misc_feature (3)..(186): NCBI GI NO: 18395127 NR Description: zinc finger
  misc_feature (3)..(186): NCBI GI NO: 21554064 NR Description: unknown [Arabidopsis thaliana]
  misc_feature (3)..(186): NCBI GI NO: 18410010 NR Description: zinc finger
  misc_feature (5)..(185): NCBI GI NO: 28376707 NR Description: unknown protein
  misc_feature (59)..(186): NCBI GI NO: 25518502 NR Description: hypothetical protein F12K8
  misc_feature (11)..(185): NCBI GI NO: 33604158 NR Description: Unknown (protein for MGC:65779) [Danio rerio]
  misc_feature (1)..(176): NCBI GI NO: 18418331 NR Description: zinc finger
  misc_feature (1)..(176): NCBI GI NO: 21553438 NR Description: unknown [Arabidopsis thaliana]
  misc_feature (1)..(176): NCBI GI NO: 26453304 NR Description: unknown protein [Arabidopsis thaliana]
  misc_feature (11)..(182): NCBI GI NO: 26334893 NR Description: unnamed protein product [Mus musculus]
MDSGPPANDLCSVCHGNFHIPCQANCSHWFCGNCIMLVWQHGSVGCSCKCPLCRRAISLLVPTEESLRQQQDPEVSQILSKIHAYNRFFGGQPTTLYQRLRDLPFLLHRLLREFLHPHRSLPLLIRARVFVVMIASVIYLFSPIDIIPEGILGVVGFLDDLLIVLICFLHVAALYRSVLYLRHGGS

SEQ ID NO: 9188 - protein, 151 aa, Glycine max
  peptide (1)..(151): Ceres Seq. ID no. 13594420
  misc_feature (1)..(151): NCBI GI NO: 18395127 NR Description: zinc finger
  misc_feature (1)..(151): NCBI GI NO: 21554064 NR Description: unknown [Arabidopsis thaliana]
  misc_feature (1)..(151): NCBI GI NO: 18410010 NR Description: zinc finger
  misc_feature (1)..(150): NCBI GI NO: 28376707 NR Description: unknown protein
  misc_feature (24)..(151): NCBI GI NO: 25518502 NR Description: hypothetical protein F12K8
  misc_feature (1)..(150): NCBI GI NO: 33604158 NR Description: Unknown (protein for MGC:65779) [Danio rerio]
  misc_feature (1)..(141): NCBI GI NO: 18418331 NR Description: zinc finger
  misc_feature (1)..(141): NCBI GI NO: 21553438 NR Description: unknown [Arabidopsis thaliana]
  misc_feature (1)..(141): NCBI GI NO: 26453304 NR Description: unknown protein [Arabidopsis thaliana]
  misc_feature (1)..(147): NCBI GI NO: 26334893 NR Description: unnamed protein product [Mus musculus]
MLVWQHGSVGCSCKCPLCRRAISLLVPTEESLRQQQDPEVSQILSKIHAYNRFFGGQPTTLYQRLRDLPFLLHRLLREFLHPHRSLPLLIRARVFVVMIASVIYLFSPIDIIPEGILGVVGFLDDLLIVLICFLHVAALYRSVLYLRHGGS

SEQ ID NO: 9189 - DNA, 1026 bp, Glycine max
  misc_feature (1)..(1026): Ceres Seq. ID no. 15170337
aaaaaacgcagccaaaacagcaacaaacgacagagattcttcctcaacacaatcgaaaaaaaaaaaagcttccgattctaaaaccagaacaacaaaaaagtaaaacacacacgtcattttaaaacatttcatttttttggttatttatttaaagagcgagtgttgtaacaaatggtgaagccgaagagcgtggagaaacccgcagaggaacaacaacaacgaagtgtttcatcgtacagaggagtacggaagaggaagtgggggaagtacgtgtcggaaattaggttacccaacagccgtcaaaggatttggttgggttcctatgacagcgccgagaaggcggcacgcgcgttcgacgctgccatgttctgcttacgtggcagcggcgccaaatttaatttcccgagtgacccacccaacatcgccggcggggggaacatgacctcctcccagattcagatcgcggcggcgcgtttcgccaattcggagccccgaaatgagcgttcggatcaacccgtggagtctttaacttcggatgaggaaacggcatcgtttccggtcatttcggatacggatacatcatctcctcctctctcagacgtgacgttccaaaacgacgccgaattagtgactgggtcgttccctgatatgttttcggatttcgggtcgggcgattttgtgcccgatttctccgattttccgagcttcgacgatttcagccgggacttcttcttgcatgaacttccgggtttcaatttcggagaagagaacttggatggattgataattcaggactcgttcttgtggaatttctaagcgggtcagggttcggataattttattatatccgaacccgatatcagaatccggatcggatccgggtttgggttgggtcaaattttgcgtgccaagccctccatgtgttagtagttagtgatgattatagttttttttttaacgtaccaagtagtcaaatgtttcgattttttgggatgcgaatcataattcatttatttgtcatgactc

SEQ ID NO: 9190 - protein, 214 aa, Glycine max
  peptide (1)..(214): Ceres Seq. ID no. 15170338
  misc_feature (20)..(82): Pfam Name: Pfam Description:  AP2 domain
  misc_feature (20)..(168): NCBI GI NO: 22329667 NR Description: AP2 domain transcription factor, putative
  misc_feature (20)..(168): NCBI GI NO: 29893536 NR Description: putative AP2 domain transcription factor
  misc_feature (12)..(190): NCBI GI NO: 15222040 NR Description: AP2 domain transcription factor, putative
  misc_feature (22)..(151): NCBI GI NO: 22326940 NR Description: AP2 domain transcription factor, putative
  misc_feature (1)..(194): NCBI GI NO: 21908036 NR Description: DRE binding factor 1 [Zea mays]
  misc_feature (15)..(135): NCBI GI NO: 18417729 NR Description: AP2 domain transcription factor, putative
  misc_feature (16)..(214): NCBI GI NO: 15224024 NR Description: AP2 domain transcription factor, putative
  misc_feature (13)..(135): NCBI GI NO: 25407707 NR Description: hypothetical protein AT4g31060
  misc_feature (1)..(192): NCBI GI NO: 15236020 NR Description: AP2 domain transcription factor, putative
  misc_feature (8)..(175): NCBI GI NO: 15239501 NR Description: AP2 domain transcription factor TINY
MVKPKSVEKPAEEQQQRSVSSYRGVRKRKWGKYVSEIRLPNSRQRIWLGSYDSAEKAARAFDAAMFCLRGSGAKFNFPSDPPNIAGGGNMTSSQIQIAAARFANSEPRNERSDQPVESLTSDEETASFPVISDTDTSSPPLSDVTFQNDAELVTGSFPDMFSDFGSGDFVPDFSDFPSFDDFSRDFFLHELPGFNFGEENLDGLIIQDSFLWNF

SEQ ID NO: 9191 - protein, 150 aa, Glycine max
  peptide (1)..(150): Ceres Seq. ID no. 15170339
  misc_feature (1)..(104): NCBI GI NO: 22329667 NR Description: AP2 domain transcription factor, putative
  misc_feature (1)..(104): NCBI GI NO: 29893536 NR Description: putative AP2 domain transcription factor
  misc_feature (1)..(126): NCBI GI NO: 15222040 NR Description: AP2 domain transcription factor, putative
  misc_feature (1)..(87): NCBI GI NO: 22326940 NR Description: AP2 domain transcription factor, putative
  misc_feature (1)..(130): NCBI GI NO: 21908036 NR Description: DRE binding factor 1 [Zea mays]
  misc_feature (1)..(71): NCBI GI NO: 18417729 NR Description: AP2 domain transcription factor, putative
  misc_feature (1)..(150): NCBI GI NO: 15224024 NR Description: AP2 domain transcription factor, putative
  misc_feature (1)..(71): NCBI GI NO: 25407707 NR Description: hypothetical protein AT4g31060
  misc_feature (1)..(128): NCBI GI NO: 15236020 NR Description: AP2 domain transcription factor, putative
  misc_feature (1)..(111): NCBI GI NO: 15239501 NR Description: AP2 domain transcription factor TINY
MFCLRGSGAKFNFPSDPPNIAGGGNMTSSQIQIAAARFANSEPRNERSDQPVESLTSDEETASFPVISDTDTSSPPLSDVTFQNDAELVTGSFPDMFSDFGSGDFVPDFSDFPSFDDFSRDFFLHELPGFNFGEENLDGLIIQDSFLWNF

SEQ ID NO: 9192 - protein, 125 aa, Glycine max
  peptide (1)..(125): Ceres Seq. ID no. 15170340
  misc_feature (1)..(79): NCBI GI NO: 22329667 NR Description: AP2 domain transcription factor, putative
  misc_feature (1)..(79): NCBI GI NO: 29893536 NR Description: putative AP2 domain transcription factor
  misc_feature (1)..(101): NCBI GI NO: 15222040 NR Description: AP2 domain transcription factor, putative
  misc_feature (1)..(62): NCBI GI NO: 22326940 NR Description: AP2 domain transcription factor, putative
  misc_feature (1)..(105): NCBI GI NO: 21908036 NR Description: DRE binding factor 1 [Zea mays]
  misc_feature (1)..(46): NCBI GI NO: 18417729 NR Description: AP2 domain transcription factor, putative
  misc_feature (1)..(125): NCBI GI NO: 15224024 NR Description: AP2 domain transcription factor, putative
  misc_feature (1)..(46): NCBI GI NO: 25407707 NR Description: hypothetical protein AT4g31060
  misc_feature (1)..(103): NCBI GI NO: 15236020 NR Description: AP2 domain transcription factor, putative
  misc_feature (1)..(86): NCBI GI NO: 15239501 NR Description: AP2 domain transcription factor TINY
MTSSQIQIAAARFANSEPRNERSDQPVESLTSDEETASFPVISDTDTSSPPLSDVTFQNDAELVTGSFPDMFSDFGSGDFVPDFSDFPSFDDFSRDFFLHELPGFNFGEENLDGLIIQDSFLWNF

SEQ ID NO: 9193 - DNA, 1848 bp, Glycine max
  misc_feature (1)..(1848): Ceres Seq. ID no. 12608629
aatggaaaactcagacgaacaacttcccttctctccacaaaaccctaacaatgccgaagaagaagacgacgacatcgaagagccagaagacgaagacgaagaagaggaggaagacgacgacgacgacgacggcgtcgtttcgcaggagcaatccccattgtcgcggctgcgcgagcagcgttcgaagctggaaaccctgtcccggcgattggcgtcggagctggtcccaatccgagtccacgacgtgctgattcgcggcaacacgaagacgaaggagtgggtgatcgaggcggagctcaagctcctcgaggaggccaccaacgtgcaggagctcattcgcgcctccgaaatcgccctcgccaggctccgcggcctcgagattttcgacaccgccgagctcacgctccaggccgggccgccggagctgcctcacaccgccaatgtcgtcgtcgacgtcgtcgagtccgccaacagaatctccggcgatttcggcgtttacaccaaacccgcgactagttcttggtctgctgaaggtggtcttaagtacaaaaacttattaggttatggtgatctatgggatgcctcgttggcctatggtgccaaccaaacaacagaggtaagtgtaggagtgtatgcccctcgactgaaaggattgttaaccccctttgtagcacgactatccatgctttctcaagattggcaagagttctcttcatataaagagcagttgctaggcttgtctcttggcttgatctcaacaaggcaccatgacttagtctacactcttggatggcgtaccttgactgatccatcacaaatgtcatccaggtctataaggaggcaacttgggcatggtttactatcatccttgaagtatacatttaaaattgacaggagaaactcaccaattaggcctacaaatggatatgcttttctttctaccactcactttggtggccttacaccagatcatcggagcttgcgatttctgcgccaggaatttgatgttcgctgtgccatcccctttgggttttataatacggcacttaaccttgggatttctgccagtgctgtttttccctgggggcatggcttcatgaacaagccatctccgcttcctgaaaggttttatttgggtggtgatttctctccagtttgcacccttggaggaccaataacattgtggggatttaaaactaggggattaggtcctactgaaccacgaagacgaagtagagatggaattattgatgacagtgatgattcctctagatgggacttcattggaggagatctagctgttactgcatttgcagacctgtcttttgatcttccaattaggtggttgagagatcatggaattcatggtcatgtttttgctggtgctgggaatactgctaaattaactcagaatgaatataagcacttttcacctcggaagttcttagaatcctttcgaacatctgtgggatgtggatttgttgttcccactagactttttcgcctagagggtaatttctattacatactcaagcagaatgagcatgatcgtgggaaaactggatttaggttcagcttctcggctccttcttagtgattgagtccacagctgagattctttttctttttcatttattctgtagcattaaacatttttgctgcctgtcaatggatggctagtactcttctttttcttctcgtttaaaagccagactgaaatcgggaaagggcactgttccagtgttgaggatttataggatcagtttttggaaaagacattacccctcgagacatataagccgatgctcattgcatgacgatggtgtatgaaattccaaattattcgcg

SEQ ID NO: 9194 - protein, 530 aa, Glycine max
  peptide (1)..(530): Ceres Seq. ID no. 12608630
  misc_feature (1)..(530): NCBI GI NO: 15228433 NR Description: unknown protein; protein id: At3g11070
  misc_feature (1)..(530): NCBI GI NO: 18414910 NR Description: expressed protein; protein id: At5g05520
  misc_feature (1)..(530): NCBI GI NO: 21553544 NR Description: unknown [Arabidopsis thaliana]
  misc_feature (47)..(383): NCBI GI NO: 38511778 NR Description: CGI-51 protein [Silurana tropicalis]
  misc_feature (58)..(383): NCBI GI NO: 30519943 NR Description: RIKEN cDNA 1110030L07 [Mus musculus]
  misc_feature (58)..(383): NCBI GI NO: 28436784 NR Description: Unknown (protein for MGC:53756) [Xenopus laevis]
  misc_feature (58)..(383): NCBI GI NO: 14043738 NR Description: Unknown (protein for MGC:14085) [Homo sapiens]
  misc_feature (58)..(383): NCBI GI NO: 4929571 NR Description: CGI-51 protein [Homo sapiens]
  misc_feature (58)..(383): NCBI GI NO: 5596714 NR Description: dJ796I17.2 (CGI-51) [Homo sapiens]
  misc_feature (58)..(383): NCBI GI NO: 31542301 NR Description: CGI-51 protein [Homo sapiens]
MENSDEQLPFSPQNPNNAEEEDDDIEEPEDEDEEEEEDDDDDDGVVSQEQSPLSRLREQRSKLETLSRRLASELVPIRVHDVLIRGNTKTKEWVIEAELKLLEEATNVQELIRASEIALARLRGLEIFDTAELTLQAGPPELPHTANVVVDVVESANRISGDFGVYTKPATSSWSAEGGLKYKNLLGYGDLWDASLAYGANQTTEVSVGVYAPRLKGLLTPFVARLSMLSQDWQEFSSYKEQLLGLSLGLISTRHHDLVYTLGWRTLTDPSQMSSRSIRRQLGHGLLSSLKYTFKIDRRNSPIRPTNGYAFLSTTHFGGLTPDHRSLRFLRQEFDVRCAIPFGFYNTALNLGISASAVFPWGHGFMNKPSPLPERFYLGGDFSPVCTLGGPITLWGFKTRGLGPTEPRRRSRDGIIDDSDDSSRWDFIGGDLAVTAFADLSFDLPIRWLRDHGIHGHVFAGAGNTAKLTQNEYKHFSPRKFLESFRTSVGCGFVVPTRLFRLEGNFYYILKQNEHDRGKTGFRFSFSAPS

SEQ ID NO: 9195 - protein, 303 aa, Glycine max
  peptide (1)..(303): Ceres Seq. ID no. 12608631
  misc_feature (1)..(303): NCBI GI NO: 15228433 NR Description: unknown protein; protein id: At3g11070
  misc_feature (1)..(303): NCBI GI NO: 18414910 NR Description: expressed protein; protein id: At5g05520
  misc_feature (1)..(303): NCBI GI NO: 21553544 NR Description: unknown [Arabidopsis thaliana]
  misc_feature (1)..(156): NCBI GI NO: 38511778 NR Description: CGI-51 protein [Silurana tropicalis]
  misc_feature (1)..(156): NCBI GI NO: 30519943 NR Description: RIKEN cDNA 1110030L07 [Mus musculus]
  misc_feature (1)..(156): NCBI GI NO: 28436784 NR Description: Unknown (protein for MGC:53756) [Xenopus laevis]
  misc_feature (1)..(156): NCBI GI NO: 14043738 NR Description: Unknown (protein for MGC:14085) [Homo sapiens]
  misc_feature (1)..(156): NCBI GI NO: 4929571 NR Description: CGI-51 protein [Homo sapiens]
  misc_feature (1)..(156): NCBI GI NO: 5596714 NR Description: dJ796I17.2 (CGI-51) [Homo sapiens]
  misc_feature (1)..(156): NCBI GI NO: 31542301 NR Description: CGI-51 protein [Homo sapiens]
MLSQDWQEFSSYKEQLLGLSLGLISTRHHDLVYTLGWRTLTDPSQMSSRSIRRQLGHGLLSSLKYTFKIDRRNSPIRPTNGYAFLSTTHFGGLTPDHRSLRFLRQEFDVRCAIPFGFYNTALNLGISASAVFPWGHGFMNKPSPLPERFYLGGDFSPVCTLGGPITLWGFKTRGLGPTEPRRRSRDGIIDDSDDSSRWDFIGGDLAVTAFADLSFDLPIRWLRDHGIHGHVFAGAGNTAKLTQNEYKHFSPRKFLESFRTSVGCGFVVPTRLFRLEGNFYYILKQNEHDRGKTGFRFSFSAPS

SEQ ID NO: 9196 - DNA, 876 bp, Glycine max
  misc_feature (1)..(876): Ceres Seq. ID no. 13594355
agtttatcaatggcacttctccacccaaatcttcttcccactttcaattccaacactcttacctttccttccatcaaactcaaaccctcactctcgcacgtgccttctccaacccccacacgcttcagtctctctgtttccgcggcggaaaccaccgcttttgccgcccctcccactccccaacctgagaagcttggagttgtagttaagccaacggagaagccgagacttgtgttgaagttcatatggatggagaagaacattggaattgcgcttgaccagatggtaccgggccatggcaccattcctctgagcccatattacttttggccccgaaaagatgcctgggaagagctcaaggagttgcttgagaacaagccttggcatatgccttctcccatcagtggaggccaaactgtagccagtattttggtcaggcttcttatagccttggtaaggaaagttggggttggagctggaccgagcgttgggttgcggcacgtccttgggaagttcgggttcgaggtcagaccaccaaaacaacaaaactcaacggccatgggcaggtgcaaaaaaccaaattagacaagatgaaccaaaatgaaagcaaagtagccttggctaaacctacactatcaaacgggaaggaaaggaaaacggtacttcagggctgtcaaagaacaatgtatccaaatagcccattctaatttgatggtttatggtttcttcttgcacttctttgggggtttattttccatattttgcttggtgagaatctaccttttggtgtgtacgttccactaggagagacttcacttattgtctgcttttgcatggtgcatatgattatgaatatgaattccctagttttggttg

SEQ ID NO: 9197 - protein, 194 aa, Glycine max
  peptide (1)..(194): Ceres Seq. ID no. 13594356
  misc_feature (63)..(128): NCBI GI NO: 28380123 NR Description: Plastid-specific 30S ribosomal protein 3
  misc_feature (3)..(128): NCBI GI NO: 21554275 NR Description: plastid-specific ribosomal protein 3 precursor
  misc_feature (9)..(128): NCBI GI NO: 15242377 NR Description: ribosomal protein 3 precursor-related protein
  misc_feature (3)..(128): NCBI GI NO: 18409071 NR Description: expressed protein [Arabidopsis thaliana]
  misc_feature (61)..(128): NCBI GI NO: 6136559 NR Description: Plastid-specific 30S ribosomal protein 3
  misc_feature (61)..(128): NCBI GI NO: 38344967 NR Description: OSJNBa0072F16.12
  misc_feature (76)..(128): NCBI GI NO: 11466424 NR Description: hypothetical chloroplast RF65 [Mesostigma viride]
  misc_feature (76)..(128): NCBI GI NO: 11465817 NR Description: ORF99 [Porphyra purpurea]
  misc_feature (75)..(128): NCBI GI NO: 11467621 NR Description: unknown [Guillardia theta]
  misc_feature (66)..(128): NCBI GI NO: 33861996 NR Description: conserved hypothetical protein
SLSMALLHPNLLPTFNSNTLTFPSIKLKPSLSHVPSPTPTRFSLSVSAAETTAFAAPPTPQPEKLGVVVKPTEKPRLVLKFIWMEKNIGIALDQMVPGHGTIPLSPYYFWPRKDAWEELKELLENKPWHMPSPISGGQTVASILVRLLIALVRKVGVGAGPSVGLRHVLGKFGFEVRPPKQQNSTAMGRCKKPN

SEQ ID NO: 9198 - protein, 191 aa, Glycine max
  peptide (1)..(191): Ceres Seq. ID no. 13594357
  misc_feature (60)..(125): NCBI GI NO: 28380123 NR Description: Plastid-specific 30S ribosomal protein 3
  misc_feature (1)..(125): NCBI GI NO: 21554275 NR Description: plastid-specific ribosomal protein 3 precursor
  misc_feature (6)..(125): NCBI GI NO: 15242377 NR Description: ribosomal protein 3 precursor-related protein
  misc_feature (1)..(125): NCBI GI NO: 18409071 NR Description: expressed protein [Arabidopsis thaliana]
  misc_feature (58)..(125): NCBI GI NO: 6136559 NR Description: Plastid-specific 30S ribosomal protein 3
  misc_feature (58)..(125): NCBI GI NO: 38344967 NR Description: OSJNBa0072F16.12
  misc_feature (73)..(125): NCBI GI NO: 11466424 NR Description: hypothetical chloroplast RF65 [Mesostigma viride]
  misc_feature (73)..(125): NCBI GI NO: 11465817 NR Description: ORF99 [Porphyra purpurea]
  misc_feature (72)..(125): NCBI GI NO: 11467621 NR Description: unknown [Guillardia theta]
  misc_feature (63)..(125): NCBI GI NO: 33861996 NR Description: conserved hypothetical protein
MALLHPNLLPTFNSNTLTFPSIKLKPSLSHVPSPTPTRFSLSVSAAETTAFAAPPTPQPEKLGVVVKPTEKPRLVLKFIWMEKNIGIALDQMVPGHGTIPLSPYYFWPRKDAWEELKELLENKPWHMPSPISGGQTVASILVRLLIALVRKVGVGAGPSVGLRHVLGKFGFEVRPPKQQNSTAMGRCKKPN

SEQ ID NO: 9199 - protein, 111 aa, Glycine max
  peptide (1)..(111): Ceres Seq. ID no. 13594358
  misc_feature (1)..(45): NCBI GI NO: 28380123 NR Description: Plastid-specific 30S ribosomal protein 3
  misc_feature (1)..(45): NCBI GI NO: 21554275 NR Description: plastid-specific ribosomal protein 3 precursor
  misc_feature (1)..(45): NCBI GI NO: 15242377 NR Description: ribosomal protein 3 precursor-related protein
  misc_feature (1)..(45): NCBI GI NO: 18409071 NR Description: expressed protein [Arabidopsis thaliana]
  misc_feature (1)..(45): NCBI GI NO: 6136559 NR Description: Plastid-specific 30S ribosomal protein 3
  misc_feature (1)..(45): NCBI GI NO: 38344967 NR Description: OSJNBa0072F16.12
  misc_feature (1)..(45): NCBI GI NO: 11466424 NR Description: hypothetical chloroplast RF65 [Mesostigma viride]
  misc_feature (1)..(45): NCBI GI NO: 11465817 NR Description: ORF99 [Porphyra purpurea]
  misc_feature (1)..(45): NCBI GI NO: 11467621 NR Description: unknown [Guillardia theta]
  misc_feature (1)..(45): NCBI GI NO: 33861996 NR Description: conserved hypothetical protein
MEKNIGIALDQMVPGHGTIPLSPYYFWPRKDAWEELKELLENKPWHMPSPISGGQTVASILVRLLIALVRKVGVGAGPSVGLRHVLGKFGFEVRPPKQQNSTAMGRCKKPN

SEQ ID NO: 9200 - DNA, 1535 bp, Glycine max
  misc_feature (1)..(1535): Ceres Seq. ID no. 13594435
attcacttctgatttgattcttttccccactttcagaacatcaacaaagtagagagagagaaccaaaaaaaaaaaactactactcaacaaaaagagctagagagaagataccccttaaatcctaatttctacctcaaagaaagtactcttcaaacattttgtattcactgaagaaggatctttgcacttgcacctgcagccatctaccatggttaagtcagaacacaagatcaaaaccgaaccatcatcaaaggcaatgcggttatcttcaccctcatcatcaacatcagattgcaagaagaagaagtacaagggagtgagaatgaggagctggggatcatgggtttctgagattagagcaccaaatcagaaaacaagaatatggttaggctcttattcaaccccagaagctgcagctagagcctatgatgctgcacttctatgccttaaaggctcctcagcaaatctcaatttccctttaagctcttcacaacaatacattcctggagatgctgtcatgtcccccaaatcaatccaaagagttgctgcggccgccgcaaatagtttcatcgacaatgccaccactcccccttccccacctccggcttcgaccccatcatcatcatcattggcctcatccccctcattggtttcttctccctcggatcaaatcgatgacgacgccttgctgatatcgtctttccaagcctacactagttgtggtcaagcaaatcaatcaatggctgtgaatgtgatggagccttggtacacctttggtgatggtcttcaatcccccaagtatgctgatcagatgctaagtggtgatttcttccatgtcgattcttcccatctgcttgatgatctatacgaagaaagtgacattcgtttgtggagcttctgctgagaaaaaaaatcaattcaagccacctacaatatttcttcttttctcaaaaattcaattcgtttgtcttcagtggtatagcttaagatgttactgactgtgaccaaattaaaatttgtataccctatgctacataaatggtgcattttagatgaaattcatatagagataagacaattttcggcctctcatgtgaatttctaagagtttgaaattatgtatcatcgatacaaatcttggtatgtcaatgtcatgaatggtttcccatgtgtcacagaatataagggagaaaaaaaaatgtagtcaccaaaatccttaggtataagcaattcgtttcactgtttttggaatgtaactatgggaggagacttttgctattgtgagtatctttggaaggcctttgttgcatgggaaggtatcagagatgcttatttccaattcagtgagaatagggaaccatgtacagagcgtggtaacttgaaaccattggaaaaattgcatcttttctaagccttgtctgctctcccgcgtgcccaaagaacaaagagtgttcccttgttttgatgtttaagtttggtattttataccctattctattcttcttttagatggaaataaatcctggttaattttc

SEQ ID NO: 9201 - protein, 231 aa, Glycine max
  peptide (1)..(231): Ceres Seq. ID no. 15221357
  misc_feature (32)..(94): Pfam Name: Pfam Description:  AP2 domain
  misc_feature (1)..(230): NCBI GI NO: 15224024 NR Description: AP2 domain transcription factor, putative
  misc_feature (1)..(208): NCBI GI NO: 15219452 NR Description: AP2 domain transcription factor TINY, putative
  misc_feature (1)..(168): NCBI GI NO: 15219139 NR Description: transcription factor TINY family
  misc_feature (1)..(168): NCBI GI NO: 21554056 NR Description: TINY-like protein [Arabidopsis thaliana]
  misc_feature (32)..(231): NCBI GI NO: 34902130 NR Description: hypothetical protein
  misc_feature (1)..(161): NCBI GI NO: 15227471 NR Description: AP2 domain transcription factor, putative
  misc_feature (1)..(158): NCBI GI NO: 15235858 NR Description: transcription factor TINY, putative
  misc_feature (15)..(140): NCBI GI NO: 9279711 NR Description: transcription factor TINY-like protein
  misc_feature (15)..(140): NCBI GI NO: 15228171 NR Description: AP2 domain transcription factor TINY, putative
  misc_feature (3)..(192): NCBI GI NO: 37536842 NR Description: putative DNA binding protein
MVKSEHKIKTEPSSKAMRLSSPSSSTSDCKKKKYKGVRMRSWGSWVSEIRAPNQKTRIWLGSYSTPEAAARAYDAALLCLKGSSANLNFPLSSSQQYIPGDAVMSPKSIQRVAAAAANSFIDNATTPPSPPPASTPSSSSLASSPSLVSSPSDQIDDDALLISSFQAYTSCGQANQSMAVNVMEPWYTFGDGLQSPKYADQMLSGDFFHVDSSHLLDDLYEESDIRLWSFC

SEQ ID NO: 9202 - protein, 215 aa, Glycine max
  peptide (1)..(215): Ceres Seq. ID no. 15221358
  misc_feature (16)..(78): Pfam Name: Pfam Description:  AP2 domain
  misc_feature (1)..(214): NCBI GI NO: 15224024 NR Description: AP2 domain transcription factor, putative
  misc_feature (1)..(192): NCBI GI NO: 15219452 NR Description: AP2 domain transcription factor TINY, putative
  misc_feature (1)..(152): NCBI GI NO: 15219139 NR Description: transcription factor TINY family
  misc_feature (1)..(152): NCBI GI NO: 21554056 NR Description: TINY-like protein [Arabidopsis thaliana]
  misc_feature (16)..(215): NCBI GI NO: 34902130 NR Description: hypothetical protein
  misc_feature (1)..(145): NCBI GI NO: 15227471 NR Description: AP2 domain transcription factor, putative
  misc_feature (1)..(142): NCBI GI NO: 15235858 NR Description: transcription factor TINY, putative
  misc_feature (1)..(124): NCBI GI NO: 9279711 NR Description: transcription factor TINY-like protein
  misc_feature (1)..(124): NCBI GI NO: 15228171 NR Description: AP2 domain transcription factor TINY, putative
  misc_feature (1)..(176): NCBI GI NO: 37536842 NR Description: putative DNA binding protein
MRLSSPSSSTSDCKKKKYKGVRMRSWGSWVSEIRAPNQKTRIWLGSYSTPEAAARAYDAALLCLKGSSANLNFPLSSSQQYIPGDAVMSPKSIQRVAAAAANSFIDNATTPPSPPPASTPSSSSLASSPSLVSSPSDQIDDDALLISSFQAYTSCGQANQSMAVNVMEPWYTFGDGLQSPKYADQMLSGDFFHVDSSHLLDDLYEESDIRLWSFC

SEQ ID NO: 9203 - protein, 193 aa, Glycine max
  peptide (1)..(193): Ceres Seq. ID no. 15221359
  misc_feature (1)..(56): Pfam Name: Pfam Description:  AP2 domain
  misc_feature (1)..(192): NCBI GI NO: 15224024 NR Description: AP2 domain transcription factor, putative
  misc_feature (1)..(170): NCBI GI NO: 15219452 NR Description: AP2 domain transcription factor TINY, putative
  misc_feature (1)..(130): NCBI GI NO: 15219139 NR Description: transcription factor TINY family
  misc_feature (1)..(130): NCBI GI NO: 21554056 NR Description: TINY-like protein [Arabidopsis thaliana]
  misc_feature (1)..(193): NCBI GI NO: 34902130 NR Description: hypothetical protein
  misc_feature (1)..(123): NCBI GI NO: 15227471 NR Description: AP2 domain transcription factor, putative
  misc_feature (1)..(120): NCBI GI NO: 15235858 NR Description: transcription factor TINY, putative
  misc_feature (1)..(102): NCBI GI NO: 9279711 NR Description: transcription factor TINY-like protein
  misc_feature (1)..(102): NCBI GI NO: 15228171 NR Description: AP2 domain transcription factor TINY, putative
  misc_feature (1)..(154): NCBI GI NO: 37536842 NR Description: putative DNA binding protein
MRSWGSWVSEIRAPNQKTRIWLGSYSTPEAAARAYDAALLCLKGSSANLNFPLSSSQQYIPGDAVMSPKSIQRVAAAAANSFIDNATTPPSPPPASTPSSSSLASSPSLVSSPSDQIDDDALLISSFQAYTSCGQANQSMAVNVMEPWYTFGDGLQSPKYADQMLSGDFFHVDSSHLLDDLYEESDIRLWSFC

SEQ ID NO: 9204 - DNA, 1283 bp, Glycine max
  misc_feature (1)..(1283): Ceres Seq. ID no. 14311675
gttgtgtgtaagtgtgaagagaagagaatggtagtaggattgaatgtgcctcagccatttctgtcaccagtttgcaagacggcaccttacccacttgatctcatcgccaccgccgcgtccctccacttcggccaccttctccgccgccgcgcgacccaccatctccgccttggggttcttcttcactcctgtttcaagaaactcgctcctttaactcacatttttagattgaacgataagtggtgtcaaagatgctttcaactcaatgggttgaactatcttcaactgtcagccggtgatttgacttcctcatggtcaactagtttctctttctttaatgggggaggagatggaggccgccgctatggaaaggctgggatgtccaactccaagatgtctggaaaagatccatttaatggaaggaaatggacagaaattctccttgctgccaatgttttattttatattgcacaacttgcaacccaaggcaagctattattgtggggagcaaagataaatagtctaattgacaaaggacaactttggagacttgccacgtcttcctttttgcatgccaacatcggacaccttttggtaaattgttattccttgaactcagttggtcctactgtggagagcttcagtggccctcggagatttcttgcagtttactttatctctgcaattgcaagttctgctacgagttattggttctgcagaatgcctgctgtaggtgcatcaggagcaatttttggactagttggatcagttgccgtatttgtattaaggcacaaagaccttgtgggaggtggtaaaaaagatttacaacacatagcccaagtaattgccctcaatatggttattgggctattatccactgggattgacaactggggacatttaggagggttggttggtggagttgctgcatcatggtttattggaccggcatggaaacatgaatccacatcaagtgatggaagaagacttttcattgacactgcaccaatgtataaactcttcaagattaaaagagtacctaagcaatggaaatagaaacatttcattatgtatggaatggaactcataactaatcattgctcgttgtttattggtaaaatgattcactgctgtgagcttctcttaaaatacttaatattgtggggttgtagtacaagtacctgacacgtctgaattattttgtatactttaataaccttcacactgggacattgtatttataaattgtatttgtgtaattggtatccttcattttccctctt

SEQ ID NO: 9205 - protein, 351 aa, Glycine max
  peptide (1)..(351): Ceres Seq. ID no. 14311676
  misc_feature (36)..(342): NCBI GI NO: 30689150 NR Description: membrane protein, Rhomboid family
  misc_feature (83)..(342): NCBI GI NO: 11761473 NR Description: unknown protein [Arabidopsis thaliana]
  misc_feature (83)..(333): NCBI GI NO: 25518651 NR Description: hypothetical protein F4F7
  misc_feature (144)..(314): NCBI GI NO: 28210270 NR Description: conserved membrane protein (rhomboid family)
  misc_feature (165)..(316): NCBI GI NO: 22972591 NR Description: hypothetical protein [Chloroflexus aurantiacus]
  misc_feature (105)..(319): NCBI GI NO: 23020903 NR Description: hypothetical protein
  misc_feature (122)..(314): NCBI GI NO: 23121840 NR Description: hypothetical protein
  misc_feature (169)..(319): NCBI GI NO: 15894241 NR Description: Uncharacterized membrane protein
  misc_feature (139)..(320): NCBI GI NO: 23099378 NR Description: hypothetical protein
  misc_feature (164)..(313): NCBI GI NO: 18310434 NR Description: conserved hypothetical protein
VVCKCEEKRMVVGLNVPQPFLSPVCKTAPYPLDLIATAASLHFGHLLRRRATHHLRLGVLLHSCFKKLAPLTHIFRLNDKWCQRCFQLNGLNYLQLSAGDLTSSWSTSFSFFNGGGDGGRRYGKAGMSNSKMSGKDPFNGRKWTEILLAANVLFYIAQLATQGKLLLWGAKINSLIDKGQLWRLATSSFLHANIGHLLVNCYSLNSVGPTVESFSGPRRFLAVYFISAIASSATSYWFCRMPAVGASGAIFGLVGSVAVFVLRHKDLVGGGKKDLQHIAQVIALNMVIGLLSTGIDNWGHLGGLVGGVAASWFIGPAWKHESTSSDGRRLFIDTAPMYKLFKIKRVPKQWK

SEQ ID NO: 9206 - protein, 342 aa, Glycine max
  peptide (1)..(342): Ceres Seq. ID no. 14311677
  misc_feature (27)..(333): NCBI GI NO: 30689150 NR Description: membrane protein, Rhomboid family
  misc_feature (74)..(333): NCBI GI NO: 11761473 NR Description: unknown protein [Arabidopsis thaliana]
  misc_feature (74)..(324): NCBI GI NO: 25518651 NR Description: hypothetical protein F4F7
  misc_feature (135)..(305): NCBI GI NO: 28210270 NR Description: conserved membrane protein (rhomboid family)
  misc_feature (156)..(307): NCBI GI NO: 22972591 NR Description: hypothetical protein [Chloroflexus aurantiacus]
  misc_feature (96)..(310): NCBI GI NO: 23020903 NR Description: hypothetical protein
  misc_feature (113)..(305): NCBI GI NO: 23121840 NR Description: hypothetical protein
  misc_feature (160)..(310): NCBI GI NO: 15894241 NR Description: Uncharacterized membrane protein
  misc_feature (130)..(311): NCBI GI NO: 23099378 NR Description: hypothetical protein
  misc_feature (155)..(304): NCBI GI NO: 18310434 NR Description: conserved hypothetical protein
MVVGLNVPQPFLSPVCKTAPYPLDLIATAASLHFGHLLRRRATHHLRLGVLLHSCFKKLAPLTHIFRLNDKWCQRCFQLNGLNYLQLSAGDLTSSWSTSFSFFNGGGDGGRRYGKAGMSNSKMSGKDPFNGRKWTEILLAANVLFYIAQLATQGKLLLWGAKINSLIDKGQLWRLATSSFLHANIGHLLVNCYSLNSVGPTVESFSGPRRFLAVYFISAIASSATSYWFCRMPAVGASGAIFGLVGSVAVFVLRHKDLVGGGKKDLQHIAQVIALNMVIGLLSTGIDNWGHLGGLVGGVAASWFIGPAWKHESTSSDGRRLFIDTAPMYKLFKIKRVPKQWK

SEQ ID NO: 9207 - protein, 225 aa, Glycine max
  peptide (1)..(225): Ceres Seq. ID no. 14311678
  misc_feature (1)..(216): NCBI GI NO: 30689150 NR Description: membrane protein, Rhomboid family
  misc_feature (1)..(216): NCBI GI NO: 11761473 NR Description: unknown protein [Arabidopsis thaliana]
  misc_feature (1)..(207): NCBI GI NO: 25518651 NR Description: hypothetical protein F4F7
  misc_feature (18)..(188): NCBI GI NO: 28210270 NR Description: conserved membrane protein (rhomboid family)
  misc_feature (39)..(190): NCBI GI NO: 22972591 NR Description: hypothetical protein [Chloroflexus aurantiacus]
  misc_feature (1)..(193): NCBI GI NO: 23020903 NR Description: hypothetical protein
  misc_feature (1)..(188): NCBI GI NO: 23121840 NR Description: hypothetical protein
  misc_feature (43)..(193): NCBI GI NO: 15894241 NR Description: Uncharacterized membrane protein
  misc_feature (13)..(194): NCBI GI NO: 23099378 NR Description: hypothetical protein
  misc_feature (38)..(187): NCBI GI NO: 18310434 NR Description: conserved hypothetical protein
MSNSKMSGKDPFNGRKWTEILLAANVLFYIAQLATQGKLLLWGAKINSLIDKGQLWRLATSSFLHANIGHLLVNCYSLNSVGPTVESFSGPRRFLAVYFISAIASSATSYWFCRMPAVGASGAIFGLVGSVAVFVLRHKDLVGGGKKDLQHIAQVIALNMVIGLLSTGIDNWGHLGGLVGGVAASWFIGPAWKHESTSSDGRRLFIDTAPMYKLFKIKRVPKQWK

SEQ ID NO: 9208 - DNA, 586 bp, Glycine max
  misc_feature (1)..(586): Ceres Seq. ID no. 13638406
acatcctaatcgaaaaactttacaaccttttaagcaactccttttgctttattgatgtattcttcattttaagcaccatcatcttcctattttgttttccaatattgctgtttgttgtggtaaatttttctgtagttcatcatcatgctagaaggcaaggctgtgattggtgagactgacatgcttcagaccatgcagcaagatgctatggatttagcatccaaagcactcgatttctttgatgtcactgaagccattaagattgctcgatttataaagaaggagtttgataggatgcatggacctggttggcagtgtattgtaggcactgattttggttcgtttgtgactcactgttgtggctgtttcatctatttctgcttaggcaacttggcaattttgctattcagaggctcggctgctccagaggcacatgaaaatcggttctcagcactagatgcagccaaagcataatttcattgcctaattaattttccctctcttttgacttttctatatatatttttgttcattccatgtaatgtaatgataatgtagaaagaaatggaaggttttagagaaaagc

SEQ ID NO: 9209 - protein, 109 aa, Glycine max
  peptide (1)..(109): Ceres Seq. ID no. 13638407
  misc_feature (1)..(91): Pfam Name: Pfam Description:  Dynein light chain type 1
  misc_feature (1)..(103): NCBI GI NO: 22328970 NR Description: expressed protein [Arabidopsis thaliana]
  misc_feature (8)..(103): NCBI GI NO: 7486801 NR Description: hypothetical protein M4I22
  misc_feature (1)..(91): NCBI GI NO: 15233288 NR Description: dynein light chain protein -related
  misc_feature (1)..(93): NCBI GI NO: 34909728 NR Description: putative dynein light chain
  misc_feature (1)..(94): NCBI GI NO: 15218189 NR Description: dynein light chain -related [Arabidopsis thaliana]
  misc_feature (1)..(89): NCBI GI NO: 34785679 NR Description: Unknown (protein for MGC:68763) [Xenopus laevis]
  misc_feature (1)..(89): NCBI GI NO: 2811014 NR Description: DYNEIN LIGHT CHAIN LC6, FLAGELLAR OUTER ARM
  misc_feature (1)..(89): NCBI GI NO: 17137630 NR Description: Cytoplasmic dynein light chain 2 CG5450-PA
  misc_feature (1)..(89): NCBI GI NO: 17552836 NR Description: Dynein light chain DLC-1 (10.3 kD) (dlc-1)
  misc_feature (1)..(89): NCBI GI NO: 17933574 NR Description: cut up CG6998-PA [Drosophila melanogaster]
MLEGKAVIGETDMLQTMQQDAMDLASKALDFFDVTEAIKIARFIKKEFDRMHGPGWQCIVGTDFGSFVTHCCGCFIYFCLGNLAILLFRGSAAPEAHENRFSALDAAKA

SEQ ID NO: 9210 - protein, 97 aa, Glycine max
  peptide (1)..(97): Ceres Seq. ID no. 13638408
  misc_feature (1)..(79): Pfam Name: Pfam Description:  Dynein light chain type 1
  misc_feature (1)..(91): NCBI GI NO: 22328970 NR Description: expressed protein [Arabidopsis thaliana]
  misc_feature (1)..(91): NCBI GI NO: 7486801 NR Description: hypothetical protein M4I22
  misc_feature (1)..(79): NCBI GI NO: 15233288 NR Description: dynein light chain protein -related
  misc_feature (1)..(81): NCBI GI NO: 34909728 NR Description: putative dynein light chain
  misc_feature (1)..(82): NCBI GI NO: 15218189 NR Description: dynein light chain -related [Arabidopsis thaliana]
  misc_feature (1)..(77): NCBI GI NO: 34785679 NR Description: Unknown (protein for MGC:68763) [Xenopus laevis]
  misc_feature (1)..(77): NCBI GI NO: 2811014 NR Description: DYNEIN LIGHT CHAIN LC6, FLAGELLAR OUTER ARM
  misc_feature (1)..(77): NCBI GI NO: 17137630 NR Description: Cytoplasmic dynein light chain 2 CG5450-PA
  misc_feature (1)..(77): NCBI GI NO: 17552836 NR Description: Dynein light chain DLC-1 (10.3 kD) (dlc-1)
  misc_feature (1)..(77): NCBI GI NO: 17933574 NR Description: cut up CG6998-PA [Drosophila melanogaster]
MLQTMQQDAMDLASKALDFFDVTEAIKIARFIKKEFDRMHGPGWQCIVGTDFGSFVTHCCGCFIYFCLGNLAILLFRGSAAPEAHENRFSALDAAKA

SEQ ID NO: 9211 - protein, 93 aa, Glycine max
  peptide (1)..(93): Ceres Seq. ID no. 13638409
  misc_feature (1)..(75): Pfam Name: Pfam Description:  Dynein light chain type 1
  misc_feature (1)..(87): NCBI GI NO: 22328970 NR Description: expressed protein [Arabidopsis thaliana]
  misc_feature (1)..(87): NCBI GI NO: 7486801 NR Description: hypothetical protein M4I22
  misc_feature (1)..(75): NCBI GI NO: 15233288 NR Description: dynein light chain protein -related
  misc_feature (1)..(77): NCBI GI NO: 34909728 NR Description: putative dynein light chain
  misc_feature (1)..(78): NCBI GI NO: 15218189 NR Description: dynein light chain -related [Arabidopsis thaliana]
  misc_feature (1)..(73): NCBI GI NO: 34785679 NR Description: Unknown (protein for MGC:68763) [Xenopus laevis]
  misc_feature (1)..(73): NCBI GI NO: 2811014 NR Description: DYNEIN LIGHT CHAIN LC6, FLAGELLAR OUTER ARM
  misc_feature (1)..(73): NCBI GI NO: 17137630 NR Description: Cytoplasmic dynein light chain 2 CG5450-PA
  misc_feature (1)..(73): NCBI GI NO: 17552836 NR Description: Dynein light chain DLC-1 (10.3 kD) (dlc-1)
  misc_feature (1)..(73): NCBI GI NO: 17933574 NR Description: cut up CG6998-PA [Drosophila melanogaster]
MQQDAMDLASKALDFFDVTEAIKIARFIKKEFDRMHGPGWQCIVGTDFGSFVTHCCGCFIYFCLGNLAILLFRGSAAPEAHENRFSALDAAKA

SEQ ID NO: 9212 - DNA, 1363 bp, Glycine max
  misc_feature (1)..(1363): Ceres Seq. ID no. 14314925
atcttctcttctcacaacacgttcccattcctctctccctaacctcaccggcagcgccttcacggtcatcgccgccgacaccccccctcccttcttaatggcctcaatcccagtcgcgtgttccacacaccccaggctccaagcctcacccttattccaatcccacgcgcgctcccgcagcgcgtccttctggagggttcagcagaggggttcgatgggtggtggtggtgccgcgtcgagtttcgcctgctccacttctcagttccgcggcggattcgggttccggttccaccggagacaggggaagttctcgttgctctctttcggcggtgacgacgacggaagcgccgttggcggcgaagcgagagaaagagacttgtctcagcttctctccgcattgcttcccgttgttgttgctgccaccgccgttgccgctctcgctaaaccctccacttttacttgggtatcaaaagagttatatgctcctgcacttggtgggattatgttgtctattggaataagactatccgtagatgacttcgctcttgcatttaaaagacctttgccacttaccattgggttaattgcgcaatacgtgcttaagcctgttcttggaatcttggttgcaaaggcttttggtttgtctaggatgttttacgcgggctttgtcctcacagcttgtgtttcgggggctcaactatccagctatgcaaacttcttaagcaaaggggatgtagccttgggcattcttctcacaagctataccacaattgcatcagttattgttacacctctgttaactggtcttctgattggatcagtagtgccagttgatgcagttgccatgtcaaagtcaattctgcaggttgtacttgttccggtgacccttggtcttcttctcaatacatatgcaaagtcagttgtatctgttcttcaacctgtgatgccctttgttgccatgatttgtacttcactgtgcattggcagccctcttgctttaaacaggagtcaaattttgacaggcgaaggtctccggttggtttttccagtattaacatttcatgttgttgccttcactttaggatattggttctcaaagattccatccttgaggcaggaagaacaggtgagcaggacgatttcactatgcactggaatgcagagttccacccttgcaggactccttgcaacgcaatttttggatagtagtcaggcagttcctcctgcatgttctgtcattgctatggctataatgggtctctgtcttgcctctttttggggaagtggctttgtaattagaaacctgttgccattacctcctctcagaaccaattctgctgttaaaacttaacttttttgtttc

SEQ ID NO: 9213 - protein, 449 aa, Glycine max
  peptide (1)..(449): Ceres Seq. ID no. 14314926
  misc_feature (161)..(340): Pfam Name: Pfam Description:  Sodium Bile acid symporter family
  misc_feature (45)..(438): NCBI GI NO: 21554890 NR Description: unknown [Arabidopsis thaliana]
  misc_feature (45)..(438): NCBI GI NO: 18404505 NR Description: bile acid:sodium symporter family
  misc_feature (45)..(413): NCBI GI NO: 9279722 NR Description: contains similarity to transporterprotein~gene_id:MWL2
  misc_feature (116)..(426): NCBI GI NO: 34911708 NR Description: P0707D10.18
  misc_feature (128)..(439): NCBI GI NO: 20269901 NR Description: putative sodium-dependent bile acid symporter
  misc_feature (128)..(439): NCBI GI NO: 30683305 NR Description: bile acid:sodium symporter family
  misc_feature (125)..(426): NCBI GI NO: 18416020 NR Description: bile acid:sodium symporter family
  misc_feature (125)..(426): NCBI GI NO: 7486890 NR Description: hypothetical protein T12H17
  misc_feature (149)..(417): NCBI GI NO: 7485401 NR Description: hypothetical protein At2g26900
  misc_feature (167)..(426): NCBI GI NO: 18413732 NR Description: bile acid:sodium symporter family
SSLLTTRSHSSLPNLTGSAFTVIAADTPPPFLMASIPVACSTHPRLQASPLFQSHARSRSASFWRVQQRGSMGGGGAASSFACSTSQFRGGFGFRFHRRQGKFSLLSFGGDDDGSAVGGEARERDLSQLLSALLPVVVAATAVAALAKPSTFTWVSKELYAPALGGIMLSIGIRLSVDDFALAFKRPLPLTIGLIAQYVLKPVLGILVAKAFGLSRMFYAGFVLTACVSGAQLSSYANFLSKGDVALGILLTSYTTIASVIVTPLLTGLLIGSVVPVDAVAMSKSILQVVLVPVTLGLLLNTYAKSVVSVLQPVMPFVAMICTSLCIGSPLALNRSQILTGEGLRLVFPVLTFHVVAFTLGYWFSKIPSLRQEEQVSRTISLCTGMQSSTLAGLLATQFLDSSQAVPPACSVIAMAIMGLCLASFWGSGFVIRNLLPLPPLRTNSAVKT

SEQ ID NO: 9214 - protein, 417 aa, Glycine max
  peptide (1)..(417): Ceres Seq. ID no. 14314927
  misc_feature (129)..(308): Pfam Name: Pfam Description:  Sodium Bile acid symporter family
  misc_feature (13)..(406): NCBI GI NO: 21554890 NR Description: unknown [Arabidopsis thaliana]
  misc_feature (13)..(406): NCBI GI NO: 18404505 NR Description: bile acid:sodium symporter family
  misc_feature (13)..(381): NCBI GI NO: 9279722 NR Description: contains similarity to transporterprotein~gene_id:MWL2
  misc_feature (84)..(394): NCBI GI NO: 34911708 NR Description: P0707D10.18
  misc_feature (96)..(407): NCBI GI NO: 20269901 NR Description: putative sodium-dependent bile acid symporter
  misc_feature (96)..(407): NCBI GI NO: 30683305 NR Description: bile acid:sodium symporter family
  misc_feature (93)..(394): NCBI GI NO: 18416020 NR Description: bile acid:sodium symporter family
  misc_feature (93)..(394): NCBI GI NO: 7486890 NR Description: hypothetical protein T12H17
  misc_feature (117)..(385): NCBI GI NO: 7485401 NR Description: hypothetical protein At2g26900
  misc_feature (135)..(394): NCBI GI NO: 18413732 NR Description: bile acid:sodium symporter family
MASIPVACSTHPRLQASPLFQSHARSRSASFWRVQQRGSMGGGGAASSFACSTSQFRGGFGFRFHRRQGKFSLLSFGGDDDGSAVGGEARERDLSQLLSALLPVVVAATAVAALAKPSTFTWVSKELYAPALGGIMLSIGIRLSVDDFALAFKRPLPLTIGLIAQYVLKPVLGILVAKAFGLSRMFYAGFVLTACVSGAQLSSYANFLSKGDVALGILLTSYTTIASVIVTPLLTGLLIGSVVPVDAVAMSKSILQVVLVPVTLGLLLNTYAKSVVSVLQPVMPFVAMICTSLCIGSPLALNRSQILTGEGLRLVFPVLTFHVVAFTLGYWFSKIPSLRQEEQVSRTISLCTGMQSSTLAGLLATQFLDSSQAVPPACSVIAMAIMGLCLASFWGSGFVIRNLLPLPPLRTNSAVKT

SEQ ID NO: 9215 - protein, 378 aa, Glycine max
  peptide (1)..(378): Ceres Seq. ID no. 14314928
  misc_feature (90)..(269): Pfam Name: Pfam Description:  Sodium Bile acid symporter family
  misc_feature (1)..(367): NCBI GI NO: 21554890 NR Description: unknown [Arabidopsis thaliana]
  misc_feature (1)..(367): NCBI GI NO: 18404505 NR Description: bile acid:sodium symporter family
  misc_feature (1)..(342): NCBI GI NO: 9279722 NR Description: contains similarity to transporterprotein~gene_id:MWL2
  misc_feature (45)..(355): NCBI GI NO: 34911708 NR Description: P0707D10.18
  misc_feature (57)..(368): NCBI GI NO: 20269901 NR Description: putative sodium-dependent bile acid symporter
  misc_feature (57)..(368): NCBI GI NO: 30683305 NR Description: bile acid:sodium symporter family
  misc_feature (54)..(355): NCBI GI NO: 18416020 NR Description: bile acid:sodium symporter family
  misc_feature (54)..(355): NCBI GI NO: 7486890 NR Description: hypothetical protein T12H17
  misc_feature (78)..(346): NCBI GI NO: 7485401 NR Description: hypothetical protein At2g26900
  misc_feature (96)..(355): NCBI GI NO: 18413732 NR Description: bile acid:sodium symporter family
MGGGGAASSFACSTSQFRGGFGFRFHRRQGKFSLLSFGGDDDGSAVGGEARERDLSQLLSALLPVVVAATAVAALAKPSTFTWVSKELYAPALGGIMLSIGIRLSVDDFALAFKRPLPLTIGLIAQYVLKPVLGILVAKAFGLSRMFYAGFVLTACVSGAQLSSYANFLSKGDVALGILLTSYTTIASVIVTPLLTGLLIGSVVPVDAVAMSKSILQVVLVPVTLGLLLNTYAKSVVSVLQPVMPFVAMICTSLCIGSPLALNRSQILTGEGLRLVFPVLTFHVVAFTLGYWFSKIPSLRQEEQVSRTISLCTGMQSSTLAGLLATQFLDSSQAVPPACSVIAMAIMGLCLASFWGSGFVIRNLLPLPPLRTNSAVKT

SEQ ID NO: 9216 - DNA, 1773 bp, Glycine max
  misc_feature (1)..(1773): Ceres Seq. ID no. 14315028
actcactctgaaaccctaaacatgccgccattagcgcctctgcatcttcggaagctcttactccgttctcgttccttatcattcacttctcccactccgattcaccctcctcctctgtttccccaacaaccttcttcccatttccattcccgaaccctcctcactccttcttcgctcttcataatcagacatttctcatcggaaacccaaacggatcagattgcgcactccctctcctcagagcttctcaaagagccagactcggacgctctctccgtctcgcagcgccttcacctgagcttctcccacatcactccaacccccaatttgattctccaaaccctaaacctctcccacgaatctggccgcactgtattagggttccatcaatggctctcttccaacccccaattctcccacacggacgacactctttcctacttcgtcgactactttggccgccgtaaggacttcaaggccacgcatgacgtcctctccgccgcttcccccgccgccggccccaaaaccctagcctccgcgatcgaccgcctcgtccgcgcgggccgccccagccaggcggttcagttcttcgagcgaatggagagagactacgggctgaagcgcgatcgtgcttccttaaaagtggtcgtggagaagctgtgttcgaagggtttcgctagttacgcggaaaaaatggttaaggatttggcgaaggtgtttttccccgacgaagccacgtgtgatatgttgatcaaagggtggtgcgttgatgggaagctcgatgaagctcaaaggctcgccggtgagatgtatcgtggtgggtttgagcttggtgtggggtcttacaatgccatgcttgattgcgtttgcaagctttgtcgccaaaaggatccgtttcaacttcactcggaagcagagaaggtgttggtggagatggagcaccgtggggttccaaggaatgtggagacattcaatgtgttgataacgaatttatgtaagattaggaagaccgaagatgctttgggattgtttcgtagcatgggagagtgggggtgttaccctaatgagactacttttcttgttttgattaggagtctgtatcaggctgctaggttggaagagggggatgagatgattgataggatgaggtctgctgggtttggtgagtttctagataagaaggcttactatcagctcctcaagattttgtgtggcattgagagggttgatcatgctttgagtgtgtttgctatgatgaaggatggtgggtgtgaacccgggcttataacttatgacttgttgatgggaaaattgggtgctcacaatcgtatcgataaggctaatgctctattcaatgaagcgaagagtagagggctgcctgtgatgctcaaagagtatgctgttgacccgaggtatttgaagaagaagaaggttgtcaagggtgtgaagaagagggaaaccttgcctgagaaaatggctaggaagagaagccgcctgaaacagattcggttgagttttgtgaagaagcccaaaagagtgatgggtcgttgatcattttttgtactttataaaggtttcggaatagatttccttatttaatcatcattttctttgtttcattgttagttttgaatatttggagataaatctttgcatggaaatggctccattgtaggacataaatgccgccacatattcagaaataattttttgtacttggtgctttatgttggttcaacttctgggagatgtatgctgggcttcttaatgatt

SEQ ID NO: 9217 - protein, 516 aa, Glycine max
  peptide (1)..(516): Ceres Seq. ID no. 14315029
  misc_feature (175)..(209): Pfam Name: Pfam Description:  PPR repeat
  misc_feature (8)..(516): NCBI GI NO: 15239488 NR Description: pentatricopeptide (PPR) repeat-containing protein
  misc_feature (8)..(516): NCBI GI NO: 21554346 NR Description: unknown [Arabidopsis thaliana]
  misc_feature (74)..(516): NCBI GI NO: 34394565 NR Description: unknown protein
  misc_feature (52)..(512): NCBI GI NO: 15240232 NR Description: pentatricopeptide (PPR) repeat-containing protein
  misc_feature (52)..(512): NCBI GI NO: 21593376 NR Description: unknown [Arabidopsis thaliana]
  misc_feature (121)..(482): NCBI GI NO: 37534458 NR Description: putative endopeptidase
  misc_feature (53)..(435): NCBI GI NO: 18394846 NR Description: expressed protein [Arabidopsis thaliana]
  misc_feature (28)..(435): NCBI GI NO: 21686921 NR Description: putative reverse transcriptase
  misc_feature (10)..(467): NCBI GI NO: 32526676 NR Description: chloroplast RNA processing 1 -like protein
  misc_feature (99)..(443): NCBI GI NO: 15228825 NR Description: pentatricopeptide (PPR) repeat-containing protein
THSETLNMPPLAPLHLRKLLLRSRSLSFTSPTPIHPPPLFPQQPSSHFHSRTLLTPSSLFIIRHFSSETQTDQIAHSLSSELLKEPDSDALSVSQRLHLSFSHITPTPNLILQTLNLSHESGRTVLGFHQWLSSNPQFSHTDDTLSYFVDYFGRRKDFKATHDVLSAASPAAGPKTLASAIDRLVRAGRPSQAVQFFERMERDYGLKRDRASLKVVVEKLCSKGFASYAEKMVKDLAKVFFPDEATCDMLIKGWCVDGKLDEAQRLAGEMYRGGFELGVGSYNAMLDCVCKLCRQKDPFQLHSEAEKVLVEMEHRGVPRNVETFNVLITNLCKIRKTEDALGLFRSMGEWGCYPNETTFLVLIRSLYQAARLEEGDEMIDRMRSAGFGEFLDKKAYYQLLKILCGIERVDHALSVFAMMKDGGCEPGLITYDLLMGKLGAHNRIDKANALFNEAKSRGLPVMLKEYAVDPRYLKKKKVVKGVKKRETLPEKMARKRSRLKQIRLSFVKKPKRVMGR

SEQ ID NO: 9218 - protein, 509 aa, Glycine max
  peptide (1)..(509): Ceres Seq. ID no. 14315030
  misc_feature (168)..(202): Pfam Name: Pfam Description:  PPR repeat
  misc_feature (1)..(509): NCBI GI NO: 15239488 NR Description: pentatricopeptide (PPR) repeat-containing protein
  misc_feature (1)..(509): NCBI GI NO: 21554346 NR Description: unknown [Arabidopsis thaliana]
  misc_feature (67)..(509): NCBI GI NO: 34394565 NR Description: unknown protein
  misc_feature (45)..(505): NCBI GI NO: 15240232 NR Description: pentatricopeptide (PPR) repeat-containing protein
  misc_feature (45)..(505): NCBI GI NO: 21593376 NR Description: unknown [Arabidopsis thaliana]
  misc_feature (114)..(475): NCBI GI NO: 37534458 NR Description: putative endopeptidase
  misc_feature (46)..(428): NCBI GI NO: 18394846 NR Description: expressed protein [Arabidopsis thaliana]
  misc_feature (21)..(428): NCBI GI NO: 21686921 NR Description: putative reverse transcriptase
  misc_feature (3)..(460): NCBI GI NO: 32526676 NR Description: chloroplast RNA processing 1 -like protein
  misc_feature (92)..(436): NCBI GI NO: 15228825 NR Description: pentatricopeptide (PPR) repeat-containing protein
MPPLAPLHLRKLLLRSRSLSFTSPTPIHPPPLFPQQPSSHFHSRTLLTPSSLFIIRHFSSETQTDQIAHSLSSELLKEPDSDALSVSQRLHLSFSHITPTPNLILQTLNLSHESGRTVLGFHQWLSSNPQFSHTDDTLSYFVDYFGRRKDFKATHDVLSAASPAAGPKTLASAIDRLVRAGRPSQAVQFFERMERDYGLKRDRASLKVVVEKLCSKGFASYAEKMVKDLAKVFFPDEATCDMLIKGWCVDGKLDEAQRLAGEMYRGGFELGVGSYNAMLDCVCKLCRQKDPFQLHSEAEKVLVEMEHRGVPRNVETFNVLITNLCKIRKTEDALGLFRSMGEWGCYPNETTFLVLIRSLYQAARLEEGDEMIDRMRSAGFGEFLDKKAYYQLLKILCGIERVDHALSVFAMMKDGGCEPGLITYDLLMGKLGAHNRIDKANALFNEAKSRGLPVMLKEYAVDPRYLKKKKVVKGVKKRETLPEKMARKRSRLKQIRLSFVKKPKRVMGR

SEQ ID NO: 9219 - protein, 317 aa, Glycine max
  peptide (1)..(317): Ceres Seq. ID no. 14315031
  misc_feature (1)..(317): NCBI GI NO: 15239488 NR Description: pentatricopeptide (PPR) repeat-containing protein
  misc_feature (1)..(317): NCBI GI NO: 21554346 NR Description: unknown [Arabidopsis thaliana]
  misc_feature (1)..(317): NCBI GI NO: 34394565 NR Description: unknown protein
  misc_feature (1)..(313): NCBI GI NO: 15240232 NR Description: pentatricopeptide (PPR) repeat-containing protein
  misc_feature (1)..(313): NCBI GI NO: 21593376 NR Description: unknown [Arabidopsis thaliana]
  misc_feature (1)..(283): NCBI GI NO: 37534458 NR Description: putative endopeptidase
  misc_feature (1)..(236): NCBI GI NO: 18394846 NR Description: expressed protein [Arabidopsis thaliana]
  misc_feature (1)..(236): NCBI GI NO: 21686921 NR Description: putative reverse transcriptase
  misc_feature (1)..(268): NCBI GI NO: 32526676 NR Description: chloroplast RNA processing 1 -like protein
  misc_feature (1)..(244): NCBI GI NO: 15228825 NR Description: pentatricopeptide (PPR) repeat-containing protein
MERDYGLKRDRASLKVVVEKLCSKGFASYAEKMVKDLAKVFFPDEATCDMLIKGWCVDGKLDEAQRLAGEMYRGGFELGVGSYNAMLDCVCKLCRQKDPFQLHSEAEKVLVEMEHRGVPRNVETFNVLITNLCKIRKTEDALGLFRSMGEWGCYPNETTFLVLIRSLYQAARLEEGDEMIDRMRSAGFGEFLDKKAYYQLLKILCGIERVDHALSVFAMMKDGGCEPGLITYDLLMGKLGAHNRIDKANALFNEAKSRGLPVMLKEYAVDPRYLKKKKVVKGVKKRETLPEKMARKRSRLKQIRLSFVKKPKRVMGR

SEQ ID NO: 9220 - DNA, 732 bp, Glycine max
  misc_feature (1)..(732): Ceres Seq. ID no. 13594425
acacaattaagctcaaatcaaaagtccctttgcatactatctatcacttatcagttatcacaaagcaaattcattaagtcttttgccatggcctccaacagctgcttcatcttggcttttttcattgctatttccttctcatgcatggattttggcctagcagctcgccatcttatgcaaacaagtactgcaccaaatttgcctttgccaaaaccaacattgccacctttgccttcacttccaacactgcctcagggcaatgttccacctttgcctacaatcccatctcttccaaccattccaactgttccacaggtcactcttccaccacttgctgccactttacttccaaacttccccacagtcccaaccactattccttccttccccttcttctccccaccaccttcagccaccactccctaaatgaagctactctgcttattggatacataggcactcgtatccttggagtttggttctggctttcagtgatcgttggctgcatttcgtgttgtttttatgttatacatgtgatggtgatatatattgtacgttgtccatttattgccggggaatatttatagtaatctttcattttcctttgttcttccatcttgtattgtatggataggattattgttttttcttcctcctccttacttcatgtacttggggatcatctattgttataggatatacgctatatataataaataatccatgttccct

SEQ ID NO: 9221 - protein, 148 aa, Glycine max
  peptide (1)..(148): Ceres Seq. ID no. 13594426
MHGFWPSSSPSYANKYCTKFAFAKTNIATFAFTSNTASGQCSTFAYNPISSNHSNCSTGHSSTTCCHFTSKLPHSPNHYSFLPLLLPTTFSHHSLNEATLLIGYIGTRILGVWFWLSVIVGCISCCFYVIHVMVIYIVRCPFIAGEYL

SEQ ID NO: 9222 - protein, 141 aa, Glycine max
  peptide (1)..(141): Ceres Seq. ID no. 13594427
  misc_feature (30)..(140): NCBI GI NO: 8778315 NR Description: F14J16.29 [Arabidopsis thaliana]
  misc_feature (61)..(140): NCBI GI NO: 8778315 NR Description: F14J16.29 [Arabidopsis thaliana]
  misc_feature (30)..(141): NCBI GI NO: 34393335 NR Description: early nodulin 75 precursor-like protein
  misc_feature (30)..(141): NCBI GI NO: 34899594 NR Description: contains ESTsAU174355
  misc_feature (54)..(137): NCBI GI NO: 15227226 NR Description: proline-rich protein family [Arabidopsis thaliana]
  misc_feature (30)..(141): NCBI GI NO: 34899598 NR Description: early nodulin 75 precursor-like protein
  misc_feature (29)..(137): NCBI GI NO: 15233688 NR Description: proline-rich protein family [Arabidopsis thaliana]
  misc_feature (52)..(141): NCBI GI NO: 34899600 NR Description: hypothetical protein~predicted by GeneMark.hmm
  misc_feature (65)..(138): NCBI GI NO: 34393335 NR Description: early nodulin 75 precursor-like protein
  misc_feature (65)..(138): NCBI GI NO: 34899594 NR Description: contains ESTsAU174355
TQLSSNQKSLCILSITYQLSQSKFIKSFAMASNSCFILAFFIAISFSCMDFGLAARHLMQTSTAPNLPLPKPTLPPLPSLPTLPQGNVPPLPTIPSLPTIPTVPQVTLPPLAATLLPNFPTVPTTIPSFPFFSPPPSATTP

SEQ ID NO: 9223 - protein, 112 aa, Glycine max
  peptide (1)..(112): Ceres Seq. ID no. 13594428
  misc_feature (1)..(111): NCBI GI NO: 8778315 NR Description: F14J16.29 [Arabidopsis thaliana]
  misc_feature (32)..(111): NCBI GI NO: 8778315 NR Description: F14J16.29 [Arabidopsis thaliana]
  misc_feature (1)..(112): NCBI GI NO: 34393335 NR Description: early nodulin 75 precursor-like protein
  misc_feature (1)..(112): NCBI GI NO: 34899594 NR Description: contains ESTsAU174355
  misc_feature (25)..(108): NCBI GI NO: 15227226 NR Description: proline-rich protein family [Arabidopsis thaliana]
  misc_feature (1)..(112): NCBI GI NO: 34899598 NR Description: early nodulin 75 precursor-like protein
  misc_feature (1)..(108): NCBI GI NO: 15233688 NR Description: proline-rich protein family [Arabidopsis thaliana]
  misc_feature (23)..(112): NCBI GI NO: 34899600 NR Description: hypothetical protein~predicted by GeneMark.hmm
  misc_feature (36)..(109): NCBI GI NO: 34393335 NR Description: early nodulin 75 precursor-like protein
  misc_feature (36)..(109): NCBI GI NO: 34899594 NR Description: contains ESTsAU174355
MASNSCFILAFFIAISFSCMDFGLAARHLMQTSTAPNLPLPKPTLPPLPSLPTLPQGNVPPLPTIPSLPTIPTVPQVTLPPLAATLLPNFPTVPTTIPSFPFFSPPPSATTP

SEQ ID NO: 9224 - DNA, 871 bp, Glycine max
  misc_feature (1)..(871): Ceres Seq. ID no. 13594385
gaacatcctaatcgaaaagaggaaacatttgcaatggctaacaacgtcgttgttgttcttaaggtagctcctgtttctctgcctccatttcccataacaaacaatgctctcactttcaagagccaaagacacacacttcatctgaattgcttccaaaccaaaaacagaacaacctcattcccttcttcctcgtcaatcctcagaaacaaagctagttgctctgtgttggcgtgtctccctcctgaatcctcaacctcatcttccactgctaaaccctcttttccttctcctcaaactaagctttatgtcagtgggctatcatttcgtaccactgaagagagtttgcgaaatgcatttaagaattttggtcaacttgtggaagtcaagctggtgatggatagaattgctaatagaccaagagggtttgcttttcttcgttatgcaactgaagaagagtcgcagaaggctattgagggaatgcatggaaagttcttggatggaagggtcatatttgtggaagttgccaaaccgagatcagagttagcgccaaggaaacaggaagacactagattgtaatgaagatccaatcaaaggatacagtagccatatgttcatcttggattcttggtgtgcaataggaagaatcattgcagcattgtacttgacattttataaaagacccctacttgattaaagttttttgcctcccttattttccaccccactgacactcttaggattcagcaatgaaaactcttttaagcaccacggccatttctgcaatatattgccaaatttatgccatttgtgcataatgtactcgttgacaatgttacaaatgtcaatggcgtttcttgaagtagttgttatc

SEQ ID NO: 9225 - protein, 191 aa, Glycine max
  peptide (1)..(191): Ceres Seq. ID no. 13594386
  misc_feature (101)..(172): Pfam Name: a.k.a. RRM, RBD, or RNP domain Pfam Description: RNA recognition motif.
  misc_feature (84)..(185): NCBI GI NO: 15219486 NR Description: RNA recognition motif (RRM)-containing protein
  misc_feature (71)..(180): NCBI GI NO: 15239676 NR Description: RNA recognition motif (RRM)-containing protein
  misc_feature (74)..(187): NCBI GI NO: 38636774 NR Description: putative RNA recognition motif
  misc_feature (90)..(183): NCBI GI NO: 34898598 NR Description: P0534A03.25
  misc_feature (64)..(190): NCBI GI NO: 15224298 NR Description: RNA-binding protein, putative
  misc_feature (84)..(186): NCBI GI NO: 18402803 NR Description: RNA recognition motif (RRM)-containing protein
  misc_feature (128)..(181): NCBI GI NO: 38346812 NR Description: OSJNBa0088A01.19
  misc_feature (100)..(178): NCBI GI NO: 38344030 NR Description: OJ991214_12.1
  misc_feature (78)..(181): NCBI GI NO: 15239958 NR Description: RNA-binding protein, putative
  misc_feature (100)..(181): NCBI GI NO: 15231311 NR Description: RNA-binding protein, putative
EHPNRKEETFAMANNVVVVLKVAPVSLPPFPITNNALTFKSQRHTLHLNCFQTKNRTTSFPSSSSILRNKASCSVLACLPPESSTSSSTAKPSFPSPQTKLYVSGLSFRTTEESLRNAFKNFGQLVEVKLVMDRIANRPRGFAFLRYATEEESQKAIEGMHGKFLDGRVIFVEVAKPRSELAPRKQEDTRL

SEQ ID NO: 9226 - protein, 180 aa, Glycine max
  peptide (1)..(180): Ceres Seq. ID no. 13594387
  misc_feature (90)..(161): Pfam Name: a.k.a. RRM, RBD, or RNP domain Pfam Description: RNA recognition motif.
  misc_feature (73)..(174): NCBI GI NO: 15219486 NR Description: RNA recognition motif (RRM)-containing protein
  misc_feature (60)..(169): NCBI GI NO: 15239676 NR Description: RNA recognition motif (RRM)-containing protein
  misc_feature (63)..(176): NCBI GI NO: 38636774 NR Description: putative RNA recognition motif
  misc_feature (79)..(172): NCBI GI NO: 34898598 NR Description: P0534A03.25
  misc_feature (53)..(179): NCBI GI NO: 15224298 NR Description: RNA-binding protein, putative
  misc_feature (73)..(175): NCBI GI NO: 18402803 NR Description: RNA recognition motif (RRM)-containing protein
  misc_feature (117)..(170): NCBI GI NO: 38346812 NR Description: OSJNBa0088A01.19
  misc_feature (89)..(167): NCBI GI NO: 38344030 NR Description: OJ991214_12.1
  misc_feature (67)..(170): NCBI GI NO: 15239958 NR Description: RNA-binding protein, putative
  misc_feature (89)..(170): NCBI GI NO: 15231311 NR Description: RNA-binding protein, putative
MANNVVVVLKVAPVSLPPFPITNNALTFKSQRHTLHLNCFQTKNRTTSFPSSSSILRNKASCSVLACLPPESSTSSSTAKPSFPSPQTKLYVSGLSFRTTEESLRNAFKNFGQLVEVKLVMDRIANRPRGFAFLRYATEEESQKAIEGMHGKFLDGRVIFVEVAKPRSELAPRKQEDTRL

SEQ ID NO: 9227 - DNA, 1125 bp, Glycine max
  misc_feature (1)..(1125): Ceres Seq. ID no. 14305461
cttcttcggttaaacctttttcaccttccccctttgtttctcaacatcattctcctcattcccctacctacccccaattttcccttctgtatttctctttttcaattctcgatttcccttctcccttttgtgtcttcataatccagatcctctcttcgatctagggtttctggcttaattaacaatcaaatgtttaaggaagaatttctatgacgattcgcaaccccatgcgacgaatccgtctcctccactccttctccgtcgtcttcctctactggttctacgtcttctcatgaactaactccctctcaatcccctaccctaattcctccaatttccccattttttttctaattaatcagatttgcaaaatcctaatttctctatcctaacaaaacccccaaattcaaacaaatccaatggcttcgattccgcgtccggcgagttcgggatcttcggagggaggaggagatccggctgcgatggacgagagaamgaggaagcggatggagtcgaaccgcgagtccgcacggcgatcgcggatgaagaagcagaagctgctcgaagacctatccgacgtagcgagtcgccttcaaggcgagaacgtgcgcttagcgcagagcataaaggcgaaggaggaagcgtacgttgagatcgaagccgcgaacgacatcctcagagcacagaccatggaactcgccgaccggttaaggtttctgaactccattctcgagatcgccgatgaggtcggcggcggtggtgaatccttcgagattccgcagattccagaccctctcttcatgccctggcagatcccccaccctatgatggcgtcacctgacatgctcctccatggaaatcaaggcctgtttgcttgatagtacttcaattaggctaggtttattgttgatgttccctagtgttttggtgaataaagaaagggaatggtgttagatgtttatgagttatatcgtgtgttggtgtgctgttttttttttttaagatctgtgtttatgttttgtgtgtgcactatcgtcgttatatagttgaattgaatgtatctgctttgtcgtagtgactggcattgtgtatcgatataaaattatgtttctgtttaaaattaat

SEQ ID NO: 9228 - protein, 152 aa, Glycine max
  peptide (1)..(152): Ceres Seq. ID no. 14305462
  misc_feature (22)..(85): Pfam Name: Pfam Description:  bZIP transcription factor
  misc_feature (12)..(142): NCBI GI NO: 15228754 NR Description: bZIP family transcription factor
  misc_feature (8)..(145): NCBI GI NO: 7489298 NR Description: DNA-binding protein bZIP-2 - garden snapdragon
  misc_feature (1)..(142): NCBI GI NO: 10241920 NR Description: TBZF [Nicotiana tabacum]
  misc_feature (1)..(142): NCBI GI NO: 16580132 NR Description: bZIP transcription factor BZI-3
  misc_feature (1)..(142): NCBI GI NO: 5901747 NR Description: bZIP DNA-binding protein [Lycopersicon esculentum]
  misc_feature (1)..(135): NCBI GI NO: 9650826 NR Description: common plant regulatory factor 6
  misc_feature (23)..(138): NCBI GI NO: 7489297 NR Description: DNA-binding protein bZIP-1 - garden snapdragon
  misc_feature (1)..(136): NCBI GI NO: 16580134 NR Description: bZIP transcription factor BZI-4
  misc_feature (1)..(144): NCBI GI NO: 7489118 NR Description: DNA-binding protein tbz17 - common tobacco
  misc_feature (1)..(140): NCBI GI NO: 479696 NR Description: oxidase lip19 - rice
  misc_feature (26)..(26): Xaa is any aa, unknown or other
MASIPRPASSGSSEGGGDPAAMDERXRKRMESNRESARRSRMKKQKLLEDLSDVASRLQGENVRLAQSIKAKEEAYVEIEAANDILRAQTMELADRLRFLNSILEIADEVGGGGESFEIPQIPDPLFMPWQIPHPMMASPDMLLHGNQGLFA

SEQ ID NO: 9229 - protein, 131 aa, Glycine max
  peptide (1)..(131): Ceres Seq. ID no. 14305463
  misc_feature (1)..(64): Pfam Name: Pfam Description:  bZIP transcription factor
  misc_feature (1)..(121): NCBI GI NO: 15228754 NR Description: bZIP family transcription factor
  misc_feature (1)..(124): NCBI GI NO: 7489298 NR Description: DNA-binding protein bZIP-2 - garden snapdragon
  misc_feature (1)..(121): NCBI GI NO: 10241920 NR Description: TBZF [Nicotiana tabacum]
  misc_feature (1)..(121): NCBI GI NO: 16580132 NR Description: bZIP transcription factor BZI-3
  misc_feature (1)..(121): NCBI GI NO: 5901747 NR Description: bZIP DNA-binding protein [Lycopersicon esculentum]
  misc_feature (1)..(114): NCBI GI NO: 9650826 NR Description: common plant regulatory factor 6
  misc_feature (2)..(117): NCBI GI NO: 7489297 NR Description: DNA-binding protein bZIP-1 - garden snapdragon
  misc_feature (1)..(115): NCBI GI NO: 16580134 NR Description: bZIP transcription factor BZI-4
  misc_feature (1)..(123): NCBI GI NO: 7489118 NR Description: DNA-binding protein tbz17 - common tobacco
  misc_feature (1)..(119): NCBI GI NO: 479696 NR Description: oxidase lip19 - rice
  misc_feature (5)..(5): Xaa is any aa, unknown or other
MDERXRKRMESNRESARRSRMKKQKLLEDLSDVASRLQGENVRLAQSIKAKEEAYVEIEAANDILRAQTMELADRLRFLNSILEIADEVGGGGESFEIPQIPDPLFMPWQIPHPMMASPDMLLHGNQGLFA

SEQ ID NO: 9230 - protein, 123 aa, Glycine max
  peptide (1)..(123): Ceres Seq. ID no. 14305464
  misc_feature (1)..(56): Pfam Name: Pfam Description:  bZIP transcription factor
  misc_feature (1)..(113): NCBI GI NO: 15228754 NR Description: bZIP family transcription factor
  misc_feature (1)..(116): NCBI GI NO: 7489298 NR Description: DNA-binding protein bZIP-2 - garden snapdragon
  misc_feature (1)..(113): NCBI GI NO: 10241920 NR Description: TBZF [Nicotiana tabacum]
  misc_feature (1)..(113): NCBI GI NO: 16580132 NR Description: bZIP transcription factor BZI-3
  misc_feature (1)..(113): NCBI GI NO: 5901747 NR Description: bZIP DNA-binding protein [Lycopersicon esculentum]
  misc_feature (1)..(106): NCBI GI NO: 9650826 NR Description: common plant regulatory factor 6
  misc_feature (1)..(109): NCBI GI NO: 7489297 NR Description: DNA-binding protein bZIP-1 - garden snapdragon
  misc_feature (1)..(107): NCBI GI NO: 16580134 NR Description: bZIP transcription factor BZI-4
  misc_feature (1)..(115): NCBI GI NO: 7489118 NR Description: DNA-binding protein tbz17 - common tobacco
  misc_feature (1)..(111): NCBI GI NO: 479696 NR Description: oxidase lip19 - rice
MESNRESARRSRMKKQKLLEDLSDVASRLQGENVRLAQSIKAKEEAYVEIEAANDILRAQTMELADRLRFLNSILEIADEVGGGGESFEIPQIPDPLFMPWQIPHPMMASPDMLLHGNQGLFA

SEQ ID NO: 9231 - DNA, 941 bp, Glycine max
  misc_feature (1)..(941): Ceres Seq. ID no. 12782126
gcatccgaatgtttcgctcctcgtatcctcctcatccttttatgcgtgtcttcccccaacgaaaccagcgagaccaaacgtggtaacgctttgaatctttgaattcattcaaagatcccccttctgtctccctctctacgcatatcagggcactatggctgccacggtgaaacaaatgtctttgatcgtgtcactgttcggcgtggtgtccttcattttgggtgttgttgctgaaaacaagaagcctgcggcaggaacacccgtgcctggtttggatggtgtctctgtcacctgcaagtacccagctgatccaactgttgcattggggtatctttctacagcatttcttgttgcatccactgtgactggatatctgtctttgttttacccttacaaaggaaagtctattccacaaggggttctgtttaagcacaccactttcacagtgttcttcaacatttctttgttcaccactggattagctgcagctatgctgttatggccaacaatcaccgaacacattcacctgacacgcaatgtgcaccgcaatatcaactatgaatgtcctacagctaaaactggtctacttggaggtggtgcctttctatcacttgattcatctctcctttggttgattgcccttatgctagctgacaatgctcgcgaggacttctttgaagaagaaggagaagatggtgacaagggtgaatttggcacagcctcctctgatgcttattatgatgctgattcaggaccgaaggctagttcctgaagtatgctacaagtagaaataagtgttgcacctggtatttctgtagtttccttttaatcacgctgaacaattccgtgaaataatgaatgtacatatatttaaaatggttgttctcggtgaacatttattgtgcttaagcactactgcagaaaaaaacatagttgtttgc

SEQ ID NO: 9232 - protein, 205 aa, Glycine max
  peptide (1)..(205): Ceres Seq. ID no. 12782127
  misc_feature (1)..(176): NCBI GI NO: 15235839 NR Description: putative protein; protein id: At4g31130
  misc_feature (1)..(204): NCBI GI NO: 8099143 NR Description: hypothetical protein [Oryza sativa]
MAATVKQMSLIVSLFGVVSFILGVVAENKKPAAGTPVPGLDGVSVTCKYPADPTVALGYLSTAFLVASTVTGYLSLFYPYKGKSIPQGVLFKHTTFTVFFNISLFTTGLAAAMLLWPTITEHIHLTRNVHRNINYECPTAKTGLLGGGAFLSLDSSLLWLIALMLADNAREDFFEEEGEDGDKGEFGTASSDAYYDADSGPKASS

SEQ ID NO: 9233 - protein, 198 aa, Glycine max
  peptide (1)..(198): Ceres Seq. ID no. 12782128
  misc_feature (1)..(169): NCBI GI NO: 15235839 NR Description: putative protein; protein id: At4g31130
  misc_feature (1)..(197): NCBI GI NO: 8099143 NR Description: hypothetical protein [Oryza sativa]
MSLIVSLFGVVSFILGVVAENKKPAAGTPVPGLDGVSVTCKYPADPTVALGYLSTAFLVASTVTGYLSLFYPYKGKSIPQGVLFKHTTFTVFFNISLFTTGLAAAMLLWPTITEHIHLTRNVHRNINYECPTAKTGLLGGGAFLSLDSSLLWLIALMLADNAREDFFEEEGEDGDKGEFGTASSDAYYDADSGPKASS

SEQ ID NO: 9234 - DNA, 1205 bp, Glycine max
  misc_feature (1)..(1205): Ceres Seq. ID no. 13639619
gaacatcctaatcgaaaacttcgggttctcgtcaaaacgcaaagatgcaagttccattgatcgacatcgacagaatcaacgatctccaagtgggtctgaactctctgcagaacccatccttcccaatcccttctcagatcacaacctccctcgcttacaatttctgcaaatggggcgcagtcattctcgcccttgtcgccaccttcggcagcatcatcaacagagtcactatcttcatcatccgcttccgcgccaaagccccttctctcccatccctaaccctaaacgacgacaatttttacacctcctcctcctctgacgacgacgacgacgacgataacgacgacgacctaacctactcctcttccgagcccgaagacgagccctccgcgtcttccagtttcatccgtttggacgactatttccgactcagaggaaccgataataataataataataacctagacgacgagtttcagactcaaaacggcacgcacaaacgatgtcgtagcatcggggatattttctccctctcggaactagccaacagcaagagcgtggtgaagctctgggacaccataggcttcggcctgggcttggacttcgatgattacgatggttactacgttggtaacgcggcggttccgacgagctccaccgcgtctccctcggtggttgtctcggcgggggaaggcgcgtgcgggaatctggcgctggagatctgggacacgcggctgcggcggcggaagcccacggtggtggcggagtggggtcccaccgtgggaaagaccctgcgcgtggaatctggtggcgtccagaaggtctacgtcatagatgacgggcgttacggcgtgacggtcggggatatgagaaaggtcagcacgccgttagagagcgtaacggaatctgacgcggatacttggtgggatgcggacgctattgttgtttcggacgagtcttttggcgaacagcaatcaatgttgcaacaaccaacttgaataataattgcagttcctttttcggtgctggaaatataattataataatcgaaaaaaaaataaggcgccaccatccgagattttctcaagagaaattgtttatttgtattattattcaatttaaaatttatacattgtatattcatcaaaaaaaaaaaaaaaaaagcttatcgataccgtcgacctcgagggggggcccggtaccca

SEQ ID NO: 9235 - protein, 317 aa, Glycine max
  peptide (1)..(317): Ceres Seq. ID no. 13639620
  misc_feature (1)..(300): NCBI GI NO: 18409031 NR Description: expressed protein [Arabidopsis thaliana]
  misc_feature (1)..(291): NCBI GI NO: 18395663 NR Description: expressed protein [Arabidopsis thaliana]
  misc_feature (203)..(300): NCBI GI NO: 12324878 NR Description: unknown protein, 5' partial; 67-381
MQVPLIDIDRINDLQVGLNSLQNPSFPIPSQITTSLAYNFCKWGAVILALVATFGSIINRVTIFIIRFRAKAPSLPSLTLNDDNFYTSSSSDDDDDDDNDDDLTYSSSEPEDEPSASSSFIRLDDYFRLRGTDNNNNNNLDDEFQTQNGTHKRCRSIGDIFSLSELANSKSVVKLWDTIGFGLGLDFDDYDGYYVGNAAVPTSSTASPSVVVSAGEGACGNLALEIWDTRLRRRKPTVVAEWGPTVGKTLRVESGGVQKVYVIDDGRYGVTVGDMRKVSTPLESVTESDADTWWDADAIVVSDESFGEQQSMLQQPT

SEQ ID NO: 9236 - DNA, 1085 bp, Glycine max
  misc_feature (1)..(1085): Ceres Seq. ID no. 14314909
aagtcttttttccttcgtaacatcttttttctctttttcttcccatagcattctgactcatacccaaattatttattgtttgtctacgaaagcagtgaaaaaaaatgacagtggagcttatggggttccccaaaatggaggaacagaaggcaattcaagaagctgcctccgaaggcctcaaggccatggaacacctcctccgtctcctatcctatcaaccctctcacctccacgctcaccacaccgacgccaccgtttccaacttcaaaaaactcatctccttactcagccgccgcaccggccacgcccgtttccgtcgcgcacctctcccttccccgccaccggctaacccggtcaccctccaccaacctccctccaccttcgtcccttcgcactcccagtctctaaccctcgatttcacaaaacctagcattttcgcctccaacgccaaatccatggacctccaattctctaaagaaaccttcagcgtctcctccaactcctccttcatgtcctccgccatcaccggcgacgccagtgtctcttacggcaaactaggatcctccctcttcctcactcctccgccagtctcagccggaaaacctcctctctcctccgctccgatcaagaagaggtgtcacgaccaccgcgaacactccgacgagatctccgggaaactctccggctccagcaagtgccactgcactaagagaaggaagaatcgagtgaagaaaacggtaagagttccggtgatcagttcgaagatcgccgatattccgccggacgagtactcgtggaggaagtacgggcagaagccgatcaagggatcgccgtacccgagggggtattacaagtgcagtagcgttatagggtgtccggcgaggaaacacgtggagcgtgctccggacgatccgacgatgttgattgtgacatatgaaggggagcaccggcactcgatgcaggagaacatttccgggggagtgggtttgggattcgagtcaacgtgagggtggttgcaatgtaaatctgacattattaaaagaaaagattatattacaggggaatcttaatcttctcccgaaaag

SEQ ID NO: 9237 - protein, 300 aa, Glycine max
  peptide (1)..(300): Ceres Seq. ID no. 14314910
  misc_feature (225)..(284): Pfam Name: Pfam Description:  WRKY DNA -binding domain
  misc_feature (89)..(288): NCBI GI NO: 4760596 NR Description: DNA-binding protein NtWRKY3 [Nicotiana tabacum]
  misc_feature (1)..(91): NCBI GI NO: 4760596 NR Description: DNA-binding protein NtWRKY3 [Nicotiana tabacum]
  misc_feature (47)..(299): NCBI GI NO: 18400580 NR Description: WRKY family transcription factor
  misc_feature (47)..(290): NCBI GI NO: 25348152 NR Description: probable WRKY-type DNA binding protein
  misc_feature (47)..(299): NCBI GI NO: 22329054 NR Description: WRKY family transcription factor
  misc_feature (47)..(299): NCBI GI NO: 30689072 NR Description: WRKY family transcription factor
  misc_feature (47)..(299): NCBI GI NO: 16604573 NR Description: putative putaive DNA-binding protein
  misc_feature (47)..(299): NCBI GI NO: 21537078 NR Description: putaive DNA-binding protein [Arabidopsis thaliana]
  misc_feature (47)..(284): NCBI GI NO: 38568048 NR Description: OSJNBa0065J03.18
  misc_feature (8)..(284): NCBI GI NO: 4894963 NR Description: DNA-binding protein WRKY3 [Avena sativa]
MTVELMGFPKMEEQKAIQEAASEGLKAMEHLLRLLSYQPSHLHAHHTDATVSNFKKLISLLSRRTGHARFRRAPLPSPPPANPVTLHQPPSTFVPSHSQSLTLDFTKPSIFASNAKSMDLQFSKETFSVSSNSSFMSSAITGDASVSYGKLGSSLFLTPPPVSAGKPPLSSAPIKKRCHDHREHSDEISGKLSGSSKCHCTKRRKNRVKKTVRVPVISSKIADIPPDEYSWRKYGQKPIKGSPYPRGYYKCSSVIGCPARKHVERAPDDPTMLIVTYEGEHRHSMQENISGGVGLGFEST

SEQ ID NO: 9238 - protein, 295 aa, Glycine max
  peptide (1)..(295): Ceres Seq. ID no. 14314911
  misc_feature (220)..(279): Pfam Name: Pfam Description:  WRKY DNA -binding domain
  misc_feature (84)..(283): NCBI GI NO: 4760596 NR Description: DNA-binding protein NtWRKY3 [Nicotiana tabacum]
  misc_feature (1)..(86): NCBI GI NO: 4760596 NR Description: DNA-binding protein NtWRKY3 [Nicotiana tabacum]
  misc_feature (42)..(294): NCBI GI NO: 18400580 NR Description: WRKY family transcription factor
  misc_feature (42)..(285): NCBI GI NO: 25348152 NR Description: probable WRKY-type DNA binding protein
  misc_feature (42)..(294): NCBI GI NO: 22329054 NR Description: WRKY family transcription factor
  misc_feature (42)..(294): NCBI GI NO: 30689072 NR Description: WRKY family transcription factor
  misc_feature (42)..(294): NCBI GI NO: 16604573 NR Description: putative putaive DNA-binding protein
  misc_feature (42)..(294): NCBI GI NO: 21537078 NR Description: putaive DNA-binding protein [Arabidopsis thaliana]
  misc_feature (42)..(279): NCBI GI NO: 38568048 NR Description: OSJNBa0065J03.18
  misc_feature (3)..(279): NCBI GI NO: 4894963 NR Description: DNA-binding protein WRKY3 [Avena sativa]
MGFPKMEEQKAIQEAASEGLKAMEHLLRLLSYQPSHLHAHHTDATVSNFKKLISLLSRRTGHARFRRAPLPSPPPANPVTLHQPPSTFVPSHSQSLTLDFTKPSIFASNAKSMDLQFSKETFSVSSNSSFMSSAITGDASVSYGKLGSSLFLTPPPVSAGKPPLSSAPIKKRCHDHREHSDEISGKLSGSSKCHCTKRRKNRVKKTVRVPVISSKIADIPPDEYSWRKYGQKPIKGSPYPRGYYKCSSVIGCPARKHVERAPDDPTMLIVTYEGEHRHSMQENISGGVGLGFEST

SEQ ID NO: 9239 - protein, 290 aa, Glycine max
  peptide (1)..(290): Ceres Seq. ID no. 14314912
  misc_feature (215)..(274): Pfam Name: Pfam Description:  WRKY DNA -binding domain
  misc_feature (79)..(278): NCBI GI NO: 4760596 NR Description: DNA-binding protein NtWRKY3 [Nicotiana tabacum]
  misc_feature (1)..(81): NCBI GI NO: 4760596 NR Description: DNA-binding protein NtWRKY3 [Nicotiana tabacum]
  misc_feature (37)..(289): NCBI GI NO: 18400580 NR Description: WRKY family transcription factor
  misc_feature (37)..(280): NCBI GI NO: 25348152 NR Description: probable WRKY-type DNA binding protein
  misc_feature (37)..(289): NCBI GI NO: 22329054 NR Description: WRKY family transcription factor
  misc_feature (37)..(289): NCBI GI NO: 30689072 NR Description: WRKY family transcription factor
  misc_feature (37)..(289): NCBI GI NO: 16604573 NR Description: putative putaive DNA-binding protein
  misc_feature (37)..(289): NCBI GI NO: 21537078 NR Description: putaive DNA-binding protein [Arabidopsis thaliana]
  misc_feature (37)..(274): NCBI GI NO: 38568048 NR Description: OSJNBa0065J03.18
  misc_feature (1)..(274): NCBI GI NO: 4894963 NR Description: DNA-binding protein WRKY3 [Avena sativa]
MEEQKAIQEAASEGLKAMEHLLRLLSYQPSHLHAHHTDATVSNFKKLISLLSRRTGHARFRRAPLPSPPPANPVTLHQPPSTFVPSHSQSLTLDFTKPSIFASNAKSMDLQFSKETFSVSSNSSFMSSAITGDASVSYGKLGSSLFLTPPPVSAGKPPLSSAPIKKRCHDHREHSDEISGKLSGSSKCHCTKRRKNRVKKTVRVPVISSKIADIPPDEYSWRKYGQKPIKGSPYPRGYYKCSSVIGCPARKHVERAPDDPTMLIVTYEGEHRHSMQENISGGVGLGFEST

SEQ ID NO: 9240 - DNA, 1231 bp, Glycine max
  misc_feature (1)..(1231): Ceres Seq. ID no. 15177031
aaaaaagttgaagaatatgagcagcagtgcagggaagttggtgtgtgtcaccggtgctgccggttatattgcttcatggattgtcaagttcctacttgaacgtggttacactgtcagggccactgttcgaaacccaaatgatcacacgaaggtagaacatttgctaaaacttgaaggtgcaaaggagagactgcacctttttaaggcagatcttttgggtgaaaattcttttgactccattgttgagggctgtgatggcgtctttcatactgcttctccttttattatcaacgtcaaagacccacaggctgacctacttgacccagcagtgaagggaactcttaacgttcttaaatcatgtgtaaaatcgccatctgtgaaacgagtcatcttaacatcttctgtggctgcagttgcatataataaaaggcctaaaagtcctgaagttgtagttgatgaaacctggtggtctgatccagattactgtaaggaattaaagctgtggtatttactttcaaagactttggctgaagatgctgcctggaaatttgccaaagaaaacgaccttgacttggttgttgttaacccagcaatggttgtagggcctcttttgcaagcagagcttaacactagtgctgctattattttaaacctaataaatggttcagaaactttttcaaatgatacatatggatggatcaatgtgaaagatgttgcaaacgcccatattcaggcatatgagattgcttcagctagtggaagatattgtttagttgagagagtggcacactactctgaactcgccaggattttacgtgatcagtacccgacatatcaaattccagaaaagtctgcagacgataagccttatgtaccaacatttcaggtttccaaagaaaaggcaaagaccttggggattgaatttattcctttggaagtgagtcttagagagacagtggaaactttgaaagaaaagaactttgccaacttttagtctctgatatctctgcttgatcaggagtgaacacgttgagaatctcaacggtgtttcgtttgtggttctggttttagaatctcattgcttgaaaataaactattgtactgaaatgtcaagcttgtgtgttgtaataaaacaagattaattgttggttttatttcggtttgtactcatgaaggaaaccaacgtgtggtataaaaagataataattaagtatcaggctatttctagtcc

SEQ ID NO: 9241 - protein, 330 aa, Glycine max
  peptide (1)..(330): Ceres Seq. ID no. 15177032
  misc_feature (10)..(245): Pfam Name: Pfam Description:  3-beta hydroxysteroid dehydrogenase/ isomerase family
  misc_feature (6)..(330): NCBI GI NO: 7488627 NR Description: probable cinnamyl-alcohol dehydrogenase (EC1
  misc_feature (7)..(330): NCBI GI NO: 7431409 NR Description: cinnamyl-alcohol dehydrogenase (EC 1
  misc_feature (6)..(327): NCBI GI NO: 5852203 NR Description: aldehyde reductase [Vigna radiata]
  misc_feature (6)..(330): NCBI GI NO: 37029996 NR Description: NADPH-dependent cinnamyl alcohol dehydrogenase
  misc_feature (6)..(330): NCBI GI NO: 30694964 NR Description: cinnamyl-alcohol dehydrogenase (CAD), putative
  misc_feature (6)..(330): NCBI GI NO: 7431406 NR Description: probable cinnamyl-alcohol dehydrogenase (EC1
  misc_feature (12)..(330): NCBI GI NO: 25405464 NR Description: hypothetical protein F5D21.12
  misc_feature (7)..(330): NCBI GI NO: 15239741 NR Description: cinnamyl-alcohol dehydrogenase (CAD), putative
  misc_feature (7)..(330): NCBI GI NO: 21594240 NR Description: cinnamyl-alcohol dehydrogenase-like protein
  misc_feature (1)..(330): NCBI GI NO: 34913420 NR Description: putative cinnamyl-alcohol dehydrogenase
KKLKNMSSSAGKLVCVTGAAGYIASWIVKFLLERGYTVRATVRNPNDHTKVEHLLKLEGAKERLHLFKADLLGENSFDSIVEGCDGVFHTASPFIINVKDPQADLLDPAVKGTLNVLKSCVKSPSVKRVILTSSVAAVAYNKRPKSPEVVVDETWWSDPDYCKELKLWYLLSKTLAEDAAWKFAKENDLDLVVVNPAMVVGPLLQAELNTSAAIILNLINGSETFSNDTYGWINVKDVANAHIQAYEIASASGRYCLVERVAHYSELARILRDQYPTYQIPEKSADDKPYVPTFQVSKEKAKTLGIEFIPLEVSLRETVETLKEKNFANF

SEQ ID NO: 9242 - protein, 325 aa, Glycine max
  peptide (1)..(325): Ceres Seq. ID no. 15177033
  misc_feature (5)..(240): Pfam Name: Pfam Description:  3-beta hydroxysteroid dehydrogenase/ isomerase family
  misc_feature (1)..(325): NCBI GI NO: 7488627 NR Description: probable cinnamyl-alcohol dehydrogenase (EC1
  misc_feature (2)..(325): NCBI GI NO: 7431409 NR Description: cinnamyl-alcohol dehydrogenase (EC 1
  misc_feature (1)..(322): NCBI GI NO: 5852203 NR Description: aldehyde reductase [Vigna radiata]
  misc_feature (1)..(325): NCBI GI NO: 37029996 NR Description: NADPH-dependent cinnamyl alcohol dehydrogenase
  misc_feature (1)..(325): NCBI GI NO: 30694964 NR Description: cinnamyl-alcohol dehydrogenase (CAD), putative
  misc_feature (1)..(325): NCBI GI NO: 7431406 NR Description: probable cinnamyl-alcohol dehydrogenase (EC1
  misc_feature (7)..(325): NCBI GI NO: 25405464 NR Description: hypothetical protein F5D21.12
  misc_feature (2)..(325): NCBI GI NO: 15239741 NR Description: cinnamyl-alcohol dehydrogenase (CAD), putative
  misc_feature (2)..(325): NCBI GI NO: 21594240 NR Description: cinnamyl-alcohol dehydrogenase-like protein
  misc_feature (1)..(325): NCBI GI NO: 34913420 NR Description: putative cinnamyl-alcohol dehydrogenase
MSSSAGKLVCVTGAAGYIASWIVKFLLERGYTVRATVRNPNDHTKVEHLLKLEGAKERLHLFKADLLGENSFDSIVEGCDGVFHTASPFIINVKDPQADLLDPAVKGTLNVLKSCVKSPSVKRVILTSSVAAVAYNKRPKSPEVVVDETWWSDPDYCKELKLWYLLSKTLAEDAAWKFAKENDLDLVVVNPAMVVGPLLQAELNTSAAIILNLINGSETFSNDTYGWINVKDVANAHIQAYEIASASGRYCLVERVAHYSELARILRDQYPTYQIPEKSADDKPYVPTFQVSKEKAKTLGIEFIPLEVSLRETVETLKEKNFANF

SEQ ID NO: 9243 - DNA, 1294 bp, Glycine max
  misc_feature (1)..(1294): Ceres Seq. ID no. 13594429
cctagaacatcataatcgaaaaaaatcactgagtctcacaccaaccaacaatcaacaacaagaacttagccacatacatacagaatacagattaataacccaaccacatgccaaacaccactgaagaattccataacaacaactgcttcgagtctctccatgtttcccttcgcaacctctcccaactcagcacccgaatggattcccttcaaagcttcctgtcccattccatccaatcccacactctcctcactcaccaccaaatgagcacagtctccaacgagatcctaaccgccattcgccacgtcatcaccaacagcgccgccctcgtcgccgcctcgggaaacgtgctccctctctcggagactccgactttggactctccgaacctcaacaacaacaacagcaacgacaacgtggtggagctcgacgcgatggagctgctggcgaagcaccttcacttctgcgaggtgtgcgggaaaggcttcacgcgcgacgcgaatctgagaatgcacatgcgcgcgcacggggacgagttcaagaccccggaggcactcgccaacaaggcgcgtggggagacgcgcctcaaggcggcgcggttttcgtgccccttggaggggtgcaaccgtaacaagacgcacaagaagttcaggccgttgaagtcggtgttctgtctgaggaaccacttcaagaggagccactgtcccaaaacgctgtcgtgccagcggtgtcggaagaagagcttcgcggtgctgtcggacttgaggagccacgtcaagcagtgtcggggagaggccacgtggaagtgctcatgcgggactacgttttcgaggaaggacaagctgttgggacacgtggcgctgttcgaggggcattcgccgatgcttgaagaggaggccccagtggcagtggcggtgaaggaaagtgagggtggtttggatgggttacctgaagggttctttgatggtttggatgaatttggatttggatccattcaaaacaactgttcacatgcaggagcaagcttagccttagggcttccctcaaataatttatatgcatgggaactctctttttctaatttaatctagaagctaaataatcaaattcaacactgaaaagtgtcatataatgcaatcaattctttataaatttaatttataaatatattaaaaatgkgatagattagctttwttwtttaaaaaaaaaaaaaaaaaaaaaaaaaaaaaaaaaaaaaaaaaaycmmaaaaaaaaaaaaaaaagsttwttcratmccgycgaccctcgagggggg

SEQ ID NO: 9244 - protein, 327 aa, Glycine max
  peptide (1)..(327): Ceres Seq. ID no. 15221349
  misc_feature (118)..(140): Pfam Name: Pfam Description:  Zinc finger, C2H2 type
  misc_feature (104)..(298): NCBI GI NO: 15218606 NR Description: zinc finger protein -related
  misc_feature (104)..(298): NCBI GI NO: 21593564 NR Description: zinc finger protein, putative
  misc_feature (104)..(275): NCBI GI NO: 34908682 NR Description: putative zinc finger protein
  misc_feature (88)..(271): NCBI GI NO: 10177236 NR Description: contains similarity to C2H2-type zinc fingerprotein~gene_id:MRN17
  misc_feature (88)..(271): NCBI GI NO: 30688719 NR Description: expressed protein [Arabidopsis thaliana]
  misc_feature (103)..(259): NCBI GI NO: 10241636 NR Description: putative zinc finger protein
  misc_feature (103)..(259): NCBI GI NO: 38346456 NR Description: OSJNBa0019G23.4
  misc_feature (104)..(263): NCBI GI NO: 28376689 NR Description: putative zinc finger protein
  misc_feature (23)..(257): NCBI GI NO: 15222242 NR Description: zinc finger protein -related
  misc_feature (111)..(274): NCBI GI NO: 34908460 NR Description: P0683F02.21
MPNTTEEFHNNNCFESLHVSLRNLSQLSTRMDSLQSFLSHSIQSHTLLTHHQMSTVSNEILTAIRHVITNSAALVAASGNVLPLSETPTLDSPNLNNNNSNDNVVELDAMELLAKHLHFCEVCGKGFTRDANLRMHMRAHGDEFKTPEALANKARGETRLKAARFSCPLEGCNRNKTHKKFRPLKSVFCLRNHFKRSHCPKTLSCQRCRKKSFAVLSDLRSHVKQCRGEATWKCSCGTTFSRKDKLLGHVALFEGHSPMLEEEAPVAVAVKESEGGLDGLPEGFFDGLDEFGFGSIQNNCSHAGASLALGLPSNNLYAWELSFSNLI

SEQ ID NO: 9245 - protein, 297 aa, Glycine max
  peptide (1)..(297): Ceres Seq. ID no. 15221350
  misc_feature (88)..(110): Pfam Name: Pfam Description:  Zinc finger, C2H2 type
  misc_feature (74)..(268): NCBI GI NO: 15218606 NR Description: zinc finger protein -related
  misc_feature (74)..(268): NCBI GI NO: 21593564 NR Description: zinc finger protein, putative
  misc_feature (74)..(245): NCBI GI NO: 34908682 NR Description: putative zinc finger protein
  misc_feature (58)..(241): NCBI GI NO: 10177236 NR Description: contains similarity to C2H2-type zinc fingerprotein~gene_id:MRN17
  misc_feature (58)..(241): NCBI GI NO: 30688719 NR Description: expressed protein [Arabidopsis thaliana]
  misc_feature (73)..(229): NCBI GI NO: 10241636 NR Description: putative zinc finger protein
  misc_feature (73)..(229): NCBI GI NO: 38346456 NR Description: OSJNBa0019G23.4
  misc_feature (74)..(233): NCBI GI NO: 28376689 NR Description: putative zinc finger protein
  misc_feature (1)..(227): NCBI GI NO: 15222242 NR Description: zinc finger protein -related
  misc_feature (81)..(244): NCBI GI NO: 34908460 NR Description: P0683F02.21
MDSLQSFLSHSIQSHTLLTHHQMSTVSNEILTAIRHVITNSAALVAASGNVLPLSETPTLDSPNLNNNNSNDNVVELDAMELLAKHLHFCEVCGKGFTRDANLRMHMRAHGDEFKTPEALANKARGETRLKAARFSCPLEGCNRNKTHKKFRPLKSVFCLRNHFKRSHCPKTLSCQRCRKKSFAVLSDLRSHVKQCRGEATWKCSCGTTFSRKDKLLGHVALFEGHSPMLEEEAPVAVAVKESEGGLDGLPEGFFDGLDEFGFGSIQNNCSHAGASLALGLPSNNLYAWELSFSNLI

SEQ ID NO: 9246 - protein, 275 aa, Glycine max
  peptide (1)..(275): Ceres Seq. ID no. 15221351
  misc_feature (66)..(88): Pfam Name: Pfam Description:  Zinc finger, C2H2 type
  misc_feature (52)..(246): NCBI GI NO: 15218606 NR Description: zinc finger protein -related
  misc_feature (52)..(246): NCBI GI NO: 21593564 NR Description: zinc finger protein, putative
  misc_feature (52)..(223): NCBI GI NO: 34908682 NR Description: putative zinc finger protein
  misc_feature (36)..(219): NCBI GI NO: 10177236 NR Description: contains similarity to C2H2-type zinc fingerprotein~gene_id:MRN17
  misc_feature (36)..(219): NCBI GI NO: 30688719 NR Description: expressed protein [Arabidopsis thaliana]
  misc_feature (51)..(207): NCBI GI NO: 10241636 NR Description: putative zinc finger protein
  misc_feature (51)..(207): NCBI GI NO: 38346456 NR Description: OSJNBa0019G23.4
  misc_feature (52)..(211): NCBI GI NO: 28376689 NR Description: putative zinc finger protein
  misc_feature (1)..(205): NCBI GI NO: 15222242 NR Description: zinc finger protein -related
  misc_feature (59)..(222): NCBI GI NO: 34908460 NR Description: P0683F02.21
MSTVSNEILTAIRHVITNSAALVAASGNVLPLSETPTLDSPNLNNNNSNDNVVELDAMELLAKHLHFCEVCGKGFTRDANLRMHMRAHGDEFKTPEALANKARGETRLKAARFSCPLEGCNRNKTHKKFRPLKSVFCLRNHFKRSHCPKTLSCQRCRKKSFAVLSDLRSHVKQCRGEATWKCSCGTTFSRKDKLLGHVALFEGHSPMLEEEAPVAVAVKESEGGLDGLPEGFFDGLDEFGFGSIQNNCSHAGASLALGLPSNNLYAWELSFSNLI

SEQ ID NO: 9247 - DNA, 625 bp, Glycine max
  misc_feature (1)..(625): Ceres Seq. ID no. 15172828
aatttatctttggggaggcgggccgggattggagacagagcccacaaggcaacaacaaagtgcgcgtgagaaatcaacaagcggtgcttgccgagaagagagagagagagatggcggcgtcggcggcgacggcaacggcggcggcggtgggggcgggggaggtgatctccgtccacaccctggagcagtggaccatgcagatcgaggaggccaacgccgccaagaagctggtggtggttgacttcactgcatcatggtgtggaccatgccgcatcatggctccagttttcgctgatctcgccaagaagttcccaaatgctgttttcctcaaggtcgatgtcgatgaactgaagcccattgcggagcaattcagcgttgaggccatgccaaccttcctgttcattaaggaaggagatgtcaaggacagggttgtgggagctatcaaggaggaactgacgaacaaggttgggctacacgcggcggcccagtaatcacctagcggagtagtattcgcctaaataaaattgtggctcaagaagcggtgcctctaatggcaccttatatcctgtgtactgcttgttacttgttggttggatgatggtgaatcaagtgtgactttattcgg

SEQ ID NO: 9248 - protein, 162 aa, Glycine max
  peptide (1)..(162): Ceres Seq. ID no. 15172829
  misc_feature (54)..(160): Pfam Name: Pfam Description:  Thioredoxin
  misc_feature (37)..(160): NCBI GI NO: 8980491 NR Description: thioredoxin h [Triticum aestivum]
  misc_feature (37)..(160): NCBI GI NO: 11135126 NR Description: Thioredoxin H-type (TRX-H) (TrxTa)
  misc_feature (38)..(161): NCBI GI NO: 2995380 NR Description: thioredoxin H [Triticum turgidum subsp. durum]
  misc_feature (41)..(162): NCBI GI NO: 32186042 NR Description: thioredoxin h isoform 2; HvTrxh2
  misc_feature (37)..(160): NCBI GI NO: 12082335 NR Description: thioredoxin h
  misc_feature (50)..(158): NCBI GI NO: 1388084 NR Description: thioredoxin h
  misc_feature (50)..(158): NCBI GI NO: 15219537 NR Description: thioredoxin H-type 5 (TRX-H-5)
  misc_feature (52)..(160): NCBI GI NO: 15230385 NR Description: thioredoxin H-type 1 (TRX-H-1)
  misc_feature (52)..(160): NCBI GI NO: 27466894 NR Description: thioredoxin h [Pisum sativum]
  misc_feature (52)..(158): NCBI GI NO: 15239136 NR Description: thioredoxin H-type 3 (TRX-H-3)
FIFGEAGRDWRQSPQGNNKVRVRNQQAVLAEKREREMAASAATATAAAVGAGEVISVHTLEQWTMQIEEANAAKKLVVVDFTASWCGPCRIMAPVFADLAKKFPNAVFLKVDVDELKPIAEQFSVEAMPTFLFIKEGDVKDRVVGAIKEELTNKVGLHAAAQ

SEQ ID NO: 9249 - protein, 126 aa, Glycine max
  peptide (1)..(126): Ceres Seq. ID no. 15172830
  misc_feature (18)..(124): Pfam Name: Pfam Description:  Thioredoxin
  misc_feature (1)..(124): NCBI GI NO: 8980491 NR Description: thioredoxin h [Triticum aestivum]
  misc_feature (1)..(124): NCBI GI NO: 11135126 NR Description: Thioredoxin H-type (TRX-H) (TrxTa)
  misc_feature (2)..(125): NCBI GI NO: 2995380 NR Description: thioredoxin H [Triticum turgidum subsp. durum]
  misc_feature (5)..(126): NCBI GI NO: 32186042 NR Description: thioredoxin h isoform 2; HvTrxh2
  misc_feature (1)..(124): NCBI GI NO: 12082335 NR Description: thioredoxin h
  misc_feature (14)..(122): NCBI GI NO: 1388084 NR Description: thioredoxin h
  misc_feature (14)..(122): NCBI GI NO: 15219537 NR Description: thioredoxin H-type 5 (TRX-H-5)
  misc_feature (16)..(124): NCBI GI NO: 15230385 NR Description: thioredoxin H-type 1 (TRX-H-1)
  misc_feature (16)..(124): NCBI GI NO: 27466894 NR Description: thioredoxin h [Pisum sativum]
  misc_feature (16)..(122): NCBI GI NO: 15239136 NR Description: thioredoxin H-type 3 (TRX-H-3)
MAASAATATAAAVGAGEVISVHTLEQWTMQIEEANAAKKLVVVDFTASWCGPCRIMAPVFADLAKKFPNAVFLKVDVDELKPIAEQFSVEAMPTFLFIKEGDVKDRVVGAIKEELTNKVGLHAAAQ

SEQ ID NO: 9250 - protein, 98 aa, Glycine max
  peptide (1)..(98): Ceres Seq. ID no. 15172831
  misc_feature (1)..(96): Pfam Name: Pfam Description:  Thioredoxin
  misc_feature (1)..(96): NCBI GI NO: 8980491 NR Description: thioredoxin h [Triticum aestivum]
  misc_feature (1)..(96): NCBI GI NO: 11135126 NR Description: Thioredoxin H-type (TRX-H) (TrxTa)
  misc_feature (1)..(97): NCBI GI NO: 2995380 NR Description: thioredoxin H [Triticum turgidum subsp. durum]
  misc_feature (1)..(98): NCBI GI NO: 32186042 NR Description: thioredoxin h isoform 2; HvTrxh2
  misc_feature (1)..(96): NCBI GI NO: 12082335 NR Description: thioredoxin h
  misc_feature (1)..(94): NCBI GI NO: 1388084 NR Description: thioredoxin h
  misc_feature (1)..(94): NCBI GI NO: 15219537 NR Description: thioredoxin H-type 5 (TRX-H-5)
  misc_feature (1)..(96): NCBI GI NO: 15230385 NR Description: thioredoxin H-type 1 (TRX-H-1)
  misc_feature (1)..(96): NCBI GI NO: 27466894 NR Description: thioredoxin h [Pisum sativum]
  misc_feature (1)..(94): NCBI GI NO: 15239136 NR Description: thioredoxin H-type 3 (TRX-H-3)
MQIEEANAAKKLVVVDFTASWCGPCRIMAPVFADLAKKFPNAVFLKVDVDELKPIAEQFSVEAMPTFLFIKEGDVKDRVVGAIKEELTNKVGLHAAAQ

SEQ ID NO: 9251 - DNA, 1061 bp, Glycine max
  misc_feature (1)..(1061): Ceres Seq. ID no. 14314939
aattcaggcgatggcgccgcgtctctggtcctgcttccgcagcagcagtagcaagggcagcaccaccggcggcggtgtctccgacgcctccgcctcgcggcgcgtggtgactgcggacctgacatcggaggagcagaagcgcgggggcccggtggtggtggagatgttctcgtcgcaggggtgcgcgacttcaccggcggcggagctggtgctgtcgcggctggggagaggggatttcgagctggaggcgccggtggtggtgctggctttccacgttgactactgggactatatgggatggaaggatccgttcggggccagccagtggacggttcggcagaaggcctatgttgaggcccttgggcttgacaccattttcacgccacaggttgtggttcagggaaaggcccagtgtgttggaaatgacgagaacgcccttgtttctgccattactagtgctcctaggttccctgctccaaccttccaggcaactttcaccaggcctgcaccagattcattgcaagtgtccctaacaggagcattgaggaccaaggtggacagcgatggcgcgaatgtcatggttgcattatacgaaaacggtttggtcaccgattgtccaagaggggagaacaaagggcgtgtcctatccaacgactatgttgttagaaagctcgaaaagctctgcactgtcaaagacatctctgccaagaaaacagtatcaggaatggttaactttcccttatgggaaggattcaaaagcagcaaatgtggtttggctgtctttgttcagagcaaatctcaccagatttttggttcacagagttttcagctgccggatgatatatgattctgattctttagtttcatttgatctgcttgctgttatcatattcgggttacattgtgttttgttaggctatatgtacagattgtgatatgatttaggataataaatgttgttttctttcttttcttacatattttttcctatgtactttgtccttccttactattgaccctatgtttaggagatggagagagaagtctaaatttgtggcgtg

SEQ ID NO: 9252 - protein, 281 aa, Glycine max
  peptide (1)..(281): Ceres Seq. ID no. 14314940
  misc_feature (4)..(281): NCBI GI NO: 15239579 NR Description: expressed protein [Arabidopsis thaliana]
  misc_feature (4)..(281): NCBI GI NO: 15234089 NR Description: membrane lipo protein lipid attachment site-containing expressed protein
  misc_feature (4)..(281): NCBI GI NO: 21593063 NR Description: unknown [Arabidopsis thaliana]
  misc_feature (4)..(281): NCBI GI NO: 13265463 NR Description: AT4g27350 [Arabidopsis thaliana]
  misc_feature (4)..(281): NCBI GI NO: 34394018 NR Description: membrane lipo protein lipid attachment site-containing protein -like
  misc_feature (209)..(281): NCBI GI NO: 28393652 NR Description: unknown protein [Arabidopsis thaliana]
  misc_feature (35)..(227): NCBI GI NO: 22962198 NR Description: hypothetical protein [Rhodopseudomonas palustris]
  misc_feature (50)..(222): NCBI GI NO: 23014426 NR Description: hypothetical protein
  misc_feature (40)..(216): NCBI GI NO: 15889939 NR Description: AGR_C_4864p [Agrobacterium tumefaciens]
  misc_feature (45)..(225): NCBI GI NO: 22959698 NR Description: hypothetical protein [Rhodobacter sphaeroides]
IQAMAPRLWSCFRSSSSKGSTTGGGVSDASASRRVVTADLTSEEQKRGGPVVVEMFSSQGCATSPAAELVLSRLGRGDFELEAPVVVLAFHVDYWDYMGWKDPFGASQWTVRQKAYVEALGLDTIFTPQVVVQGKAQCVGNDENALVSAITSAPRFPAPTFQATFTRPAPDSLQVSLTGALRTKVDSDGANVMVALYENGLVTDCPRGENKGRVLSNDYVVRKLEKLCTVKDISAKKTVSGMVNFPLWEGFKSSKCGLAVFVQSKSHQIFGSQSFQLPDDI

SEQ ID NO: 9253 - protein, 278 aa, Glycine max
  peptide (1)..(278): Ceres Seq. ID no. 14314941
  misc_feature (1)..(278): NCBI GI NO: 15239579 NR Description: expressed protein [Arabidopsis thaliana]
  misc_feature (1)..(278): NCBI GI NO: 15234089 NR Description: membrane lipo protein lipid attachment site-containing expressed protein
  misc_feature (1)..(278): NCBI GI NO: 21593063 NR Description: unknown [Arabidopsis thaliana]
  misc_feature (1)..(278): NCBI GI NO: 13265463 NR Description: AT4g27350 [Arabidopsis thaliana]
  misc_feature (1)..(278): NCBI GI NO: 34394018 NR Description: membrane lipo protein lipid attachment site-containing protein -like
  misc_feature (206)..(278): NCBI GI NO: 28393652 NR Description: unknown protein [Arabidopsis thaliana]
  misc_feature (32)..(224): NCBI GI NO: 22962198 NR Description: hypothetical protein [Rhodopseudomonas palustris]
  misc_feature (47)..(219): NCBI GI NO: 23014426 NR Description: hypothetical protein
  misc_feature (37)..(213): NCBI GI NO: 15889939 NR Description: AGR_C_4864p [Agrobacterium tumefaciens]
  misc_feature (42)..(222): NCBI GI NO: 22959698 NR Description: hypothetical protein [Rhodobacter sphaeroides]
MAPRLWSCFRSSSSKGSTTGGGVSDASASRRVVTADLTSEEQKRGGPVVVEMFSSQGCATSPAAELVLSRLGRGDFELEAPVVVLAFHVDYWDYMGWKDPFGASQWTVRQKAYVEALGLDTIFTPQVVVQGKAQCVGNDENALVSAITSAPRFPAPTFQATFTRPAPDSLQVSLTGALRTKVDSDGANVMVALYENGLVTDCPRGENKGRVLSNDYVVRKLEKLCTVKDISAKKTVSGMVNFPLWEGFKSSKCGLAVFVQSKSHQIFGSQSFQLPDDI

SEQ ID NO: 9254 - protein, 227 aa, Glycine max
  peptide (1)..(227): Ceres Seq. ID no. 14314942
  misc_feature (1)..(227): NCBI GI NO: 15239579 NR Description: expressed protein [Arabidopsis thaliana]
  misc_feature (1)..(227): NCBI GI NO: 15234089 NR Description: membrane lipo protein lipid attachment site-containing expressed protein
  misc_feature (1)..(227): NCBI GI NO: 21593063 NR Description: unknown [Arabidopsis thaliana]
  misc_feature (1)..(227): NCBI GI NO: 13265463 NR Description: AT4g27350 [Arabidopsis thaliana]
  misc_feature (1)..(227): NCBI GI NO: 34394018 NR Description: membrane lipo protein lipid attachment site-containing protein -like
  misc_feature (155)..(227): NCBI GI NO: 28393652 NR Description: unknown protein [Arabidopsis thaliana]
  misc_feature (1)..(173): NCBI GI NO: 22962198 NR Description: hypothetical protein [Rhodopseudomonas palustris]
  misc_feature (1)..(168): NCBI GI NO: 23014426 NR Description: hypothetical protein
  misc_feature (1)..(162): NCBI GI NO: 15889939 NR Description: AGR_C_4864p [Agrobacterium tumefaciens]
  misc_feature (1)..(171): NCBI GI NO: 22959698 NR Description: hypothetical protein [Rhodobacter sphaeroides]
MFSSQGCATSPAAELVLSRLGRGDFELEAPVVVLAFHVDYWDYMGWKDPFGASQWTVRQKAYVEALGLDTIFTPQVVVQGKAQCVGNDENALVSAITSAPRFPAPTFQATFTRPAPDSLQVSLTGALRTKVDSDGANVMVALYENGLVTDCPRGENKGRVLSNDYVVRKLEKLCTVKDISAKKTVSGMVNFPLWEGFKSSKCGLAVFVQSKSHQIFGSQSFQLPDDI

SEQ ID NO: 9255 - DNA, 1624 bp, Glycine max
  misc_feature (1)..(1624): Ceres Seq. ID no. 15225233
  misc_feature (31)..(31): n is a, c, t, g, unknown, or other
ttctgtcagtttaagactttattgtatagtnatacctattgggtagttaagatttatttctaaaacatctgataggtgtggattacttatattggagcgaagctggattctagcctcgcaaaatctgaaacatcaccctctgacttcacaagattaaaagattcaaagatttgcgaggtagcctctcatgcttgtttctactccattttaatggaaataaatcctcgaactttcagccgagttctttaggataagaggctaaatattcgatcacatgtactagtatatgttatccatattttaaggcaatgctcaaattgattattagattaattcaaagttagtaacttactataaaaaaaaaaaaaaaagctaacgttttaatttgtgggctgagcctggtttttctgggtacaaggccagaacccaacttgtagaaattcaagccaccactcatgatttttacatgagagggctatctgaaaatcgcattgataagaaagtttaatgatggaagcgggaactgctctcagtctccgactccacactcgcattcccattcccatcaacactgccaattcaaataccttattattccaacctcgcttcactctttcatctcattctccttcttccttttccgcttacagttacagaggccccacaccaaaacgccccttcctcgccgactgggtctcccaaaacgacgacgtcgttcgcaccctcccaatctacgtcggctctgcctccctcttcgccatcctcctaaaccgctccctgtccggcatcgcccccgtcgtcgacgccggcagttcgcagtcccgagctgacctcttgactttgggattggccgttaccaatattttggcaggcctcgtttggctttcagtaaaacctaaatctattactgtggtaaatcctcgaggagttgaatgcaagagtttgtgcgctacactccctgaagttgcacgtaatgagttgctttgggtgtgggaatctctatcagatgccacttgttgtcgttcacttgttgttgtttatgagagcagttgtgtactccaaattggttttgcagcagaatcttctcctggggatggtgacgctgtaagtgtggatgccaataaattgatgcaaggatcagtataccagggggttatgaaatctggtgctcagagttacttggctaatctatctctttatcctgggaaatctgagctgccatttctaccttcaaatacacaggcagtaattttacaaccacttggagataaagggattgcaattattggtggtgacacgatacgaggtttcactggttctgatcaggtgtggattacttatattggagcgaagctggattctagccttgcaaaatatctgaaacatcaccctctgacttcacaagattaaaagattcaaagatttgcgaggtagcctctcatgcttgtttctactccattttaatggaaataaatcctcgaactttcagccgagttctttaggataagaggctaaatattcgatcacatgtactagtatatgttatccatattttaaggcaatgctcaaattgattattagattaattcaaagttagtaacttactataaaaaaaaaaaaaaaa

SEQ ID NO: 9256 - protein, 300 aa, Glycine max
  peptide (1)..(300): Ceres Seq. ID no. 15225234
  misc_feature (2)..(290): NCBI GI NO: 34146872 NR Description: At1g59840 [Arabidopsis thaliana]
  misc_feature (2)..(290): NCBI GI NO: 15218930 NR Description: expressed protein [Arabidopsis thaliana]
  misc_feature (28)..(289): NCBI GI NO: 38345907 NR Description: OSJNBb0059K02.12
  misc_feature (102)..(287): NCBI GI NO: 17231313 NR Description: hypothetical protein [Nostoc sp. PCC 7120]
  misc_feature (103)..(288): NCBI GI NO: 23127716 NR Description: hypothetical protein [Nostoc punctiforme]
  misc_feature (77)..(288): NCBI GI NO: 16331001 NR Description: unknown protein [Synechocystis sp. PCC 6803]
  misc_feature (102)..(291): NCBI GI NO: 23039835 NR Description: hypothetical protein
  misc_feature (103)..(289): NCBI GI NO: 22298227 NR Description: ORF_ID:tll0685~hypothetical protein
  misc_feature (91)..(287): NCBI GI NO: 37523882 NR Description: hypothetical protein gll4313
  misc_feature (85)..(287): NCBI GI NO: 33865754 NR Description: conserved hypothetical protein
MMEAGTALSLRLHTRIPIPINTANSNTLLFQPRFTLSSHSPSSFSAYSYRGPTPKRPFLADWVSQNDDVVRTLPIYVGSASLFAILLNRSLSGIAPVVDAGSSQSRADLLTLGLAVTNILAGLVWLSVKPKSITVVNPRGVECKSLCATLPEVARNELLWVWESLSDATCCRSLVVVYESSCVLQIGFAAESSPGDGDAVSVDANKLMQGSVYQGVMKSGAQSYLANLSLYPGKSELPFLPSNTQAVILQPLGDKGIAIIGGDTIRGFTGSDQVWITYIGAKLDSSLAKYLKHHPLTSQD

SEQ ID NO: 9257 - protein, 299 aa, Glycine max
  peptide (1)..(299): Ceres Seq. ID no. 15225235
  misc_feature (1)..(289): NCBI GI NO: 34146872 NR Description: At1g59840 [Arabidopsis thaliana]
  misc_feature (1)..(289): NCBI GI NO: 15218930 NR Description: expressed protein [Arabidopsis thaliana]
  misc_feature (27)..(288): NCBI GI NO: 38345907 NR Description: OSJNBb0059K02.12
  misc_feature (101)..(286): NCBI GI NO: 17231313 NR Description: hypothetical protein [Nostoc sp. PCC 7120]
  misc_feature (102)..(287): NCBI GI NO: 23127716 NR Description: hypothetical protein [Nostoc punctiforme]
  misc_feature (76)..(287): NCBI GI NO: 16331001 NR Description: unknown protein [Synechocystis sp. PCC 6803]
  misc_feature (101)..(290): NCBI GI NO: 23039835 NR Description: hypothetical protein
  misc_feature (102)..(288): NCBI GI NO: 22298227 NR Description: ORF_ID:tll0685~hypothetical protein
  misc_feature (90)..(286): NCBI GI NO: 37523882 NR Description: hypothetical protein gll4313
  misc_feature (84)..(286): NCBI GI NO: 33865754 NR Description: conserved hypothetical protein
MEAGTALSLRLHTRIPIPINTANSNTLLFQPRFTLSSHSPSSFSAYSYRGPTPKRPFLADWVSQNDDVVRTLPIYVGSASLFAILLNRSLSGIAPVVDAGSSQSRADLLTLGLAVTNILAGLVWLSVKPKSITVVNPRGVECKSLCATLPEVARNELLWVWESLSDATCCRSLVVVYESSCVLQIGFAAESSPGDGDAVSVDANKLMQGSVYQGVMKSGAQSYLANLSLYPGKSELPFLPSNTQAVILQPLGDKGIAIIGGDTIRGFTGSDQVWITYIGAKLDSSLAKYLKHHPLTSQD

SEQ ID NO: 9258 - DNA, 908 bp, Glycine max
  misc_feature (1)..(908): Ceres Seq. ID no. 13638318
agaaaatttgaacatatgttccttttttgttacaacgttgttgtttccaacggtacaacggtagatgatgggaacgctatctacgcaatttcgttccatcaaacgcccaaatccaaaccctaaactatccaaatcgtcatctcctacaaaatcagaaattaaattcatcgctaaaccaaaaccaaaatcagagtcagagtcagagtcatggtctgtttatctcatcctctccaccaaccatcctatcaaaacctacgttggaattacaaacaatttccctcgccgtttgaagcagcataacggtgaacttaaaggtggtgcaaaggcatcccgtgctggaagaccttggatttgtgcatgcataatttgtggttttacagaccgaagtgaagctagtgtatttgaatcaaaatggaaaactttctcaaggagagctccccgcaaaaatcaaaatgacaatctctccaagcaaagtgaagattcatcattaccactgctgcgacacagacaagcggctctgaatagagtgaaaggttcactcgactgcgctcacttagaaattatttggcatttggatccattgtgatccaactgccacaatgtatgtgttttgattatgtaattgtaataagttcaaatagcaaaacataggccataagagaaatattaagaacacattttgtgttattagttaaaatttattgaaaattataaaattataagtggatttcattaagtaaaaagtgagatcctccaaattttataattttttataataaagaatattaaaaagagtgcgtagctagcatttttctatatttgatagtactagcaaattgtaccagacattgattggttcttgtagtaaggtctttgtatagtatataagtgacgaaaggttataattt

SEQ ID NO: 9259 - protein, 173 aa, Glycine max
  peptide (1)..(173): Ceres Seq. ID no. 13638319
  misc_feature (1)..(170): NCBI GI NO: 15239808 NR Description: expressed protein [Arabidopsis thaliana]
  misc_feature (52)..(118): NCBI GI NO: 19114332 NR Description: conserved hypothetical protein
  misc_feature (69)..(101): NCBI GI NO: 9294275 NR Description: gene_id:MZN14.8~unknown protein
MMGTLSTQFRSIKRPNPNPKLSKSSSPTKSEIKFIAKPKPKSESESESWSVYLILSTNHPIKTYVGITNNFPRRLKQHNGELKGGAKASRAGRPWICACIICGFTDRSEASVFESKWKTFSRRAPRKNQNDNLSKQSEDSSLPLLRHRQAALNRVKGSLDCAHLEIIWHLDPL

SEQ ID NO: 9260 - protein, 172 aa, Glycine max
  peptide (1)..(172): Ceres Seq. ID no. 13638320
  misc_feature (1)..(169): NCBI GI NO: 15239808 NR Description: expressed protein [Arabidopsis thaliana]
  misc_feature (51)..(117): NCBI GI NO: 19114332 NR Description: conserved hypothetical protein
  misc_feature (68)..(100): NCBI GI NO: 9294275 NR Description: gene_id:MZN14.8~unknown protein
MGTLSTQFRSIKRPNPNPKLSKSSSPTKSEIKFIAKPKPKSESESESWSVYLILSTNHPIKTYVGITNNFPRRLKQHNGELKGGAKASRAGRPWICACIICGFTDRSEASVFESKWKTFSRRAPRKNQNDNLSKQSEDSSLPLLRHRQAALNRVKGSLDCAHLEIIWHLDPL

SEQ ID NO: 9261 - DNA, 848 bp, Glycine max
  misc_feature (1)..(848): Ceres Seq. ID no. 12608406
gtgacaatctttcttagctagatcagtgcctcatttttctttcagttttcctgcttcttctcttcttcaactggttttgagattgccattttcttatcttgtttagtttagcttgtttggttgagaggaattaattattttgtataaaacaatgaaggagagtgtaggaaaccctttgcgtcttcaatctgtgaatcatatctccctcatatgcagatcagtggaacaatcaatggatttctatcagaacgttcttggattttaccccatcaggaggcctggctctttagattttgatggggcatggctattcggctacggaattggaattcatttgctagaagcagagaaccctgaaaagttgccaaagaagaaggaaattaatccaaaggataatcatatatctttccagtgtgagagcatggttgcagtggagaagaagctgaaagaaatggaaattgactatgtgcgagcaacggtggaggaaggtggaatccaagtggatcaactgtttttccacgaccctgatgggttcatgatcgagatatgcaactgtgatagcctccctgtgattcccttagttggtgaggtggcaagatcatgttcccttgtgaatcttgagaagatgcagaatcagcagcagatacagaaaatgctccagcaactttgatgagccttttctgttatgttatgtgatcagagcatcctcacggatcacgaggacttgttgcttttttttttatgtggttgagttgtcaatgtgtcattctgttccttttgttttgttttctttaattgtgttatataataataaacaatctgccaaatagatcagcgcttttgcaacc

SEQ ID NO: 9262 - protein, 172 aa, Glycine max
  peptide (1)..(172): Ceres Seq. ID no. 12608407
  misc_feature (1)..(165): NCBI GI NO: 18412683 NR Description: expressed protein; protein id: At1g80160
  misc_feature (1)..(165): NCBI GI NO: 25406639 NR Description: hypothetical protein F18B13.24
  misc_feature (1)..(166): NCBI GI NO: 18394235 NR Description: expressed protein; protein id: At1g15380
  misc_feature (6)..(150): NCBI GI NO: 34910246 NR Description: OSJNBa0089K24.9
  misc_feature (11)..(142): NCBI GI NO: 18401734 NR Description: expressed protein; protein id: At2g28420
  misc_feature (11)..(142): NCBI GI NO: 15529260 NR Description: At2g28420/T1B3.6 [Arabidopsis thaliana]
  misc_feature (11)..(149): NCBI GI NO: 34395261 NR Description: glyoxalase family-like protein
  misc_feature (11)..(149): NCBI GI NO: 34899038 NR Description: hypothetical protein~similar to Arabidopsisthaliana chromosome 2
  misc_feature (4)..(144): NCBI GI NO: 21740426 NR Description: OSJNBa0091D06.24
  misc_feature (1)..(131): NCBI GI NO: 33146737 NR Description: unknown protein
MKESVGNPLRLQSVNHISLICRSVEQSMDFYQNVLGFYPIRRPGSLDFDGAWLFGYGIGIHLLEAENPEKLPKKKEINPKDNHISFQCESMVAVEKKLKEMEIDYVRATVEEGGIQVDQLFFHDPDGFMIEICNCDSLPVIPLVGEVARSCSLVNLEKMQNQQQIQKMLQQL

SEQ ID NO: 9263 - protein, 145 aa, Glycine max
  peptide (1)..(145): Ceres Seq. ID no. 12608408
  misc_feature (1)..(138): NCBI GI NO: 18412683 NR Description: expressed protein; protein id: At1g80160
  misc_feature (1)..(138): NCBI GI NO: 25406639 NR Description: hypothetical protein F18B13.24
  misc_feature (1)..(139): NCBI GI NO: 18394235 NR Description: expressed protein; protein id: At1g15380
  misc_feature (1)..(123): NCBI GI NO: 34910246 NR Description: OSJNBa0089K24.9
  misc_feature (1)..(115): NCBI GI NO: 18401734 NR Description: expressed protein; protein id: At2g28420
  misc_feature (1)..(115): NCBI GI NO: 15529260 NR Description: At2g28420/T1B3.6 [Arabidopsis thaliana]
  misc_feature (1)..(122): NCBI GI NO: 34395261 NR Description: glyoxalase family-like protein
  misc_feature (1)..(122): NCBI GI NO: 34899038 NR Description: hypothetical protein~similar to Arabidopsisthaliana chromosome 2
  misc_feature (1)..(117): NCBI GI NO: 21740426 NR Description: OSJNBa0091D06.24
  misc_feature (1)..(104): NCBI GI NO: 33146737 NR Description: unknown protein
MDFYQNVLGFYPIRRPGSLDFDGAWLFGYGIGIHLLEAENPEKLPKKKEINPKDNHISFQCESMVAVEKKLKEMEIDYVRATVEEGGIQVDQLFFHDPDGFMIEICNCDSLPVIPLVGEVARSCSLVNLEKMQNQQQIQKMLQQL

SEQ ID NO: 9264 - DNA, 752 bp, Glycine max
  misc_feature (1)..(752): Ceres Seq. ID no. 15172839
actcaatacaaacgaaattggtacaaaacaaaatgctactgtttctccggctgatgatgcagttgttgtgatgcgtcaaagcactgctccaactgctcgataattattctcgctgttaccgccagcaactgcttcttttgttagatctcaaagactgagttagtggttggaaaaggtttaattaacaagatgtgcaaaagaaagtgtccaggtcgagaattgaagctgccaagcaggcccacatcggcggagttatcatcgtcgacatcatcaggtgagtggccggaattatcatcgtcatcgtctgcatcttcggtatcatgtacatcaaagatgccgaaggagtcagaagaagagaacgagcaacgtgaaaattctactccagaaacaaaggccatggatctcgttggttgtcctcgatgcttcatgtacgtcatgttatccgaggtggatccaaagtgccctaagtgcaagaccacagtgtttcttgaacttttcaaagatgaaaacttgaagactaacagttgagttatggggagaattatgggaattaaataaataaaatcctcgtggttttaggacgtttgtttgtttgtgcttattttgtttgtaaaatctgaagcttcatatcttgttgagagtgaagtaaagattatgggagctagtatatggtagtgtaacgcgatgccacactatatgggtacggaacgaggaatcgtggtagtaataagatgcgcctattttttttcttt

SEQ ID NO: 9265 - protein, 112 aa, Glycine max
  peptide (1)..(112): Ceres Seq. ID no. 15172840
  misc_feature (4)..(112): NCBI GI NO: 15239988 NR Description: B-type cyclin -related [Arabidopsis thaliana]
  misc_feature (7)..(107): NCBI GI NO: 18399295 NR Description: expressed protein [Arabidopsis thaliana]
  misc_feature (3)..(112): NCBI GI NO: 32479729 NR Description: OJ991214_12.5
  misc_feature (32)..(107): NCBI GI NO: 34908532 NR Description: P0423B08.15
MCKRKCPGRELKLPSRPTSAELSSSTSSGEWPELSSSSSASSVSCTSKMPKESEEENEQRENSTPETKAMDLVGCPRCFMYVMLSEVDPKCPKCKTTVFLELFKDENLKTNS

SEQ ID NO: 9266 - protein, 64 aa, Glycine max
  peptide (1)..(64): Ceres Seq. ID no. 15172841
  misc_feature (1)..(64): NCBI GI NO: 15239988 NR Description: B-type cyclin -related [Arabidopsis thaliana]
  misc_feature (1)..(59): NCBI GI NO: 18399295 NR Description: expressed protein [Arabidopsis thaliana]
  misc_feature (1)..(64): NCBI GI NO: 32479729 NR Description: OJ991214_12.5
  misc_feature (1)..(59): NCBI GI NO: 34908532 NR Description: P0423B08.15
MPKESEEENEQRENSTPETKAMDLVGCPRCFMYVMLSEVDPKCPKCKTTVFLELFKDENLKTNS

SEQ ID NO: 9267 - DNA, 1255 bp, Glycine max
  misc_feature (1)..(1255): Ceres Seq. ID no. 13594430
  misc_feature (1132)..(1132): n is a, c, t, g, unknown, or other
  misc_feature (1133)..(1133): n is a, c, t, g, unknown, or other
  misc_feature (1131)..(1131): n is a, c, t, g, unknown, or other
  misc_feature (1130)..(1130): n is a, c, t, g, unknown, or other
aaaaattgaataagaccataaaagttcgacatagttggtgttcactgctttttctcttttttcccgtggatcatcccaaagctctctgctttttggtggcacagatcccttgctgggtttaagttcctcactttggattctcccccaaatgggttcctttgatcgattgtttaaccgccaaagaggtcttcatgagatccttggtggtggtcaagttgcagatttaattctgtggaggcgtaagaaccttactgtggggatattgttggtcacactaggtgtttgggttgtgtttgagagatctggttatactcttctgtctcttatttctaatgttctccttctcctcattgtcattctctttctttgggccaaatcagcagatattctcaacagacctgctccacctctaccacagctgcgtctctcagaggaaatggcaaatgaagcgaagacttttatctgcacaagagttaatgatctgttgtcagtttctcaagatattgctctcggaaaagactcgaggctgtttctcaaagtagctgcatacctctggttaatttctattattggtggcttaactgatttccttaccctggcatacaccagtcttcttttggttcttacagtaccagcaatctatgaaagatatgaagattacatagatatgtatatcttgaagggttacagaaaattatgcctattgcatgttaaaataaatgagggatatgtcagcaaagtccacaactggattctggagaagaaaaagctaagctgagtttgtgtttttcgcattcattttgataagttctcttattattcttctaaagtatttcttacaggatcactggtgagattgtaattgtgagtttgagggacaacaatagtgatcttctccccccaaaaatgagtgtcttcctttttgcattttccatcttcaatgatggatcccttttttggtacataatgatgaaactcttacgttggactggttcatgtagtccactaagtatttaagatttcttcttaggttaacaaagaaaaaatataggtgtcactacctatacacaatataaaatgtgtttgccaagtatttgtacatgtaaataatataggtacaattattattnnnnaaaaaaaaaaaaaaaaaaaaaaaaaaaaaaaaaaaaaaaaaaaaaaaaaaaatttaaaaaaaaaaaaaaaagggtttttcgttcccgccaccctcgggggggggcccggaccccatttcccc

SEQ ID NO: 9268 - protein, 209 aa, Glycine max
  peptide (1)..(209): Ceres Seq. ID no. 15221352
  misc_feature (3)..(172): NCBI GI NO: 15232423 NR Description: expressed protein [Arabidopsis thaliana]
  misc_feature (28)..(153): NCBI GI NO: 38344513 NR Description: OSJNBa0016N04.6
  misc_feature (147)..(197): NCBI GI NO: 38344513 NR Description: OSJNBa0016N04.6
  misc_feature (11)..(173): NCBI GI NO: 38345298 NR Description: OSJNBa0043A12.26
  misc_feature (14)..(173): NCBI GI NO: 18402246 NR Description: expressed protein [Arabidopsis thaliana]
  misc_feature (14)..(173): NCBI GI NO: 21593206 NR Description: unknown [Arabidopsis thaliana]
  misc_feature (6)..(207): NCBI GI NO: 26450318 NR Description: unknown protein [Arabidopsis thaliana]
  misc_feature (6)..(207): NCBI GI NO: 34904202 NR Description: P0492F05.25
  misc_feature (1)..(207): NCBI GI NO: 15238125 NR Description: expressed protein [Arabidopsis thaliana]
  misc_feature (6)..(207): NCBI GI NO: 15236556 NR Description: expressed protein [Arabidopsis thaliana]
MGSFDRLFNRQRGLHEILGGGQVADLILWRRKNLTVGILLVTLGVWVVFERSGYTLLSLISNVLLLLIVILFLWAKSADILNRPAPPLPQLRLSEEMANEAKTFICTRVNDLLSVSQDIALGKDSRLFLKVAAYLWLISIIGGLTDFLTLAYTSLLLVLTVPAIYERYEDYIDMYILKGYRKLCLLHVKINEGYVSKVHNWILEKKKLS

SEQ ID NO: 9269 - protein, 113 aa, Glycine max
  peptide (1)..(113): Ceres Seq. ID no. 15221353
  misc_feature (1)..(76): NCBI GI NO: 15232423 NR Description: expressed protein [Arabidopsis thaliana]
  misc_feature (1)..(57): NCBI GI NO: 38344513 NR Description: OSJNBa0016N04.6
  misc_feature (51)..(101): NCBI GI NO: 38344513 NR Description: OSJNBa0016N04.6
  misc_feature (1)..(77): NCBI GI NO: 38345298 NR Description: OSJNBa0043A12.26
  misc_feature (1)..(77): NCBI GI NO: 18402246 NR Description: expressed protein [Arabidopsis thaliana]
  misc_feature (1)..(77): NCBI GI NO: 21593206 NR Description: unknown [Arabidopsis thaliana]
  misc_feature (1)..(111): NCBI GI NO: 26450318 NR Description: unknown protein [Arabidopsis thaliana]
  misc_feature (1)..(111): NCBI GI NO: 34904202 NR Description: P0492F05.25
  misc_feature (1)..(111): NCBI GI NO: 15238125 NR Description: expressed protein [Arabidopsis thaliana]
  misc_feature (1)..(111): NCBI GI NO: 15236556 NR Description: expressed protein [Arabidopsis thaliana]
MANEAKTFICTRVNDLLSVSQDIALGKDSRLFLKVAAYLWLISIIGGLTDFLTLAYTSLLLVLTVPAIYERYEDYIDMYILKGYRKLCLLHVKINEGYVSKVHNWILEKKKLS

SEQ ID NO: 9270 - DNA, 524 bp, Glycine max
  misc_feature (1)..(524): Ceres Seq. ID no. 15172842
aaaaacaaacaagggaatagaaagaaaagcgcaatgttgttacttgttgaaatcgaaaaagtaaagtgtttccattgaatcaatggggttatgggaggccttcggcaattggttacgcagctgatcatgacaatttatctgtctctaaatgaacttcatgacttgttgagcaaaccttctttaagtgggattcctatgcttattttgggtaataagattgacaaacctggggcattgtctaagcaagacctgacagagcagatgggactgaaatgcatcaatggtagagacgtttgttgcttcatgatctcctgtaaaaactccatcaacattgatacagttattgattggcttgtaaaacattctaaatggatgaactgaagcttgagttctgccctattgatctatttgtatgttgtattacagatgaacctagctgattgaacttctgttggtgtgatactagtttttcttttcccttttttgactagcttacaccaaaccagacaacatgtgatttgata

SEQ ID NO: 9271 - protein, 96 aa, Glycine max
  peptide (1)..(96): Ceres Seq. ID no. 15172843
  misc_feature (17)..(92): Pfam Name: Pfam Description:  ADP-ribosylation factor family
  misc_feature (17)..(96): NCBI GI NO: 9757877 NR Description: ADP-ribosylation factor-like protein
  misc_feature (17)..(96): NCBI GI NO: 18425204 NR Description: ADP-ribosylation factor, putative
  misc_feature (17)..(96): NCBI GI NO: 22331720 NR Description: ADP-ribosylation factor, putative
  misc_feature (17)..(58): NCBI GI NO: 11274625 NR Description: ADP-ribosylation factor-like protein T16K5
  misc_feature (59)..(96): NCBI GI NO: 11274625 NR Description: ADP-ribosylation factor-like protein T16K5
  misc_feature (14)..(93): NCBI GI NO: 9757978 NR Description: ADP-ribosylation factor-like protein
  misc_feature (14)..(93): NCBI GI NO: 18421676 NR Description: ADP-ribosylation factor, putative
  misc_feature (23)..(96): NCBI GI NO: 40641591 NR Description: putative ADP-rybosylation factor-like protein
  misc_feature (17)..(96): NCBI GI NO: 15229626 NR Description: ADP-ribosylation factor, putative
  misc_feature (15)..(93): NCBI GI NO: 20270343 NR Description: hypothetical protein BC015408 [Homo sapiens]
MGGLRQLVTQLIMTIYLSLNELHDLLSKPSLSGIPMLILGNKIDKPGALSKQDLTEQMGLKCINGRDVCCFMISCKNSINIDTVIDWLVKHSKWMN

SEQ ID NO: 9272 - protein, 84 aa, Glycine max
  peptide (1)..(84): Ceres Seq. ID no. 15172844
  misc_feature (5)..(80): Pfam Name: Pfam Description:  ADP-ribosylation factor family
  misc_feature (5)..(84): NCBI GI NO: 9757877 NR Description: ADP-ribosylation factor-like protein
  misc_feature (5)..(84): NCBI GI NO: 18425204 NR Description: ADP-ribosylation factor, putative
  misc_feature (5)..(84): NCBI GI NO: 22331720 NR Description: ADP-ribosylation factor, putative
  misc_feature (5)..(46): NCBI GI NO: 11274625 NR Description: ADP-ribosylation factor-like protein T16K5
  misc_feature (47)..(84): NCBI GI NO: 11274625 NR Description: ADP-ribosylation factor-like protein T16K5
  misc_feature (2)..(81): NCBI GI NO: 9757978 NR Description: ADP-ribosylation factor-like protein
  misc_feature (2)..(81): NCBI GI NO: 18421676 NR Description: ADP-ribosylation factor, putative
  misc_feature (11)..(84): NCBI GI NO: 40641591 NR Description: putative ADP-rybosylation factor-like protein
  misc_feature (5)..(84): NCBI GI NO: 15229626 NR Description: ADP-ribosylation factor, putative
  misc_feature (3)..(81): NCBI GI NO: 20270343 NR Description: hypothetical protein BC015408 [Homo sapiens]
MTIYLSLNELHDLLSKPSLSGIPMLILGNKIDKPGALSKQDLTEQMGLKCINGRDVCCFMISCKNSINIDTVIDWLVKHSKWMN

SEQ ID NO: 9273 - protein, 61 aa, Glycine max
  peptide (1)..(61): Ceres Seq. ID no. 15172845
  misc_feature (1)..(57): Pfam Name: Pfam Description:  ADP-ribosylation factor family
  misc_feature (1)..(61): NCBI GI NO: 9757877 NR Description: ADP-ribosylation factor-like protein
  misc_feature (1)..(61): NCBI GI NO: 18425204 NR Description: ADP-ribosylation factor, putative
  misc_feature (1)..(61): NCBI GI NO: 22331720 NR Description: ADP-ribosylation factor, putative
  misc_feature (1)..(23): NCBI GI NO: 11274625 NR Description: ADP-ribosylation factor-like protein T16K5
  misc_feature (24)..(61): NCBI GI NO: 11274625 NR Description: ADP-ribosylation factor-like protein T16K5
  misc_feature (1)..(58): NCBI GI NO: 9757978 NR Description: ADP-ribosylation factor-like protein
  misc_feature (1)..(58): NCBI GI NO: 18421676 NR Description: ADP-ribosylation factor, putative
  misc_feature (1)..(61): NCBI GI NO: 40641591 NR Description: putative ADP-rybosylation factor-like protein
  misc_feature (1)..(61): NCBI GI NO: 15229626 NR Description: ADP-ribosylation factor, putative
  misc_feature (1)..(58): NCBI GI NO: 20270343 NR Description: hypothetical protein BC015408 [Homo sapiens]
MLILGNKIDKPGALSKQDLTEQMGLKCINGRDVCCFMISCKNSINIDTVIDWLVKHSKWMN

SEQ ID NO: 9274 - DNA, 532 bp, Glycine max
  misc_feature (1)..(532): Ceres Seq. ID no. 15172614
caagttctgtatttccttctcttttccaattgtttgagcgtgaatttttgcgttaatgaagtctgaaacctatgataaggggatatctgttgatgactggaaaatactggtaaagtggtaataggcaaagaagtgaagaatcacaattggtttggaggcccatcgcattgaggcaagtagaaaattgacccgcccaagtggagattcaagtcgggtaccgaacgtgcgactataaagggaatgaacgtggacaccccacgctttcttcacggcaacagaagaataatcaaatttctcagatctatccgacgtcgtcgcagatccaccaaccgttatggctgccttcagcggtgatgaaacggctccgtttttcggcttccttggagccgcagctgccctcgtcttctcctgtactccttccactctcttcaattcccccaatcacttccattagatccgtatttaccgtttcattatttatgtaatccgttcctaaaattgacttttaatccaatttcatgttccactgccc

SEQ ID NO: 9275 - protein, 43 aa, Glycine max
  peptide (1)..(43): Ceres Seq. ID no. 15172615
MKRLRFSASLEPQLPSSSPVLLPLSSIPPITSIRSVFTVSLFM

SEQ ID NO: 9276 - protein, 39 aa, Glycine max
  peptide (1)..(39): Ceres Seq. ID no. 15172616
  misc_feature (1)..(26): NCBI GI NO: 3334413 NR Description: Vacuolar ATP synthase 16 kDa proteolipid subunit
  misc_feature (1)..(26): NCBI GI NO: 15227232 NR Description: H+-pumping ATPase 16 kDa proteolipid, vacuolar
  misc_feature (1)..(26): NCBI GI NO: 30144705 NR Description: vacuolar H(+)-ATPase subunit c
  misc_feature (1)..(26): NCBI GI NO: 6164957 NR Description: vacuolar H+-ATP synthase 16kDa proteolipid subunit
  misc_feature (2)..(26): NCBI GI NO: 4519260 NR Description: vacuolar H+-ATPase c subunit [Citrus unshiu]
MAAFSGDETAPFFGFLGAAAALVFSCTPSTLFNSPNHFH

SEQ ID NO: 9277 - protein, 37 aa, Glycine max
  peptide (1)..(37): Ceres Seq. ID no. 15172617
MNVDTPRFLHGNRRIIKFLRSIRRRRRSTNRYGCLQR

SEQ ID NO: 9278 - DNA, 1455 bp, Glycine max
  misc_feature (1)..(1455): Ceres Seq. ID no. 13639636
tcctaatcgaaaaaaaacctaatagtaatagtagcaagtttctttcttttttgctctctctctctccatggacttccatctgaagcaatggagaaaccagcacgagtcagaggaacaacattctacaaagatgccaaaacttctccctgaatcccatcaacaacaacagccatcagcctctgcactccctttgtttgtacctgaacccaacagcagcaaagtcagcaccctgtcagattcaacattagcttctgctacaatgacttctaccaccactaacagattatttcccaggatggggagctacttcagcttgtctcagtggcaggagcttgagttgcaggctttgatattcaggtacatgttggctggtgctgctgttcctcctgaactccttcaaccaatcaagaaaagccttcttcattctccacactattacctccatcaccctctccaacattaccaaccttctgctttgttgcaatcagggtattggggtagaggagcgatggatccggagccagggcggtgccggagaaccgacggcaagaagtggcgctgttcgagggacgtggtggctgggcaaaagtactgtgagcgccacatgcaccgtggaagaaaccgttcaagaaagcctgtggaactacccacaccaactagtgctattaacaattgtggtgtaactggagttggatccctaggaccaggtgcttcatcatcttccatttgttcaccacccttagcttctgcttcattcaaatctccttttgatcttcatcttgatgaacgttcctctgggaccaagaatgaagacgaagatcatgtgggtggggatggcagatcaggtggaggtggtggccatatgctgaggcatttcttcgatgattggccacgatcactccaagactctgacaacgttgaaaacaatgctgctgctggccgtagcctctctatttcaatgcccggtgcttcctcggatgtgtcattgaaattgtccacgggctatggagaggactcgggcccaggaaatgagaatgtaagcctcgagccagagcagctgcagttgaattgggccggaggatgggcctcgtctaatcaagtggcttcgatgggaggtccacttgctgaggcactcagatcatctacttcaacctcatctcccactagtgttttgcatcgtcacttgcctcgtggatctgagaccagctttattagcacctgaatttagttatagtgggtgccccgattatttttctgtttcttgtttcgaggtttaagttccacttttggagcattcttggaccacggttatgttcttttcaaactgtgtagactacttttgtttctaagtgggcgatgaaaggatatggtcggtccctggttggattaattcgaagtaatactaaattgtcaattaacaatcacattttctttatgaaagtactttagttcctc

SEQ ID NO: 9279 - protein, 384 aa, Glycine max
  peptide (1)..(384): Ceres Seq. ID no. 13639637
  misc_feature (1)..(371): NCBI GI NO: 15231708 NR Description: expressed protein [Arabidopsis thaliana]
  misc_feature (1)..(371): NCBI GI NO: 21539886 NR Description: transcription activator [Arabidopsis thaliana]
  misc_feature (1)..(199): NCBI GI NO: 15227652 NR Description: transcription activator (GRL3)
  misc_feature (1)..(199): NCBI GI NO: 26449924 NR Description: unknown protein [Arabidopsis thaliana]
  misc_feature (1)..(189): NCBI GI NO: 27808514 NR Description: At3g52910 [Arabidopsis thaliana]
  misc_feature (7)..(371): NCBI GI NO: 26449924 NR Description: unknown protein [Arabidopsis thaliana]
  misc_feature (6)..(371): NCBI GI NO: 15227652 NR Description: transcription activator (GRL3)
  misc_feature (81)..(247): NCBI GI NO: 32470630 NR Description: putative growth-regulating factor
  misc_feature (81)..(247): NCBI GI NO: 32470646 NR Description: putative growth-regulating factor
  misc_feature (78)..(235): NCBI GI NO: 6573149 NR Description: growth-regulating factor 1 [Oryza sativa]
MDFHLKQWRNQHESEEQHSTKMPKLLPESHQQQQPSASALPLFVPEPNSSKVSTLSDSTLASATMTSTTTNRLFPRMGSYFSLSQWQELELQALIFRYMLAGAAVPPELLQPIKKSLLHSPHYYLHHPLQHYQPSALLQSGYWGRGAMDPEPGRCRRTDGKKWRCSRDVVAGQKYCERHMHRGRNRSRKPVELPTPTSAINNCGVTGVGSLGPGASSSSICSPPLASASFKSPFDLHLDERSSGTKNEDEDHVGGDGRSGGGGGHMLRHFFDDWPRSLQDSDNVENNAAAGRSLSISMPGASSDVSLKLSTGYGEDSGPGNENVSLEPEQLQLNWAGGWASSNQVASMGGPLAEALRSSTSTSSPTSVLHRHLPRGSETSFIST

SEQ ID NO: 9280 - protein, 363 aa, Glycine max
  peptide (1)..(363): Ceres Seq. ID no. 13639638
  misc_feature (1)..(350): NCBI GI NO: 15231708 NR Description: expressed protein [Arabidopsis thaliana]
  misc_feature (1)..(350): NCBI GI NO: 21539886 NR Description: transcription activator [Arabidopsis thaliana]
  misc_feature (1)..(178): NCBI GI NO: 15227652 NR Description: transcription activator (GRL3)
  misc_feature (1)..(178): NCBI GI NO: 26449924 NR Description: unknown protein [Arabidopsis thaliana]
  misc_feature (1)..(168): NCBI GI NO: 27808514 NR Description: At3g52910 [Arabidopsis thaliana]
  misc_feature (1)..(350): NCBI GI NO: 26449924 NR Description: unknown protein [Arabidopsis thaliana]
  misc_feature (1)..(350): NCBI GI NO: 15227652 NR Description: transcription activator (GRL3)
  misc_feature (60)..(226): NCBI GI NO: 32470630 NR Description: putative growth-regulating factor
  misc_feature (60)..(226): NCBI GI NO: 32470646 NR Description: putative growth-regulating factor
  misc_feature (57)..(214): NCBI GI NO: 6573149 NR Description: growth-regulating factor 1 [Oryza sativa]
MPKLLPESHQQQQPSASALPLFVPEPNSSKVSTLSDSTLASATMTSTTTNRLFPRMGSYFSLSQWQELELQALIFRYMLAGAAVPPELLQPIKKSLLHSPHYYLHHPLQHYQPSALLQSGYWGRGAMDPEPGRCRRTDGKKWRCSRDVVAGQKYCERHMHRGRNRSRKPVELPTPTSAINNCGVTGVGSLGPGASSSSICSPPLASASFKSPFDLHLDERSSGTKNEDEDHVGGDGRSGGGGGHMLRHFFDDWPRSLQDSDNVENNAAAGRSLSISMPGASSDVSLKLSTGYGEDSGPGNENVSLEPEQLQLNWAGGWASSNQVASMGGPLAEALRSSTSTSSPTSVLHRHLPRGSETSFIST

SEQ ID NO: 9281 - protein, 320 aa, Glycine max
  peptide (1)..(320): Ceres Seq. ID no. 13639639
  misc_feature (1)..(307): NCBI GI NO: 15231708 NR Description: expressed protein [Arabidopsis thaliana]
  misc_feature (1)..(307): NCBI GI NO: 21539886 NR Description: transcription activator [Arabidopsis thaliana]
  misc_feature (1)..(135): NCBI GI NO: 15227652 NR Description: transcription activator (GRL3)
  misc_feature (1)..(135): NCBI GI NO: 26449924 NR Description: unknown protein [Arabidopsis thaliana]
  misc_feature (1)..(125): NCBI GI NO: 27808514 NR Description: At3g52910 [Arabidopsis thaliana]
  misc_feature (1)..(307): NCBI GI NO: 26449924 NR Description: unknown protein [Arabidopsis thaliana]
  misc_feature (1)..(307): NCBI GI NO: 15227652 NR Description: transcription activator (GRL3)
  misc_feature (17)..(183): NCBI GI NO: 32470630 NR Description: putative growth-regulating factor
  misc_feature (17)..(183): NCBI GI NO: 32470646 NR Description: putative growth-regulating factor
  misc_feature (14)..(171): NCBI GI NO: 6573149 NR Description: growth-regulating factor 1 [Oryza sativa]
MTSTTTNRLFPRMGSYFSLSQWQELELQALIFRYMLAGAAVPPELLQPIKKSLLHSPHYYLHHPLQHYQPSALLQSGYWGRGAMDPEPGRCRRTDGKKWRCSRDVVAGQKYCERHMHRGRNRSRKPVELPTPTSAINNCGVTGVGSLGPGASSSSICSPPLASASFKSPFDLHLDERSSGTKNEDEDHVGGDGRSGGGGGHMLRHFFDDWPRSLQDSDNVENNAAAGRSLSISMPGASSDVSLKLSTGYGEDSGPGNENVSLEPEQLQLNWAGGWASSNQVASMGGPLAEALRSSTSTSSPTSVLHRHLPRGSETSFIST

SEQ ID NO: 9282 - DNA, 1614 bp, Glycine max
  misc_feature (1)..(1614): Ceres Seq. ID no. 14314945
agagaaagaagaagacattctcagttgtgttgtctgacaaaacgaacagcaattgggagcagatgcaagatccatcttcaaaccctaattccaatccaaatcccaatcctcacaatgccaatgccgcatcccagctaccgcgtccaccgccggccaccaccgccggcgccggcgcctcctcgtcctcgctgttcgcgcgctccggcgggcctcaccaccggcgagcccattcggaagtgagtttccggctgccggacgacatgatggacctctcgccgtcggatccgttcgccggcgggtcgtcgacggccagcatggaggagatcggatcggaggacgacctgttctcgacgtacattgacgtggacaagctcggcggcgcaaacgggtcgggcgcctccggaaacggagcggatccgaccggcgaaaccgagaagagtccggcgaggccgcgacaccggcacagtagctccgtcgatttcggggaaattatggatgcgaagaaagctatgcctcctgataagttagctgagctatggacaattgatcccaagcgtgctaagagaatacttgcaaatcggcaatctgctgctcgatcgaaggagagaaaagcgcgctacatacaagaacttgagcgcaaggttcagactcttcagacggaagccacaactctttctgcccaattgaccttataccagagggacacaacaggactgagtactgaaaatacagagctaaagctccgtttgcaagccatggagcaacaagcacaacttcgtgacgctcttaatgaagcattgaagaaggaagttgagaggcttaaggttgctactggtgagatgatgagccacactgattcctttaatctgggaatgcacctgatgccattttccggatcaaatttcgttccaatcccgccacaatcaggtccttctggtcaccaaaacatgcagatgccaccatttggtctcaccccatccacaatgccaagccatctactgcatcaaacaagttctcatccatattcagaaatattgcaaaatgaccagcttggtcgtttccaggggcttgacattagtagcaaaggatcaactctcgtgaagtctgaaggcccctcactctccgcaagtgagagtagcactacattttgaatttgacagaaaatgcttgacctgctgacttatccatgccattcattgttcatagggttgacatttagtcaactaatgaaggtaccttatttcatgattcaaatttgaggattaattttaactatttattctaagggggtgctcaccaaaaaggggaagcacccatggggttttgttgcaaagttcacgtaatcatgtttcagcatggcatttggtgtttctgggagctggaatattgggaatgaaaggtcattcccattgtatctttgtatttgtatcatcgtttacgtgatagcatgtaaactgtgtgatttattgttgtgtttcactacattcagagtccaagacggactctttttctttctttctataattacttagtttcaggtttattcatagtcgttgtacaatgcaagagttttgggtactccgtacgtgttgtattaagcttcttccgagatcg

SEQ ID NO: 9283 - protein, 382 aa, Glycine max
  peptide (1)..(382): Ceres Seq. ID no. 14314946
  misc_feature (181)..(244): Pfam Name: Pfam Description:  bZIP transcription factor
  misc_feature (69)..(382): NCBI GI NO: 39579226 NR Description: bZIP transcription factor RF2b
  misc_feature (48)..(382): NCBI GI NO: 15222213 NR Description: bZIP protein [Arabidopsis thaliana]
  misc_feature (48)..(376): NCBI GI NO: 25406943 NR Description: hypothetical protein
  misc_feature (21)..(342): NCBI GI NO: 15226727 NR Description: bZip DNA binding protein [Arabidopsis thaliana]
  misc_feature (21)..(342): NCBI GI NO: 25453519 NR Description: b-Zip DNA binding protein
  misc_feature (125)..(382): NCBI GI NO: 34394739 NR Description: putative transcription activator RF2a
  misc_feature (48)..(287): NCBI GI NO: 17065884 NR Description: AtbZIP transcription factor [Arabidopsis thaliana]
  misc_feature (27)..(343): NCBI GI NO: 7489564 NR Description: probable transcription activator RF2a - rice
  misc_feature (131)..(340): NCBI GI NO: 2921823 NR Description: shoot-forming PKSF1 [Paulownia kawakamii]
  misc_feature (138)..(378): NCBI GI NO: 21740783 NR Description: OSJNBa0067K08.2
RKKKTFSVVLSDKTNSNWEQMQDPSSNPNSNPNPNPHNANAASQLPRPPPATTAGAGASSSSLFARSGGPHHRRAHSEVSFRLPDDMMDLSPSDPFAGGSSTASMEEIGSEDDLFSTYIDVDKLGGANGSGASGNGADPTGETEKSPARPRHRHSSSVDFGEIMDAKKAMPPDKLAELWTIDPKRAKRILANRQSAARSKERKARYIQELERKVQTLQTEATTLSAQLTLYQRDTTGLSTENTELKLRLQAMEQQAQLRDALNEALKKEVERLKVATGEMMSHTDSFNLGMHLMPFSGSNFVPIPPQSGPSGHQNMQMPPFGLTPSTMPSHLLHQTSSHPYSEILQNDQLGRFQGLDISSKGSTLVKSEGPSLSASESSTTF

SEQ ID NO: 9284 - protein, 362 aa, Glycine max
  peptide (1)..(362): Ceres Seq. ID no. 14314947
  misc_feature (161)..(224): Pfam Name: Pfam Description:  bZIP transcription factor
  misc_feature (49)..(362): NCBI GI NO: 39579226 NR Description: bZIP transcription factor RF2b
  misc_feature (28)..(362): NCBI GI NO: 15222213 NR Description: bZIP protein [Arabidopsis thaliana]
  misc_feature (28)..(356): NCBI GI NO: 25406943 NR Description: hypothetical protein
  misc_feature (1)..(322): NCBI GI NO: 15226727 NR Description: bZip DNA binding protein [Arabidopsis thaliana]
  misc_feature (1)..(322): NCBI GI NO: 25453519 NR Description: b-Zip DNA binding protein
  misc_feature (105)..(362): NCBI GI NO: 34394739 NR Description: putative transcription activator RF2a
  misc_feature (28)..(267): NCBI GI NO: 17065884 NR Description: AtbZIP transcription factor [Arabidopsis thaliana]
  misc_feature (7)..(323): NCBI GI NO: 7489564 NR Description: probable transcription activator RF2a - rice
  misc_feature (111)..(320): NCBI GI NO: 2921823 NR Description: shoot-forming PKSF1 [Paulownia kawakamii]
  misc_feature (118)..(358): NCBI GI NO: 21740783 NR Description: OSJNBa0067K08.2
MQDPSSNPNSNPNPNPHNANAASQLPRPPPATTAGAGASSSSLFARSGGPHHRRAHSEVSFRLPDDMMDLSPSDPFAGGSSTASMEEIGSEDDLFSTYIDVDKLGGANGSGASGNGADPTGETEKSPARPRHRHSSSVDFGEIMDAKKAMPPDKLAELWTIDPKRAKRILANRQSAARSKERKARYIQELERKVQTLQTEATTLSAQLTLYQRDTTGLSTENTELKLRLQAMEQQAQLRDALNEALKKEVERLKVATGEMMSHTDSFNLGMHLMPFSGSNFVPIPPQSGPSGHQNMQMPPFGLTPSTMPSHLLHQTSSHPYSEILQNDQLGRFQGLDISSKGSTLVKSEGPSLSASESSTTF

SEQ ID NO: 9285 - protein, 296 aa, Glycine max
  peptide (1)..(296): Ceres Seq. ID no. 14314948
  misc_feature (95)..(158): Pfam Name: Pfam Description:  bZIP transcription factor
  misc_feature (1)..(296): NCBI GI NO: 39579226 NR Description: bZIP transcription factor RF2b
  misc_feature (1)..(296): NCBI GI NO: 15222213 NR Description: bZIP protein [Arabidopsis thaliana]
  misc_feature (1)..(290): NCBI GI NO: 25406943 NR Description: hypothetical protein
  misc_feature (1)..(256): NCBI GI NO: 15226727 NR Description: bZip DNA binding protein [Arabidopsis thaliana]
  misc_feature (1)..(256): NCBI GI NO: 25453519 NR Description: b-Zip DNA binding protein
  misc_feature (39)..(296): NCBI GI NO: 34394739 NR Description: putative transcription activator RF2a
  misc_feature (1)..(201): NCBI GI NO: 17065884 NR Description: AtbZIP transcription factor [Arabidopsis thaliana]
  misc_feature (1)..(257): NCBI GI NO: 7489564 NR Description: probable transcription activator RF2a - rice
  misc_feature (45)..(254): NCBI GI NO: 2921823 NR Description: shoot-forming PKSF1 [Paulownia kawakamii]
  misc_feature (52)..(292): NCBI GI NO: 21740783 NR Description: OSJNBa0067K08.2
MMDLSPSDPFAGGSSTASMEEIGSEDDLFSTYIDVDKLGGANGSGASGNGADPTGETEKSPARPRHRHSSSVDFGEIMDAKKAMPPDKLAELWTIDPKRAKRILANRQSAARSKERKARYIQELERKVQTLQTEATTLSAQLTLYQRDTTGLSTENTELKLRLQAMEQQAQLRDALNEALKKEVERLKVATGEMMSHTDSFNLGMHLMPFSGSNFVPIPPQSGPSGHQNMQMPPFGLTPSTMPSHLLHQTSSHPYSEILQNDQLGRFQGLDISSKGSTLVKSEGPSLSASESSTTF

SEQ ID NO: 9286 - DNA, 1062 bp, Glycine max
  misc_feature (1)..(1062): Ceres Seq. ID no. 15226854
gcttagtcgttcccaccatttttcctaatcccatttctctttttctcgttctcttgaatttctagggttaccgttggaaccactcgccagccacgtacgtacggaggctctctcttcctccgccatgaactcacggcaatcctctctgtcgccctgtgacatctgcggcgccacccaaaccctatctctgaccatccacaacatccgccaccgcgcccacacctgccgccactgcaccaactgcgtcctcaagcagcaccctggcctcttctgccctctctgcttcgaactccacgacgactcgcccctccctccccaccaccgcctcatgtgcgtccgctgccccgccgtcgcacaccgttcctgtgcgttcccctccaccaacccctccgctgcacccgcgccagcaccaccgttcttctgccctacttgtctcgattctaacttcacctacttcaaactccccgaccgcaagaccggagccgtcgacgtccagtccgccaaggtgctcgtcactgctgcccggatcgctgccgtgtccatgagcaaggcggccgccgtggcacggttcgatgcggaacgtcgcgccagggaggccgccgtggccaggaagagggcgaaggacgcgctggagcatctcgcggagatcctcgccagggagcaggcggagcaggacgaggaggaacagaacggcaccgtttctgctggccggaggcgtggcgcgtaatagttatatcctaagagttgaaggctgctgtactgtttgctatcaattctggaagtgcctcctccactgggtttctcttgggttctttggagatttcttcttgggagcatatgactcggagtttgactatggcaatctacctaaggatttactgaagctgcgtaatcatattttggtgtcattactatgctaaattgtgtatagaaaataaaaaggtttacatgactcacagcagttaataagtgcagctctcggaatttctttgccattgggcctcttataaattgtgattggtatattttatgaataagatttgtgtcattttctagcaaagt

SEQ ID NO: 9287 - protein, 200 aa, Glycine max
  peptide (1)..(200): Ceres Seq. ID no. 15226855
  misc_feature (49)..(103): Pfam Name: Pfam Description:  PHD-finger
  misc_feature (1)..(181): NCBI GI NO: 18391032 NR Description: expressed protein [Arabidopsis thaliana]
  misc_feature (1)..(188): NCBI GI NO: 15229050 NR Description: hypothetical protein [Arabidopsis thaliana]
  misc_feature (11)..(186): NCBI GI NO: 34904592 NR Description: B1008C01.29
MNSRQSSLSPCDICGATQTLSLTIHNIRHRAHTCRHCTNCVLKQHPGLFCPLCFELHDDSPLPPHHRLMCVRCPAVAHRSCAFPSTNPSAAPAPAPPFFCPTCLDSNFTYFKLPDRKTGAVDVQSAKVLVTAARIAAVSMSKAAAVARFDAERRAREAAVARKRAKDALEHLAEILAREQAEQDEEEQNGTVSAGRRRGA

SEQ ID NO: 9288 - protein, 132 aa, Glycine max
  peptide (1)..(132): Ceres Seq. ID no. 15226856
  misc_feature (1)..(113): NCBI GI NO: 18391032 NR Description: expressed protein [Arabidopsis thaliana]
  misc_feature (1)..(120): NCBI GI NO: 15229050 NR Description: hypothetical protein [Arabidopsis thaliana]
  misc_feature (1)..(118): NCBI GI NO: 34904592 NR Description: B1008C01.29
MCVRCPAVAHRSCAFPSTNPSAAPAPAPPFFCPTCLDSNFTYFKLPDRKTGAVDVQSAKVLVTAARIAAVSMSKAAAVARFDAERRAREAAVARKRAKDALEHLAEILAREQAEQDEEEQNGTVSAGRRRGA

SEQ ID NO: 9289 - protein, 115 aa, Glycine max
  peptide (1)..(115): Ceres Seq. ID no. 15226857
  misc_feature (1)..(90): NCBI GI NO: 38175466 NR Description: putative high-affinity potassium transporter
  misc_feature (1)..(17): NCBI GI NO: 25404769 NR Description: hypothetical protein F14K14.17
  misc_feature (1)..(12): NCBI GI NO: 15233976 NR Description: leucine-rich repeat extensin family
  misc_feature (1)..(12): NCBI GI NO: 20138131 NR Description: Vegetative cell wall protein gp1 precursor
  misc_feature (1)..(17): NCBI GI NO: 22330504 NR Description: arabinogalactan-protein, putative (AGP19)
  misc_feature (1)..(17): NCBI GI NO: 27375632 NR Description: blr0521 [Bradyrhizobium japonicum]
  misc_feature (1)..(13): NCBI GI NO: 38099936 NR Description: hypothetical protein MG11009.4
  misc_feature (1)..(28): NCBI GI NO: 38345019 NR Description: OSJNBa0029H02.3
  misc_feature (1)..(12): NCBI GI NO: 38345019 NR Description: OSJNBa0029H02.3
MRNVAPGRPPWPGRGRRTRWSISRRSSPGSRRSRTRRNRTAPFLLAGGVARNSYILRVEGCCTVCYQFWKCLLHWVSLGFFGDFFLGAYDSEFDYGNLPKDLLKLRNHILVSLLC

SEQ ID NO: 9290 - DNA, 661 bp, Glycine max
  misc_feature (1)..(661): Ceres Seq. ID no. 13594380
actacaacattcactccctctctcttgtcttttcctctacgttcctgcattgctcgtctcaaacgctaaccatggccggcggaggtttcaccagcggcggcggcgccggagatttcgaggccaaaatcactcccatcgtcatcatttcatgtatcatggctgccaccggaggtctcatgttcggctacgacgtcggcgtttcaggtggtgtgacgtctatgcccccgttcttgaagaagttttttccgacggtatacagaaagacagtggaagagaaaggactggacagtaattactgcaaatacgacaaccaaggattacagcttttcacgtcgtctctgtatctggctggtttgacttcgacgttctttgcttcatacacgactcgtaggttgggaagaaggctgaccatgttgattgctggggtattcttcatctgtggagttgtccttaatgctgctgctcaagaccttgccatgctcatcgttggcagaatcttacttggctgtggtgttggctttgctaatcaggttcatcaatcatcatattttatttttcaaaactcaattgcacaatgttaattaattggatttaaatgaattcgtgtatattgctagtaagtattaattataaataaataaataaatattgcacatgtwtc

SEQ ID NO: 9291 - protein, 192 aa, Glycine max
  peptide (1)..(192): Ceres Seq. ID no. 15221340
  misc_feature (49)..(176): Pfam Name: and other Pfam Description: Sugar
  misc_feature (24)..(176): NCBI GI NO: 5734440 NR Description: hexose transporter [Lycopersicon esculentum]
  misc_feature (24)..(176): NCBI GI NO: 7446737 NR Description: hexose transport protein - tomato
  misc_feature (24)..(176): NCBI GI NO: 15010580 NR Description: AT5g26340/F9D12_17 [Arabidopsis thaliana]
  misc_feature (24)..(176): NCBI GI NO: 15240313 NR Description: hexose transporter, putative
  misc_feature (24)..(176): NCBI GI NO: 33694266 NR Description: monosaccharide transporter 4
  misc_feature (24)..(176): NCBI GI NO: 34915514 NR Description: monosaccharide transporter 3
  misc_feature (27)..(176): NCBI GI NO: 3108161 NR Description: putative monosaccharide transporter 1
  misc_feature (24)..(176): NCBI GI NO: 1353516 NR Description: sugar transporter
  misc_feature (24)..(176): NCBI GI NO: 15222935 NR Description: sugar transporter, putative [Arabidopsis thaliana]
  misc_feature (24)..(176): NCBI GI NO: 81619 NR Description: glucose transport protein STP1
YNIHSLSLVFSSTFLHCSSQTLTMAGGGFTSGGGAGDFEAKITPIVIISCIMAATGGLMFGYDVGVSGGVTSMPPFLKKFFPTVYRKTVEEKGLDSNYCKYDNQGLQLFTSSLYLAGLTSTFFASYTTRRLGRRLTMLIAGVFFICGVVLNAAAQDLAMLIVGRILLGCGVGFANQVHQSSYFIFQNSIAQC

SEQ ID NO: 9292 - protein, 169 aa, Glycine max
  peptide (1)..(169): Ceres Seq. ID no. 15221341
  misc_feature (26)..(153): Pfam Name: and other Pfam Description: Sugar
  misc_feature (1)..(153): NCBI GI NO: 5734440 NR Description: hexose transporter [Lycopersicon esculentum]
  misc_feature (1)..(153): NCBI GI NO: 7446737 NR Description: hexose transport protein - tomato
  misc_feature (1)..(153): NCBI GI NO: 15010580 NR Description: AT5g26340/F9D12_17 [Arabidopsis thaliana]
  misc_feature (1)..(153): NCBI GI NO: 15240313 NR Description: hexose transporter, putative
  misc_feature (1)..(153): NCBI GI NO: 33694266 NR Description: monosaccharide transporter 4
  misc_feature (1)..(153): NCBI GI NO: 34915514 NR Description: monosaccharide transporter 3
  misc_feature (4)..(153): NCBI GI NO: 3108161 NR Description: putative monosaccharide transporter 1
  misc_feature (1)..(153): NCBI GI NO: 1353516 NR Description: sugar transporter
  misc_feature (1)..(153): NCBI GI NO: 15222935 NR Description: sugar transporter, putative [Arabidopsis thaliana]
  misc_feature (1)..(153): NCBI GI NO: 81619 NR Description: glucose transport protein STP1
MAGGGFTSGGGAGDFEAKITPIVIISCIMAATGGLMFGYDVGVSGGVTSMPPFLKKFFPTVYRKTVEEKGLDSNYCKYDNQGLQLFTSSLYLAGLTSTFFASYTTRRLGRRLTMLIAGVFFICGVVLNAAAQDLAMLIVGRILLGCGVGFANQVHQSSYFIFQNSIAQC

SEQ ID NO: 9293 - protein, 141 aa, Glycine max
  peptide (1)..(141): Ceres Seq. ID no. 15221342
  misc_feature (1)..(125): Pfam Name: and other Pfam Description: Sugar
  misc_feature (1)..(125): NCBI GI NO: 5734440 NR Description: hexose transporter [Lycopersicon esculentum]
  misc_feature (1)..(125): NCBI GI NO: 7446737 NR Description: hexose transport protein - tomato
  misc_feature (1)..(125): NCBI GI NO: 15010580 NR Description: AT5g26340/F9D12_17 [Arabidopsis thaliana]
  misc_feature (1)..(125): NCBI GI NO: 15240313 NR Description: hexose transporter, putative
  misc_feature (1)..(125): NCBI GI NO: 33694266 NR Description: monosaccharide transporter 4
  misc_feature (1)..(125): NCBI GI NO: 34915514 NR Description: monosaccharide transporter 3
  misc_feature (1)..(125): NCBI GI NO: 3108161 NR Description: putative monosaccharide transporter 1
  misc_feature (1)..(125): NCBI GI NO: 1353516 NR Description: sugar transporter
  misc_feature (1)..(125): NCBI GI NO: 15222935 NR Description: sugar transporter, putative [Arabidopsis thaliana]
  misc_feature (1)..(125): NCBI GI NO: 81619 NR Description: glucose transport protein STP1
MAATGGLMFGYDVGVSGGVTSMPPFLKKFFPTVYRKTVEEKGLDSNYCKYDNQGLQLFTSSLYLAGLTSTFFASYTTRRLGRRLTMLIAGVFFICGVVLNAAAQDLAMLIVGRILLGCGVGFANQVHQSSYFIFQNSIAQC

SEQ ID NO: 9294 - DNA, 1705 bp, Glycine max
  misc_feature (1)..(1705): Ceres Seq. ID no. 13594345
aaaatgtctcttttccctctctcactgtttttataagtttgattgccaaatcaatatccatggcttcggaggacagaaacgaagaagagcttcacgttctattggtggcattctctgcccaaggtcacatcaaccctttgcttaggcttggcaaaaaactactaagcagaggcctccacgtcaccctcgccaccaccgaattagtttaccaccgcgtcttcaagtcctccgccgccacccccaccgccaccgtccccacttcaatcaccaccaacggaatccaagtgctattcttctccgacggcttcggaaccggcctagacaacaagaccatcacccccgaccaatacatggaactcataggaaaatttggtcccatcagcctctccaacatcatcaaagaccacttcctcaacggttcccaaaaactcgtttgcatcatcaacaacccctttgtcccatgggttgcagatgtagctgccaacttcaacatcccatgcgcatgtctctggatccaaccctgtgctctctacgccatatactaccgtttctacaacaaccttaacacgttccccactctggaggacccttcaatgaatgtcgagttaccaggtcttcccttactacaaccccaagaccttccttctttcgttctcccatcaaacccccatggaagtattcccaaggtgctgtcttcgatgttccaacacatgaagaagctgaagtgggtactcgcgaactcgtttcacgaactggagaaagaggtaatagactccatggctgagttatgccccataacaacggtgggcccactagtccctccatcgttactcggccaagacgaaaacatcgaaggagacgtgggaatcgaaatgtggaagccacaggactcgtgcatggagtggctaaaccagcaacctccttcttcggttatctacgtttcctttgggagcattattgtgcttaccgctaaacaattggagagcatagcgagggctcttaggaacagtgaaaaaccttttctttgggtggttaagcgtcgagatggagaagaagcgcttccacttccagaagggtttgttgaagagaccaaagagaagggcatggtggtgccgtggtgcccgcaaacgaaggtgctgagtcacccttcggtggcgtgtttcttaacgcactgtggttggaattcgatgctggaagcaatcactgcgggcacgcccatgattgcttggccgcaatggaccgaccaacccaccaacgcgaaactgatttcggatgtgtttcgtttggggattcggctcgcgcaggagagtgatgggttcgttgcgacggaggaaatggaaagggcttttgagcggattttctcggcgggggactttaagagaaaggcgtcggagctaaaacgggcggcgagagaagcggtggctcagggtggctcgtcggagcagaatatccaatgcttcgtggatgaaattatagggacaaagtctacttgatggttggaccaggaccagatacagctttggtaacttcttgtcggtattggagattaagattctgctagagtttggagttttatgatcattatatttatcgccttcttccaaaaaaagttgtggttattatttttaattcctagttttgtgcttactatgattcggtgattacataattatagaacaagaacaagggtcacaggactttgtgg

SEQ ID NO: 9295 - protein, 496 aa, Glycine max
  peptide (1)..(496): Ceres Seq. ID no. 13594346
  misc_feature (27)..(490): NCBI GI NO: 13431605 NR Description: Limonoid UDP-glucosyltransferase
  misc_feature (93)..(490): NCBI GI NO: 15227791 NR Description: UDP-glycosyltransferase family
  misc_feature (28)..(133): NCBI GI NO: 15227791 NR Description: UDP-glycosyltransferase family
  misc_feature (53)..(490): NCBI GI NO: 15227796 NR Description: UDP-glycosyltransferase family
  misc_feature (93)..(490): NCBI GI NO: 15227795 NR Description: UDP-glycosyltransferase family
  misc_feature (31)..(494): NCBI GI NO: 15233091 NR Description: UDP-glucosyltransferase, putative
  misc_feature (31)..(494): NCBI GI NO: 21593030 NR Description: indole-3-acetate beta-glucosyltransferase like
  misc_feature (31)..(494): NCBI GI NO: 20259348 NR Description: putative UDP-glucose:indole-3-acetate beta-D-glucosyltransferase
  misc_feature (31)..(494): NCBI GI NO: 15234616 NR Description: UDP-glycosyltransferase, putative
  misc_feature (30)..(490): NCBI GI NO: 25082972 NR Description: indole-3-acetate beta-glucosyltransferase like
NVSFPSLTVFISLIAKSISMASEDRNEEELHVLLVAFSAQGHINPLLRLGKKLLSRGLHVTLATTELVYHRVFKSSAATPTATVPTSITTNGIQVLFFSDGFGTGLDNKTITPDQYMELIGKFGPISLSNIIKDHFLNGSQKLVCIINNPFVPWVADVAANFNIPCACLWIQPCALYAIYYRFYNNLNTFPTLEDPSMNVELPGLPLLQPQDLPSFVLPSNPHGSIPKVLSSMFQHMKKLKWVLANSFHELEKEVIDSMAELCPITTVGPLVPPSLLGQDENIEGDVGIEMWKPQDSCMEWLNQQPPSSVIYVSFGSIIVLTAKQLESIARALRNSEKPFLWVVKRRDGEEALPLPEGFVEETKEKGMVVPWCPQTKVLSHPSVACFLTHCGWNSMLEAITAGTPMIAWPQWTDQPTNAKLISDVFRLGIRLAQESDGFVATEEMERAFERIFSAGDFKRKASELKRAAREAVAQGGSSEQNIQCFVDEIIGTKST

SEQ ID NO: 9296 - protein, 477 aa, Glycine max
  peptide (1)..(477): Ceres Seq. ID no. 13594347
  misc_feature (8)..(471): NCBI GI NO: 13431605 NR Description: Limonoid UDP-glucosyltransferase
  misc_feature (74)..(471): NCBI GI NO: 15227791 NR Description: UDP-glycosyltransferase family
  misc_feature (9)..(114): NCBI GI NO: 15227791 NR Description: UDP-glycosyltransferase family
  misc_feature (34)..(471): NCBI GI NO: 15227796 NR Description: UDP-glycosyltransferase family
  misc_feature (74)..(471): NCBI GI NO: 15227795 NR Description: UDP-glycosyltransferase family
  misc_feature (12)..(475): NCBI GI NO: 15233091 NR Description: UDP-glucosyltransferase, putative
  misc_feature (12)..(475): NCBI GI NO: 21593030 NR Description: indole-3-acetate beta-glucosyltransferase like
  misc_feature (12)..(475): NCBI GI NO: 20259348 NR Description: putative UDP-glucose:indole-3-acetate beta-D-glucosyltransferase
  misc_feature (12)..(475): NCBI GI NO: 15234616 NR Description: UDP-glycosyltransferase, putative
  misc_feature (11)..(471): NCBI GI NO: 25082972 NR Description: indole-3-acetate beta-glucosyltransferase like
MASEDRNEEELHVLLVAFSAQGHINPLLRLGKKLLSRGLHVTLATTELVYHRVFKSSAATPTATVPTSITTNGIQVLFFSDGFGTGLDNKTITPDQYMELIGKFGPISLSNIIKDHFLNGSQKLVCIINNPFVPWVADVAANFNIPCACLWIQPCALYAIYYRFYNNLNTFPTLEDPSMNVELPGLPLLQPQDLPSFVLPSNPHGSIPKVLSSMFQHMKKLKWVLANSFHELEKEVIDSMAELCPITTVGPLVPPSLLGQDENIEGDVGIEMWKPQDSCMEWLNQQPPSSVIYVSFGSIIVLTAKQLESIARALRNSEKPFLWVVKRRDGEEALPLPEGFVEETKEKGMVVPWCPQTKVLSHPSVACFLTHCGWNSMLEAITAGTPMIAWPQWTDQPTNAKLISDVFRLGIRLAQESDGFVATEEMERAFERIFSAGDFKRKASELKRAAREAVAQGGSSEQNIQCFVDEIIGTKST

SEQ ID NO: 9297 - protein, 380 aa, Glycine max
  peptide (1)..(380): Ceres Seq. ID no. 13594348
  misc_feature (1)..(374): NCBI GI NO: 13431605 NR Description: Limonoid UDP-glucosyltransferase
  misc_feature (1)..(374): NCBI GI NO: 15227791 NR Description: UDP-glycosyltransferase family
  misc_feature (1)..(17): NCBI GI NO: 15227791 NR Description: UDP-glycosyltransferase family
  misc_feature (1)..(374): NCBI GI NO: 15227796 NR Description: UDP-glycosyltransferase family
  misc_feature (1)..(374): NCBI GI NO: 15227795 NR Description: UDP-glycosyltransferase family
  misc_feature (1)..(378): NCBI GI NO: 15233091 NR Description: UDP-glucosyltransferase, putative
  misc_feature (1)..(378): NCBI GI NO: 21593030 NR Description: indole-3-acetate beta-glucosyltransferase like
  misc_feature (1)..(378): NCBI GI NO: 20259348 NR Description: putative UDP-glucose:indole-3-acetate beta-D-glucosyltransferase
  misc_feature (1)..(378): NCBI GI NO: 15234616 NR Description: UDP-glycosyltransferase, putative
  misc_feature (1)..(374): NCBI GI NO: 25082972 NR Description: indole-3-acetate beta-glucosyltransferase like
MELIGKFGPISLSNIIKDHFLNGSQKLVCIINNPFVPWVADVAANFNIPCACLWIQPCALYAIYYRFYNNLNTFPTLEDPSMNVELPGLPLLQPQDLPSFVLPSNPHGSIPKVLSSMFQHMKKLKWVLANSFHELEKEVIDSMAELCPITTVGPLVPPSLLGQDENIEGDVGIEMWKPQDSCMEWLNQQPPSSVIYVSFGSIIVLTAKQLESIARALRNSEKPFLWVVKRRDGEEALPLPEGFVEETKEKGMVVPWCPQTKVLSHPSVACFLTHCGWNSMLEAITAGTPMIAWPQWTDQPTNAKLISDVFRLGIRLAQESDGFVATEEMERAFERIFSAGDFKRKASELKRAAREAVAQGGSSEQNIQCFVDEIIGTKST

SEQ ID NO: 9298 - DNA, 1326 bp, Glycine max
  misc_feature (1)..(1326): Ceres Seq. ID no. 13528075
catggaggaccacaccccatttctctagcactgattaaacaataatctttgatttttttggtcctccggtcatccttgatgtgttcacaggaggtatgctctggtattttatatgacttaattagttcattttaaatgaatttaatttaatttaccaaattcagtaatgaaattgaatcagctaaattcaaccatgtatgaggtttcttgtagaattagcatgcagccaaccatatgcttcttagaatcttagtgacaacctgtagatgaagtgtgtcatatctttatcatttgttgtttctgttaactgatgatgatctactctgtaagttgtaactgtaatatagtaacattccttatttcatgttcctcttccaaccctaattgctttatctttctggtcatccagtggctagtatagaagaaccataagcactgagggaaaaagtgattagtactttagccaacaaattaaaaatggctgtcaccaaggtctacattgtgtattactccttatatggacatgtagacaccatggctagagaagtacacagaggggctgctacagttgaaggtgttgaagcaacactttggagggtacctgagatgctttcggaactaatattggataagttgaaggcccctcctaaaccaaatgatgtaccagacataatgccagaacaacttgtggaggctgatggtttgatatttggttttccttctcgttttgggatgatgccgagccagctcaaggccttctttgatgcaactagtgagctatgggcatcccaagcacttgccggcaaacctgctggaatcttctggagtactggtttttatggtggaggccaagaactatcagcattgacagctataactcaattagctcatcatggtatgctttttgttcctcttggatacacctttggaagtggcatgtttgagatagatgaggtaaaaggaggatctgcatatggtgctggaacttttgcaggagatggatctcgtcaacctacagaactagaactgcagcaggcattttaccagggtaaatatcttgccgaagtaacaaaaaagctgaaaagctaacttctctgcctaacaaatacatgacaggatactatgaactgtgatgtgctacattatctataacatttgattgaagactcgatgattatttttaccggtaagacaagatagaaagacctcatgtggcttttctttttctgggttctgttgttgcaacaatgtatatcttctgttatctctttcagaaaactctcaaattattccaatgaaatgataaacaagatattcagtatttcc

SEQ ID NO: 9299 - protein, 203 aa, Glycine max
  peptide (1)..(203): Ceres Seq. ID no. 13528076
  misc_feature (1)..(202): NCBI GI NO: 22327957 NR Description: quinone reductase family [Arabidopsis thaliana]
  misc_feature (4)..(202): NCBI GI NO: 15239652 NR Description: quinone reductase, putative [Arabidopsis thaliana]
  misc_feature (4)..(202): NCBI GI NO: 30687535 NR Description: quinone reductase family [Arabidopsis thaliana]
  misc_feature (1)..(202): NCBI GI NO: 21068664 NR Description: putative quinone oxidoreductase [Cicer arietinum]
  misc_feature (4)..(202): NCBI GI NO: 5031275 NR Description: unknown [Prunus armeniaca]
  misc_feature (1)..(202): NCBI GI NO: 34910128 NR Description: putative 1,4-benzoquinone reductase
  misc_feature (4)..(202): NCBI GI NO: 12484052 NR Description: quinone-oxidoreductase QR2
  misc_feature (5)..(202): NCBI GI NO: 38636776 NR Description: putative quinone-oxidoreductase QR2
  misc_feature (4)..(202): NCBI GI NO: 7445353 NR Description: hypothetical protein M4I22
  misc_feature (1)..(201): NCBI GI NO: 15234512 NR Description: quinone reductase family [Arabidopsis thaliana]
MAVTKVYIVYYSLYGHVDTMAREVHRGAATVEGVEATLWRVPEMLSELILDKLKAPPKPNDVPDIMPEQLVEADGLIFGFPSRFGMMPSQLKAFFDATSELWASQALAGKPAGIFWSTGFYGGGQELSALTAITQLAHHGMLFVPLGYTFGSGMFEIDEVKGGSAYGAGTFAGDGSRQPTELELQQAFYQGKYLAEVTKKLKS

SEQ ID NO: 9300 - protein, 184 aa, Glycine max
  peptide (1)..(184): Ceres Seq. ID no. 13528077
  misc_feature (1)..(183): NCBI GI NO: 22327957 NR Description: quinone reductase family [Arabidopsis thaliana]
  misc_feature (1)..(183): NCBI GI NO: 15239652 NR Description: quinone reductase, putative [Arabidopsis thaliana]
  misc_feature (1)..(183): NCBI GI NO: 30687535 NR Description: quinone reductase family [Arabidopsis thaliana]
  misc_feature (1)..(183): NCBI GI NO: 21068664 NR Description: putative quinone oxidoreductase [Cicer arietinum]
  misc_feature (1)..(183): NCBI GI NO: 5031275 NR Description: unknown [Prunus armeniaca]
  misc_feature (1)..(183): NCBI GI NO: 34910128 NR Description: putative 1,4-benzoquinone reductase
  misc_feature (1)..(183): NCBI GI NO: 12484052 NR Description: quinone-oxidoreductase QR2
  misc_feature (1)..(183): NCBI GI NO: 38636776 NR Description: putative quinone-oxidoreductase QR2
  misc_feature (1)..(183): NCBI GI NO: 7445353 NR Description: hypothetical protein M4I22
  misc_feature (1)..(182): NCBI GI NO: 15234512 NR Description: quinone reductase family [Arabidopsis thaliana]
MAREVHRGAATVEGVEATLWRVPEMLSELILDKLKAPPKPNDVPDIMPEQLVEADGLIFGFPSRFGMMPSQLKAFFDATSELWASQALAGKPAGIFWSTGFYGGGQELSALTAITQLAHHGMLFVPLGYTFGSGMFEIDEVKGGSAYGAGTFAGDGSRQPTELELQQAFYQGKYLAEVTKKLKS

SEQ ID NO: 9301 - protein, 160 aa, Glycine max
  peptide (1)..(160): Ceres Seq. ID no. 13528078
  misc_feature (1)..(159): NCBI GI NO: 22327957 NR Description: quinone reductase family [Arabidopsis thaliana]
  misc_feature (1)..(159): NCBI GI NO: 15239652 NR Description: quinone reductase, putative [Arabidopsis thaliana]
  misc_feature (1)..(159): NCBI GI NO: 30687535 NR Description: quinone reductase family [Arabidopsis thaliana]
  misc_feature (1)..(159): NCBI GI NO: 21068664 NR Description: putative quinone oxidoreductase [Cicer arietinum]
  misc_feature (1)..(159): NCBI GI NO: 5031275 NR Description: unknown [Prunus armeniaca]
  misc_feature (1)..(159): NCBI GI NO: 34910128 NR Description: putative 1,4-benzoquinone reductase
  misc_feature (1)..(159): NCBI GI NO: 12484052 NR Description: quinone-oxidoreductase QR2
  misc_feature (1)..(159): NCBI GI NO: 38636776 NR Description: putative quinone-oxidoreductase QR2
  misc_feature (1)..(159): NCBI GI NO: 7445353 NR Description: hypothetical protein M4I22
  misc_feature (1)..(158): NCBI GI NO: 15234512 NR Description: quinone reductase family [Arabidopsis thaliana]
MLSELILDKLKAPPKPNDVPDIMPEQLVEADGLIFGFPSRFGMMPSQLKAFFDATSELWASQALAGKPAGIFWSTGFYGGGQELSALTAITQLAHHGMLFVPLGYTFGSGMFEIDEVKGGSAYGAGTFAGDGSRQPTELELQQAFYQGKYLAEVTKKLKS

SEQ ID NO: 9302 - DNA, 1850 bp, Glycine max
  misc_feature (1)..(1850): Ceres Seq. ID no. 13638331
  misc_feature (1836)..(1836): n is a, c, t, g, unknown, or other
atcgaaaagtattacaattagtctcagtccccaacgactggttctgttttctctctgctgcttcgattcattcacacaaccatgactagccttactaatggcgatgctggctccctcaacaaggtccccacgatcaagttcaccaagctcttcattaatggagacttcgttgactctctgtcaggaaagacatttgagacaatagatccaagaacaggagatgttatagcgaggataagcgagggagataaagaagacattgacattgctgttaaagcagcacgtcatgcatttgacaacggtccatggcctcgccttcccggctctgagagagcaagaatattgctgaaatgggcagaaataattgaggaaaacgcagaagaacttgcagcactagatgcgattgatgcggggaagttgtaccatatgtgtaggaatgtggaagttccagcagcggcaaacactcttcgttactatgctggtgcagccgataagattcatggagaggtgttgaaaatgtctcgagagttccatgcctatacattacttgaaccacttggtgttgtgggacacattactccctggaatttccccaataccatgttctacatcaaagtcgctccttctttagctgctggctgcaccatggtcctcaagcctgctgagcaaacacccctctctgctttgttttctgctcatcttgctaaattggctggaatcccagatggagtgatcaatgtagtgcctggatttggcccaactgctggtgctgcattaagctcacacatggatgttgataaggtcagctttaccggttcaacacaaacaggccgtgtgataatgcaggctgcagcaaagagtaacttgaaacaagtttcacttgaattaggaggcaagtcacccctcataatttttgatgatgcagatatagacaaagctactgagctagctctactaggcatcctatataacaagggagaagtttgtgttgcaagttcccgtgtgtttgttcaagaagggatctatgatgaatttgagaaaaaactggtggagaaggcaaaagcttgggtcgttggggatccctttgatcctaaagttcaacaaggccctcaggttgacaaggaacaatttgaaaaagttctttcatatattgagcatggaaagaaagaaggagctacccttttgaccgggggtaaaacagtggggaacaagggctactttattgagccgacaattttctccaatataagggaggatatgcttatagcacaggatgaaatatttggcccagtgatggcactgaagaagtttaagaccactgaggaagcaattaagagtgctaacaataccaagtatggcctagcagcaggcatagtgaccaagaatttggatacagcaaacacagtgtcaaggtctattcgggcaggcactatatggatcaactgctattttgcctttggcgatgatgttccctttggaggatataagatgagtggatttggaaaagatcatggattggaagcccttcacaagtacctacaagttaaatctgttgttactcccctttacaattctccctggctttgaatgtctactgcatggatcttggaaaatggtccattctggccatttcctatcaatttgcatctgccatgaggcatggaaattcagttcttgaacagtggtgtctattatattgtcaacaagctggccttttcctacttttcagtcatgctttaatagaaaatgtatggaagaaaaatagtaattttatttttgtttggtttgtaattaaaaggaaatatcaacacaatttaacttattgcttcaacaganatatatgaattgtt

SEQ ID NO: 9303 - protein, 501 aa, Glycine max
  peptide (1)..(501): Ceres Seq. ID no. 13638332
  misc_feature (1)..(501): NCBI GI NO: 34912248 NR Description: cytosolic aldehyde dehydrogenase
  misc_feature (6)..(501): NCBI GI NO: 19850241 NR Description: cytosolic aldehyde dehydrogenase RF2C [Zea mays]
  misc_feature (6)..(501): NCBI GI NO: 19850243 NR Description: cytosolic aldehyde dehydrogenase RF2C [Zea mays]
  misc_feature (14)..(501): NCBI GI NO: 18404212 NR Description: aldehyde dehydrogenase (ALDH1a)
  misc_feature (6)..(500): NCBI GI NO: 19850247 NR Description: cytosolic aldehyde dehydrogenase RF2D [Zea mays]
  misc_feature (36)..(500): NCBI GI NO: 19850245 NR Description: cytosolic aldehyde dehydrogenase RF2D [Zea mays]
  misc_feature (18)..(501): NCBI GI NO: 7431451 NR Description: rf2 nuclear restorer protein - maize
  misc_feature (18)..(501): NCBI GI NO: 20530131 NR Description: mitochondrial aldehyde dehydrogenase
  misc_feature (18)..(501): NCBI GI NO: 14276718 NR Description: T-cytoplasm male sterility restorer factor 2
  misc_feature (18)..(501): NCBI GI NO: 11691926 NR Description: aldehyde dehydrogenase ALDH2b
MTSLTNGDAGSLNKVPTIKFTKLFINGDFVDSLSGKTFETIDPRTGDVIARISEGDKEDIDIAVKAARHAFDNGPWPRLPGSERARILLKWAEIIEENAEELAALDAIDAGKLYHMCRNVEVPAAANTLRYYAGAADKIHGEVLKMSREFHAYTLLEPLGVVGHITPWNFPNTMFYIKVAPSLAAGCTMVLKPAEQTPLSALFSAHLAKLAGIPDGVINVVPGFGPTAGAALSSHMDVDKVSFTGSTQTGRVIMQAAAKSNLKQVSLELGGKSPLIIFDDADIDKATELALLGILYNKGEVCVASSRVFVQEGIYDEFEKKLVEKAKAWVVGDPFDPKVQQGPQVDKEQFEKVLSYIEHGKKEGATLLTGGKTVGNKGYFIEPTIFSNIREDMLIAQDEIFGPVMALKKFKTTEEAIKSANNTKYGLAAGIVTKNLDTANTVSRSIRAGTIWINCYFAFGDDVPFGGYKMSGFGKDHGLEALHKYLQVKSVVTPLYNSPWL

SEQ ID NO: 9304 - protein, 386 aa, Glycine max
  peptide (1)..(386): Ceres Seq. ID no. 13638333
  misc_feature (1)..(386): NCBI GI NO: 34912248 NR Description: cytosolic aldehyde dehydrogenase
  misc_feature (1)..(386): NCBI GI NO: 19850241 NR Description: cytosolic aldehyde dehydrogenase RF2C [Zea mays]
  misc_feature (1)..(386): NCBI GI NO: 19850243 NR Description: cytosolic aldehyde dehydrogenase RF2C [Zea mays]
  misc_feature (1)..(386): NCBI GI NO: 18404212 NR Description: aldehyde dehydrogenase (ALDH1a)
  misc_feature (1)..(385): NCBI GI NO: 19850247 NR Description: cytosolic aldehyde dehydrogenase RF2D [Zea mays]
  misc_feature (1)..(385): NCBI GI NO: 19850245 NR Description: cytosolic aldehyde dehydrogenase RF2D [Zea mays]
  misc_feature (1)..(386): NCBI GI NO: 7431451 NR Description: rf2 nuclear restorer protein - maize
  misc_feature (1)..(386): NCBI GI NO: 20530131 NR Description: mitochondrial aldehyde dehydrogenase
  misc_feature (1)..(386): NCBI GI NO: 14276718 NR Description: T-cytoplasm male sterility restorer factor 2
  misc_feature (1)..(386): NCBI GI NO: 11691926 NR Description: aldehyde dehydrogenase ALDH2b
MCRNVEVPAAANTLRYYAGAADKIHGEVLKMSREFHAYTLLEPLGVVGHITPWNFPNTMFYIKVAPSLAAGCTMVLKPAEQTPLSALFSAHLAKLAGIPDGVINVVPGFGPTAGAALSSHMDVDKVSFTGSTQTGRVIMQAAAKSNLKQVSLELGGKSPLIIFDDADIDKATELALLGILYNKGEVCVASSRVFVQEGIYDEFEKKLVEKAKAWVVGDPFDPKVQQGPQVDKEQFEKVLSYIEHGKKEGATLLTGGKTVGNKGYFIEPTIFSNIREDMLIAQDEIFGPVMALKKFKTTEEAIKSANNTKYGLAAGIVTKNLDTANTVSRSIRAGTIWINCYFAFGDDVPFGGYKMSGFGKDHGLEALHKYLQVKSVVTPLYNSPWL

SEQ ID NO: 9305 - protein, 356 aa, Glycine max
  peptide (1)..(356): Ceres Seq. ID no. 13638334
  misc_feature (1)..(356): NCBI GI NO: 34912248 NR Description: cytosolic aldehyde dehydrogenase
  misc_feature (1)..(356): NCBI GI NO: 19850241 NR Description: cytosolic aldehyde dehydrogenase RF2C [Zea mays]
  misc_feature (1)..(356): NCBI GI NO: 19850243 NR Description: cytosolic aldehyde dehydrogenase RF2C [Zea mays]
  misc_feature (1)..(356): NCBI GI NO: 18404212 NR Description: aldehyde dehydrogenase (ALDH1a)
  misc_feature (1)..(355): NCBI GI NO: 19850247 NR Description: cytosolic aldehyde dehydrogenase RF2D [Zea mays]
  misc_feature (1)..(355): NCBI GI NO: 19850245 NR Description: cytosolic aldehyde dehydrogenase RF2D [Zea mays]
  misc_feature (1)..(356): NCBI GI NO: 7431451 NR Description: rf2 nuclear restorer protein - maize
  misc_feature (1)..(356): NCBI GI NO: 20530131 NR Description: mitochondrial aldehyde dehydrogenase
  misc_feature (1)..(356): NCBI GI NO: 14276718 NR Description: T-cytoplasm male sterility restorer factor 2
  misc_feature (1)..(356): NCBI GI NO: 11691926 NR Description: aldehyde dehydrogenase ALDH2b
MSREFHAYTLLEPLGVVGHITPWNFPNTMFYIKVAPSLAAGCTMVLKPAEQTPLSALFSAHLAKLAGIPDGVINVVPGFGPTAGAALSSHMDVDKVSFTGSTQTGRVIMQAAAKSNLKQVSLELGGKSPLIIFDDADIDKATELALLGILYNKGEVCVASSRVFVQEGIYDEFEKKLVEKAKAWVVGDPFDPKVQQGPQVDKEQFEKVLSYIEHGKKEGATLLTGGKTVGNKGYFIEPTIFSNIREDMLIAQDEIFGPVMALKKFKTTEEAIKSANNTKYGLAAGIVTKNLDTANTVSRSIRAGTIWINCYFAFGDDVPFGGYKMSGFGKDHGLEALHKYLQVKSVVTPLYNSPWL

SEQ ID NO: 9306 - DNA, 1202 bp, Glycine max
  misc_feature (1)..(1202): Ceres Seq. ID no. 14304408
ctgtaccacaataatcaaagtctcaaccatgagaaaacgtatcaatatggaaagtgatgctgacttcaattcctttgccacatcctcctcttccaccacaccttcaatcttctttgacactaacacttctagcacatcctcctcctcaacatctcctacctcaaattcagaatcatgcaccaaagaacactccaaaacacctcaaaatgactcaaccacttctcaaacctcattggaaaatggaaaggactcaaaagggtgcaagaagaggcagatagacaatagcaaccagaatcaccaccctacttataggggtgtaaggatgaggaattggggcaaatgggtgtccgaaatccgtgagccgagaaagaagtcaagaatatggctaggaacataccctacagcagaaatggcagctagagcacatgatgtggctgccttagccatcaagggccattcagcatacctcaattttcctgaattggctcaagagcttccaaggccagttagcacatctcctaaggacattcaagctgcagctgcaaaagctgcaaatactgcctttgaggaggttaggcattgtcaaataactgaagaagaagcagaacaaaaccaagcagaacaagcttcatcttcaactctctcaatggacaatcctcaagagccttcaagttctcattctaccattgatgatgacactttgtttgaccttccagatcttttccctgatggaaacaatggactttgctccttttcttcttcttggcatttgtgtgcagttgatagtggctttaggcttgaggagtcatttttttatgagaaccattagaatttagaggctttttattttctttttaattcaagtaaaatacagagtttaataagaccaaaaggaaggagagcaacatgcggagtttttcttctttgtttggtcactgcaactgcattctgcgcagagaataaccagttgaggaagactttacatttttatctgtaaatggtgctgtctattgctaatattttgtccgatatagtttttttttctattttggggaataaaggtttaggtgagccgtgagcaaagactattccatcatcaagtaagttacgtattcaactaggagtgcataacatctgagacaaggtttctcttctactgtatatgaaaggtatttatgatttgagagaatatcctttcctct

SEQ ID NO: 9307 - protein, 275 aa, Glycine max
  peptide (1)..(275): Ceres Seq. ID no. 14304409
  misc_feature (100)..(164): Pfam Name: Pfam Description:  AP2 domain
  misc_feature (66)..(274): NCBI GI NO: 15232340 NR Description: AP2 domain transcription factor TINY, putative
  misc_feature (10)..(228): NCBI GI NO: 15225381 NR Description: AP2 domain transcription factor TINY, putative
  misc_feature (10)..(228): NCBI GI NO: 21592664 NR Description: putative AP2 domain transcription factor
  misc_feature (26)..(273): NCBI GI NO: 21908034 NR Description: DRE binding factor 2 [Zea mays]
  misc_feature (26)..(273): NCBI GI NO: 25990951 NR Description: DREB-like protein [Zea mays]
  misc_feature (46)..(273): NCBI GI NO: 14140163 NR Description: putative AP2 domain containing protein
  misc_feature (86)..(250): NCBI GI NO: 14140155 NR Description: putative AP2 domain transcription factor
  misc_feature (2)..(255): NCBI GI NO: 38605844 NR Description: OSJNBb0034G17.2
  misc_feature (10)..(261): NCBI GI NO: 37536842 NR Description: putative DNA binding protein
  misc_feature (83)..(275): NCBI GI NO: 15233928 NR Description: AP2 domain transcription factor TINY, putative
CTTIIKVSTMRKRINMESDADFNSFATSSSSTTPSIFFDTNTSSTSSSSTSPTSNSESCTKEHSKTPQNDSTTSQTSLENGKDSKGCKKRQIDNSNQNHHPTYRGVRMRNWGKWVSEIREPRKKSRIWLGTYPTAEMAARAHDVAALAIKGHSAYLNFPELAQELPRPVSTSPKDIQAAAAKAANTAFEEVRHCQITEEEAEQNQAEQASSSTLSMDNPQEPSSSHSTIDDDTLFDLPDLFPDGNNGLCSFSSSWHLCAVDSGFRLEESFFYENH

SEQ ID NO: 9308 - protein, 266 aa, Glycine max
  peptide (1)..(266): Ceres Seq. ID no. 14304410
  misc_feature (91)..(155): Pfam Name: Pfam Description:  AP2 domain
  misc_feature (57)..(265): NCBI GI NO: 15232340 NR Description: AP2 domain transcription factor TINY, putative
  misc_feature (1)..(219): NCBI GI NO: 15225381 NR Description: AP2 domain transcription factor TINY, putative
  misc_feature (1)..(219): NCBI GI NO: 21592664 NR Description: putative AP2 domain transcription factor
  misc_feature (17)..(264): NCBI GI NO: 21908034 NR Description: DRE binding factor 2 [Zea mays]
  misc_feature (17)..(264): NCBI GI NO: 25990951 NR Description: DREB-like protein [Zea mays]
  misc_feature (37)..(264): NCBI GI NO: 14140163 NR Description: putative AP2 domain containing protein
  misc_feature (77)..(241): NCBI GI NO: 14140155 NR Description: putative AP2 domain transcription factor
  misc_feature (1)..(246): NCBI GI NO: 38605844 NR Description: OSJNBb0034G17.2
  misc_feature (1)..(252): NCBI GI NO: 37536842 NR Description: putative DNA binding protein
  misc_feature (74)..(266): NCBI GI NO: 15233928 NR Description: AP2 domain transcription factor TINY, putative
MRKRINMESDADFNSFATSSSSTTPSIFFDTNTSSTSSSSTSPTSNSESCTKEHSKTPQNDSTTSQTSLENGKDSKGCKKRQIDNSNQNHHPTYRGVRMRNWGKWVSEIREPRKKSRIWLGTYPTAEMAARAHDVAALAIKGHSAYLNFPELAQELPRPVSTSPKDIQAAAAKAANTAFEEVRHCQITEEEAEQNQAEQASSSTLSMDNPQEPSSSHSTIDDDTLFDLPDLFPDGNNGLCSFSSSWHLCAVDSGFRLEESFFYENH

SEQ ID NO: 9309 - protein, 260 aa, Glycine max
  peptide (1)..(260): Ceres Seq. ID no. 14304411
  misc_feature (85)..(149): Pfam Name: Pfam Description:  AP2 domain
  misc_feature (51)..(259): NCBI GI NO: 15232340 NR Description: AP2 domain transcription factor TINY, putative
  misc_feature (1)..(213): NCBI GI NO: 15225381 NR Description: AP2 domain transcription factor TINY, putative
  misc_feature (1)..(213): NCBI GI NO: 21592664 NR Description: putative AP2 domain transcription factor
  misc_feature (11)..(258): NCBI GI NO: 21908034 NR Description: DRE binding factor 2 [Zea mays]
  misc_feature (11)..(258): NCBI GI NO: 25990951 NR Description: DREB-like protein [Zea mays]
  misc_feature (31)..(258): NCBI GI NO: 14140163 NR Description: putative AP2 domain containing protein
  misc_feature (71)..(235): NCBI GI NO: 14140155 NR Description: putative AP2 domain transcription factor
  misc_feature (1)..(240): NCBI GI NO: 38605844 NR Description: OSJNBb0034G17.2
  misc_feature (1)..(246): NCBI GI NO: 37536842 NR Description: putative DNA binding protein
  misc_feature (68)..(260): NCBI GI NO: 15233928 NR Description: AP2 domain transcription factor TINY, putative
MESDADFNSFATSSSSTTPSIFFDTNTSSTSSSSTSPTSNSESCTKEHSKTPQNDSTTSQTSLENGKDSKGCKKRQIDNSNQNHHPTYRGVRMRNWGKWVSEIREPRKKSRIWLGTYPTAEMAARAHDVAALAIKGHSAYLNFPELAQELPRPVSTSPKDIQAAAAKAANTAFEEVRHCQITEEEAEQNQAEQASSSTLSMDNPQEPSSSHSTIDDDTLFDLPDLFPDGNNGLCSFSSSWHLCAVDSGFRLEESFFYENH

SEQ ID NO: 9310 - DNA, 949 bp, Glycine max
  misc_feature (1)..(949): Ceres Seq. ID no. 12608620
accccattttggaaaataaccttatttcttggtctgcaaaacatcatggcagaagcgagtttctttgttggagtcataggtaacatcatctcaattctcatgtttctttctcctgtacctacgttttggaaaataaagaagcacggatccaccgaagatttctcaagccttccttatatttgcacattgcttaattgctccctctggacttactatggaatcataaaagctggagagtaccttgtggccactgttaatggctttggcattctcatggagacaatctacattattctatttctcatatatgcaccaaaagggataaggggtaggactgctattttggctttgattttggatgtggtaatcttgacggcaataataattattactcaattagcattagaaggagagactcgtagtggtgctgttggtgttatgggagcaggcttaaatattgttatgtattcctcacctctgtcggtcatgaaaacagtggtgactacaaaaagcgtggagtatatgccattcttgctttcttttttcttctttttcaacggtgccgtttggttgttgtatgctgttctcgttcgtgatgttatcctcggggtgccaaacggtactggatttttactgggagcgatgcaattagtgctatacgcgatctacagaaatgggaagcgtgtttcaaataacagattggaagaaggattacaacatgagcctctcatctcagagccgaataatgagtcacatcagagtgaagacaggcccatctagtttgtcctcaagttttaaagctatatatgcatgctagctcgaccattgttatttgatattttcaatataaaaagagataagttaaatgttcaattgattagtttattcgattaaagtatgtttttaccgatcaagtgcatgaaataattaatgtgaaattatttcaatt

SEQ ID NO: 9311 - protein, 259 aa, Glycine max
  peptide (1)..(259): Ceres Seq. ID no. 12608621
  misc_feature (21)..(106): Pfam Name: Pfam Description:  MtN3/saliva family
  misc_feature (16)..(241): NCBI GI NO: 27754697 NR Description: putative cytochrome c oxidoreductase
  misc_feature (16)..(241): NCBI GI NO: 30683457 NR Description: nodulin MtN3 family protein [Arabidopsis thaliana]
  misc_feature (16)..(245): NCBI GI NO: 30684193 NR Description: nodulin MtN3 family protein [Arabidopsis thaliana]
  misc_feature (19)..(227): NCBI GI NO: 34907420 NR Description: P0018C10.36
  misc_feature (20)..(224): NCBI GI NO: 15229019 NR Description: MTN3-like protein; protein id: At3g48740
  misc_feature (20)..(226): NCBI GI NO: 1619602 NR Description: MtN3 [Medicago truncatula]
  misc_feature (23)..(223): NCBI GI NO: 34912462 NR Description: MtN3-like protein
  misc_feature (20)..(231): NCBI GI NO: 15237803 NR Description: MtN3-like protein; protein id: At5g23660
  misc_feature (20)..(239): NCBI GI NO: 21593422 NR Description: senescence-associated protein (SAG29)
  misc_feature (23)..(223): NCBI GI NO: 34912454 NR Description: P0681B11.31
TPFWKITLFLGLQNIMAEASFFVGVIGNIISILMFLSPVPTFWKIKKHGSTEDFSSLPYICTLLNCSLWTYYGIIKAGEYLVATVNGFGILMETIYIILFLIYAPKGIRGRTAILALILDVVILTAIIIITQLALEGETRSGAVGVMGAGLNIVMYSSPLSVMKTVVTTKSVEYMPFLLSFFFFFNGAVWLLYAVLVRDVILGVPNGTGFLLGAMQLVLYAIYRNGKRVSNNRLEEGLQHEPLISEPNNESHQSEDRPI

SEQ ID NO: 9312 - protein, 244 aa, Glycine max
  peptide (1)..(244): Ceres Seq. ID no. 12608622
  misc_feature (6)..(91): Pfam Name: Pfam Description:  MtN3/saliva family
  misc_feature (1)..(226): NCBI GI NO: 27754697 NR Description: putative cytochrome c oxidoreductase
  misc_feature (1)..(226): NCBI GI NO: 30683457 NR Description: nodulin MtN3 family protein [Arabidopsis thaliana]
  misc_feature (1)..(230): NCBI GI NO: 30684193 NR Description: nodulin MtN3 family protein [Arabidopsis thaliana]
  misc_feature (4)..(212): NCBI GI NO: 34907420 NR Description: P0018C10.36
  misc_feature (5)..(209): NCBI GI NO: 15229019 NR Description: MTN3-like protein; protein id: At3g48740
  misc_feature (5)..(211): NCBI GI NO: 1619602 NR Description: MtN3 [Medicago truncatula]
  misc_feature (8)..(208): NCBI GI NO: 34912462 NR Description: MtN3-like protein
  misc_feature (5)..(216): NCBI GI NO: 15237803 NR Description: MtN3-like protein; protein id: At5g23660
  misc_feature (5)..(224): NCBI GI NO: 21593422 NR Description: senescence-associated protein (SAG29)
  misc_feature (8)..(208): NCBI GI NO: 34912454 NR Description: P0681B11.31
MAEASFFVGVIGNIISILMFLSPVPTFWKIKKHGSTEDFSSLPYICTLLNCSLWTYYGIIKAGEYLVATVNGFGILMETIYIILFLIYAPKGIRGRTAILALILDVVILTAIIIITQLALEGETRSGAVGVMGAGLNIVMYSSPLSVMKTVVTTKSVEYMPFLLSFFFFFNGAVWLLYAVLVRDVILGVPNGTGFLLGAMQLVLYAIYRNGKRVSNNRLEEGLQHEPLISEPNNESHQSEDRPI

SEQ ID NO: 9313 - protein, 226 aa, Glycine max
  peptide (1)..(226): Ceres Seq. ID no. 12608623
  misc_feature (1)..(73): Pfam Name: Pfam Description:  MtN3/saliva family
  misc_feature (1)..(208): NCBI GI NO: 27754697 NR Description: putative cytochrome c oxidoreductase
  misc_feature (1)..(208): NCBI GI NO: 30683457 NR Description: nodulin MtN3 family protein [Arabidopsis thaliana]
  misc_feature (1)..(212): NCBI GI NO: 30684193 NR Description: nodulin MtN3 family protein [Arabidopsis thaliana]
  misc_feature (1)..(194): NCBI GI NO: 34907420 NR Description: P0018C10.36
  misc_feature (1)..(191): NCBI GI NO: 15229019 NR Description: MTN3-like protein; protein id: At3g48740
  misc_feature (1)..(193): NCBI GI NO: 1619602 NR Description: MtN3 [Medicago truncatula]
  misc_feature (1)..(190): NCBI GI NO: 34912462 NR Description: MtN3-like protein
  misc_feature (1)..(198): NCBI GI NO: 15237803 NR Description: MtN3-like protein; protein id: At5g23660
  misc_feature (1)..(206): NCBI GI NO: 21593422 NR Description: senescence-associated protein (SAG29)
  misc_feature (1)..(190): NCBI GI NO: 34912454 NR Description: P0681B11.31
MFLSPVPTFWKIKKHGSTEDFSSLPYICTLLNCSLWTYYGIIKAGEYLVATVNGFGILMETIYIILFLIYAPKGIRGRTAILALILDVVILTAIIIITQLALEGETRSGAVGVMGAGLNIVMYSSPLSVMKTVVTTKSVEYMPFLLSFFFFFNGAVWLLYAVLVRDVILGVPNGTGFLLGAMQLVLYAIYRNGKRVSNNRLEEGLQHEPLISEPNNESHQSEDRPI

SEQ ID NO: 9314 - DNA, 759 bp, Glycine max
  misc_feature (1)..(759): Ceres Seq. ID no. 15170395
aaaacctttttactatcagtcacttgctattttccttgtcctctttttcgtccaatcctaatacgatcatggaggatgctgctacttctaatgaggatagagaaaacaagttcctaactatggcaattgaagaagcatataaggcggttgaaagtggccatggtcgcccatttggtgcagttattgttcgaaacgatgaaatactttcaagctgtcataacatggttgtaagaaatgctgatcccactgcccatgctgagattactgctataagagaggcttgtcgaaagctgaatcaagttgaacttgctgactctgaaatctatgcttcttgcgagccttgtccaatgtgccttagtgcaattcatttttccaaaattaagaaactggtttatggagctaaagcagaagctgcggtagcaattgggtttgagagtatcattgctgatgcactgaaggacactggtttttatgagaaactcaacttagaggtaaaaaaggctgaaggtagtgttgctgtaatggcagaacaagtattcgagaagaccaaagacaagtttattattccctgattagttagctttaatcatcttattaaatgtgagcgcaagttacaattgttcaggaaaacttttgattcttggacaaaaataattttttgtcagactttattttggattagtcaggtctcattttcctgataatccggaggattagacaaaaaagaaatataaaatttgcacgttcatgtttctgtac

SEQ ID NO: 9315 - protein, 189 aa, Glycine max
  peptide (1)..(189): Ceres Seq. ID no. 15170396
  misc_feature (31)..(133): Pfam Name: Pfam Description:  Cytidine and deoxycytidylate deaminase zinc-binding region
  misc_feature (31)..(186): NCBI GI NO: 23928436 NR Description: putative cytidine deaminase [Zea mays]
  misc_feature (31)..(186): NCBI GI NO: 3204108 NR Description: putative cytidine deaminase
  misc_feature (31)..(186): NCBI GI NO: 40714681 NR Description: putative deoxycytidine deaminase
  misc_feature (31)..(186): NCBI GI NO: 18266045 NR Description: deoxycytidine deaminase [Brassica oleracea]
  misc_feature (32)..(186): NCBI GI NO: 15241124 NR Description: putative cytidine deaminase - like
  misc_feature (74)..(186): NCBI GI NO: 15229953 NR Description: hypothetical protein [Arabidopsis thaliana]
  misc_feature (37)..(185): NCBI GI NO: 23021911 NR Description: hypothetical protein
  misc_feature (36)..(185): NCBI GI NO: 39582012 NR Description: Hypothetical protein CBG09150
  misc_feature (34)..(185): NCBI GI NO: 23049830 NR Description: hypothetical protein [Methanosarcina barkeri]
  misc_feature (36)..(185): NCBI GI NO: 17554608 NR Description: deaminase (3I668) [Caenorhabditis elegans]
NLFTISHLLFSLSSFSSNPNTIMEDAATSNEDRENKFLTMAIEEAYKAVESGHGRPFGAVIVRNDEILSSCHNMVVRNADPTAHAEITAIREACRKLNQVELADSEIYASCEPCPMCLSAIHFSKIKKLVYGAKAEAAVAIGFESIIADALKDTGFYEKLNLEVKKAEGSVAVMAEQVFEKTKDKFIIP

SEQ ID NO: 9316 - protein, 167 aa, Glycine max
  peptide (1)..(167): Ceres Seq. ID no. 15170397
  misc_feature (9)..(111): Pfam Name: Pfam Description:  Cytidine and deoxycytidylate deaminase zinc-binding region
  misc_feature (9)..(164): NCBI GI NO: 23928436 NR Description: putative cytidine deaminase [Zea mays]
  misc_feature (9)..(164): NCBI GI NO: 3204108 NR Description: putative cytidine deaminase
  misc_feature (9)..(164): NCBI GI NO: 40714681 NR Description: putative deoxycytidine deaminase
  misc_feature (9)..(164): NCBI GI NO: 18266045 NR Description: deoxycytidine deaminase [Brassica oleracea]
  misc_feature (10)..(164): NCBI GI NO: 15241124 NR Description: putative cytidine deaminase - like
  misc_feature (52)..(164): NCBI GI NO: 15229953 NR Description: hypothetical protein [Arabidopsis thaliana]
  misc_feature (15)..(163): NCBI GI NO: 23021911 NR Description: hypothetical protein
  misc_feature (14)..(163): NCBI GI NO: 39582012 NR Description: Hypothetical protein CBG09150
  misc_feature (12)..(163): NCBI GI NO: 23049830 NR Description: hypothetical protein [Methanosarcina barkeri]
  misc_feature (14)..(163): NCBI GI NO: 17554608 NR Description: deaminase (3I668) [Caenorhabditis elegans]
MEDAATSNEDRENKFLTMAIEEAYKAVESGHGRPFGAVIVRNDEILSSCHNMVVRNADPTAHAEITAIREACRKLNQVELADSEIYASCEPCPMCLSAIHFSKIKKLVYGAKAEAAVAIGFESIIADALKDTGFYEKLNLEVKKAEGSVAVMAEQVFEKTKDKFIIP

SEQ ID NO: 9317 - protein, 150 aa, Glycine max
  peptide (1)..(150): Ceres Seq. ID no. 15170398
  misc_feature (1)..(94): Pfam Name: Pfam Description:  Cytidine and deoxycytidylate deaminase zinc-binding region
  misc_feature (1)..(147): NCBI GI NO: 23928436 NR Description: putative cytidine deaminase [Zea mays]
  misc_feature (1)..(147): NCBI GI NO: 3204108 NR Description: putative cytidine deaminase
  misc_feature (1)..(147): NCBI GI NO: 40714681 NR Description: putative deoxycytidine deaminase
  misc_feature (1)..(147): NCBI GI NO: 18266045 NR Description: deoxycytidine deaminase [Brassica oleracea]
  misc_feature (1)..(147): NCBI GI NO: 15241124 NR Description: putative cytidine deaminase - like
  misc_feature (35)..(147): NCBI GI NO: 15229953 NR Description: hypothetical protein [Arabidopsis thaliana]
  misc_feature (1)..(146): NCBI GI NO: 23021911 NR Description: hypothetical protein
  misc_feature (1)..(146): NCBI GI NO: 39582012 NR Description: Hypothetical protein CBG09150
  misc_feature (1)..(146): NCBI GI NO: 23049830 NR Description: hypothetical protein [Methanosarcina barkeri]
  misc_feature (1)..(146): NCBI GI NO: 17554608 NR Description: deaminase (3I668) [Caenorhabditis elegans]
MAIEEAYKAVESGHGRPFGAVIVRNDEILSSCHNMVVRNADPTAHAEITAIREACRKLNQVELADSEIYASCEPCPMCLSAIHFSKIKKLVYGAKAEAAVAIGFESIIADALKDTGFYEKLNLEVKKAEGSVAVMAEQVFEKTKDKFIIP

SEQ ID NO: 9318 - DNA, 1149 bp, Glycine max
  misc_feature (1)..(1149): Ceres Seq. ID no. 15224827
gcacgagwccaktmcctagaacatccamtcgaaaacctggttgatatcaattgatgagaatggtkggagaaccataccacaaaaacaagctgtgttgtggagcctaagaaagagtttttaaaatcttggggataaaaatggccgatctatataatctcaattctcaaagactaatttaagggtttattcccagaaaaaaacttgttactgaaaatactgaactactattctacttgcctatttatgatagcagcaatttgatggaaactaaggcagaaacttgaaattcagctgaattttattggactgcaaattttctaatggtgtccaaagaaaggccaaatgctacagtcactttgtcacaatttgtcctgaacatttattcttgtactactaactgattatatattatctaccaaatcacacaggagaatgggaaaacaaccacgtacacatggattttgagcactggctggtggcagagtagagcaccagttaacccagatgctgttgttgtagttgtcttcttatgtgcttgcttaattggtggctttttttacctcaacaggtttttgttttttgcaacttcccatgttaaccatcaagttaatagtatagacactgcttggttttgacttgttatcctctccttaattgccgcgcagagcaaatgcctcaaactccataaagaagaagtcatatcagtcaatgcttcttgtgatgtccatagcttgtttgtactgcttttggtgtgcaattcagatatactggatcagtccacgtcgtccagccgtaggtgaagaggccgatcttggtgttctcgtgttcttagctatatactttttcctaccttatggtttgtgtataatgtccatgtccccaaaagatcatgatcctaatctgattcctctttaatagtgttcaccctattagagatgtgttctgcttttgccactcctatatagttgtgagggtagctagaatatttcgccagtaagtaaattgtataatcactcagcaaaactatgtgaagctatgcatccattccttgttggaactggattcttttgagcttacaggttatatttcactgactcatacgttgttatctgtatcttgttgcaaagtgatccaatatagaagtttggc

SEQ ID NO: 9319 - protein, 68 aa, Glycine max
  peptide (1)..(68): Ceres Seq. ID no. 15224828
  misc_feature (1)..(61): NCBI GI NO: 21741227 NR Description: OSJNBb0048E02.14
MLLVMSIACLYCFWCAIQIYWISPRRPAVGEEADLGVLVFLAIYFFLPYGLCIMSMSPKDHDPNLIPL

SEQ ID NO: 9320 - protein, 64 aa, Glycine max
  peptide (1)..(64): Ceres Seq. ID no. 15224829
  misc_feature (1)..(57): NCBI GI NO: 21741227 NR Description: OSJNBb0048E02.14
MSIACLYCFWCAIQIYWISPRRPAVGEEADLGVLVFLAIYFFLPYGLCIMSMSPKDHDPNLIPL

SEQ ID NO: 9321 - DNA, 1338 bp, Glycine max
  misc_feature (1)..(1338): Ceres Seq. ID no. 15177059
ataacataacttgcctcttcccccaagacccaagttttctcttttcctcataaccccctctctccctaccaaatttcaatttcctctttcctcccttaggttatggatccattggggaaacgccctgccgccgaggacgattccctaatttccgattgcgagagcggggtttccgctggagacacgccgccgccgttcgtcgaaaacgccgacctcgtccggaccagattcgttcgtggcctcgtcgcgcactgcttcaaacccgaggttctggcagttcgcagaaacgtgtgttcctccgtcatggccctggcgcgtcaacattcctttcacgtcttcgcgcgtgccgtggccgaattgcgcggcggcaatgccaacgtgaagttcgcctggtacggtgcgtccagtaaggaagagataaatgacatcattcagcacggtttcggtcacgctcacagtaacggcctgcgtctctctccacaagattctccacttgaaagtgtgaagagttccgttgtggacgaagacggtttgaggcacttgttgctgtgccgcgttatcttggggaagacggaggtggttccacgtggctcctaccaatgccgttcgagttctcaagagtttgattctggggtggatgatctttccaatcccaaggagtatgttatttggtgtaaccagatcaacactcatgttttgcccgaatatgttttgagtttcagacttccttcaccattgaaagggattgtgaagattggggaacctttgaggccttcttcgccgtggatggcattcccagctttgatttcgatgctttcgaagattttgcctccgtccgaggttgcctccattgccaagtttcacaaggattatagagaaaagaggatttctcgacatgagctgatacagaaagtgagagtaatagcaggcgacaaattgctactttccgtcatcaaatctttcagagccaagaaaatacctgcaaactttaaagatgacaaggcgaaagaatggcaagcggacagccagcagcttgaacggaatgattgttcatatgggagttctattagctattacaggaagtgaatagaatacttgaagaaacacaatgctcatactaaccaaaacttacattgagggtgcaagtgcaaccactgcttaagaagtagagcgtcatttgagaccttttaaattgtttttagggtgatatactgatataggtgatttgttttgatgttgacggacgatagtgtagcaaaagaaatcactttctctttctggttggttacagttactggttgaaataaatatacttcggttcggacgtttatcatagtt

SEQ ID NO: 9322 - protein, 327 aa, Glycine max
  peptide (1)..(327): Ceres Seq. ID no. 15177060
  misc_feature (37)..(286): NCBI GI NO: 15241862 NR Description: expressed protein [Arabidopsis thaliana]
  misc_feature (37)..(286): NCBI GI NO: 21592445 NR Description: unknown [Arabidopsis thaliana]
  misc_feature (37)..(295): NCBI GI NO: 15220787 NR Description: hypothetical protein [Arabidopsis thaliana]
  misc_feature (75)..(295): NCBI GI NO: 8778582 NR Description: F28C11.18 [Arabidopsis thaliana]
  misc_feature (55)..(290): NCBI GI NO: 15228235 NR Description: hypothetical protein [Arabidopsis thaliana]
  misc_feature (37)..(288): NCBI GI NO: 15223159 NR Description: hypothetical protein [Arabidopsis thaliana]
  misc_feature (37)..(274): NCBI GI NO: 7485680 NR Description: hypothetical protein F17O7
  misc_feature (56)..(258): NCBI GI NO: 27311235 NR Description: Unknown protein
  misc_feature (33)..(209): NCBI GI NO: 29126336 NR Description: putative CEO protein
  misc_feature (221)..(293): NCBI GI NO: 29126336 NR Description: putative CEO protein
MDPLGKRPAAEDDSLISDCESGVSAGDTPPPFVENADLVRTRFVRGLVAHCFKPEVLAVRRNVCSSVMALARQHSFHVFARAVAELRGGNANVKFAWYGASSKEEINDIIQHGFGHAHSNGLRLSPQDSPLESVKSSVVDEDGLRHLLLCRVILGKTEVVPRGSYQCRSSSQEFDSGVDDLSNPKEYVIWCNQINTHVLPEYVLSFRLPSPLKGIVKIGEPLRPSSPWMAFPALISMLSKILPPSEVASIAKFHKDYREKRISRHELIQKVRVIAGDKLLLSVIKSFRAKKIPANFKDDKAKEWQADSQQLERNDCSYGSSISYYRK

SEQ ID NO: 9323 - protein, 260 aa, Glycine max
  peptide (1)..(260): Ceres Seq. ID no. 15177061
  misc_feature (1)..(219): NCBI GI NO: 15241862 NR Description: expressed protein [Arabidopsis thaliana]
  misc_feature (1)..(219): NCBI GI NO: 21592445 NR Description: unknown [Arabidopsis thaliana]
  misc_feature (1)..(228): NCBI GI NO: 15220787 NR Description: hypothetical protein [Arabidopsis thaliana]
  misc_feature (8)..(228): NCBI GI NO: 8778582 NR Description: F28C11.18 [Arabidopsis thaliana]
  misc_feature (1)..(223): NCBI GI NO: 15228235 NR Description: hypothetical protein [Arabidopsis thaliana]
  misc_feature (1)..(221): NCBI GI NO: 15223159 NR Description: hypothetical protein [Arabidopsis thaliana]
  misc_feature (1)..(207): NCBI GI NO: 7485680 NR Description: hypothetical protein F17O7
  misc_feature (1)..(191): NCBI GI NO: 27311235 NR Description: Unknown protein
  misc_feature (1)..(142): NCBI GI NO: 29126336 NR Description: putative CEO protein
  misc_feature (154)..(226): NCBI GI NO: 29126336 NR Description: putative CEO protein
MALARQHSFHVFARAVAELRGGNANVKFAWYGASSKEEINDIIQHGFGHAHSNGLRLSPQDSPLESVKSSVVDEDGLRHLLLCRVILGKTEVVPRGSYQCRSSSQEFDSGVDDLSNPKEYVIWCNQINTHVLPEYVLSFRLPSPLKGIVKIGEPLRPSSPWMAFPALISMLSKILPPSEVASIAKFHKDYREKRISRHELIQKVRVIAGDKLLLSVIKSFRAKKIPANFKDDKAKEWQADSQQLERNDCSYGSSISYYRK

SEQ ID NO: 9324 - DNA, 1285 bp, Glycine max
  misc_feature (1)..(1285): Ceres Seq. ID no. 13638375
cctagaacatcctaatcgaaaaattaaattcaaaattgaaaacggaaggaaaactcagcgtgtgattgaaatttgaagagtgtgaagatggcgatggaagtggagcagaatcagaatcatcaattagggtttcccttctggaaaccgctccgtcgcaggttcggacccgaatctcctttcttcgctcatggcaacctcgaacgggaacttctcgccaaacagcttgctttggaattaacagaagagaaacaacagcttgagaaatggatgcaagaggaagaaggaagggaagtcttttgtcccattgtgggttgtggtgcacgcttgacctcaatggaggactttgaaaatcactataatgcaaggcatactgcatcctgttctgtgtgctccagagtttacccgacatcttggttgctcagcatacatgtatctgaagtgcatgattctttctttcaggcaaaagttgcacgtggctatgatatgtatgaatgcttggtggaaaggtgtggattgaaattcaaaagctacaatagtaggcagcagcatctggttgacaagcataaattccccacctcatttgagtttttcaagaaggctaagccttcaaagaaacataggttgaagtcccaacgcaaacaagctgtttgtaaggaggattcttcaggaatgatggaagtggaaaatgcatccatggatgaccttgtttcagcagtctctaaattgaacacttctgactccaccccttcatctatcagttttggtcgccgccacaaaggcttgtcatttgtccctcgagctgttcagcgtggaggtggatcaaactcaacagcatctgtgacaaagaaataagcttggactcaaacaaatctgcattcttaattgctgaatgatcaacatgcagatgcagctccattataaaatccgtgtggacgtcttgcattctaagtttgaagaagccaattaagttgaagatggaaaattagaatcatgctggaggatgtaataacagcatttgtcagtattatctttttttgctcccacttggggctgtaagtttgcccaacacaggcaatatgagcatgcgaatatgcctggcttgtataatgtggagattttgagcttctttttctatgatattgttctgttaacatctaaccactttactgaatagccacattgtaattagagttgaaagaaatcactcttaaagcttgtcatacgtttgtggcagcacatgaataagaaaaaaaaaaaaaaaaaagcttatcgataccgtcgacct

SEQ ID NO: 9325 - protein, 254 aa, Glycine max
  peptide (1)..(254): Ceres Seq. ID no. 15220403
  misc_feature (134)..(159): Pfam Name: Pfam Description:  Zinc finger, C2H2 type
  misc_feature (12)..(250): NCBI GI NO: 27808566 NR Description: At5g14140 [Arabidopsis thaliana]
  misc_feature (12)..(237): NCBI GI NO: 15241318 NR Description: zinc finger (C2H2 type) protein family
  misc_feature (16)..(227): NCBI GI NO: 27802782 NR Description: SI:zC217G15
  misc_feature (16)..(198): NCBI GI NO: 34861715 NR Description: similar to hypothetical protein MGC30006
  misc_feature (24)..(227): NCBI GI NO: 15929411 NR Description: Unknown (protein for IMAGE:4040789) [Homo sapiens]
  misc_feature (24)..(227): NCBI GI NO: 28274701 NR Description: hypothetical protein MGC30006 [Homo sapiens]
  misc_feature (24)..(198): NCBI GI NO: 21750147 NR Description: unnamed protein product [Homo sapiens]
  misc_feature (68)..(240): NCBI GI NO: 31201613 NR Description: ENSANGP00000012483 [Anopheles gambiae]
  misc_feature (97)..(182): NCBI GI NO: 28573317 NR Description: CG13951-PA [Drosophila melanogaster]
MAMEVEQNQNHQLGFPFWKPLRRRFGPESPFFAHGNLERELLAKQLALELTEEKQQLEKWMQEEEGREVFCPIVGCGARLTSMEDFENHYNARHTASCSVCSRVYPTSWLLSIHVSEVHDSFFQAKVARGYDMYECLVERCGLKFKSYNSRQQHLVDKHKFPTSFEFFKKAKPSKKHRLKSQRKQAVCKEDSSGMMEVENASMDDLVSAVSKLNTSDSTPSSISFGRRHKGLSFVPRAVQRGGGSNSTASVTKK

SEQ ID NO: 9326 - protein, 252 aa, Glycine max
  peptide (1)..(252): Ceres Seq. ID no. 15220404
  misc_feature (132)..(157): Pfam Name: Pfam Description:  Zinc finger, C2H2 type
  misc_feature (10)..(248): NCBI GI NO: 27808566 NR Description: At5g14140 [Arabidopsis thaliana]
  misc_feature (10)..(235): NCBI GI NO: 15241318 NR Description: zinc finger (C2H2 type) protein family
  misc_feature (14)..(225): NCBI GI NO: 27802782 NR Description: SI:zC217G15
  misc_feature (14)..(196): NCBI GI NO: 34861715 NR Description: similar to hypothetical protein MGC30006
  misc_feature (22)..(225): NCBI GI NO: 15929411 NR Description: Unknown (protein for IMAGE:4040789) [Homo sapiens]
  misc_feature (22)..(225): NCBI GI NO: 28274701 NR Description: hypothetical protein MGC30006 [Homo sapiens]
  misc_feature (22)..(196): NCBI GI NO: 21750147 NR Description: unnamed protein product [Homo sapiens]
  misc_feature (66)..(238): NCBI GI NO: 31201613 NR Description: ENSANGP00000012483 [Anopheles gambiae]
  misc_feature (95)..(180): NCBI GI NO: 28573317 NR Description: CG13951-PA [Drosophila melanogaster]
MEVEQNQNHQLGFPFWKPLRRRFGPESPFFAHGNLERELLAKQLALELTEEKQQLEKWMQEEEGREVFCPIVGCGARLTSMEDFENHYNARHTASCSVCSRVYPTSWLLSIHVSEVHDSFFQAKVARGYDMYECLVERCGLKFKSYNSRQQHLVDKHKFPTSFEFFKKAKPSKKHRLKSQRKQAVCKEDSSGMMEVENASMDDLVSAVSKLNTSDSTPSSISFGRRHKGLSFVPRAVQRGGGSNSTASVTKK

SEQ ID NO: 9327 - protein, 194 aa, Glycine max
  peptide (1)..(194): Ceres Seq. ID no. 15220405
  misc_feature (74)..(99): Pfam Name: Pfam Description:  Zinc finger, C2H2 type
  misc_feature (1)..(190): NCBI GI NO: 27808566 NR Description: At5g14140 [Arabidopsis thaliana]
  misc_feature (1)..(177): NCBI GI NO: 15241318 NR Description: zinc finger (C2H2 type) protein family
  misc_feature (1)..(167): NCBI GI NO: 27802782 NR Description: SI:zC217G15
  misc_feature (1)..(138): NCBI GI NO: 34861715 NR Description: similar to hypothetical protein MGC30006
  misc_feature (1)..(167): NCBI GI NO: 15929411 NR Description: Unknown (protein for IMAGE:4040789) [Homo sapiens]
  misc_feature (1)..(167): NCBI GI NO: 28274701 NR Description: hypothetical protein MGC30006 [Homo sapiens]
  misc_feature (1)..(138): NCBI GI NO: 21750147 NR Description: unnamed protein product [Homo sapiens]
  misc_feature (8)..(180): NCBI GI NO: 31201613 NR Description: ENSANGP00000012483 [Anopheles gambiae]
  misc_feature (37)..(122): NCBI GI NO: 28573317 NR Description: CG13951-PA [Drosophila melanogaster]
MQEEEGREVFCPIVGCGARLTSMEDFENHYNARHTASCSVCSRVYPTSWLLSIHVSEVHDSFFQAKVARGYDMYECLVERCGLKFKSYNSRQQHLVDKHKFPTSFEFFKKAKPSKKHRLKSQRKQAVCKEDSSGMMEVENASMDDLVSAVSKLNTSDSTPSSISFGRRHKGLSFVPRAVQRGGGSNSTASVTKK

SEQ ID NO: 9328 - DNA, 1724 bp, Glycine max
  misc_feature (1)..(1724): Ceres Seq. ID no. 13638441
aattaacactcatcacattcgttgtgtttggcttcttcactcgctttctctatttttttctcactaaaaagttccatcttttttttttttttaatttctggggttattattgctttctgtgattctgtctcagttccattttggtatctttgagggaaattcattgggtttgcagggttttatcttgttagaatttagaccaattggctaacagataatagtcttcattgaacatcaatttcaagcattctctctgatttttttgatcaagtggctcttttctagattccgattcccttcaaaatgcttctggatttatccttagtattgttgtggtaaaacctccacttctgttatcattttctctcttctgccttatcttcctcagtttccactcatcaagtttcaatcttcctttgaataagcccaaatttgattgtatgaaccagtagctttttgcttgtacaaaattgaattgatgaagtgggaaagtataaccctctcttctcctacaccttgcactccaaactccaacaccaattggttggtgatggaggataataatagcaggagcacaaaatggacctctgaagagaacaagctctttgaaaatgctcttgcagtgcatgataaggacaccccggatcggtggcacagagtggctgagatgattcctggaaagacagtggttgatgtgataaggcagtacaaggagttggaagtagatgttagcaatatagaagctggtttgattccagttcctggctatagtagcactgctacctcacccttcaccttagattgggtgaacactcctggctatgatgggtttaaaggatgtggaaagagatcttcctcagtgagaccgattgagcatgaaaggaagaaaggagtgccttggactgaagacgaacataaattgtttctattgggtctgaagaagtatgggaaaggtgattggagaaatatatctcgcaattttgttattacaagaactccaacacaggttgctagtcatgctcagaagtacttcataaggcagctttcaggaggcaaagacaagaggagggctagcatacatgacataacaacagtgaatctcacagaaaccataacaacttcttcagaagacaccaatggatcctcttcaccacatgtgctctcacagcaacaacagccaaattctactcctactacaccaagaactcgttttcagtggagtaatcagtctaacacaggagtagctatgactctcaaccctgctcatgaaagagtcttcatgtctcattatggtgctaactcctttggggttaaaattgagggacagaatcttcatgagtcttcttacttgcgacctcagacacagaacatggttttccaaatgcaacagtcctctcaacactagttccatgcattatcacttgttgtagtgaattattaatgggcagaagtagaaccagaatcttctgtccatttcaataagtacagtgcttgagttgagctttttccccaagttcttatgtgaataccctagattgttggttagttattatgaacttgaaggaaggtacatacatttgtttcttcaacaaataagaacttcctgaaaggagtggcaggcaaccaagtccccaacgttggttttggttggtttttctatgtkgtctaagaataatggatttcaagccccgtgtwtaattaatgaaatgtttcmmcttrgrggc

SEQ ID NO: 9329 - protein, 308 aa, Glycine max
  peptide (1)..(308): Ceres Seq. ID no. 15220411
  misc_feature (138)..(185): Pfam Name: Pfam Description:  Myb-like DNA-binding domain
  misc_feature (13)..(308): NCBI GI NO: 18874263 NR Description: MYB-like transcription factor DIVARICATA
  misc_feature (12)..(303): NCBI GI NO: 12005328 NR Description: unknown [Hevea brasiliensis]
  misc_feature (12)..(302): NCBI GI NO: 18874265 NR Description: MYB-like transcription factor DVL1
  misc_feature (13)..(302): NCBI GI NO: 15237776 NR Description: I-box binding factor - like protein
  misc_feature (12)..(302): NCBI GI NO: 7446171 NR Description: probable MYB family transcription factor
  misc_feature (12)..(302): NCBI GI NO: 30687381 NR Description: MYB family transcription factor -related
  misc_feature (18)..(235): NCBI GI NO: 15240915 NR Description: myb family transcription factor
  misc_feature (16)..(290): NCBI GI NO: 15239231 NR Description: hypothetical protein [Arabidopsis thaliana]
  misc_feature (1)..(225): NCBI GI NO: 34908386 NR Description: P0529E05.19
  misc_feature (16)..(208): NCBI GI NO: 15229712 NR Description: MYB-family transcription factor -related
MKWESITLSSPTPCTPNSNTNWLVMEDNNSRSTKWTSEENKLFENALAVHDKDTPDRWHRVAEMIPGKTVVDVIRQYKELEVDVSNIEAGLIPVPGYSSTATSPFTLDWVNTPGYDGFKGCGKRSSSVRPIEHERKKGVPWTEDEHKLFLLGLKKYGKGDWRNISRNFVITRTPTQVASHAQKYFIRQLSGGKDKRRASIHDITTVNLTETITTSSEDTNGSSSPHVLSQQQQPNSTPTTPRTRFQWSNQSNTGVAMTLNPAHERVFMSHYGANSFGVKIEGQNLHESSYLRPQTQNMVFQMQQSSQH

SEQ ID NO: 9330 - protein, 284 aa, Glycine max
  peptide (1)..(284): Ceres Seq. ID no. 15220412
  misc_feature (114)..(161): Pfam Name: Pfam Description:  Myb-like DNA-binding domain
  misc_feature (1)..(284): NCBI GI NO: 18874263 NR Description: MYB-like transcription factor DIVARICATA
  misc_feature (1)..(279): NCBI GI NO: 12005328 NR Description: unknown [Hevea brasiliensis]
  misc_feature (1)..(278): NCBI GI NO: 18874265 NR Description: MYB-like transcription factor DVL1
  misc_feature (1)..(278): NCBI GI NO: 15237776 NR Description: I-box binding factor - like protein
  misc_feature (1)..(278): NCBI GI NO: 7446171 NR Description: probable MYB family transcription factor
  misc_feature (1)..(278): NCBI GI NO: 30687381 NR Description: MYB family transcription factor -related
  misc_feature (1)..(211): NCBI GI NO: 15240915 NR Description: myb family transcription factor
  misc_feature (1)..(266): NCBI GI NO: 15239231 NR Description: hypothetical protein [Arabidopsis thaliana]
  misc_feature (1)..(201): NCBI GI NO: 34908386 NR Description: P0529E05.19
  misc_feature (1)..(184): NCBI GI NO: 15229712 NR Description: MYB-family transcription factor -related
MEDNNSRSTKWTSEENKLFENALAVHDKDTPDRWHRVAEMIPGKTVVDVIRQYKELEVDVSNIEAGLIPVPGYSSTATSPFTLDWVNTPGYDGFKGCGKRSSSVRPIEHERKKGVPWTEDEHKLFLLGLKKYGKGDWRNISRNFVITRTPTQVASHAQKYFIRQLSGGKDKRRASIHDITTVNLTETITTSSEDTNGSSSPHVLSQQQQPNSTPTTPRTRFQWSNQSNTGVAMTLNPAHERVFMSHYGANSFGVKIEGQNLHESSYLRPQTQNMVFQMQQSSQH

SEQ ID NO: 9331 - protein, 245 aa, Glycine max
  peptide (1)..(245): Ceres Seq. ID no. 15220413
  misc_feature (75)..(122): Pfam Name: Pfam Description:  Myb-like DNA-binding domain
  misc_feature (1)..(245): NCBI GI NO: 18874263 NR Description: MYB-like transcription factor DIVARICATA
  misc_feature (1)..(240): NCBI GI NO: 12005328 NR Description: unknown [Hevea brasiliensis]
  misc_feature (1)..(239): NCBI GI NO: 18874265 NR Description: MYB-like transcription factor DVL1
  misc_feature (1)..(239): NCBI GI NO: 15237776 NR Description: I-box binding factor - like protein
  misc_feature (1)..(239): NCBI GI NO: 7446171 NR Description: probable MYB family transcription factor
  misc_feature (1)..(239): NCBI GI NO: 30687381 NR Description: MYB family transcription factor -related
  misc_feature (1)..(172): NCBI GI NO: 15240915 NR Description: myb family transcription factor
  misc_feature (1)..(227): NCBI GI NO: 15239231 NR Description: hypothetical protein [Arabidopsis thaliana]
  misc_feature (1)..(162): NCBI GI NO: 34908386 NR Description: P0529E05.19
  misc_feature (1)..(145): NCBI GI NO: 15229712 NR Description: MYB-family transcription factor -related
MIPGKTVVDVIRQYKELEVDVSNIEAGLIPVPGYSSTATSPFTLDWVNTPGYDGFKGCGKRSSSVRPIEHERKKGVPWTEDEHKLFLLGLKKYGKGDWRNISRNFVITRTPTQVASHAQKYFIRQLSGGKDKRRASIHDITTVNLTETITTSSEDTNGSSSPHVLSQQQQPNSTPTTPRTRFQWSNQSNTGVAMTLNPAHERVFMSHYGANSFGVKIEGQNLHESSYLRPQTQNMVFQMQQSSQH

SEQ ID NO: 9332 - DNA, 1258 bp, Glycine max
  misc_feature (1)..(1258): Ceres Seq. ID no. 15168366
atttttcacctctccccaaaaccctcgcgccgcatttttatttttctctttcattatttttttaccatttttttatggacctcttcgccggcgaccacttccctgtccccgaccacgtcgctccgttccccgattccggcgacctcgtcttcgccgccgacctcctctcccaccgccccaacccccagaagctccgccctatcaggtccgtccccgccgcccccattgcccaccctcctccgccccctctctcgcacgatccgattccctccgggtcgggtcacgccccatgccacgaatccagctcgtctttagatgctgaggatgaagacgatgacgacaattcatcagcaagtacggaaggacatggccctataaagaagaggagaaagacggtgaggaagctcgaagattttttgaaggatttgatggcgaaggtgatggaaaagcaagagcagatgcacgaacagttattggaaatcatagaaaataaggaaagggaaaggataaagagagaagaagcttggaagaacgaggagatggagagaatcagaaaagatgaagaggctagagcccaagtaaattctcgaaatttggccctcatatccttcattcagaacctgttgggccatgaaattcaaatcccccaacaaccagtagaaccatgcagcaaaagagaagaggatgaagttgaggtgagtgctagaaaggatttgaacaatgatccaagtgacaataatagatggcctgatgttgaagtgcaggcactgatcactgtgagaacttcattggagcacaagtttcgtttcatgggatcaaaagggtcaatatgggaggagatatctgaagcaatgaatggcatggggtacaaccgctcttcaaagaagtgtaaggagaagtgggaaaacattaacaagtactataaaaggacaatagggagtggcaagaaaaggcgtcaaaacagtaaaacttgcccttactttgatgagttggacattttgtatagaaatggtcttctaagtattggaaatgccttgagcaataccagcgatgttccccagattgaagtaaaggagttgactgaaacttgaatattagtaattgatagtcatagatacagcttatgtaaaagttccttcgtttcagcatttatttagccattcttcctttcaattttctcactgatgactttagtgtacaataccatcctctaactctgcatttaaaattttaaatattaagttcattgggttgatat

SEQ ID NO: 9333 - protein, 362 aa, Glycine max
  peptide (1)..(362): Ceres Seq. ID no. 15168367
  misc_feature (260)..(304): Pfam Name: Pfam Description:  Myb-like DNA-binding domain
  misc_feature (58)..(221): NCBI GI NO: 2664198 NR Description: GTL1 [Arabidopsis thaliana]
  misc_feature (58)..(221): NCBI GI NO: 25403172 NR Description: protein trihelix DNA-binding protein (GTL1)
  misc_feature (217)..(353): NCBI GI NO: 2664198 NR Description: GTL1 [Arabidopsis thaliana]
  misc_feature (217)..(353): NCBI GI NO: 25403172 NR Description: protein trihelix DNA-binding protein (GTL1)
  misc_feature (58)..(221): NCBI GI NO: 15217472 NR Description: DNA-binding factor -related [Arabidopsis thaliana]
  misc_feature (217)..(353): NCBI GI NO: 15217472 NR Description: DNA-binding factor -related [Arabidopsis thaliana]
  misc_feature (58)..(221): NCBI GI NO: 9665169 NR Description: Putative GTL1 [Arabidopsis thaliana]
  misc_feature (217)..(353): NCBI GI NO: 9665169 NR Description: Putative GTL1 [Arabidopsis thaliana]
  misc_feature (59)..(215): NCBI GI NO: 38344985 NR Description: OSJNBa0011L07.15
  misc_feature (243)..(342): NCBI GI NO: 38344985 NR Description: OSJNBa0011L07.15
FSPLPKTLAPHFYFSLSLFFYHFFMDLFAGDHFPVPDHVAPFPDSGDLVFAADLLSHRPNPQKLRPIRSVPAAPIAHPPPPPLSHDPIPSGSGHAPCHESSSSLDAEDEDDDDNSSASTEGHGPIKKRRKTVRKLEDFLKDLMAKVMEKQEQMHEQLLEIIENKERERIKREEAWKNEEMERIRKDEEARAQVNSRNLALISFIQNLLGHEIQIPQQPVEPCSKREEDEVEVSARKDLNNDPSDNNRWPDVEVQALITVRTSLEHKFRFMGSKGSIWEEISEAMNGMGYNRSSKKCKEKWENINKYYKRTIGSGKKRRQNSKTCPYFDELDILYRNGLLSIGNALSNTSDVPQIEVKELTET

SEQ ID NO: 9334 - protein, 338 aa, Glycine max
  peptide (1)..(338): Ceres Seq. ID no. 15168368
  misc_feature (236)..(280): Pfam Name: Pfam Description:  Myb-like DNA-binding domain
  misc_feature (34)..(197): NCBI GI NO: 2664198 NR Description: GTL1 [Arabidopsis thaliana]
  misc_feature (34)..(197): NCBI GI NO: 25403172 NR Description: protein trihelix DNA-binding protein (GTL1)
  misc_feature (193)..(329): NCBI GI NO: 2664198 NR Description: GTL1 [Arabidopsis thaliana]
  misc_feature (193)..(329): NCBI GI NO: 25403172 NR Description: protein trihelix DNA-binding protein (GTL1)
  misc_feature (34)..(197): NCBI GI NO: 15217472 NR Description: DNA-binding factor -related [Arabidopsis thaliana]
  misc_feature (193)..(329): NCBI GI NO: 15217472 NR Description: DNA-binding factor -related [Arabidopsis thaliana]
  misc_feature (34)..(197): NCBI GI NO: 9665169 NR Description: Putative GTL1 [Arabidopsis thaliana]
  misc_feature (193)..(329): NCBI GI NO: 9665169 NR Description: Putative GTL1 [Arabidopsis thaliana]
  misc_feature (35)..(191): NCBI GI NO: 38344985 NR Description: OSJNBa0011L07.15
  misc_feature (219)..(318): NCBI GI NO: 38344985 NR Description: OSJNBa0011L07.15
MDLFAGDHFPVPDHVAPFPDSGDLVFAADLLSHRPNPQKLRPIRSVPAAPIAHPPPPPLSHDPIPSGSGHAPCHESSSSLDAEDEDDDDNSSASTEGHGPIKKRRKTVRKLEDFLKDLMAKVMEKQEQMHEQLLEIIENKERERIKREEAWKNEEMERIRKDEEARAQVNSRNLALISFIQNLLGHEIQIPQQPVEPCSKREEDEVEVSARKDLNNDPSDNNRWPDVEVQALITVRTSLEHKFRFMGSKGSIWEEISEAMNGMGYNRSSKKCKEKWENINKYYKRTIGSGKKRRQNSKTCPYFDELDILYRNGLLSIGNALSNTSDVPQIEVKELTET

SEQ ID NO: 9335 - protein, 220 aa, Glycine max
  peptide (1)..(220): Ceres Seq. ID no. 15168369
  misc_feature (118)..(162): Pfam Name: Pfam Description:  Myb-like DNA-binding domain
  misc_feature (1)..(79): NCBI GI NO: 2664198 NR Description: GTL1 [Arabidopsis thaliana]
  misc_feature (1)..(79): NCBI GI NO: 25403172 NR Description: protein trihelix DNA-binding protein (GTL1)
  misc_feature (75)..(211): NCBI GI NO: 2664198 NR Description: GTL1 [Arabidopsis thaliana]
  misc_feature (75)..(211): NCBI GI NO: 25403172 NR Description: protein trihelix DNA-binding protein (GTL1)
  misc_feature (1)..(79): NCBI GI NO: 15217472 NR Description: DNA-binding factor -related [Arabidopsis thaliana]
  misc_feature (75)..(211): NCBI GI NO: 15217472 NR Description: DNA-binding factor -related [Arabidopsis thaliana]
  misc_feature (1)..(79): NCBI GI NO: 9665169 NR Description: Putative GTL1 [Arabidopsis thaliana]
  misc_feature (75)..(211): NCBI GI NO: 9665169 NR Description: Putative GTL1 [Arabidopsis thaliana]
  misc_feature (1)..(73): NCBI GI NO: 38344985 NR Description: OSJNBa0011L07.15
  misc_feature (101)..(200): NCBI GI NO: 38344985 NR Description: OSJNBa0011L07.15
MAKVMEKQEQMHEQLLEIIENKERERIKREEAWKNEEMERIRKDEEARAQVNSRNLALISFIQNLLGHEIQIPQQPVEPCSKREEDEVEVSARKDLNNDPSDNNRWPDVEVQALITVRTSLEHKFRFMGSKGSIWEEISEAMNGMGYNRSSKKCKEKWENINKYYKRTIGSGKKRRQNSKTCPYFDELDILYRNGLLSIGNALSNTSDVPQIEVKELTET

SEQ ID NO: 9336 - DNA, 1798 bp, Glycine max
  misc_feature (1)..(1798): Ceres Seq. ID no. 14311667
atcttgttggtccattcgtgcggtaacggaaggagacaataagcgtctccatcgcttaaattgccgagaacttcattacccattatctgttacagttctacgctctcgctccaaaccccacttcagatttggtttactggaaggaaagtgcttgaaggacccaatctacacgagagatgcaatggcaataaacacacacatgttagcttcaatgtgttattattgctgccactgtgattaatgagtaagtcactgtgtcaaaggatatagagctgttttcttccagtgcatctttggtttgagatttatgtagttttctctgaaaagtgattactagtttccctcaaacaataatggaggcagcaaaggttctttcacactgcaaaactgccccttttggtttctctatcgtgagcaacaaagtatctctgagacctttcgacaaacattttcatgctgatgtacttgctaacagacccaagagcattagttttcaattgaattgttcctatggaaaccctttttcctctgtgctgaaacctgcaagaaaaagggctaattttttaccttctcccagatgctcaatttccagtagtgccagcactgaatctcaaaatccagtcctagagttctttagaaatgtgccatttgattcaataaaagctacacttctgcagttgactccaattgatgttgtgaagtggtctgggatattatgcatcatagctgcagccacaaaatggactatgaatatgcttttcagtcccttcttttggatgtattttagctggacgtggttgttctggccttggatggtggccatagggcttgcagtctatgggttatattgctttcggaaacatctgcacagtgaggcaaacatatttgagcaattggctattgttacatcagtttttacgtggctcactcttgttccacctggtcatttcaatggctaccttgaaggctggccttatgttttcttttttgtgtatcattatttctttttcttcaatgttagtgttagaaagcggttatatggagattattttgctcagccccatgacccaaagtgggacgtgaacttgccaatgtggtctcgcctattgttcagcacaggagtcatggttggccattggcttgcagcatttgaagggcctgagcttcacctcataccgggtgggtggagcaatcttggaatctgggctttaatcattacaactctgctaatgcagtataatgctacattgtatctcgctaagtattcagaaaatgtggtggagccaacttctgtagtgcaatttggaccttatcgttgggtccgtcatccaatatattcatcaacaatgcttttgtttgtaacatactgcattgcgcttcgagcacctctgagtctgctatttattgtggcagtatgcttgttgtattataagcagaaggcagagaaggaagaggatttgatggttgagacttttggccagagttacacagaatatgcaagcaaagttaagtacaagcttattccttttatctattagttgatctccagaagtttagtcagtcatcaaaatctgattgtactgtcaggtttaggcaaaagatagtgttaattctcaaaatccaagtgtatctctttgtttactctttactctgttatctttagtgtagccttaaattatggtatcatgtgcacttgtggtgattagatttttgaagattttggttttcaatgatgttttgtttcatagaacatgcaaaatttgactatataaatcttgtctatattaagctgtgtgcc

SEQ ID NO: 9337 - protein, 394 aa, Glycine max
  peptide (1)..(394): Ceres Seq. ID no. 14311668
  misc_feature (297)..(372): Pfam Name: ICMT Pfam Description: Isoprenylcysteine carboxyl methyltransferase
  misc_feature (1)..(394): NCBI GI NO: 15238431 NR Description: expressed protein [Arabidopsis thaliana]
  misc_feature (1)..(394): NCBI GI NO: 21593420 NR Description: unknown [Arabidopsis thaliana]
  misc_feature (131)..(394): NCBI GI NO: 19347912 NR Description: unknown protein [Arabidopsis thaliana]
  misc_feature (297)..(394): NCBI GI NO: 15921450 NR Description: 199aa long conserved hypothetical protein
  misc_feature (273)..(394): NCBI GI NO: 24378738 NR Description: conserved hypothetical protein
  misc_feature (209)..(394): NCBI GI NO: 15896653 NR Description: Predicted protein-S-isoprenylcysteinemethyltransferase
  misc_feature (247)..(394): NCBI GI NO: 21229585 NR Description: conserved hypothetical protein
MEAAKVLSHCKTAPFGFSIVSNKVSLRPFDKHFHADVLANRPKSISFQLNCSYGNPFSSVLKPARKRANFLPSPRCSISSSASTESQNPVLEFFRNVPFDSIKATLLQLTPIDVVKWSGILCIIAAATKWTMNMLFSPFFWMYFSWTWLFWPWMVAIGLAVYGLYCFRKHLHSEANIFEQLAIVTSVFTWLTLVPPGHFNGYLEGWPYVFFFVYHYFFFFNVSVRKRLYGDYFAQPHDPKWDVNLPMWSRLLFSTGVMVGHWLAAFEGPELHLIPGGWSNLGIWALIITTLLMQYNATLYLAKYSENVVEPTSVVQFGPYRWVRHPIYSSTMLLFVTYCIALRAPLSLLFIVAVCLLYYKQKAEKEEDLMVETFGQSYTEYASKVKYKLIPFIY

SEQ ID NO: 9338 - protein, 263 aa, Glycine max
  peptide (1)..(263): Ceres Seq. ID no. 14311669
  misc_feature (166)..(241): Pfam Name: ICMT Pfam Description: Isoprenylcysteine carboxyl methyltransferase
  misc_feature (1)..(263): NCBI GI NO: 15238431 NR Description: expressed protein [Arabidopsis thaliana]
  misc_feature (1)..(263): NCBI GI NO: 21593420 NR Description: unknown [Arabidopsis thaliana]
  misc_feature (1)..(263): NCBI GI NO: 19347912 NR Description: unknown protein [Arabidopsis thaliana]
  misc_feature (166)..(263): NCBI GI NO: 15921450 NR Description: 199aa long conserved hypothetical protein
  misc_feature (142)..(263): NCBI GI NO: 24378738 NR Description: conserved hypothetical protein
  misc_feature (78)..(263): NCBI GI NO: 15896653 NR Description: Predicted protein-S-isoprenylcysteinemethyltransferase
  misc_feature (116)..(263): NCBI GI NO: 21229585 NR Description: conserved hypothetical protein
MNMLFSPFFWMYFSWTWLFWPWMVAIGLAVYGLYCFRKHLHSEANIFEQLAIVTSVFTWLTLVPPGHFNGYLEGWPYVFFFVYHYFFFFNVSVRKRLYGDYFAQPHDPKWDVNLPMWSRLLFSTGVMVGHWLAAFEGPELHLIPGGWSNLGIWALIITTLLMQYNATLYLAKYSENVVEPTSVVQFGPYRWVRHPIYSSTMLLFVTYCIALRAPLSLLFIVAVCLLYYKQKAEKEEDLMVETFGQSYTEYASKVKYKLIPFIY

SEQ ID NO: 9339 - protein, 261 aa, Glycine max
  peptide (1)..(261): Ceres Seq. ID no. 14311670
  misc_feature (164)..(239): Pfam Name: ICMT Pfam Description: Isoprenylcysteine carboxyl methyltransferase
  misc_feature (1)..(261): NCBI GI NO: 15238431 NR Description: expressed protein [Arabidopsis thaliana]
  misc_feature (1)..(261): NCBI GI NO: 21593420 NR Description: unknown [Arabidopsis thaliana]
  misc_feature (1)..(261): NCBI GI NO: 19347912 NR Description: unknown protein [Arabidopsis thaliana]
  misc_feature (164)..(261): NCBI GI NO: 15921450 NR Description: 199aa long conserved hypothetical protein
  misc_feature (140)..(261): NCBI GI NO: 24378738 NR Description: conserved hypothetical protein
  misc_feature (76)..(261): NCBI GI NO: 15896653 NR Description: Predicted protein-S-isoprenylcysteinemethyltransferase
  misc_feature (114)..(261): NCBI GI NO: 21229585 NR Description: conserved hypothetical protein
MLFSPFFWMYFSWTWLFWPWMVAIGLAVYGLYCFRKHLHSEANIFEQLAIVTSVFTWLTLVPPGHFNGYLEGWPYVFFFVYHYFFFFNVSVRKRLYGDYFAQPHDPKWDVNLPMWSRLLFSTGVMVGHWLAAFEGPELHLIPGGWSNLGIWALIITTLLMQYNATLYLAKYSENVVEPTSVVQFGPYRWVRHPIYSSTMLLFVTYCIALRAPLSLLFIVAVCLLYYKQKAEKEEDLMVETFGQSYTEYASKVKYKLIPFIY

SEQ ID NO: 9340 - DNA, 1613 bp, Glycine max
  misc_feature (1)..(1613): Ceres Seq. ID no. 15168348
ttggacaggttctaaagtttttgatagcctcagaaacaaaatcagacctcatcatagttttgctaacacaagtacattcattctcaaaaggtttaatttcatcctttctttccctctcttttcattggtgtgcactttcacttgtggagctagctgcaccaacagcagtggaaattgccttgttcttgagatgtctggtgttcttctttgggtgagttctggacccaaagagaacatcaactccttggtgagtttttcatgcaggagtggtggtggtggtgaaagaacacaaaagaggttttctggaatcagttttgcaagtggtgcctctgctttttcaagtgcagtggcagctgagactttaagatcctcagaggagagggtctatgaagtggtgctgaagcaagcagctctggtaaaagaaaacaaaaggggtacaaagatagctctagatttggacaaagacgttgaaggtgatttcaccaatgtggatctgttgaatgcagcttatgatcggtgtggtgaagtctgtgctgagtatgccaagacattttacttaggcacacaattgatgactgcagagcgccgaaaagctatttgggcaatttatgtgtggtgcagaagaactgatgagctagtggatggcccaaatgcttcgcacatcacccccggggccttggacaggtgggagcaacgactgagtgatgtttttgaaggtcgaccctatgatatgtatgatgctgccctctcacatactgtctcaaagtacccagttgatattcagccattcaaggacatgatcgaagggatgaggatggacctgagaaagtcaagatacgataactttgatgagctctacctttattgctactatgttgctgggacagtaggccttatgagtgtcccagtaatggggatagcaccagaagcaaatgcttcaacagagagcatttataatgctgcattggctctaggcattgcaaatcaacttactaacatactcagagatgttggagaggatgctagaagaggaagagtatatctcccacaagatgaattggcactagctggcctttcagatgaagacattttcagcggaagagttacagacaaatggcggaaattcatgaagggacaaataaagagggcgaggatgttttttgatgaagcagagaggggagttgcagacctcaactcagctagcaggtggcctgtgtgggcatcattgttgttgtataggcaaatattagattccattgaagccaatgattataataacttcacaaaaagggcatatgtaggaaaagtaaagaagctattatcactacctactgcctatggtttttcacttctaggccctcagaagtttgccaaaatggttaggagataactgttacaatgtgtgatacttttcagttagagttgtatacatctcaatttaccatgtgttgaagcgcatgagcaacccattcaattcatttaatcaatttgcaagatatcttagtaatcagttttaaaatgtgtaaaaaagaagaaggaagaatgtatcaatccatttgtataccataaatttcagatatcattcttcaaagggatacaacattttacttttg

SEQ ID NO: 9341 - protein, 462 aa, Glycine max
  peptide (1)..(462): Ceres Seq. ID no. 15168349
  misc_feature (177)..(451): Pfam Name: Pfam Description:  Squalene/phytoene synthase
  misc_feature (114)..(453): NCBI GI NO: 8928282 NR Description: Phytoene synthase, chloroplast precursor
  misc_feature (109)..(453): NCBI GI NO: 40456029 NR Description: phytoene synthase
  misc_feature (76)..(453): NCBI GI NO: 1346882 NR Description: Phytoene synthase, chloroplast precursor (MEL5)
  misc_feature (64)..(453): NCBI GI NO: 21360353 NR Description: phytoene synthase [Tagetes erecta]
  misc_feature (52)..(451): NCBI GI NO: 585749 NR Description: Phytoene synthase, chloroplast precursor
  misc_feature (101)..(455): NCBI GI NO: 6959860 NR Description: phytoene synthase [Citrus unshiu]
  misc_feature (81)..(461): NCBI GI NO: 585746 NR Description: Phytoene synthase 1, chloroplast precursor
  misc_feature (109)..(451): NCBI GI NO: 15237933 NR Description: phytoene synthase
  misc_feature (109)..(451): NCBI GI NO: 21553694 NR Description: phytoene synthase [Arabidopsis thaliana]
  misc_feature (117)..(453): NCBI GI NO: 1709885 NR Description: Phytoene synthase, chloroplast precursor
WTGSKVFDSLRNKIRPHHSFANTSTFILKRFNFILSFPLFSLVCTFTCGASCTNSSGNCLVLEMSGVLLWVSSGPKENINSLVSFSCRSGGGGERTQKRFSGISFASGASAFSSAVAAETLRSSEERVYEVVLKQAALVKENKRGTKIALDLDKDVEGDFTNVDLLNAAYDRCGEVCAEYAKTFYLGTQLMTAERRKAIWAIYVWCRRTDELVDGPNASHITPGALDRWEQRLSDVFEGRPYDMYDAALSHTVSKYPVDIQPFKDMIEGMRMDLRKSRYDNFDELYLYCYYVAGTVGLMSVPVMGIAPEANASTESIYNAALALGIANQLTNILRDVGEDARRGRVYLPQDELALAGLSDEDIFSGRVTDKWRKFMKGQIKRARMFFDEAERGVADLNSASRWPVWASLLLYRQILDSIEANDYNNFTKRAYVGKVKKLLSLPTAYGFSLLGPQKFAKMVRR

SEQ ID NO: 9342 - protein, 399 aa, Glycine max
  peptide (1)..(399): Ceres Seq. ID no. 15168350
  misc_feature (114)..(388): Pfam Name: Pfam Description:  Squalene/phytoene synthase
  misc_feature (51)..(390): NCBI GI NO: 8928282 NR Description: Phytoene synthase, chloroplast precursor
  misc_feature (46)..(390): NCBI GI NO: 40456029 NR Description: phytoene synthase
  misc_feature (13)..(390): NCBI GI NO: 1346882 NR Description: Phytoene synthase, chloroplast precursor (MEL5)
  misc_feature (1)..(390): NCBI GI NO: 21360353 NR Description: phytoene synthase [Tagetes erecta]
  misc_feature (1)..(388): NCBI GI NO: 585749 NR Description: Phytoene synthase, chloroplast precursor
  misc_feature (38)..(392): NCBI GI NO: 6959860 NR Description: phytoene synthase [Citrus unshiu]
  misc_feature (18)..(398): NCBI GI NO: 585746 NR Description: Phytoene synthase 1, chloroplast precursor
  misc_feature (46)..(388): NCBI GI NO: 15237933 NR Description: phytoene synthase
  misc_feature (46)..(388): NCBI GI NO: 21553694 NR Description: phytoene synthase [Arabidopsis thaliana]
  misc_feature (54)..(390): NCBI GI NO: 1709885 NR Description: Phytoene synthase, chloroplast precursor
MSGVLLWVSSGPKENINSLVSFSCRSGGGGERTQKRFSGISFASGASAFSSAVAAETLRSSEERVYEVVLKQAALVKENKRGTKIALDLDKDVEGDFTNVDLLNAAYDRCGEVCAEYAKTFYLGTQLMTAERRKAIWAIYVWCRRTDELVDGPNASHITPGALDRWEQRLSDVFEGRPYDMYDAALSHTVSKYPVDIQPFKDMIEGMRMDLRKSRYDNFDELYLYCYYVAGTVGLMSVPVMGIAPEANASTESIYNAALALGIANQLTNILRDVGEDARRGRVYLPQDELALAGLSDEDIFSGRVTDKWRKFMKGQIKRARMFFDEAERGVADLNSASRWPVWASLLLYRQILDSIEANDYNNFTKRAYVGKVKKLLSLPTAYGFSLLGPQKFAKMVRR

SEQ ID NO: 9343 - protein, 272 aa, Glycine max
  peptide (1)..(272): Ceres Seq. ID no. 15168351
  misc_feature (1)..(261): Pfam Name: Pfam Description:  Squalene/phytoene synthase
  misc_feature (1)..(263): NCBI GI NO: 8928282 NR Description: Phytoene synthase, chloroplast precursor
  misc_feature (1)..(263): NCBI GI NO: 40456029 NR Description: phytoene synthase
  misc_feature (1)..(263): NCBI GI NO: 1346882 NR Description: Phytoene synthase, chloroplast precursor (MEL5)
  misc_feature (1)..(263): NCBI GI NO: 21360353 NR Description: phytoene synthase [Tagetes erecta]
  misc_feature (1)..(261): NCBI GI NO: 585749 NR Description: Phytoene synthase, chloroplast precursor
  misc_feature (1)..(265): NCBI GI NO: 6959860 NR Description: phytoene synthase [Citrus unshiu]
  misc_feature (1)..(271): NCBI GI NO: 585746 NR Description: Phytoene synthase 1, chloroplast precursor
  misc_feature (1)..(261): NCBI GI NO: 15237933 NR Description: phytoene synthase
  misc_feature (1)..(261): NCBI GI NO: 21553694 NR Description: phytoene synthase [Arabidopsis thaliana]
  misc_feature (1)..(263): NCBI GI NO: 1709885 NR Description: Phytoene synthase, chloroplast precursor
MTAERRKAIWAIYVWCRRTDELVDGPNASHITPGALDRWEQRLSDVFEGRPYDMYDAALSHTVSKYPVDIQPFKDMIEGMRMDLRKSRYDNFDELYLYCYYVAGTVGLMSVPVMGIAPEANASTESIYNAALALGIANQLTNILRDVGEDARRGRVYLPQDELALAGLSDEDIFSGRVTDKWRKFMKGQIKRARMFFDEAERGVADLNSASRWPVWASLLLYRQILDSIEANDYNNFTKRAYVGKVKKLLSLPTAYGFSLLGPQKFAKMVRR

SEQ ID NO: 9344 - DNA, 1052 bp, Glycine max
  misc_feature (1)..(1052): Ceres Seq. ID no. 13595775
acacccaacccaacctcacgcacccactccaataatattaacaacaaccacaaccctttgtttttgttccttacacaccacacaccttcctcatcaatcaatggcgacccccccaaacgacgccgcatcgacaaagaagccccagcccataccatggacccaccaggagaccgtgcacctcatccgcgcctaccaggagaagtggtatgcccttaagcggggcccactccgccacaaccagtgggaggaggtcgccgtcgttgtcgccgcccgctgcggctatgacctcgcccaccccgctaagtccgccctccagtgccgccacaagatggaaaagctccgccagcgccaccgtgccgagaagaagcaacaacacaccgcggccgccctccgccctggcgcgtggcagtacaacaccctcatggacgacctcgagcgcggccccctccccatctccgccctcgcccctctcgacacctttgaagaagaagacgaaaacaacgacgacaccattgacgatcgaaacgactatgatggcgacgggagttttattaacatcaagtcgaagagtattaactgtatcctcagcgagaggcctgtgagaatgagaagcaacaaaagagggtttttgagagagcacgttgttgttaaagaagaagaggagaatgaaaacgaagacgacgacgttttggggttgtcgacggagatgagggctttcgcggagaggtttattgggatggagagtttgaagatggagatgatgaaggagacggagaggtgtaggttggagatggagaagaagcggatccagatgattctggaaacgcaaaggaggatcgttgattccattgggagggcgtttgggtctaacaagaggatcaagattactcaacaaaactgaaaagggtttcatttcttttcttttctaaattgtaattttgattgagtttaatttctatgcattgtgtaagaagttttaatcaagaggtaccacttatacatgacagaatgtgatgggatgacaatgaatacatgcactatttactcagttt

SEQ ID NO: 9345 - protein, 299 aa, Glycine max
  peptide (1)..(299): Ceres Seq. ID no. 13595776
  misc_feature (30)..(289): NCBI GI NO: 15230214 NR Description: proline-rich protein family [Arabidopsis thaliana]
  misc_feature (5)..(181): NCBI GI NO: 15224948 NR Description: expressed protein [Arabidopsis thaliana]
  misc_feature (206)..(286): NCBI GI NO: 15224948 NR Description: expressed protein [Arabidopsis thaliana]
  misc_feature (148)..(285): NCBI GI NO: 37536908 NR Description: hypothetical protein
  misc_feature (35)..(157): NCBI GI NO: 37536908 NR Description: hypothetical protein
  misc_feature (41)..(232): NCBI GI NO: 26451533 NR Description: unknown protein [Arabidopsis thaliana]
  misc_feature (32)..(144): NCBI GI NO: 38344545 NR Description: OSJNBa0027P08.13
HPTQPHAPTPIILTTTTTLCFCSLHTTHLPHQSMATPPNDAASTKKPQPIPWTHQETVHLIRAYQEKWYALKRGPLRHNQWEEVAVVVAARCGYDLAHPAKSALQCRHKMEKLRQRHRAEKKQQHTAAALRPGAWQYNTLMDDLERGPLPISALAPLDTFEEEDENNDDTIDDRNDYDGDGSFINIKSKSINCILSERPVRMRSNKRGFLREHVVVKEEEENENEDDDVLGLSTEMRAFAERFIGMESLKMEMMKETERCRLEMEKKRIQMILETQRRIVDSIGRAFGSNKRIKITQQN

SEQ ID NO: 9346 - protein, 266 aa, Glycine max
  peptide (1)..(266): Ceres Seq. ID no. 13595777
  misc_feature (1)..(256): NCBI GI NO: 15230214 NR Description: proline-rich protein family [Arabidopsis thaliana]
  misc_feature (1)..(148): NCBI GI NO: 15224948 NR Description: expressed protein [Arabidopsis thaliana]
  misc_feature (173)..(253): NCBI GI NO: 15224948 NR Description: expressed protein [Arabidopsis thaliana]
  misc_feature (115)..(252): NCBI GI NO: 37536908 NR Description: hypothetical protein
  misc_feature (2)..(124): NCBI GI NO: 37536908 NR Description: hypothetical protein
  misc_feature (8)..(199): NCBI GI NO: 26451533 NR Description: unknown protein [Arabidopsis thaliana]
  misc_feature (1)..(111): NCBI GI NO: 38344545 NR Description: OSJNBa0027P08.13
MATPPNDAASTKKPQPIPWTHQETVHLIRAYQEKWYALKRGPLRHNQWEEVAVVVAARCGYDLAHPAKSALQCRHKMEKLRQRHRAEKKQQHTAAALRPGAWQYNTLMDDLERGPLPISALAPLDTFEEEDENNDDTIDDRNDYDGDGSFINIKSKSINCILSERPVRMRSNKRGFLREHVVVKEEEENENEDDDVLGLSTEMRAFAERFIGMESLKMEMMKETERCRLEMEKKRIQMILETQRRIVDSIGRAFGSNKRIKITQQN

SEQ ID NO: 9347 - protein, 190 aa, Glycine max
  peptide (1)..(190): Ceres Seq. ID no. 13595778
  misc_feature (1)..(180): NCBI GI NO: 15230214 NR Description: proline-rich protein family [Arabidopsis thaliana]
  misc_feature (1)..(72): NCBI GI NO: 15224948 NR Description: expressed protein [Arabidopsis thaliana]
  misc_feature (97)..(177): NCBI GI NO: 15224948 NR Description: expressed protein [Arabidopsis thaliana]
  misc_feature (39)..(176): NCBI GI NO: 37536908 NR Description: hypothetical protein
  misc_feature (1)..(48): NCBI GI NO: 37536908 NR Description: hypothetical protein
  misc_feature (1)..(123): NCBI GI NO: 26451533 NR Description: unknown protein [Arabidopsis thaliana]
  misc_feature (1)..(35): NCBI GI NO: 38344545 NR Description: OSJNBa0027P08.13
MEKLRQRHRAEKKQQHTAAALRPGAWQYNTLMDDLERGPLPISALAPLDTFEEEDENNDDTIDDRNDYDGDGSFINIKSKSINCILSERPVRMRSNKRGFLREHVVVKEEEENENEDDDVLGLSTEMRAFAERFIGMESLKMEMMKETERCRLEMEKKRIQMILETQRRIVDSIGRAFGSNKRIKITQQN

SEQ ID NO: 9348 - DNA, 1188 bp, Glycine max
  misc_feature (1)..(1188): Ceres Seq. ID no. 15177225
ctgctcaatttgtgagattccaaagcaattctttgctgccaacacaatggattcaagagcttacatccttagagtcaccattgcaattctttgcatctcaatgctagcttccactcttttccctgtgtgtgatgctataaatcatggaagagcaataaggggtcacaaaatccgtagaagctccccaatcaaatctttaaagaaactgaaaataaaatctttaagacatttaaacaagtacacaccatttgattcatttgggtactcagactttgattcatatgggtactcaaactttgatgattcatatggctctccctcttccctacccttaccacctttcaattcactagcaccacatccacaacctacaccatcaagttccattgctcctccaaatttggcacctccaagcataggtggcaactcctctctcccagcactctcaccagttccaagctcacctcatggtgctgtctttgggccaccaaacccaagaagcatgccaccacctccttatcccttaagcccaccaaagcatgctccaagcctaagcccaccaaagagtgctccaagcctaaacccaccaccactagtgtacctcccacctgttgtgttcccaccacccccttcaccttctacgcaccgcaaaaagccgccacaatacgcactttggtgtgtggcaaagcccacggttcctgacccaataattcaggaggccatggactatgcctgtgggtctggtgcggattgcaagtcaattcagcccaatggaatgtgcttccagcccaacactttgctggcccatgcttcgtatgccttcaatagctactggcagaacactaagattggtggaggcacgtgtgattttggtggaactgccatgctagtcactgttgatccaagctatgacaaatgcaacttcatgttgacttagctgcccttgccatatagcacatgtttggagacataatgttcagtgttcaaatattctctctcatcccaacatggatttttgatgtaacaataataattaattccctggcccataagttattggagctacgtaggttgtctttcccccctttcttctcggattattatagctgtcgtatttggaagtatcttatcttttttgtaataatctcattatttttatcgccatttcattatcatgttcgttttgtt

SEQ ID NO: 9349 - protein, 311 aa, Glycine max
  peptide (1)..(311): Ceres Seq. ID no. 15177226
  misc_feature (106)..(235): Pfam Name: Pfam Description:  Extensin-like region
  misc_feature (92)..(311): NCBI GI NO: 15219387 NR Description: hypothetical protein [Arabidopsis thaliana]
  misc_feature (108)..(311): NCBI GI NO: 15240743 NR Description: glycosyl hydrolase family 17
  misc_feature (121)..(302): NCBI GI NO: 37533178 NR Description: hypothetical protein
  misc_feature (105)..(302): NCBI GI NO: 40714691 NR Description: putative glucanase
  misc_feature (112)..(306): NCBI GI NO: 22329437 NR Description: expressed protein [Arabidopsis thaliana]
  misc_feature (112)..(302): NCBI GI NO: 25402549 NR Description: hypothetical protein
  misc_feature (223)..(302): NCBI GI NO: 7487744 NR Description: hypothetical protein T6G15
  misc_feature (223)..(302): NCBI GI NO: 22328593 NR Description: glycosyl hydrolase family 17
  misc_feature (225)..(308): NCBI GI NO: 34912962 NR Description: beta-1,3 glucanase-like protein
  misc_feature (223)..(308): NCBI GI NO: 22775658 NR Description: glycosyl hydrolase family 17-like protein
CSICEIPKQFFAANTMDSRAYILRVTIAILCISMLASTLFPVCDAINHGRAIRGHKIRRSSPIKSLKKLKIKSLRHLNKYTPFDSFGYSDFDSYGYSNFDDSYGSPSSLPLPPFNSLAPHPQPTPSSSIAPPNLAPPSIGGNSSLPALSPVPSSPHGAVFGPPNPRSMPPPPYPLSPPKHAPSLSPPKSAPSLNPPPLVYLPPVVFPPPPSPSTHRKKPPQYALWCVAKPTVPDPIIQEAMDYACGSGADCKSIQPNGMCFQPNTLLAHASYAFNSYWQNTKIGGGTCDFGGTAMLVTVDPSYDKCNFMLT

SEQ ID NO: 9350 - protein, 296 aa, Glycine max
  peptide (1)..(296): Ceres Seq. ID no. 15177227
  misc_feature (91)..(220): Pfam Name: Pfam Description:  Extensin-like region
  misc_feature (77)..(296): NCBI GI NO: 15219387 NR Description: hypothetical protein [Arabidopsis thaliana]
  misc_feature (93)..(296): NCBI GI NO: 15240743 NR Description: glycosyl hydrolase family 17
  misc_feature (106)..(287): NCBI GI NO: 37533178 NR Description: hypothetical protein
  misc_feature (90)..(287): NCBI GI NO: 40714691 NR Description: putative glucanase
  misc_feature (97)..(291): NCBI GI NO: 22329437 NR Description: expressed protein [Arabidopsis thaliana]
  misc_feature (97)..(287): NCBI GI NO: 25402549 NR Description: hypothetical protein
  misc_feature (208)..(287): NCBI GI NO: 7487744 NR Description: hypothetical protein T6G15
  misc_feature (208)..(287): NCBI GI NO: 22328593 NR Description: glycosyl hydrolase family 17
  misc_feature (210)..(293): NCBI GI NO: 34912962 NR Description: beta-1,3 glucanase-like protein
  misc_feature (208)..(293): NCBI GI NO: 22775658 NR Description: glycosyl hydrolase family 17-like protein
MDSRAYILRVTIAILCISMLASTLFPVCDAINHGRAIRGHKIRRSSPIKSLKKLKIKSLRHLNKYTPFDSFGYSDFDSYGYSNFDDSYGSPSSLPLPPFNSLAPHPQPTPSSSIAPPNLAPPSIGGNSSLPALSPVPSSPHGAVFGPPNPRSMPPPPYPLSPPKHAPSLSPPKSAPSLNPPPLVYLPPVVFPPPPSPSTHRKKPPQYALWCVAKPTVPDPIIQEAMDYACGSGADCKSIQPNGMCFQPNTLLAHASYAFNSYWQNTKIGGGTCDFGGTAMLVTVDPSYDKCNFMLT

SEQ ID NO: 9351 - protein, 278 aa, Glycine max
  peptide (1)..(278): Ceres Seq. ID no. 15177228
  misc_feature (73)..(202): Pfam Name: Pfam Description:  Extensin-like region
  misc_feature (59)..(278): NCBI GI NO: 15219387 NR Description: hypothetical protein [Arabidopsis thaliana]
  misc_feature (75)..(278): NCBI GI NO: 15240743 NR Description: glycosyl hydrolase family 17
  misc_feature (88)..(269): NCBI GI NO: 37533178 NR Description: hypothetical protein
  misc_feature (72)..(269): NCBI GI NO: 40714691 NR Description: putative glucanase
  misc_feature (79)..(273): NCBI GI NO: 22329437 NR Description: expressed protein [Arabidopsis thaliana]
  misc_feature (79)..(269): NCBI GI NO: 25402549 NR Description: hypothetical protein
  misc_feature (190)..(269): NCBI GI NO: 7487744 NR Description: hypothetical protein T6G15
  misc_feature (190)..(269): NCBI GI NO: 22328593 NR Description: glycosyl hydrolase family 17
  misc_feature (192)..(275): NCBI GI NO: 34912962 NR Description: beta-1,3 glucanase-like protein
  misc_feature (190)..(275): NCBI GI NO: 22775658 NR Description: glycosyl hydrolase family 17-like protein
MLASTLFPVCDAINHGRAIRGHKIRRSSPIKSLKKLKIKSLRHLNKYTPFDSFGYSDFDSYGYSNFDDSYGSPSSLPLPPFNSLAPHPQPTPSSSIAPPNLAPPSIGGNSSLPALSPVPSSPHGAVFGPPNPRSMPPPPYPLSPPKHAPSLSPPKSAPSLNPPPLVYLPPVVFPPPPSPSTHRKKPPQYALWCVAKPTVPDPIIQEAMDYACGSGADCKSIQPNGMCFQPNTLLAHASYAFNSYWQNTKIGGGTCDFGGTAMLVTVDPSYDKCNFMLT

SEQ ID NO: 9352 - DNA, 921 bp, Glycine max
  misc_feature (1)..(921): Ceres Seq. ID no. 13594354
aaattcctcgacttagctatcaattcattcataaagaaataaaaacaaaagagaagcacgaacagtaactttagaagatcgatcatcatcaatggctgtccaagtttatattgtgtactactctatgtacgggcatgtggagagattagcagaagaaataaagaaaggagctgattcggtggaaggcgttgaggccaaactatggcaggtagctgagatattgccagaagaggttcttggcaaaatgggagcaccaccaaagagtgacgtaccaatcattacccctaatgagctctctgaggctgatgggtttgtctttggcttcccaacaagatttggaatgatggctgctcagttcaaagcttttatagatgcaactggaggtttgtggaaaacacaacaacttgcagggaagccggctggaatcttctatagcactagttcccagggtggtggacaagagactacagcgctaactgctataactcagttggttcatcatggaatgctatttgttccaattggatacacatttggtgctggaatgtttgagatggaggaactcaaaggtggaagcccatatggttcaggaacttatgctggtgatggttcaagacagccaactaagcttgaactggagcaagcattccaccaaggcaagtatattgccggcatcacaaagaagctcaaggaagctgcataatgttgaatcaattaagatttagaattaaatatatgtttgagaatcgttcattatattttagtcctagaatgttctgagttctgtttctttaggtgcttgcatgttatagttttcttatctttcaaaaagaaaatactatgtattgagttatatttttatgttacactacggtgtagtgattattgaaatttattgaataaaggaagtttgttttgtcg

SEQ ID NO: 9353 - protein, 203 aa, Glycine max
  peptide (1)..(203): Ceres Seq. ID no. 15221337
  misc_feature (14)..(152): Pfam Name: Pfam Description:  NADPH-dependent FMN reductase
  misc_feature (1)..(200): NCBI GI NO: 15239652 NR Description: quinone reductase, putative [Arabidopsis thaliana]
  misc_feature (1)..(203): NCBI GI NO: 30687535 NR Description: quinone reductase family [Arabidopsis thaliana]
  misc_feature (1)..(200): NCBI GI NO: 5031275 NR Description: unknown [Prunus armeniaca]
  misc_feature (4)..(200): NCBI GI NO: 21068664 NR Description: putative quinone oxidoreductase [Cicer arietinum]
  misc_feature (1)..(203): NCBI GI NO: 38636776 NR Description: putative quinone-oxidoreductase QR2
  misc_feature (1)..(203): NCBI GI NO: 12484052 NR Description: quinone-oxidoreductase QR2
  misc_feature (1)..(203): NCBI GI NO: 7445353 NR Description: hypothetical protein M4I22
  misc_feature (1)..(203): NCBI GI NO: 34910128 NR Description: putative 1,4-benzoquinone reductase
  misc_feature (38)..(203): NCBI GI NO: 37724581 NR Description: putative quinone reductase [Vitis vinifera]
  misc_feature (1)..(200): NCBI GI NO: 2564066 NR Description: LEDI-3 protein [Lithospermum erythrorhizon]
MAVQVYIVYYSMYGHVERLAEEIKKGADSVEGVEAKLWQVAEILPEEVLGKMGAPPKSDVPIITPNELSEADGFVFGFPTRFGMMAAQFKAFIDATGGLWKTQQLAGKPAGIFYSTSSQGGGQETTALTAITQLVHHGMLFVPIGYTFGAGMFEMEELKGGSPYGSGTYAGDGSRQPTKLELEQAFHQGKYIAGITKKLKEAA

SEQ ID NO: 9354 - protein, 192 aa, Glycine max
  peptide (1)..(192): Ceres Seq. ID no. 15221338
  misc_feature (3)..(141): Pfam Name: Pfam Description:  NADPH-dependent FMN reductase
  misc_feature (1)..(189): NCBI GI NO: 15239652 NR Description: quinone reductase, putative [Arabidopsis thaliana]
  misc_feature (1)..(192): NCBI GI NO: 30687535 NR Description: quinone reductase family [Arabidopsis thaliana]
  misc_feature (1)..(189): NCBI GI NO: 5031275 NR Description: unknown [Prunus armeniaca]
  misc_feature (1)..(189): NCBI GI NO: 21068664 NR Description: putative quinone oxidoreductase [Cicer arietinum]
  misc_feature (1)..(192): NCBI GI NO: 38636776 NR Description: putative quinone-oxidoreductase QR2
  misc_feature (1)..(192): NCBI GI NO: 12484052 NR Description: quinone-oxidoreductase QR2
  misc_feature (1)..(192): NCBI GI NO: 7445353 NR Description: hypothetical protein M4I22
  misc_feature (1)..(192): NCBI GI NO: 34910128 NR Description: putative 1,4-benzoquinone reductase
  misc_feature (27)..(192): NCBI GI NO: 37724581 NR Description: putative quinone reductase [Vitis vinifera]
  misc_feature (1)..(189): NCBI GI NO: 2564066 NR Description: LEDI-3 protein [Lithospermum erythrorhizon]
MYGHVERLAEEIKKGADSVEGVEAKLWQVAEILPEEVLGKMGAPPKSDVPIITPNELSEADGFVFGFPTRFGMMAAQFKAFIDATGGLWKTQQLAGKPAGIFYSTSSQGGGQETTALTAITQLVHHGMLFVPIGYTFGAGMFEMEELKGGSPYGSGTYAGDGSRQPTKLELEQAFHQGKYIAGITKKLKEAA

SEQ ID NO: 9355 - protein, 152 aa, Glycine max
  peptide (1)..(152): Ceres Seq. ID no. 15221339
  misc_feature (1)..(101): Pfam Name: Pfam Description:  NADPH-dependent FMN reductase
  misc_feature (1)..(149): NCBI GI NO: 15239652 NR Description: quinone reductase, putative [Arabidopsis thaliana]
  misc_feature (1)..(152): NCBI GI NO: 30687535 NR Description: quinone reductase family [Arabidopsis thaliana]
  misc_feature (1)..(149): NCBI GI NO: 5031275 NR Description: unknown [Prunus armeniaca]
  misc_feature (1)..(149): NCBI GI NO: 21068664 NR Description: putative quinone oxidoreductase [Cicer arietinum]
  misc_feature (1)..(152): NCBI GI NO: 38636776 NR Description: putative quinone-oxidoreductase QR2
  misc_feature (1)..(152): NCBI GI NO: 12484052 NR Description: quinone-oxidoreductase QR2
  misc_feature (1)..(152): NCBI GI NO: 7445353 NR Description: hypothetical protein M4I22
  misc_feature (1)..(152): NCBI GI NO: 34910128 NR Description: putative 1,4-benzoquinone reductase
  misc_feature (1)..(152): NCBI GI NO: 37724581 NR Description: putative quinone reductase [Vitis vinifera]
  misc_feature (1)..(149): NCBI GI NO: 2564066 NR Description: LEDI-3 protein [Lithospermum erythrorhizon]
MGAPPKSDVPIITPNELSEADGFVFGFPTRFGMMAAQFKAFIDATGGLWKTQQLAGKPAGIFYSTSSQGGGQETTALTAITQLVHHGMLFVPIGYTFGAGMFEMEELKGGSPYGSGTYAGDGSRQPTKLELEQAFHQGKYIAGITKKLKEAA

SEQ ID NO: 9356 - DNA, 1522 bp, Glycine max
  misc_feature (1)..(1522): Ceres Seq. ID no. 14315862
gttttcattcaccgccgcattttgttcttgttgttgctctttcaacaggaaactcctccttcaacagattatgagtgcggttcattactcttgaagcaaggtttggtgggggggaataagatcatgcctggcattctctcaaggctgaatgcaaccatttactgtcgcattcgggaagcaataacaaggcaacaaggagtgccgacatccttgtacagaagttcagctttgcctctttgttcgctcacttcaagtcacacacttcacacaaaatcaatgattactgcctcacattccaatgctatgctgggagatgtttatgcttatggcttaatctcaggtcgtggtagtgtgcgagacttcacaaagcctgctgtaggttgcttgaggggtagtgtgaatctaaggagactacaaccattgtatggtcctttgagttttgggtgttctacttttgatgctaataggaggatccgggattcgagtttgctgcatggatcatggctcaagaatttctcagcctcttcttctgcttgctactcagccggggctgcacatgctgtctcatttgatggaagccctcctgatgaacagcttgcaaattcctctttttcgcctgacccaactattgttggtggtaagcccttgaagatgttgtcaggatcttgttacctaccacatccagataaggaggagacaggaggagaggatgctcattttatttgcacggatgaacaagcaattggtgttgctgatggtgtaggtggctgggcggatgttggcgttaatgcaggactgtttgcacaggaacttatatccaatttagtgagagcaattcaaaaggagcctaaaggttcttttaatctgacaagagtgttaagggaagctcacgcaaatacaaaggtcaagggttcatcaacagcttgtattgttgctcttactgacaagggactacattctattaatttgggtgacagtggattcattgtggttagagatggatgcaccattttcgagtccccttctcaacagcatgacttcaatttcccatatcagttggagagtgggaatggcgctgatctacccagctctggtgaggtttttaccatacccgttgcttcaggagatgtggtcatttctggaacagatggtttatttgacaatttgtacaacagtgagatcactggagttgttgaacatgcaattagggctggactagagccccaagtaactgctcagaagatagcagcactggctcgtcagcgagcactgtccaagagtagtcggacaccattttctaccctgctgaaaaagctggattctgttattatggtggcaaacttgatgacataactgttgttgtctcatacatatcaggttcagtgagtgagtgagtctcatttttgttctacatgtttgaactggtggaagagaatgaaatgtaacgatattatggtccattttttttggattggtataacgaagatgagatataatggaaactagtagtgaaatttattct

SEQ ID NO: 9357 - protein, 450 aa, Glycine max
  peptide (1)..(450): Ceres Seq. ID no. 14315863
  misc_feature (225)..(427): Pfam Name: Pfam Description:  Protein phosphatase 2C
  misc_feature (154)..(434): NCBI GI NO: 25366932 NR Description: hypothetical protein dl4315c
  misc_feature (170)..(434): NCBI GI NO: 30683717 NR Description: expressed protein [Arabidopsis thaliana]
  misc_feature (91)..(434): NCBI GI NO: 15240071 NR Description: expressed protein [Arabidopsis thaliana]
  misc_feature (220)..(438): NCBI GI NO: 18418226 NR Description: protein phosphatase 2C (PP2C) -related
  misc_feature (206)..(438): NCBI GI NO: 7485658 NR Description: hypothetical protein F17M5
  misc_feature (230)..(433): NCBI GI NO: 37533570 NR Description: putative protein phosphatase 2C
  misc_feature (173)..(433): NCBI GI NO: 34896100 NR Description: B1189A09.35
  misc_feature (216)..(433): NCBI GI NO: 7487482 NR Description: hypothetical protein At2g30170
  misc_feature (209)..(433): NCBI GI NO: 31198213 NR Description: ENSANGP00000019458 [Anopheles gambiae]
  misc_feature (216)..(398): NCBI GI NO: 18402284 NR Description: expressed protein [Arabidopsis thaliana]
VFIHRRILFLLLLFQQETPPSTDYECGSLLLKQGLVGGNKIMPGILSRLNATIYCRIREAITRQQGVPTSLYRSSALPLCSLTSSHTLHTKSMITASHSNAMLGDVYAYGLISGRGSVRDFTKPAVGCLRGSVNLRRLQPLYGPLSFGCSTFDANRRIRDSSLLHGSWLKNFSASSSACYSAGAAHAVSFDGSPPDEQLANSSFSPDPTIVGGKPLKMLSGSCYLPHPDKEETGGEDAHFICTDEQAIGVADGVGGWADVGVNAGLFAQELISNLVRAIQKEPKGSFNLTRVLREAHANTKVKGSSTACIVALTDKGLHSINLGDSGFIVVRDGCTIFESPSQQHDFNFPYQLESGNGADLPSSGEVFTIPVASGDVVISGTDGLFDNLYNSEITGVVEHAIRAGLEPQVTAQKIAALARQRALSKSSRTPFSTLLKKLDSVIMVANLMT

SEQ ID NO: 9358 - protein, 409 aa, Glycine max
  peptide (1)..(409): Ceres Seq. ID no. 14315864
  misc_feature (184)..(386): Pfam Name: Pfam Description:  Protein phosphatase 2C
  misc_feature (113)..(393): NCBI GI NO: 25366932 NR Description: hypothetical protein dl4315c
  misc_feature (129)..(393): NCBI GI NO: 30683717 NR Description: expressed protein [Arabidopsis thaliana]
  misc_feature (50)..(393): NCBI GI NO: 15240071 NR Description: expressed protein [Arabidopsis thaliana]
  misc_feature (179)..(397): NCBI GI NO: 18418226 NR Description: protein phosphatase 2C (PP2C) -related
  misc_feature (165)..(397): NCBI GI NO: 7485658 NR Description: hypothetical protein F17M5
  misc_feature (189)..(392): NCBI GI NO: 37533570 NR Description: putative protein phosphatase 2C
  misc_feature (132)..(392): NCBI GI NO: 34896100 NR Description: B1189A09.35
  misc_feature (175)..(392): NCBI GI NO: 7487482 NR Description: hypothetical protein At2g30170
  misc_feature (168)..(392): NCBI GI NO: 31198213 NR Description: ENSANGP00000019458 [Anopheles gambiae]
  misc_feature (175)..(357): NCBI GI NO: 18402284 NR Description: expressed protein [Arabidopsis thaliana]
MPGILSRLNATIYCRIREAITRQQGVPTSLYRSSALPLCSLTSSHTLHTKSMITASHSNAMLGDVYAYGLISGRGSVRDFTKPAVGCLRGSVNLRRLQPLYGPLSFGCSTFDANRRIRDSSLLHGSWLKNFSASSSACYSAGAAHAVSFDGSPPDEQLANSSFSPDPTIVGGKPLKMLSGSCYLPHPDKEETGGEDAHFICTDEQAIGVADGVGGWADVGVNAGLFAQELISNLVRAIQKEPKGSFNLTRVLREAHANTKVKGSSTACIVALTDKGLHSINLGDSGFIVVRDGCTIFESPSQQHDFNFPYQLESGNGADLPSSGEVFTIPVASGDVVISGTDGLFDNLYNSEITGVVEHAIRAGLEPQVTAQKIAALARQRALSKSSRTPFSTLLKKLDSVIMVANLMT

SEQ ID NO: 9359 - protein, 358 aa, Glycine max
  peptide (1)..(358): Ceres Seq. ID no. 14315865
  misc_feature (133)..(335): Pfam Name: Pfam Description:  Protein phosphatase 2C
  misc_feature (62)..(342): NCBI GI NO: 25366932 NR Description: hypothetical protein dl4315c
  misc_feature (78)..(342): NCBI GI NO: 30683717 NR Description: expressed protein [Arabidopsis thaliana]
  misc_feature (1)..(342): NCBI GI NO: 15240071 NR Description: expressed protein [Arabidopsis thaliana]
  misc_feature (128)..(346): NCBI GI NO: 18418226 NR Description: protein phosphatase 2C (PP2C) -related
  misc_feature (114)..(346): NCBI GI NO: 7485658 NR Description: hypothetical protein F17M5
  misc_feature (138)..(341): NCBI GI NO: 37533570 NR Description: putative protein phosphatase 2C
  misc_feature (81)..(341): NCBI GI NO: 34896100 NR Description: B1189A09.35
  misc_feature (124)..(341): NCBI GI NO: 7487482 NR Description: hypothetical protein At2g30170
  misc_feature (117)..(341): NCBI GI NO: 31198213 NR Description: ENSANGP00000019458 [Anopheles gambiae]
  misc_feature (124)..(306): NCBI GI NO: 18402284 NR Description: expressed protein [Arabidopsis thaliana]
MITASHSNAMLGDVYAYGLISGRGSVRDFTKPAVGCLRGSVNLRRLQPLYGPLSFGCSTFDANRRIRDSSLLHGSWLKNFSASSSACYSAGAAHAVSFDGSPPDEQLANSSFSPDPTIVGGKPLKMLSGSCYLPHPDKEETGGEDAHFICTDEQAIGVADGVGGWADVGVNAGLFAQELISNLVRAIQKEPKGSFNLTRVLREAHANTKVKGSSTACIVALTDKGLHSINLGDSGFIVVRDGCTIFESPSQQHDFNFPYQLESGNGADLPSSGEVFTIPVASGDVVISGTDGLFDNLYNSEITGVVEHAIRAGLEPQVTAQKIAALARQRALSKSSRTPFSTLLKKLDSVIMVANLMT

SEQ ID NO: 9360 - DNA, 1211 bp, Glycine max
  misc_feature (1)..(1211): Ceres Seq. ID no. 13594359
aaaaaaccctataaaacttaaatttcaggcataaactgagagagagataacatcgttgcagtggcgcgcccaatggctctgggaatctctaacatactgcactgccccaaattgagtttctcccacaataattttctccccaaagttccaacctctatcagcctcaggtttccccagacagcagcatggagtgatagaaagattatctgtgctgctgcatctgcggcaggaagctctaatcccgatggtgaatttaatccttatgaggtgctaggtgtaagccctattgagaaatttgacatggtcaaggcagcatatgctaaaaaaaagaaggaggctgagatgaatggcgatgaagcaactgcttcaagactggaaaaggcatatgacaaactcatgatggctcaattgtctaatcggaaaaagggtgtgacttttggatcatttaaggtttcaaaggagatcaagtatgctgacaagcttccagttataccttgggggccaaggcttactaaatcaagtcaaaatgacatgcgcatcaacttggcaatatctgctgtttttacagcttggatccttgtcaagcgcagtgctgaatataaacctttgcagtttttagcctttgcctttgtttataggctttttgagaagttaaaagcctctgaatctcctgtaacccccaaatataatgaagagggtgaagacacaggagaaggactccgcatgggaaaacgactgctccgatcactagccttggtttttggatgtgtagctatttcatctttggcatacactttcattttgaacataattgagtttgcaggtggttttattcctactcttttgtacaacagtcaggagttgataatcaccacttcatcggcactcatgctttatatcatggcatcttattatggatagtggagtgtgtcttgaagacgaagaaaccatgcatctattcaccatccctttttttttttaagtctttttcctcccttctctttcttttgttcttattgtgaactaaagtgcttttcttacaaattttgtcaaaagagatgctttttccttgttttaatatactaaattagggatagtgtcaactttcttatggtacttttttcttttcttttttgggaagggaggggggtcatttatattgattttgactattcacatcatagtggtatataagtcttgtattcttgctc

SEQ ID NO: 9361 - protein, 282 aa, Glycine max
  peptide (1)..(282): Ceres Seq. ID no. 13594360
  misc_feature (62)..(123): Pfam Name: Pfam Description:  DnaJ domain
  misc_feature (1)..(281): NCBI GI NO: 18390922 NR Description: expressed protein [Arabidopsis thaliana]
  misc_feature (1)..(281): NCBI GI NO: 21593057 NR Description: unknown [Arabidopsis thaliana]
  misc_feature (1)..(281): NCBI GI NO: 23397051 NR Description: unknown protein [Arabidopsis thaliana]
  misc_feature (1)..(262): NCBI GI NO: 25341936 NR Description: protein F22O13.12
  misc_feature (31)..(262): NCBI GI NO: 7485979 NR Description: hypothetical protein F22O13
  misc_feature (44)..(146): NCBI GI NO: 37535386 NR Description: unknown protein
  misc_feature (207)..(281): NCBI GI NO: 37535386 NR Description: unknown protein
MALGISNILHCPKLSFSHNNFLPKVPTSISLRFPQTAAWSDRKIICAAASAAGSSNPDGEFNPYEVLGVSPIEKFDMVKAAYAKKKKEAEMNGDEATASRLEKAYDKLMMAQLSNRKKGVTFGSFKVSKEIKYADKLPVIPWGPRLTKSSQNDMRINLAISAVFTAWILVKRSAEYKPLQFLAFAFVYRLFEKLKASESPVTPKYNEEGEDTGEGLRMGKRLLRSLALVFGCVAISSLAYTFILNIIEFAGGFIPTLLYNSQELIITTSSALMLYIMASYYG

SEQ ID NO: 9362 - protein, 206 aa, Glycine max
  peptide (1)..(206): Ceres Seq. ID no. 13594361
  misc_feature (1)..(47): Pfam Name: Pfam Description:  DnaJ domain
  misc_feature (1)..(205): NCBI GI NO: 18390922 NR Description: expressed protein [Arabidopsis thaliana]
  misc_feature (1)..(205): NCBI GI NO: 21593057 NR Description: unknown [Arabidopsis thaliana]
  misc_feature (1)..(205): NCBI GI NO: 23397051 NR Description: unknown protein [Arabidopsis thaliana]
  misc_feature (1)..(186): NCBI GI NO: 25341936 NR Description: protein F22O13.12
  misc_feature (1)..(186): NCBI GI NO: 7485979 NR Description: hypothetical protein F22O13
  misc_feature (1)..(70): NCBI GI NO: 37535386 NR Description: unknown protein
  misc_feature (131)..(205): NCBI GI NO: 37535386 NR Description: unknown protein
MVKAAYAKKKKEAEMNGDEATASRLEKAYDKLMMAQLSNRKKGVTFGSFKVSKEIKYADKLPVIPWGPRLTKSSQNDMRINLAISAVFTAWILVKRSAEYKPLQFLAFAFVYRLFEKLKASESPVTPKYNEEGEDTGEGLRMGKRLLRSLALVFGCVAISSLAYTFILNIIEFAGGFIPTLLYNSQELIITTSSALMLYIMASYYG

SEQ ID NO: 9363 - protein, 192 aa, Glycine max
  peptide (1)..(192): Ceres Seq. ID no. 13594362
  misc_feature (1)..(191): NCBI GI NO: 18390922 NR Description: expressed protein [Arabidopsis thaliana]
  misc_feature (1)..(191): NCBI GI NO: 21593057 NR Description: unknown [Arabidopsis thaliana]
  misc_feature (1)..(191): NCBI GI NO: 23397051 NR Description: unknown protein [Arabidopsis thaliana]
  misc_feature (1)..(172): NCBI GI NO: 25341936 NR Description: protein F22O13.12
  misc_feature (1)..(172): NCBI GI NO: 7485979 NR Description: hypothetical protein F22O13
  misc_feature (1)..(56): NCBI GI NO: 37535386 NR Description: unknown protein
  misc_feature (117)..(191): NCBI GI NO: 37535386 NR Description: unknown protein
MNGDEATASRLEKAYDKLMMAQLSNRKKGVTFGSFKVSKEIKYADKLPVIPWGPRLTKSSQNDMRINLAISAVFTAWILVKRSAEYKPLQFLAFAFVYRLFEKLKASESPVTPKYNEEGEDTGEGLRMGKRLLRSLALVFGCVAISSLAYTFILNIIEFAGGFIPTLLYNSQELIITTSSALMLYIMASYYG

SEQ ID NO: 9364 - DNA, 796 bp, Glycine max
  misc_feature (1)..(796): Ceres Seq. ID no. 12608513
attctctctttcccctgtaatctctatatattgtttacaattattcgagagtcatggcaacaagggtgcttttgttgatggccctcaccctctatatcttccccattgctacagcaacattccatgtcaagggttccgtttattgtgatacctgccgtgctggattcgaaaccaatgccaccttttatattcgaggtgcaagggtcggaattcagtgcaaagagaggaagaccatgaaggtagctttctactctgagggtgtgacggactccacgggaacataccacattgaggttgaaaatgaccaccgtgacaatatttgcgaatgcttgcttgttaaaagccctatcaaatggtgtagcaccccagactctgggcgtgacaaatccagcatagtactaacccactcccaaaatggcatagtcaaccatcttcactatgcaaatgctatgggttacttgagggacgaacccttgcctgaatgccacaaactgcttaaatactacttggcagactcagatgtttgatcaataaggtagaagaacgacttgttctttgtttaaatcatgtgttaatttaacgacggatctatttctatggttaagtatttgttgacatcagagtggtactatgtattagttactagcttgttactacttagttttgcttcatatgtctgtttgtaattaagtcacttaattgtggcgtcgtaatgattgatgatgtttaagtctcttatttaattttatgacaatgaagagaaaaaagggtacagacaatgctaaatgcatggttt

SEQ ID NO: 9365 - protein, 157 aa, Glycine max
  peptide (1)..(157): Ceres Seq. ID no. 12608514
  misc_feature (25)..(144): Pfam Name: Pfam Description:  Pollen proteins Ole e I family
  misc_feature (4)..(156): NCBI GI NO: 6561156 NR Description: allergen-like protein BRSn20 [Sambucus nigra]
  misc_feature (5)..(156): NCBI GI NO: 15238066 NR Description: pollen allergen -like protein
  misc_feature (7)..(156): NCBI GI NO: 38347168 NR Description: OSJNBa0039C07.14
  misc_feature (22)..(154): NCBI GI NO: 25990491 NR Description: LLP-B3 protein [Lilium longiflorum]
  misc_feature (7)..(156): NCBI GI NO: 322854 NR Description: pollen-specific protein - rice
  misc_feature (25)..(156): NCBI GI NO: 416731 NR Description: Pollen specific protein C13 precursor
  misc_feature (1)..(156): NCBI GI NO: 18413144 NR Description: Expressed protein; protein id: At4g08685
  misc_feature (5)..(151): NCBI GI NO: 37533594 NR Description: putative Pollen specific protein C13 precursor
  misc_feature (7)..(157): NCBI GI NO: 15218200 NR Description: allergen, putative; protein id: At1g78040
  misc_feature (26)..(144): NCBI GI NO: 29836469 NR Description: putative SAH7 protein [Gossypium barbadense]
MATRVLLLMALTLYIFPIATATFHVKGSVYCDTCRAGFETNATFYIRGARVGIQCKERKTMKVAFYSEGVTDSTGTYHIEVENDHRDNICECLLVKSPIKWCSTPDSGRDKSSIVLTHSQNGIVNHLHYANAMGYLRDEPLPECHKLLKYYLADSDV

SEQ ID NO: 9366 - protein, 149 aa, Glycine max
  peptide (1)..(149): Ceres Seq. ID no. 12608515
  misc_feature (17)..(136): Pfam Name: Pfam Description:  Pollen proteins Ole e I family
  misc_feature (1)..(148): NCBI GI NO: 6561156 NR Description: allergen-like protein BRSn20 [Sambucus nigra]
  misc_feature (1)..(148): NCBI GI NO: 15238066 NR Description: pollen allergen -like protein
  misc_feature (1)..(148): NCBI GI NO: 38347168 NR Description: OSJNBa0039C07.14
  misc_feature (14)..(146): NCBI GI NO: 25990491 NR Description: LLP-B3 protein [Lilium longiflorum]
  misc_feature (1)..(148): NCBI GI NO: 322854 NR Description: pollen-specific protein - rice
  misc_feature (17)..(148): NCBI GI NO: 416731 NR Description: Pollen specific protein C13 precursor
  misc_feature (1)..(148): NCBI GI NO: 18413144 NR Description: Expressed protein; protein id: At4g08685
  misc_feature (1)..(143): NCBI GI NO: 37533594 NR Description: putative Pollen specific protein C13 precursor
  misc_feature (1)..(149): NCBI GI NO: 15218200 NR Description: allergen, putative; protein id: At1g78040
  misc_feature (18)..(136): NCBI GI NO: 29836469 NR Description: putative SAH7 protein [Gossypium barbadense]
MALTLYIFPIATATFHVKGSVYCDTCRAGFETNATFYIRGARVGIQCKERKTMKVAFYSEGVTDSTGTYHIEVENDHRDNICECLLVKSPIKWCSTPDSGRDKSSIVLTHSQNGIVNHLHYANAMGYLRDEPLPECHKLLKYYLADSDV

SEQ ID NO: 9367 - protein, 97 aa, Glycine max
  peptide (1)..(97): Ceres Seq. ID no. 12608516
  misc_feature (1)..(84): Pfam Name: Pfam Description:  Pollen proteins Ole e I family
  misc_feature (1)..(96): NCBI GI NO: 6561156 NR Description: allergen-like protein BRSn20 [Sambucus nigra]
  misc_feature (1)..(96): NCBI GI NO: 15238066 NR Description: pollen allergen -like protein
  misc_feature (1)..(96): NCBI GI NO: 38347168 NR Description: OSJNBa0039C07.14
  misc_feature (1)..(94): NCBI GI NO: 25990491 NR Description: LLP-B3 protein [Lilium longiflorum]
  misc_feature (1)..(96): NCBI GI NO: 322854 NR Description: pollen-specific protein - rice
  misc_feature (1)..(96): NCBI GI NO: 416731 NR Description: Pollen specific protein C13 precursor
  misc_feature (1)..(96): NCBI GI NO: 18413144 NR Description: Expressed protein; protein id: At4g08685
  misc_feature (1)..(91): NCBI GI NO: 37533594 NR Description: putative Pollen specific protein C13 precursor
  misc_feature (1)..(97): NCBI GI NO: 15218200 NR Description: allergen, putative; protein id: At1g78040
  misc_feature (1)..(84): NCBI GI NO: 29836469 NR Description: putative SAH7 protein [Gossypium barbadense]
MKVAFYSEGVTDSTGTYHIEVENDHRDNICECLLVKSPIKWCSTPDSGRDKSSIVLTHSQNGIVNHLHYANAMGYLRDEPLPECHKLLKYYLADSDV

SEQ ID NO: 9368 - DNA, 1362 bp, Glycine max
  misc_feature (1)..(1362): Ceres Seq. ID no. 13639675
attcttcataatgattaaagaacttgtgaaatttatgtcaatcctactcttatcccgtggaaagtttttatagccagtctacatcgattaagatttgcttttgcctacagcgctcaaaagcttaagcaaatcttcacacttcctggagaaaacatgggtgcagcactagagaagtttttcttcagcactttggaaaggaatggaaaaggagaaagggcagatgttggggttccggttgctccatttggtactggaagattcgaagagcctgtccttaatggagattgtgaaaattactgtggtggctcacaatatgttcagttgtatcataattatgccatgccagtaattgtagattccagttctctagctttgcctgatgatatccttgcatcatcaacgcagcaaaactggagtctgttttatcatggtggtaccgatgtatatatcccgagacatacactctatcatccaacttacaaccttgaaggaggagggaaatcacgtggaacaggcacatacatacctgacttgaattacaattcctactgggatatgagcaccaaggcacctaggccaaggagatttccttcttcaaagcacaatgcatttcccagatcacgtctgaaaaagaaacaagtggaagaggttcattctgagatagacataaatgctaattcagattcaaggttgtttgagttcttaaatgaagatttccccgttcttccatgcaattccaaggctataccgccaacacaagccgaagagtctacgccattagaaaagtttcattctgagacagacatggatggtacttctcggtcatttgagttctcaaatgaagatttcccccttcttccaaaggtttgttctgagacacacatggatggtaattcaaggtcatttgggctttcaaagaaagattccccccttcttcaaagcgctcgcaagaccatcctgtcagggtctgctaatttaactaagcaagccaagagtttcccattctctaaagtgtctaaactgaaaaatattgagtttggaactttcaagaaatcacaatcattgacagaaccaagtgtgtcaacaaaggatgagaaagaagattccgatatttcattatctaaaaaaaactgtgcttgtattttcgaaggtggcgatagagaggaaagattaatctcttgaaagcaatgaaaagatggatcaacaatgttaacatagatattttgagggatattaaggatgtgtgtgtgtgtttgtttaagagagactggttgctagtgatagcctcaaacttctaggaacataatgatatcttgaacttgtacatttgtttaagttaaatcttttaatcatgtatgggtc

SEQ ID NO: 9369 - protein, 342 aa, Glycine max
  peptide (1)..(342): Ceres Seq. ID no. 13639676
  misc_feature (1)..(134): NCBI GI NO: 15228893 NR Description: expressed protein [Arabidopsis thaliana]
  misc_feature (1)..(134): NCBI GI NO: 30725328 NR Description: At3g56320 [Arabidopsis thaliana]
  misc_feature (1)..(148): NCBI GI NO: 30688308 NR Description: expressed protein [Arabidopsis thaliana]
  misc_feature (1)..(148): NCBI GI NO: 21805733 NR Description: hypothetical protein [Arabidopsis thaliana]
  misc_feature (1)..(132): NCBI GI NO: 25408709 NR Description: hypothetical protein At2g40520
MGAALEKFFFSTLERNGKGERADVGVPVAPFGTGRFEEPVLNGDCENYCGGSQYVQLYHNYAMPVIVDSSSLALPDDILASSTQQNWSLFYHGGTDVYIPRHTLYHPTYNLEGGGKSRGTGTYIPDLNYNSYWDMSTKAPRPRRFPSSKHNAFPRSRLKKKQVEEVHSEIDINANSDSRLFEFLNEDFPVLPCNSKAIPPTQAEESTPLEKFHSETDMDGTSRSFEFSNEDFPLLPKVCSETHMDGNSRSFGLSKKDSPLLQSARKTILSGSANLTKQAKSFPFSKVSKLKNIEFGTFKKSQSLTEPSVSTKDEKEDSDISLSKKNCACIFEGGDREERLIS

SEQ ID NO: 9370 - protein, 280 aa, Glycine max
  peptide (1)..(280): Ceres Seq. ID no. 13639677
  misc_feature (1)..(72): NCBI GI NO: 15228893 NR Description: expressed protein [Arabidopsis thaliana]
  misc_feature (1)..(72): NCBI GI NO: 30725328 NR Description: At3g56320 [Arabidopsis thaliana]
  misc_feature (1)..(86): NCBI GI NO: 30688308 NR Description: expressed protein [Arabidopsis thaliana]
  misc_feature (1)..(86): NCBI GI NO: 21805733 NR Description: hypothetical protein [Arabidopsis thaliana]
  misc_feature (1)..(70): NCBI GI NO: 25408709 NR Description: hypothetical protein At2g40520
MPVIVDSSSLALPDDILASSTQQNWSLFYHGGTDVYIPRHTLYHPTYNLEGGGKSRGTGTYIPDLNYNSYWDMSTKAPRPRRFPSSKHNAFPRSRLKKKQVEEVHSEIDINANSDSRLFEFLNEDFPVLPCNSKAIPPTQAEESTPLEKFHSETDMDGTSRSFEFSNEDFPLLPKVCSETHMDGNSRSFGLSKKDSPLLQSARKTILSGSANLTKQAKSFPFSKVSKLKNIEFGTFKKSQSLTEPSVSTKDEKEDSDISLSKKNCACIFEGGDREERLIS

SEQ ID NO: 9371 - protein, 208 aa, Glycine max
  peptide (1)..(208): Ceres Seq. ID no. 13639678
  misc_feature (1)..(14): NCBI GI NO: 30688308 NR Description: expressed protein [Arabidopsis thaliana]
  misc_feature (1)..(14): NCBI GI NO: 21805733 NR Description: hypothetical protein [Arabidopsis thaliana]
MSTKAPRPRRFPSSKHNAFPRSRLKKKQVEEVHSEIDINANSDSRLFEFLNEDFPVLPCNSKAIPPTQAEESTPLEKFHSETDMDGTSRSFEFSNEDFPLLPKVCSETHMDGNSRSFGLSKKDSPLLQSARKTILSGSANLTKQAKSFPFSKVSKLKNIEFGTFKKSQSLTEPSVSTKDEKEDSDISLSKKNCACIFEGGDREERLIS

SEQ ID NO: 9372 - DNA, 1298 bp, Glycine max
  misc_feature (1)..(1298): Ceres Seq. ID no. 14315846
aaaacccacgtccgtgcccttgaagctaagcaacagtacaaccaaagactcctccaagctgtctgttttcctgtgtagttcttttgtctgctttcctttgtccttgagagggtttcatttttttgcgtatcacaaaaggtaacagagtcaaaaccctgcaaaaagtacaaaatgatgccaggcaatggacagttaactgttcctccgggcttcaggttccaccctactgatgaggagcttctctactattatctgaggaagaaagtttcttatgaagtcattgatcttgatgtcataagagaagtagatctcaacaaacttgagccttgggacctcaaagataagtgtaggattggatcagggcctcagaatgagtggtatttcttcagccataaggacaagaaatacccaacaggaaccagaacaaatcgagcaactacagctggtttttggaaagcaactggaagagacaagtccatataccacactaattccaagaggattggcatgaggaaaaccctagttttctacactggtcgtgctcctcatggccagaagactgattggatcatgcatgagtatcgccttgatgaagatgatgctgatgttcaagaagatgggtgggtggtatgcagggtcttcaaaaagaaaaaccaaagccgaggtttccaacaagaacttgaagaagaagagcacttaaccacccacatgagagcaagtggtccatgccaggttctagagcagaagcatcttcacatgcaaggaggaccatatgatcattacaactttgatgggacaatgcacctcccacagttgttcagtccagaatcagctattgcaccacctacaaattcttccttggccttatccatgaatgccatggacatccttgagtgctctcaaaacctgttgaggctcacaaccactggctgtggacttaatcttatgcagcaacaacaagaagagaggttcagtggtgactggtctttcttggacaagctactagcatcacaccatggcatggatcaaagcaaatgtaaccctcctactaatcatcatgctgcaactgttgtgggcacttctgctcaaaaattcccatttcattaccttggctgtgacaccacccatgatatcatgaaattttccaagtaggaagggatattgcattttaatgtgttattatacttaaggtgatcatgaggtgagaaatatttggtttctaagtatgtgtaatatgtagcaccttgttagatactcattgagattccactcattaatttagttatttcttgagtgtc

SEQ ID NO: 9373 - protein, 326 aa, Glycine max
  peptide (1)..(326): Ceres Seq. ID no. 14315847
  misc_feature (10)..(140): Pfam Name: NAM Pfam Description: No apical meristem
  misc_feature (4)..(175): NCBI GI NO: 15219419 NR Description: NAM (no apical meristem) protein -related
  misc_feature (192)..(297): NCBI GI NO: 15219419 NR Description: NAM (no apical meristem) protein -related
  misc_feature (1)..(218): NCBI GI NO: 6730944 NR Description: OsNAC7 protein [Oryza sativa]
  misc_feature (5)..(141): NCBI GI NO: 6006373 NR Description: Similar to NAM like protein (AC005310)
  misc_feature (143)..(161): NCBI GI NO: 6006373 NR Description: Similar to NAM like protein (AC005310)
  misc_feature (10)..(287): NCBI GI NO: 15235031 NR Description: No apical meristem (NAM) protein family
  misc_feature (1)..(161): NCBI GI NO: 15217491 NR Description: No apical meristem (NAM) protein family
  misc_feature (10)..(291): NCBI GI NO: 38605889 NR Description: OSJNBb0020O11.1
  misc_feature (5)..(164): NCBI GI NO: 15223299 NR Description: No apical meristem (NAM) protein family
  misc_feature (5)..(161): NCBI GI NO: 7485760 NR Description: NAM (no apical meristem)-like protein
MMPGNGQLTVPPGFRFHPTDEELLYYYLRKKVSYEVIDLDVIREVDLNKLEPWDLKDKCRIGSGPQNEWYFFSHKDKKYPTGTRTNRATTAGFWKATGRDKSIYHTNSKRIGMRKTLVFYTGRAPHGQKTDWIMHEYRLDEDDADVQEDGWVVCRVFKKKNQSRGFQQELEEEEHLTTHMRASGPCQVLEQKHLHMQGGPYDHYNFDGTMHLPQLFSPESAIAPPTNSSLALSMNAMDILECSQNLLRLTTTGCGLNLMQQQQEERFSGDWSFLDKLLASHHGMDQSKCNPPTNHHAATVVGTSAQKFPFHYLGCDTTHDIMKFSK

SEQ ID NO: 9374 - protein, 325 aa, Glycine max
  peptide (1)..(325): Ceres Seq. ID no. 14315848
  misc_feature (9)..(139): Pfam Name: NAM Pfam Description: No apical meristem
  misc_feature (3)..(174): NCBI GI NO: 15219419 NR Description: NAM (no apical meristem) protein -related
  misc_feature (191)..(296): NCBI GI NO: 15219419 NR Description: NAM (no apical meristem) protein -related
  misc_feature (1)..(217): NCBI GI NO: 6730944 NR Description: OsNAC7 protein [Oryza sativa]
  misc_feature (4)..(140): NCBI GI NO: 6006373 NR Description: Similar to NAM like protein (AC005310)
  misc_feature (142)..(160): NCBI GI NO: 6006373 NR Description: Similar to NAM like protein (AC005310)
  misc_feature (9)..(286): NCBI GI NO: 15235031 NR Description: No apical meristem (NAM) protein family
  misc_feature (1)..(160): NCBI GI NO: 15217491 NR Description: No apical meristem (NAM) protein family
  misc_feature (9)..(290): NCBI GI NO: 38605889 NR Description: OSJNBb0020O11.1
  misc_feature (4)..(163): NCBI GI NO: 15223299 NR Description: No apical meristem (NAM) protein family
  misc_feature (4)..(160): NCBI GI NO: 7485760 NR Description: NAM (no apical meristem)-like protein
MPGNGQLTVPPGFRFHPTDEELLYYYLRKKVSYEVIDLDVIREVDLNKLEPWDLKDKCRIGSGPQNEWYFFSHKDKKYPTGTRTNRATTAGFWKATGRDKSIYHTNSKRIGMRKTLVFYTGRAPHGQKTDWIMHEYRLDEDDADVQEDGWVVCRVFKKKNQSRGFQQELEEEEHLTTHMRASGPCQVLEQKHLHMQGGPYDHYNFDGTMHLPQLFSPESAIAPPTNSSLALSMNAMDILECSQNLLRLTTTGCGLNLMQQQQEERFSGDWSFLDKLLASHHGMDQSKCNPPTNHHAATVVGTSAQKFPFHYLGCDTTHDIMKFSK

SEQ ID NO: 9375 - protein, 214 aa, Glycine max
  peptide (1)..(214): Ceres Seq. ID no. 14315849
  misc_feature (1)..(63): NCBI GI NO: 15219419 NR Description: NAM (no apical meristem) protein -related
  misc_feature (80)..(185): NCBI GI NO: 15219419 NR Description: NAM (no apical meristem) protein -related
  misc_feature (1)..(106): NCBI GI NO: 6730944 NR Description: OsNAC7 protein [Oryza sativa]
  misc_feature (1)..(29): NCBI GI NO: 6006373 NR Description: Similar to NAM like protein (AC005310)
  misc_feature (31)..(49): NCBI GI NO: 6006373 NR Description: Similar to NAM like protein (AC005310)
  misc_feature (1)..(175): NCBI GI NO: 15235031 NR Description: No apical meristem (NAM) protein family
  misc_feature (1)..(49): NCBI GI NO: 15217491 NR Description: No apical meristem (NAM) protein family
  misc_feature (1)..(179): NCBI GI NO: 38605889 NR Description: OSJNBb0020O11.1
  misc_feature (1)..(52): NCBI GI NO: 15223299 NR Description: No apical meristem (NAM) protein family
  misc_feature (1)..(49): NCBI GI NO: 7485760 NR Description: NAM (no apical meristem)-like protein
MRKTLVFYTGRAPHGQKTDWIMHEYRLDEDDADVQEDGWVVCRVFKKKNQSRGFQQELEEEEHLTTHMRASGPCQVLEQKHLHMQGGPYDHYNFDGTMHLPQLFSPESAIAPPTNSSLALSMNAMDILECSQNLLRLTTTGCGLNLMQQQQEERFSGDWSFLDKLLASHHGMDQSKCNPPTNHHAATVVGTSAQKFPFHYLGCDTTHDIMKFSK

SEQ ID NO: 9376 - DNA, 688 bp, Glycine max
  misc_feature (1)..(688): Ceres Seq. ID no. 15226128
atattaataataaccaaaacagcagagagaagagaagggctacacaaacacaatctctaatggcactcaggatgtgggcttcttccactgccaatgcactcaaactctcttctgtctccagacctcatctcttgcctcctttttctttctccagatgcttatcttccgtcttggatggacttaagtacgctgattcacatgaatgggtcaagcacgaaggctcagtcgccaccattggtatcactgaccatgcccaggaccatcttggagaggttgtgtatgtggagctgccagaaccaggtggcacagtttccaagaagtctggcttcggagccgttgaaagtgttaaagcaacaagtgatataaactctccaatctcgggggagatcgttgaggttaacaaaaagctcacagaaacgcctggcctggtcaactcaagcccatacgaagatggatggatgatcaaagtaaagccaagcgatccatctgaattagattccttgatgggtccaaaggagtacacaaaattttgtgaggaagaagatgcaagtcattaaagtttgaattgaattggctcctgcagttatgtgtgggactgactgttcttcatatgtttatgatcttattaccttctgaacagttttttaatatgcaacagaactgtttctttccaaaaaaaaaaaaaaaa

SEQ ID NO: 9377 - protein, 184 aa, Glycine max
  peptide (1)..(184): Ceres Seq. ID no. 15226129
  misc_feature (60)..(180): Pfam Name: Pfam Description:  Glycine cleavage H-protein
  misc_feature (20)..(184): NCBI GI NO: 2147453 NR Description: glycine cleavage system protein H precursor
  misc_feature (20)..(184): NCBI GI NO: 2499417 NR Description: Glycine cleavage system H protein
  misc_feature (20)..(184): NCBI GI NO: 2887286 NR Description: H protein [Flaveria anomala]
  misc_feature (20)..(184): NCBI GI NO: 1346118 NR Description: Glycine cleavage system H protein
  misc_feature (20)..(184): NCBI GI NO: 15223217 NR Description: glycine cleavage system H protein precursor -related
  misc_feature (20)..(184): NCBI GI NO: 3688309 NR Description: H-Protein precursor [Flaveria pringlei]
  misc_feature (20)..(183): NCBI GI NO: 1362140 NR Description: H-protein precursor - Flaveria trinervia
  misc_feature (20)..(184): NCBI GI NO: 121080 NR Description: Glycine cleavage system H protein
  misc_feature (20)..(184): NCBI GI NO: 15226973 NR Description: glycine decarboxylase complex H-protein
  misc_feature (21)..(184): NCBI GI NO: 2119600 NR Description: glycine cleavage system protein H precursor
INNNQNSREKRRATQTQSLMALRMWASSTANALKLSSVSRPHLLPPFSFSRCLSSVLDGLKYADSHEWVKHEGSVATIGITDHAQDHLGEVVYVELPEPGGTVSKKSGFGAVESVKATSDINSPISGEIVEVNKKLTETPGLVNSSPYEDGWMIKVKPSDPSELDSLMGPKEYTKFCEEEDASH

SEQ ID NO: 9378 - protein, 165 aa, Glycine max
  peptide (1)..(165): Ceres Seq. ID no. 15226130
  misc_feature (41)..(161): Pfam Name: Pfam Description:  Glycine cleavage H-protein
  misc_feature (1)..(165): NCBI GI NO: 2147453 NR Description: glycine cleavage system protein H precursor
  misc_feature (1)..(165): NCBI GI NO: 2499417 NR Description: Glycine cleavage system H protein
  misc_feature (1)..(165): NCBI GI NO: 2887286 NR Description: H protein [Flaveria anomala]
  misc_feature (1)..(165): NCBI GI NO: 1346118 NR Description: Glycine cleavage system H protein
  misc_feature (1)..(165): NCBI GI NO: 15223217 NR Description: glycine cleavage system H protein precursor -related
  misc_feature (1)..(165): NCBI GI NO: 3688309 NR Description: H-Protein precursor [Flaveria pringlei]
  misc_feature (1)..(164): NCBI GI NO: 1362140 NR Description: H-protein precursor - Flaveria trinervia
  misc_feature (1)..(165): NCBI GI NO: 121080 NR Description: Glycine cleavage system H protein
  misc_feature (1)..(165): NCBI GI NO: 15226973 NR Description: glycine decarboxylase complex H-protein
  misc_feature (2)..(165): NCBI GI NO: 2119600 NR Description: glycine cleavage system protein H precursor
MALRMWASSTANALKLSSVSRPHLLPPFSFSRCLSSVLDGLKYADSHEWVKHEGSVATIGITDHAQDHLGEVVYVELPEPGGTVSKKSGFGAVESVKATSDINSPISGEIVEVNKKLTETPGLVNSSPYEDGWMIKVKPSDPSELDSLMGPKEYTKFCEEEDASH

SEQ ID NO: 9379 - protein, 161 aa, Glycine max
  peptide (1)..(161): Ceres Seq. ID no. 15226131
  misc_feature (37)..(157): Pfam Name: Pfam Description:  Glycine cleavage H-protein
  misc_feature (1)..(161): NCBI GI NO: 2147453 NR Description: glycine cleavage system protein H precursor
  misc_feature (1)..(161): NCBI GI NO: 2499417 NR Description: Glycine cleavage system H protein
  misc_feature (1)..(161): NCBI GI NO: 2887286 NR Description: H protein [Flaveria anomala]
  misc_feature (1)..(161): NCBI GI NO: 1346118 NR Description: Glycine cleavage system H protein
  misc_feature (1)..(161): NCBI GI NO: 15223217 NR Description: glycine cleavage system H protein precursor -related
  misc_feature (1)..(161): NCBI GI NO: 3688309 NR Description: H-Protein precursor [Flaveria pringlei]
  misc_feature (1)..(160): NCBI GI NO: 1362140 NR Description: H-protein precursor - Flaveria trinervia
  misc_feature (1)..(161): NCBI GI NO: 121080 NR Description: Glycine cleavage system H protein
  misc_feature (1)..(161): NCBI GI NO: 15226973 NR Description: glycine decarboxylase complex H-protein
  misc_feature (1)..(161): NCBI GI NO: 2119600 NR Description: glycine cleavage system protein H precursor
MWASSTANALKLSSVSRPHLLPPFSFSRCLSSVLDGLKYADSHEWVKHEGSVATIGITDHAQDHLGEVVYVELPEPGGTVSKKSGFGAVESVKATSDINSPISGEIVEVNKKLTETPGLVNSSPYEDGWMIKVKPSDPSELDSLMGPKEYTKFCEEEDASH

SEQ ID NO: 9380 - DNA, 432 bp, Glycine max
  misc_feature (1)..(432): Ceres Seq. ID no. 12608522
  misc_feature (166)..(166): n is a, c, t, g, unknown, or other
agctaggtagggttttctctttctcacgttcctcttcgcagcaccacagtagcttcgcattagcaatggcgagaatcaaggtgtacgagctgaggtacaagacaaaagcagagcttctgaaccaacttaaggatctcaaagcagaactcgctctcctccgcgtcgntaaggagagcgagttctgctttgagatccttaagtgtcgtatgctcttctttgcttttgagaagatatagaaaacccaaacttactacaatacttgaaatagttgtaaattaacgagaattgaaacagaataacttgagggtgcaaatgaatttgacccttgtaattccaattttgtgcattttcctttagatccgctgcacccattggggtgcaattgtaattgtagctgccaattcattgtaaatgctcttgtaatttcatagt

SEQ ID NO: 9381 - protein, 77 aa, Glycine max
  peptide (1)..(77): Ceres Seq. ID no. 12608523
  misc_feature (22)..(56): NCBI GI NO: 6984224 NR Description: 60S ribosomal protein L35 [Euphorbia esula]
  misc_feature (22)..(56): NCBI GI NO: 15232693 NR Description: putative 60S ribosomal protein L35
  misc_feature (22)..(56): NCBI GI NO: 38346113 NR Description: OSJNBb0006N15.8
  misc_feature (55)..(55): Xaa is any aa, unknown or other
LGRVFSFSRSSSQHHSSFALAMARIKVYELRYKTKAELLNQLKDLKAELALLRVXKESEFCFEILKCRMLFFAFEKI

SEQ ID NO: 9382 - protein, 56 aa, Glycine max
  peptide (1)..(56): Ceres Seq. ID no. 12608524
  misc_feature (1)..(35): NCBI GI NO: 6984224 NR Description: 60S ribosomal protein L35 [Euphorbia esula]
  misc_feature (1)..(35): NCBI GI NO: 15232693 NR Description: putative 60S ribosomal protein L35
  misc_feature (1)..(35): NCBI GI NO: 38346113 NR Description: OSJNBb0006N15.8
  misc_feature (34)..(34): Xaa is any aa, unknown or other
MARIKVYELRYKTKAELLNQLKDLKAELALLRVXKESEFCFEILKCRMLFFAFEKI

SEQ ID NO: 9383 - DNA, 505 bp, Glycine max
  misc_feature (1)..(505): Ceres Seq. ID no. 13594351
acaagggaggcttggagatttctttattcttctggtcttaccaatcaaattgacctttttttgctttgccccggtatgattccttgtgatcaacgtcacttgttaatggtgcatgcaatatgaataagtagtgtatggaacagtgccaccataaggtttcttttgttgtattctttcttataacatggtagcagcggaggatttctgcacctttacggcatttttcttatgtccatagagcatggatgctacatcctcaccgtttgtttcctcaagaagaatgggtgtatatgatcctatccaccaaattagcacgtgggaagaaaatttcaaaagtaatgatactaataatttaactgtatccacatccataattggggaggtggacatgaagttagataatcagtttcaggtgcaatcagaggatgatactcatggaatatttggcacatctgtgaagtacgaccaagacactaacagacttactgataagacacaacgacgt

SEQ ID NO: 9384 - protein, 88 aa, Glycine max
  peptide (1)..(88): Ceres Seq. ID no. 13594352
  misc_feature (1)..(87): NCBI GI NO: 15148922 NR Description: TGA-type basic leucine zipper protein TGA1.1
  misc_feature (1)..(87): NCBI GI NO: 7488719 NR Description: transcription factor STGA1 - soybean
  misc_feature (1)..(87): NCBI GI NO: 320563 NR Description: transcription factor tga1 - Arabidopsis thaliana
  misc_feature (1)..(87): NCBI GI NO: 15238367 NR Description: bZIP transcription factor, TGA1
  misc_feature (1)..(87): NCBI GI NO: 1076422 NR Description: transcription factor OBF4 - Arabidopsis thaliana
  misc_feature (1)..(87): NCBI GI NO: 15238046 NR Description: bZIP transcription factor, OBF4
  misc_feature (3)..(87): NCBI GI NO: 13195751 NR Description: mas-binding factor MBF3 [Solanum tuberosum]
  misc_feature (1)..(87): NCBI GI NO: 100288 NR Description: transcription activator TGA1a - tobacco
  misc_feature (3)..(87): NCBI GI NO: 7489280 NR Description: transcription factor TGA1a homolog MBF2 - potato
  misc_feature (3)..(87): NCBI GI NO: 14600166 NR Description: leucine-zipper transcription factor
MDATSSPFVSSRRMGVYDPIHQISTWEENFKSNDTNNLTVSTSIIGEVDMKLDNQFQVQSEDDTHGIFGTSVKYDQDTNRLTDKTQRR

SEQ ID NO: 9385 - protein, 75 aa, Glycine max
  peptide (1)..(75): Ceres Seq. ID no. 13594353
  misc_feature (1)..(74): NCBI GI NO: 15148922 NR Description: TGA-type basic leucine zipper protein TGA1.1
  misc_feature (1)..(74): NCBI GI NO: 7488719 NR Description: transcription factor STGA1 - soybean
  misc_feature (1)..(74): NCBI GI NO: 320563 NR Description: transcription factor tga1 - Arabidopsis thaliana
  misc_feature (1)..(74): NCBI GI NO: 15238367 NR Description: bZIP transcription factor, TGA1
  misc_feature (1)..(74): NCBI GI NO: 1076422 NR Description: transcription factor OBF4 - Arabidopsis thaliana
  misc_feature (1)..(74): NCBI GI NO: 15238046 NR Description: bZIP transcription factor, OBF4
  misc_feature (1)..(74): NCBI GI NO: 13195751 NR Description: mas-binding factor MBF3 [Solanum tuberosum]
  misc_feature (1)..(74): NCBI GI NO: 100288 NR Description: transcription activator TGA1a - tobacco
  misc_feature (1)..(74): NCBI GI NO: 7489280 NR Description: transcription factor TGA1a homolog MBF2 - potato
  misc_feature (1)..(74): NCBI GI NO: 14600166 NR Description: leucine-zipper transcription factor
MGVYDPIHQISTWEENFKSNDTNNLTVSTSIIGEVDMKLDNQFQVQSEDDTHGIFGTSVKYDQDTNRLTDKTQRR

SEQ ID NO: 9386 - DNA, 498 bp, Glycine max
  misc_feature (1)..(498): Ceres Seq. ID no. 13581730
atcctaatcgaaaaacatacacatttattccgctaaataataataataaaaaagaacgacacacaccaaagaaaaatttattagagcttttcgaagatatttgagatttgtgtttcatttgatatggagaagaagagtggtagcagctggtcctttaagaagatgagcaaagagttgtggccacggaggttgtcgtcgtcttttcgcagcaaacggcttcacttacccaccatgaccatcatcgttgacaacgttgttttcaagattgtctcggtggtagagggtgttgtaattgtttccacgctttgtgtattctacctttgttgtggttgtcacatttgaaatattctatgtatgtttgatgatcttcaaattcatttgttcgttcattttttgagggctagttaaagttcatcaataacagtctgagtttgtgttaagttgttaccatcctatgtagattgtccatgcaataaataacaattttgttttgttttt

SEQ ID NO: 9387 - protein, 72 aa, Glycine max
  peptide (1)..(72): Ceres Seq. ID no. 13581731
  misc_feature (1)..(72): NCBI GI NO: 12003398 NR Description: Avr9/Cf-9 rapidly elicited protein 180
MEKKSGSSWSFKKMSKELWPRRLSSSFRSKRLHLPTMTIIVDNVVFKIVSVVEGVVIVSTLCVFYLCCGCHI

SEQ ID NO: 9388 - protein, 59 aa, Glycine max
  peptide (1)..(59): Ceres Seq. ID no. 13581732
  misc_feature (1)..(59): NCBI GI NO: 12003398 NR Description: Avr9/Cf-9 rapidly elicited protein 180
MSKELWPRRLSSSFRSKRLHLPTMTIIVDNVVFKIVSVVEGVVIVSTLCVFYLCCGCHI

SEQ ID NO: 9389 - protein, 36 aa, Glycine max
  peptide (1)..(36): Ceres Seq. ID no. 13581733
  misc_feature (1)..(36): NCBI GI NO: 12003398 NR Description: Avr9/Cf-9 rapidly elicited protein 180
MTIIVDNVVFKIVSVVEGVVIVSTLCVFYLCCGCHI

SEQ ID NO: 9390 - DNA, 1409 bp, Glycine max
  misc_feature (1)..(1409): Ceres Seq. ID no. 15168492
aacgaaatcttcctctgaaatcatagtaaaatacatccccactgaagttcaagttcttgtgtgtaaaatggccaacattttcctacacaatgggggcaacacttgcaaggctaccctctatctcttattcataaccacagccttttttatcgcaaactctgcaaggattctagatgaagtggaatcccaaccccaagccataggcaatctaccagcacctggagctaccaatccttcactcacaacagctccagtcaccaccacaccacagatagatcctgccaccactttgccaagtggccaaacatctgcacccaccaccatatcacagcaggtaggtcctgccaccactttgccaagtggccaaacacctgcaaccgccgccaccatgaaccctgctactaaagaagactctggagaggaagatgataaccaagtagagccgccagttccagaaacagaagctccagctgctgtcactgcaccggctgaagaggaaactccagctatccctagtgcagctccagtgacaccaaactctttggcaaaagagccatctttttctttcttcatgcatgacatccttggagggtcacgtccatcagcaagagtggtagcaggaatagtagcaaacactgatgtcactggcctaccattctcaaagctcaacaacaacctcttcccaatcactggaggaattccactggtaaaccccaagctcaacggcatcataaccaacaacaatctcccaaaccttgtaggcctcagtggtgcacaatcctccactgtgttcaagaacagtggcaccagcaacactgtcactggtggcaacaaccaaccatttgtctcagcaggtaacctccctgcaggattcaccatccagaagctcatgttcggctcggtgacggtgatcgacgaccagctaactgaagggcacgagcttgattctgctgtgattggaaaggcacaagggttctacttggcaagttcattggatggtagcagccagaccattttgttgacagttttggtgcatggtggtgaacatgatcaacatcatgatgtggtggatgacagtatcaatttctttgggattcataggacagcttcatcagaatctgaggtagcagtgattggtgggactggcaagtatgagaatgctagagggtatgcttcacttgagactcttctcaaggaggaccagcacaccactgatggggtggacaccatcctgcatttcaatgtctacctcactgagtagagagactagctacctgtcattgtgattgattgcctttcatatttagagtttgaatttgaatatttgtgtatggtttgttcaaattggtgctatatgtctctgttaatgcttcatcaagtttgaaacaaagctcattctgctttctttt

SEQ ID NO: 9391 - protein, 419 aa, Glycine max
  peptide (1)..(419): Ceres Seq. ID no. 15168493
  misc_feature (225)..(418): Pfam Name: Pfam Description:  Dirigent-like protein
  misc_feature (142)..(418): NCBI GI NO: 15225466 NR Description: disease resistance response protein-related/dirigent protein-related
  misc_feature (145)..(418): NCBI GI NO: 15233217 NR Description: disease resistance response protein-related
  misc_feature (35)..(418): NCBI GI NO: 25407001 NR Description: hypothetical protein
  misc_feature (180)..(418): NCBI GI NO: 15226923 NR Description: fibroin-related [Arabidopsis thaliana]
  misc_feature (157)..(417): NCBI GI NO: 34895944 NR Description: P0011G08.13
  misc_feature (183)..(417): NCBI GI NO: 15229564 NR Description: disease resistance response protein-related
  misc_feature (183)..(417): NCBI GI NO: 15236315 NR Description: disease resistance response protein-related
  misc_feature (196)..(417): NCBI GI NO: 27497202 NR Description: Putative disease resistance response protein
  misc_feature (183)..(381): NCBI GI NO: 9294671 NR Description: contains similarity to disease resistance responseprotein~gene_id:F14O13
  misc_feature (148)..(349): NCBI GI NO: 27497202 NR Description: Putative disease resistance response protein
TKSSSEIIVKYIPTEVQVLVCKMANIFLHNGGNTCKATLYLLFITTAFFIANSARILDEVESQPQAIGNLPAPGATNPSLTTAPVTTTPQIDPATTLPSGQTSAPTTISQQVGPATTLPSGQTPATAATMNPATKEDSGEEDDNQVEPPVPETEAPAAVTAPAEEETPAIPSAAPVTPNSLAKEPSFSFFMHDILGGSRPSARVVAGIVANTDVTGLPFSKLNNNLFPITGGIPLVNPKLNGIITNNNLPNLVGLSGAQSSTVFKNSGTSNTVTGGNNQPFVSAGNLPAGFTIQKLMFGSVTVIDDQLTEGHELDSAVIGKAQGFYLASSLDGSSQTILLTVLVHGGEHDQHHDVVDDSINFFGIHRTASSESEVAVIGGTGKYENARGYASLETLLKEDQHTTDGVDTILHFNVYLTE

SEQ ID NO: 9392 - protein, 397 aa, Glycine max
  peptide (1)..(397): Ceres Seq. ID no. 15168494
  misc_feature (203)..(396): Pfam Name: Pfam Description:  Dirigent-like protein
  misc_feature (120)..(396): NCBI GI NO: 15225466 NR Description: disease resistance response protein-related/dirigent protein-related
  misc_feature (123)..(396): NCBI GI NO: 15233217 NR Description: disease resistance response protein-related
  misc_feature (13)..(396): NCBI GI NO: 25407001 NR Description: hypothetical protein
  misc_feature (158)..(396): NCBI GI NO: 15226923 NR Description: fibroin-related [Arabidopsis thaliana]
  misc_feature (135)..(395): NCBI GI NO: 34895944 NR Description: P0011G08.13
  misc_feature (161)..(395): NCBI GI NO: 15229564 NR Description: disease resistance response protein-related
  misc_feature (161)..(395): NCBI GI NO: 15236315 NR Description: disease resistance response protein-related
  misc_feature (174)..(395): NCBI GI NO: 27497202 NR Description: Putative disease resistance response protein
  misc_feature (161)..(359): NCBI GI NO: 9294671 NR Description: contains similarity to disease resistance responseprotein~gene_id:F14O13
  misc_feature (126)..(327): NCBI GI NO: 27497202 NR Description: Putative disease resistance response protein
MANIFLHNGGNTCKATLYLLFITTAFFIANSARILDEVESQPQAIGNLPAPGATNPSLTTAPVTTTPQIDPATTLPSGQTSAPTTISQQVGPATTLPSGQTPATAATMNPATKEDSGEEDDNQVEPPVPETEAPAAVTAPAEEETPAIPSAAPVTPNSLAKEPSFSFFMHDILGGSRPSARVVAGIVANTDVTGLPFSKLNNNLFPITGGIPLVNPKLNGIITNNNLPNLVGLSGAQSSTVFKNSGTSNTVTGGNNQPFVSAGNLPAGFTIQKLMFGSVTVIDDQLTEGHELDSAVIGKAQGFYLASSLDGSSQTILLTVLVHGGEHDQHHDVVDDSINFFGIHRTASSESEVAVIGGTGKYENARGYASLETLLKEDQHTTDGVDTILHFNVYLTE

SEQ ID NO: 9393 - protein, 290 aa, Glycine max
  peptide (1)..(290): Ceres Seq. ID no. 15168495
  misc_feature (96)..(289): Pfam Name: Pfam Description:  Dirigent-like protein
  misc_feature (13)..(289): NCBI GI NO: 15225466 NR Description: disease resistance response protein-related/dirigent protein-related
  misc_feature (16)..(289): NCBI GI NO: 15233217 NR Description: disease resistance response protein-related
  misc_feature (1)..(289): NCBI GI NO: 25407001 NR Description: hypothetical protein
  misc_feature (51)..(289): NCBI GI NO: 15226923 NR Description: fibroin-related [Arabidopsis thaliana]
  misc_feature (28)..(288): NCBI GI NO: 34895944 NR Description: P0011G08.13
  misc_feature (54)..(288): NCBI GI NO: 15229564 NR Description: disease resistance response protein-related
  misc_feature (54)..(288): NCBI GI NO: 15236315 NR Description: disease resistance response protein-related
  misc_feature (67)..(288): NCBI GI NO: 27497202 NR Description: Putative disease resistance response protein
  misc_feature (54)..(252): NCBI GI NO: 9294671 NR Description: contains similarity to disease resistance responseprotein~gene_id:F14O13
  misc_feature (19)..(220): NCBI GI NO: 27497202 NR Description: Putative disease resistance response protein
MNPATKEDSGEEDDNQVEPPVPETEAPAAVTAPAEEETPAIPSAAPVTPNSLAKEPSFSFFMHDILGGSRPSARVVAGIVANTDVTGLPFSKLNNNLFPITGGIPLVNPKLNGIITNNNLPNLVGLSGAQSSTVFKNSGTSNTVTGGNNQPFVSAGNLPAGFTIQKLMFGSVTVIDDQLTEGHELDSAVIGKAQGFYLASSLDGSSQTILLTVLVHGGEHDQHHDVVDDSINFFGIHRTASSESEVAVIGGTGKYENARGYASLETLLKEDQHTTDGVDTILHFNVYLTE

SEQ ID NO: 9394 - DNA, 1372 bp, Glycine max
  misc_feature (1)..(1372): Ceres Seq. ID no. 13518893
accttaaacttttgcattgacattgcaaactgtttttctctcttagcttaaaagttctctcttgctatccctcctccattaaccccattaataataagcaccatcaatttccttaattgcttcatatataggaaaatacaatgaccaagatctttgtgctgttatgtctgctcttcttagcttcttctgggtttgtccatggctcttctaagaaggatcatattaggttatttgagctcaagaaaggtgatttttctataaaggtcaccaattggggtgcaacacttgtgtccgtaatacttcccgataagaatgggaagttgggtgatattgttcttggatatgattctcccaaggcatacacaaatgatacatcatactttggagctactgtgggccgggttgctaacagaattggaggagctcagttcactctaaatggaatccattacaaattagttgctaatgaaggaaacaacacacttcattctggacccaaagcattcagtgatgttctttggaaagtgacaaggtacataaaagatgatgacaaacccagaatcaccttcagttatcacagttatgatggtgaaggaggatttcctggggacctcctagtaactgtgagctacattcttgggaaaaactcattaagcataatcatgaaagcaaaagctctgaacaagcctaccccagtgaacatggtgaaccatgcttactggaacctaggaaaccacaacagtggcaacattctagatgaagtggttcagatctttggatcccaagtcacactatttgatgacaatctcattcccacaggccaatatgcctcagttagaggaaccccaaatgatttccttgagccacacattgttggagaaaggatcaaccaattgcctaagacaaatggctataacatcaactatgtgcttgatggtgaaaaaggcaatgcagagattaagctggcagctatagcggtggataagaagtcagggagagtgatgaagctcttcacaaatgctcctggtttgcagttttacactgctaattttgtcaagaatgacaagggaaaaggagggtttgtttatcagccacgttcagcactttgtttggagagtcaagcatttcctgactccgtgaatcaccctaattttccatcaactattgtgaccccagataagccttacaagcatgtcatgttgcttaagttttccaccaaagttccatatgctttttcacagttctaattagaattgtgtgctttgatgaaccactttttatgtgtttggtatcaatgtatagcacgactctttttgtgctcttgcaaaacttggcttgggttcattaaaatgaataatgagatattttaatt

SEQ ID NO: 9395 - protein, 368 aa, Glycine max
  peptide (1)..(368): Ceres Seq. ID no. 13518894
  misc_feature (30)..(354): Pfam Name: Pfam Description:  Aldose 1-epimerase
  misc_feature (2)..(360): NCBI GI NO: 15824565 NR Description: non-cell-autonomous protein pathway1
  misc_feature (3)..(360): NCBI GI NO: 7430313 NR Description: probable aldose 1-epimerase (EC 5
  misc_feature (2)..(360): NCBI GI NO: 15824567 NR Description: non-cell-autonomous protein pathway2
  misc_feature (26)..(358): NCBI GI NO: 21537069 NR Description: aldose 1-epimerase-like protein
  misc_feature (26)..(358): NCBI GI NO: 15228261 NR Description: aldose 1-epimerase family [Arabidopsis thaliana]
  misc_feature (23)..(358): NCBI GI NO: 15242223 NR Description: aldose 1-epimerase family [Arabidopsis thaliana]
  misc_feature (116)..(358): NCBI GI NO: 38567883 NR Description: OSJNBa0036B21.18
  misc_feature (4)..(125): NCBI GI NO: 38567883 NR Description: OSJNBa0036B21.18
  misc_feature (25)..(358): NCBI GI NO: 40882679 NR Description: putative aldose 1-epimerase
  misc_feature (30)..(358): NCBI GI NO: 37531218 NR Description: putative aldose 1-epimerase - like protein
MTKIFVLLCLLFLASSGFVHGSSKKDHIRLFELKKGDFSIKVTNWGATLVSVILPDKNGKLGDIVLGYDSPKAYTNDTSYFGATVGRVANRIGGAQFTLNGIHYKLVANEGNNTLHSGPKAFSDVLWKVTRYIKDDDKPRITFSYHSYDGEGGFPGDLLVTVSYILGKNSLSIIMKAKALNKPTPVNMVNHAYWNLGNHNSGNILDEVVQIFGSQVTLFDDNLIPTGQYASVRGTPNDFLEPHIVGERINQLPKTNGYNINYVLDGEKGNAEIKLAAIAVDKKSGRVMKLFTNAPGLQFYTANFVKNDKGKGGFVYQPRSALCLESQAFPDSVNHPNFPSTIVTPDKPYKHVMLLKFSTKVPYAFSQF

SEQ ID NO: 9396 - protein, 194 aa, Glycine max
  peptide (1)..(194): Ceres Seq. ID no. 13518895
  misc_feature (1)..(180): Pfam Name: Pfam Description:  Aldose 1-epimerase
  misc_feature (1)..(186): NCBI GI NO: 15824565 NR Description: non-cell-autonomous protein pathway1
  misc_feature (1)..(186): NCBI GI NO: 7430313 NR Description: probable aldose 1-epimerase (EC 5
  misc_feature (1)..(186): NCBI GI NO: 15824567 NR Description: non-cell-autonomous protein pathway2
  misc_feature (1)..(184): NCBI GI NO: 21537069 NR Description: aldose 1-epimerase-like protein
  misc_feature (1)..(184): NCBI GI NO: 15228261 NR Description: aldose 1-epimerase family [Arabidopsis thaliana]
  misc_feature (1)..(184): NCBI GI NO: 15242223 NR Description: aldose 1-epimerase family [Arabidopsis thaliana]
  misc_feature (1)..(184): NCBI GI NO: 38567883 NR Description: OSJNBa0036B21.18
  misc_feature (1)..(184): NCBI GI NO: 40882679 NR Description: putative aldose 1-epimerase
  misc_feature (1)..(184): NCBI GI NO: 37531218 NR Description: putative aldose 1-epimerase - like protein
  misc_feature (1)..(184): NCBI GI NO: 26452398 NR Description: putative aldose 1-epimerase [Arabidopsis thaliana]
MKAKALNKPTPVNMVNHAYWNLGNHNSGNILDEVVQIFGSQVTLFDDNLIPTGQYASVRGTPNDFLEPHIVGERINQLPKTNGYNINYVLDGEKGNAEIKLAAIAVDKKSGRVMKLFTNAPGLQFYTANFVKNDKGKGGFVYQPRSALCLESQAFPDSVNHPNFPSTIVTPDKPYKHVMLLKFSTKVPYAFSQF

SEQ ID NO: 9397 - DNA, 1721 bp, Glycine max
  misc_feature (1)..(1721): Ceres Seq. ID no. 14311175
aatatcaaattctttgtcccacaaaagatggggttcactcccacaagtactgcaacatgctttctcataatagcacctctggttgtgctatggtgttggaagctactaaagtgggtgtggctgaggccaaagagattggagagagcattaagggcacagggccttcaggggaatccctacagcctcttgattggggacactaaggaaatgtacacagtgctcatgcaagctgccagatctcaacaatctacaagttcttttctctctaaggataaggatgcagcaccacatatcacaacctttaaccatcacattgtcaacaaattcggcaagaattcatttttttgggaaggtaccaaaccaaaagtggtaatcactgaccctgagcaaatcaaagaagtcttcaacaagatccaagactttgagaaacccaagttgagtcctattgtcaagttgttgggctctggacttgcaaatttagaaggcgagaaatggcgtacacatcgaaagattattaaccctgctttccatttagaaaaattgaaggttatgttaccaatatttcttgaatgttgtgacgatatggtttccaaatgggaaaggttgttgtcttcaaatgacaaatccgaaattgatgtgtggcctttccttcaaaatttaacatgtgatattatatctagaacagcatttggaagcagttatgaagatgggaaacgtatatttgaacttctgaaagagcaaactggacttatgatgaaattgcagaacgcttacattccaggatggtggttgctgccaacaactacaaataagaggatgaaaaaaattgatactgagatacgagcattacttaaaggtgtcatcaacaaacgagagaatgcaatgaaggctggtgaagtcttgaacaatgacttgttgggcatgcttttggaatcaaaccgtatggaaatacaagatcatggaaagaataacattattgcaatgactagcctagaggtaattgaggaatgcaatgcattctacatagcaggacaagaaaccacatcggttttactagtttggacaatggtgttattgagtagatatcctcattggcaagaacgtgcaagggaggaagtattgcatgtttttggtaaccaaaagccagactataatgggctaagtcaccttaaaattgtgaccatgattttatacgaggttcttaggttatacccacctttaatttattttgctcgagcgatcaagaatgatgtgaaacttggaaacctttccctacctgcgggagtgcaagtttccttaccaatactattgattcaccaggatcgtgatatttggggtgatgatgctacagagttcaacccagaaagatttgctgaaggagtagcaaaggcaacaaaaggccaagttgtgtttttcccatttggatggggtcctagagtgtgcttaggccaaaattttgctttattagaagcgaagttggttttgtcattactcttacaacgcttctcatttgagctttctcctacctatgcacatgctccagtcactgtgctcactcttaatccaaaatttggtgctcatatcatcttacataagttgtagtgtcatctattaatttgtatcctgcacacctaattatctccattcctttcttatgttctaatctcttgtatttatagagggaaacctctttattatattgaatgctatttttatttcct

SEQ ID NO: 9398 - protein, 533 aa, Glycine max
  peptide (1)..(533): Ceres Seq. ID no. 14311176
  misc_feature (16)..(533): NCBI GI NO: 15231889 NR Description: cytochrome P450, putative [Arabidopsis thaliana]
  misc_feature (17)..(533): NCBI GI NO: 15231906 NR Description: cytochrome P450, putative [Arabidopsis thaliana]
  misc_feature (16)..(533): NCBI GI NO: 15231907 NR Description: cytochrome P450, putative [Arabidopsis thaliana]
  misc_feature (24)..(533): NCBI GI NO: 15231897 NR Description: cytochrome P450, putative [Arabidopsis thaliana]
  misc_feature (25)..(533): NCBI GI NO: 21842133 NR Description: cytochrome P450 monooxygenase CYP72A16
  misc_feature (16)..(533): NCBI GI NO: 15231903 NR Description: cytochrome P450, putative [Arabidopsis thaliana]
  misc_feature (25)..(533): NCBI GI NO: 13661774 NR Description: putative cytochrome P450 [Lolium rigidum]
  misc_feature (24)..(533): NCBI GI NO: 7430703 NR Description: cytochrome P450 - Madagascar periwinkle
  misc_feature (25)..(533): NCBI GI NO: 13661772 NR Description: putative cytochrome P450 [Lolium rigidum]
  misc_feature (118)..(533): NCBI GI NO: 9294385 NR Description: cytochrome P450-like protein
NIKFFVPQKMGFTPTSTATCFLIIAPLVVLWCWKLLKWVWLRPKRLERALRAQGLQGNPYSLLIGDTKEMYTVLMQAARSQQSTSSFLSKDKDAAPHITTFNHHIVNKFGKNSFFWEGTKPKVVITDPEQIKEVFNKIQDFEKPKLSPIVKLLGSGLANLEGEKWRTHRKIINPAFHLEKLKVMLPIFLECCDDMVSKWERLLSSNDKSEIDVWPFLQNLTCDIISRTAFGSSYEDGKRIFELLKEQTGLMMKLQNAYIPGWWLLPTTTNKRMKKIDTEIRALLKGVINKRENAMKAGEVLNNDLLGMLLESNRMEIQDHGKNNIIAMTSLEVIEECNAFYIAGQETTSVLLVWTMVLLSRYPHWQERAREEVLHVFGNQKPDYNGLSHLKIVTMILYEVLRLYPPLIYFARAIKNDVKLGNLSLPAGVQVSLPILLIHQDRDIWGDDATEFNPERFAEGVAKATKGQVVFFPFGWGPRVCLGQNFALLEAKLVLSLLLQRFSFELSPTYAHAPVTVLTLNPKFGAHIILHKL

SEQ ID NO: 9399 - protein, 524 aa, Glycine max
  peptide (1)..(524): Ceres Seq. ID no. 14311177
  misc_feature (7)..(524): NCBI GI NO: 15231889 NR Description: cytochrome P450, putative [Arabidopsis thaliana]
  misc_feature (8)..(524): NCBI GI NO: 15231906 NR Description: cytochrome P450, putative [Arabidopsis thaliana]
  misc_feature (7)..(524): NCBI GI NO: 15231907 NR Description: cytochrome P450, putative [Arabidopsis thaliana]
  misc_feature (15)..(524): NCBI GI NO: 15231897 NR Description: cytochrome P450, putative [Arabidopsis thaliana]
  misc_feature (16)..(524): NCBI GI NO: 21842133 NR Description: cytochrome P450 monooxygenase CYP72A16
  misc_feature (7)..(524): NCBI GI NO: 15231903 NR Description: cytochrome P450, putative [Arabidopsis thaliana]
  misc_feature (16)..(524): NCBI GI NO: 13661774 NR Description: putative cytochrome P450 [Lolium rigidum]
  misc_feature (15)..(524): NCBI GI NO: 7430703 NR Description: cytochrome P450 - Madagascar periwinkle
  misc_feature (16)..(524): NCBI GI NO: 13661772 NR Description: putative cytochrome P450 [Lolium rigidum]
  misc_feature (109)..(524): NCBI GI NO: 9294385 NR Description: cytochrome P450-like protein
MGFTPTSTATCFLIIAPLVVLWCWKLLKWVWLRPKRLERALRAQGLQGNPYSLLIGDTKEMYTVLMQAARSQQSTSSFLSKDKDAAPHITTFNHHIVNKFGKNSFFWEGTKPKVVITDPEQIKEVFNKIQDFEKPKLSPIVKLLGSGLANLEGEKWRTHRKIINPAFHLEKLKVMLPIFLECCDDMVSKWERLLSSNDKSEIDVWPFLQNLTCDIISRTAFGSSYEDGKRIFELLKEQTGLMMKLQNAYIPGWWLLPTTTNKRMKKIDTEIRALLKGVINKRENAMKAGEVLNNDLLGMLLESNRMEIQDHGKNNIIAMTSLEVIEECNAFYIAGQETTSVLLVWTMVLLSRYPHWQERAREEVLHVFGNQKPDYNGLSHLKIVTMILYEVLRLYPPLIYFARAIKNDVKLGNLSLPAGVQVSLPILLIHQDRDIWGDDATEFNPERFAEGVAKATKGQVVFFPFGWGPRVCLGQNFALLEAKLVLSLLLQRFSFELSPTYAHAPVTVLTLNPKFGAHIILHKL

SEQ ID NO: 9400 - protein, 464 aa, Glycine max
  peptide (1)..(464): Ceres Seq. ID no. 14311178
  misc_feature (1)..(464): NCBI GI NO: 15231889 NR Description: cytochrome P450, putative [Arabidopsis thaliana]
  misc_feature (1)..(464): NCBI GI NO: 15231906 NR Description: cytochrome P450, putative [Arabidopsis thaliana]
  misc_feature (1)..(464): NCBI GI NO: 15231907 NR Description: cytochrome P450, putative [Arabidopsis thaliana]
  misc_feature (1)..(464): NCBI GI NO: 15231897 NR Description: cytochrome P450, putative [Arabidopsis thaliana]
  misc_feature (1)..(464): NCBI GI NO: 21842133 NR Description: cytochrome P450 monooxygenase CYP72A16
  misc_feature (1)..(464): NCBI GI NO: 15231903 NR Description: cytochrome P450, putative [Arabidopsis thaliana]
  misc_feature (1)..(464): NCBI GI NO: 13661774 NR Description: putative cytochrome P450 [Lolium rigidum]
  misc_feature (1)..(464): NCBI GI NO: 7430703 NR Description: cytochrome P450 - Madagascar periwinkle
  misc_feature (1)..(464): NCBI GI NO: 13661772 NR Description: putative cytochrome P450 [Lolium rigidum]
  misc_feature (49)..(464): NCBI GI NO: 9294385 NR Description: cytochrome P450-like protein
MYTVLMQAARSQQSTSSFLSKDKDAAPHITTFNHHIVNKFGKNSFFWEGTKPKVVITDPEQIKEVFNKIQDFEKPKLSPIVKLLGSGLANLEGEKWRTHRKIINPAFHLEKLKVMLPIFLECCDDMVSKWERLLSSNDKSEIDVWPFLQNLTCDIISRTAFGSSYEDGKRIFELLKEQTGLMMKLQNAYIPGWWLLPTTTNKRMKKIDTEIRALLKGVINKRENAMKAGEVLNNDLLGMLLESNRMEIQDHGKNNIIAMTSLEVIEECNAFYIAGQETTSVLLVWTMVLLSRYPHWQERAREEVLHVFGNQKPDYNGLSHLKIVTMILYEVLRLYPPLIYFARAIKNDVKLGNLSLPAGVQVSLPILLIHQDRDIWGDDATEFNPERFAEGVAKATKGQVVFFPFGWGPRVCLGQNFALLEAKLVLSLLLQRFSFELSPTYAHAPVTVLTLNPKFGAHIILHKL

SEQ ID NO: 9401 - DNA, 1461 bp, Glycine max
  misc_feature (1)..(1461): Ceres Seq. ID no. 15171131
aggaagtaatagcccctacactcgacagtctcttcttctcttctctgcagcttctctcccctcaacagtgagtaattttggcagaatctccgccaagtatcccaaaatttcctccaatctcttcagagttctgcagacattcatccactttccctctataaaaccattcacaatcccaatccaacttgcaaaaccaaaacctagggttcccaaatcctaattgcactaaaacccagaatgaaagcctctttgaagttccgcgaggaacagcaaaaacccctcttgagagcaaaagtcccactcggcatcctcggcatgcccttccaatccggcatagtcgctggcgaatccaaagaactcactctcaacctttctaccttcttcgaatcgggtccttctctcaaagttgcgtatcgacccaacgactcaaagaaccctttttccttcatagtgaaaacgggaaccggacccttcggttcccctctcaagagctccatgctcatgagctgcgagtttaaccttcccggtacaaccggtaccccgttgtttatgcttcacttcaaaccccgcttcggcgactttactttcaagaagacgcagtcttcgatttttgatgggaaagggtttgggtcttttaacacgcaaaacgacgccgttgagaatgggaataatgctgaaacgccgttgatggaatcggccaaggtttcgattcttgactccggcgcctcgatgttctccggcatggaggtggctgcgcggacgactctgccggtgcggggacgtgctgccgtgaagttccggtggggagttaggattccggcggagttcaaggggaacaacgcgtttcagaagattccgtttctcgtaatggataagatcggcgtggagcacatgatggagtgcggagattcgaagaaggggaagggggacgccggagagaaaccgagggttccggctagtgctgacgtggcggaggcgtgctttgcggtgaagcggcagatggaggttctgcaggcggagaacgggttgcttaggaacgccgtggaagatctccggcgagaaattgtcggcggccgaagcggaggctcgattttggggaaaaaccctaaaaagaacgataggaaaacgacgtcggattacggtaattttcccgggaaatcgacggaggctgaagcgagtgaggaattgaagaaagcattaatgggagcagctggtggtagtagtgcttgaatttgaatctgtagaattgtgtttttctctgttgcaattttagtttcagttttgatgctgcgaaattttcttgtgtagtgttatatatattatgataatgatgatatataggttcattaggttggttcgtcaaggctgcttgttcttgtattcaattcaattttgaagctttgaacggaggatcatgaaaataagaaaatttgaggtttttagtagttggtacgaaatcag

SEQ ID NO: 9402 - protein, 330 aa, Glycine max
  peptide (1)..(330): Ceres Seq. ID no. 15171132
  misc_feature (1)..(276): NCBI GI NO: 15230911 NR Description: expressed protein [Arabidopsis thaliana]
  misc_feature (1)..(198): NCBI GI NO: 28411873 NR Description: OSJNBa0016N23.25
  misc_feature (205)..(287): NCBI GI NO: 28411873 NR Description: OSJNBa0016N23.25
  misc_feature (51)..(129): NCBI GI NO: 21740989 NR Description: OSJNBa0019K04.27
MKASLKFREEQQKPLLRAKVPLGILGMPFQSGIVAGESKELTLNLSTFFESGPSLKVAYRPNDSKNPFSFIVKTGTGPFGSPLKSSMLMSCEFNLPGTTGTPLFMLHFKPRFGDFTFKKTQSSIFDGKGFGSFNTQNDAVENGNNAETPLMESAKVSILDSGASMFSGMEVAARTTLPVRGRAAVKFRWGVRIPAEFKGNNAFQKIPFLVMDKIGVEHMMECGDSKKGKGDAGEKPRVPASADVAEACFAVKRQMEVLQAENGLLRNAVEDLRREIVGGRSGGSILGKNPKKNDRKTTSDYGNFPGKSTEAEASEELKKALMGAAGGSSA

SEQ ID NO: 9403 - protein, 304 aa, Glycine max
  peptide (1)..(304): Ceres Seq. ID no. 15171133
  misc_feature (1)..(250): NCBI GI NO: 15230911 NR Description: expressed protein [Arabidopsis thaliana]
  misc_feature (1)..(172): NCBI GI NO: 28411873 NR Description: OSJNBa0016N23.25
  misc_feature (179)..(261): NCBI GI NO: 28411873 NR Description: OSJNBa0016N23.25
  misc_feature (25)..(103): NCBI GI NO: 21740989 NR Description: OSJNBa0019K04.27
MPFQSGIVAGESKELTLNLSTFFESGPSLKVAYRPNDSKNPFSFIVKTGTGPFGSPLKSSMLMSCEFNLPGTTGTPLFMLHFKPRFGDFTFKKTQSSIFDGKGFGSFNTQNDAVENGNNAETPLMESAKVSILDSGASMFSGMEVAARTTLPVRGRAAVKFRWGVRIPAEFKGNNAFQKIPFLVMDKIGVEHMMECGDSKKGKGDAGEKPRVPASADVAEACFAVKRQMEVLQAENGLLRNAVEDLRREIVGGRSGGSILGKNPKKNDRKTTSDYGNFPGKSTEAEASEELKKALMGAAGGSSA

SEQ ID NO: 9404 - protein, 244 aa, Glycine max
  peptide (1)..(244): Ceres Seq. ID no. 15171134
  misc_feature (1)..(190): NCBI GI NO: 15230911 NR Description: expressed protein [Arabidopsis thaliana]
  misc_feature (1)..(112): NCBI GI NO: 28411873 NR Description: OSJNBa0016N23.25
  misc_feature (119)..(201): NCBI GI NO: 28411873 NR Description: OSJNBa0016N23.25
  misc_feature (1)..(43): NCBI GI NO: 21740989 NR Description: OSJNBa0019K04.27
MLMSCEFNLPGTTGTPLFMLHFKPRFGDFTFKKTQSSIFDGKGFGSFNTQNDAVENGNNAETPLMESAKVSILDSGASMFSGMEVAARTTLPVRGRAAVKFRWGVRIPAEFKGNNAFQKIPFLVMDKIGVEHMMECGDSKKGKGDAGEKPRVPASADVAEACFAVKRQMEVLQAENGLLRNAVEDLRREIVGGRSGGSILGKNPKKNDRKTTSDYGNFPGKSTEAEASEELKKALMGAAGGSSA

SEQ ID NO: 9405 - DNA, 1363 bp, Glycine max
  misc_feature (1)..(1363): Ceres Seq. ID no. 15168468
aattatttctgataaaatcttgaacatctttttctctcattctaagaattggagacttttcaaaagtttagggactgcaaattctctgcttctctacacatggagccggtgtcgcgtgctaatttcttttcattccaaagattttggctaccgtttcagggacagggagggatgaggcagcaagttgatccctcggctcacacaatcaagtcccatggagcatcacttgcaagaaaacacgctcgtgattggcttatattgctgcttctcatagtgatagagattgtcctttttgtcattcatccatttaaacgctttgtgggaagggacatgatggaggaccttagatatcctatgaaagaaaacacggtgcctgtatgggctgttcctttatatgcggttctgttgccaatggccgttttccttctcttctatatgcgcaggagagatgtttatgatttgcaccacagtgttctaggtttgttatttgctgttctgataactggggtcttcaccgatgcaataaaaaatgcagttggccggcctcgcccagacttctattggcgttgcttccccgatggggtagagaattatgatagttggggaggtgtggtatgtcatggcaatgctagcgatataaaagaaggacacaagagtttcccaagcggccatacatcatggtcctttgcaggtctaggttttctgtctctgtacctatcggggaagattaaagcttttgatcgcaaagggcacgtggcaaaattatgcattgtgtttcttcctctacttgttgcttgcctagttgcaatctctcgagtggatgactattggcaccattggcaagatgtgtttgccggaggcattctagggcttgttgtggcaaccttttgttatatgcagttcttccctgcgccctataatgatgaaggatggggtccatatgcatatttccgggcaatggaggaatcacgagcgaatgcaaatattaatcgggaattaccagttgggcaggccatggaggatcgggtaacgaatcaagaaccaaggagaaatggtgataccacctttaccccttactcttaccgtagcccaaccttggaagccatggaaatgggacagaagtaatagtcttctatagcactaatcttctccctagctacctagttccttacttttgtgtatacttatgagcttctctacacggcaaccactagatttagctaattgtgcagcttctgtttcttcttgcattattattattattggcactgccactgtaaaaaatgaaaaatgacggcttctttccgctgaattagattatgttgatagatggtacgttaatgggatcccattttgaccttac

SEQ ID NO: 9406 - protein, 341 aa, Glycine max; identical to SEQ ID NO: 9004
  peptide (1)..(341): Ceres Seq. ID no. 15168469
  misc_feature (98)..(273): Pfam Name: Pfam Description:  PAP2 superfamily
  misc_feature (1)..(340): NCBI GI NO: 9621903 NR Description: phosphatidic acid phosphatase alpha
  misc_feature (8)..(322): NCBI GI NO: 15724220 NR Description: At2g01180/F10A8.6 [Arabidopsis thaliana]
  misc_feature (8)..(322): NCBI GI NO: 18379166 NR Description: phosphatidic acid phosphatase (PAP2) family
  misc_feature (8)..(322): NCBI GI NO: 21554001 NR Description: putative phosphatidic acid phosphatase
  misc_feature (34)..(319): NCBI GI NO: 6957723 NR Description: putative phosphatidate phosphohydrolase
  misc_feature (34)..(319): NCBI GI NO: 18396250 NR Description: phosphatidic acid phosphatase (PAP2) family
  misc_feature (27)..(322): NCBI GI NO: 25353094 NR Description: probable phosphatidic acid phosphatase
  misc_feature (28)..(291): NCBI GI NO: 15218051 NR Description: phosphatidic acid phosphatase (PAP2) family
  misc_feature (35)..(335): NCBI GI NO: 34910912 NR Description: putative phosphatidic acid phosphatase beta
  misc_feature (34)..(297): NCBI GI NO: 38637528 NR Description: unknown protein

SEQ ID NO: 9407 - protein, 317 aa, Glycine max; identical to SEQ ID NO: 9005
  peptide (1)..(317): Ceres Seq. ID no. 15168470
  misc_feature (74)..(249): Pfam Name: Pfam Description:  PAP2 superfamily
  misc_feature (1)..(316): NCBI GI NO: 9621903 NR Description: phosphatidic acid phosphatase alpha
  misc_feature (1)..(298): NCBI GI NO: 15724220 NR Description: At2g01180/F10A8.6 [Arabidopsis thaliana]
  misc_feature (1)..(298): NCBI GI NO: 18379166 NR Description: phosphatidic acid phosphatase (PAP2) family
  misc_feature (1)..(298): NCBI GI NO: 21554001 NR Description: putative phosphatidic acid phosphatase
  misc_feature (10)..(295): NCBI GI NO: 6957723 NR Description: putative phosphatidate phosphohydrolase
  misc_feature (10)..(295): NCBI GI NO: 18396250 NR Description: phosphatidic acid phosphatase (PAP2) family
  misc_feature (3)..(298): NCBI GI NO: 25353094 NR Description: probable phosphatidic acid phosphatase
  misc_feature (4)..(267): NCBI GI NO: 15218051 NR Description: phosphatidic acid phosphatase (PAP2) family
  misc_feature (11)..(311): NCBI GI NO: 34910912 NR Description: putative phosphatidic acid phosphatase beta
  misc_feature (10)..(273): NCBI GI NO: 38637528 NR Description: unknown protein

SEQ ID NO: 9408 - protein, 264 aa, Glycine max
  peptide (1)..(264): Ceres Seq. ID no. 15168471
  misc_feature (21)..(196): Pfam Name: Pfam Description:  PAP2 superfamily
  misc_feature (1)..(263): NCBI GI NO: 9621903 NR Description: phosphatidic acid phosphatase alpha
  misc_feature (1)..(245): NCBI GI NO: 15724220 NR Description: At2g01180/F10A8.6 [Arabidopsis thaliana]
  misc_feature (1)..(245): NCBI GI NO: 18379166 NR Description: phosphatidic acid phosphatase (PAP2) family
  misc_feature (1)..(245): NCBI GI NO: 21554001 NR Description: putative phosphatidic acid phosphatase
  misc_feature (1)..(242): NCBI GI NO: 6957723 NR Description: putative phosphatidate phosphohydrolase
  misc_feature (1)..(242): NCBI GI NO: 18396250 NR Description: phosphatidic acid phosphatase (PAP2) family
  misc_feature (1)..(245): NCBI GI NO: 25353094 NR Description: probable phosphatidic acid phosphatase
  misc_feature (1)..(214): NCBI GI NO: 15218051 NR Description: phosphatidic acid phosphatase (PAP2) family
  misc_feature (1)..(258): NCBI GI NO: 34910912 NR Description: putative phosphatidic acid phosphatase beta
  misc_feature (1)..(220): NCBI GI NO: 38637528 NR Description: unknown protein
MMEDLRYPMKENTVPVWAVPLYAVLLPMAVFLLFYMRRRDVYDLHHSVLGLLFAVLITGVFTDAIKNAVGRPRPDFYWRCFPDGVENYDSWGGVVCHGNASDIKEGHKSFPSGHTSWSFAGLGFLSLYLSGKIKAFDRKGHVAKLCIVFLPLLVACLVAISRVDDYWHHWQDVFAGGILGLVVATFCYMQFFPAPYNDEGWGPYAYFRAMEESRANANINRELPVGQAMEDRVTNQEPRRNGDTTFTPYSYRSPTLEAMEMGQK

SEQ ID NO: 9409 - DNA, 1389 bp, Glycine max
  misc_feature (1)..(1389): Ceres Seq. ID no. 15171144
attagggattccctccctcctccgcctcttgtcactcacacagaaaagaccgttgaatttcaaacctcagccatgcccgctctcagaaagcgaaatcgattgtcggagttcgatgccatatccaaccacgacacacctcatgaacagaagaagaatatgtctgagtacgagctgtcgagagagcagagaatccgcgaaaaccgcgagagaatgggaaagctgggaatcttggacctttccctcactctcaagctcaacaacaaaaacaaaagatcctattcctctcacaaaccccaaacccctccttctcttccaaactcctccgtccccgttcgccgctcttccaggttgcagaatgtgactcctgttagttactccgaagttcccccaaagaaagacgagtttaagaaaaatggaagggtggtcattgaacaaggtgccaagccagaggtgtactctgaagaacacgagaagctgttgggaaacaccgacaagccctggacgctcttcgtcgatggtgttggcaaagatgggaaacgaatttatgactccgtccatggcaaaacttgccatcagtgcaggcaaaagactcttggttatcggacaagttgtagccaatgcaacatggtccaggggcagttttgtggagattgcttgtatatgagatatggggagcatgtactcgaagccttgcagaatccaacttggctatgccctgtttgtcgtggaatttgcaactgtagcttatgtcgtcaagcaaaaggatgggccccaactggcactctatataaaaagatatcaacattgggttacaaatcagttgcacactaccttattcaaacccggcgctcagaaatagatgtgaagaaaaatgcagatccttccaacccagtttcagcaaaaaggtcgctacccttctctgatgtggacaagtctcttgaggttaacgagaatcatctggaatcattgaagcctctagctgaatctgaaggtgatgatgctgaggtttcagcaaagagattgcttttctctgataagcaaaatcagcttgaaaaagttgagtgttcagataccccaaaacctcttcagcttgaaaaaaatgagtgttcaggtaccaagaagccacttgcttcttcctccaaacctagctctgacagcattgctggaagacttaggtccaggcttaaaaaaccatgagacttttttttatctttttcttagtctaacctgggatacatgtgcttactttccaagaaacacattatgaattgggataactggagttggtaatttggcatttgtcatagtaacggtaatatatgctttctcttttaattaccaaccggatttggtaatttggtataaaatcctttttgtcatagtaatggt

SEQ ID NO: 9410 - protein, 398 aa, Glycine max
  peptide (1)..(398): Ceres Seq. ID no. 15171145
  misc_feature (48)..(366): NCBI GI NO: 30690864 NR Description: expressed protein [Arabidopsis thaliana]
  misc_feature (131)..(366): NCBI GI NO: 25407788 NR Description: hypothetical protein AT4g37110
  misc_feature (48)..(383): NCBI GI NO: 15227848 NR Description: hypothetical protein [Arabidopsis thaliana]
  misc_feature (180)..(287): NCBI GI NO: 11360288 NR Description: hypothetical protein DKFZp762L0311
  misc_feature (31)..(287): NCBI GI NO: 27651995 NR Description: transcription factor RAM2 splice variant b
  misc_feature (31)..(287): NCBI GI NO: 31542537 NR Description: transcription factor RAM2 [Homo sapiens]
  misc_feature (179)..(289): NCBI GI NO: 15929382 NR Description: Unknown (protein for IMAGE:3829029) [Homo sapiens]
  misc_feature (179)..(289): NCBI GI NO: 22027514 NR Description: cell division cycle associated protein 7 isoform 2
  misc_feature (180)..(278): NCBI GI NO: 22122529 NR Description: cDNA sequence BC006933 [Mus musculus]
  misc_feature (179)..(289): NCBI GI NO: 21313220 NR Description: RIKEN cDNA 2310021G01 [Mus musculus]
IRDSLPPPPLVTHTEKTVEFQTSAMPALRKRNRLSEFDAISNHDTPHEQKKNMSEYELSREQRIRENRERMGKLGILDLSLTLKLNNKNKRSYSSHKPQTPPSLPNSSVPVRRSSRLQNVTPVSYSEVPPKKDEFKKNGRVVIEQGAKPEVYSEEHEKLLGNTDKPWTLFVDGVGKDGKRIYDSVHGKTCHQCRQKTLGYRTSCSQCNMVQGQFCGDCLYMRYGEHVLEALQNPTWLCPVCRGICNCSLCRQAKGWAPTGTLYKKISTLGYKSVAHYLIQTRRSEIDVKKNADPSNPVSAKRSLPFSDVDKSLEVNENHLESLKPLAESEGDDAEVSAKRLLFSDKQNQLEKVECSDTPKPLQLEKNECSGTKKPLASSSKPSSDSIAGRLRSRLKKP

SEQ ID NO: 9411 - protein, 374 aa, Glycine max
  peptide (1)..(374): Ceres Seq. ID no. 15171146
  misc_feature (24)..(342): NCBI GI NO: 30690864 NR Description: expressed protein [Arabidopsis thaliana]
  misc_feature (107)..(342): NCBI GI NO: 25407788 NR Description: hypothetical protein AT4g37110
  misc_feature (24)..(359): NCBI GI NO: 15227848 NR Description: hypothetical protein [Arabidopsis thaliana]
  misc_feature (156)..(263): NCBI GI NO: 11360288 NR Description: hypothetical protein DKFZp762L0311
  misc_feature (7)..(263): NCBI GI NO: 27651995 NR Description: transcription factor RAM2 splice variant b
  misc_feature (7)..(263): NCBI GI NO: 31542537 NR Description: transcription factor RAM2 [Homo sapiens]
  misc_feature (155)..(265): NCBI GI NO: 15929382 NR Description: Unknown (protein for IMAGE:3829029) [Homo sapiens]
  misc_feature (155)..(265): NCBI GI NO: 22027514 NR Description: cell division cycle associated protein 7 isoform 2
  misc_feature (156)..(254): NCBI GI NO: 22122529 NR Description: cDNA sequence BC006933 [Mus musculus]
  misc_feature (155)..(265): NCBI GI NO: 21313220 NR Description: RIKEN cDNA 2310021G01 [Mus musculus]
MPALRKRNRLSEFDAISNHDTPHEQKKNMSEYELSREQRIRENRERMGKLGILDLSLTLKLNNKNKRSYSSHKPQTPPSLPNSSVPVRRSSRLQNVTPVSYSEVPPKKDEFKKNGRVVIEQGAKPEVYSEEHEKLLGNTDKPWTLFVDGVGKDGKRIYDSVHGKTCHQCRQKTLGYRTSCSQCNMVQGQFCGDCLYMRYGEHVLEALQNPTWLCPVCRGICNCSLCRQAKGWAPTGTLYKKISTLGYKSVAHYLIQTRRSEIDVKKNADPSNPVSAKRSLPFSDVDKSLEVNENHLESLKPLAESEGDDAEVSAKRLLFSDKQNQLEKVECSDTPKPLQLEKNECSGTKKPLASSSKPSSDSIAGRLRSRLKKP

SEQ ID NO: 9412 - protein, 346 aa, Glycine max
  peptide (1)..(346): Ceres Seq. ID no. 15171147
  misc_feature (1)..(314): NCBI GI NO: 30690864 NR Description: expressed protein [Arabidopsis thaliana]
  misc_feature (79)..(314): NCBI GI NO: 25407788 NR Description: hypothetical protein AT4g37110
  misc_feature (1)..(331): NCBI GI NO: 15227848 NR Description: hypothetical protein [Arabidopsis thaliana]
  misc_feature (128)..(235): NCBI GI NO: 11360288 NR Description: hypothetical protein DKFZp762L0311
  misc_feature (1)..(235): NCBI GI NO: 27651995 NR Description: transcription factor RAM2 splice variant b
  misc_feature (1)..(235): NCBI GI NO: 31542537 NR Description: transcription factor RAM2 [Homo sapiens]
  misc_feature (127)..(237): NCBI GI NO: 15929382 NR Description: Unknown (protein for IMAGE:3829029) [Homo sapiens]
  misc_feature (127)..(237): NCBI GI NO: 22027514 NR Description: cell division cycle associated protein 7 isoform 2
  misc_feature (128)..(226): NCBI GI NO: 22122529 NR Description: cDNA sequence BC006933 [Mus musculus]
  misc_feature (127)..(237): NCBI GI NO: 21313220 NR Description: RIKEN cDNA 2310021G01 [Mus musculus]
MSEYELSREQRIRENRERMGKLGILDLSLTLKLNNKNKRSYSSHKPQTPPSLPNSSVPVRRSSRLQNVTPVSYSEVPPKKDEFKKNGRVVIEQGAKPEVYSEEHEKLLGNTDKPWTLFVDGVGKDGKRIYDSVHGKTCHQCRQKTLGYRTSCSQCNMVQGQFCGDCLYMRYGEHVLEALQNPTWLCPVCRGICNCSLCRQAKGWAPTGTLYKKISTLGYKSVAHYLIQTRRSEIDVKKNADPSNPVSAKRSLPFSDVDKSLEVNENHLESLKPLAESEGDDAEVSAKRLLFSDKQNQLEKVECSDTPKPLQLEKNECSGTKKPLASSSKPSSDSIAGRLRSRLKKP

SEQ ID NO: 9413 - DNA, 985 bp, Glycine max
  misc_feature (1)..(985): Ceres Seq. ID no. 15168557
attgcctcacacacacaaacacaacagtgtctgctgcaccctacaatggtttcgctaccaacatggtttcgctactttcaccacaaggtcggatactccgtttccctcgccgtgaagaacaataaaggagatccaatcacagccagagagataaatgatgctgtttggaaaaacttctttctaggaaagctgacatacttgctctggaataaaggagaggagatggcccctactattgatggaaaagcagtaactcttgttcggaaattaccagctgtagacccaacgagtgtttttgtaggagatgttgtggttatgaaggaccctgagaagccagataactacctactcagaagattaactgcaattgaaggctatgaagtggtttctactgatgaaaaggatgaaccctttattcttgagaaggatcaatgctgggtagaggctgaaaatgaaaaattgaatgccaaggaagcgaaggatagccgaacatttggtccagttcagatgacagacattgtaggcagagtcatatattgcctgcgaagtgctgtagaccatggccgtgtacaaaacagtgatttcggcatgcgaaacgatacaccagtgctggaagtggaacttgatgttgatgagatggcaaagagtcacaaagcctgaaacatttttcccaagaaacactaactagtttactttacgcatgccttagtttcttcttgtggattttccttgaagcacagattgaagaataaaaaaatatgatttttaaattgttgcaatgggatgatggtgttatgtggatgtcctctgcatgctaggcaattggctgcggcctgtgttaaagcttgagttcaacattattgtatgctaagttctagcaaggactcctctgccctttgttctattcatttggctgtaaaattgaccaagttttggtctttttttgttaatggtcgaggaagataataaaagatgctgcgttgtt

SEQ ID NO: 9414 - protein, 219 aa, Glycine max
  peptide (1)..(219): Ceres Seq. ID no. 15168558
  misc_feature (16)..(218): NCBI GI NO: 38344766 NR Description: OSJNBa0068L06.9
  misc_feature (16)..(219): NCBI GI NO: 30684839 NR Description: expressed protein [Arabidopsis thaliana]
  misc_feature (16)..(219): NCBI GI NO: 15221421 NR Description: expressed protein [Arabidopsis thaliana]
  misc_feature (16)..(219): NCBI GI NO: 25406903 NR Description: hypothetical protein
  misc_feature (16)..(193): NCBI GI NO: 25408133 NR Description: hypothetical protein At2g31140
IASHTQTQQCLLHPTMVSLPTWFRYFHHKVGYSVSLAVKNNKGDPITAREINDAVWKNFFLGKLTYLLWNKGEEMAPTIDGKAVTLVRKLPAVDPTSVFVGDVVVMKDPEKPDNYLLRRLTAIEGYEVVSTDEKDEPFILEKDQCWVEAENEKLNAKEAKDSRTFGPVQMTDIVGRVIYCLRSAVDHGRVQNSDFGMRNDTPVLEVELDVDEMAKSHKA

SEQ ID NO: 9415 - protein, 204 aa, Glycine max
  peptide (1)..(204): Ceres Seq. ID no. 15168559
  misc_feature (1)..(203): NCBI GI NO: 38344766 NR Description: OSJNBa0068L06.9
  misc_feature (1)..(204): NCBI GI NO: 30684839 NR Description: expressed protein [Arabidopsis thaliana]
  misc_feature (1)..(204): NCBI GI NO: 15221421 NR Description: expressed protein [Arabidopsis thaliana]
  misc_feature (1)..(204): NCBI GI NO: 25406903 NR Description: hypothetical protein
  misc_feature (1)..(178): NCBI GI NO: 25408133 NR Description: hypothetical protein At2g31140
MVSLPTWFRYFHHKVGYSVSLAVKNNKGDPITAREINDAVWKNFFLGKLTYLLWNKGEEMAPTIDGKAVTLVRKLPAVDPTSVFVGDVVVMKDPEKPDNYLLRRLTAIEGYEVVSTDEKDEPFILEKDQCWVEAENEKLNAKEAKDSRTFGPVQMTDIVGRVIYCLRSAVDHGRVQNSDFGMRNDTPVLEVELDVDEMAKSHKA

SEQ ID NO: 9416 - protein, 145 aa, Glycine max
  peptide (1)..(145): Ceres Seq. ID no. 15168560
  misc_feature (1)..(144): NCBI GI NO: 38344766 NR Description: OSJNBa0068L06.9
  misc_feature (1)..(145): NCBI GI NO: 30684839 NR Description: expressed protein [Arabidopsis thaliana]
  misc_feature (1)..(145): NCBI GI NO: 15221421 NR Description: expressed protein [Arabidopsis thaliana]
  misc_feature (1)..(145): NCBI GI NO: 25406903 NR Description: hypothetical protein
  misc_feature (1)..(119): NCBI GI NO: 25408133 NR Description: hypothetical protein At2g31140
MAPTIDGKAVTLVRKLPAVDPTSVFVGDVVVMKDPEKPDNYLLRRLTAIEGYEVVSTDEKDEPFILEKDQCWVEAENEKLNAKEAKDSRTFGPVQMTDIVGRVIYCLRSAVDHGRVQNSDFGMRNDTPVLEVELDVDEMAKSHKA

SEQ ID NO: 9417 - DNA, 1754 bp, Glycine max
  misc_feature (1)..(1754): Ceres Seq. ID no. 15168569
aaaccctagaagttcgtcgtcttgtcttccagaatctgacaactttcctcatccgaacctaaattctctcatcaaaccctcacttatccaatccccacccaaattccccgcatcgacctcactcccctaaattcccccatcgccggctctctcacggccgaattcatcgcatcgccggttccgctacggtggctatcgcatgggtaagattctccgagaaaacgcgaagccgtcggcaaattcctcatcggcgtacccctctgcggcgcccgccaccacttcgtcgacatcggtgacggagacggtgagggggtcacaccagttcaagatcacggggtactcgctctcgaaggggatcgggattgggaagtacatggcctccgacgtgttttctgtcggagggtacaattgggcgatttatttctaccccgatgggaagagcgtggaggacaatgcaacctacgtgtcgctcttcatcgcgctggccagcgaaggcaccgatgttagggcacttttcgagttgacccttttggatcagagtgggaaggagaggcacaaggtgcatagccatttcgagaggactcttgaaagcgggccttacaccttaaaataccgcggtagtatgtggggttacaagcggtttttcaagagaacagctctagagacatcagactaccttaaagatgattgtctgtctgtgaattgtagtgttggtgttgtgaggtcacacacggaaggtccgaaaatctataccatagcaatacctccttctagcattggtcagaaatttggacaactgctggaaagtggtaaaggcagtgatgtaaattttgaagttaatggtgatatttttgctgcacataaattggtactagcagctcgttcacctgttttcagagcacagctttttggtcctatgaaagatcagaatacccagcgtattaaagttgaagacatggaggctccagttttcaaggcattgcttcattttatatactgggactcactaccagacatgcaagagcttactgggttgaactcaaaatgggcatcaaccttgatggctcagcatcttctagcagcagctgatcgatatggcttagagagacttaggctgatgtgtgaagcgagtctctgtgaagatgttgctattaatactgtggctacaactctagccttggcagagcagcaccattgtttccaactgaaagctgtctgtctcaagtttattgctacctctgaaaatcttagagctgtgatgcaaactgacggatttgagtacttgaaggaaagctgcccatctgttctgactgagctattggagtacgtggccagatttactgagcattcggacatcatgtgcaagcataggaatgaagcattacttgatggcagtgacataaatgggaggcgggtgaagcaaaggctctaatatgtgaagaacactgcacagctttctgtacatccctcttctactctccgttttaaaagatagcgagagcatggttagagggagaatatatataatcttttataggatcagaggcaatttttaattttcttagcttattcatgtgtaagagatgtaaatgtaatttgtgttgttgctgttactgttctgtttcacgtgtaggtttctgtaatatcttcagtatcactttttactggaaaacatgccttgcaagtgttgatcattactttttatattctgtatgcttattattcaaatgtagtagcgtaagtgcccttgaaac

SEQ ID NO: 9418 - protein, 410 aa, Glycine max
  peptide (1)..(410): Ceres Seq. ID no. 15168570
  misc_feature (44)..(173): Pfam Name: Pfam Description:  MATH domain
  misc_feature (12)..(410): NCBI GI NO: 23617108 NR Description: contains ESTsAU056959
  misc_feature (21)..(410): NCBI GI NO: 18397497 NR Description: expressed protein [Arabidopsis thaliana]
  misc_feature (15)..(410): NCBI GI NO: 22531225 NR Description: putative protein [Arabidopsis thaliana]
  misc_feature (25)..(410): NCBI GI NO: 34394164 NR Description: putative speckle-type POZ protein
  misc_feature (29)..(409): NCBI GI NO: 21595740 NR Description: unknown [Arabidopsis thaliana]
  misc_feature (29)..(409): NCBI GI NO: 18405153 NR Description: expressed protein [Arabidopsis thaliana]
  misc_feature (23)..(409): NCBI GI NO: 34900034 NR Description: OJ1641_C04.24
  misc_feature (6)..(407): NCBI GI NO: 30678912 NR Description: expressed protein [Arabidopsis thaliana]
  misc_feature (1)..(409): NCBI GI NO: 30691638 NR Description: expressed protein [Arabidopsis thaliana]
  misc_feature (9)..(378): NCBI GI NO: 4680338 NR Description: hypothetical protein [Oryza sativa subsp. indica]
MGKILRENAKPSANSSSAYPSAAPATTSSTSVTETVRGSHQFKITGYSLSKGIGIGKYMASDVFSVGGYNWAIYFYPDGKSVEDNATYVSLFIALASEGTDVRALFELTLLDQSGKERHKVHSHFERTLESGPYTLKYRGSMWGYKRFFKRTALETSDYLKDDCLSVNCSVGVVRSHTEGPKIYTIAIPPSSIGQKFGQLLESGKGSDVNFEVNGDIFAAHKLVLAARSPVFRAQLFGPMKDQNTQRIKVEDMEAPVFKALLHFIYWDSLPDMQELTGLNSKWASTLMAQHLLAAADRYGLERLRLMCEASLCEDVAINTVATTLALAEQHHCFQLKAVCLKFIATSENLRAVMQTDGFEYLKESCPSVLTELLEYVARFTEHSDIMCKHRNEALLDGSDINGRRVKQRL

SEQ ID NO: 9419 - protein, 352 aa, Glycine max
  peptide (1)..(352): Ceres Seq. ID no. 15168571
  misc_feature (1)..(115): Pfam Name: Pfam Description:  MATH domain
  misc_feature (1)..(352): NCBI GI NO: 23617108 NR Description: contains ESTsAU056959
  misc_feature (1)..(352): NCBI GI NO: 18397497 NR Description: expressed protein [Arabidopsis thaliana]
  misc_feature (1)..(352): NCBI GI NO: 22531225 NR Description: putative protein [Arabidopsis thaliana]
  misc_feature (1)..(352): NCBI GI NO: 34394164 NR Description: putative speckle-type POZ protein
  misc_feature (1)..(351): NCBI GI NO: 21595740 NR Description: unknown [Arabidopsis thaliana]
  misc_feature (1)..(351): NCBI GI NO: 18405153 NR Description: expressed protein [Arabidopsis thaliana]
  misc_feature (1)..(351): NCBI GI NO: 34900034 NR Description: OJ1641_C04.24
  misc_feature (1)..(349): NCBI GI NO: 30678912 NR Description: expressed protein [Arabidopsis thaliana]
  misc_feature (1)..(351): NCBI GI NO: 30691638 NR Description: expressed protein [Arabidopsis thaliana]
  misc_feature (1)..(320): NCBI GI NO: 4680338 NR Description: hypothetical protein [Oryza sativa subsp. indica]
MASDVFSVGGYNWAIYFYPDGKSVEDNATYVSLFIALASEGTDVRALFELTLLDQSGKERHKVHSHFERTLESGPYTLKYRGSMWGYKRFFKRTALETSDYLKDDCLSVNCSVGVVRSHTEGPKIYTIAIPPSSIGQKFGQLLESGKGSDVNFEVNGDIFAAHKLVLAARSPVFRAQLFGPMKDQNTQRIKVEDMEAPVFKALLHFIYWDSLPDMQELTGLNSKWASTLMAQHLLAAADRYGLERLRLMCEASLCEDVAINTVATTLALAEQHHCFQLKAVCLKFIATSENLRAVMQTDGFEYLKESCPSVLTELLEYVARFTEHSDIMCKHRNEALLDGSDINGRRVKQRL

SEQ ID NO: 9420 - protein, 269 aa, Glycine max
  peptide (1)..(269): Ceres Seq. ID no. 15168572
  misc_feature (57)..(175): Pfam Name: Pfam Description:  BTB/POZ domain
  misc_feature (1)..(269): NCBI GI NO: 23617108 NR Description: contains ESTsAU056959
  misc_feature (1)..(269): NCBI GI NO: 18397497 NR Description: expressed protein [Arabidopsis thaliana]
  misc_feature (1)..(269): NCBI GI NO: 22531225 NR Description: putative protein [Arabidopsis thaliana]
  misc_feature (1)..(269): NCBI GI NO: 34394164 NR Description: putative speckle-type POZ protein
  misc_feature (1)..(268): NCBI GI NO: 21595740 NR Description: unknown [Arabidopsis thaliana]
  misc_feature (1)..(268): NCBI GI NO: 18405153 NR Description: expressed protein [Arabidopsis thaliana]
  misc_feature (1)..(268): NCBI GI NO: 34900034 NR Description: OJ1641_C04.24
  misc_feature (1)..(266): NCBI GI NO: 30678912 NR Description: expressed protein [Arabidopsis thaliana]
  misc_feature (1)..(268): NCBI GI NO: 30691638 NR Description: expressed protein [Arabidopsis thaliana]
  misc_feature (1)..(237): NCBI GI NO: 4680338 NR Description: hypothetical protein [Oryza sativa subsp. indica]
MWGYKRFFKRTALETSDYLKDDCLSVNCSVGVVRSHTEGPKIYTIAIPPSSIGQKFGQLLESGKGSDVNFEVNGDIFAAHKLVLAARSPVFRAQLFGPMKDQNTQRIKVEDMEAPVFKALLHFIYWDSLPDMQELTGLNSKWASTLMAQHLLAAADRYGLERLRLMCEASLCEDVAINTVATTLALAEQHHCFQLKAVCLKFIATSENLRAVMQTDGFEYLKESCPSVLTELLEYVARFTEHSDIMCKHRNEALLDGSDINGRRVKQRL

SEQ ID NO: 9421 - DNA, 833 bp, Glycine max
  misc_feature (1)..(833): Ceres Seq. ID no. 12608429
actctctcttttgtttcctctcttaacttctcttctcacaccacttactttctctctcctctccatgtcttcttcacgtcaaacgtagaatatctttttctttttccccttttttaatcttaacccaatttttactctcgcaaagtggtgtatttgaggaagtttgatttgggaaatgaacaaaggacagtcaccggagcctcttgatttcttcatctggactgttgaggatgttggcttgtggctggagactataaatcttggtagttacagccaaatttttaaagaaaatggtgttaatggagaatacctggaaggcatgtccatgtttacgactgaacagatcctacgttttataagacgttgccacatgaagtggggagacttcatcacattatgcaaggaattaagacggattaaagtggcttgtctgaaaggggagcagaaggtgcggcggccatggtgggcaccggcttgcctatctacagtgttcttaaaggttgcaaaatccaacagacaatcaagagttgtttccttgaagctggaaccatgataatacaataagttaaacctctgcatatgtgtaccagtgtacgtatagcaaatttctttttgcctagaaaacaaaagataggaaagaactttttctagcccccttttttattttattttatttttcttttgattccaaaacctggttgtttcttctcctctggagaactgaactgttatgcagttgaaggtccttgtgcactaatttccggtgctgtgtaattatgtattctcttatatgtgaacgaaaatacgatatatgtcgtttctcttcaggttcc

SEQ ID NO: 9422 - protein, 125 aa, Glycine max
  peptide (1)..(125): Ceres Seq. ID no. 12608430
  misc_feature (13)..(42): Pfam Name: Sterile alpha motif Pfam Description: SAM domain
  misc_feature (1)..(124): NCBI GI NO: 6466959 NR Description: unknown protein [Arabidopsis thaliana]
  misc_feature (1)..(124): NCBI GI NO: 18398048 NR Description: auxin-regulated protein; protein id: At3g07760
MNKGQSPEPLDFFIWTVEDVGLWLETINLGSYSQIFKENGVNGEYLEGMSMFTTEQILRFIRRCHMKWGDFITLCKELRRIKVACLKGEQKVRRPWWAPACLSTVFLKVAKSNRQSRVVSLKLEP

SEQ ID NO: 9423 - protein, 77 aa, Glycine max
  peptide (1)..(77): Ceres Seq. ID no. 12608431
  misc_feature (1)..(76): NCBI GI NO: 6466959 NR Description: unknown protein [Arabidopsis thaliana]
  misc_feature (1)..(76): NCBI GI NO: 18398048 NR Description: auxin-regulated protein; protein id: At3g07760
MSMFTTEQILRFIRRCHMKWGDFITLCKELRRIKVACLKGEQKVRRPWWAPACLSTVFLKVAKSNRQSRVVSLKLEP

SEQ ID NO: 9424 - protein, 75 aa, Glycine max
  peptide (1)..(75): Ceres Seq. ID no. 12608432
  misc_feature (1)..(74): NCBI GI NO: 6466959 NR Description: unknown protein [Arabidopsis thaliana]
  misc_feature (1)..(74): NCBI GI NO: 18398048 NR Description: auxin-regulated protein; protein id: At3g07760
MFTTEQILRFIRRCHMKWGDFITLCKELRRIKVACLKGEQKVRRPWWAPACLSTVFLKVAKSNRQSRVVSLKLEP

SEQ ID NO: 9425 - DNA, 949 bp, Glycine max
  misc_feature (1)..(949): Ceres Seq. ID no. 13639640
aaagataatgtctagacacaaactgctacgccaaaatactagcttcaacgcagcttgtctttgactcttctttcttggatcttgaagagccatttagttagctagatctgagtttaggaaacctaacaaactacacataactacttcactcacttgtgtttgagcctttccaccatcaaaatgctgagtgaaagttccaacacccacaactcatctaaaatgtccttcagaataacgaaggaggatgggttcttctctaggctaatagccaaggaaactaccacccccaactcttcttcaaggatcttctactacggagaaacttcggttgcggttcctttcacatgggaggcacaacctggtaccccgaaacaccctttgtcagagacatctttgccacctcttacacccccaccttcctacttttcaagccccaaaaagtcccacaacaccaagagaagaaactactactcaaataaggccagcaacatattttcaagcatttttctgaggcttgtaggatcaagaaagtctcttcataatcatcatcatgtgtcaccatcgtcatcttggtcgtcaccttcttcatcgtcttcatcttcttcttcgtggtctttggcgcattataataataataataataactcatcgccctcgttttccatgagagacaaaggtcgaggtcaaggaggaagaagcagcaaacacaacaaatgttctaatggatttagaggctgctatccctttggcaacatgaggaacgcaaatgtaagccatggtagtgtggactaattaattagttagtttaatttgatctattttggaaattaactattctgcatgattttaatatttttgtagagatcttcgaaagtttatatagctgctaagtgctaagtgtatttattggaagatgttagtgttggcctgggatgtcccccccttttcc

SEQ ID NO: 9426 - protein, 203 aa, Glycine max
  peptide (1)..(203): Ceres Seq. ID no. 13639641
  misc_feature (26)..(201): NCBI GI NO: 18405403 NR Description: expressed protein [Arabidopsis thaliana]
  misc_feature (26)..(201): NCBI GI NO: 21537311 NR Description: unknown [Arabidopsis thaliana]
  misc_feature (4)..(173): NCBI GI NO: 34896128 NR Description: P0701D05.18
  misc_feature (1)..(187): NCBI GI NO: 38566620 NR Description: At5g01790 [Arabidopsis thaliana]
  misc_feature (39)..(187): NCBI GI NO: 15241064 NR Description: expressed protein [Arabidopsis thaliana]
  misc_feature (44)..(179): NCBI GI NO: 15222240 NR Description: hypothetical protein [Arabidopsis thaliana]
MLSESSNTHNSSKMSFRITKEDGFFSRLIAKETTTPNSSSRIFYYGETSVAVPFTWEAQPGTPKHPLSETSLPPLTPPPSYFSSPKKSHNTKRRNYYSNKASNIFSSIFLRLVGSRKSLHNHHHVSPSSSWSSPSSSSSSSSSWSLAHYNNNNNNSSPSFSMRDKGRGQGGRSSKHNKCSNGFRGCYPFGNMRNANVSHGSVD

SEQ ID NO: 9427 - protein, 190 aa, Glycine max
  peptide (1)..(190): Ceres Seq. ID no. 13639642
  misc_feature (13)..(188): NCBI GI NO: 18405403 NR Description: expressed protein [Arabidopsis thaliana]
  misc_feature (13)..(188): NCBI GI NO: 21537311 NR Description: unknown [Arabidopsis thaliana]
  misc_feature (1)..(160): NCBI GI NO: 34896128 NR Description: P0701D05.18
  misc_feature (1)..(174): NCBI GI NO: 38566620 NR Description: At5g01790 [Arabidopsis thaliana]
  misc_feature (26)..(174): NCBI GI NO: 15241064 NR Description: expressed protein [Arabidopsis thaliana]
  misc_feature (31)..(166): NCBI GI NO: 15222240 NR Description: hypothetical protein [Arabidopsis thaliana]
MSFRITKEDGFFSRLIAKETTTPNSSSRIFYYGETSVAVPFTWEAQPGTPKHPLSETSLPPLTPPPSYFSSPKKSHNTKRRNYYSNKASNIFSSIFLRLVGSRKSLHNHHHVSPSSSWSSPSSSSSSSSSWSLAHYNNNNNNSSPSFSMRDKGRGQGGRSSKHNKCSNGFRGCYPFGNMRNANVSHGSVD

SEQ ID NO: 9428 - DNA, 749 bp, Glycine max
  misc_feature (1)..(749): Ceres Seq. ID no. 15173273
ctctctctctctctcctctaaaaaaaacacctaatctgatctgagttcctgacatgtccatcgaatttgattctgaatccattcccactcccacggcccaagcccaagcccaggagcgatccaactctcgctgcgccttgttattttcttcctacaactgcttcggcggccaacgacgtcgttcctcatggtgggagcgcgtccgctcccactcccactccgctccagcctcagccggtgaccggtggtggtcgcgtgggctcagggcgctgaagaagcttcgcgagtggtcggagatcgtagcggggcctaagtggaagaccttcattcgcaggttcaaccgcaaccgccccaacaaacgcatacccacgtaccagtatgaccccttcagttacgccctcaacttcgacgaggggcctaacggggatttcaaccaccaccacgacgatgctgcgcttcgcaatttctccacgcgctacgctgccgcgaacaacgtcaagtcgctttcccccaaggcccgtgactgcgatgacgccgttttggtgtgagtggtgtggagtggccacgcggtgtttggtttgtggcttagcttcagtccgaaaaggggcaggagtgggtgccccttcgcgtcattatttagttttatttttttgcttaaattacttattttttctttatattttcatgatttttttaattttttttagtcttgtaataatttttttgaaagtgatatttttagcttttac

SEQ ID NO: 9429 - protein, 164 aa, Glycine max
  peptide (1)..(164): Ceres Seq. ID no. 15173274
  misc_feature (43)..(159): NCBI GI NO: 15228321 NR Description: hypothetical protein [Arabidopsis thaliana]
  misc_feature (36)..(144): NCBI GI NO: 10177465 NR Description: gene_id:MQB2
  misc_feature (36)..(144): NCBI GI NO: 15241990 NR Description: expressed protein [Arabidopsis thaliana]
  misc_feature (44)..(144): NCBI GI NO: 11357718 NR Description: hypothetical protein F2G14_10 - Arabidopsisthaliana
  misc_feature (44)..(144): NCBI GI NO: 30685100 NR Description: expressed protein [Arabidopsis thaliana]
  misc_feature (41)..(98): NCBI GI NO: 15232117 NR Description: expressed protein [Arabidopsis thaliana]
  misc_feature (36)..(124): NCBI GI NO: 15238747 NR Description: expressed protein [Arabidopsis thaliana]
MSIEFDSESIPTPTAQAQAQERSNSRCALLFSSYNCFGGQRRRSSWWERVRSHSHSAPASAGDRWWSRGLRALKKLREWSEIVAGPKWKTFIRRFNRNRPNKRIPTYQYDPFSYALNFDEGPNGDFNHHHDDAALRNFSTRYAAANNVKSLSPKARDCDDAVLV

SEQ ID NO: 9430 - protein, 123 aa, Glycine max
  peptide (1)..(123): Ceres Seq. ID no. 15173275
  misc_feature (1)..(68): NCBI GI NO: 280630 NR Description: larval glue protein Lgp-1 precursor - fruit fly
MTPSVTPSTSTRGLTGISTTTTTMLRFAISPRATLPRTTSSRFPPRPVTAMTPFWCEWCGVATRCLVCGLASVRKGAGVGAPSRHYLVLFFCLNYLFFLYIFMIFLIFFSLVIIFLKVIFLAF

SEQ ID NO: 9431 - protein, 100 aa, Glycine max
  peptide (1)..(100): Ceres Seq. ID no. 15173276
  misc_feature (1)..(45): NCBI GI NO: 280630 NR Description: larval glue protein Lgp-1 precursor - fruit fly
MLRFAISPRATLPRTTSSRFPPRPVTAMTPFWCEWCGVATRCLVCGLASVRKGAGVGAPSRHYLVLFFCLNYLFFLYIFMIFLIFFSLVIIFLKVIFLAF

SEQ ID NO: 9432 - DNA, 1026 bp, Glycine max
  misc_feature (1)..(1026): Ceres Seq. ID no. 15168588
acacaagacactcaaattacatggtcatagtgtacacctagttaggcaaacacaccaaacaccaaacaccaaactagttggctcaattctctttgaatggctttggaggctttgaattcaccaacagcagccaccactccgttccgtggctaccaagaagaggaggaggacgaggaggctgaccttcacttacgtgagccttgggctaaaaggaaacgctccaaacgaccgcgttttgagacggaggaagagtacctcgctctttgcctcatcatgctcgcacaaagcggtaacaccagaaacatccacaacaacaacacccaattaccgtcttcttcactgtcagacaaagaagcgtcgccgccggtgaaactaacacacaggtgcaccgtttgcaacaaggcctttggttcttatcaagcactcggtggacacaaggccagccaccgcaaggcctcgtcggaatccaaccccaccgcctccgtctctgccctagccaacgacagcgtttctgcttccaccgtcggcggcggaaggatgcacgagtgttccatctgtcacaagagtttccctaccggtcaggccctgggtggccacaagcgctgccactacgacggcgggaacaaccacagtaacagcaacgccaacggaaacaacagcagcggcgccactacctccgacggcggcgctgcctcctcctcccacacgctccgtgggtttgacctgaaccttccggcgccgctgacggagttctggtcgccgatggggtttgatttcgggaagaagaaggtaggcggtgaacaagaggtggaaagcccgttgccggtaaccgccaagaggccgcgtttgtttacaggggaagatgatgaaaccgcgtagatttgtttgcagaattttattttaaattgattgaaattgaatttgttgctggtatatcgcgaatatgattatgaattcaaaccagttagtttaattttcattttatgtttttttttagtatataggtgggattgggattttgtttct

SEQ ID NO: 9433 - protein, 260 aa, Glycine max
  peptide (1)..(260): Ceres Seq. ID no. 15168589
  misc_feature (149)..(171): Pfam Name: Pfam Description:  Zinc finger, C2H2 type
  misc_feature (1)..(251): NCBI GI NO: 4666360 NR Description: zinc-finger protein 1 [Datisca glomerata]
  misc_feature (1)..(251): NCBI GI NO: 33331578 NR Description: zinc finger protein [Capsicum annuum]
  misc_feature (1)..(251): NCBI GI NO: 439493 NR Description: zinc-finger protein [Petunia x hybrida]
  misc_feature (1)..(252): NCBI GI NO: 7228329 NR Description: putative TFIIIA
  misc_feature (1)..(252): NCBI GI NO: 7488707 NR Description: probable zinc finger protein SCOF-1
  misc_feature (1)..(251): NCBI GI NO: 7489215 NR Description: zinc-finger protein
  misc_feature (1)..(251): NCBI GI NO: 439491 NR Description: zinc-finger DNA binding protein
  misc_feature (1)..(248): NCBI GI NO: 15237692 NR Description: c2h2 zinc finger transcription factor -related
  misc_feature (1)..(214): NCBI GI NO: 7488533 NR Description: probable zinc-finger protein-1 - turnip
  misc_feature (31)..(253): NCBI GI NO: 12698882 NR Description: zinc finger transcription factor ZF1
MALEALNSPTAATTPFRGYQEEEEDEEADLHLREPWAKRKRSKRPRFETEEEYLALCLIMLAQSGNTRNIHNNNTQLPSSSLSDKEASPPVKLTHRCTVCNKAFGSYQALGGHKASHRKASSESNPTASVSALANDSVSASTVGGGRMHECSICHKSFPTGQALGGHKRCHYDGGNNHSNSNANGNNSSGATTSDGGAASSSHTLRGFDLNLPAPLTEFWSPMGFDFGKKKVGGEQEVESPLPVTAKRPRLFTGEDDETA

SEQ ID NO: 9434 - protein, 201 aa, Glycine max
  peptide (1)..(201): Ceres Seq. ID no. 15168590
  misc_feature (90)..(112): Pfam Name: Pfam Description:  Zinc finger, C2H2 type
  misc_feature (1)..(192): NCBI GI NO: 4666360 NR Description: zinc-finger protein 1 [Datisca glomerata]
  misc_feature (1)..(192): NCBI GI NO: 33331578 NR Description: zinc finger protein [Capsicum annuum]
  misc_feature (1)..(192): NCBI GI NO: 439493 NR Description: zinc-finger protein [Petunia x hybrida]
  misc_feature (1)..(193): NCBI GI NO: 7228329 NR Description: putative TFIIIA
  misc_feature (1)..(193): NCBI GI NO: 7488707 NR Description: probable zinc finger protein SCOF-1
  misc_feature (1)..(192): NCBI GI NO: 7489215 NR Description: zinc-finger protein
  misc_feature (1)..(192): NCBI GI NO: 439491 NR Description: zinc-finger DNA binding protein
  misc_feature (1)..(189): NCBI GI NO: 15237692 NR Description: c2h2 zinc finger transcription factor -related
  misc_feature (1)..(155): NCBI GI NO: 7488533 NR Description: probable zinc-finger protein-1 - turnip
  misc_feature (1)..(194): NCBI GI NO: 12698882 NR Description: zinc finger transcription factor ZF1
MLAQSGNTRNIHNNNTQLPSSSLSDKEASPPVKLTHRCTVCNKAFGSYQALGGHKASHRKASSESNPTASVSALANDSVSASTVGGGRMHECSICHKSFPTGQALGGHKRCHYDGGNNHSNSNANGNNSSGATTSDGGAASSSHTLRGFDLNLPAPLTEFWSPMGFDFGKKKVGGEQEVESPLPVTAKRPRLFTGEDDETA

SEQ ID NO: 9435 - DNA, 1292 bp, Glycine max
  misc_feature (1)..(1292): Ceres Seq. ID no. 14315330
ttcctaaaaggctgtccctgtccatgttgagcgcgtttgttcacgcgccttcaatttgttcttccaacaccctcagtcattgtgtgagtccgaagctcaacctctctcgctcttcaatggccgtatcctctattcgaatcgccgtcgtcggtgatgtgcatgattgctggaaccttgaacaagattcgaaagcacttgagctcttgcagccagatttggtgctgtttacaggtgattttggtgaagaaaatcttgaagtcattaagagtgttgtgaatcttgaatttgctaaagcagttatattgggaaaccacgatgcctggtttactaaacagttttctggaagcaaggagaaggataaagttcagcttcagctagaatgccttggtaaggagcacgtggcttatcaacgttcagacttccctcagataaaagtaagcgttgttggtggacgaccattttctattgggggtaaaccaatgtttcggaaaaagcttcttttggcaagatacggagtcaaagacatggatgagagtgctaagagaatccagaaagctgctcttggaacaccagaggaccattttcttatattacttgcacataatggacccacaggccttggttctgattcaaatgatatatgtggaaaggattgggaatttgagggtgatggtgatcatggtgacccagatctagcacaagcaatatccttgctaaaggagaacaatcagatatccattccattggttgtgttcggtcacatgcacaaagagctggcatatggcaatggctttaggaaaatgattgtggttggcgctgataacaccatatacttgaatggggcaattgttccaagggtcaaaaggttgggtggtgatgaagacaagaaaagcttagatgatgaaagtgcccttgcctcaccagaggccaaaggtacaagaagagcctttactttagttgagatttcggaaggaagagttgccaagattgcagaaagttgggtctcggttgtcgaagataggaccacattagaagaagagcacatactatttgagagcagctaggatcctcatcctccacatataggttcctgcttcagtcacatggattttaatgcgcatagataaatgcagccaggggtgaattatgtctcgatactcatgaatacatcgtatttaatgttagtaactactgtatagacttgataaatggtacatgctctgataccaattcccccttatctaggtggtgatttattgcttgtaccgctcctccattctatgtggcaattc

SEQ ID NO: 9436 - protein, 353 aa, Glycine max
  peptide (1)..(353): Ceres Seq. ID no. 14315331
  misc_feature (44)..(255): Pfam Name: Pfam Description:  Calcineurin-like phosphoesterase
  misc_feature (139)..(351): NCBI GI NO: 8777321 NR Description: contains similarity tophosphoesterase~gene_id:MCK7
  misc_feature (39)..(69): NCBI GI NO: 8777321 NR Description: contains similarity tophosphoesterase~gene_id:MCK7
  misc_feature (123)..(351): NCBI GI NO: 30697022 NR Description: contains similarity to phosphoesterase
  misc_feature (35)..(293): NCBI GI NO: 23124236 NR Description: hypothetical protein [Nostoc punctiforme]
  misc_feature (46)..(335): NCBI GI NO: 16331583 NR Description: hypothetical protein [Synechocystis sp. PCC 6803]
  misc_feature (43)..(346): NCBI GI NO: 17232166 NR Description: putative transcripton factor for heterocystdifferentiation DevT
  misc_feature (44)..(353): NCBI GI NO: 23042127 NR Description: hypothetical protein
  misc_feature (41)..(293): NCBI GI NO: 33865849 NR Description: putative transcripton factor
  misc_feature (68)..(285): NCBI GI NO: 33240462 NR Description: Predicted phosphoesterase
PKRLSLSMLSAFVHAPSICSSNTLSHCVSPKLNLSRSSMAVSSIRIAVVGDVHDCWNLEQDSKALELLQPDLVLFTGDFGEENLEVIKSVVNLEFAKAVILGNHDAWFTKQFSGSKEKDKVQLQLECLGKEHVAYQRSDFPQIKVSVVGGRPFSIGGKPMFRKKLLLARYGVKDMDESAKRIQKAALGTPEDHFLILLAHNGPTGLGSDSNDICGKDWEFEGDGDHGDPDLAQAISLLKENNQISIPLVVFGHMHKELAYGNGFRKMIVVGADNTIYLNGAIVPRVKRLGGDEDKKSLDDESALASPEAKGTRRAFTLVEISEGRVAKIAESWVSVVEDRTTLEEEHILFESS

SEQ ID NO: 9437 - protein, 346 aa, Glycine max
  peptide (1)..(346): Ceres Seq. ID no. 14315332
  misc_feature (37)..(248): Pfam Name: Pfam Description:  Calcineurin-like phosphoesterase
  misc_feature (132)..(344): NCBI GI NO: 8777321 NR Description: contains similarity tophosphoesterase~gene_id:MCK7
  misc_feature (32)..(62): NCBI GI NO: 8777321 NR Description: contains similarity tophosphoesterase~gene_id:MCK7
  misc_feature (116)..(344): NCBI GI NO: 30697022 NR Description: contains similarity to phosphoesterase
  misc_feature (28)..(286): NCBI GI NO: 23124236 NR Description: hypothetical protein [Nostoc punctiforme]
  misc_feature (39)..(328): NCBI GI NO: 16331583 NR Description: hypothetical protein [Synechocystis sp. PCC 6803]
  misc_feature (36)..(339): NCBI GI NO: 17232166 NR Description: putative transcripton factor for heterocystdifferentiation DevT
  misc_feature (37)..(346): NCBI GI NO: 23042127 NR Description: hypothetical protein
  misc_feature (34)..(286): NCBI GI NO: 33865849 NR Description: putative transcripton factor
  misc_feature (61)..(278): NCBI GI NO: 33240462 NR Description: Predicted phosphoesterase
MLSAFVHAPSICSSNTLSHCVSPKLNLSRSSMAVSSIRIAVVGDVHDCWNLEQDSKALELLQPDLVLFTGDFGEENLEVIKSVVNLEFAKAVILGNHDAWFTKQFSGSKEKDKVQLQLECLGKEHVAYQRSDFPQIKVSVVGGRPFSIGGKPMFRKKLLLARYGVKDMDESAKRIQKAALGTPEDHFLILLAHNGPTGLGSDSNDICGKDWEFEGDGDHGDPDLAQAISLLKENNQISIPLVVFGHMHKELAYGNGFRKMIVVGADNTIYLNGAIVPRVKRLGGDEDKKSLDDESALASPEAKGTRRAFTLVEISEGRVAKIAESWVSVVEDRTTLEEEHILFESS

SEQ ID NO: 9438 - protein, 315 aa, Glycine max
  peptide (1)..(315): Ceres Seq. ID no. 14315333
  misc_feature (6)..(217): Pfam Name: Pfam Description:  Calcineurin-like phosphoesterase
  misc_feature (101)..(313): NCBI GI NO: 8777321 NR Description: contains similarity tophosphoesterase~gene_id:MCK7
  misc_feature (1)..(31): NCBI GI NO: 8777321 NR Description: contains similarity tophosphoesterase~gene_id:MCK7
  misc_feature (85)..(313): NCBI GI NO: 30697022 NR Description: contains similarity to phosphoesterase
  misc_feature (1)..(255): NCBI GI NO: 23124236 NR Description: hypothetical protein [Nostoc punctiforme]
  misc_feature (8)..(297): NCBI GI NO: 16331583 NR Description: hypothetical protein [Synechocystis sp. PCC 6803]
  misc_feature (5)..(308): NCBI GI NO: 17232166 NR Description: putative transcripton factor for heterocystdifferentiation DevT
  misc_feature (6)..(315): NCBI GI NO: 23042127 NR Description: hypothetical protein
  misc_feature (3)..(255): NCBI GI NO: 33865849 NR Description: putative transcripton factor
  misc_feature (30)..(247): NCBI GI NO: 33240462 NR Description: Predicted phosphoesterase
MAVSSIRIAVVGDVHDCWNLEQDSKALELLQPDLVLFTGDFGEENLEVIKSVVNLEFAKAVILGNHDAWFTKQFSGSKEKDKVQLQLECLGKEHVAYQRSDFPQIKVSVVGGRPFSIGGKPMFRKKLLLARYGVKDMDESAKRIQKAALGTPEDHFLILLAHNGPTGLGSDSNDICGKDWEFEGDGDHGDPDLAQAISLLKENNQISIPLVVFGHMHKELAYGNGFRKMIVVGADNTIYLNGAIVPRVKRLGGDEDKKSLDDESALASPEAKGTRRAFTLVEISEGRVAKIAESWVSVVEDRTTLEEEHILFESS

SEQ ID NO: 9439 - DNA, 1460 bp, Glycine max
  misc_feature (1)..(1460): Ceres Seq. ID no. 15224973
ctggataacatttcaaccacttactccactcttgagtccttcacactcgacgctatcaccggccggtaacgtcacacaaacccaaaatcacaatggcgttctcatcgtccctatggtcttccctcttcgttgcttacccaaacagaaccgccatttccactcgattctctcacaaaccgcccaaactccctctctcgccggcgttcgccatcccgccgctctccacggccactgcggcggacgtctcgggcgccatcgacgggactacgatcgcggtggtgagcgggggattcgtggcggcactggcggcggtgctgtcgctgacggacccggagcggcggcggcagttacaggcggaggaggtgggcggcggcgacaaggaggtggtgagggagtacttcaacaactccgggttccagcgctggaagaagatctacggcgacaccgacgaggtgaaccgggttcagcgcgacattaggttgggccacgccaagaccgtggagaacacgctgagcatgttgaaggacgaaggttcccttcagggcgttacggtttgcgacgctgggtgcggtaccggttctctctctattcctcttgccaaagagggcgctgttgtgttcgccagtgatatctccgccgctatggttgccgaggctgagaaacaggcaaaagaacagcttgcaaccagtgaagatggatctgtgcccgtgatgcctaagtttgtagtgaaggatttagagagcttggatggcaagtatgatacggtggtctgcctcgatgtcttgattcattacccacaacataaagccgatgggatgattgcacaccttgcatcattggccaacaaccgattgattctgagttttgccccaaagacgttttattatgatctgctaaagagggttggagagttgttccctggtccttcaaaggcaacaagagcatatcttcactctgaggcagatgtagagagagcattgcaaaaggttggctggaccataaggaagagaggcttaaccactacccaattttactttgctaggcttattgaggctgttcctatgtagtggggattgaaaggtgagttttgcatgattagaggaaattcttagtgtaaattgttaggccttctattaagtgattttgtatgctattatcctccacatggaccacatataattctattgtgtatatttcttcatagcctagaagatgctgacgaattgaggctatgttttctgggagaaatagagtgtaagtggttcatgataatttgtgtggagctagtgcctagtgagttaccggtccattgggttggtggaatggaggcaagctccctttaagctgttcagaagttacagcgattattactcaagggtagtaattagttcctgtattgcattttttttataacaatgataacgataataataataataataataatatcacactttttg

SEQ ID NO: 9440 - protein, 324 aa, Glycine max
  peptide (1)..(324): Ceres Seq. ID no. 15224974
  misc_feature (1)..(323): NCBI GI NO: 7839365 NR Description: S-adenosyl-L-methionine Mg-protoporphyrin IXmethyltranserase
  misc_feature (16)..(324): NCBI GI NO: 15234905 NR Description: magnesium-protoporphyrin O-methyltransferase
  misc_feature (18)..(324): NCBI GI NO: 6006382 NR Description: Similar to magnesium-protoporphyrin IXmethyltransferase
  misc_feature (95)..(321): NCBI GI NO: 17230693 NR Description: Mg-protoporphyrin IX methyl transferase
  misc_feature (95)..(321): NCBI GI NO: 23130334 NR Description: COG2227: 2-polyprenyl-3-methyl-5-hydroxy-6-metoxy-1
  misc_feature (95)..(322): NCBI GI NO: 16332013 NR Description: Mg-protoporphyrin IX methyl transferase
  misc_feature (95)..(322): NCBI GI NO: 7470730 NR Description: magnesium-protoporphyrin IX methyltransferase (EC2
  misc_feature (79)..(323): NCBI GI NO: 22297994 NR Description: Mg-protoporphyrin IX methyl transferase
  misc_feature (95)..(322): NCBI GI NO: 23040051 NR Description: COG2227: 2-polyprenyl-3-methyl-5-hydroxy-6-metoxy-1
  misc_feature (95)..(319): NCBI GI NO: 37523971 NR Description: Mg-protoporphyrin IX methyl transferase
MAFSSSLWSSLFVAYPNRTAISTRFSHKPPKLPLSPAFAIPPLSTATAADVSGAIDGTTIAVVSGGFVAALAAVLSLTDPERRRQLQAEEVGGGDKEVVREYFNNSGFQRWKKIYGDTDEVNRVQRDIRLGHAKTVENTLSMLKDEGSLQGVTVCDAGCGTGSLSIPLAKEGAVVFASDISAAMVAEAEKQAKEQLATSEDGSVPVMPKFVVKDLESLDGKYDTVVCLDVLIHYPQHKADGMIAHLASLANNRLILSFAPKTFYYDLLKRVGELFPGPSKATRAYLHSEADVERALQKVGWTIRKRGLTTTQFYFARLIEAVPM

SEQ ID NO: 9441 - protein, 183 aa, Glycine max
  peptide (1)..(183): Ceres Seq. ID no. 15224975
  misc_feature (1)..(182): NCBI GI NO: 7839365 NR Description: S-adenosyl-L-methionine Mg-protoporphyrin IXmethyltranserase
  misc_feature (1)..(183): NCBI GI NO: 15234905 NR Description: magnesium-protoporphyrin O-methyltransferase
  misc_feature (1)..(183): NCBI GI NO: 6006382 NR Description: Similar to magnesium-protoporphyrin IXmethyltransferase
  misc_feature (1)..(180): NCBI GI NO: 17230693 NR Description: Mg-protoporphyrin IX methyl transferase
  misc_feature (1)..(180): NCBI GI NO: 23130334 NR Description: COG2227: 2-polyprenyl-3-methyl-5-hydroxy-6-metoxy-1
  misc_feature (1)..(181): NCBI GI NO: 16332013 NR Description: Mg-protoporphyrin IX methyl transferase
  misc_feature (1)..(181): NCBI GI NO: 7470730 NR Description: magnesium-protoporphyrin IX methyltransferase (EC2
  misc_feature (1)..(182): NCBI GI NO: 22297994 NR Description: Mg-protoporphyrin IX methyl transferase
  misc_feature (1)..(181): NCBI GI NO: 23040051 NR Description: COG2227: 2-polyprenyl-3-methyl-5-hydroxy-6-metoxy-1
  misc_feature (1)..(178): NCBI GI NO: 37523971 NR Description: Mg-protoporphyrin IX methyl transferase
MLKDEGSLQGVTVCDAGCGTGSLSIPLAKEGAVVFASDISAAMVAEAEKQAKEQLATSEDGSVPVMPKFVVKDLESLDGKYDTVVCLDVLIHYPQHKADGMIAHLASLANNRLILSFAPKTFYYDLLKRVGELFPGPSKATRAYLHSEADVERALQKVGWTIRKRGLTTTQFYFARLIEAVPM

SEQ ID NO: 9442 - DNA, 1773 bp, Glycine max
  misc_feature (1)..(1773): Ceres Seq. ID no. 12608463
aaccacaatgcaccaaaacaactctttttcttcttcttcttcttcaccattctcaattcttttcttcttcttctaacatgggaccctcttccacgcacactcctcgttcccctacgtacttaattccctgcgttatagctcttgccctcttctccctcactggactcctcctctacaaggtggacgacgtcgcttcgcgcaccggaacggtggtgggtcacaacctagaaccgacgccgtggcacgtcttccctcacaagcccttcgacgaggagtcccgccagcagcgcgcgtacaaaatcctacaatgctcctacctgacgtgccgctacgccgctgaagccctcggcggagcacggcggagaaccggcggcggcagggaggagtgccccaagtttttccgggcaatccatcgggacctggcgccgtggtcggagagccggatatcgaaggcgcacgtggcggcggcgcagcggtacgcggcgttcagagtggtgattgttgaagggaaggtgtttgtggattggtactatgcttgtgtgcagagtagggcaatgtttacactgtgggggttgttgcagcttatgaggaggtaccctgggatggtgccagatgtggatatgatgtttgattgcatggataaaccttctgttaataagactgaacaccaagcaatgcctttgcctctatttcggtattgcaccacaaaggaacactttgacatcccttttccggattggtctttctggggttggtcagaaataaacatacgaccctggcaggaagagttcccagatatcaagcgaggttctcgatctgttacttggaaaaataagttaccatgggcatactggaaaggaaaccctgatgttgcatctcctattcgtactgaattaataaattgtaatgattctaggaagtggggagcagagattatgcgccaggattggggggaagcagctagaaatggctttaagcagtcaaaactttcagatcagtgtaatcatcggtataagatctatgctgaagggtatgcatggtctgtgagtttgaaatatattctctcatgtggttctgttgcattgattatatcaccccagtatgaagattttttcagccgtggccttattccaaaccataatttttggcttgttgatcctctaaatctatgtccatctataaagtatgctgtagaatgggggaaccaacacccagtagaggcagaggctatagggaaaagagggcaggatttaatggaaagcttgaacatgaatcgaatttatgaatacatgttccaccttatttctgattactcaaaacttcaagacttcaagcctactccaccaccaactgccctggaagtttgtgtagaatctgtgctttgctttgctgatgagaagcagaggatgttcctcaataaatcatttacattcccttcacataaacctccttgcaatctcaaacctgcctagttatatcacctcttagtttacacaacaaatatactaaaggattttacacatccaagaatatggaaactcccagtgaacattacacgttatttaatagtgtaaaaatatagtgccttttaggttatcatttacaagatttagctttagtaataggccatcatcatttatcagaaaacaacaccacaggaatttcattttcattctcttcccggtcattcttttgttactctgttttttgttttcttatctttgtctttccctttttttattttgcataaatttcttaaatcacaactaaatt

SEQ ID NO: 9443 - protein, 489 aa, Glycine max
  peptide (1)..(489): Ceres Seq. ID no. 12608464
  misc_feature (128)..(484): Pfam Name: DUF821 Pfam Description: Arabidopsis thaliana protein of unknown function
  misc_feature (33)..(484): NCBI GI NO: 15222341 NR Description: hypothetical protein; protein id: At1g07220.1
  misc_feature (129)..(489): NCBI GI NO: 15237842 NR Description: putative protein; protein id: At5g23850.1
  misc_feature (129)..(488): NCBI GI NO: 15229061 NR Description: putative protein; protein id: At3g48980.1
  misc_feature (129)..(489): NCBI GI NO: 7486461 NR Description: hypothetical protein At2g45830
  misc_feature (129)..(488): NCBI GI NO: 38346998 NR Description: OSJNBb0039L24.21
  misc_feature (75)..(488): NCBI GI NO: 15222413 NR Description: hypothetical protein; protein id: At1g63420.1
  misc_feature (153)..(488): NCBI GI NO: 21742339 NR Description: OSJNBb0020O11.18
  misc_feature (129)..(488): NCBI GI NO: 15233070 NR Description: putative protein; protein id: At3g61270.1
  misc_feature (129)..(488): NCBI GI NO: 38637028 NR Description: unknown protein
  misc_feature (156)..(489): NCBI GI NO: 30690136 NR Description: expressed protein [Arabidopsis thaliana]
PQCTKTTLFLLLLLHHSQFFSSSSNMGPSSTHTPRSPTYLIPCVIALALFSLTGLLLYKVDDVASRTGTVVGHNLEPTPWHVFPHKPFDEESRQQRAYKILQCSYLTCRYAAEALGGARRRTGGGREECPKFFRAIHRDLAPWSESRISKAHVAAAQRYAAFRVVIVEGKVFVDWYYACVQSRAMFTLWGLLQLMRRYPGMVPDVDMMFDCMDKPSVNKTEHQAMPLPLFRYCTTKEHFDIPFPDWSFWGWSEINIRPWQEEFPDIKRGSRSVTWKNKLPWAYWKGNPDVASPIRTELINCNDSRKWGAEIMRQDWGEAARNGFKQSKLSDQCNHRYKIYAEGYAWSVSLKYILSCGSVALIISPQYEDFFSRGLIPNHNFWLVDPLNLCPSIKYAVEWGNQHPVEAEAIGKRGQDLMESLNMNRIYEYMFHLISDYSKLQDFKPTPPPTALEVCVESVLCFADEKQRMFLNKSFTFPSHKPPCNLKPA

SEQ ID NO: 9444 - protein, 464 aa, Glycine max
  peptide (1)..(464): Ceres Seq. ID no. 12608465
  misc_feature (103)..(459): Pfam Name: DUF821 Pfam Description: Arabidopsis thaliana protein of unknown function
  misc_feature (8)..(459): NCBI GI NO: 15222341 NR Description: hypothetical protein; protein id: At1g07220.1
  misc_feature (104)..(464): NCBI GI NO: 15237842 NR Description: putative protein; protein id: At5g23850.1
  misc_feature (104)..(463): NCBI GI NO: 15229061 NR Description: putative protein; protein id: At3g48980.1
  misc_feature (104)..(464): NCBI GI NO: 7486461 NR Description: hypothetical protein At2g45830
  misc_feature (104)..(463): NCBI GI NO: 38346998 NR Description: OSJNBb0039L24.21
  misc_feature (50)..(463): NCBI GI NO: 15222413 NR Description: hypothetical protein; protein id: At1g63420.1
  misc_feature (128)..(463): NCBI GI NO: 21742339 NR Description: OSJNBb0020O11.18
  misc_feature (104)..(463): NCBI GI NO: 15233070 NR Description: putative protein; protein id: At3g61270.1
  misc_feature (104)..(463): NCBI GI NO: 38637028 NR Description: unknown protein
  misc_feature (131)..(464): NCBI GI NO: 30690136 NR Description: expressed protein [Arabidopsis thaliana]
MGPSSTHTPRSPTYLIPCVIALALFSLTGLLLYKVDDVASRTGTVVGHNLEPTPWHVFPHKPFDEESRQQRAYKILQCSYLTCRYAAEALGGARRRTGGGREECPKFFRAIHRDLAPWSESRISKAHVAAAQRYAAFRVVIVEGKVFVDWYYACVQSRAMFTLWGLLQLMRRYPGMVPDVDMMFDCMDKPSVNKTEHQAMPLPLFRYCTTKEHFDIPFPDWSFWGWSEINIRPWQEEFPDIKRGSRSVTWKNKLPWAYWKGNPDVASPIRTELINCNDSRKWGAEIMRQDWGEAARNGFKQSKLSDQCNHRYKIYAEGYAWSVSLKYILSCGSVALIISPQYEDFFSRGLIPNHNFWLVDPLNLCPSIKYAVEWGNQHPVEAEAIGKRGQDLMESLNMNRIYEYMFHLISDYSKLQDFKPTPPPTALEVCVESVLCFADEKQRMFLNKSFTFPSHKPPCNLKPA

SEQ ID NO: 9445 - protein, 305 aa, Glycine max
  peptide (1)..(305): Ceres Seq. ID no. 12608466
  misc_feature (1)..(300): Pfam Name: DUF821 Pfam Description: Arabidopsis thaliana protein of unknown function
  misc_feature (1)..(300): NCBI GI NO: 15222341 NR Description: hypothetical protein; protein id: At1g07220.1
  misc_feature (1)..(305): NCBI GI NO: 15237842 NR Description: putative protein; protein id: At5g23850.1
  misc_feature (1)..(304): NCBI GI NO: 15229061 NR Description: putative protein; protein id: At3g48980.1
  misc_feature (1)..(305): NCBI GI NO: 7486461 NR Description: hypothetical protein At2g45830
  misc_feature (1)..(304): NCBI GI NO: 38346998 NR Description: OSJNBb0039L24.21
  misc_feature (1)..(304): NCBI GI NO: 15222413 NR Description: hypothetical protein; protein id: At1g63420.1
  misc_feature (1)..(304): NCBI GI NO: 21742339 NR Description: OSJNBb0020O11.18
  misc_feature (1)..(304): NCBI GI NO: 15233070 NR Description: putative protein; protein id: At3g61270.1
  misc_feature (1)..(304): NCBI GI NO: 38637028 NR Description: unknown protein
  misc_feature (1)..(305): NCBI GI NO: 30690136 NR Description: expressed protein [Arabidopsis thaliana]
MFTLWGLLQLMRRYPGMVPDVDMMFDCMDKPSVNKTEHQAMPLPLFRYCTTKEHFDIPFPDWSFWGWSEINIRPWQEEFPDIKRGSRSVTWKNKLPWAYWKGNPDVASPIRTELINCNDSRKWGAEIMRQDWGEAARNGFKQSKLSDQCNHRYKIYAEGYAWSVSLKYILSCGSVALIISPQYEDFFSRGLIPNHNFWLVDPLNLCPSIKYAVEWGNQHPVEAEAIGKRGQDLMESLNMNRIYEYMFHLISDYSKLQDFKPTPPPTALEVCVESVLCFADEKQRMFLNKSFTFPSHKPPCNLKPA

SEQ ID NO: 9446 - DNA, 714 bp, Glycine max
  misc_feature (1)..(714): Ceres Seq. ID no. 12612236
attattcaccgaaaaagaggatctgcagagtgagtgatggggattgcggcggctattggattgttgtcaccgtttccgttctattactgcctctggatttggccacagtggtgggtggacttgtgtggcagaggccgagaggcccgagatccatctaaggttatggcttacgtttcttacttcttgaagctcgttcagttcatctccctcttctatgtttcttctttccactggcctcctcctttctacttctggcccctcattgcctttggccaattcctaaatttcagggtttatcagctacttggtgagactggcacatactatggtgtacgctttggaaaaacaattccctgggtaactgaattcccttttggtgtcatcaaagatcctcagtacgttggcagcatcatgagcattcttgcatgcttttcgtgggttccttttcaatacattctcctttgggttttaggatatgtgtttatgatgcatgtggaatcaaaggaagatccatctactcgtgccaagccactccattgattgagtgaatttcagtagattagaaggaatttggaggatttagcagcacctgaggtgccaaattctttgtatcttgctgtttctttcctttgctctggaatgaacatctctattttatatgttctgattccagcaaattatttctaatgaattgcgaacttatttttgtttctc

SEQ ID NO: 9447 - protein, 167 aa, Glycine max
  peptide (1)..(167): Ceres Seq. ID no. 12612237
  misc_feature (1)..(166): NCBI GI NO: 18412906 NR Description: expressed protein; protein id: At1g80860
  misc_feature (1)..(166): NCBI GI NO: 21593732 NR Description: unknown [Arabidopsis thaliana]
  misc_feature (43)..(166): NCBI GI NO: 30699543 NR Description: expressed protein [Arabidopsis thaliana]
MGIAAAIGLLSPFPFYYCLWIWPQWWVDLCGRGREARDPSKVMAYVSYFLKLVQFISLFYVSSFHWPPPFYFWPLIAFGQFLNFRVYQLLGETGTYYGVRFGKTIPWVTEFPFGVIKDPQYVGSIMSILACFSWVPFQYILLWVLGYVFMMHVESKEDPSTRAKPLH

SEQ ID NO: 9448 - protein, 125 aa, Glycine max
  peptide (1)..(125): Ceres Seq. ID no. 12612238
  misc_feature (1)..(124): NCBI GI NO: 18412906 NR Description: expressed protein; protein id: At1g80860
  misc_feature (1)..(124): NCBI GI NO: 21593732 NR Description: unknown [Arabidopsis thaliana]
  misc_feature (1)..(124): NCBI GI NO: 30699543 NR Description: expressed protein [Arabidopsis thaliana]
MAYVSYFLKLVQFISLFYVSSFHWPPPFYFWPLIAFGQFLNFRVYQLLGETGTYYGVRFGKTIPWVTEFPFGVIKDPQYVGSIMSILACFSWVPFQYILLWVLGYVFMMHVESKEDPSTRAKPLH

SEQ ID NO: 9449 - DNA, 846 bp, Glycine max
  misc_feature (1)..(846): Ceres Seq. ID no. 15173278
cttgttcaaacaattccccaacattcaaagctacacttaatcttagccaaaaggcctataaaggtatatatacctttttttttctgatcaagattcaaaccctagatcagttttaatttcctagctatagttttattcatagagcaagaatgggaaacagcttaaggtgttgtttggcttgtgttcttccatgtggggctctagacttgattcgaatagtccatttaaacggctatgtggaagagattacacgtccaatcacagcaggagaggttctaaaagccaaccctaaccatgttctaagcaaacctagctctcaaggagtcgttcgtcggattttgatcctctcgccggagaccgagctcaagaggggcagcatatacttcttgatcccggaatcttcactgccggagaataaacggcacgccggaaagggaagcattggtggtgatagtggtataaaaaagaaagcatcaacaatgaaaagcaacaagggtagtagtgatgttgattattcttcactaccacaagggtacctcaaagtcactcacaaaggttctaaagagaagagatcgtcgtgccgggatcgccggaaaggccgcatcggaatatggaggcctcatttagagagtatattggaagattagtcggttttttgtgccggcggtcggtggccggaatccaacttggccggaaaagaagagaagaaaaagaaaaaaaaatgttcaattattgaaatatagcgacacgacttttttttttccctgtgttttataaatgtatgtgggaatttgattttgtggataaaaaagtttactttcccttcgaaattgtcttgctgagtgc

SEQ ID NO: 9450 - protein, 165 aa, Glycine max
  peptide (1)..(165): Ceres Seq. ID no. 15173279
  misc_feature (1)..(165): NCBI GI NO: 18390706 NR Description: expressed protein [Arabidopsis thaliana]
  misc_feature (1)..(165): NCBI GI NO: 15227725 NR Description: hypothetical protein [Arabidopsis thaliana]
  misc_feature (1)..(165): NCBI GI NO: 34896112 NR Description: P0701D05.10
  misc_feature (1)..(165): NCBI GI NO: 34907910 NR Description: P0439E11.22
  misc_feature (3)..(95): NCBI GI NO: 34909702 NR Description: B1131G08.9
  misc_feature (138)..(165): NCBI GI NO: 34909702 NR Description: B1131G08.9
  misc_feature (1)..(119): NCBI GI NO: 18396990 NR Description: expressed protein [Arabidopsis thaliana]
  misc_feature (62)..(164): NCBI GI NO: 18396990 NR Description: expressed protein [Arabidopsis thaliana]
MGNSLRCCLACVLPCGALDLIRIVHLNGYVEEITRPITAGEVLKANPNHVLSKPSSQGVVRRILILSPETELKRGSIYFLIPESSLPENKRHAGKGSIGGDSGIKKKASTMKSNKGSSDVDYSSLPQGYLKVTHKGSKEKRSSCRDRRKGRIGIWRPHLESILED

SEQ ID NO: 9451 - DNA, 1594 bp, Glycine max
  misc_feature (1)..(1594): Ceres Seq. ID no. 15177037
tcgcgcccacaagcaaaacagagagaaaaaagaaagcagaaatgggatcattcccaaaagcaaaacccaacaacactcacaccgacaccaacaccaacacccataacagggttatgggttttctcctagttttctttccggaagagaataacaatacaacaccaaccattgctaccaaaagtaccaaacccaaccttgtatcttcttctccctctccacattccttgaagagaattagttccagttccaacaatgcccttctctccaaagcccagtccactatctcaatatgcttcctcctcctcttcactaccctccttctcttcacactctccacattcgaacccacacaccacaaacctcgctccataccccccaaatccaaactccgcaaaaacacctcctcaagcgacgtcgctttcccctccactgcgctccagcgtatgggcacgctctaccgcagaggcacccgagccatgaacgacatcgtcgtttgccacgtacccgaagacactactcacgacgaattccgaatcttcctcagactcctccaccgctccggcctcacttccaaatccgacgtcgtcttcatcttcgtctctgcctcctcttcaaccactttcgctcacattgtccacgaagagaacacctcattcctctcgctcattaacctccacgctcagttgaactcgactcagtgggccaaaccgtccgagtcgaacttcgacgcgactcgtttcttgaaagctcccaagaaaggagaaccgctctggggaaagaaaattcggacgaattatagtggctcggaaggtgagttgagtcgggcgagttatgggtcggtgcttagttttgatgccaacgaactcgatccagagaactcgttggctggttttttggaccgagttccactcagtttgagaaggtgggcctgttaccccatgttattcgggcgcgtgaggaggaactttaaacacgtgacccttgtggatgtaaaaaatgtggtcatttttaatgacccactcggacgagtcaggaaccagagtcccgagtcggttttcgtgtaccctaatgcaaaacacggtaggaactccgagaggactcagtcgcatcacccggttaactcagtgattctgatgggcggcgcccgcgggatccggcgcgtgtcgcacgccatgctcgttgcgattgttcgggccgcaatgcagccgcacaagaggaagaactcggtgtccgactcggcgattctgagtcaactcgtaaggaacaagtttgcattgaggaacgttcacttaattgtctcgggggagtcgattccggaagcgagttcactcgctgggtcaacatcgttttcggattgtgcaataattcagcggggtacgggtaattattatgacctcaattctattgttaagaagcaaatttgttcttctgtgatggattcttttgtttataacagtgattgtaagcatctggtaaaagtagaacaataatgagaaaataggggggaaaattaacgagaaaattcgtgtatttattgaacttacttgtactagtagttttatagtagcataaattttcccaccgtctctcctct

SEQ ID NO: 9452 - protein, 495 aa, Glycine max
  peptide (1)..(495): Ceres Seq. ID no. 15177038
  misc_feature (28)..(484): NCBI GI NO: 17064822 NR Description: putative protein [Arabidopsis thaliana]
  misc_feature (28)..(484): NCBI GI NO: 15230285 NR Description: expressed protein [Arabidopsis thaliana]
  misc_feature (180)..(441): NCBI GI NO: 15237180 NR Description: expressed protein [Arabidopsis thaliana]
  misc_feature (38)..(269): NCBI GI NO: 15237180 NR Description: expressed protein [Arabidopsis thaliana]
APTSKTERKKKAEMGSFPKAKPNNTHTDTNTNTHNRVMGFLLVFFPEENNNTTPTIATKSTKPNLVSSSPSPHSLKRISSSSNNALLSKAQSTISICFLLLFTTLLLFTLSTFEPTHHKPRSIPPKSKLRKNTSSSDVAFPSTALQRMGTLYRRGTRAMNDIVVCHVPEDTTHDEFRIFLRLLHRSGLTSKSDVVFIFVSASSSTTFAHIVHEENTSFLSLINLHAQLNSTQWAKPSESNFDATRFLKAPKKGEPLWGKKIRTNYSGSEGELSRASYGSVLSFDANELDPENSLAGFLDRVPLSLRRWACYPMLFGRVRRNFKHVTLVDVKNVVIFNDPLGRVRNQSPESVFVYPNAKHGRNSERTQSHHPVNSVILMGGARGIRRVSHAMLVAIVRAAMQPHKRKNSVSDSAILSQLVRNKFALRNVHLIVSGESIPEASSLAGSTSFSDCAIIQRGTGNYYDLNSIVKKQICSSVMDSFVYNSDCKHLVKVEQ

SEQ ID NO: 9453 - protein, 482 aa, Glycine max
  peptide (1)..(482): Ceres Seq. ID no. 15177039
  misc_feature (15)..(471): NCBI GI NO: 17064822 NR Description: putative protein [Arabidopsis thaliana]
  misc_feature (15)..(471): NCBI GI NO: 15230285 NR Description: expressed protein [Arabidopsis thaliana]
  misc_feature (167)..(428): NCBI GI NO: 15237180 NR Description: expressed protein [Arabidopsis thaliana]
  misc_feature (25)..(256): NCBI GI NO: 15237180 NR Description: expressed protein [Arabidopsis thaliana]
MGSFPKAKPNNTHTDTNTNTHNRVMGFLLVFFPEENNNTTPTIATKSTKPNLVSSSPSPHSLKRISSSSNNALLSKAQSTISICFLLLFTTLLLFTLSTFEPTHHKPRSIPPKSKLRKNTSSSDVAFPSTALQRMGTLYRRGTRAMNDIVVCHVPEDTTHDEFRIFLRLLHRSGLTSKSDVVFIFVSASSSTTFAHIVHEENTSFLSLINLHAQLNSTQWAKPSESNFDATRFLKAPKKGEPLWGKKIRTNYSGSEGELSRASYGSVLSFDANELDPENSLAGFLDRVPLSLRRWACYPMLFGRVRRNFKHVTLVDVKNVVIFNDPLGRVRNQSPESVFVYPNAKHGRNSERTQSHHPVNSVILMGGARGIRRVSHAMLVAIVRAAMQPHKRKNSVSDSAILSQLVRNKFALRNVHLIVSGESIPEASSLAGSTSFSDCAIIQRGTGNYYDLNSIVKKQICSSVMDSFVYNSDCKHLVKVEQ

SEQ ID NO: 9454 - protein, 458 aa, Glycine max
  peptide (1)..(458): Ceres Seq. ID no. 15177040
  misc_feature (1)..(447): NCBI GI NO: 17064822 NR Description: putative protein [Arabidopsis thaliana]
  misc_feature (1)..(447): NCBI GI NO: 15230285 NR Description: expressed protein [Arabidopsis thaliana]
  misc_feature (143)..(404): NCBI GI NO: 15237180 NR Description: expressed protein [Arabidopsis thaliana]
  misc_feature (1)..(232): NCBI GI NO: 15237180 NR Description: expressed protein [Arabidopsis thaliana]
MGFLLVFFPEENNNTTPTIATKSTKPNLVSSSPSPHSLKRISSSSNNALLSKAQSTISICFLLLFTTLLLFTLSTFEPTHHKPRSIPPKSKLRKNTSSSDVAFPSTALQRMGTLYRRGTRAMNDIVVCHVPEDTTHDEFRIFLRLLHRSGLTSKSDVVFIFVSASSSTTFAHIVHEENTSFLSLINLHAQLNSTQWAKPSESNFDATRFLKAPKKGEPLWGKKIRTNYSGSEGELSRASYGSVLSFDANELDPENSLAGFLDRVPLSLRRWACYPMLFGRVRRNFKHVTLVDVKNVVIFNDPLGRVRNQSPESVFVYPNAKHGRNSERTQSHHPVNSVILMGGARGIRRVSHAMLVAIVRAAMQPHKRKNSVSDSAILSQLVRNKFALRNVHLIVSGESIPEASSLAGSTSFSDCAIIQRGTGNYYDLNSIVKKQICSSVMDSFVYNSDCKHLVKVEQ

SEQ ID NO: 9455 - DNA, 1052 bp, Glycine max
  misc_feature (1)..(1052): Ceres Seq. ID no. 13595755
attacctagaacatcctaatcgaaaaccttttctttcttttgtgtttcttgctttcttcttcttcgctttcgtcccttttcggagtatccctcccaaccatggacgttgatccttgccaatacgaacaaattgctataaatgaaaaagatgtcaacaacatcattctgtcataccttatacataattgctacaaagagtcatcagagtcattcatttcttgcactgggatgaagcagcctgcagatcatttggagaacatggaaaaaagaaaaagaatctttcaccatgcattggagggaaatgtacttaaggcgattgagctcacagggcagctggcacaggatattctggagaacaataatgatttgctgtttgatcttctaagccttcattttgtagaccttgtctgctctaaggaatgggcagaagctttggagtttgctcagaccaagttgagtccttttagtgtgaaggagcagaaatatatggaaaaaatagaaggttttatgtcccttcttgcttatgagaatccagtggaatgcccaatgtttcatctgattggcttagactatcggcaacaagttgtggatagtttgaatcaaactattctcgatgttggtgatggccagcacactttaaccttcccatccacactgccatggagcggcttatacaacagacctcagtagttagacaatgcttaagcctggaggatggggggcctccaccattttccttgaaggatattcttaaaagtcaatgaaaagcagttaaatatccactgggatgttgaggaatgaagcatgtgtacattgtgccttttttgccacataagggattggtgcatgcatgatttgatcactagtgtaaagttgtcttcgtatacttttgtataaattttttggtagcaggctatctagatctttcgggtcatattgcattctttaggtattagtgttccatgaaaatggagaaaattgcaattctaccggattaagataatattttctttctggggaatttgatctaattgtggccttaagatgtcgtc

SEQ ID NO: 9456 - protein, 196 aa, Glycine max
  peptide (1)..(196): Ceres Seq. ID no. 13595756
  misc_feature (3)..(187): NCBI GI NO: 18390607 NR Description: expressed protein [Arabidopsis thaliana]
  misc_feature (1)..(169): NCBI GI NO: 34910006 NR Description: P0413G02.3
  misc_feature (13)..(179): NCBI GI NO: 20863687 NR Description: RIKEN cDNA 2310003C23 [Mus musculus]
  misc_feature (11)..(179): NCBI GI NO: 37748055 NR Description: Unknown (protein for MGC:73100) [Danio rerio]
  misc_feature (13)..(179): NCBI GI NO: 8923557 NR Description: chromosome 20 open reading frame 11
  misc_feature (13)..(179): NCBI GI NO: 21594655 NR Description: chromosome 20 open reading frame 11 [Homo sapiens]
  misc_feature (11)..(186): NCBI GI NO: 15219873 NR Description: expressed protein [Arabidopsis thaliana]
  misc_feature (11)..(186): NCBI GI NO: 25404311 NR Description: hypothetical protein F11P17.12
  misc_feature (9)..(171): NCBI GI NO: 24643081 NR Description: CG6617-PA [Drosophila melanogaster]
  misc_feature (15)..(171): NCBI GI NO: 28573518 NR Description: CG18467-PA [Drosophila melanogaster]
MDVDPCQYEQIAINEKDVNNIILSYLIHNCYKESSESFISCTGMKQPADHLENMEKRKRIFHHALEGNVLKAIELTGQLAQDILENNNDLLFDLLSLHFVDLVCSKEWAEALEFAQTKLSPFSVKEQKYMEKIEGFMSLLAYENPVECPMFHLIGLDYRQQVVDSLNQTILDVGDGQHTLTFPSTLPWSGLYNRPQ

SEQ ID NO: 9457 - protein, 153 aa, Glycine max
  peptide (1)..(153): Ceres Seq. ID no. 13595757
  misc_feature (1)..(144): NCBI GI NO: 18390607 NR Description: expressed protein [Arabidopsis thaliana]
  misc_feature (1)..(126): NCBI GI NO: 34910006 NR Description: P0413G02.3
  misc_feature (1)..(136): NCBI GI NO: 20863687 NR Description: RIKEN cDNA 2310003C23 [Mus musculus]
  misc_feature (1)..(136): NCBI GI NO: 37748055 NR Description: Unknown (protein for MGC:73100) [Danio rerio]
  misc_feature (1)..(136): NCBI GI NO: 8923557 NR Description: chromosome 20 open reading frame 11
  misc_feature (1)..(136): NCBI GI NO: 21594655 NR Description: chromosome 20 open reading frame 11 [Homo sapiens]
  misc_feature (1)..(143): NCBI GI NO: 15219873 NR Description: expressed protein [Arabidopsis thaliana]
  misc_feature (1)..(143): NCBI GI NO: 25404311 NR Description: hypothetical protein F11P17.12
  misc_feature (1)..(128): NCBI GI NO: 24643081 NR Description: CG6617-PA [Drosophila melanogaster]
  misc_feature (1)..(128): NCBI GI NO: 28573518 NR Description: CG18467-PA [Drosophila melanogaster]
MKQPADHLENMEKRKRIFHHALEGNVLKAIELTGQLAQDILENNNDLLFDLLSLHFVDLVCSKEWAEALEFAQTKLSPFSVKEQKYMEKIEGFMSLLAYENPVECPMFHLIGLDYRQQVVDSLNQTILDVGDGQHTLTFPSTLPWSGLYNRPQ

SEQ ID NO: 9458 - protein, 143 aa, Glycine max
  peptide (1)..(143): Ceres Seq. ID no. 13595758
  misc_feature (1)..(134): NCBI GI NO: 18390607 NR Description: expressed protein [Arabidopsis thaliana]
  misc_feature (1)..(116): NCBI GI NO: 34910006 NR Description: P0413G02.3
  misc_feature (1)..(126): NCBI GI NO: 20863687 NR Description: RIKEN cDNA 2310003C23 [Mus musculus]
  misc_feature (1)..(126): NCBI GI NO: 37748055 NR Description: Unknown (protein for MGC:73100) [Danio rerio]
  misc_feature (1)..(126): NCBI GI NO: 8923557 NR Description: chromosome 20 open reading frame 11
  misc_feature (1)..(126): NCBI GI NO: 21594655 NR Description: chromosome 20 open reading frame 11 [Homo sapiens]
  misc_feature (1)..(133): NCBI GI NO: 15219873 NR Description: expressed protein [Arabidopsis thaliana]
  misc_feature (1)..(133): NCBI GI NO: 25404311 NR Description: hypothetical protein F11P17.12
  misc_feature (1)..(118): NCBI GI NO: 24643081 NR Description: CG6617-PA [Drosophila melanogaster]
  misc_feature (1)..(118): NCBI GI NO: 28573518 NR Description: CG18467-PA [Drosophila melanogaster]
MEKRKRIFHHALEGNVLKAIELTGQLAQDILENNNDLLFDLLSLHFVDLVCSKEWAEALEFAQTKLSPFSVKEQKYMEKIEGFMSLLAYENPVECPMFHLIGLDYRQQVVDSLNQTILDVGDGQHTLTFPSTLPWSGLYNRPQ

SEQ ID NO: 9459 - DNA, 852 bp, Glycine max
  misc_feature (1)..(852): Ceres Seq. ID no. 15173288
atcatctctttgagttgccattgaagaagaagctcagatcggaaaaattcacctctccaatcccaatcccatcgttgcaaatgatccgattcattctgttgcagaacaggcagggcaagacccgtcttgccaaatactacgttcctctcgaggactccgagaagcacaaggtcgaatacgaggttcatcggctcgtcgtaaacagagaccctaaatacacaaatttcgtcgagtttcgtacgcacaagataatatacaggcgatatgctgggttatttttctcactctgtgttgatatcactgataatgagttggcgtatttagagtgcatccatttgtttgtggaaatattggatcacttcttcagcaatgtctgtgagctcgatttggtttttaacttccacaaggtctatcttatacttgatgaattcattctagcgggtgaactgcaagaaacaagcaagaaggctatcattgagagaatgggggaacttgaaaaactagaatgaaaaattacttttcagcagtcatatcaatttggagatttcgatgacttactcatgcccttggcttaattcttgtatttcaattgtgatacagaattttgaaaatcttttccgttgagccatgtattcaatgccctttaccttcgcttcttattcggcttatgtttatatttgtaagacatttataaaatcagggttttcagtagcctttctgttactgtctctgttttgtttcactttttataaatttatttgctcttcttggttgttagtaaaacacttaatggaaatgtaattggatgattgtagtatataagcaatgcaaaacgattaattttgatggtac

SEQ ID NO: 9460 - protein, 168 aa, Glycine max
  peptide (1)..(168): Ceres Seq. ID no. 15173289
  misc_feature (27)..(168): Pfam Name: Pfam Description:  Clathrin adaptor complex small chain
  misc_feature (27)..(168): NCBI GI NO: 17149110 NR Description: clathrin assembly protein AP17-like protein
  misc_feature (27)..(168): NCBI GI NO: 30983940 NR Description: clathrin coat assembly protein
  misc_feature (27)..(168): NCBI GI NO: 15220987 NR Description: clathrin coat assembly protein AP17 -related
  misc_feature (27)..(155): NCBI GI NO: 7489722 NR Description: clathrin coat assembly protein AP17 - maize
  misc_feature (27)..(168): NCBI GI NO: 32416434 NR Description: hypothetical protein [Neurospora crassa]
  misc_feature (66)..(168): NCBI GI NO: 19070753 NR Description: clathrin coat assembly protein [Oryza sativa]
  misc_feature (27)..(168): NCBI GI NO: 40746043 NR Description: conserved hypothetical protein
  misc_feature (27)..(168): NCBI GI NO: 34784526 NR Description: Unknown (protein for MGC:65827) [Danio rerio]
  misc_feature (37)..(135): NCBI GI NO: 25405904 NR Description: protein T2E6.6 [imported] - Arabidopsis thaliana
  misc_feature (27)..(168): NCBI GI NO: 30584435 NR Description: Homo sapiens adaptor-related protein complex 2
HLFELPLKKKLRSEKFTSPIPIPSLQMIRFILLQNRQGKTRLAKYYVPLEDSEKHKVEYEVHRLVVNRDPKYTNFVEFRTHKIIYRRYAGLFFSLCVDITDNELAYLECIHLFVEILDHFFSNVCELDLVFNFHKVYLILDEFILAGELQETSKKAIIERMGELEKLE

SEQ ID NO: 9461 - protein, 142 aa, Glycine max
  peptide (1)..(142): Ceres Seq. ID no. 15173290
  misc_feature (1)..(142): Pfam Name: Pfam Description:  Clathrin adaptor complex small chain
  misc_feature (1)..(142): NCBI GI NO: 17149110 NR Description: clathrin assembly protein AP17-like protein
  misc_feature (1)..(142): NCBI GI NO: 30983940 NR Description: clathrin coat assembly protein
  misc_feature (1)..(142): NCBI GI NO: 15220987 NR Description: clathrin coat assembly protein AP17 -related
  misc_feature (1)..(129): NCBI GI NO: 7489722 NR Description: clathrin coat assembly protein AP17 - maize
  misc_feature (1)..(142): NCBI GI NO: 32416434 NR Description: hypothetical protein [Neurospora crassa]
  misc_feature (40)..(142): NCBI GI NO: 19070753 NR Description: clathrin coat assembly protein [Oryza sativa]
  misc_feature (1)..(142): NCBI GI NO: 40746043 NR Description: conserved hypothetical protein
  misc_feature (1)..(142): NCBI GI NO: 34784526 NR Description: Unknown (protein for MGC:65827) [Danio rerio]
  misc_feature (11)..(109): NCBI GI NO: 25405904 NR Description: protein T2E6.6 [imported] - Arabidopsis thaliana
  misc_feature (1)..(142): NCBI GI NO: 30584435 NR Description: Homo sapiens adaptor-related protein complex 2
MIRFILLQNRQGKTRLAKYYVPLEDSEKHKVEYEVHRLVVNRDPKYTNFVEFRTHKIIYRRYAGLFFSLCVDITDNELAYLECIHLFVEILDHFFSNVCELDLVFNFHKVYLILDEFILAGELQETSKKAIIERMGELEKLE

SEQ ID NO: 9462 - DNA, 1362 bp, Glycine max
  misc_feature (1)..(1362): Ceres Seq. ID no. 12777206
attcgttcatcctcttgccaacacaacctcgttgctcatcttcaccgaagcacctcaaccattttcccaaccaaacctccatagaggaaaaaaaatccagactctaggccttcatggatagagaacaagaagagatgcaatttcttgggttctttggcatctacaaagaagcctccaagatcatactttcatggaggagaatcttcacccaaatcacctcaacactaatcctccctctctccttcatcttcctcatccacatggaaatctccaacctcctcttcaggaagattctcatcaacgaaatagtcatggacgaaacaaagcctaacacacctcaatacaacaagctcgatcacatgatctcttcagaaatggtcactcttgtggtcttcaaaatcgcatacttcactctgctcctcatattctccctcctctccacctcggcagtggtctgcaccatcgcctccatctacaccgcaaaagacgtgacattcaagagggtcatgagtgttgtccctaaggtgtggaagaggctcatgttgacctttctatgtgcctttgctgctttcttcgcttacaatatcatgactgcgctagttatgttcttgtccatagtcacaattgggttaagtagtggtgggcttgcggttttggtttcgataacggttttgtacttcattgggtttgtgtacctcaccgtggtgtggcaactagccagcgttgtcactgtgttggaggactcgtggggggttcgagccatggcgaagagcaaggagttgataagggggaagatggttttgtccatattcatctttttcacccttgtggcttcttttgtttccattagggttttgttcaaggtgatggtggtggatggatggagggtgagttctttggacaaaacagcatatggggttctctgtttcttgctattgtcttgtttgttcctctttgggcttgttttgcaaactgtgctctactttgtttgcaagtcctatcaccatgagaatattgacaaatcggctttggcagatcatcttgaagggtatcgtggagagtatgtgccattgacggctaaggatgttcagctggagcagtaccaagtttgatttataatatagcttaattagataaattaaattaatcatcatcatgtgtctagattgatgatgcggttaattatatctgctttggtttcttgatgtctttagaaatatcttttgtgtgtgaaattaaggcaggtgtgaagtgaatttcattactctctatatgattggttatatgtatttaattttctgtttaaaaataggactcttttgcaaaggtgtattaattaatgctatgagatgactttatttc

SEQ ID NO: 9463 - protein, 332 aa, Glycine max
  peptide (1)..(332): Ceres Seq. ID no. 12777207
  misc_feature (1)..(332): NCBI GI NO: 30684945 NR Description: expressed protein [Arabidopsis thaliana]
  misc_feature (1)..(332): NCBI GI NO: 18397813 NR Description: expressed protein; protein id: At1g31130
  misc_feature (1)..(332): NCBI GI NO: 15241607 NR Description: putative protein; protein id: At5g44860
  misc_feature (1)..(332): NCBI GI NO: 7485737 NR Description: hypothetical protein F18F4
  misc_feature (1)..(328): NCBI GI NO: 34908936 NR Description: P0691E06.20
  misc_feature (36)..(295): NCBI GI NO: 25370705 NR Description: hypothetical protein At2g18680
  misc_feature (70)..(295): NCBI GI NO: 18398816 NR Description: unknown protein; protein id: At2g18680.1
  misc_feature (8)..(302): NCBI GI NO: 18398818 NR Description: expressed protein; protein id: At2g18690
  misc_feature (16)..(302): NCBI GI NO: 27817928 NR Description: P0453E05.2
  misc_feature (16)..(302): NCBI GI NO: 15222319 NR Description: unknown protein; protein id: At1g69430.1
MDREQEEMQFLGFFGIYKEASKIILSWRRIFTQITSTLILPLSFIFLIHMEISNLLFRKILINEIVMDETKPNTPQYNKLDHMISSEMVTLVVFKIAYFTLLLIFSLLSTSAVVCTIASIYTAKDVTFKRVMSVVPKVWKRLMLTFLCAFAAFFAYNIMTALVMFLSIVTIGLSSGGLAVLVSITVLYFIGFVYLTVVWQLASVVTVLEDSWGVRAMAKSKELIRGKMVLSIFIFFTLVASFVSIRVLFKVMVVDGWRVSSLDKTAYGVLCFLLLSCLFLFGLVLQTVLYFVCKSYHHENIDKSALADHLEGYRGEYVPLTAKDVQLEQYQV

SEQ ID NO: 9464 - protein, 325 aa, Glycine max
  peptide (1)..(325): Ceres Seq. ID no. 12777208
  misc_feature (1)..(325): NCBI GI NO: 30684945 NR Description: expressed protein [Arabidopsis thaliana]
  misc_feature (1)..(325): NCBI GI NO: 18397813 NR Description: expressed protein; protein id: At1g31130
  misc_feature (1)..(325): NCBI GI NO: 15241607 NR Description: putative protein; protein id: At5g44860
  misc_feature (1)..(325): NCBI GI NO: 7485737 NR Description: hypothetical protein F18F4
  misc_feature (1)..(321): NCBI GI NO: 34908936 NR Description: P0691E06.20
  misc_feature (29)..(288): NCBI GI NO: 25370705 NR Description: hypothetical protein At2g18680
  misc_feature (63)..(288): NCBI GI NO: 18398816 NR Description: unknown protein; protein id: At2g18680.1
  misc_feature (1)..(295): NCBI GI NO: 18398818 NR Description: expressed protein; protein id: At2g18690
  misc_feature (9)..(295): NCBI GI NO: 27817928 NR Description: P0453E05.2
  misc_feature (9)..(295): NCBI GI NO: 15222319 NR Description: unknown protein; protein id: At1g69430.1
MQFLGFFGIYKEASKIILSWRRIFTQITSTLILPLSFIFLIHMEISNLLFRKILINEIVMDETKPNTPQYNKLDHMISSEMVTLVVFKIAYFTLLLIFSLLSTSAVVCTIASIYTAKDVTFKRVMSVVPKVWKRLMLTFLCAFAAFFAYNIMTALVMFLSIVTIGLSSGGLAVLVSITVLYFIGFVYLTVVWQLASVVTVLEDSWGVRAMAKSKELIRGKMVLSIFIFFTLVASFVSIRVLFKVMVVDGWRVSSLDKTAYGVLCFLLLSCLFLFGLVLQTVLYFVCKSYHHENIDKSALADHLEGYRGEYVPLTAKDVQLEQYQV

SEQ ID NO: 9465 - protein, 283 aa, Glycine max
  peptide (1)..(283): Ceres Seq. ID no. 12777209
  misc_feature (1)..(283): NCBI GI NO: 30684945 NR Description: expressed protein [Arabidopsis thaliana]
  misc_feature (1)..(283): NCBI GI NO: 18397813 NR Description: expressed protein; protein id: At1g31130
  misc_feature (1)..(283): NCBI GI NO: 15241607 NR Description: putative protein; protein id: At5g44860
  misc_feature (1)..(283): NCBI GI NO: 7485737 NR Description: hypothetical protein F18F4
  misc_feature (1)..(279): NCBI GI NO: 34908936 NR Description: P0691E06.20
  misc_feature (1)..(246): NCBI GI NO: 25370705 NR Description: hypothetical protein At2g18680
  misc_feature (21)..(246): NCBI GI NO: 18398816 NR Description: unknown protein; protein id: At2g18680.1
  misc_feature (1)..(253): NCBI GI NO: 18398818 NR Description: expressed protein; protein id: At2g18690
  misc_feature (1)..(253): NCBI GI NO: 27817928 NR Description: P0453E05.2
  misc_feature (1)..(253): NCBI GI NO: 15222319 NR Description: unknown protein; protein id: At1g69430.1
MEISNLLFRKILINEIVMDETKPNTPQYNKLDHMISSEMVTLVVFKIAYFTLLLIFSLLSTSAVVCTIASIYTAKDVTFKRVMSVVPKVWKRLMLTFLCAFAAFFAYNIMTALVMFLSIVTIGLSSGGLAVLVSITVLYFIGFVYLTVVWQLASVVTVLEDSWGVRAMAKSKELIRGKMVLSIFIFFTLVASFVSIRVLFKVMVVDGWRVSSLDKTAYGVLCFLLLSCLFLFGLVLQTVLYFVCKSYHHENIDKSALADHLEGYRGEYVPLTAKDVQLEQYQV

SEQ ID NO: 9466 - DNA, 1324 bp, Glycine max
  misc_feature (1)..(1324): Ceres Seq. ID no. 13595861
atcgaaagtcgaaacatcccctgtcactttgactcaactcacacaccaatctccatatccctaccaattttccctattcactcatcaattttctcgtatcagattttgtggtagtgtagtccaactgtccaacttagagcaggcagcatggaggatattctgttggataccaggtgggaagatgtaatctgccccatatgcttggaagtccctcataatagtgtgctccttcagtgttcatcttatgataaggggtgtcgttcttttgtatgtgacacaagtcagttgcactcaaattgcttggatcgttttaaaagcacacatagcatgccatcctcttcaacatatgattcaacctcccaaatgtctgatgcaaattccatggcaaatagtgagtcagtggtatctgattgtcaatacaagctgagttgtccgttgtgtagaggtgatgtttttgggtggattattgttgataaagctcgtgtgcatcttgatgagaagaagcgttgctgtgaagaggagcaatgtgcatttattggaagttactccgagctacaaaaacatgctcaactggaacaccctcatgcttgtccatcgaaaattgatcctgtccgacagcttgattggaaaaattttcagcagtcatctgagatcatagatgttttgagcactattcattcagaaattccacggggagtggtcttgggagattatgtgattgaatatggggatgatgacagtgcagatgagtttgaggacttccctggagatgaaggttctgtagcatctgtagagtatggcgagtataggctagatgagattgatgatgattttgttagtacaattggccacttgagaggtggaagtggttttcgcagatcgcggagacgtcattctcgctccaatgacaattagtatttgaactgaaggaagcagaatgagaggaagagatacactcaacatagaaaccagtgtgatcttgatgcagctggtgtgacaactcgcaaaggttacatttaggtcatctaatgcatttgtgataacttgagggatcaacattacaagattgatagttgaatgtggattatattccaagtttctgttatgcttaccattaactaccatttagtatgctagccattgggagcctgttaatttactcctgtgccaccaaagtgattccgctagctttatgctctgtagaacaatgaattacttcttttccttgtatatatagccgcttagttgtgatgtattataatgattctaaagtagggatgtttccatgtcactgaataaaacttttgtttttttttcctccccc

SEQ ID NO: 9467 - protein, 255 aa, Glycine max
  peptide (1)..(255): Ceres Seq. ID no. 13595862
  misc_feature (1)..(255): NCBI GI NO: 7486671 NR Description: hypothetical protein F8F16
  misc_feature (1)..(255): NCBI GI NO: 18417801 NR Description: expressed protein [Arabidopsis thaliana]
  misc_feature (83)..(255): NCBI GI NO: 15230170 NR Description: expressed protein [Arabidopsis thaliana]
  misc_feature (1)..(85): NCBI GI NO: 15230170 NR Description: expressed protein [Arabidopsis thaliana]
  misc_feature (68)..(249): NCBI GI NO: 38346521 NR Description: OSJNBa0027H09.16
  misc_feature (6)..(78): NCBI GI NO: 38346521 NR Description: OSJNBa0027H09.16
  misc_feature (87)..(225): NCBI GI NO: 15236507 NR Description: expressed protein [Arabidopsis thaliana]
  misc_feature (10)..(65): NCBI GI NO: 15236507 NR Description: expressed protein [Arabidopsis thaliana]
  misc_feature (90)..(209): NCBI GI NO: 25365932 NR Description: unknown protein T32E8.10
  misc_feature (90)..(209): NCBI GI NO: 30699285 NR Description: expressed protein [Arabidopsis thaliana]
MEDILLDTRWEDVICPICLEVPHNSVLLQCSSYDKGCRSFVCDTSQLHSNCLDRFKSTHSMPSSSTYDSTSQMSDANSMANSESVVSDCQYKLSCPLCRGDVFGWIIVDKARVHLDEKKRCCEEEQCAFIGSYSELQKHAQLEHPHACPSKIDPVRQLDWKNFQQSSEIIDVLSTIHSEIPRGVVLGDYVIEYGDDDSADEFEDFPGDEGSVASVEYGEYRLDEIDDDFVSTIGHLRGGSGFRRSRRRHSRSNDN

SEQ ID NO: 9468 - protein, 195 aa, Glycine max
  peptide (1)..(195): Ceres Seq. ID no. 13595863
  misc_feature (1)..(195): NCBI GI NO: 7486671 NR Description: hypothetical protein F8F16
  misc_feature (1)..(195): NCBI GI NO: 18417801 NR Description: expressed protein [Arabidopsis thaliana]
  misc_feature (23)..(195): NCBI GI NO: 15230170 NR Description: expressed protein [Arabidopsis thaliana]
  misc_feature (1)..(25): NCBI GI NO: 15230170 NR Description: expressed protein [Arabidopsis thaliana]
  misc_feature (8)..(189): NCBI GI NO: 38346521 NR Description: OSJNBa0027H09.16
  misc_feature (1)..(18): NCBI GI NO: 38346521 NR Description: OSJNBa0027H09.16
  misc_feature (27)..(165): NCBI GI NO: 15236507 NR Description: expressed protein [Arabidopsis thaliana]
  misc_feature (30)..(149): NCBI GI NO: 25365932 NR Description: unknown protein T32E8.10
  misc_feature (30)..(149): NCBI GI NO: 30699285 NR Description: expressed protein [Arabidopsis thaliana]
  misc_feature (1)..(195): NCBI GI NO: 15221290 NR Description: expressed protein [Arabidopsis thaliana]
MPSSSTYDSTSQMSDANSMANSESVVSDCQYKLSCPLCRGDVFGWIIVDKARVHLDEKKRCCEEEQCAFIGSYSELQKHAQLEHPHACPSKIDPVRQLDWKNFQQSSEIIDVLSTIHSEIPRGVVLGDYVIEYGDDDSADEFEDFPGDEGSVASVEYGEYRLDEIDDDFVSTIGHLRGGSGFRRSRRRHSRSNDN

SEQ ID NO: 9469 - protein, 183 aa, Glycine max
  peptide (1)..(183): Ceres Seq. ID no. 13595864
  misc_feature (1)..(183): NCBI GI NO: 7486671 NR Description: hypothetical protein F8F16
  misc_feature (1)..(183): NCBI GI NO: 18417801 NR Description: expressed protein [Arabidopsis thaliana]
  misc_feature (11)..(183): NCBI GI NO: 15230170 NR Description: expressed protein [Arabidopsis thaliana]
  misc_feature (1)..(13): NCBI GI NO: 15230170 NR Description: expressed protein [Arabidopsis thaliana]
  misc_feature (1)..(177): NCBI GI NO: 38346521 NR Description: OSJNBa0027H09.16
  misc_feature (15)..(153): NCBI GI NO: 15236507 NR Description: expressed protein [Arabidopsis thaliana]
  misc_feature (18)..(137): NCBI GI NO: 25365932 NR Description: unknown protein T32E8.10
  misc_feature (18)..(137): NCBI GI NO: 30699285 NR Description: expressed protein [Arabidopsis thaliana]
  misc_feature (1)..(183): NCBI GI NO: 15221290 NR Description: expressed protein [Arabidopsis thaliana]
  misc_feature (1)..(136): NCBI GI NO: 38344827 NR Description: OSJNBa0064H22.8
MSDANSMANSESVVSDCQYKLSCPLCRGDVFGWIIVDKARVHLDEKKRCCEEEQCAFIGSYSELQKHAQLEHPHACPSKIDPVRQLDWKNFQQSSEIIDVLSTIHSEIPRGVVLGDYVIEYGDDDSADEFEDFPGDEGSVASVEYGEYRLDEIDDDFVSTIGHLRGGSGFRRSRRRHSRSNDN

SEQ ID NO: 9470 - DNA, 1653 bp, Glycine max
  misc_feature (1)..(1653): Ceres Seq. ID no. 15177184
gcactttatcacaatcacaggctaagcttcaacaatggacaagtcgtgcgtgatttctccaagttgctacgacaatcatcacctctgctttgcatttctcttctcctttctcttttgctctctgctgttatcctttcatgctcccaacctcctccgactcacatccaagaccaaaaatgtcacagattcctgcactggccgctatgtttacattcaccaactcccctcccgcttcaacgattacttgcttcagaattgccagtccctcactagaggcactgacaaacccaacatgtgtccatacatgcaaaacaatggtttaggtcctcacattacctactcccaagggcttttctccaacaacacttgctatgccaccaaccagttcttgttggaagttatttttcacaacaggatgaccaaatatggctgcttgaccaacgattcctccctcgcctctgcaattttcgtcccattctatgctggtcttgatgttagccgtttcctttggctctctaatctcacagagagagattcctctggtcgtgatcttcttcaatgggtcgcaaaaagacccgagtggaagcaaatgtggggcagagatcatttccttgtttctgggaggattgcttgggatttcaggagacaatatgatgatgcgtcctattggggtagtaagttcaggtttatacccgaatccatgaacatgtccatgttagcagttgaagcaagttcgtggaataatgactacgcaattccgtacccaacttctttccacccatcagaggacactcatgtttaccggtggcagagaaaaatcagacatcaaaagcggccatacttgttcactttcaccggagctccaaggcctgaacttgaaggttctatcaggggtaagattatagaccagtgtcgagcttcgagtgtttgcaaattcgttgactgcagctatggtgtagagagatgtgacgaccccatcaatgttataaaggtgtttgaaagttctgtgttctgtttgcagcctccgggtgactcatacaccagaaggtccatttttgattccatcttggccggttgtattcccgttttctttcatcctggtactgcttactcgcagtacaagtggcatttacccaagaataggactaagtactctgtgtatatacccgtgaaggatgtaaaacaatggaatgtcaacgtggagcaggtgttgctgggaattccagagggtgaggtgtttgcaatgagagaggaggttataaagctgcttccaaatattatctatgcagatcctaggtctaagttagattgctttgaagacgcgtttgatttagcagtaaaaggaatgcttgaaagaatagagaaggtgagggaagcaatgaggagtgggagagatcctagcattggttttgcggatgaagaccattataagtatacattttcacaaaattacagctaaaggaagacacatcatattatagtgcatatcgtttcatagttaacatattcccttcagagaatcccgtgtaacacttttttttttttttttgtgggtattctggcttttctgatttacttttgattttgctttttcttggcctataaagaaggaaatccgattgcaatgataacaagtgaagaaaaaatgtttgt

SEQ ID NO: 9471 - protein, 474 aa, Glycine max
  peptide (1)..(474): Ceres Seq. ID no. 15177185
  misc_feature (58)..(408): Pfam Name: Pfam Description:  Exostosin family
  misc_feature (52)..(470): NCBI GI NO: 29824391 NR Description: unknown protein [Arabidopsis thaliana]
  misc_feature (41)..(467): NCBI GI NO: 27497206 NR Description: Unknown protein
  misc_feature (38)..(467): NCBI GI NO: 25411977 NR Description: hypothetical protein At2g20370
  misc_feature (38)..(467): NCBI GI NO: 30680972 NR Description: expressed protein [Arabidopsis thaliana]
  misc_feature (1)..(454): NCBI GI NO: 15225735 NR Description: hypothetical protein [Arabidopsis thaliana]
  misc_feature (51)..(472): NCBI GI NO: 15227020 NR Description: hypothetical protein [Arabidopsis thaliana]
  misc_feature (51)..(446): NCBI GI NO: 15225165 NR Description: Exostosin family [Arabidopsis thaliana]
  misc_feature (24)..(446): NCBI GI NO: 27497203 NR Description: Hypothetical protein
  misc_feature (52)..(449): NCBI GI NO: 27497204 NR Description: Hypothetical protein
  misc_feature (22)..(442): NCBI GI NO: 15225734 NR Description: Exostosin family [Arabidopsis thaliana]
MDKSCVISPSCYDNHHLCFAFLFSFLFCSLLLSFHAPNLLRLTSKTKNVTDSCTGRYVYIHQLPSRFNDYLLQNCQSLTRGTDKPNMCPYMQNNGLGPHITYSQGLFSNNTCYATNQFLLEVIFHNRMTKYGCLTNDSSLASAIFVPFYAGLDVSRFLWLSNLTERDSSGRDLLQWVAKRPEWKQMWGRDHFLVSGRIAWDFRRQYDDASYWGSKFRFIPESMNMSMLAVEASSWNNDYAIPYPTSFHPSEDTHVYRWQRKIRHQKRPYLFTFTGAPRPELEGSIRGKIIDQCRASSVCKFVDCSYGVERCDDPINVIKVFESSVFCLQPPGDSYTRRSIFDSILAGCIPVFFHPGTAYSQYKWHLPKNRTKYSVYIPVKDVKQWNVNVEQVLLGIPEGEVFAMREEVIKLLPNIIYADPRSKLDCFEDAFDLAVKGMLERIEKVREAMRSGRDPSIGFADEDHYKYTFSQNYS

SEQ ID NO: 9472 - protein, 388 aa, Glycine max
  peptide (1)..(388): Ceres Seq. ID no. 15177186
  misc_feature (1)..(322): Pfam Name: Pfam Description:  Exostosin family
  misc_feature (1)..(384): NCBI GI NO: 29824391 NR Description: unknown protein [Arabidopsis thaliana]
  misc_feature (1)..(381): NCBI GI NO: 27497206 NR Description: Unknown protein
  misc_feature (1)..(381): NCBI GI NO: 25411977 NR Description: hypothetical protein At2g20370
  misc_feature (1)..(381): NCBI GI NO: 30680972 NR Description: expressed protein [Arabidopsis thaliana]
  misc_feature (1)..(368): NCBI GI NO: 15225735 NR Description: hypothetical protein [Arabidopsis thaliana]
  misc_feature (1)..(386): NCBI GI NO: 15227020 NR Description: hypothetical protein [Arabidopsis thaliana]
  misc_feature (1)..(360): NCBI GI NO: 15225165 NR Description: Exostosin family [Arabidopsis thaliana]
  misc_feature (1)..(360): NCBI GI NO: 27497203 NR Description: Hypothetical protein
  misc_feature (1)..(363): NCBI GI NO: 27497204 NR Description: Hypothetical protein
  misc_feature (1)..(356): NCBI GI NO: 15225734 NR Description: Exostosin family [Arabidopsis thaliana]
MCPYMQNNGLGPHITYSQGLFSNNTCYATNQFLLEVIFHNRMTKYGCLTNDSSLASAIFVPFYAGLDVSRFLWLSNLTERDSSGRDLLQWVAKRPEWKQMWGRDHFLVSGRIAWDFRRQYDDASYWGSKFRFIPESMNMSMLAVEASSWNNDYAIPYPTSFHPSEDTHVYRWQRKIRHQKRPYLFTFTGAPRPELEGSIRGKIIDQCRASSVCKFVDCSYGVERCDDPINVIKVFESSVFCLQPPGDSYTRRSIFDSILAGCIPVFFHPGTAYSQYKWHLPKNRTKYSVYIPVKDVKQWNVNVEQVLLGIPEGEVFAMREEVIKLLPNIIYADPRSKLDCFEDAFDLAVKGMLERIEKVREAMRSGRDPSIGFADEDHYKYTFSQNYS

SEQ ID NO: 9473 - protein, 384 aa, Glycine max
  peptide (1)..(384): Ceres Seq. ID no. 15177187
  misc_feature (1)..(318): Pfam Name: Pfam Description:  Exostosin family
  misc_feature (1)..(380): NCBI GI NO: 29824391 NR Description: unknown protein [Arabidopsis thaliana]
  misc_feature (1)..(377): NCBI GI NO: 27497206 NR Description: Unknown protein
  misc_feature (1)..(377): NCBI GI NO: 25411977 NR Description: hypothetical protein At2g20370
  misc_feature (1)..(377): NCBI GI NO: 30680972 NR Description: expressed protein [Arabidopsis thaliana]
  misc_feature (1)..(364): NCBI GI NO: 15225735 NR Description: hypothetical protein [Arabidopsis thaliana]
  misc_feature (1)..(382): NCBI GI NO: 15227020 NR Description: hypothetical protein [Arabidopsis thaliana]
  misc_feature (1)..(356): NCBI GI NO: 15225165 NR Description: Exostosin family [Arabidopsis thaliana]
  misc_feature (1)..(356): NCBI GI NO: 27497203 NR Description: Hypothetical protein
  misc_feature (1)..(359): NCBI GI NO: 27497204 NR Description: Hypothetical protein
  misc_feature (1)..(352): NCBI GI NO: 15225734 NR Description: Exostosin family [Arabidopsis thaliana]
MQNNGLGPHITYSQGLFSNNTCYATNQFLLEVIFHNRMTKYGCLTNDSSLASAIFVPFYAGLDVSRFLWLSNLTERDSSGRDLLQWVAKRPEWKQMWGRDHFLVSGRIAWDFRRQYDDASYWGSKFRFIPESMNMSMLAVEASSWNNDYAIPYPTSFHPSEDTHVYRWQRKIRHQKRPYLFTFTGAPRPELEGSIRGKIIDQCRASSVCKFVDCSYGVERCDDPINVIKVFESSVFCLQPPGDSYTRRSIFDSILAGCIPVFFHPGTAYSQYKWHLPKNRTKYSVYIPVKDVKQWNVNVEQVLLGIPEGEVFAMREEVIKLLPNIIYADPRSKLDCFEDAFDLAVKGMLERIEKVREAMRSGRDPSIGFADEDHYKYTFSQNYS

SEQ ID NO: 9474 - DNA, 904 bp, Glycine max
  misc_feature (1)..(904): Ceres Seq. ID no. 13594363
aatgactcacacgctggcaagaaacaacacgatgtgcacattagagaagagaggacccctcttcgtcctaaccctaaccagcgaattcgacgaccagcaccgcctcaaccccaccctcctatcttccctcctcgctgcgctctccgaagtcaagtcccaagccaccgccggctccgccctcctcaccgccgcgcacggcagattcttctgcaacggcttcgacttccgctgggcccaggccgccggcgaccagccctccgcccgcctccgcctccgccgcatgtccgacgccctccgccccgtcctcgccgcgctcctctccctccccatccccaccgttgccgccgtctccggccacgccgccgctgccggagcaatcttcgccctcgcgcacgactacgtcctcatgcgcgccgaccgcggtgtgatctactttccggaggtggacctgggaatcactcttccagaatacttcgccgccgtcgccggggcgaagatcccggcggcggcgctgcgtgacgttgtgttggccggaaggaaggttagggcggagggggcggtggagatggggatcgtgcactcggcgcacgatagcgcggagggcaccgtggaggctgcgatgcgcctgggggaggagttagcacggagaaagtgggttggggacgcttatgcggaaatcagaaagagtttgtaccctgaagtgtgtgctgctttgggattaacacccaaaaccatcgtttctaagatctgattacttgtaatttgaattgcacaaacaacaatttaacagtatgagaaaacaaaaaataaaaaatctatgttcgaagaatgaatttgaaatgtgatcaataatacagtgtgtatggttctacaatcatatgatacaagcatttatatttcttgt

SEQ ID NO: 9475 - protein, 249 aa, Glycine max
  peptide (1)..(249): Ceres Seq. ID no. 13594364
  misc_feature (21)..(195): Pfam Name: Pfam Description:  Enoyl-CoA hydratase/isomerase family
  misc_feature (11)..(247): NCBI GI NO: 15236498 NR Description: enoyl-CoA hydratase/isomerase family
  misc_feature (11)..(247): NCBI GI NO: 21555734 NR Description: carnitine racemase like protein
  misc_feature (11)..(247): NCBI GI NO: 15236499 NR Description: enoyl-CoA hydratase/isomerase family
  misc_feature (11)..(234): NCBI GI NO: 15218713 NR Description: enoyl-CoA hydratase/isomerase family
  misc_feature (10)..(236): NCBI GI NO: 34903766 NR Description: unnamed protein product
  misc_feature (7)..(242): NCBI GI NO: 23017142 NR Description: hypothetical protein [Thermobifida fusca]
  misc_feature (30)..(238): NCBI GI NO: 15828352 NR Description: possible enoyl-CoA hydratase
  misc_feature (13)..(233): NCBI GI NO: 40739395 NR Description: hypothetical protein AN6767.2
  misc_feature (22)..(208): NCBI GI NO: 24214965 NR Description: enoyl-CoA hydratase
  misc_feature (16)..(207): NCBI GI NO: 22968140 NR Description: hypothetical protein [Rhodospirillum rubrum]
MTHTLARNNTMCTLEKRGPLFVLTLTSEFDDQHRLNPTLLSSLLAALSEVKSQATAGSALLTAAHGRFFCNGFDFRWAQAAGDQPSARLRLRRMSDALRPVLAALLSLPIPTVAAVSGHAAAAGAIFALAHDYVLMRADRGVIYFPEVDLGITLPEYFAAVAGAKIPAAALRDVVLAGRKVRAEGAVEMGIVHSAHDSAEGTVEAAMRLGEELARRKWVGDAYAEIRKSLYPEVCAALGLTPKTIVSKI

SEQ ID NO: 9476 - protein, 239 aa, Glycine max
  peptide (1)..(239): Ceres Seq. ID no. 13594365
  misc_feature (11)..(185): Pfam Name: Pfam Description:  Enoyl-CoA hydratase/isomerase family
  misc_feature (1)..(237): NCBI GI NO: 15236498 NR Description: enoyl-CoA hydratase/isomerase family
  misc_feature (1)..(237): NCBI GI NO: 21555734 NR Description: carnitine racemase like protein
  misc_feature (1)..(237): NCBI GI NO: 15236499 NR Description: enoyl-CoA hydratase/isomerase family
  misc_feature (1)..(224): NCBI GI NO: 15218713 NR Description: enoyl-CoA hydratase/isomerase family
  misc_feature (1)..(226): NCBI GI NO: 34903766 NR Description: unnamed protein product
  misc_feature (1)..(232): NCBI GI NO: 23017142 NR Description: hypothetical protein [Thermobifida fusca]
  misc_feature (20)..(228): NCBI GI NO: 15828352 NR Description: possible enoyl-CoA hydratase
  misc_feature (3)..(223): NCBI GI NO: 40739395 NR Description: hypothetical protein AN6767.2
  misc_feature (12)..(198): NCBI GI NO: 24214965 NR Description: enoyl-CoA hydratase
  misc_feature (6)..(197): NCBI GI NO: 22968140 NR Description: hypothetical protein [Rhodospirillum rubrum]
MCTLEKRGPLFVLTLTSEFDDQHRLNPTLLSSLLAALSEVKSQATAGSALLTAAHGRFFCNGFDFRWAQAAGDQPSARLRLRRMSDALRPVLAALLSLPIPTVAAVSGHAAAAGAIFALAHDYVLMRADRGVIYFPEVDLGITLPEYFAAVAGAKIPAAALRDVVLAGRKVRAEGAVEMGIVHSAHDSAEGTVEAAMRLGEELARRKWVGDAYAEIRKSLYPEVCAALGLTPKTIVSKI

SEQ ID NO: 9477 - protein, 172 aa, Glycine max
  peptide (1)..(172): Ceres Seq. ID no. 13594366
NDSHAGKKQHDVHIREERTPLRPNPNQRIRRPAPPQPHPPIFPPRCALRSQVPSHRRLRPPHRRARQILLQRLRLPLGPGRRRPALRPPPPPPHVRRPPPRPRRAPLPPHPHRCRRLRPRRRCRSNLRPRARLRPHARRPRCDLLSGGGPGNHSSRILRRRRRGEDPGGGAA

SEQ ID NO: 9478 - DNA, 656 bp, Glycine max
  misc_feature (1)..(656): Ceres Seq. ID no. 13594349
gaggaagtgagtccagagacagggatcagttatggctccgtgttcagtttttttcaattttcttcttctgcttcttctttctttcaccaaagaagctttaggtgtttcagagcaagaagctgacagagtgcatggactacccggacagcctccggtgaagttcaaacaatattctggttatatcactgtcaatgaaacccatggaagagcactcttctattggttctttgaggccactcataaaccagaagaaaagcctcttctcttatggctcaatggaggccctggttgttcctcaattggttatggagaagcagaggagctaggacccttctttcctcaggacagcagccaaccaaagctaaagttaaatccttattcttggaataacgctgccaatcttttgtttttggaatcccctgttggggtggggttctcctacaccaacaccagcagtgatataagtgagcttggtgacaccattaccgctaaagattcacacacctttatcatcaagtggtttagaagatttccacaattcagatcacacgaattctacatttccggtgaaagctatgcagggcactatgttccgcaactttcagagctcattttcgataataatcgcaatcctgtcgagaaagactacattaact

SEQ ID NO: 9479 - protein, 208 aa, Glycine max
  peptide (1)..(208): Ceres Seq. ID no. 13594350
  misc_feature (25)..(207): NCBI GI NO: 10177810 NR Description: serine carboxypeptidase II-like protein
  misc_feature (27)..(207): NCBI GI NO: 34894888 NR Description: putative serine carboxypeptidase II-like protein
  misc_feature (20)..(200): NCBI GI NO: 15220282 NR Description: serine carboxypeptidase -related
  misc_feature (28)..(207): NCBI GI NO: 10140766 NR Description: putative serine carboxypeptidase [Oryza sativa]
  misc_feature (28)..(207): NCBI GI NO: 37536528 NR Description: putative serine carboxypeptidase
  misc_feature (29)..(207): NCBI GI NO: 38344436 NR Description: OSJNBa0038O10.8
  misc_feature (28)..(207): NCBI GI NO: 15241571 NR Description: serine carboxypeptidase II -related
  misc_feature (8)..(207): NCBI GI NO: 13877871 NR Description: putative serine carboxypeptidase II
  misc_feature (1)..(201): NCBI GI NO: 15227493 NR Description: serine carboxypeptidase -related
  misc_feature (8)..(207): NCBI GI NO: 15234795 NR Description: serine carboxypeptidase -related
MAPCSVFFNFLLLLLLSFTKEALGVSEQEADRVHGLPGQPPVKFKQYSGYITVNETHGRALFYWFFEATHKPEEKPLLLWLNGGPGCSSIGYGEAEELGPFFPQDSSQPKLKLNPYSWNNAANLLFLESPVGVGFSYTNTSSDISELGDTITAKDSHTFIIKWFRRFPQFRSHEFYISGESYAGHYVPQLSELIFDNNRNPVEKDYIN

SEQ ID NO: 9480 - DNA, 1425 bp, Glycine max
  misc_feature (1)..(1425): Ceres Seq. ID no. 12476493
caacaaagtcacaaatcacacatacacacactcaaatacatacactagtagtgtggtgtgtgcccttcctttatccttttgctttttgtgtgcaattaacacacactcacacaaaaatgacggcatgccaagattggccagagccagtgattcgagtccaagccttggctgcaagtggcttagccacaatccccgaacgtttcataaagcctaagtcccaaagacccactaatagtaacaattatgctccaaagaccaatttctctcaaattggtcatcataagaacaataccaccaacagcaacatcccagtgattgacatgaagcacatctacagtggtgacgagggaaagagggctgagacgctccggctcgtgtcggaggcgtgccaagaatggggttttttccaggtggtgaaccatggagtgagccatgagttgatgaagggggcaagggaggtgtggagggagttctttcaccagccacttgatgtgaaagaggtgtatgctaatacacccctcacttatgaagggtatggaagcaggttgggagtgaaaaaaggggccattttggattggagtgattacttctttctccattacatgccttgttccctaagggaccaagccaagtggcctgccctcccaacatccttaaggagcatcatctctgaatatggtgaacaaattgttaagctaggaggaaggatacttgagataatgtcaataaatcttggccttagagaggattttctcctaaatgcatttggtggggaaaatgaccttggtgcttgcttgagggtgaatttctaccctaagtgcccacagcctgacctcactcttggactttcctctcactcagatcctggtggcatgaccattcttctccctgatgaaaatgtatcaggacttcaagtacgcagaggagaagattgggtcactgttaagccagtcccaaatgctttcatcatcaacatgggtgaccaaattcaggtgctgagcaatgcaacttacaagagtatagagcacagggtgatcgtgaactcagacaaagatcgcgtttcattggcctttttctataaccccaggagcgatataccgatccaaccagccaaggagcttgtgactaaggataggccagcactatacccaccaatgacatttgatgagtatagactttacattaggacaagaggaccaagtggaaaagctcaagttgaatctttgacttccaaatgagatgagattccaattgagcagtagtttgcagtgcacaaaattaatttgcatatgaataatttatcatctttgtgtttgtctcaatatcagactcaattaatcaagtatcatatcccacttaaattctatgtaacactttactctgtatttttcttatctcaaatataatatatggttgagttattgc

SEQ ID NO: 9481 - protein, 411 aa, Glycine max
  peptide (1)..(411): Ceres Seq. ID no. 12476494
  misc_feature (261)..(361): Pfam Name: II Pfam Description: 2OG-Fe
  misc_feature (37)..(407): NCBI GI NO: 15239179 NR Description: leucoanthocyanidin dioxygenase-like protein
  misc_feature (43)..(407): NCBI GI NO: 15229694 NR Description: putative leucoanthocyanidin dioxygenase
  misc_feature (44)..(407): NCBI GI NO: 21537324 NR Description: leucoanthocyanidin dioxygenase-like protein
  misc_feature (39)..(410): NCBI GI NO: 15228785 NR Description: leucoanthocyanidin dioxygenase -like protein
  misc_feature (97)..(336): NCBI GI NO: 34907994 NR Description: leucoanthocyanidin dioxygenase-like protein
  misc_feature (39)..(122): NCBI GI NO: 34907994 NR Description: leucoanthocyanidin dioxygenase-like protein
  misc_feature (327)..(408): NCBI GI NO: 34907994 NR Description: leucoanthocyanidin dioxygenase-like protein
  misc_feature (75)..(408): NCBI GI NO: 15224472 NR Description: putative anthocyanidin synthase
  misc_feature (75)..(408): NCBI GI NO: 21554535 NR Description: putative anthocyanidin synthase
  misc_feature (51)..(390): NCBI GI NO: 1730107 NR Description: LEUCOANTHOCYANIDIN DIOXYGENASE
TKSQITHTHTQIHTLVVWCVPFLYPFAFCVQLTHTHTKMTACQDWPEPVIRVQALAASGLATIPERFIKPKSQRPTNSNNYAPKTNFSQIGHHKNNTTNSNIPVIDMKHIYSGDEGKRAETLRLVSEACQEWGFFQVVNHGVSHELMKGAREVWREFFHQPLDVKEVYANTPLTYEGYGSRLGVKKGAILDWSDYFFLHYMPCSLRDQAKWPALPTSLRSIISEYGEQIVKLGGRILEIMSINLGLREDFLLNAFGGENDLGACLRVNFYPKCPQPDLTLGLSSHSDPGGMTILLPDENVSGLQVRRGEDWVTVKPVPNAFIINMGDQIQVLSNATYKSIEHRVIVNSDKDRVSLAFFYNPRSDIPIQPAKELVTKDRPALYPPMTFDEYRLYIRTRGPSGKAQVESLTSK

SEQ ID NO: 9482 - protein, 373 aa, Glycine max
  peptide (1)..(373): Ceres Seq. ID no. 12476495
  misc_feature (223)..(323): Pfam Name: II Pfam Description: 2OG-Fe
  misc_feature (1)..(369): NCBI GI NO: 15239179 NR Description: leucoanthocyanidin dioxygenase-like protein
  misc_feature (5)..(369): NCBI GI NO: 15229694 NR Description: putative leucoanthocyanidin dioxygenase
  misc_feature (6)..(369): NCBI GI NO: 21537324 NR Description: leucoanthocyanidin dioxygenase-like protein
  misc_feature (1)..(372): NCBI GI NO: 15228785 NR Description: leucoanthocyanidin dioxygenase -like protein
  misc_feature (59)..(298): NCBI GI NO: 34907994 NR Description: leucoanthocyanidin dioxygenase-like protein
  misc_feature (1)..(84): NCBI GI NO: 34907994 NR Description: leucoanthocyanidin dioxygenase-like protein
  misc_feature (289)..(370): NCBI GI NO: 34907994 NR Description: leucoanthocyanidin dioxygenase-like protein
  misc_feature (37)..(370): NCBI GI NO: 15224472 NR Description: putative anthocyanidin synthase
  misc_feature (37)..(370): NCBI GI NO: 21554535 NR Description: putative anthocyanidin synthase
  misc_feature (13)..(352): NCBI GI NO: 1730107 NR Description: LEUCOANTHOCYANIDIN DIOXYGENASE
MTACQDWPEPVIRVQALAASGLATIPERFIKPKSQRPTNSNNYAPKTNFSQIGHHKNNTTNSNIPVIDMKHIYSGDEGKRAETLRLVSEACQEWGFFQVVNHGVSHELMKGAREVWREFFHQPLDVKEVYANTPLTYEGYGSRLGVKKGAILDWSDYFFLHYMPCSLRDQAKWPALPTSLRSIISEYGEQIVKLGGRILEIMSINLGLREDFLLNAFGGENDLGACLRVNFYPKCPQPDLTLGLSSHSDPGGMTILLPDENVSGLQVRRGEDWVTVKPVPNAFIINMGDQIQVLSNATYKSIEHRVIVNSDKDRVSLAFFYNPRSDIPIQPAKELVTKDRPALYPPMTFDEYRLYIRTRGPSGKAQVESLTSK

SEQ ID NO: 9483 - protein, 305 aa, Glycine max
  peptide (1)..(305): Ceres Seq. ID no. 12476496
  misc_feature (155)..(255): Pfam Name: II Pfam Description: 2OG-Fe
  misc_feature (1)..(301): NCBI GI NO: 15239179 NR Description: leucoanthocyanidin dioxygenase-like protein
  misc_feature (1)..(301): NCBI GI NO: 15229694 NR Description: putative leucoanthocyanidin dioxygenase
  misc_feature (1)..(301): NCBI GI NO: 21537324 NR Description: leucoanthocyanidin dioxygenase-like protein
  misc_feature (1)..(304): NCBI GI NO: 15228785 NR Description: leucoanthocyanidin dioxygenase -like protein
  misc_feature (1)..(230): NCBI GI NO: 34907994 NR Description: leucoanthocyanidin dioxygenase-like protein
  misc_feature (1)..(16): NCBI GI NO: 34907994 NR Description: leucoanthocyanidin dioxygenase-like protein
  misc_feature (221)..(302): NCBI GI NO: 34907994 NR Description: leucoanthocyanidin dioxygenase-like protein
  misc_feature (1)..(302): NCBI GI NO: 15224472 NR Description: putative anthocyanidin synthase
  misc_feature (1)..(302): NCBI GI NO: 21554535 NR Description: putative anthocyanidin synthase
  misc_feature (1)..(284): NCBI GI NO: 1730107 NR Description: LEUCOANTHOCYANIDIN DIOXYGENASE
MKHIYSGDEGKRAETLRLVSEACQEWGFFQVVNHGVSHELMKGAREVWREFFHQPLDVKEVYANTPLTYEGYGSRLGVKKGAILDWSDYFFLHYMPCSLRDQAKWPALPTSLRSIISEYGEQIVKLGGRILEIMSINLGLREDFLLNAFGGENDLGACLRVNFYPKCPQPDLTLGLSSHSDPGGMTILLPDENVSGLQVRRGEDWVTVKPVPNAFIINMGDQIQVLSNATYKSIEHRVIVNSDKDRVSLAFFYNPRSDIPIQPAKELVTKDRPALYPPMTFDEYRLYIRTRGPSGKAQVESLTSK

SEQ ID NO: 9484 - DNA, 1473 bp, Glycine max
  misc_feature (1)..(1473): Ceres Seq. ID no. 12608490
gcctgttctacttctgggacttgttcttccacccaacgagtggagttaaattctaacccaacaaacaaacacaacaaattcaaattgtgcgaaaaataaaacagaaagtctcttgaacaaaaacttcgaactcaccaactcaaactcgctgctttcaaacttcaaagtaaaacccaactctatttccttctctcaggtctcagagtggcaaactgtaaagttttgatgcagaatggctgcaaccagggctcgagttagtagcttctctcgcaatgtatcaactgtgacttctcagaatcatggacttaagcatggccctaatgggacaatgttcatttcatctgggattccagatctggacaagattttaggtggtggtttttctctgggtagccttgtcatggttatggaagatcctgaagcacctcatcatatgcttctattgagaaattttatgtctcaaggacttgtgcaaaaacagccactcttgtatgctagtgcatctagagatcctaaaagttttctcggtactttgcctagtccggcgtcacccaaaggggataataaatcttcagatcttagccatgaaaaggatctaagaatcgcttggcaatacaaaaagtattttggtgagcctcagctaaatctgaacactaataatggtggtcagcatgattactgtaatgattttgacttgagaaagcccctggaccggcacttttttagtggcaataatgtagattgtgttagcatcaaagattctcctaaccttactgctcttcaagattgttgtgctggatttctagctaaattctcaagaaatgaaggcagcatttcctctgctggtcgtattgcaattcaatcattctgttctccacaatgcaagtattcaaatgaggagtggcatatgctttcttttattaggtccctaaagggcatggcccggtcttcaaacgctgttattgttgtaacctttccaccttcacttcttcctccatcttgttcaaaaagattgcagcatatggcagacaccttgctttctgtcaaagccattccagatgaggataaggaacttgcaaaactcctcactggttaccaggatatgattgggcttctaaatgtacacaaagttgcacggttaaatacacaggttcctgtgattctggaggccacaacattctccataaaattgcaaaaacgaaggtttttggttttagaatgtctaaatcaagccccagttgatggttcaagtggcagttcgtatggcacatctggcggttgttctgggtcaactaaagctggaccacttgatttttagactataccttatttataactgaaggcttttatcaaccaaaaatacgatatagccatagtgagtcaggctcaatgtttttcttagtgcttgaaatttagccttctaaattgtgttactccttttcttttttgttcttttgatgattaattggttgc

SEQ ID NO: 9485 - protein, 361 aa, Glycine max
  peptide (1)..(361): Ceres Seq. ID no. 12608491
  misc_feature (9)..(361): Pfam Name: Pfam Description:  PAXNEB protein
  misc_feature (1)..(361): NCBI GI NO: 12321866 NR Description: hypothetical protein; 53156-50996
  misc_feature (1)..(212): NCBI GI NO: 18399153 NR Description: expressed protein; protein id: At3g11220
  misc_feature (1)..(212): NCBI GI NO: 17063185 NR Description: AT3g11220/F11B9_116 [Arabidopsis thaliana]
  misc_feature (30)..(158): NCBI GI NO: 12861422 NR Description: unnamed protein product [Mus musculus]
  misc_feature (1)..(189): NCBI GI NO: 34858115 NR Description: similar to Paxneb protein [Rattus norvegicus]
  misc_feature (30)..(158): NCBI GI NO: 26329633 NR Description: unnamed protein product [Mus musculus]
  misc_feature (30)..(158): NCBI GI NO: 26347749 NR Description: unnamed protein product [Mus musculus]
  misc_feature (30)..(158): NCBI GI NO: 10129788 NR Description: Paxneb protein [Mus musculus]
  misc_feature (30)..(158): NCBI GI NO: 31542608 NR Description: elongation protein 4 homolog [Mus musculus]
  misc_feature (30)..(158): NCBI GI NO: 7020641 NR Description: unnamed protein product [Homo sapiens]
MAATRARVSSFSRNVSTVTSQNHGLKHGPNGTMFISSGIPDLDKILGGGFSLGSLVMVMEDPEAPHHMLLLRNFMSQGLVQKQPLLYASASRDPKSFLGTLPSPASPKGDNKSSDLSHEKDLRIAWQYKKYFGEPQLNLNTNNGGQHDYCNDFDLRKPLDRHFFSGNNVDCVSIKDSPNLTALQDCCAGFLAKFSRNEGSISSAGRIAIQSFCSPQCKYSNEEWHMLSFIRSLKGMARSSNAVIVVTFPPSLLPPSCSKRLQHMADTLLSVKAIPDEDKELAKLLTGYQDMIGLLNVHKVARLNTQVPVILEATTFSIKLQKRRFLVLECLNQAPVDGSSGSSYGTSGGCSGSTKAGPLDF

SEQ ID NO: 9486 - protein, 329 aa, Glycine max
  peptide (1)..(329): Ceres Seq. ID no. 12608492
  misc_feature (1)..(329): Pfam Name: Pfam Description:  PAXNEB protein
  misc_feature (1)..(329): NCBI GI NO: 12321866 NR Description: hypothetical protein; 53156-50996
  misc_feature (1)..(180): NCBI GI NO: 18399153 NR Description: expressed protein; protein id: At3g11220
  misc_feature (1)..(180): NCBI GI NO: 17063185 NR Description: AT3g11220/F11B9_116 [Arabidopsis thaliana]
  misc_feature (1)..(126): NCBI GI NO: 12861422 NR Description: unnamed protein product [Mus musculus]
  misc_feature (1)..(157): NCBI GI NO: 34858115 NR Description: similar to Paxneb protein [Rattus norvegicus]
  misc_feature (1)..(126): NCBI GI NO: 26329633 NR Description: unnamed protein product [Mus musculus]
  misc_feature (1)..(126): NCBI GI NO: 26347749 NR Description: unnamed protein product [Mus musculus]
  misc_feature (1)..(126): NCBI GI NO: 10129788 NR Description: Paxneb protein [Mus musculus]
  misc_feature (1)..(126): NCBI GI NO: 31542608 NR Description: elongation protein 4 homolog [Mus musculus]
  misc_feature (1)..(126): NCBI GI NO: 7020641 NR Description: unnamed protein product [Homo sapiens]
MFISSGIPDLDKILGGGFSLGSLVMVMEDPEAPHHMLLLRNFMSQGLVQKQPLLYASASRDPKSFLGTLPSPASPKGDNKSSDLSHEKDLRIAWQYKKYFGEPQLNLNTNNGGQHDYCNDFDLRKPLDRHFFSGNNVDCVSIKDSPNLTALQDCCAGFLAKFSRNEGSISSAGRIAIQSFCSPQCKYSNEEWHMLSFIRSLKGMARSSNAVIVVTFPPSLLPPSCSKRLQHMADTLLSVKAIPDEDKELAKLLTGYQDMIGLLNVHKVARLNTQVPVILEATTFSIKLQKRRFLVLECLNQAPVDGSSGSSYGTSGGCSGSTKAGPLDF

SEQ ID NO: 9487 - protein, 305 aa, Glycine max
  peptide (1)..(305): Ceres Seq. ID no. 12608493
  misc_feature (1)..(305): Pfam Name: Pfam Description:  PAXNEB protein
  misc_feature (1)..(305): NCBI GI NO: 12321866 NR Description: hypothetical protein; 53156-50996
  misc_feature (1)..(156): NCBI GI NO: 18399153 NR Description: expressed protein; protein id: At3g11220
  misc_feature (1)..(156): NCBI GI NO: 17063185 NR Description: AT3g11220/F11B9_116 [Arabidopsis thaliana]
  misc_feature (1)..(102): NCBI GI NO: 12861422 NR Description: unnamed protein product [Mus musculus]
  misc_feature (1)..(133): NCBI GI NO: 34858115 NR Description: similar to Paxneb protein [Rattus norvegicus]
  misc_feature (1)..(102): NCBI GI NO: 26329633 NR Description: unnamed protein product [Mus musculus]
  misc_feature (1)..(102): NCBI GI NO: 26347749 NR Description: unnamed protein product [Mus musculus]
  misc_feature (1)..(102): NCBI GI NO: 10129788 NR Description: Paxneb protein [Mus musculus]
  misc_feature (1)..(102): NCBI GI NO: 31542608 NR Description: elongation protein 4 homolog [Mus musculus]
  misc_feature (1)..(102): NCBI GI NO: 7020641 NR Description: unnamed protein product [Homo sapiens]
MVMEDPEAPHHMLLLRNFMSQGLVQKQPLLYASASRDPKSFLGTLPSPASPKGDNKSSDLSHEKDLRIAWQYKKYFGEPQLNLNTNNGGQHDYCNDFDLRKPLDRHFFSGNNVDCVSIKDSPNLTALQDCCAGFLAKFSRNEGSISSAGRIAIQSFCSPQCKYSNEEWHMLSFIRSLKGMARSSNAVIVVTFPPSLLPPSCSKRLQHMADTLLSVKAIPDEDKELAKLLTGYQDMIGLLNVHKVARLNTQVPVILEATTFSIKLQKRRFLVLECLNQAPVDGSSGSSYGTSGGCSGSTKAGPLDF

SEQ ID NO: 9488 - DNA, 1794 bp, Glycine max
  misc_feature (1)..(1794): Ceres Seq. ID no. 15171148
aaaaaaggaaacgtatagaaaaagcttctccaaagaatttgaaggagaaagattcattcatgttcattttttccttttccccttcgtccccatcaagtttctgattctctcttttcacttcctttctctttcttcattcttctttctcttttcaactattttctttacatttttttctttttctctcgcttttttcgcgttcactttctctactctgttttacgcattttatttattgttttgttagttaattttgcgattcgagtaattggtatgcttgtgttttctagaagacgatattttcacgacgattaagctgcgttttcgccggtgtcgttttaccgcaagatggtgtcgttttcggaaatatgcaaaaagggttgaagttctttcttcagcattgaatctttgattacataggttggtttctttggaactcaattcaattcaataattggtcctccctttttgtggaactcaattcaattaggttagtggaaaaaatatggttgaatcaattgctgcaacttcactccttggccaccgcccaatttgtggtggaagtttaaccagggatgtttctgctaaacgcaaatctttgaatactgttcggttcccaacaactgagtttcttggtgggggaaggattgtggtttctctggctttgcctaaatctgataagcaggataggtttgtgttttcatcaattaaggccttggctgtggagttaacaagagaagcacatgcttatagggaaaagaaattgcccaatagggataacaagattgaccgtggatttgatcagaggcctgatttgtggcctccggcgaatagggcggataagctgtcacttcggaatcccttgctccggcatgagaggatgggatgtggttggttgggtgctatatttgagtgggagggtgttctaattgaagacaaccccgatttagagaagcaggcttggctggcactctctcaggaagaaggcaaaccctctcctcctgcttttatcctcaagagaatagaaggcatgaagaatgaacaggcgatttcggaagtgctgtgttggtctagggatccggcacagctgagaagaatggctaatagaaaggaagaaatctaccaagctttgctgggtgggatatatagtttcttgtctgggtccaaggagtttgtgagtgttttgatgcattataagataccaatggcattggtttccacgcggcctagaaaggctcttgagtctgctatgggggagattgggattgaggacactttcagtgttattgtagcagcagaggatgttcataggggaaagcctgatccagaaatgtttgtgtatgctgcacagcttttgaacttcatacctgagagggtcattgtgtttggtaactccaatctaacagtggaggctgctcatgaagcccggatgaagtgtgtggctgttgctagcaggcatcctgtatatgagcttggggctgcagacttggttgtcaggcgccttgacgagctttcagtggttgatttgaagaatcttgcagacattgaaatgactgaatttgggtctgtggagcctgagatggagctggaggtggaaaaagatcatgatacatcatcacttgatgacaatttctggtaaatcctataaatgtacagttgattgaactcatctgattgttgatgatattagttacaggttagttacttgtgtatatggtaaacagaataaatggggaaaaaatgataagtggtatgcattgaacattgatgttactactaatgaattttctgttc

SEQ ID NO: 9489 - protein, 377 aa, Glycine max
  peptide (1)..(377): Ceres Seq. ID no. 15171149
  misc_feature (130)..(317): Pfam Name: Pfam Description:  haloacid dehalogenase-like hydrolase
  misc_feature (1)..(371): NCBI GI NO: 15234236 NR Description: haloacid dehalogenase-like hydrolase family
  misc_feature (132)..(363): NCBI GI NO: 10444400 NR Description: genetic modifier [Zea mays]
  misc_feature (132)..(363): NCBI GI NO: 18542168 NR Description: putative genetic modifier [Zea mays]
  misc_feature (117)..(364): NCBI GI NO: 38345597 NR Description: OSJNBb0012E24.15
  misc_feature (132)..(344): NCBI GI NO: 18399067 NR Description: haloacid dehalogenase-like hydrolase family
  misc_feature (132)..(344): NCBI GI NO: 21592870 NR Description: unknown [Arabidopsis thaliana]
  misc_feature (132)..(344): NCBI GI NO: 14532506 NR Description: AT3g10970/F9F8_21 [Arabidopsis thaliana]
  misc_feature (133)..(336): NCBI GI NO: 23018808 NR Description: hypothetical protein [Thermobifida fusca]
  misc_feature (132)..(347): NCBI GI NO: 23129248 NR Description: hypothetical protein [Nostoc punctiforme]
  misc_feature (219)..(346): NCBI GI NO: 23019853 NR Description: hypothetical protein [Thermobifida fusca]
MVESIAATSLLGHRPICGGSLTRDVSAKRKSLNTVRFPTTEFLGGGRIVVSLALPKSDKQDRFVFSSIKALAVELTREAHAYREKKLPNRDNKIDRGFDQRPDLWPPANRADKLSLRNPLLRHERMGCGWLGAIFEWEGVLIEDNPDLEKQAWLALSQEEGKPSPPAFILKRIEGMKNEQAISEVLCWSRDPAQLRRMANRKEEIYQALLGGIYSFLSGSKEFVSVLMHYKIPMALVSTRPRKALESAMGEIGIEDTFSVIVAAEDVHRGKPDPEMFVYAAQLLNFIPERVIVFGNSNLTVEAAHEARMKCVAVASRHPVYELGAADLVVRRLDELSVVDLKNLADIEMTEFGSVEPEMELEVEKDHDTSSLDDNFW

SEQ ID NO: 9490 - protein, 252 aa, Glycine max
  peptide (1)..(252): Ceres Seq. ID no. 15171150
  misc_feature (5)..(192): Pfam Name: Pfam Description:  haloacid dehalogenase-like hydrolase
  misc_feature (1)..(246): NCBI GI NO: 15234236 NR Description: haloacid dehalogenase-like hydrolase family
  misc_feature (7)..(238): NCBI GI NO: 10444400 NR Description: genetic modifier [Zea mays]
  misc_feature (7)..(238): NCBI GI NO: 18542168 NR Description: putative genetic modifier [Zea mays]
  misc_feature (1)..(239): NCBI GI NO: 38345597 NR Description: OSJNBb0012E24.15
  misc_feature (7)..(219): NCBI GI NO: 18399067 NR Description: haloacid dehalogenase-like hydrolase family
  misc_feature (7)..(219): NCBI GI NO: 21592870 NR Description: unknown [Arabidopsis thaliana]
  misc_feature (7)..(219): NCBI GI NO: 14532506 NR Description: AT3g10970/F9F8_21 [Arabidopsis thaliana]
  misc_feature (8)..(211): NCBI GI NO: 23018808 NR Description: hypothetical protein [Thermobifida fusca]
  misc_feature (7)..(222): NCBI GI NO: 23129248 NR Description: hypothetical protein [Nostoc punctiforme]
  misc_feature (94)..(221): NCBI GI NO: 23019853 NR Description: hypothetical protein [Thermobifida fusca]
MGCGWLGAIFEWEGVLIEDNPDLEKQAWLALSQEEGKPSPPAFILKRIEGMKNEQAISEVLCWSRDPAQLRRMANRKEEIYQALLGGIYSFLSGSKEFVSVLMHYKIPMALVSTRPRKALESAMGEIGIEDTFSVIVAAEDVHRGKPDPEMFVYAAQLLNFIPERVIVFGNSNLTVEAAHEARMKCVAVASRHPVYELGAADLVVRRLDELSVVDLKNLADIEMTEFGSVEPEMELEVEKDHDTSSLDDNFW

SEQ ID NO: 9491 - protein, 202 aa, Glycine max
  peptide (1)..(202): Ceres Seq. ID no. 15171151
  misc_feature (1)..(142): Pfam Name: Pfam Description:  haloacid dehalogenase-like hydrolase
  misc_feature (1)..(196): NCBI GI NO: 15234236 NR Description: haloacid dehalogenase-like hydrolase family
  misc_feature (1)..(188): NCBI GI NO: 10444400 NR Description: genetic modifier [Zea mays]
  misc_feature (1)..(188): NCBI GI NO: 18542168 NR Description: putative genetic modifier [Zea mays]
  misc_feature (1)..(189): NCBI GI NO: 38345597 NR Description: OSJNBb0012E24.15
  misc_feature (1)..(169): NCBI GI NO: 18399067 NR Description: haloacid dehalogenase-like hydrolase family
  misc_feature (1)..(169): NCBI GI NO: 21592870 NR Description: unknown [Arabidopsis thaliana]
  misc_feature (1)..(169): NCBI GI NO: 14532506 NR Description: AT3g10970/F9F8_21 [Arabidopsis thaliana]
  misc_feature (1)..(161): NCBI GI NO: 23018808 NR Description: hypothetical protein [Thermobifida fusca]
  misc_feature (1)..(172): NCBI GI NO: 23129248 NR Description: hypothetical protein [Nostoc punctiforme]
  misc_feature (44)..(171): NCBI GI NO: 23019853 NR Description: hypothetical protein [Thermobifida fusca]
MKNEQAISEVLCWSRDPAQLRRMANRKEEIYQALLGGIYSFLSGSKEFVSVLMHYKIPMALVSTRPRKALESAMGEIGIEDTFSVIVAAEDVHRGKPDPEMFVYAAQLLNFIPERVIVFGNSNLTVEAAHEARMKCVAVASRHPVYELGAADLVVRRLDELSVVDLKNLADIEMTEFGSVEPEMELEVEKDHDTSSLDDNFW

SEQ ID NO: 9492 - DNA, 866 bp, Glycine max
  misc_feature (1)..(866): Ceres Seq. ID no. 15177027
agttgtgacggattgatccaaagttgatggagaggatctaaatctgagttttgacgaactgggaagttacggcggaagaaaacctcttgcagttgttgacttgttggtgcaggtagttgaatatagtacattttgtcacacgaaagtttctgtgttacaatggaggagctgaaatctgctatggaggagcacatggaccttatggcagatcttgttcagaagctctcttcagatcttcgcgctggctttcgccccgcttacgataactttatcggttttttccatgccattgactggaaggaaccttggctaatgggattattaggattccatgttgtgttgctgcttgtagctatcatctctaggaagaagacaaactttcaaatgttcttgttccttttgacattggctggtgtatattttgcggagagtctgaacagatttttgggtaaaaactggaaaagcttctctagtcagaattactttgatccaaggggactatttatgtctgttctttggtctggaccacttcttgttatttctatgataatcttgatcaatacactcttctccttatgttacatgattgttaggtggaaaagagccgaactgagacatcgtgcaagggctgctcgtaataagcaggattagttgttttgttgtgggattttgatggattaaactctgaaggagttcatgtcaatggtaatgtaatcatatgttttacaaatgaattttgtttttccttttttttatttataattttcagatttagtacttgttatttccagttatgtctgtgtacactattaacgggaattttttctctccttttactgaaggaactgagaatttaacaaagtgct

SEQ ID NO: 9493 - protein, 163 aa, Glycine max
  peptide (1)..(163): Ceres Seq. ID no. 15177028
  misc_feature (1)..(163): NCBI GI NO: 18399227 NR Description: expressed protein [Arabidopsis thaliana]
  misc_feature (1)..(163): NCBI GI NO: 21554376 NR Description: unknown [Arabidopsis thaliana]
  misc_feature (3)..(163): NCBI GI NO: 38637052 NR Description: unknown protein
  misc_feature (40)..(163): NCBI GI NO: 24653051 NR Description: CG30051-PB [Drosophila melanogaster]
  misc_feature (44)..(162): NCBI GI NO: 31210097 NR Description: ENSANGP00000009975 [Anopheles gambiae]
  misc_feature (1)..(47): NCBI GI NO: 25518732 NR Description: hypothetical protein F7P12.4
  misc_feature (46)..(81): NCBI GI NO: 25518732 NR Description: hypothetical protein F7P12.4
  misc_feature (45)..(163): NCBI GI NO: 21595411 NR Description: Hypothetical protein DKFZp434C1714 [Homo sapiens]
  misc_feature (45)..(163): NCBI GI NO: 40548391 NR Description: hypothetical protein DKFZp434C1714 [Homo sapiens]
  misc_feature (45)..(163): NCBI GI NO: 11359939 NR Description: hypothetical protein DKFZp434C1714
MEELKSAMEEHMDLMADLVQKLSSDLRAGFRPAYDNFIGFFHAIDWKEPWLMGLLGFHVVLLLVAIISRKKTNFQMFLFLLTLAGVYFAESLNRFLGKNWKSFSSQNYFDPRGLFMSVLWSGPLLVISMIILINTLFSLCYMIVRWKRAELRHRARAARNKQD

SEQ ID NO: 9494 - protein, 156 aa, Glycine max
  peptide (1)..(156): Ceres Seq. ID no. 15177029
  misc_feature (1)..(156): NCBI GI NO: 18399227 NR Description: expressed protein [Arabidopsis thaliana]
  misc_feature (1)..(156): NCBI GI NO: 21554376 NR Description: unknown [Arabidopsis thaliana]
  misc_feature (1)..(156): NCBI GI NO: 38637052 NR Description: unknown protein
  misc_feature (33)..(156): NCBI GI NO: 24653051 NR Description: CG30051-PB [Drosophila melanogaster]
  misc_feature (37)..(155): NCBI GI NO: 31210097 NR Description: ENSANGP00000009975 [Anopheles gambiae]
  misc_feature (1)..(40): NCBI GI NO: 25518732 NR Description: hypothetical protein F7P12.4
  misc_feature (39)..(74): NCBI GI NO: 25518732 NR Description: hypothetical protein F7P12.4
  misc_feature (38)..(156): NCBI GI NO: 21595411 NR Description: Hypothetical protein DKFZp434C1714 [Homo sapiens]
  misc_feature (38)..(156): NCBI GI NO: 40548391 NR Description: hypothetical protein DKFZp434C1714 [Homo sapiens]
  misc_feature (38)..(156): NCBI GI NO: 11359939 NR Description: hypothetical protein DKFZp434C1714
MEEHMDLMADLVQKLSSDLRAGFRPAYDNFIGFFHAIDWKEPWLMGLLGFHVVLLLVAIISRKKTNFQMFLFLLTLAGVYFAESLNRFLGKNWKSFSSQNYFDPRGLFMSVLWSGPLLVISMIILINTLFSLCYMIVRWKRAELRHRARAARNKQD

SEQ ID NO: 9495 - protein, 152 aa, Glycine max
  peptide (1)..(152): Ceres Seq. ID no. 15177030
  misc_feature (1)..(152): NCBI GI NO: 18399227 NR Description: expressed protein [Arabidopsis thaliana]
  misc_feature (1)..(152): NCBI GI NO: 21554376 NR Description: unknown [Arabidopsis thaliana]
  misc_feature (1)..(152): NCBI GI NO: 38637052 NR Description: unknown protein
  misc_feature (29)..(152): NCBI GI NO: 24653051 NR Description: CG30051-PB [Drosophila melanogaster]
  misc_feature (33)..(151): NCBI GI NO: 31210097 NR Description: ENSANGP00000009975 [Anopheles gambiae]
  misc_feature (1)..(36): NCBI GI NO: 25518732 NR Description: hypothetical protein F7P12.4
  misc_feature (35)..(70): NCBI GI NO: 25518732 NR Description: hypothetical protein F7P12.4
  misc_feature (34)..(152): NCBI GI NO: 21595411 NR Description: Hypothetical protein DKFZp434C1714 [Homo sapiens]
  misc_feature (34)..(152): NCBI GI NO: 40548391 NR Description: hypothetical protein DKFZp434C1714 [Homo sapiens]
  misc_feature (34)..(152): NCBI GI NO: 11359939 NR Description: hypothetical protein DKFZp434C1714
MDLMADLVQKLSSDLRAGFRPAYDNFIGFFHAIDWKEPWLMGLLGFHVVLLLVAIISRKKTNFQMFLFLLTLAGVYFAESLNRFLGKNWKSFSSQNYFDPRGLFMSVLWSGPLLVISMIILINTLFSLCYMIVRWKRAELRHRARAARNKQD

SEQ ID NO: 9496 - DNA, 1392 bp, Glycine max
  misc_feature (1)..(1392): Ceres Seq. ID no. 13497992
taacaatcattattataacgcaaacttcaacttgtaatcaagggagagagaaaatttcaagcacaaaaaatggcggagaagaaagtggtgatcctaggaggtggtgttgccggtgccaaccttgcaaaaactatacaacgtcaagccaacgtcacccttattgatccgaaggaatattttgagattccatgggcaagtttgaggggattggttgagccaacttttgctgaaaggatagtgatcaaccatagagagtacttcaaaaagggtaaccttgttgtatccagtgctgtcaacataactgaaactgcagtggtgactgaagatggccagcagattgcctatgactatcttgttattgccactggacacacagaaccaatccccaaaaccaggagtgaaagacttgaccaatacaaaggagaaaatgcaaagatcaaatctgcaagttcagttttgattgttgggggaggtccaactggtgttgagcttgcagcagagattgctgttgattttcctgataagaaggtcaccatagtgcataaaggaacgaggttgcttgaatacattgggacaaaagcttccagcaagactttaaagtggctcaaatcaaagaaaattgatgtgaaactagaacaatcggtcgatttgagctcctcttcagaagaaaataagacatatcaaacttcaaatggagagactataaaagcagatcttcattttctatgcacagggaaaccacttggttcaacatggattagagaaactcttctaaagaatgacttggatgctgatggaaggatcaaggtcgatgagcacttgagagtgaagggcaagagcaacatttttgcaattggagatattacagatgttcaagaaatcaaacaagggatgtatgcaagtgctcatgctcaagtggttgccaagaacctgaagctattgatagagggaggaggcaaagagcgtaagttgggaacatacaaggcacagccaccaatatctatagtttcacttggaaggaaaatagctgttgcacagttcccattcatgactgtgcttggaaggcttcctggcatgatcaagtcaggggatttgtttgttgggaaaaccagaaaggaattaggactcgaacctaatgttaaaaaatcttaaatttggtatattgagtgagtgttgtggtgtgtaattgtgtatatacacttcttcaactctttttcttccttgtcattgttgtgcatgtgtaagttgattgtatgtgtttactttcctattgtattcaacaaattactttgtatctgtaatgtttcttaatgattttgatgttgtcggtgttgtctcttgagatatgggattggagtcagaagcagaatgagttagagtgttattcattgg

SEQ ID NO: 9497 - protein, 360 aa, Glycine max
  peptide (1)..(360): Ceres Seq. ID no. 13497993
  misc_feature (5)..(274): Pfam Name: Pfam Description:  Pyridine nucleotide-disulphide oxidoreductase
  misc_feature (4)..(357): NCBI GI NO: 22326972 NR Description: pyridine nucleotide-disulphide oxidoreductasefamily
  misc_feature (4)..(357): NCBI GI NO: 26450665 NR Description: unknown protein [Arabidopsis thaliana]
  misc_feature (4)..(357): NCBI GI NO: 15229901 NR Description: pyridine nucleotide-disulphide oxidoreductasefamily
  misc_feature (34)..(355): NCBI GI NO: 34581771 NR Description: pyridine nucleotide-disulphide oxidoreductase
  misc_feature (149)..(353): NCBI GI NO: 40641605 NR Description: putative pyridine nucleotide-disulphideoxidoreductase
  misc_feature (6)..(355): NCBI GI NO: 14318424 NR Description: apoptosis-inducing factor
  misc_feature (6)..(355): NCBI GI NO: 30017355 NR Description: RIKEN cDNA 5430437E11 [Mus musculus]
  misc_feature (6)..(312): NCBI GI NO: 24418885 NR Description: RIKEN cDNA 5430437E11 [Mus musculus]
  misc_feature (5)..(164): NCBI GI NO: 8745008 NR Description: hypothetical protein P1295.22 [Leishmania major]
  misc_feature (2)..(301): NCBI GI NO: 27764291 NR Description: unnamed protein product [Podospora anserina]
MAEKKVVILGGGVAGANLAKTIQRQANVTLIDPKEYFEIPWASLRGLVEPTFAERIVINHREYFKKGNLVVSSAVNITETAVVTEDGQQIAYDYLVIATGHTEPIPKTRSERLDQYKGENAKIKSASSVLIVGGGPTGVELAAEIAVDFPDKKVTIVHKGTRLLEYIGTKASSKTLKWLKSKKIDVKLEQSVDLSSSSEENKTYQTSNGETIKADLHFLCTGKPLGSTWIRETLLKNDLDADGRIKVDEHLRVKGKSNIFAIGDITDVQEIKQGMYASAHAQVVAKNLKLLIEGGGKERKLGTYKAQPPISIVSLGRKIAVAQFPFMTVLGRLPGMIKSGDLFVGKTRKELGLEPNVKKS

SEQ ID NO: 9498 - DNA, 1114 bp, Glycine max
  misc_feature (1)..(1114): Ceres Seq. ID no. 13594377
atcatcacttggaagaaaaaagagaggcaaaagtaaaagatggcaccttacatttctagagatagagcctctatttttgttttacttgcctcactagtccttccctttattctcctggactattcttcttctgtgttgtttgcaagtgcaaaatccccaaaatccaaggatgctgatttgttagaatttgctctcaatttggaatacttagaggctgagtttttcttgtttggggctttggggcatggattagatgtagttgctccaaacctaactgggggaggaccccttcccattggtgccaaaaaggttgaacttgacgatcttaccaatgatgtcatcttgcagtttgcttttcaggaagttggacacttaagggctataaagagcaaagtgacagggttccctaggccattgttggatctaagctcaaaatcttttgccaaactaatggacaatgcatttgggaaacctctggttcctccctttgatccctatgctaattccctcaactttataattgcatcttatgtgattccctatgttggcctcactggttatgttggtgccaatcgactactggaaagtgctacttctagggagcttgttgcggggcttctaggagtagagtctggacaagatgcaattttaagagaattgttgtatgaacgtaaagaacagttggtgccaccgtacggagtggccgtggaagagttcacaaaccgcatttctatacttaggagcaagttaggaaacagaggtttgaaagatgaaggtattgttgtgccttttggactcggtgccgagggtaaagttagaggtaacattcttgctggtgacgtaaactcactggcatattcaaggactccagaagaaatattaaggatagtatatggaagtggtgatgaacatgtttgtggtggtttctatcctataggagcaagtggtcaaatagctcaatcttacttaaattaagctaaagcatttgttttaaacttttatagattatacaacttgtctttaatccattgctaattttcttgttgctaaatattgttgatgggtgaagaccttgaaaaaacttttgataatatgcaaataataaaggagaaat

SEQ ID NO: 9499 - protein, 311 aa, Glycine max
  peptide (1)..(311): Ceres Seq. ID no. 13594378
  misc_feature (5)..(310): NCBI GI NO: 21593191 NR Description: dessication-related protein, putative
  misc_feature (5)..(310): NCBI GI NO: 18401988 NR Description: dessication-related protein -related
  misc_feature (43)..(310): NCBI GI NO: 25357137 NR Description: hypothetical protein T2J15.11
  misc_feature (40)..(310): NCBI GI NO: 38346151 NR Description: OSJNBb0118P14.11
  misc_feature (17)..(281): NCBI GI NO: 118926 NR Description: Desiccation-related protein PCC13-62 precursor
  misc_feature (42)..(311): NCBI GI NO: 15228845 NR Description: expressed protein [Arabidopsis thaliana]
  misc_feature (171)..(309): NCBI GI NO: 12083528 NR Description: similar to Arabidopsis thaliana hypotheticalprotein
  misc_feature (48)..(169): NCBI GI NO: 12083528 NR Description: similar to Arabidopsis thaliana hypotheticalprotein
  misc_feature (35)..(308): NCBI GI NO: 22984403 NR Description: hypothetical protein [Burkholderia fungorum]
  misc_feature (35)..(303): NCBI GI NO: 10957418 NR Description: dessication-associated protein
MAPYISRDRASIFVLLASLVLPFILLDYSSSVLFASAKSPKSKDADLLEFALNLEYLEAEFFLFGALGHGLDVVAPNLTGGGPLPIGAKKVELDDLTNDVILQFAFQEVGHLRAIKSKVTGFPRPLLDLSSKSFAKLMDNAFGKPLVPPFDPYANSLNFIIASYVIPYVGLTGYVGANRLLESATSRELVAGLLGVESGQDAILRELLYERKEQLVPPYGVAVEEFTNRISILRSKLGNRGLKDEGIVVPFGLGAEGKVRGNILAGDVNSLAYSRTPEEILRIVYGSGDEHVCGGFYPIGASGQIAQSYLN

SEQ ID NO: 9500 - protein, 174 aa, Glycine max
  peptide (1)..(174): Ceres Seq. ID no. 13594379
  misc_feature (1)..(173): NCBI GI NO: 21593191 NR Description: dessication-related protein, putative
  misc_feature (1)..(173): NCBI GI NO: 18401988 NR Description: dessication-related protein -related
  misc_feature (1)..(173): NCBI GI NO: 25357137 NR Description: hypothetical protein T2J15.11
  misc_feature (1)..(173): NCBI GI NO: 38346151 NR Description: OSJNBb0118P14.11
  misc_feature (1)..(144): NCBI GI NO: 118926 NR Description: Desiccation-related protein PCC13-62 precursor
  misc_feature (1)..(174): NCBI GI NO: 15228845 NR Description: expressed protein [Arabidopsis thaliana]
  misc_feature (34)..(172): NCBI GI NO: 12083528 NR Description: similar to Arabidopsis thaliana hypotheticalprotein
  misc_feature (1)..(32): NCBI GI NO: 12083528 NR Description: similar to Arabidopsis thaliana hypotheticalprotein
  misc_feature (1)..(171): NCBI GI NO: 22984403 NR Description: hypothetical protein [Burkholderia fungorum]
  misc_feature (1)..(166): NCBI GI NO: 10957418 NR Description: dessication-associated protein
MDNAFGKPLVPPFDPYANSLNFIIASYVIPYVGLTGYVGANRLLESATSRELVAGLLGVESGQDAILRELLYERKEQLVPPYGVAVEEFTNRISILRSKLGNRGLKDEGIVVPFGLGAEGKVRGNILAGDVNSLAYSRTPEEILRIVYGSGDEHVCGGFYPIGASGQIAQSYLN

SEQ ID NO: 9501 - DNA, 1454 bp, Glycine max
  misc_feature (1)..(1454): Ceres Seq. ID no. 15177935
aacgtacaaggccttttcttatctctctctttctttctcatcttttggggcctcaaaatagtaggtgccactacacaatatgggttccaaagtaaagaccttggttttgctctctttgttttgcttggctctatttgagtccttgcaccaagcaagagcagcaaagtcacataatgatcataatgtgactcgcttgaaggggagaaaggagttaaatagatgtaatttgttcattggaagttgggttattgacccttcacaccctctctatgactcctcaagctgcccctttatagatgctgagtttgattgccaaaagtatgggagacccgataagcagtatctcaaatactcttggaagcctgattcatgtgccttacccaggttcgatggagtgaatttcttgaccaagtggaagggtaagaagataatgtttgtgggagactcattgagtttgaacatgtgggaatcattgtcctgcatgcttcacgcgtcggtgccgaatgccaccaccagctttgtgaggagacaagcactctccactgtgaccttccaggactatggagtaaccatacaactatatcgcacaccatatttggtggacataattcaagaagatgctgggcgagtgctcacactagactccatacaagctggtaatgcttggacaggcatggacatgttgatcttcaactcctggcattggtggacccacaaaggagattctcaaggatgggattacataaggaacggttccaatctagtaaaggatatggatcgtttggatgcatttttcaaagggatgaccacatgggctggatgggttgatcaaaaggttgactctaccaaaactaaagttttctttcaaggcatttctcctactcattatcaaggtcaggagtggaatcaaccaagaaagagttgtagtggagaactagaaccatcagcagggtcaacatatcctgctggtctacctcctgcagcaaacatagtgaacaaagtgttaaagaacatgaagaatcaagtttatctacttgacataacacttctctcacaactacgaaaagatgcccacccttctgcctatggtggcttggatcatacgggtaatgactgcagtcattggtgcctaccaggagtacctgatacttggaatgaacttctatatgcagctctatttatgtgaagttatatattaatgttatattctagtaattaaaggaatggattcaattgtattataggactcttgaagaatagttatgacagacttgcaaactaagttagtcagggtgatcaaattgttacacgtgtccagaaattgggaaaagtactttagaaggggatagtaatgtttattggattacaaattggaattgtactaatgattgattgatgcataattcatattgaatctttcatattaataaaagcttgcaaatttcagttttaag

SEQ ID NO: 9502 - protein, 368 aa, Glycine max
  peptide (1)..(368): Ceres Seq. ID no. 15177936
  misc_feature (1)..(368): NCBI GI NO: 18396930 NR Description: expressed protein [Arabidopsis thaliana]
  misc_feature (39)..(368): NCBI GI NO: 18403435 NR Description: expressed protein [Arabidopsis thaliana]
  misc_feature (1)..(368): NCBI GI NO: 25366741 NR Description: F28N24.24 protein - Arabidopsis thaliana
  misc_feature (34)..(366): NCBI GI NO: 34911864 NR Description: OSJNBb0032K15.9
  misc_feature (42)..(367): NCBI GI NO: 18406003 NR Description: expressed protein [Arabidopsis thaliana]
  misc_feature (8)..(366): NCBI GI NO: 21593142 NR Description: unknown [Arabidopsis thaliana]
  misc_feature (8)..(366): NCBI GI NO: 28393769 NR Description: unknown protein [Arabidopsis thaliana]
  misc_feature (200)..(368): NCBI GI NO: 25408325 NR Description: hypothetical protein At2g34070
  misc_feature (39)..(138): NCBI GI NO: 25408325 NR Description: hypothetical protein At2g34070
  misc_feature (40)..(366): NCBI GI NO: 15228743 NR Description: expressed protein [Arabidopsis thaliana]
MGSKVKTLVLLSLFCLALFESLHQARAAKSHNDHNVTRLKGRKELNRCNLFIGSWVIDPSHPLYDSSSCPFIDAEFDCQKYGRPDKQYLKYSWKPDSCALPRFDGVNFLTKWKGKKIMFVGDSLSLNMWESLSCMLHASVPNATTSFVRRQALSTVTFQDYGVTIQLYRTPYLVDIIQEDAGRVLTLDSIQAGNAWTGMDMLIFNSWHWWTHKGDSQGWDYIRNGSNLVKDMDRLDAFFKGMTTWAGWVDQKVDSTKTKVFFQGISPTHYQGQEWNQPRKSCSGELEPSAGSTYPAGLPPAANIVNKVLKNMKNQVYLLDITLLSQLRKDAHPSAYGGLDHTGNDCSHWCLPGVPDTWNELLYAALFM

SEQ ID NO: 9503 - protein, 251 aa, Glycine max
  peptide (1)..(251): Ceres Seq. ID no. 15177937
  misc_feature (1)..(251): NCBI GI NO: 18396930 NR Description: expressed protein [Arabidopsis thaliana]
  misc_feature (1)..(251): NCBI GI NO: 18403435 NR Description: expressed protein [Arabidopsis thaliana]
  misc_feature (1)..(251): NCBI GI NO: 25366741 NR Description: F28N24.24 protein - Arabidopsis thaliana
  misc_feature (1)..(249): NCBI GI NO: 34911864 NR Description: OSJNBb0032K15.9
  misc_feature (1)..(250): NCBI GI NO: 18406003 NR Description: expressed protein [Arabidopsis thaliana]
  misc_feature (1)..(249): NCBI GI NO: 21593142 NR Description: unknown [Arabidopsis thaliana]
  misc_feature (1)..(249): NCBI GI NO: 28393769 NR Description: unknown protein [Arabidopsis thaliana]
  misc_feature (83)..(251): NCBI GI NO: 25408325 NR Description: hypothetical protein At2g34070
  misc_feature (1)..(21): NCBI GI NO: 25408325 NR Description: hypothetical protein At2g34070
  misc_feature (1)..(249): NCBI GI NO: 15228743 NR Description: expressed protein [Arabidopsis thaliana]
MFVGDSLSLNMWESLSCMLHASVPNATTSFVRRQALSTVTFQDYGVTIQLYRTPYLVDIIQEDAGRVLTLDSIQAGNAWTGMDMLIFNSWHWWTHKGDSQGWDYIRNGSNLVKDMDRLDAFFKGMTTWAGWVDQKVDSTKTKVFFQGISPTHYQGQEWNQPRKSCSGELEPSAGSTYPAGLPPAANIVNKVLKNMKNQVYLLDITLLSQLRKDAHPSAYGGLDHTGNDCSHWCLPGVPDTWNELLYAALFM

SEQ ID NO: 9504 - protein, 241 aa, Glycine max
  peptide (1)..(241): Ceres Seq. ID no. 15177938
  misc_feature (1)..(241): NCBI GI NO: 18396930 NR Description: expressed protein [Arabidopsis thaliana]
  misc_feature (1)..(241): NCBI GI NO: 18403435 NR Description: expressed protein [Arabidopsis thaliana]
  misc_feature (1)..(241): NCBI GI NO: 25366741 NR Description: F28N24.24 protein - Arabidopsis thaliana
  misc_feature (1)..(239): NCBI GI NO: 34911864 NR Description: OSJNBb0032K15.9
  misc_feature (1)..(240): NCBI GI NO: 18406003 NR Description: expressed protein [Arabidopsis thaliana]
  misc_feature (1)..(239): NCBI GI NO: 21593142 NR Description: unknown [Arabidopsis thaliana]
  misc_feature (1)..(239): NCBI GI NO: 28393769 NR Description: unknown protein [Arabidopsis thaliana]
  misc_feature (73)..(241): NCBI GI NO: 25408325 NR Description: hypothetical protein At2g34070
  misc_feature (1)..(11): NCBI GI NO: 25408325 NR Description: hypothetical protein At2g34070
  misc_feature (1)..(239): NCBI GI NO: 15228743 NR Description: expressed protein [Arabidopsis thaliana]
MWESLSCMLHASVPNATTSFVRRQALSTVTFQDYGVTIQLYRTPYLVDIIQEDAGRVLTLDSIQAGNAWTGMDMLIFNSWHWWTHKGDSQGWDYIRNGSNLVKDMDRLDAFFKGMTTWAGWVDQKVDSTKTKVFFQGISPTHYQGQEWNQPRKSCSGELEPSAGSTYPAGLPPAANIVNKVLKNMKNQVYLLDITLLSQLRKDAHPSAYGGLDHTGNDCSHWCLPGVPDTWNELLYAALFM

SEQ ID NO: 9505 - DNA, 1471 bp, Glycine max
  misc_feature (1)..(1471): Ceres Seq. ID no. 15168521
aaggtttcaattccgtcaaattctcaaaccctaaaataaattcagcaaatcacaaaagagaactatttattcctattccttgtatgcaatcttcctgaatataccagaattgttttcattattactactcaacaatttctttctttctttctttcttttggttttgcagcaacaaaatcaacaccaagcaaatggaagtaacagtcctcatgagctgcttccgccgctgcctcagccgccacaggcccctcacgtgggggttgaatccgagcaaatccggtccggtctgatggcggatcgggccaagattccggcaccggaaggagttctgaagtgtcctcggtgtgaatccaccaacacaaagttttgctacttcaacaattacagcctctctcagccaaggcacttctgcaagacatgtaggcgttattggacaagaggtggtgctctcaggaacgttcctgttggtggaggatgccgtaggaacaaaaagaacaaaaggtctcgctccaaatctccggtttctactgagaaaccatcacttcccaataatacaagtgcaatccctgagcttattggtcgtttcccacaacctttcatggcctctcttcagagtatgaaccgctatggtgtagggattaacacaggtgttaacttgcgtgagattcaagcacagaacgcttctcaaatggagtttcaaattggaggtcttggcaatggttcaagcgttgctactgcaggaggaggaggaggaggaggagtggagcagtggcggtttcagcagtttcctttcttgaatggttttgagtcaacttcagctgcttctaattcctacccttttcaaagtgaaattgttgaaggtttggttggagatattaatgccacaagttctaggattactcagctgccagcacgggttaaaatggaatataacggtggcttgaatttgtcaagatctcctttgaatgtctcagaaaatagtaaccatttctattcatggacggatttatctggtcttgcatcttcttcagcgagtcatctcttgtaactttgacctctcatatgggttagtagccacaaaaatttaagggttttggtgctgttattttttgatcaataattgaatgagtttccattttatgaagctctctctctccctttctcttggcatgtttaaactcatttatttatcgatccaaaaaatatttgtaccaataaactcttagatttatatatccgggttagaatgacagctctccaatgtcgttccaccgtcttcacgcgtcagtgttgttaacagaaatccaatcaggctggtagaatttaatcttcaattgtatatttttcttatcattggtttgtttatgtttttgcatcgagtcaagtttcttttgtgttctttttggctttctttgaacaacagtgtgtgcatgtattatgttttgtttgtttatgcgatatcatttgggct

SEQ ID NO: 9506 - protein, 252 aa, Glycine max
  peptide (1)..(252): Ceres Seq. ID no. 15168522
  misc_feature (10)..(70): Pfam Name: Pfam Description:  Dof domain, zinc finger
  misc_feature (1)..(251): NCBI GI NO: 11282341 NR Description: zinc finger protein OBP3 - Arabidopsis thaliana
  misc_feature (1)..(249): NCBI GI NO: 30684022 NR Description: Dof zinc finger protein [Arabidopsis thaliana]
  misc_feature (1)..(194): NCBI GI NO: 29124139 NR Description: putative DNA-binding protein
  misc_feature (1)..(233): NCBI GI NO: 25352305 NR Description: probable DOF zinc finger protein
  misc_feature (5)..(251): NCBI GI NO: 30694234 NR Description: Dof zinc finger protein [Arabidopsis thaliana]
  misc_feature (1)..(246): NCBI GI NO: 15224320 NR Description: Dof zinc finger protein [Arabidopsis thaliana]
  misc_feature (1)..(213): NCBI GI NO: 33146614 NR Description: putative dof zinc finger protein
  misc_feature (1)..(213): NCBI GI NO: 34900534 NR Description: DNA-binding protein Dof3-like protein
  misc_feature (1)..(232): NCBI GI NO: 25406987 NR Description: hypothetical protein
  misc_feature (1)..(232): NCBI GI NO: 30680246 NR Description: Dof zinc finger protein [Arabidopsis thaliana]
MADRAKIPAPEGVLKCPRCESTNTKFCYFNNYSLSQPRHFCKTCRRYWTRGGALRNVPVGGGCRRNKKNKRSRSKSPVSTEKPSLPNNTSAIPELIGRFPQPFMASLQSMNRYGVGINTGVNLREIQAQNASQMEFQIGGLGNGSSVATAGGGGGGGVEQWRFQQFPFLNGFESTSAASNSYPFQSEIVEGLVGDINATSSRITQLPARVKMEYNGGLNLSRSPLNVSENSNHFYSWTDLSGLASSSASHLL

SEQ ID NO: 9507 - protein, 149 aa, Glycine max
  peptide (1)..(149): Ceres Seq. ID no. 15168523
  misc_feature (1)..(148): NCBI GI NO: 11282341 NR Description: zinc finger protein OBP3 - Arabidopsis thaliana
  misc_feature (1)..(146): NCBI GI NO: 30684022 NR Description: Dof zinc finger protein [Arabidopsis thaliana]
  misc_feature (1)..(91): NCBI GI NO: 29124139 NR Description: putative DNA-binding protein
  misc_feature (1)..(130): NCBI GI NO: 25352305 NR Description: probable DOF zinc finger protein
  misc_feature (1)..(148): NCBI GI NO: 30694234 NR Description: Dof zinc finger protein [Arabidopsis thaliana]
  misc_feature (1)..(143): NCBI GI NO: 15224320 NR Description: Dof zinc finger protein [Arabidopsis thaliana]
  misc_feature (1)..(110): NCBI GI NO: 33146614 NR Description: putative dof zinc finger protein
  misc_feature (1)..(110): NCBI GI NO: 34900534 NR Description: DNA-binding protein Dof3-like protein
  misc_feature (1)..(129): NCBI GI NO: 25406987 NR Description: hypothetical protein
  misc_feature (1)..(129): NCBI GI NO: 30680246 NR Description: Dof zinc finger protein [Arabidopsis thaliana]
MASLQSMNRYGVGINTGVNLREIQAQNASQMEFQIGGLGNGSSVATAGGGGGGGVEQWRFQQFPFLNGFESTSAASNSYPFQSEIVEGLVGDINATSSRITQLPARVKMEYNGGLNLSRSPLNVSENSNHFYSWTDLSGLASSSASHLL

SEQ ID NO: 9508 - protein, 143 aa, Glycine max
  peptide (1)..(143): Ceres Seq. ID no. 15168524
  misc_feature (1)..(142): NCBI GI NO: 11282341 NR Description: zinc finger protein OBP3 - Arabidopsis thaliana
  misc_feature (1)..(140): NCBI GI NO: 30684022 NR Description: Dof zinc finger protein [Arabidopsis thaliana]
  misc_feature (1)..(85): NCBI GI NO: 29124139 NR Description: putative DNA-binding protein
  misc_feature (1)..(124): NCBI GI NO: 25352305 NR Description: probable DOF zinc finger protein
  misc_feature (1)..(142): NCBI GI NO: 30694234 NR Description: Dof zinc finger protein [Arabidopsis thaliana]
  misc_feature (1)..(137): NCBI GI NO: 15224320 NR Description: Dof zinc finger protein [Arabidopsis thaliana]
  misc_feature (1)..(104): NCBI GI NO: 33146614 NR Description: putative dof zinc finger protein
  misc_feature (1)..(104): NCBI GI NO: 34900534 NR Description: DNA-binding protein Dof3-like protein
  misc_feature (1)..(123): NCBI GI NO: 25406987 NR Description: hypothetical protein
  misc_feature (1)..(123): NCBI GI NO: 30680246 NR Description: Dof zinc finger protein [Arabidopsis thaliana]
MNRYGVGINTGVNLREIQAQNASQMEFQIGGLGNGSSVATAGGGGGGGVEQWRFQQFPFLNGFESTSAASNSYPFQSEIVEGLVGDINATSSRITQLPARVKMEYNGGLNLSRSPLNVSENSNHFYSWTDLSGLASSSASHLL

SEQ ID NO: 9509 - DNA, 1663 bp, Glycine max
  misc_feature (1)..(1663): Ceres Seq. ID no. 15176532
aaacttcttttatttccttcttcttctcttctctgttacagcaatggcttctttgccaacacttctctcgttcgccgtcatcttcttcaccgtcgccctcttatacctccgccgcgtgttccgccgccgtcagttccgcctcccgccggggagccacggcctgccgttgatcggcgagacgctgcagctgatatcggcgtacaagagcgacaatccggagcctttcatcgacgagcgcgtggagcggtacggttcgatcttcacgacgcacgtgttcggcgagccgacggtgttctcggcggacccggaggtgaaccggttcattctgcagaacgaagggaagctgttggattgcagttatcccggttcgatatcgaacctgctcggaaaacactctcttctgttgatgaaaggtgctctccacaagagaatgcactctctcacaatgagcttcgccaactcctccatcatcaaggatcatcttcttcaccacatcgaccgcctcatctgcctcaacctcgatgcctggtccgacactgtctttctcatggatcaggcaaaaaagataacatttgagttaacggtgaagcagttgatgagctttgacccagatgaatggactgagaatctaaggaaagagtatgttcttgtgattgaaggattcttcactctcccttttcctctcttctccaccacataccgcagagccatcaaggcaagaacaaaggtggcagaggcactagcgttggtagtgaggcagaggagaaaagagtatggtgaaaacaaagagaaaaagagtgacatgcttggggcactgttggcctccggcgaccacctttccgacgaggaaatagtggattttttgttggctttgctcgtcgccggttacgaaaccacctctaccataatgactcttgcgatcaagttcctcactgagactcctctggccttggcacagctcaaggaagagcatgaccaaatcagagcaaagagtcacccaggggcaccactggaatggacggattacaagtcaatggcatttactcaatgtgttgtgaatgagaccttgagagtggcaaacataattggtgggatatttaggagagcaacgacagacatcaacataaaaggttacactattcctaagggatggaaagtctttgcatcatttcgtgctgtacatctgaatcctgaacattacaaagatgcccggtccttcaatccctggagatggcagagtaactcatcagaaacagcaaatcctgggaatgtttatacaccatttggaggagggccaaggttgtgccctggctatgagctagccagagttgtactgtctgtcttccttcaccgcattgttacccgcttcagttgggttcctgctgaggaagataagttggtgttttttccaactactaggacgcagaagaggtatcctattattgtgcagcgtagacattagagaggaatgaccatgtatagcaatatgaaaattaagagcacaacagatagagaagggaaaaaaggaagctgagtgtagatcagtttaataagttaattttcatcacatgtaaataaataataaaattcatatctccccgttcatatatcaattgtctctgcaatgctcaacaaccagaaaagttggcaagaattttaacgc

SEQ ID NO: 9510 - protein, 486 aa, Glycine max
  peptide (1)..(486): Ceres Seq. ID no. 15176533
  misc_feature (15)..(486): NCBI GI NO: 9587211 NR Description: cytochrome P450 [Vigna radiata]
  misc_feature (23)..(485): NCBI GI NO: 15239203 NR Description: cytochrome p450 90A1 [Arabidopsis thaliana]
  misc_feature (46)..(482): NCBI GI NO: 34903584 NR Description: cytochrome P450-like protein
  misc_feature (41)..(484): NCBI GI NO: 34902330 NR Description: Putative steroid 22-alpha-hydroxylase
  misc_feature (42)..(482): NCBI GI NO: 13878393 NR Description: Cytochrome P450 90C1 (ROTUNDIFOLIA3)
  misc_feature (42)..(482): NCBI GI NO: 18419825 NR Description: rotundifolia3 (rot3) [Arabidopsis thaliana]
  misc_feature (47)..(482): NCBI GI NO: 25282635 NR Description: cytochrome P450 like protein
  misc_feature (46)..(484): NCBI GI NO: 18400142 NR Description: cytochrome P450, putative (CYP90D)
  misc_feature (82)..(485): NCBI GI NO: 15219454 NR Description: cytochrome P450 family [Arabidopsis thaliana]
  misc_feature (10)..(122): NCBI GI NO: 15219454 NR Description: cytochrome P450 family [Arabidopsis thaliana]
NFFYFLLLLFSVTAMASLPTLLSFAVIFFTVALLYLRRVFRRRQFRLPPGSHGLPLIGETLQLISAYKSDNPEPFIDERVERYGSIFTTHVFGEPTVFSADPEVNRFILQNEGKLLDCSYPGSISNLLGKHSLLLMKGALHKRMHSLTMSFANSSIIKDHLLHHIDRLICLNLDAWSDTVFLMDQAKKITFELTVKQLMSFDPDEWTENLRKEYVLVIEGFFTLPFPLFSTTYRRAIKARTKVAEALALVVRQRRKEYGENKEKKSDMLGALLASGDHLSDEEIVDFLLALLVAGYETTSTIMTLAIKFLTETPLALAQLKEEHDQIRAKSHPGAPLEWTDYKSMAFTQCVVNETLRVANIIGGIFRRATTDINIKGYTIPKGWKVFASFRAVHLNPEHYKDARSFNPWRWQSNSSETANPGNVYTPFGGGPRLCPGYELARVVLSVFLHRIVTRFSWVPAEEDKLVFFPTTRTQKRYPIIVQRRH

SEQ ID NO: 9511 - protein, 472 aa, Glycine max
  peptide (1)..(472): Ceres Seq. ID no. 15176534
  misc_feature (1)..(472): NCBI GI NO: 9587211 NR Description: cytochrome P450 [Vigna radiata]
  misc_feature (9)..(471): NCBI GI NO: 15239203 NR Description: cytochrome p450 90A1 [Arabidopsis thaliana]
  misc_feature (32)..(468): NCBI GI NO: 34903584 NR Description: cytochrome P450-like protein
  misc_feature (27)..(470): NCBI GI NO: 34902330 NR Description: Putative steroid 22-alpha-hydroxylase
  misc_feature (28)..(468): NCBI GI NO: 13878393 NR Description: Cytochrome P450 90C1 (ROTUNDIFOLIA3)
  misc_feature (28)..(468): NCBI GI NO: 18419825 NR Description: rotundifolia3 (rot3) [Arabidopsis thaliana]
  misc_feature (33)..(468): NCBI GI NO: 25282635 NR Description: cytochrome P450 like protein
  misc_feature (32)..(470): NCBI GI NO: 18400142 NR Description: cytochrome P450, putative (CYP90D)
  misc_feature (68)..(471): NCBI GI NO: 15219454 NR Description: cytochrome P450 family [Arabidopsis thaliana]
  misc_feature (1)..(108): NCBI GI NO: 15219454 NR Description: cytochrome P450 family [Arabidopsis thaliana]
MASLPTLLSFAVIFFTVALLYLRRVFRRRQFRLPPGSHGLPLIGETLQLISAYKSDNPEPFIDERVERYGSIFTTHVFGEPTVFSADPEVNRFILQNEGKLLDCSYPGSISNLLGKHSLLLMKGALHKRMHSLTMSFANSSIIKDHLLHHIDRLICLNLDAWSDTVFLMDQAKKITFELTVKQLMSFDPDEWTENLRKEYVLVIEGFFTLPFPLFSTTYRRAIKARTKVAEALALVVRQRRKEYGENKEKKSDMLGALLASGDHLSDEEIVDFLLALLVAGYETTSTIMTLAIKFLTETPLALAQLKEEHDQIRAKSHPGAPLEWTDYKSMAFTQCVVNETLRVANIIGGIFRRATTDINIKGYTIPKGWKVFASFRAVHLNPEHYKDARSFNPWRWQSNSSETANPGNVYTPFGGGPRLCPGYELARVVLSVFLHRIVTRFSWVPAEEDKLVFFPTTRTQKRYPIIVQRRH

SEQ ID NO: 9512 - protein, 351 aa, Glycine max
  peptide (1)..(351): Ceres Seq. ID no. 15176535
  misc_feature (1)..(351): NCBI GI NO: 9587211 NR Description: cytochrome P450 [Vigna radiata]
  misc_feature (1)..(350): NCBI GI NO: 15239203 NR Description: cytochrome p450 90A1 [Arabidopsis thaliana]
  misc_feature (1)..(347): NCBI GI NO: 34903584 NR Description: cytochrome P450-like protein
  misc_feature (1)..(349): NCBI GI NO: 34902330 NR Description: Putative steroid 22-alpha-hydroxylase
  misc_feature (1)..(347): NCBI GI NO: 13878393 NR Description: Cytochrome P450 90C1 (ROTUNDIFOLIA3)
  misc_feature (1)..(347): NCBI GI NO: 18419825 NR Description: rotundifolia3 (rot3) [Arabidopsis thaliana]
  misc_feature (1)..(347): NCBI GI NO: 25282635 NR Description: cytochrome P450 like protein
  misc_feature (1)..(349): NCBI GI NO: 18400142 NR Description: cytochrome P450, putative (CYP90D)
  misc_feature (1)..(350): NCBI GI NO: 15219454 NR Description: cytochrome P450 family [Arabidopsis thaliana]
  misc_feature (1)..(335): NCBI GI NO: 20520627 NR Description: putative cytochrome P450
MKGALHKRMHSLTMSFANSSIIKDHLLHHIDRLICLNLDAWSDTVFLMDQAKKITFELTVKQLMSFDPDEWTENLRKEYVLVIEGFFTLPFPLFSTTYRRAIKARTKVAEALALVVRQRRKEYGENKEKKSDMLGALLASGDHLSDEEIVDFLLALLVAGYETTSTIMTLAIKFLTETPLALAQLKEEHDQIRAKSHPGAPLEWTDYKSMAFTQCVVNETLRVANIIGGIFRRATTDINIKGYTIPKGWKVFASFRAVHLNPEHYKDARSFNPWRWQSNSSETANPGNVYTPFGGGPRLCPGYELARVVLSVFLHRIVTRFSWVPAEEDKLVFFPTTRTQKRYPIIVQRRH

SEQ ID NO: 9513 - DNA, 1743 bp, Glycine max
  misc_feature (1)..(1743): Ceres Seq. ID no. 15168476
atcaaattgggatgttcttctcaggaaggtccaaaaagtcagtgcagcgaaaacggacgatccgaagaatacccttttcatctctctctacaataatcatcatcttcctcttcttcttcagtaaattattgtacctgacgatcttctcggtttgatcttatatcaatggaatttttttagacagaactcggattcacagggaaatctgattgcataggaacaaaaaagacaacacctttttatctctacacaagtgattatggcggttgctgagaatgttggggccaaaatcggttcttccagtcaaaatttggaaaacaatgtagtgtcatcgaactcaggcgaggttgagcaatcaaaacccagaagtgggtccatcaacgacgatcagaagctgaacaacggtgtcttcaaccaccaagatagagttcctggcactatgccagtgcccaatagcaattataactacgaggcccaaatgggtcagatgcacacaaatggggtgaacaatgatgggtatggaatgaatggggtcatttgtggggagaatgggggtgagagtttcaagcgtgatatgagggatttggaagagcttttgtcaaagttgaatcccatggctgaggaatttgtgcccccatcactaaccaatactcatggctacctacctggacctggtgccggtgctggtgccgggtttggttaccctaataattttatactgctcaataactttggtgatgctaacggtcaaactaacagaaggaggaagaatggctataatcatgggaagcgaagagtgaatcataaaatggatatggagaagagagaagagatgattaggaggactgtttatgtgtcagacattgatcaactggttactgaagagcagttggcggggctctttcttaactgtggccaggtcgttgattgccgtgtttgtggggatcctaattctattctgaggtttgccttcgttgagtttacagatgaagatggtgcaagggctgctttgaacctgtctggaaccatgcttggatattacccgttgagagtactaccttcgaaaactgctattgcccctgttaatccaacatttttgcccaggtctgaagatgaaagggagatgtgttcaagaacaatttattgcacaaatattgacaagaagcttactcaagctgatgtcaaacacttctttgaatctatttgcggagaggttcaacggttgaggcttcttggagattaccatcattcaactcgaattgcttttgttgagttcacagtggctgagagtgcaattgcagctctaagctgtagtggggtgattttgggttcactgcccataagggtaagtccatcgaagacaccagttcgttcacgtgctcctcgtccttctatgcactgaatcaactttccatgtttctggggttgattgctgctgagatatatttacatatatacatacatagaaacagctatgttctaaggaacatgtggcatttagttggtacttttgtcctcatgtcttacagtatggttactttgctccccttgggggattatgggtctctgttttagcatgtagagtcgaatcgtacttcgaggatcttgatggcttaatttatgatgcacaatgtgtcgtgttgatcatgcaaggagagaagtttatggttgttgggtgtttctaacatctggaattcattttaaagaaacatgttacaaagccttcgttttcgttaaaaaaag

SEQ ID NO: 9514 - protein, 380 aa, Glycine max
  peptide (1)..(380): Ceres Seq. ID no. 15168477
  misc_feature (197)..(265): Pfam Name: a.k.a. RRM, RBD, or RNP domain Pfam Description: RNA recognition motif.
  misc_feature (63)..(380): NCBI GI NO: 15223304 NR Description: RNA-binding protein, putative
  misc_feature (83)..(380): NCBI GI NO: 15235177 NR Description: RNA-binding protein RBP37 [Arabidopsis thaliana]
  misc_feature (83)..(380): NCBI GI NO: 1174153 NR Description: RNA-binding protein
  misc_feature (89)..(376): NCBI GI NO: 15229132 NR Description: RNA-binding protein, putative
  misc_feature (1)..(86): NCBI GI NO: 15229132 NR Description: RNA-binding protein, putative
  misc_feature (106)..(378): NCBI GI NO: 15220902 NR Description: RNA-binding protein, putative
  misc_feature (180)..(380): NCBI GI NO: 14030687 NR Description: At1g32790 [Arabidopsis thaliana]
  misc_feature (84)..(377): NCBI GI NO: 15231858 NR Description: RNA-binding protein, putative
  misc_feature (112)..(363): NCBI GI NO: 8671859 NR Description: Contains similarity to RNA-binding protein fromArabidopsis thaliana gi|2129727 and
  misc_feature (108)..(371): NCBI GI NO: 15238531 NR Description: RNA-binding protein, putative
MAVAENVGAKIGSSSQNLENNVVSSNSGEVEQSKPRSGSINDDQKLNNGVFNHQDRVPGTMPVPNSNYNYEAQMGQMHTNGVNNDGYGMNGVICGENGGESFKRDMRDLEELLSKLNPMAEEFVPPSLTNTHGYLPGPGAGAGAGFGYPNNFILLNNFGDANGQTNRRRKNGYNHGKRRVNHKMDMEKREEMIRRTVYVSDIDQLVTEEQLAGLFLNCGQVVDCRVCGDPNSILRFAFVEFTDEDGARAALNLSGTMLGYYPLRVLPSKTAIAPVNPTFLPRSEDEREMCSRTIYCTNIDKKLTQADVKHFFESICGEVQRLRLLGDYHHSTRIAFVEFTVAESAIAALSCSGVILGSLPIRVSPSKTPVRSRAPRPSMH

SEQ ID NO: 9515 - protein, 320 aa, Glycine max
  peptide (1)..(320): Ceres Seq. ID no. 15168478
  misc_feature (137)..(205): Pfam Name: a.k.a. RRM, RBD, or RNP domain Pfam Description: RNA recognition motif.
  misc_feature (3)..(320): NCBI GI NO: 15223304 NR Description: RNA-binding protein, putative
  misc_feature (23)..(320): NCBI GI NO: 15235177 NR Description: RNA-binding protein RBP37 [Arabidopsis thaliana]
  misc_feature (23)..(320): NCBI GI NO: 1174153 NR Description: RNA-binding protein
  misc_feature (29)..(316): NCBI GI NO: 15229132 NR Description: RNA-binding protein, putative
  misc_feature (1)..(26): NCBI GI NO: 15229132 NR Description: RNA-binding protein, putative
  misc_feature (46)..(318): NCBI GI NO: 15220902 NR Description: RNA-binding protein, putative
  misc_feature (120)..(320): NCBI GI NO: 14030687 NR Description: At1g32790 [Arabidopsis thaliana]
  misc_feature (24)..(317): NCBI GI NO: 15231858 NR Description: RNA-binding protein, putative
  misc_feature (52)..(303): NCBI GI NO: 8671859 NR Description: Contains similarity to RNA-binding protein fromArabidopsis thaliana gi|2129727 and
  misc_feature (48)..(311): NCBI GI NO: 15238531 NR Description: RNA-binding protein, putative
MPVPNSNYNYEAQMGQMHTNGVNNDGYGMNGVICGENGGESFKRDMRDLEELLSKLNPMAEEFVPPSLTNTHGYLPGPGAGAGAGFGYPNNFILLNNFGDANGQTNRRRKNGYNHGKRRVNHKMDMEKREEMIRRTVYVSDIDQLVTEEQLAGLFLNCGQVVDCRVCGDPNSILRFAFVEFTDEDGARAALNLSGTMLGYYPLRVLPSKTAIAPVNPTFLPRSEDEREMCSRTIYCTNIDKKLTQADVKHFFESICGEVQRLRLLGDYHHSTRIAFVEFTVAESAIAALSCSGVILGSLPIRVSPSKTPVRSRAPRPSMH

SEQ ID NO: 9516 - protein, 307 aa, Glycine max
  peptide (1)..(307): Ceres Seq. ID no. 15168479
  misc_feature (124)..(192): Pfam Name: a.k.a. RRM, RBD, or RNP domain Pfam Description: RNA recognition motif.
  misc_feature (1)..(307): NCBI GI NO: 15223304 NR Description: RNA-binding protein, putative
  misc_feature (10)..(307): NCBI GI NO: 15235177 NR Description: RNA-binding protein RBP37 [Arabidopsis thaliana]
  misc_feature (10)..(307): NCBI GI NO: 1174153 NR Description: RNA-binding protein
  misc_feature (16)..(303): NCBI GI NO: 15229132 NR Description: RNA-binding protein, putative
  misc_feature (1)..(13): NCBI GI NO: 15229132 NR Description: RNA-binding protein, putative
  misc_feature (33)..(305): NCBI GI NO: 15220902 NR Description: RNA-binding protein, putative
  misc_feature (107)..(307): NCBI GI NO: 14030687 NR Description: At1g32790 [Arabidopsis thaliana]
  misc_feature (11)..(304): NCBI GI NO: 15231858 NR Description: RNA-binding protein, putative
  misc_feature (39)..(290): NCBI GI NO: 8671859 NR Description: Contains similarity to RNA-binding protein fromArabidopsis thaliana gi|2129727 and
  misc_feature (35)..(298): NCBI GI NO: 15238531 NR Description: RNA-binding protein, putative
MGQMHTNGVNNDGYGMNGVICGENGGESFKRDMRDLEELLSKLNPMAEEFVPPSLTNTHGYLPGPGAGAGAGFGYPNNFILLNNFGDANGQTNRRRKNGYNHGKRRVNHKMDMEKREEMIRRTVYVSDIDQLVTEEQLAGLFLNCGQVVDCRVCGDPNSILRFAFVEFTDEDGARAALNLSGTMLGYYPLRVLPSKTAIAPVNPTFLPRSEDEREMCSRTIYCTNIDKKLTQADVKHFFESICGEVQRLRLLGDYHHSTRIAFVEFTVAESAIAALSCSGVILGSLPIRVSPSKTPVRSRAPRPSMH

SEQ ID NO: 9517 - DNA, 1375 bp, Glycine max
  misc_feature (1)..(1375): Ceres Seq. ID no. 15224520
ggataaattatttagggggcagaaaagatcaaccgagtctaattccagcctttggctgattctctttgcaaaccaatctcatcatatattctcaaaccatatcagcttccccaccacacaaaaccataaaccaaaaactccattgattgaagaaaaagagagcatcatatcatcgtattcatggacacagaacaagaagagatgcagttcatggggctctacggcgtctacagagaatcctacaagatcatattcgcatggagcaaggtcttcaacaagatcaccttaaccctaatcctccctctctccttcatctttctcatccacatcgaagtctccaacatcctcttcggaaaaatcctccacaacacccaacaaatgatggaaaccccacaagacacgccccaataccacaacctcaccaacatgctctcttccgaatgggccattttcattctcttcaagctcctctacttcaccttcctcctcgtcttctccctcttatccacctcagcagcagtctacaccgtggcctcaatctacacttcacgagaagtcaccttctccaaagtcatgaacgttgttcccaaagtatggaaaagactcatggtaacttttttatgcacctttgtggcgtttttcgcgtacaacgttatgacactcgttgttttcgttatatgggcacttgcaataggactaaggaatggtggggttgtggttttggttgtgttggggatgttgtatttcgcggggtttgtgtacttaacggtggtttggcaactggcgagtgtggtgaccgtgttggaggaagacacgtgcggggtaagagcaatgatgaagaccaacgagttgataaaagggagaatagggttgaccgtactcatattcttgaagctcgtgatttcttttgggttgatacagtttctgttcaagaaaacggtggtacaagggtggaagttggggtctgtggatagaacgatttatggggtggtgtgtttggtgctgttctctcagttgtaccttttccaacttgttatacaaaccgtgctctatttcgtttgcaagtcctaccaccatcagaatattgacaaatctgctttgtcggatcaccttgaagtgtatcatggtgagtatgagcctttgaaggctaaagatgttcagatggaagagtgccatgtttgatagatatagcaaaattatgtgcatatctatctgctatagtttctaggtgtcataagaaatatgttccaatgtttgaaattaaatcaatcagatatatatgtcagagtgctgaatacacaggattagttatctgcagcatgtgccttaatttgcttttgcgctacgtgttaataaattcttgtagtttttattc

SEQ ID NO: 9518 - protein, 333 aa, Glycine max
  peptide (1)..(333): Ceres Seq. ID no. 15224521
  misc_feature (1)..(333): NCBI GI NO: 18397813 NR Description: expressed protein [Arabidopsis thaliana]
  misc_feature (1)..(333): NCBI GI NO: 30684945 NR Description: expressed protein [Arabidopsis thaliana]
  misc_feature (1)..(329): NCBI GI NO: 15241607 NR Description: expressed protein [Arabidopsis thaliana]
  misc_feature (1)..(333): NCBI GI NO: 7485737 NR Description: hypothetical protein F18F4
  misc_feature (1)..(329): NCBI GI NO: 34908936 NR Description: P0691E06.20
  misc_feature (11)..(303): NCBI GI NO: 15222319 NR Description: hypothetical protein [Arabidopsis thaliana]
  misc_feature (16)..(312): NCBI GI NO: 9295718 NR Description: T24P13.3 [Arabidopsis thaliana]
  misc_feature (11)..(316): NCBI GI NO: 27817928 NR Description: hypothetical protein
MDTEQEEMQFMGLYGVYRESYKIIFAWSKVFNKITLTLILPLSFIFLIHIEVSNILFGKILHNTQQMMETPQDTPQYHNLTNMLSSEWAIFILFKLLYFTFLLVFSLLSTSAAVYTVASIYTSREVTFSKVMNVVPKVWKRLMVTFLCTFVAFFAYNVMTLVVFVIWALAIGLRNGGVVVLVVLGMLYFAGFVYLTVVWQLASVVTVLEEDTCGVRAMMKTNELIKGRIGLTVLIFLKLVISFGLIQFLFKKTVVQGWKLGSVDRTIYGVVCLVLFSQLYLFQLVIQTVLYFVCKSYHHQNIDKSALSDHLEVYHGEYEPLKAKDVQMEECHV

SEQ ID NO: 9519 - protein, 326 aa, Glycine max
  peptide (1)..(326): Ceres Seq. ID no. 15224522
  misc_feature (1)..(326): NCBI GI NO: 18397813 NR Description: expressed protein [Arabidopsis thaliana]
  misc_feature (1)..(326): NCBI GI NO: 30684945 NR Description: expressed protein [Arabidopsis thaliana]
  misc_feature (1)..(322): NCBI GI NO: 15241607 NR Description: expressed protein [Arabidopsis thaliana]
  misc_feature (1)..(326): NCBI GI NO: 7485737 NR Description: hypothetical protein F18F4
  misc_feature (1)..(322): NCBI GI NO: 34908936 NR Description: P0691E06.20
  misc_feature (4)..(296): NCBI GI NO: 15222319 NR Description: hypothetical protein [Arabidopsis thaliana]
  misc_feature (9)..(305): NCBI GI NO: 9295718 NR Description: T24P13.3 [Arabidopsis thaliana]
  misc_feature (4)..(309): NCBI GI NO: 27817928 NR Description: hypothetical protein
MQFMGLYGVYRESYKIIFAWSKVFNKITLTLILPLSFIFLIHIEVSNILFGKILHNTQQMMETPQDTPQYHNLTNMLSSEWAIFILFKLLYFTFLLVFSLLSTSAAVYTVASIYTSREVTFSKVMNVVPKVWKRLMVTFLCTFVAFFAYNVMTLVVFVIWALAIGLRNGGVVVLVVLGMLYFAGFVYLTVVWQLASVVTVLEEDTCGVRAMMKTNELIKGRIGLTVLIFLKLVISFGLIQFLFKKTVVQGWKLGSVDRTIYGVVCLVLFSQLYLFQLVIQTVLYFVCKSYHHQNIDKSALSDHLEVYHGEYEPLKAKDVQMEECHV

SEQ ID NO: 9520 - protein, 323 aa, Glycine max
  peptide (1)..(323): Ceres Seq. ID no. 15224523
  misc_feature (1)..(323): NCBI GI NO: 18397813 NR Description: expressed protein [Arabidopsis thaliana]
  misc_feature (1)..(323): NCBI GI NO: 30684945 NR Description: expressed protein [Arabidopsis thaliana]
  misc_feature (1)..(319): NCBI GI NO: 15241607 NR Description: expressed protein [Arabidopsis thaliana]
  misc_feature (1)..(323): NCBI GI NO: 7485737 NR Description: hypothetical protein F18F4
  misc_feature (1)..(319): NCBI GI NO: 34908936 NR Description: P0691E06.20
  misc_feature (1)..(293): NCBI GI NO: 15222319 NR Description: hypothetical protein [Arabidopsis thaliana]
  misc_feature (6)..(302): NCBI GI NO: 9295718 NR Description: T24P13.3 [Arabidopsis thaliana]
  misc_feature (1)..(306): NCBI GI NO: 27817928 NR Description: hypothetical protein
MGLYGVYRESYKIIFAWSKVFNKITLTLILPLSFIFLIHIEVSNILFGKILHNTQQMMETPQDTPQYHNLTNMLSSEWAIFILFKLLYFTFLLVFSLLSTSAAVYTVASIYTSREVTFSKVMNVVPKVWKRLMVTFLCTFVAFFAYNVMTLVVFVIWALAIGLRNGGVVVLVVLGMLYFAGFVYLTVVWQLASVVTVLEEDTCGVRAMMKTNELIKGRIGLTVLIFLKLVISFGLIQFLFKKTVVQGWKLGSVDRTIYGVVCLVLFSQLYLFQLVIQTVLYFVCKSYHHQNIDKSALSDHLEVYHGEYEPLKAKDVQMEECHV

SEQ ID NO: 9521 - DNA, 1412 bp, Glycine max
  misc_feature (1)..(1412): Ceres Seq. ID no. 15168525
attctattccatgtctcttcttgagagagttcacttctctcactctaaaagtctaaatcaccttgttttcaactgtctctctttccttttctagtcgagtacttttctttcacttttcacttagctgataggtttcaacttgcaccatcttttcattagcattctgtatcagtcctcatcccactgtatgcattgctagctctcatattaccccaactccttgattttctttttgtttgagtcgtagaagatgttacttagaagctcctcggcaccgattctaacttcattgttacactattcaaaggagtcctcctccgaaccagaacacattcttaaccttcctaaaacagcatcagctttaagtctaagccaaaacttggtggagatagaccttaaaaagtcatcaagtcccaagagaaaaaatcgtgtgccacttagtagtgttcctaaaaatcaacagagtaaaaagataaaagaaagagatgaagggaaagatccacaacaaaaaacttgcatgaaagcaaaatcttcaattcaagaactgttttctagtttggatttagataagggactcctggatcatgaagagcgtggttcggggaagaaagatagttggttacagacttcagtgatgggtggtggaatggggagtgatggtggttggatttgtggtggttgcaatggaagtggaagaggctcaggtggtggacatggaaaaaagtggggtttccatgaaggaaatgatcatggtagagataggacggaagcttattaccagaacatgattgaagcaaaccccagtgatgcacttttgctaggaaattatgcaaagtttttgaaagaggtttgtgacgattatcctaaatcaaaagagtatctcgaaagggcgattttggctaatcctgatgatggtcatattctgtccctctatgcggagttaatatggcaattagagaaggatgctaatcgagctgaaggatattttgatcaagccattaaaagtgccccatatgatagctatgtcctagcttcatatgctaatttcctttgggatgccgaagaagacgaggaagataaagactgtaaaaataaatcgaatcacagccatacatatccaactgatctctttcatggagctaaccatcacattcatttaactgcagccatagaaacctcaccactgtttcttaagtgaaggtgtgtgacttgtatgacaaatgtaagtaaataatagtcttttgtcagctattgtgaatagcagcttggatcatactaagagaaagcatctttaatttggtgcctcttgtgctggtaaaaaggcttccaccattgtatcttttaagaataatgttagttttgtatgcagagactaaggagtaaagagcaacactgtattatatacctttaac

SEQ ID NO: 9522 - protein, 315 aa, Glycine max
  peptide (1)..(315): Ceres Seq. ID no. 15168526
  misc_feature (1)..(296): NCBI GI NO: 15241290 NR Description: expressed protein [Arabidopsis thaliana]
  misc_feature (1)..(306): NCBI GI NO: 18412668 NR Description: expressed protein [Arabidopsis thaliana]
  misc_feature (121)..(278): NCBI GI NO: 7487766 NR Description: hypothetical protein T6K21
  misc_feature (121)..(278): NCBI GI NO: 18414994 NR Description: expressed protein [Arabidopsis thaliana]
  misc_feature (121)..(278): NCBI GI NO: 21592868 NR Description: unknown [Arabidopsis thaliana]
  misc_feature (134)..(281): NCBI GI NO: 14532728 NR Description: unknown protein [Arabidopsis thaliana]
  misc_feature (134)..(281): NCBI GI NO: 15236755 NR Description: expressed protein [Arabidopsis thaliana]
  misc_feature (132)..(276): NCBI GI NO: 32488305 NR Description: OSJNBb0065L13.14
  misc_feature (145)..(277): NCBI GI NO: 37537130 NR Description: unknown protein
  misc_feature (175)..(294): NCBI GI NO: 18390404 NR Description: expressed protein [Arabidopsis thaliana]
MLLRSSSAPILTSLLHYSKESSSEPEHILNLPKTASALSLSQNLVEIDLKKSSSPKRKNRVPLSSVPKNQQSKKIKERDEGKDPQQKTCMKAKSSIQELFSSLDLDKGLLDHEERGSGKKDSWLQTSVMGGGMGSDGGWICGGCNGSGRGSGGGHGKKWGFHEGNDHGRDRTEAYYQNMIEANPSDALLLGNYAKFLKEVCDDYPKSKEYLERAILANPDDGHILSLYAELIWQLEKDANRAEGYFDQAIKSAPYDSYVLASYANFLWDAEEDEEDKDCKNKSNHSHTYPTDLFHGANHHIHLTAAIETSPLFLK

SEQ ID NO: 9523 - protein, 226 aa, Glycine max
  peptide (1)..(226): Ceres Seq. ID no. 15168527
  misc_feature (1)..(207): NCBI GI NO: 15241290 NR Description: expressed protein [Arabidopsis thaliana]
  misc_feature (1)..(217): NCBI GI NO: 18412668 NR Description: expressed protein [Arabidopsis thaliana]
  misc_feature (32)..(189): NCBI GI NO: 7487766 NR Description: hypothetical protein T6K21
  misc_feature (32)..(189): NCBI GI NO: 21592868 NR Description: unknown [Arabidopsis thaliana]
  misc_feature (32)..(189): NCBI GI NO: 18414994 NR Description: expressed protein [Arabidopsis thaliana]
  misc_feature (45)..(192): NCBI GI NO: 14532728 NR Description: unknown protein [Arabidopsis thaliana]
  misc_feature (45)..(192): NCBI GI NO: 15236755 NR Description: expressed protein [Arabidopsis thaliana]
  misc_feature (43)..(187): NCBI GI NO: 32488305 NR Description: OSJNBb0065L13.14
  misc_feature (56)..(188): NCBI GI NO: 37537130 NR Description: unknown protein
  misc_feature (86)..(205): NCBI GI NO: 18390404 NR Description: expressed protein [Arabidopsis thaliana]
MKAKSSIQELFSSLDLDKGLLDHEERGSGKKDSWLQTSVMGGGMGSDGGWICGGCNGSGRGSGGGHGKKWGFHEGNDHGRDRTEAYYQNMIEANPSDALLLGNYAKFLKEVCDDYPKSKEYLERAILANPDDGHILSLYAELIWQLEKDANRAEGYFDQAIKSAPYDSYVLASYANFLWDAEEDEEDKDCKNKSNHSHTYPTDLFHGANHHIHLTAAIETSPLFLK

SEQ ID NO: 9524 - protein, 187 aa, Glycine max
  peptide (1)..(187): Ceres Seq. ID no. 15168528
  misc_feature (1)..(168): NCBI GI NO: 15241290 NR Description: expressed protein [Arabidopsis thaliana]
  misc_feature (1)..(178): NCBI GI NO: 18412668 NR Description: expressed protein [Arabidopsis thaliana]
  misc_feature (1)..(150): NCBI GI NO: 7487766 NR Description: hypothetical protein T6K21
  misc_feature (1)..(150): NCBI GI NO: 21592868 NR Description: unknown [Arabidopsis thaliana]
  misc_feature (1)..(150): NCBI GI NO: 18414994 NR Description: expressed protein [Arabidopsis thaliana]
  misc_feature (6)..(153): NCBI GI NO: 14532728 NR Description: unknown protein [Arabidopsis thaliana]
  misc_feature (6)..(153): NCBI GI NO: 15236755 NR Description: expressed protein [Arabidopsis thaliana]
  misc_feature (4)..(148): NCBI GI NO: 32488305 NR Description: OSJNBb0065L13.14
  misc_feature (17)..(149): NCBI GI NO: 37537130 NR Description: unknown protein
  misc_feature (47)..(166): NCBI GI NO: 18390404 NR Description: expressed protein [Arabidopsis thaliana]
MGGGMGSDGGWICGGCNGSGRGSGGGHGKKWGFHEGNDHGRDRTEAYYQNMIEANPSDALLLGNYAKFLKEVCDDYPKSKEYLERAILANPDDGHILSLYAELIWQLEKDANRAEGYFDQAIKSAPYDSYVLASYANFLWDAEEDEEDKDCKNKSNHSHTYPTDLFHGANHHIHLTAAIETSPLFLK

SEQ ID NO: 9525 - DNA, 1600 bp, Glycine max
  misc_feature (1)..(1600): Ceres Seq. ID no. 15168496
aacacttacccatcccatggaatccgcaacatcatggagtaaccctctcccactttccagtctcccttccccttcgcattcacgccacccctccgccttcaaatttatggctttttcaactcttcacactttctcactcccttccctttcttctccctcttctttccacccatttcccctttcctctctctctccaaaacccacttctttcaaccctcgccctctcttccctcgcaccatgcacgcctcgcgcatccaagatgccgttggaggggcactggccctcgtccaatcgtcccccgctacgtggcagtccgcgcttctcagcaacgcgctgatctttttcttggggtctccgattttggtcagcgggttgtctctttccgggatcggtgctgcgtttctgctcggaacgctcacttggcgcgcttttgggccttctgggttcttccttgttgccacgtactttgttattggtactgctgctacaaaggtcaaaatggcacagaaagtggctcagggggttgctgagaaaaaaagaggaagaaggggtccgggcagtgttattggatccagtgctgctggttgcatttgtgctttcctcacgatttttggtgttgggggagaggcattttctcggctttggagacttggatttgttgccagtttctgcactaagttgagtgacactgtctcaagtgagattgggaaggcatatggcaaaacaacgtaccttgttacaacattcaaggtagtcccaagaggcacagaaggggctgttagtgttgaaggaaccttggcagggattttagcatccatagttctagcatttgtcagttttctcatcggtgaggttggttcacatgaagcaattatatgtgtactagctgctcagattgctaatcttggtgagagcataattggtgctgcacttcaagagaaggaaggatttaaatggcttaacaatgatgcagtcaatgtcatcaacatatcaatgggcagtatcatagcagtcttcatgcagcaagcactccagatctggggttcctaaacttgatgcagggttttcgaggagctcaatcatattaacatagtgaccatcttgataagtgcttatctagggcacggatttgaacaatggagcagtttggataaaatgattattcgtttatttgtcattgaaaactgacttggatatttatactcctggatgtttgagtgccatatgagaagcagccttctctgacacaagattcatctgcaaatttaaaatggctagaaacccgtccttctgatcatacccaaaccatgttggttgttacaaaggtgtggcaatggaaaccacaaaactcagtaagctgtagccatgattcaactcttgtatgggaagtagtggttcttccaaaatgtagatgtgaacttcttcttcttgatctagaacagtttcaaccaagcatttctgtctatcgttcttgtttgtcccttttattttctggctgttgggagggtaagattgggggggaggggtctttgtttctggccttgatccgtttttttaaatgcatgcactcactgaaatacagtcattgaaagaatagtt

SEQ ID NO: 9526 - protein, 349 aa, Glycine max
  peptide (1)..(349): Ceres Seq. ID no. 15168497
  misc_feature (102)..(341): Pfam Name: Pfam Description:  Integral membrane protein DUF92
  misc_feature (21)..(347): NCBI GI NO: 18412044 NR Description: expressed protein [Arabidopsis thaliana]
  misc_feature (47)..(347): NCBI GI NO: 21592713 NR Description: unknown [Arabidopsis thaliana]
  misc_feature (36)..(320): NCBI GI NO: 34910822 NR Description: P0456A01.17
  misc_feature (97)..(346): NCBI GI NO: 16330187 NR Description: hypothetical protein [Synechocystis sp. PCC 6803]
  misc_feature (78)..(338): NCBI GI NO: 22299927 NR Description: ORF_ID:tlr2384~hypothetical protein
  misc_feature (103)..(337): NCBI GI NO: 37520469 NR Description: hypothetical protein gll0900
  misc_feature (217)..(340): NCBI GI NO: 23125371 NR Description: hypothetical protein [Nostoc punctiforme]
  misc_feature (103)..(207): NCBI GI NO: 23125371 NR Description: hypothetical protein [Nostoc punctiforme]
  misc_feature (103)..(340): NCBI GI NO: 23043616 NR Description: hypothetical protein
  misc_feature (98)..(349): NCBI GI NO: 17229104 NR Description: hypothetical protein [Nostoc sp. PCC 7120]
TLTHPMESATSWSNPLPLSSLPSPSHSRHPSAFKFMAFSTLHTFSLPSLSSPSSFHPFPLSSLSPKPTSFNPRPLFPRTMHASRIQDAVGGALALVQSSPATWQSALLSNALIFFLGSPILVSGLSLSGIGAAFLLGTLTWRAFGPSGFFLVATYFVIGTAATKVKMAQKVAQGVAEKKRGRRGPGSVIGSSAAGCICAFLTIFGVGGEAFSRLWRLGFVASFCTKLSDTVSSEIGKAYGKTTYLVTTFKVVPRGTEGAVSVEGTLAGILASIVLAFVSFLIGEVGSHEAIICVLAAQIANLGESIIGAALQEKEGFKWLNNDAVNVINISMGSIIAVFMQQALQIWGS

SEQ ID NO: 9527 - protein, 344 aa, Glycine max
  peptide (1)..(344): Ceres Seq. ID no. 15168498
  misc_feature (97)..(336): Pfam Name: Pfam Description:  Integral membrane protein DUF92
  misc_feature (16)..(342): NCBI GI NO: 18412044 NR Description: expressed protein [Arabidopsis thaliana]
  misc_feature (42)..(342): NCBI GI NO: 21592713 NR Description: unknown [Arabidopsis thaliana]
  misc_feature (31)..(315): NCBI GI NO: 34910822 NR Description: P0456A01.17
  misc_feature (92)..(341): NCBI GI NO: 16330187 NR Description: hypothetical protein [Synechocystis sp. PCC 6803]
  misc_feature (73)..(333): NCBI GI NO: 22299927 NR Description: ORF_ID:tlr2384~hypothetical protein
  misc_feature (98)..(332): NCBI GI NO: 37520469 NR Description: hypothetical protein gll0900
  misc_feature (212)..(335): NCBI GI NO: 23125371 NR Description: hypothetical protein [Nostoc punctiforme]
  misc_feature (98)..(202): NCBI GI NO: 23125371 NR Description: hypothetical protein [Nostoc punctiforme]
  misc_feature (98)..(335): NCBI GI NO: 23043616 NR Description: hypothetical protein
  misc_feature (93)..(344): NCBI GI NO: 17229104 NR Description: hypothetical protein [Nostoc sp. PCC 7120]
MESATSWSNPLPLSSLPSPSHSRHPSAFKFMAFSTLHTFSLPSLSSPSSFHPFPLSSLSPKPTSFNPRPLFPRTMHASRIQDAVGGALALVQSSPATWQSALLSNALIFFLGSPILVSGLSLSGIGAAFLLGTLTWRAFGPSGFFLVATYFVIGTAATKVKMAQKVAQGVAEKKRGRRGPGSVIGSSAAGCICAFLTIFGVGGEAFSRLWRLGFVASFCTKLSDTVSSEIGKAYGKTTYLVTTFKVVPRGTEGAVSVEGTLAGILASIVLAFVSFLIGEVGSHEAIICVLAAQIANLGESIIGAALQEKEGFKWLNNDAVNVINISMGSIIAVFMQQALQIWGS

SEQ ID NO: 9528 - protein, 314 aa, Glycine max
  peptide (1)..(314): Ceres Seq. ID no. 15168499
  misc_feature (67)..(306): Pfam Name: Pfam Description:  Integral membrane protein DUF92
  misc_feature (1)..(312): NCBI GI NO: 18412044 NR Description: expressed protein [Arabidopsis thaliana]
  misc_feature (12)..(312): NCBI GI NO: 21592713 NR Description: unknown [Arabidopsis thaliana]
  misc_feature (1)..(285): NCBI GI NO: 34910822 NR Description: P0456A01.17
  misc_feature (62)..(311): NCBI GI NO: 16330187 NR Description: hypothetical protein [Synechocystis sp. PCC 6803]
  misc_feature (43)..(303): NCBI GI NO: 22299927 NR Description: ORF_ID:tlr2384~hypothetical protein
  misc_feature (68)..(302): NCBI GI NO: 37520469 NR Description: hypothetical protein gll0900
  misc_feature (182)..(305): NCBI GI NO: 23125371 NR Description: hypothetical protein [Nostoc punctiforme]
  misc_feature (68)..(172): NCBI GI NO: 23125371 NR Description: hypothetical protein [Nostoc punctiforme]
  misc_feature (68)..(305): NCBI GI NO: 23043616 NR Description: hypothetical protein
  misc_feature (63)..(314): NCBI GI NO: 17229104 NR Description: hypothetical protein [Nostoc sp. PCC 7120]
MAFSTLHTFSLPSLSSPSSFHPFPLSSLSPKPTSFNPRPLFPRTMHASRIQDAVGGALALVQSSPATWQSALLSNALIFFLGSPILVSGLSLSGIGAAFLLGTLTWRAFGPSGFFLVATYFVIGTAATKVKMAQKVAQGVAEKKRGRRGPGSVIGSSAAGCICAFLTIFGVGGEAFSRLWRLGFVASFCTKLSDTVSSEIGKAYGKTTYLVTTFKVVPRGTEGAVSVEGTLAGILASIVLAFVSFLIGEVGSHEAIICVLAAQIANLGESIIGAALQEKEGFKWLNNDAVNVINISMGSIIAVFMQQALQIWGS

SEQ ID NO: 9529 - DNA, 1324 bp, Glycine max
  misc_feature (1)..(1324): Ceres Seq. ID no. 13594402
ctaatcgaaaaaaccaaaatctggtaattaagatcttctcttcagaagatgtgtaacaccctcaagttcaacccctttaagaaccgtttgctaataatgttcatgctggttctttctctccccttcaatgttcaatcccaagccaaagatagtgaagaacagaacctggcagaactccctcaaacggttcatccaagcaagggaatagtaatagcagttctctccacaatgtttgccataacattactcttacttctctatgttaaattctgccgaactatccctcatgaactccttagtcaaaactcaaatctccaaaactttcagggcctaactcgatcaaggtctagagtttctgggattgacaaacaagtagttgaaacacttcctttcttcaagttctcttccctcaagggttccaaagaaggcctagaatgcaccgtttgtctctccaaattcgaggacacagagactctaagacttcttccaaagtgcaagcacgctttccacatgaattgcattgacaagtggtttgaaagccactctacgtgccctctttgtagacgcagggttgaagcaggggacattaaaaacctcaacttttcattaagctcgcggttcctccgagttccttcaaatctcacggaggatccaaaccttgaaatctttgttcacagagagccatctcatggagggtcagcatcgatccaaaggtcatatttacccttagaccagcggtgtcgaggatcatcgagaagaggcttttgggacgtgggcaagtgcaagaaacaagaactactgcttattgatgatagcagttctattggtgggacaagaaagtggaacaaaccggtgcacgtgatgaatcataagatagttatctctaatgtttttacgaggagcaggtggagtgatcttaatgcttcggacctgttgtcattgaacagtgagatgcttaatgatgtttgcagtgggagattctgtttgtgtcctttggaatccagcgacgacagcggaaattttcatgggatttcgagttctaatgaggaagaaaactcgtttacggcactgaatagtcctgcggagaagaggtgcatgtctgagaggtttacacaaaaggggaaggagaataggatcagagaatgtgtgacatctaatggggccagtgagaggctgtggaaggtttggttgccaattgcgcgaagaacggtccaatggtttgcgatacaagaaaggaattcggttgaattagaacacaaaaccttagcttcaaatgtctgatcaatgcgactaaattgttggtaacgtgtatgtttgtgcattc

SEQ ID NO: 9530 - protein, 410 aa, Glycine max
  peptide (1)..(410): Ceres Seq. ID no. 13594403
  misc_feature (130)..(171): Pfam Name: RING finger Pfam Description: Zinc finger, C3HC4 type
  misc_feature (17)..(334): NCBI GI NO: 15235482 NR Description: zinc finger
  misc_feature (370)..(404): NCBI GI NO: 15235482 NR Description: zinc finger
  misc_feature (16)..(398): NCBI GI NO: 15225285 NR Description: zinc finger
  misc_feature (49)..(208): NCBI GI NO: 15239252 NR Description: zinc finger
  misc_feature (7)..(177): NCBI GI NO: 7487705 NR Description: hypothetical protein T5J17
  misc_feature (7)..(177): NCBI GI NO: 25407810 NR Description: hypothetical protein AT4g40070
  misc_feature (16)..(205): NCBI GI NO: 15219561 NR Description: RING zinc finger protein -related
  misc_feature (39)..(194): NCBI GI NO: 15224200 NR Description: zinc finger
  misc_feature (42)..(206): NCBI GI NO: 15809840 NR Description: AT4g30400/F17I23_260 [Arabidopsis thaliana]
  misc_feature (10)..(172): NCBI GI NO: 19347753 NR Description: putative RING-H2 zinc finger protein ATL6
MCNTLKFNPFKNRLLIMFMLVLSLPFNVQSQAKDSEEQNLAELPQTVHPSKGIVIAVLSTMFAITLLLLLYVKFCRTIPHELLSQNSNLQNFQGLTRSRSRVSGIDKQVVETLPFFKFSSLKGSKEGLECTVCLSKFEDTETLRLLPKCKHAFHMNCIDKWFESHSTCPLCRRRVEAGDIKNLNFSLSSRFLRVPSNLTEDPNLEIFVHREPSHGGSASIQRSYLPLDQRCRGSSRRGFWDVGKCKKQELLLIDDSSSIGGTRKWNKPVHVMNHKIVISNVFTRSRWSDLNASDLLSLNSEMLNDVCSGRFCLCPLESSDDSGNFHGISSSNEEENSFTALNSPAEKRCMSERFTQKGKENRIRECVTSNGASERLWKVWLPIARRTVQWFAIQERNSVELEHKTLASNV

SEQ ID NO: 9531 - protein, 394 aa, Glycine max
  peptide (1)..(394): Ceres Seq. ID no. 13594404
  misc_feature (114)..(155): Pfam Name: RING finger Pfam Description: Zinc finger, C3HC4 type
  misc_feature (1)..(318): NCBI GI NO: 15235482 NR Description: zinc finger
  misc_feature (354)..(388): NCBI GI NO: 15235482 NR Description: zinc finger
  misc_feature (1)..(382): NCBI GI NO: 15225285 NR Description: zinc finger
  misc_feature (33)..(192): NCBI GI NO: 15239252 NR Description: zinc finger
  misc_feature (1)..(161): NCBI GI NO: 7487705 NR Description: hypothetical protein T5J17
  misc_feature (1)..(161): NCBI GI NO: 25407810 NR Description: hypothetical protein AT4g40070
  misc_feature (1)..(189): NCBI GI NO: 15219561 NR Description: RING zinc finger protein -related
  misc_feature (23)..(178): NCBI GI NO: 15224200 NR Description: zinc finger
  misc_feature (26)..(190): NCBI GI NO: 15809840 NR Description: AT4g30400/F17I23_260 [Arabidopsis thaliana]
  misc_feature (1)..(156): NCBI GI NO: 19347753 NR Description: putative RING-H2 zinc finger protein ATL6
MFMLVLSLPFNVQSQAKDSEEQNLAELPQTVHPSKGIVIAVLSTMFAITLLLLLYVKFCRTIPHELLSQNSNLQNFQGLTRSRSRVSGIDKQVVETLPFFKFSSLKGSKEGLECTVCLSKFEDTETLRLLPKCKHAFHMNCIDKWFESHSTCPLCRRRVEAGDIKNLNFSLSSRFLRVPSNLTEDPNLEIFVHREPSHGGSASIQRSYLPLDQRCRGSSRRGFWDVGKCKKQELLLIDDSSSIGGTRKWNKPVHVMNHKIVISNVFTRSRWSDLNASDLLSLNSEMLNDVCSGRFCLCPLESSDDSGNFHGISSSNEEENSFTALNSPAEKRCMSERFTQKGKENRIRECVTSNGASERLWKVWLPIARRTVQWFAIQERNSVELEHKTLASNV

SEQ ID NO: 9532 - protein, 392 aa, Glycine max
  peptide (1)..(392): Ceres Seq. ID no. 13594405
  misc_feature (112)..(153): Pfam Name: RING finger Pfam Description: Zinc finger, C3HC4 type
  misc_feature (1)..(316): NCBI GI NO: 15235482 NR Description: zinc finger
  misc_feature (352)..(386): NCBI GI NO: 15235482 NR Description: zinc finger
  misc_feature (1)..(380): NCBI GI NO: 15225285 NR Description: zinc finger
  misc_feature (31)..(190): NCBI GI NO: 15239252 NR Description: zinc finger
  misc_feature (1)..(159): NCBI GI NO: 7487705 NR Description: hypothetical protein T5J17
  misc_feature (1)..(159): NCBI GI NO: 25407810 NR Description: hypothetical protein AT4g40070
  misc_feature (1)..(187): NCBI GI NO: 15219561 NR Description: RING zinc finger protein -related
  misc_feature (21)..(176): NCBI GI NO: 15224200 NR Description: zinc finger
  misc_feature (24)..(188): NCBI GI NO: 15809840 NR Description: AT4g30400/F17I23_260 [Arabidopsis thaliana]
  misc_feature (1)..(154): NCBI GI NO: 19347753 NR Description: putative RING-H2 zinc finger protein ATL6
MLVLSLPFNVQSQAKDSEEQNLAELPQTVHPSKGIVIAVLSTMFAITLLLLLYVKFCRTIPHELLSQNSNLQNFQGLTRSRSRVSGIDKQVVETLPFFKFSSLKGSKEGLECTVCLSKFEDTETLRLLPKCKHAFHMNCIDKWFESHSTCPLCRRRVEAGDIKNLNFSLSSRFLRVPSNLTEDPNLEIFVHREPSHGGSASIQRSYLPLDQRCRGSSRRGFWDVGKCKKQELLLIDDSSSIGGTRKWNKPVHVMNHKIVISNVFTRSRWSDLNASDLLSLNSEMLNDVCSGRFCLCPLESSDDSGNFHGISSSNEEENSFTALNSPAEKRCMSERFTQKGKENRIRECVTSNGASERLWKVWLPIARRTVQWFAIQERNSVELEHKTLASNV

SEQ ID NO: 9533 - DNA, 1037 bp, Glycine max
  misc_feature (1)..(1037): Ceres Seq. ID no. 13581740
gaaaagagaattgagctggcttggtgatccctgctccatcagaggttagggtttggcagagaacagaaattgggaaattcctcaatcttttgaactcgtcaagtgcgtgcaacactgtacaataatcttcatcgtccttgaaattcccaatcccctgtagtggtagtaagttgctagcaatcgagaatgggagggcacggaggtctcaacattctcccccaaaagcgatggaacgtttacaatttcgacaacagagagaaggtccgtcgcgacgaagagcaagccgccagggaggagcagctcaagcgtgaagagacccggaagcgcgacgccgagctccgcctcgaccgactccgcgtcgctcgcggcttggcgccgtcgattccgccgcctcccgaatccgaacctcagccttcctcccgctccgaacccgtgccttcctccgaccctggccacatcaacctcttcgaggggatcaacatttttgacccaattcagaaggacggtgctgctgaaagggattgggcgaagaggaggaagaagattgagaagggaggaggacccaagcccaagcccacagtttctgtgggcccggaggatgagaagtataggctgggctatgggcttgcggggaagggggttcagttgccgtggtatcttcggaagcctgatggtgaaggtgtcggtgatgataataaggatgaaggtggtgacgtggataggagagaaaataagggtgagaagaagaggaagactatggaggaattgagggaagagaggttgaaaagggagaggaaagagaaggatagggagagggctttgagacacgagaagatgcagagtcacagagatggttctggttatggcagtaggaggaggttcaccagatgaacataggttttttgtgttctttttctgaactgatttttgtttctgaagtttcatgtaattggaagttatgcaatttggattcagtagtatattgtataagggaagataggtttatatagttaatcaaagtggtttggttttctttc

SEQ ID NO: 9534 - protein, 234 aa, Glycine max
  peptide (1)..(234): Ceres Seq. ID no. 13581741
  misc_feature (1)..(231): NCBI GI NO: 30683690 NR Description: expressed protein [Arabidopsis thaliana]
  misc_feature (1)..(230): NCBI GI NO: 7485079 NR Description: hypothetical protein - Arabidopsis thaliana
  misc_feature (1)..(234): NCBI GI NO: 37535892 NR Description: hypothetical protein
  misc_feature (7)..(224): NCBI GI NO: 39585902 NR Description: Hypothetical protein CBG05151
  misc_feature (1)..(57): NCBI GI NO: 23489800 NR Description: hypothetical protein [Plasmodium yoelii yoelii]
MGGHGGLNILPQKRWNVYNFDNREKVRRDEEQAAREEQLKREETRKRDAELRLDRLRVARGLAPSIPPPPESEPQPSSRSEPVPSSDPGHINLFEGINIFDPIQKDGAAERDWAKRRKKIEKGGGPKPKPTVSVGPEDEKYRLGYGLAGKGVQLPWYLRKPDGEGVGDDNKDEGGDVDRRENKGEKKRKTMEELREERLKRERKEKDRERALRHEKMQSHRDGSGYGSRRRFTR

SEQ ID NO: 9535 - DNA, 772 bp, Glycine max
  misc_feature (1)..(772): Ceres Seq. ID no. 14316530
attctccaaccaacggcgacaacaacaaagattctttctagtttcttcctttcctttcctttttcgtcgccaacacggtaaacaaaaccccccaaatttcctcaattagggtttcaatccacattccaattccccaaccctcttcttccccatcctccaaatcccgaaactttccccaactgggtcctcaagtacgccacggcgagccctcgtagctcgcgatctcagaaaccaacgatgccgaaatcctcacgattcctcgtcgtcgcgatcgccgtcgccgcgctctgcgtgatcctccccgtcgcggcggcggcggatctcgaggaccccggcgtgctgcggctgccgtcggacagcctgtgcggcaaaacgacgccgtcttcgtgcccggcaaagtgcttccgcgccgaccccgtttgcggcgcggacggcgtgacgtactggtgcggttgcgcagaggcggcgtgcgcaggcgtggaggttgcgaaattggggttctgtgaagtcgggaatggtggctcggcgccgattcctgggcaagctctgcttttggtgcacattgtttggctcattgtgttggggttctccgtgttgttcggtcttttttagataattgggtttctttatgtatctaccatgatcagagggtgttatggttttggttctttgggattctttgagggttctttttgtaaattgatcaaacggccattcttgtattgtatgtatgattattcttattattgtaatttcacaactttcttgattc

SEQ ID NO: 9536 - protein, 124 aa, Glycine max
  peptide (1)..(124): Ceres Seq. ID no. 14316531
  misc_feature (44)..(89): Pfam Name: Pfam Description:  Kazal-type serine protease inhibitor domain
  misc_feature (4)..(124): NCBI GI NO: 18411677 NR Description: expressed protein [Arabidopsis thaliana]
  misc_feature (4)..(124): NCBI GI NO: 21555759 NR Description: unknown [Arabidopsis thaliana]
  misc_feature (6)..(122): NCBI GI NO: 34909170 NR Description: P0468B07.28
  misc_feature (1)..(124): NCBI GI NO: 18412211 NR Description: expressed protein [Arabidopsis thaliana]
  misc_feature (1)..(124): NCBI GI NO: 21554106 NR Description: unknown [Arabidopsis thaliana]
MPKSSRFLVVAIAVAALCVILPVAAAADLEDPGVLRLPSDSLCGKTTPSSCPAKCFRADPVCGADGVTYWCGCAEAACAGVEVAKLGFCEVGNGGSAPIPGQALLLVHIVWLIVLGFSVLFGLF

SEQ ID NO: 9537 - DNA, 512 bp, Glycine max
  misc_feature (1)..(512): Ceres Seq. ID no. 13581734
  misc_feature (391)..(391): n is a, c, t, g, unknown, or other
  misc_feature (452)..(452): n is a, c, t, g, unknown, or other
  misc_feature (455)..(455): n is a, c, t, g, unknown, or other
  misc_feature (394)..(394): n is a, c, t, g, unknown, or other
  misc_feature (453)..(453): n is a, c, t, g, unknown, or other
  misc_feature (451)..(451): n is a, c, t, g, unknown, or other
  misc_feature (454)..(454): n is a, c, t, g, unknown, or other
  misc_feature (392)..(392): n is a, c, t, g, unknown, or other
  misc_feature (393)..(393): n is a, c, t, g, unknown, or other
atttcatactacaacctcgcagttcaaaagttcaaaccccaaatcttcaaaatcctcacagcaaacccaaaataaaacaacaacaacataaaaaaaccttaacaaaaccaaaaccccaagagaaaaacaccacacttccaatcaaatgttcttcctctctttgcccttctcttcctgcttcagagcttcacaacccaaccacgatcccaccaccctctcaacgaacctcaccacctacatctaccacaccgaatacggcaccgtttcgctgacatggtcacgctccatgctaggccgctccctccacgtgaacctccacaaccactcctcctttcacctccacgtcaaaccctgaaggaaaaaagggtccaagaagctttctcacaacacnnnnttcctctggaacctctcctccgcgagattcgaatccggacgacccgaacctcgctcnnnnntctacctcgccatcgaggtagaacacagcctcagcctcctcgtgggggacttatccc

SEQ ID NO: 9538 - protein, 89 aa, Glycine max
  peptide (1)..(89): Ceres Seq. ID no. 13581735
  misc_feature (27)..(89): Pfam Name: Pfam Description:  Mucin-like glycoprotein
  misc_feature (5)..(89): NCBI GI NO: 188864 NR Description: mucin
  misc_feature (3)..(89): NCBI GI NO: 188864 NR Description: mucin
  misc_feature (5)..(89): NCBI GI NO: 186396 NR Description: mucin
  misc_feature (32)..(89): NCBI GI NO: 188864 NR Description: mucin
  misc_feature (7)..(89): NCBI GI NO: 188864 NR Description: mucin
  misc_feature (5)..(89): NCBI GI NO: 17566006 NR Description: Reverse transcriptase [Caenorhabditis elegans]
  misc_feature (5)..(89): NCBI GI NO: 2135765 NR Description: mucin 2 precursor, intestinal - human (fragments)
  misc_feature (3)..(89): NCBI GI NO: 186396 NR Description: mucin
  misc_feature (32)..(89): NCBI GI NO: 186396 NR Description: mucin
FILQPRSSKVQTPNLQNPHSKPKIKQQQHKKTLTKPKPQEKNTTLPIKCSSSLCPSLPASELHNPTTIPPPSQRTSPPTSTTPNTAPFR

SEQ ID NO: 9539 - protein, 79 aa, Glycine max
  peptide (1)..(79): Ceres Seq. ID no. 13581736
  misc_feature (40)..(40): Xaa is any aa, unknown or other
  misc_feature (41)..(41): Xaa is any aa, unknown or other
  misc_feature (60)..(60): Xaa is any aa, unknown or other
  misc_feature (61)..(61): Xaa is any aa, unknown or other
MVTLHARPLPPREPPQPLLLSPPRQTLKEKRVQEAFSQHXXPLEPLLREIRIRTTRTSLXXLPRHRGRTQPQPPRGGLI

SEQ ID NO: 9540 - protein, 69 aa, Glycine max
  peptide (1)..(69): Ceres Seq. ID no. 13581737
MFFLSLPFSSCFRASQPNHDPTTLSTNLTTYIYHTEYGTVSLTWSRSMLGRSLHVNLHNHSSFHLHVKP

SEQ ID NO: 9541 - DNA, 1061 bp, Glycine max
  misc_feature (1)..(1061): Ceres Seq. ID no. 14316536
gaacaaattaagagtaattgtcaccaacatagtaacatttaaccacacctgtggccaaatgacatcctcagttcccttggtctccaccttattgctttgctctattgctcttctctactctgcatcatttggagctgaagcatggacctcgccctacatacccgtctcttccctcatcagcaaaagtctttatgacacatttttccttcacaaagatgacactgcatgccctgccaaagacttctacccctacgacgccttcattcgtgcatccaaatccttccctgcgtttggtaccaccggatgtttagcaacacgcaagcgtgagattgctgcgtttctcgctcagatttcccacgaaaccactggcggctgggccaccgcacccgacggcccatttgcatggggtctctgcttcaaggaagaaattagtcctcagagtaattactgtgattctactaacacccaatggccttgtttcccaggcaaaagctacaagggtcgaggacccattcaactttcttggaactacaactatggtccagcagggaaggctttgggatttgatgggctgaggaacccagagattgtggcgaacaattctgtgatagccttcaaaactgctatgtggttttggatgacagagcaaaagccaaaaccttcatgccacaatgtgatggttgggatatatgtgccgacagaagatgacatagcagcaaaccgaacagcgggttatggtttggtgactaacataatcaatggtggactggaatgtgggattcctggtgatgcaagagtgaatgatcggattgggtttttcgaaaggtatacgaagttgttcaacgtggacactggacctaacttggattgtgcatatcagaaacccttctaactctttcgttatgtttttgttttgtgtttttcttttcctttaatttaatttttttttctctgccaagactttaataatgtattgaaagaaagcaaatactacctgcttcatggaattttcctaatgtactcaaaacagaagttgacaaacaaagttttatattattctt

SEQ ID NO: 9542 - protein, 296 aa, Glycine max
  peptide (1)..(296): Ceres Seq. ID no. 14316537
  misc_feature (34)..(296): NCBI GI NO: 2129820 NR Description: chitinase (EC 3.2.1.14) class II - peanut
  misc_feature (25)..(296): NCBI GI NO: 5880847 NR Description: chitinase precursor [Petroselinum crispum]
  misc_feature (25)..(296): NCBI GI NO: 5880845 NR Description: chitinase precursor [Petroselinum crispum]
  misc_feature (23)..(296): NCBI GI NO: 6002766 NR Description: class II chitinase [Fragaria x ananassa]
  misc_feature (29)..(296): NCBI GI NO: 15234281 NR Description: glycosyl hydrolase family 19 (chitinase)
  misc_feature (28)..(296): NCBI GI NO: 15217733 NR Description: glycosyl hydrolase family 19 (chitinase)
  misc_feature (37)..(289): NCBI GI NO: 4008074 NR Description: chitinase [Cynodon dactylon]
  misc_feature (25)..(296): NCBI GI NO: 34894264 NR Description: unnamed protein product
  misc_feature (90)..(296): NCBI GI NO: 4008072 NR Description: chitinase [Cynodon dactylon]
  misc_feature (44)..(296): NCBI GI NO: 7798668 NR Description: class I chitinase [Arabis lyallii]
NKLRVIVTNIVTFNHTCGQMTSSVPLVSTLLLCSIALLYSASFGAEAWTSPYIPVSSLISKSLYDTFFLHKDDTACPAKDFYPYDAFIRASKSFPAFGTTGCLATRKREIAAFLAQISHETTGGWATAPDGPFAWGLCFKEEISPQSNYCDSTNTQWPCFPGKSYKGRGPIQLSWNYNYGPAGKALGFDGLRNPEIVANNSVIAFKTAMWFWMTEQKPKPSCHNVMVGIYVPTEDDIAANRTAGYGLVTNIINGGLECGIPGDARVNDRIGFFERYTKLFNVDTGPNLDCAYQKPF

SEQ ID NO: 9543 - protein, 277 aa, Glycine max
  peptide (1)..(277): Ceres Seq. ID no. 14316538
  misc_feature (15)..(277): NCBI GI NO: 2129820 NR Description: chitinase (EC 3.2.1.14) class II - peanut
  misc_feature (6)..(277): NCBI GI NO: 5880847 NR Description: chitinase precursor [Petroselinum crispum]
  misc_feature (6)..(277): NCBI GI NO: 5880845 NR Description: chitinase precursor [Petroselinum crispum]
  misc_feature (4)..(277): NCBI GI NO: 6002766 NR Description: class II chitinase [Fragaria x ananassa]
  misc_feature (10)..(277): NCBI GI NO: 15234281 NR Description: glycosyl hydrolase family 19 (chitinase)
  misc_feature (9)..(277): NCBI GI NO: 15217733 NR Description: glycosyl hydrolase family 19 (chitinase)
  misc_feature (18)..(270): NCBI GI NO: 4008074 NR Description: chitinase [Cynodon dactylon]
  misc_feature (6)..(277): NCBI GI NO: 34894264 NR Description: unnamed protein product
  misc_feature (71)..(277): NCBI GI NO: 4008072 NR Description: chitinase [Cynodon dactylon]
  misc_feature (25)..(277): NCBI GI NO: 7798668 NR Description: class I chitinase [Arabis lyallii]
MTSSVPLVSTLLLCSIALLYSASFGAEAWTSPYIPVSSLISKSLYDTFFLHKDDTACPAKDFYPYDAFIRASKSFPAFGTTGCLATRKREIAAFLAQISHETTGGWATAPDGPFAWGLCFKEEISPQSNYCDSTNTQWPCFPGKSYKGRGPIQLSWNYNYGPAGKALGFDGLRNPEIVANNSVIAFKTAMWFWMTEQKPKPSCHNVMVGIYVPTEDDIAANRTAGYGLVTNIINGGLECGIPGDARVNDRIGFFERYTKLFNVDTGPNLDCAYQKPF

SEQ ID NO: 9544 - DNA, 1822 bp, Glycine max
  misc_feature (1)..(1822): Ceres Seq. ID no. 15171286
gtaacatcttagtcgtcctatacatagagaagaagtagtacgtagtagatgctttcgaaaccctactctaacaaaaaccaagacatttagtttcatcaccactgttgagaaacttggagaagattttcaccaatggatccctgtcccttcgtgcgtctcatggtagactctttagctctcaaccttccctccgccaccaaaccgccacctgtctccggcgtccacccttccactaccccatgcttctgccaaatccgcatcaccaatttcccctctcaaaccgcgcttcttccactctcttcttcctcctccggcgacgccaaccccgaagccgcaacctccgccccgggcttccacctcgactccagcgcgctccgtcgcctctccgccaaacctctcaccctccgcctcgccgtctactccggcagcaccgcccgcgcctgcggcatctcctccgccaaactcctcggccgcctcaacctcaccctcgacctctccgccgcgctctcccgccccaacaccttccactccggctggctcaacctgagaaagaacagaaccggcttcgaaccggagcacaagcctgcgcctcgggttcacattgtggtccggtccgaaccggacccgcggttcgtgttccagttcggtggcgaaccggagtgtagcccggtggttttccagattcaggagaataatatcagacagcctgtctttagttgcaagttcagtgcggatcgtaactctagatccaggtgtctaccctcagattttgccaacaaccccagtagatggaggagaaccttgaagggtattagagagcgtcatgggagggagagaaagggttggatgataatgatccatgatctctctggctcacccgttgcagctgcctccatgataaccccatttgtcccttcccctggttcagacagagtatcaagatcaaacccaggtgcatggctcattcttcgcaccaacaatggtgcctctgtgagtagctggaagccatggggccgtctcgaagcgtggcgagaacgaggccctgtcgatggcttgggctacaagtttgagctcgtcactgagaatggacctgccaatgggataccaattgctgaggccacaatgaatgtgaaaaagggtggccagttctgcattgactacaaagtgatgagggattctggattgggttcaaggttgaaaggaaaagggtttgtgatgggttccacagtggaaggtgaaggcaaagttagcaagcctgttgtgcaagttggtgcacagcatgtgacatgcatggctgatgctgctttgttcattgcactttctgctgccattgatcttagcatggatgcatgcaagctcttctcgcataaactaaggaaagagctttgccatgaagaacaacaagtttcctttccctaaaaacctgctagaagaattgaattgttgtccttagttaaattacaagttagttatcatctgctgcagtgatagccaatgcgttcctagcttgatggatagtgggaactctggtttgagcatagagacagacttgcaattaattatcaagtctttgcagctgctatggcggattcagttttgtgaatgttgtcaggaaattaatcagagttgctagttttgttgattctacctttttctggttggattttctaaacagcagaaattagaggggtgattttagcagcattttttgtactgaacatgtacagagtacagacaaaccacaggcaaatgtatgtttatatatttttatttttttatatatttattaattttttttatgtcttacttgattttatgtctt

SEQ ID NO: 9545 - protein, 428 aa, Glycine max
  peptide (1)..(428): Ceres Seq. ID no. 15171287
  misc_feature (255)..(423): Pfam Name: DUF1005 Pfam Description: Protein of unknown function
  misc_feature (1)..(423): NCBI GI NO: 15233530 NR Description: expressed protein [Arabidopsis thaliana]
  misc_feature (1)..(342): NCBI GI NO: 15218372 NR Description: expressed protein [Arabidopsis thaliana]
  misc_feature (358)..(421): NCBI GI NO: 15218372 NR Description: expressed protein [Arabidopsis thaliana]
  misc_feature (1)..(352): NCBI GI NO: 36104436 NR Description: unknown protein
  misc_feature (358)..(425): NCBI GI NO: 36104436 NR Description: unknown protein
  misc_feature (48)..(423): NCBI GI NO: 34909364 NR Description: P0638D12.14
  misc_feature (1)..(342): NCBI GI NO: 15222861 NR Description: expressed protein [Arabidopsis thaliana]
  misc_feature (359)..(418): NCBI GI NO: 15222861 NR Description: expressed protein [Arabidopsis thaliana]
  misc_feature (53)..(352): NCBI GI NO: 34896878 NR Description: unknown protein
  misc_feature (358)..(425): NCBI GI NO: 34896878 NR Description: unknown protein
MDPCPFVRLMVDSLALNLPSATKPPPVSGVHPSTTPCFCQIRITNFPSQTALLPLSSSSSGDANPEAATSAPGFHLDSSALRRLSAKPLTLRLAVYSGSTARACGISSAKLLGRLNLTLDLSAALSRPNTFHSGWLNLRKNRTGFEPEHKPAPRVHIVVRSEPDPRFVFQFGGEPECSPVVFQIQENNIRQPVFSCKFSADRNSRSRCLPSDFANNPSRWRRTLKGIRERHGRERKGWMIMIHDLSGSPVAAASMITPFVPSPGSDRVSRSNPGAWLILRTNNGASVSSWKPWGRLEAWRERGPVDGLGYKFELVTENGPANGIPIAEATMNVKKGGQFCIDYKVMRDSGLGSRLKGKGFVMGSTVEGEGKVSKPVVQVGAQHVTCMADAALFIALSAAIDLSMDACKLFSHKLRKELCHEEQQVSFP

SEQ ID NO: 9546 - protein, 419 aa, Glycine max
  peptide (1)..(419): Ceres Seq. ID no. 15171288
  misc_feature (246)..(414): Pfam Name: DUF1005 Pfam Description: Protein of unknown function
  misc_feature (1)..(414): NCBI GI NO: 15233530 NR Description: expressed protein [Arabidopsis thaliana]
  misc_feature (1)..(333): NCBI GI NO: 15218372 NR Description: expressed protein [Arabidopsis thaliana]
  misc_feature (349)..(412): NCBI GI NO: 15218372 NR Description: expressed protein [Arabidopsis thaliana]
  misc_feature (1)..(343): NCBI GI NO: 36104436 NR Description: unknown protein
  misc_feature (349)..(416): NCBI GI NO: 36104436 NR Description: unknown protein
  misc_feature (39)..(414): NCBI GI NO: 34909364 NR Description: P0638D12.14
  misc_feature (1)..(333): NCBI GI NO: 15222861 NR Description: expressed protein [Arabidopsis thaliana]
  misc_feature (350)..(409): NCBI GI NO: 15222861 NR Description: expressed protein [Arabidopsis thaliana]
  misc_feature (44)..(343): NCBI GI NO: 34896878 NR Description: unknown protein
  misc_feature (349)..(416): NCBI GI NO: 34896878 NR Description: unknown protein
MVDSLALNLPSATKPPPVSGVHPSTTPCFCQIRITNFPSQTALLPLSSSSSGDANPEAATSAPGFHLDSSALRRLSAKPLTLRLAVYSGSTARACGISSAKLLGRLNLTLDLSAALSRPNTFHSGWLNLRKNRTGFEPEHKPAPRVHIVVRSEPDPRFVFQFGGEPECSPVVFQIQENNIRQPVFSCKFSADRNSRSRCLPSDFANNPSRWRRTLKGIRERHGRERKGWMIMIHDLSGSPVAAASMITPFVPSPGSDRVSRSNPGAWLILRTNNGASVSSWKPWGRLEAWRERGPVDGLGYKFELVTENGPANGIPIAEATMNVKKGGQFCIDYKVMRDSGLGSRLKGKGFVMGSTVEGEGKVSKPVVQVGAQHVTCMADAALFIALSAAIDLSMDACKLFSHKLRKELCHEEQQVSFP

SEQ ID NO: 9547 - DNA, 1440 bp, Glycine max
  misc_feature (1)..(1440): Ceres Seq. ID no. 14302817
gcacgataggaggcactacgctgtcgtttgcggtgttagaagacgtagtcgggcgtgatggcgaagaagcgatcagccccgagtggcggtcgtcgggaaaaccgagccgaatcatcttcccgacggctcaactcagcttccggtcgcagaaaactcgttgcgttcttcatcgtatcgtccatcatcgctatcgtcacttatcgttatcgcttcagacaatcttctccttcgcaaggccttgtcacaactcatgctaattgccaacatatactcgccgaaaattcaaaagtatcaggaaattcgtctcagcgccattatacttatcctgtgcttggctacattactccctggaattctcgaggttatgaattggcaaaaaggttcaactctaagttcacacatttatcacccatttggtatgatctaaagagccaacagactagcttagttctagaggggagacataatgctgacagaggatggatctcagagcttaaaaaggcaggagaagctttgattttgcctagagttgttctggaagcatcaccagcagtgctgttgggaaaggaaaaacaaaggaacaaagccattaaccttatagtaacagagtgcaaggaaatgggatatgatggtattgttttggaatcttggtcaaggtgggcagcttatggtatcttgcatgatccaagcatgcggaatttggcattgcagtttgtaaaacagcttggagatgcactgcattctataagctcagagaaaattagtgggcagcagctgcagttggtctatgttataggtccaccttctgagaagttgcaagagcatgattttggtcctaaagatcttgagactttaagtgaagctgtggatggattctcgttaatgacatatgatttctctaatcctcataatcctggtcctaatgcacctttgaaatggattcaaattgttctacagctgcttctcggtacctctggcaatagagcccaaagccttgcccccaagatacttcttggtatcaacttctatggaaatgatttctccctttcaagggatgcagggggtggagctattattgggagagattacctggcacttttggagaagcactggcctgaactgcagtgggataagaatagtggggagcattttttcttttacactgacgacaaggatatcaggcatgtggtattttatccatctttgaagtcaatttctttgcggttagaggaagctcgttcatggggatgtggcatctcgatctgggaaattggccaaggtctggattatttttttgaccttctgtgatagcttgttatgtgtacttcttttgtggcccatgctaatgtttattcctacgtcgtaatgttgtgtattcagtataatcgaaacgtacttcagttaaattgggattttgtttttcagaaatctagtttgagg

SEQ ID NO: 9548 - protein, 416 aa, Glycine max
  peptide (1)..(416): Ceres Seq. ID no. 14302818
  misc_feature (201)..(408): Pfam Name: Pfam Description:  Glycosyl hydrolases family 18
  misc_feature (1)..(416): NCBI GI NO: 15234049 NR Description: glycosyl hydrolase family 18
  misc_feature (1)..(412): NCBI GI NO: 7485232 NR Description: hypothetical protein A_IG002N01
  misc_feature (51)..(416): NCBI GI NO: 11034671 NR Description: P0407B12.10
  misc_feature (1)..(254): NCBI GI NO: 22135960 NR Description: unknown protein [Arabidopsis thaliana]
  misc_feature (186)..(416): NCBI GI NO: 34912746 NR Description: B1040D09.22
  misc_feature (258)..(416): NCBI GI NO: 14585861 NR Description: hypothetical protein SB139 [Homo sapiens]
  misc_feature (59)..(200): NCBI GI NO: 14585861 NR Description: hypothetical protein SB139 [Homo sapiens]
  misc_feature (59)..(208): NCBI GI NO: 34861254 NR Description: similar to Cc1-9 [Rattus norvegicus]
  misc_feature (258)..(416): NCBI GI NO: 34861254 NR Description: similar to Cc1-9 [Rattus norvegicus]
  misc_feature (59)..(416): NCBI GI NO: 13905168 NR Description: 3110023E09Rik protein [Mus musculus]
MAKKRSAPSGGRRENRAESSSRRLNSASGRRKLVAFFIVSSIIAIVTYRYRFRQSSPSQGLVTTHANCQHILAENSKVSGNSSQRHYTYPVLGYITPWNSRGYELAKRFNSKFTHLSPIWYDLKSQQTSLVLEGRHNADRGWISELKKAGEALILPRVVLEASPAVLLGKEKQRNKAINLIVTECKEMGYDGIVLESWSRWAAYGILHDPSMRNLALQFVKQLGDALHSISSEKISGQQLQLVYVIGPPSEKLQEHDFGPKDLETLSEAVDGFSLMTYDFSNPHNPGPNAPLKWIQIVLQLLLGTSGNRAQSLAPKILLGINFYGNDFSLSRDAGGGAIIGRDYLALLEKHWPELQWDKNSGEHFFFYTDDKDIRHVVFYPSLKSISLRLEEARSWGCGISIWEIGQGLDYFFDLL

SEQ ID NO: 9549 - protein, 229 aa, Glycine max
  peptide (1)..(229): Ceres Seq. ID no. 14302819
  misc_feature (14)..(221): Pfam Name: Pfam Description:  Glycosyl hydrolases family 18
  misc_feature (1)..(229): NCBI GI NO: 15234049 NR Description: glycosyl hydrolase family 18
  misc_feature (1)..(225): NCBI GI NO: 7485232 NR Description: hypothetical protein A_IG002N01
  misc_feature (1)..(229): NCBI GI NO: 11034671 NR Description: P0407B12.10
  misc_feature (1)..(67): NCBI GI NO: 22135960 NR Description: unknown protein [Arabidopsis thaliana]
  misc_feature (1)..(229): NCBI GI NO: 34912746 NR Description: B1040D09.22
  misc_feature (71)..(229): NCBI GI NO: 14585861 NR Description: hypothetical protein SB139 [Homo sapiens]
  misc_feature (1)..(13): NCBI GI NO: 14585861 NR Description: hypothetical protein SB139 [Homo sapiens]
  misc_feature (1)..(21): NCBI GI NO: 34861254 NR Description: similar to Cc1-9 [Rattus norvegicus]
  misc_feature (71)..(229): NCBI GI NO: 34861254 NR Description: similar to Cc1-9 [Rattus norvegicus]
  misc_feature (1)..(229): NCBI GI NO: 13905168 NR Description: 3110023E09Rik protein [Mus musculus]
MGYDGIVLESWSRWAAYGILHDPSMRNLALQFVKQLGDALHSISSEKISGQQLQLVYVIGPPSEKLQEHDFGPKDLETLSEAVDGFSLMTYDFSNPHNPGPNAPLKWIQIVLQLLLGTSGNRAQSLAPKILLGINFYGNDFSLSRDAGGGAIIGRDYLALLEKHWPELQWDKNSGEHFFFYTDDKDIRHVVFYPSLKSISLRLEEARSWGCGISIWEIGQGLDYFFDLL

SEQ ID NO: 9550 - DNA, 1562 bp, Glycine max
  misc_feature (1)..(1562): Ceres Seq. ID no. 15171152
attaagcgcattcccatgttcggtcactatcgcagggcattgctctgcttcaagcacaacccaaactccatcactgcaatctccacacccttctctattcttctccgatcattctccacttcctcttccgaccataaacagcaacactcattcaccttaaactacctcctcaacaccttcggcttctccccagaaaccgcctcaaaactctccacccgaatccgcctcgaaacctcccacgatcctgactcaatcctctccctcttcaaatcccacggcttctccgactcccatatccgccgcatcatccaaacatacccttacttcctctcctacaacgcccgcaaaaccatcctccccaaactcaccttcctcctctccaaaggcgcctccacctccgacctcgttcgcatcgtcaccaaaaaccctagaatcctccacttcgatctccacaacgccatcaccccgcgctacgacttcatcaaaaaattcatgctttccgatgattccaccctccgctccatcaaatcatgccccagcatcatcttttcgaacacccccctcctcaacattcaatttctcctccacaacgatgtcccggaatccaaggttgttatgttgcttcgctactgggcctgctcgctcgttgccaatgcccccacgtttcaggatgcggttcgggaggttatggaattgggcttcaggcccaacaaaacgttgttcttggtggcacttcgtgctaagcttgtgaggaaatcgttgtgggagaggaaggttgaggtgtataggaaatggggctggtctgaggagattctgctttccacgtttctgaggaacccctggtgtatgctggtctctgagaagaaaattgaggccatgatggagttttttattactcatttgggtttggattctttgtgttttgctaagcatcccgtgcttattgcgttgagcttggagaaaagggttgttcccagggcttctgtgttgcagtttcttttggcgaaaggtttgcttaaggatgttaattgggcgtccgcgtttatagttactgataagattttcttgcagaaatttgtggtttcctatgagaaggaagccgatcagctgttgaagctctatgaagagaagagagatgttcctagagaagagagatgttgaagctctctgaagccgatcagctgtcaaagggaactttgtaactggaatggaaccatatggattggtgtgatcatagagacttgttcatgatcatgactcttctaccatgttttgtcaggattcctgactttagtggtagactggtagtagaaggtttctctctatcattagctgaaattatatggtgaaacttgaggtatattatatcttgccttttcagttactattgctgaaataattggtatttcagtttaaacttaataaattctgttacttgattcagtagaattcccttaattgtttaaatccagggttgtggaaaccactattttcattttacaattaaagctatttctggctgtgatgccatcatcaatagtttgttctcaaccagttgatgt

SEQ ID NO: 9551 - protein, 386 aa, Glycine max
  peptide (1)..(386): Ceres Seq. ID no. 15171153
  misc_feature (86)..(357): Pfam Name: Pfam Description:  mTERF
  misc_feature (9)..(374): NCBI GI NO: 18415647 NR Description: expressed protein [Arabidopsis thaliana]
  misc_feature (50)..(378): NCBI GI NO: 15218140 NR Description: hypothetical protein [Arabidopsis thaliana]
  misc_feature (50)..(378): NCBI GI NO: 25511650 NR Description: T22I11.2 protein - Arabidopsis thaliana
  misc_feature (50)..(374): NCBI GI NO: 34394750 NR Description: unknown protein
  misc_feature (23)..(295): NCBI GI NO: 15232683 NR Description: expressed protein [Arabidopsis thaliana]
  misc_feature (32)..(356): NCBI GI NO: 15220664 NR Description: expressed protein [Arabidopsis thaliana]
  misc_feature (46)..(361): NCBI GI NO: 15220662 NR Description: expressed protein [Arabidopsis thaliana]
  misc_feature (32)..(375): NCBI GI NO: 15238313 NR Description: expressed protein [Arabidopsis thaliana]
  misc_feature (32)..(375): NCBI GI NO: 21553423 NR Description: unknown [Arabidopsis thaliana]
  misc_feature (25)..(344): NCBI GI NO: 15220713 NR Description: hypothetical protein [Arabidopsis thaliana]
IKRIPMFGHYRRALLCFKHNPNSITAISTPFSILLRSFSTSSSDHKQQHSFTLNYLLNTFGFSPETASKLSTRIRLETSHDPDSILSLFKSHGFSDSHIRRIIQTYPYFLSYNARKTILPKLTFLLSKGASTSDLVRIVTKNPRILHFDLHNAITPRYDFIKKFMLSDDSTLRSIKSCPSIIFSNTPLLNIQFLLHNDVPESKVVMLLRYWACSLVANAPTFQDAVREVMELGFRPNKTLFLVALRAKLVRKSLWERKVEVYRKWGWSEEILLSTFLRNPWCMLVSEKKIEAMMEFFITHLGLDSLCFAKHPVLIALSLEKRVVPRASVLQFLLAKGLLKDVNWASAFIVTDKIFLQKFVVSYEKEADQLLKLYEEKRDVPREERC

SEQ ID NO: 9552 - protein, 381 aa, Glycine max
  peptide (1)..(381): Ceres Seq. ID no. 15171154
  misc_feature (81)..(352): Pfam Name: Pfam Description:  mTERF
  misc_feature (4)..(369): NCBI GI NO: 18415647 NR Description: expressed protein [Arabidopsis thaliana]
  misc_feature (45)..(373): NCBI GI NO: 15218140 NR Description: hypothetical protein [Arabidopsis thaliana]
  misc_feature (45)..(373): NCBI GI NO: 25511650 NR Description: T22I11.2 protein - Arabidopsis thaliana
  misc_feature (45)..(369): NCBI GI NO: 34394750 NR Description: unknown protein
  misc_feature (18)..(290): NCBI GI NO: 15232683 NR Description: expressed protein [Arabidopsis thaliana]
  misc_feature (27)..(351): NCBI GI NO: 15220664 NR Description: expressed protein [Arabidopsis thaliana]
  misc_feature (41)..(356): NCBI GI NO: 15220662 NR Description: expressed protein [Arabidopsis thaliana]
  misc_feature (27)..(370): NCBI GI NO: 15238313 NR Description: expressed protein [Arabidopsis thaliana]
  misc_feature (27)..(370): NCBI GI NO: 21553423 NR Description: unknown [Arabidopsis thaliana]
  misc_feature (20)..(339): NCBI GI NO: 15220713 NR Description: hypothetical protein [Arabidopsis thaliana]
MFGHYRRALLCFKHNPNSITAISTPFSILLRSFSTSSSDHKQQHSFTLNYLLNTFGFSPETASKLSTRIRLETSHDPDSILSLFKSHGFSDSHIRRIIQTYPYFLSYNARKTILPKLTFLLSKGASTSDLVRIVTKNPRILHFDLHNAITPRYDFIKKFMLSDDSTLRSIKSCPSIIFSNTPLLNIQFLLHNDVPESKVVMLLRYWACSLVANAPTFQDAVREVMELGFRPNKTLFLVALRAKLVRKSLWERKVEVYRKWGWSEEILLSTFLRNPWCMLVSEKKIEAMMEFFITHLGLDSLCFAKHPVLIALSLEKRVVPRASVLQFLLAKGLLKDVNWASAFIVTDKIFLQKFVVSYEKEADQLLKLYEEKRDVPREERC

SEQ ID NO: 9553 - protein, 222 aa, Glycine max
  peptide (1)..(222): Ceres Seq. ID no. 15171155
  misc_feature (1)..(193): Pfam Name: Pfam Description:  mTERF
  misc_feature (1)..(210): NCBI GI NO: 18415647 NR Description: expressed protein [Arabidopsis thaliana]
  misc_feature (1)..(214): NCBI GI NO: 15218140 NR Description: hypothetical protein [Arabidopsis thaliana]
  misc_feature (1)..(214): NCBI GI NO: 25511650 NR Description: T22I11.2 protein - Arabidopsis thaliana
  misc_feature (1)..(210): NCBI GI NO: 34394750 NR Description: unknown protein
  misc_feature (1)..(131): NCBI GI NO: 15232683 NR Description: expressed protein [Arabidopsis thaliana]
  misc_feature (1)..(192): NCBI GI NO: 15220664 NR Description: expressed protein [Arabidopsis thaliana]
  misc_feature (1)..(197): NCBI GI NO: 15220662 NR Description: expressed protein [Arabidopsis thaliana]
  misc_feature (1)..(211): NCBI GI NO: 15238313 NR Description: expressed protein [Arabidopsis thaliana]
  misc_feature (1)..(211): NCBI GI NO: 21553423 NR Description: unknown [Arabidopsis thaliana]
  misc_feature (1)..(180): NCBI GI NO: 15220713 NR Description: hypothetical protein [Arabidopsis thaliana]
MLSDDSTLRSIKSCPSIIFSNTPLLNIQFLLHNDVPESKVVMLLRYWACSLVANAPTFQDAVREVMELGFRPNKTLFLVALRAKLVRKSLWERKVEVYRKWGWSEEILLSTFLRNPWCMLVSEKKIEAMMEFFITHLGLDSLCFAKHPVLIALSLEKRVVPRASVLQFLLAKGLLKDVNWASAFIVTDKIFLQKFVVSYEKEADQLLKLYEEKRDVPREERC

SEQ ID NO: 9554 - DNA, 1288 bp, Glycine max
  misc_feature (1)..(1288): Ceres Seq. ID no. 15171141
agaggaagagaagagaaagaggagcacataataaccctcaaactccatttcactcacagaaaaatagagatatagagagagaaagtgctgcagaatacacacatacacaccacttcttcaagagagagaggtgtgtgaaggaaaataagaactgaaagaaaaattgttttgcaaaggaagatatgaaactttgcaaatttaacaactgagaaagaagatctgtgatttctctctctctttttgttgttgttgttgtttgcagagaaaatcacacaaacgcacacacacacacacacacacacacacacccttcttcgtgtctgaatttttatcattgacaattttttcacaaagggttgttgtctcttcagagagacacagatcttgaggttggaggcaaaatccttcacacactttggtggttatggaaacagaagagaggaaccagaaagattgcaaggcttcggagccagagtttttcttgcagtgggggaacaggaagaggctgagatgtgtgagggtgaaggaccctcggatttcagcgaggctcaacggtggaatcagaaggaaacttggttctgcaatggagcatcatcgctctggcctcactgtgccagaaaaagaacatcatcaccatcatcatcatcaacaacttaatcgccttacaaggaattccgacggggcgattctccggtcatcggccggcgagacaaggaaatcggcgtcgccggagaaggaggaccggtactacacgacgcggggttcggcggaggagaacggcaaggtcaccggcggcgaaggcatcaacggcgaagaacgagccctagtttggcccaagctctacatcactctctcaagcaaggagaaagaggaagattttctggccatgaagggttgcaagcttcctcagcgacccaaaaagagggccaaaatcattcaaagaagcttacttagaccaagagggttgaaggctatgggaagcatggaaagtgattctgaatgaatgatatgatggaaagaaagaaaaaaaaatcaattgagcggatccacaagaagggggaagaaggaagcccttttaagaagcatgaagaagaaatgttttggagatggtgatgatgatgatgatgttgtttgaattgatgaatggtgaagataatgatgattcaagttttttttatatttgtgtggcatgtatgttgccccctcaatgtttttttgtaaacgagtaagattcgatccgatccaatccatttcaattaattaagaaaaaatattttctcatcttcac

SEQ ID NO: 9555 - protein, 192 aa, Glycine max
  peptide (1)..(192): Ceres Seq. ID no. 15171142
  misc_feature (76)..(177): NCBI GI NO: 6006854 NR Description: hypothetical protein [Arabidopsis thaliana]
  misc_feature (15)..(51): NCBI GI NO: 6006854 NR Description: hypothetical protein [Arabidopsis thaliana]
  misc_feature (76)..(176): NCBI GI NO: 30678969 NR Description: expressed protein [Arabidopsis thaliana]
  misc_feature (15)..(51): NCBI GI NO: 30678969 NR Description: expressed protein [Arabidopsis thaliana]
  misc_feature (1)..(176): NCBI GI NO: 25405821 NR Description: unknown protein, 25817-24837
  misc_feature (1)..(176): NCBI GI NO: 30695924 NR Description: expressed protein [Arabidopsis thaliana]
  misc_feature (1)..(176): NCBI GI NO: 30103017 NR Description: unknown protein
  misc_feature (90)..(175): NCBI GI NO: 21553974 NR Description: unknown [Arabidopsis thaliana]
  misc_feature (90)..(175): NCBI GI NO: 7485821 NR Description: hypothetical protein F1C12
  misc_feature (72)..(175): NCBI GI NO: 34911178 NR Description: P0019E03.4
METEERNQKDCKASEPEFFLQWGNRKRLRCVRVKDPRISARLNGGIRRKLGSAMEHHRSGLTVPEKEHHHHHHHQQLNRLTRNSDGAILRSSAGETRKSASPEKEDRYYTTRGSAEENGKVTGGEGINGEERALVWPKLYITLSSKEKEEDFLAMKGCKLPQRPKKRAKIIQRSLLRPRGLKAMGSMESDSE

SEQ ID NO: 9556 - protein, 139 aa, Glycine max
  peptide (1)..(139): Ceres Seq. ID no. 15171143
  misc_feature (23)..(124): NCBI GI NO: 6006854 NR Description: hypothetical protein [Arabidopsis thaliana]
  misc_feature (23)..(123): NCBI GI NO: 30678969 NR Description: expressed protein [Arabidopsis thaliana]
  misc_feature (1)..(123): NCBI GI NO: 25405821 NR Description: unknown protein, 25817-24837
  misc_feature (1)..(123): NCBI GI NO: 30695924 NR Description: expressed protein [Arabidopsis thaliana]
  misc_feature (1)..(123): NCBI GI NO: 30103017 NR Description: unknown protein
  misc_feature (37)..(122): NCBI GI NO: 21553974 NR Description: unknown [Arabidopsis thaliana]
  misc_feature (37)..(122): NCBI GI NO: 7485821 NR Description: hypothetical protein F1C12
  misc_feature (19)..(122): NCBI GI NO: 34911178 NR Description: P0019E03.4
  misc_feature (37)..(122): NCBI GI NO: 30685055 NR Description: expressed protein [Arabidopsis thaliana]
  misc_feature (37)..(122): NCBI GI NO: 30685058 NR Description: expressed protein [Arabidopsis thaliana]
MEHHRSGLTVPEKEHHHHHHHQQLNRLTRNSDGAILRSSAGETRKSASPEKEDRYYTTRGSAEENGKVTGGEGINGEERALVWPKLYITLSSKEKEEDFLAMKGCKLPQRPKKRAKIIQRSLLRPRGLKAMGSMESDSE

SEQ ID NO: 9557 - DNA, 1356 bp, Glycine max
  misc_feature (1)..(1356): Ceres Seq. ID no. 15179800
atatattgaatgttctggtcttcctttgtgtttttgtagatagaagccatcagtcatggataggcttctatcatcgtcttcacccccttcttttacatttctcactcgattcgaatctgcaactgcaagattcaatttctctccgtcaacacgttctcactctcacttgaagcggctctcctcaatttgttgccagcatgcaaatccatctcctttttcctcttccactccctttctcgcttcttccaaccaccccattaattttccatccttttcctcttcttcagatccctccacactcgaatcccattctctcaatcaaatcaaaaccggggctttcccaaaaccaaaggtaataacagctcggacgcttgtaatactttctgctcttgctatgatcttaatccaaccaactattgcaccagcagcttttgcaacctttcaaactgctgccaagactggtggtcctgctgctgcagctgcagttggtagaaaactaatccacacggagctactaagtagtgcttggactggtttcttggctggctgcttacacaccttatcagggcctgaccacctagctgccttggctccattgtcaatcggtcgaacccgaatggagagtgctgctgttggagccctttggggttgtggccatgatgctggtcaagttctttttgggttaatatttctaatcctcaaggatcaactccatattgaaattatccgaacttggggtaccagagtggtgggtcttactctgctaataattggtgctatgggaattagagaagcatcagaagtacatgccccaattgttgctttagaaagtggtgaatgtgatgtcaacgtgtatgaatcgcttgataatccaacagtgggcaaaaagaagataggttttgctacttttgcaacagggatagttcatggcctgcaaccagatgcattgatgatggttttgcctgcccttgctttgccttcgcgtttggctggtgctgcgtttctcatcatgttcttaattggaactgtaattgcaatgggaagttataccgtgtttataggttcgtgtagccaggcactgaaggatagagtacctaggataactgagaaactcacttgggtttcctcccttattgcaatagccctcggatttgctatcattattagccagttttttgggtttagtctgtattaaaacatctttaataagaaaggtactttttttcttatgaacattgttttagtatttagaaaaagtagacgttggacagaaaattggttgtttataggaagtacatcatccagaaaacatgtgaaattgattgttaattatttactttgcattcgaatgtgtat

SEQ ID NO: 9558 - protein, 379 aa, Glycine max
  peptide (1)..(379): Ceres Seq. ID no. 15179801
  misc_feature (9)..(379): NCBI GI NO: 18398217 NR Description: expressed protein [Arabidopsis thaliana]
  misc_feature (9)..(379): NCBI GI NO: 15724154 NR Description: At2g16800/T24I21.21 [Arabidopsis thaliana]
  misc_feature (7)..(379): NCBI GI NO: 21592431 NR Description: unknown [Arabidopsis thaliana]
  misc_feature (1)..(379): NCBI GI NO: 18418571 NR Description: expressed protein [Arabidopsis thaliana]
  misc_feature (99)..(379): NCBI GI NO: 7486794 NR Description: hypothetical protein M4E13
  misc_feature (99)..(379): NCBI GI NO: 34897966 NR Description: hypothetical protein~similar to Arabidopsisthaliana chromosome 2
  misc_feature (98)..(379): NCBI GI NO: 21397272 NR Description: Hypothetical protein
  misc_feature (153)..(328): NCBI GI NO: 33866162 NR Description: cyanobacterial conserved hypothetical protein
MDRLLSSSSPPSFTFLTRFESATARFNFSPSTRSHSHLKRLSSICCQHANPSPFSSSTPFLASSNHPINFPSFSSSSDPSTLESHSLNQIKTGAFPKPKVITARTLVILSALAMILIQPTIAPAAFATFQTAAKTGGPAAAAAVGRKLIHTELLSSAWTGFLAGCLHTLSGPDHLAALAPLSIGRTRMESAAVGALWGCGHDAGQVLFGLIFLILKDQLHIEIIRTWGTRVVGLTLLIIGAMGIREASEVHAPIVALESGECDVNVYESLDNPTVGKKKIGFATFATGIVHGLQPDALMMVLPALALPSRLAGAAFLIMFLIGTVIAMGSYTVFIGSCSQALKDRVPRITEKLTWVSSLIAIALGFAIIISQFFGFSLY

SEQ ID NO: 9559 - protein, 266 aa, Glycine max
  peptide (1)..(266): Ceres Seq. ID no. 15179802
  misc_feature (1)..(266): NCBI GI NO: 18398217 NR Description: expressed protein [Arabidopsis thaliana]
  misc_feature (1)..(266): NCBI GI NO: 15724154 NR Description: At2g16800/T24I21.21 [Arabidopsis thaliana]
  misc_feature (1)..(266): NCBI GI NO: 21592431 NR Description: unknown [Arabidopsis thaliana]
  misc_feature (1)..(266): NCBI GI NO: 18418571 NR Description: expressed protein [Arabidopsis thaliana]
  misc_feature (1)..(266): NCBI GI NO: 7486794 NR Description: hypothetical protein M4E13
  misc_feature (1)..(266): NCBI GI NO: 34897966 NR Description: hypothetical protein~similar to Arabidopsisthaliana chromosome 2
  misc_feature (1)..(266): NCBI GI NO: 21397272 NR Description: Hypothetical protein
  misc_feature (40)..(215): NCBI GI NO: 33866162 NR Description: cyanobacterial conserved hypothetical protein
MILIQPTIAPAAFATFQTAAKTGGPAAAAAVGRKLIHTELLSSAWTGFLAGCLHTLSGPDHLAALAPLSIGRTRMESAAVGALWGCGHDAGQVLFGLIFLILKDQLHIEIIRTWGTRVVGLTLLIIGAMGIREASEVHAPIVALESGECDVNVYESLDNPTVGKKKIGFATFATGIVHGLQPDALMMVLPALALPSRLAGAAFLIMFLIGTVIAMGSYTVFIGSCSQALKDRVPRITEKLTWVSSLIAIALGFAIIISQFFGFSLY

SEQ ID NO: 9560 - protein, 192 aa, Glycine max
  peptide (1)..(192): Ceres Seq. ID no. 15179803
  misc_feature (1)..(192): NCBI GI NO: 18398217 NR Description: expressed protein [Arabidopsis thaliana]
  misc_feature (1)..(192): NCBI GI NO: 15724154 NR Description: At2g16800/T24I21.21 [Arabidopsis thaliana]
  misc_feature (1)..(192): NCBI GI NO: 21592431 NR Description: unknown [Arabidopsis thaliana]
  misc_feature (1)..(192): NCBI GI NO: 18418571 NR Description: expressed protein [Arabidopsis thaliana]
  misc_feature (1)..(192): NCBI GI NO: 7486794 NR Description: hypothetical protein M4E13
  misc_feature (1)..(192): NCBI GI NO: 34897966 NR Description: hypothetical protein~similar to Arabidopsisthaliana chromosome 2
  misc_feature (1)..(192): NCBI GI NO: 21397272 NR Description: Hypothetical protein
  misc_feature (1)..(141): NCBI GI NO: 33866162 NR Description: cyanobacterial conserved hypothetical protein
MESAAVGALWGCGHDAGQVLFGLIFLILKDQLHIEIIRTWGTRVVGLTLLIIGAMGIREASEVHAPIVALESGECDVNVYESLDNPTVGKKKIGFATFATGIVHGLQPDALMMVLPALALPSRLAGAAFLIMFLIGTVIAMGSYTVFIGSCSQALKDRVPRITEKLTWVSSLIAIALGFAIIISQFFGFSLY

SEQ ID NO: 9561 - DNA, 1278 bp, Glycine max
  misc_feature (1)..(1278): Ceres Seq. ID no. 15168580
aattacgaaaacccctcttccaattctgaattagcctctctaatccttcgcagcgccagaaaacttcaaactacagtcaacgtttcaaaatccgcttctctgttcatcttctccccacccctgcctaaccgactataattttttcataacccgcttctgaatggaagtcaatcccacccacgacggtggcgatgacacctcggaaacgccactgccgccaatggtggacccatctccgtctccgtctccgcaaatgaaagaagaggtgatggacgcggagcaaggcggtgacgtatcgcttccaatgagcgttgttccggcgtcgttgacagtgtcaactgaggcagcggcgaaacgatcgtcgaaggaccggcacacgaaggtggagggacgcggccggagaatccgtatgccggcgacgtgcgcggcgaggatctttcagctgacgcgggaactgggacacaagtccgacggagaaacaatccggtggttgctggagcacgcagagccggcgatcatcgaggccaccggaaccggcaccataccggcgatcgcggtctcggtcggcggcacactcaagattccgacatcctcggaagcgagagcccagggagaagaagacactccgaaaaagcgaaggagaagagcattaaagagcgaattcatcaacctgaacgaaaaccaggtttcggtgtcttcagggctggcaccaatcgcacaaagcagcgcatatggaagtggtggtggtggacttgttcctctgtggcatggtaacggtgctgctgctgggcctttcttcgtgtttccgaacgcttcaaacccacctcagtattgggccattccggcaaccgcggccccgtttttcaacgtccaggcccggcccatttcggggttcgtttccgccttgcagatgcaacatgataaccaccaccactctttaataaacgctgctgcctcgggttctgttaaatcttcgtccactgtgagtgtcactagcagtgctgcttccactcaaatgctcaaggatttctccttcgaaatttatgacaagaaagagcttcaatttttaggtcaaccaccacaaccctcttcatagccttgaactttaatacaatattcaaatactagtgtctattttttgttttttcaattttagttttagacatgtttgtttgtaatagttaggaggatttagggacaaattatattgtattttaattgaaaccttttaatttaagctgttgatattttttttaaagtaaaattgtatttttgacc

SEQ ID NO: 9562 - protein, 311 aa, Glycine max
  peptide (1)..(311): Ceres Seq. ID no. 15168581
  misc_feature (58)..(247): Pfam Name: Pfam Description:  TCP family transcription factor
  misc_feature (16)..(304): NCBI GI NO: 15242216 NR Description: TCP family transcription factor, putative
  misc_feature (58)..(304): NCBI GI NO: 21592496 NR Description: unknown [Arabidopsis thaliana]
  misc_feature (15)..(287): NCBI GI NO: 15225538 NR Description: TCP family transcription factor, putative
  misc_feature (68)..(221): NCBI GI NO: 7489534 NR Description: probable DNA binding protein PCF2 - rice
  misc_feature (50)..(151): NCBI GI NO: 15217857 NR Description: TCP family transcription factor, putative
  misc_feature (42)..(149): NCBI GI NO: 20975251 NR Description: transcription factor PCF3
  misc_feature (23)..(149): NCBI GI NO: 18409345 NR Description: TCP family transcription factor, putative
  misc_feature (43)..(144): NCBI GI NO: 15219640 NR Description: TCP family transcription factor, putative
  misc_feature (24)..(155): NCBI GI NO: 15218305 NR Description: TCP family transcription factor, putative
  misc_feature (20)..(192): NCBI GI NO: 5731257 NR Description: auxin-induced basic helix-loop-helix transcriptionfactor
MEVNPTHDGGDDTSETPLPPMVDPSPSPSPQMKEEVMDAEQGGDVSLPMSVVPASLTVSTEAAAKRSSKDRHTKVEGRGRRIRMPATCAARIFQLTRELGHKSDGETIRWLLEHAEPAIIEATGTGTIPAIAVSVGGTLKIPTSSEARAQGEEDTPKKRRRRALKSEFINLNENQVSVSSGLAPIAQSSAYGSGGGGLVPLWHGNGAAAGPFFVFPNASNPPQYWAIPATAAPFFNVQARPISGFVSALQMQHDNHHHSLINAAASGSVKSSSTVSVTSSAASTQMLKDFSFEIYDKKELQFLGQPPQPSS

SEQ ID NO: 9563 - protein, 291 aa, Glycine max
  peptide (1)..(291): Ceres Seq. ID no. 15168582
  misc_feature (38)..(227): Pfam Name: Pfam Description:  TCP family transcription factor
  misc_feature (1)..(284): NCBI GI NO: 15242216 NR Description: TCP family transcription factor, putative
  misc_feature (38)..(284): NCBI GI NO: 21592496 NR Description: unknown [Arabidopsis thaliana]
  misc_feature (1)..(267): NCBI GI NO: 15225538 NR Description: TCP family transcription factor, putative
  misc_feature (48)..(201): NCBI GI NO: 7489534 NR Description: probable DNA binding protein PCF2 - rice
  misc_feature (30)..(131): NCBI GI NO: 15217857 NR Description: TCP family transcription factor, putative
  misc_feature (22)..(129): NCBI GI NO: 20975251 NR Description: transcription factor PCF3
  misc_feature (3)..(129): NCBI GI NO: 18409345 NR Description: TCP family transcription factor, putative
  misc_feature (23)..(124): NCBI GI NO: 15219640 NR Description: TCP family transcription factor, putative
  misc_feature (4)..(135): NCBI GI NO: 15218305 NR Description: TCP family transcription factor, putative
  misc_feature (1)..(172): NCBI GI NO: 5731257 NR Description: auxin-induced basic helix-loop-helix transcriptionfactor
MVDPSPSPSPQMKEEVMDAEQGGDVSLPMSVVPASLTVSTEAAAKRSSKDRHTKVEGRGRRIRMPATCAARIFQLTRELGHKSDGETIRWLLEHAEPAIIEATGTGTIPAIAVSVGGTLKIPTSSEARAQGEEDTPKKRRRRALKSEFINLNENQVSVSSGLAPIAQSSAYGSGGGGLVPLWHGNGAAAGPFFVFPNASNPPQYWAIPATAAPFFNVQARPISGFVSALQMQHDNHHHSLINAAASGSVKSSSTVSVTSSAASTQMLKDFSFEIYDKKELQFLGQPPQPSS

SEQ ID NO: 9564 - protein, 280 aa, Glycine max
  peptide (1)..(280): Ceres Seq. ID no. 15168583
  misc_feature (27)..(216): Pfam Name: Pfam Description:  TCP family transcription factor
  misc_feature (1)..(273): NCBI GI NO: 15242216 NR Description: TCP family transcription factor, putative
  misc_feature (27)..(273): NCBI GI NO: 21592496 NR Description: unknown [Arabidopsis thaliana]
  misc_feature (1)..(256): NCBI GI NO: 15225538 NR Description: TCP family transcription factor, putative
  misc_feature (37)..(190): NCBI GI NO: 7489534 NR Description: probable DNA binding protein PCF2 - rice
  misc_feature (19)..(120): NCBI GI NO: 15217857 NR Description: TCP family transcription factor, putative
  misc_feature (11)..(118): NCBI GI NO: 20975251 NR Description: transcription factor PCF3
  misc_feature (1)..(118): NCBI GI NO: 18409345 NR Description: TCP family transcription factor, putative
  misc_feature (12)..(113): NCBI GI NO: 15219640 NR Description: TCP family transcription factor, putative
  misc_feature (1)..(124): NCBI GI NO: 15218305 NR Description: TCP family transcription factor, putative
  misc_feature (1)..(161): NCBI GI NO: 5731257 NR Description: auxin-induced basic helix-loop-helix transcriptionfactor
MKEEVMDAEQGGDVSLPMSVVPASLTVSTEAAAKRSSKDRHTKVEGRGRRIRMPATCAARIFQLTRELGHKSDGETIRWLLEHAEPAIIEATGTGTIPAIAVSVGGTLKIPTSSEARAQGEEDTPKKRRRRALKSEFINLNENQVSVSSGLAPIAQSSAYGSGGGGLVPLWHGNGAAAGPFFVFPNASNPPQYWAIPATAAPFFNVQARPISGFVSALQMQHDNHHHSLINAAASGSVKSSSTVSVTSSAASTQMLKDFSFEIYDKKELQFLGQPPQPSS

SEQ ID NO: 9565 - DNA, 1292 bp, Glycine max
  misc_feature (1)..(1292): Ceres Seq. ID no. 15170306
gttctcattcatttcatttttcgtggtttcaatctcaggcataaggctcccgcgtcgcaccccactcctcccctccaaaccctcccagccacgctccctcgcacgtgaggctcttgcgtcgcagcaacaactccgcaatacttgactcgagaatgagccattcattcattccaagggacgacccctgacgcttccactctttctttggtggcggcatcgttttctctccgctttacccattcattcattcacgttctttatatgcatgctgagagtcgtgtggagatgccactgcctatgtacgtaccaagagacgaacaatttgatgagtctaagctgaacacattcttaatcaagaggctcaaggcagtggtccataacttgatccctggtcttaaggctagtctttctgctaataaccatgacttcaatagattttcagacattgacgacctttacagtgatggcctgcccttgcaagatgaaattttgaagaaaattccattgttacaagtgctcacaaagatacaagaatgcagccaggggcttcttaagtatgacactcccaagattatttctaaggacaagttttcctggctgcgagatgatgaattttcccggcaagcaatagcaggagtcaaccctgttaacattgaggggcttaaagttttcccactggtgagcaaactcgacccggaaacatatgaccaccaagattctgcactcaaaaaagagcatattctaggacaacttaatggcatgaccgtgcaacaggcaatagtggaaaataagctgtttatggtaaagtaacgcgatgtctatgttccatttcttgacgggatcaatgccctttatgggagaaaatcctatgctacccgcaccatatttttcttgataccgcttggcactctcaagcctattgctatagagcttagcctcggaccaagtttcggatgaaaacgtgtagttactcctcctgtggatgcaactacaaattggaagtggcagcttgccaaagctcatgtgtgtgccaatgatgctggggtgcaccaacttgttaaccattgtacctcttgaggttgtatcttatttatcctctatcatctgaaatcgtcaaggcaaatggggtaatgatggaaaaagcatggactgggacactggatcgtgtgcagacattttggggcctaagacgaaaatgttaaagggtcttttttttacaaaaattttaaagagacttagtacattatataaaatatcaatttttatattaatcttctagcttttttagctgc

SEQ ID NO: 9566 - protein, 182 aa, Glycine max
  peptide (1)..(182): Ceres Seq. ID no. 15170307
  misc_feature (1)..(182): Pfam Name: Pfam Description:  Lipoxygenase
  misc_feature (1)..(182): NCBI GI NO: 14589309 NR Description: lipoxygenase [Sesbania rostrata]
  misc_feature (1)..(182): NCBI GI NO: 28911945 NR Description: lipoxygenase [Nicotiana attenuata]
  misc_feature (1)..(182): NCBI GI NO: 32454714 NR Description: lipoxygenase [Nicotiana attenuata]
  misc_feature (3)..(182): NCBI GI NO: 7433167 NR Description: probable lipoxygenase (EC 1
  misc_feature (3)..(182): NCBI GI NO: 7433165 NR Description: lipoxygenase (EC 1.13.11.12) loxD - tomato
  misc_feature (3)..(182): NCBI GI NO: 9665131 NR Description: lipoxygenase [Arabidopsis thaliana]
  misc_feature (3)..(182): NCBI GI NO: 18394479 NR Description: lipoxygenase (LOX), putative
  misc_feature (3)..(182): NCBI GI NO: 6002055 NR Description: lipoxygenase [Arabidopsis thaliana]
  misc_feature (1)..(182): NCBI GI NO: 12323766 NR Description: putative lipoxygenase, 5' partial; 101105-97928
  misc_feature (1)..(182): NCBI GI NO: 15218506 NR Description: lipoxygenase (LOX), putative
MHAESRVEMPLPMYVPRDEQFDESKLNTFLIKRLKAVVHNLIPGLKASLSANNHDFNRFSDIDDLYSDGLPLQDEILKKIPLLQVLTKIQECSQGLLKYDTPKIISKDKFSWLRDDEFSRQAIAGVNPVNIEGLKVFPLVSKLDPETYDHQDSALKKEHILGQLNGMTVQQAIVENKLFMVK

SEQ ID NO: 9567 - protein, 174 aa, Glycine max
  peptide (1)..(174): Ceres Seq. ID no. 15170308
  misc_feature (1)..(174): Pfam Name: Pfam Description:  Lipoxygenase
  misc_feature (1)..(174): NCBI GI NO: 14589309 NR Description: lipoxygenase [Sesbania rostrata]
  misc_feature (1)..(174): NCBI GI NO: 28911945 NR Description: lipoxygenase [Nicotiana attenuata]
  misc_feature (1)..(174): NCBI GI NO: 32454714 NR Description: lipoxygenase [Nicotiana attenuata]
  misc_feature (1)..(174): NCBI GI NO: 7433167 NR Description: probable lipoxygenase (EC 1
  misc_feature (1)..(174): NCBI GI NO: 7433165 NR Description: lipoxygenase (EC 1.13.11.12) loxD - tomato
  misc_feature (1)..(174): NCBI GI NO: 9665131 NR Description: lipoxygenase [Arabidopsis thaliana]
  misc_feature (1)..(174): NCBI GI NO: 18394479 NR Description: lipoxygenase (LOX), putative
  misc_feature (1)..(174): NCBI GI NO: 6002055 NR Description: lipoxygenase [Arabidopsis thaliana]
  misc_feature (1)..(174): NCBI GI NO: 12323766 NR Description: putative lipoxygenase, 5' partial; 101105-97928
  misc_feature (1)..(174): NCBI GI NO: 15218506 NR Description: lipoxygenase (LOX), putative
MPLPMYVPRDEQFDESKLNTFLIKRLKAVVHNLIPGLKASLSANNHDFNRFSDIDDLYSDGLPLQDEILKKIPLLQVLTKIQECSQGLLKYDTPKIISKDKFSWLRDDEFSRQAIAGVNPVNIEGLKVFPLVSKLDPETYDHQDSALKKEHILGQLNGMTVQQAIVENKLFMVK

SEQ ID NO: 9568 - protein, 170 aa, Glycine max
  peptide (1)..(170): Ceres Seq. ID no. 15170309
  misc_feature (1)..(170): Pfam Name: Pfam Description:  Lipoxygenase
  misc_feature (1)..(170): NCBI GI NO: 14589309 NR Description: lipoxygenase [Sesbania rostrata]
  misc_feature (1)..(170): NCBI GI NO: 28911945 NR Description: lipoxygenase [Nicotiana attenuata]
  misc_feature (1)..(170): NCBI GI NO: 32454714 NR Description: lipoxygenase [Nicotiana attenuata]
  misc_feature (1)..(170): NCBI GI NO: 7433167 NR Description: probable lipoxygenase (EC 1
  misc_feature (1)..(170): NCBI GI NO: 7433165 NR Description: lipoxygenase (EC 1.13.11.12) loxD - tomato
  misc_feature (1)..(170): NCBI GI NO: 9665131 NR Description: lipoxygenase [Arabidopsis thaliana]
  misc_feature (1)..(170): NCBI GI NO: 18394479 NR Description: lipoxygenase (LOX), putative
  misc_feature (1)..(170): NCBI GI NO: 6002055 NR Description: lipoxygenase [Arabidopsis thaliana]
  misc_feature (1)..(170): NCBI GI NO: 12323766 NR Description: putative lipoxygenase, 5' partial; 101105-97928
  misc_feature (1)..(170): NCBI GI NO: 15218506 NR Description: lipoxygenase (LOX), putative
MYVPRDEQFDESKLNTFLIKRLKAVVHNLIPGLKASLSANNHDFNRFSDIDDLYSDGLPLQDEILKKIPLLQVLTKIQECSQGLLKYDTPKIISKDKFSWLRDDEFSRQAIAGVNPVNIEGLKVFPLVSKLDPETYDHQDSALKKEHILGQLNGMTVQQAIVENKLFMVK

SEQ ID NO: 9569 - DNA, 1627 bp, Glycine max
  misc_feature (1)..(1627): Ceres Seq. ID no. 14315338
ttttccctttgttttatattctttattttaacttttttctgttttggttgaccagagaggatatatcctcctttgtacttttgtttctcttaatgaattttcttattatataaaggaaatctattgaaaatagtttaatcgtgcacatttctatcagaaaaatatatgcaacatcttaatgagttaggacagtcatgttgaacttggagagttcatatatttagaagcaacttagggggggtttggtgaatgtaatcttttttcattcttggaaatcatgtttcctaggaatcatatttcctgggaatatctaaaatattactggaattgaaggacataattgtgtttttgcattataaaaaacttccccccttcatgggaatcttggactccacccctcccataggaaaattttactgggaaacacagttaaaaaataatttctgggaatgttaaactcttaggaatgattattaaaattgtcataccaaacatgggaattcaacattcacaacctaagattcttgagaaacttaagaaatcttccttccgaacactgccttaatgtttgatttaattgtactgagacatagttgtttgcttttatcttgtgtccttttccctgttttctttttattggagtatgtaatttccttattcctcaaagttaaacagagagcacattctatatccactgagaaggctacagtttctgctaccgatgaagattccattgctgatgtgatggaacagcatgacgaatttcttagttcaatgctggctcgttcagctaagttacagatggtcttcagatgttgggaaagaaatgatgttaaggaggtcattggcataatggcaaggatggatgatcatgctgtgattgctgatgttgttagcattataatggaaaaaattgatatcattacacttgagatatgtgctggtcttctgccacttctaactgatcttctacaaagtgaaatggaaagacatctaggaatatccttggaaatgctattgaaactggtcagaatatttggttcagtaatctattcaaccgtatcagctacacaacctgttggtgtcgatatcgaggcagagaacaggctagagcgttgcaacctctgcttcacagagcttgaaaaagtcaaacgttttttgccttctctttcaagaagaggaggatcaattgcaaaatctgcacaagagttgaatctggctttgcaggatgtttcgtgatcttttcctgattcaattatttccgccgctcaagttttaccggtgctttttaggggttttgtgcattttaaagatttaaacctccatacaagccaccgaatagtttgatgcattgtcatttggcattgaatgaagccttttcctgtatgtacatttattgctgttaaaaattcatggtaattgattagtggaggcactgatagctgctaattctgcgacatatactcgaagccaaagcttgaggcatgtcaccctctgctgatggttgcacagctgactataacctgtcgatatctgcttaatgtgtagatctcagtcggttccataactaacctaatatgtggcgcaagatactactgcctatctaatcttatttcaaaatttcatg

SEQ ID NO: 9570 - protein, 224 aa, Glycine max
  peptide (1)..(224): Ceres Seq. ID no. 14315339
  misc_feature (38)..(223): NCBI GI NO: 38344202 NR Description: OSJNBa0064G10.18
  misc_feature (36)..(224): NCBI GI NO: 30688988 NR Description: transducin / WD-40 repeat protein family
  misc_feature (36)..(224): NCBI GI NO: 30688991 NR Description: transducin / WD-40 repeat protein family
  misc_feature (35)..(204): NCBI GI NO: 10178281 NR Description: katanin p80 subunit-like protein
  misc_feature (35)..(204): NCBI GI NO: 18415801 NR Description: katanin p80 subunit - like protein
  misc_feature (36)..(208): NCBI GI NO: 9759081 NR Description: contains similarity to unknownprotein~gb|AAB71474
  misc_feature (61)..(221): NCBI GI NO: 26452373 NR Description: unknown protein [Arabidopsis thaliana]
  misc_feature (37)..(223): NCBI GI NO: 37535664 NR Description: putative microtubule-severing protein subunit
  misc_feature (34)..(195): NCBI GI NO: 15219885 NR Description: expressed protein [Arabidopsis thaliana]
  misc_feature (45)..(181): NCBI GI NO: 15220302 NR Description: transducin / WD-40 repeat protein family
MFDLIVLRHSCLLLSCVLFPVFFLLEYVISLFLKVKQRAHSISTEKATVSATDEDSIADVMEQHDEFLSSMLARSAKLQMVFRCWERNDVKEVIGIMARMDDHAVIADVVSIIMEKIDIITLEICAGLLPLLTDLLQSEMERHLGISLEMLLKLVRIFGSVIYSTVSATQPVGVDIEAENRLERCNLCFTELEKVKRFLPSLSRRGGSIAKSAQELNLALQDVS

SEQ ID NO: 9571 - protein, 164 aa, Glycine max
  peptide (1)..(164): Ceres Seq. ID no. 14315340
  misc_feature (1)..(163): NCBI GI NO: 38344202 NR Description: OSJNBa0064G10.18
  misc_feature (1)..(164): NCBI GI NO: 30688988 NR Description: transducin / WD-40 repeat protein family
  misc_feature (1)..(164): NCBI GI NO: 30688991 NR Description: transducin / WD-40 repeat protein family
  misc_feature (1)..(144): NCBI GI NO: 10178281 NR Description: katanin p80 subunit-like protein
  misc_feature (1)..(144): NCBI GI NO: 18415801 NR Description: katanin p80 subunit - like protein
  misc_feature (1)..(148): NCBI GI NO: 9759081 NR Description: contains similarity to unknownprotein~gb|AAB71474
  misc_feature (1)..(161): NCBI GI NO: 26452373 NR Description: unknown protein [Arabidopsis thaliana]
  misc_feature (1)..(163): NCBI GI NO: 37535664 NR Description: putative microtubule-severing protein subunit
  misc_feature (1)..(135): NCBI GI NO: 15219885 NR Description: expressed protein [Arabidopsis thaliana]
  misc_feature (1)..(121): NCBI GI NO: 15220302 NR Description: transducin / WD-40 repeat protein family
MEQHDEFLSSMLARSAKLQMVFRCWERNDVKEVIGIMARMDDHAVIADVVSIIMEKIDIITLEICAGLLPLLTDLLQSEMERHLGISLEMLLKLVRIFGSVIYSTVSATQPVGVDIEAENRLERCNLCFTELEKVKRFLPSLSRRGGSIAKSAQELNLALQDVS

SEQ ID NO: 9572 - protein, 154 aa, Glycine max
  peptide (1)..(154): Ceres Seq. ID no. 14315341
  misc_feature (1)..(153): NCBI GI NO: 38344202 NR Description: OSJNBa0064G10.18
  misc_feature (1)..(154): NCBI GI NO: 30688988 NR Description: transducin / WD-40 repeat protein family
  misc_feature (1)..(154): NCBI GI NO: 30688991 NR Description: transducin / WD-40 repeat protein family
  misc_feature (1)..(134): NCBI GI NO: 10178281 NR Description: katanin p80 subunit-like protein
  misc_feature (1)..(134): NCBI GI NO: 18415801 NR Description: katanin p80 subunit - like protein
  misc_feature (1)..(138): NCBI GI NO: 9759081 NR Description: contains similarity to unknownprotein~gb|AAB71474
  misc_feature (1)..(151): NCBI GI NO: 26452373 NR Description: unknown protein [Arabidopsis thaliana]
  misc_feature (1)..(153): NCBI GI NO: 37535664 NR Description: putative microtubule-severing protein subunit
  misc_feature (1)..(125): NCBI GI NO: 15219885 NR Description: expressed protein [Arabidopsis thaliana]
  misc_feature (1)..(111): NCBI GI NO: 15220302 NR Description: transducin / WD-40 repeat protein family
MLARSAKLQMVFRCWERNDVKEVIGIMARMDDHAVIADVVSIIMEKIDIITLEICAGLLPLLTDLLQSEMERHLGISLEMLLKLVRIFGSVIYSTVSATQPVGVDIEAENRLERCNLCFTELEKVKRFLPSLSRRGGSIAKSAQELNLALQDVS

SEQ ID NO: 9573 - DNA, 904 bp, Glycine max
  misc_feature (1)..(904): Ceres Seq. ID no. 13594411
ctagaacatcctaatcgaaaaataacaccacattacattggcttgggagctatggcggcaaggatgttgcagaggcgattcatttcaatcttctcaagacaaacccatcaccccattactcaagaatcttggtattctcctaccagtgcaatattaaacagttatggattccatcaacggggggtcatgacccatacaaatccaatcaaacctgtctgtgaagatgtagagaataatgaagcagacaccttaaaatcaagtccaaacccagatgaagttgctacatctattagtgttaatgaaacctcttctgtaaagttttctgccaagtccagtttgaagacatcctcaaggcatgatcttgctatggttttcacctgcaaggtctgtgaaacgagatccattaagacggcttgtcgcgaatcgtatgagaaaggtgtagtggtggcaagatgtggggggtgtaataaccttcacctgattgcagatcaccttgggtggtttggtgaaccaggaagcgttgaggacttcctggctgctcgtggagaagaagtgaaaagaggttcagttgacacactgaatcttacattggaagatttagctggaaggaaaccttgaaagatagaatttgaccaagtgtatgttctgcaatagggtgtcactgagagtttggaagtgcaagggaggtaacaatagttggttttgtaaactcggctcttctgtctataattatgctagtaatattaaaaagcaacatattcaatgtactgtttgctttatcaattatttttggtgcctgccaaaggaatgtttttagaccatgatacaccttcatgtgcaaaacttagccaagaaaggaatttatgaaaaaaaaaaaaaaaaaagctyatcgataccgtcgacc

SEQ ID NO: 9574 - protein, 205 aa, Glycine max
  peptide (1)..(205): Ceres Seq. ID no. 15221345
  misc_feature (121)..(185): Pfam Name: Pfam Description:  DNL zinc finger
  misc_feature (18)..(204): NCBI GI NO: 29028810 NR Description: At3g54830 [Arabidopsis thaliana]
  misc_feature (123)..(198): NCBI GI NO: 12835133 NR Description: unnamed protein product [Mus musculus]
  misc_feature (86)..(200): NCBI GI NO: 23485607 NR Description: Drosophila melanogaster CG12379 gene product
  misc_feature (123)..(198): NCBI GI NO: 34853079 NR Description: similar to CG12379-PA [Rattus norvegicus]
  misc_feature (121)..(187): NCBI GI NO: 17553552 NR Description: Protein required for cell viability like
  misc_feature (121)..(187): NCBI GI NO: 24642261 NR Description: CG12379-PA [Drosophila melanogaster]
  misc_feature (75)..(200): NCBI GI NO: 23509418 NR Description: hypothetical protein [Plasmodium falciparum 3D7]
  misc_feature (104)..(194): NCBI GI NO: 19113862 NR Description: hypothetical protein [Schizosaccharomyces pombe]
  misc_feature (102)..(187): NCBI GI NO: 39584058 NR Description: Hypothetical protein CBG11741
  misc_feature (121)..(200): NCBI GI NO: 6324019 NR Description: Protein required for cell viability; Ynl310cp
LEHPNRKITPHYIGLGAMAARMLQRRFISIFSRQTHHPITQESWYSPTSAILNSYGFHQRGVMTHTNPIKPVCEDVENNEADTLKSSPNPDEVATSISVNETSSVKFSAKSSLKTSSRHDLAMVFTCKVCETRSIKTACRESYEKGVVVARCGGCNNLHLIADHLGWFGEPGSVEDFLAARGEEVKRGSVDTLNLTLEDLAGRKP

SEQ ID NO: 9575 - protein, 188 aa, Glycine max
  peptide (1)..(188): Ceres Seq. ID no. 15221346
  misc_feature (104)..(168): Pfam Name: Pfam Description:  DNL zinc finger
  misc_feature (1)..(187): NCBI GI NO: 29028810 NR Description: At3g54830 [Arabidopsis thaliana]
  misc_feature (106)..(181): NCBI GI NO: 12835133 NR Description: unnamed protein product [Mus musculus]
  misc_feature (69)..(183): NCBI GI NO: 23485607 NR Description: Drosophila melanogaster CG12379 gene product
  misc_feature (106)..(181): NCBI GI NO: 34853079 NR Description: similar to CG12379-PA [Rattus norvegicus]
  misc_feature (104)..(170): NCBI GI NO: 17553552 NR Description: Protein required for cell viability like
  misc_feature (104)..(170): NCBI GI NO: 24642261 NR Description: CG12379-PA [Drosophila melanogaster]
  misc_feature (58)..(183): NCBI GI NO: 23509418 NR Description: hypothetical protein [Plasmodium falciparum 3D7]
  misc_feature (87)..(177): NCBI GI NO: 19113862 NR Description: hypothetical protein [Schizosaccharomyces pombe]
  misc_feature (85)..(170): NCBI GI NO: 39584058 NR Description: Hypothetical protein CBG11741
  misc_feature (104)..(183): NCBI GI NO: 6324019 NR Description: Protein required for cell viability; Ynl310cp
MAARMLQRRFISIFSRQTHHPITQESWYSPTSAILNSYGFHQRGVMTHTNPIKPVCEDVENNEADTLKSSPNPDEVATSISVNETSSVKFSAKSSLKTSSRHDLAMVFTCKVCETRSIKTACRESYEKGVVVARCGGCNNLHLIADHLGWFGEPGSVEDFLAARGEEVKRGSVDTLNLTLEDLAGRKP

SEQ ID NO: 9576 - protein, 184 aa, Glycine max
  peptide (1)..(184): Ceres Seq. ID no. 15221347
  misc_feature (100)..(164): Pfam Name: Pfam Description:  DNL zinc finger
  misc_feature (1)..(183): NCBI GI NO: 29028810 NR Description: At3g54830 [Arabidopsis thaliana]
  misc_feature (102)..(177): NCBI GI NO: 12835133 NR Description: unnamed protein product [Mus musculus]
  misc_feature (65)..(179): NCBI GI NO: 23485607 NR Description: Drosophila melanogaster CG12379 gene product
  misc_feature (102)..(177): NCBI GI NO: 34853079 NR Description: similar to CG12379-PA [Rattus norvegicus]
  misc_feature (100)..(166): NCBI GI NO: 17553552 NR Description: Protein required for cell viability like
  misc_feature (100)..(166): NCBI GI NO: 24642261 NR Description: CG12379-PA [Drosophila melanogaster]
  misc_feature (54)..(179): NCBI GI NO: 23509418 NR Description: hypothetical protein [Plasmodium falciparum 3D7]
  misc_feature (83)..(173): NCBI GI NO: 19113862 NR Description: hypothetical protein [Schizosaccharomyces pombe]
  misc_feature (81)..(166): NCBI GI NO: 39584058 NR Description: Hypothetical protein CBG11741
  misc_feature (100)..(179): NCBI GI NO: 6324019 NR Description: Protein required for cell viability; Ynl310cp
MLQRRFISIFSRQTHHPITQESWYSPTSAILNSYGFHQRGVMTHTNPIKPVCEDVENNEADTLKSSPNPDEVATSISVNETSSVKFSAKSSLKTSSRHDLAMVFTCKVCETRSIKTACRESYEKGVVVARCGGCNNLHLIADHLGWFGEPGSVEDFLAARGEEVKRGSVDTLNLTLEDLAGRKP

SEQ ID NO: 9577 - protein, 143 aa, Glycine max
  peptide (1)..(143): Ceres Seq. ID no. 15221348
  misc_feature (59)..(123): Pfam Name: Pfam Description:  DNL zinc finger
  misc_feature (1)..(142): NCBI GI NO: 29028810 NR Description: At3g54830 [Arabidopsis thaliana]
  misc_feature (61)..(136): NCBI GI NO: 12835133 NR Description: unnamed protein product [Mus musculus]
  misc_feature (24)..(138): NCBI GI NO: 23485607 NR Description: Drosophila melanogaster CG12379 gene product
  misc_feature (61)..(136): NCBI GI NO: 34853079 NR Description: similar to CG12379-PA [Rattus norvegicus]
  misc_feature (59)..(125): NCBI GI NO: 17553552 NR Description: Protein required for cell viability like
  misc_feature (59)..(125): NCBI GI NO: 24642261 NR Description: CG12379-PA [Drosophila melanogaster]
  misc_feature (13)..(138): NCBI GI NO: 23509418 NR Description: hypothetical protein [Plasmodium falciparum 3D7]
  misc_feature (42)..(132): NCBI GI NO: 19113862 NR Description: hypothetical protein [Schizosaccharomyces pombe]
  misc_feature (40)..(125): NCBI GI NO: 39584058 NR Description: Hypothetical protein CBG11741
  misc_feature (59)..(138): NCBI GI NO: 6324019 NR Description: Protein required for cell viability; Ynl310cp
MTHTNPIKPVCEDVENNEADTLKSSPNPDEVATSISVNETSSVKFSAKSSLKTSSRHDLAMVFTCKVCETRSIKTACRESYEKGVVVARCGGCNNLHLIADHLGWFGEPGSVEDFLAARGEEVKRGSVDTLNLTLEDLAGRKP

SEQ ID NO: 9578 - DNA, 1150 bp, Glycine max
  misc_feature (1)..(1150): Ceres Seq. ID no. 14316408
atattcatctcagttcaaaggtttgtttctctcctattatcgatttgcctaacttgtattgttttttgtcgaaaccatcacactttacaactcaactattatgattttcctgttgtttatcccttcatcttattcatctttcatggaggaccacaccccatttctctagcactgattaaacaataatctttgatttttttggtcctccggtcatccttgatgtgttcacaggagtggctagtatagaagaaccataagcactgagggaaaaagtgattagtactttagccaacaaattaaaaatggctgtcaccaaggtctacattgtgtattactccttatatggacatgtagacaccatggctagagaagtacacagaggggctgctacagttgaaggtgttgaagcaacactttggagggtacctgagatgctttcggaactaatattggataagttgaaggcccctcctaaaccaaatgatgtaccagacataatgccagaacaatttgtggaggctgatggtttgatatttggttttccttctcgttttgggatgatgccgagccagctcaaggccttctttgatgcaactagtgagctatgggcatcccaagcacttgccggcaaacctgctggaatcttctggagtactggtttttatggtggaggccaagaactatcagcattgacagctataactcaattagctcatcatggtatgctttttgttcctcttggatacacctttggaagtggcatgtttgagatagatgaggtaaaaggaggatctgcatatggtgctggaacttttgcaggagatggatctcgtcaacctacagaactagaactgcagcaggcattttaccagggtaaatatcttgccgaagtaacaaaaaagctgaaaagctaacttctctgcctaacaaatacatgacaggatactatgaactgtgatgtgctacattatctataacatttgattgaagactcgatgattatttttaccggtaagacaagatagaaagacctcatgtggcttttctttttctgggttctgttgttgcaacaatgtatatcttctgttatctctttcagaaaactctcaaattattccaatgaaatgataaacaagatattcagttttcc

SEQ ID NO: 9579 - protein, 203 aa, Glycine max
  peptide (1)..(203): Ceres Seq. ID no. 14316409
  misc_feature (1)..(202): NCBI GI NO: 22327957 NR Description: quinone reductase family [Arabidopsis thaliana]
  misc_feature (4)..(202): NCBI GI NO: 15239652 NR Description: quinone reductase, putative [Arabidopsis thaliana]
  misc_feature (4)..(202): NCBI GI NO: 30687535 NR Description: quinone reductase family [Arabidopsis thaliana]
  misc_feature (1)..(202): NCBI GI NO: 21068664 NR Description: putative quinone oxidoreductase [Cicer arietinum]
  misc_feature (4)..(202): NCBI GI NO: 5031275 NR Description: unknown [Prunus armeniaca]
  misc_feature (1)..(202): NCBI GI NO: 34910128 NR Description: putative 1,4-benzoquinone reductase
  misc_feature (4)..(202): NCBI GI NO: 12484052 NR Description: quinone-oxidoreductase QR2
  misc_feature (5)..(202): NCBI GI NO: 38636776 NR Description: putative quinone-oxidoreductase QR2
  misc_feature (4)..(202): NCBI GI NO: 7445353 NR Description: hypothetical protein M4I22
  misc_feature (1)..(201): NCBI GI NO: 15234512 NR Description: quinone reductase family [Arabidopsis thaliana]
MAVTKVYIVYYSLYGHVDTMAREVHRGAATVEGVEATLWRVPEMLSELILDKLKAPPKPNDVPDIMPEQFVEADGLIFGFPSRFGMMPSQLKAFFDATSELWASQALAGKPAGIFWSTGFYGGGQELSALTAITQLAHHGMLFVPLGYTFGSGMFEIDEVKGGSAYGAGTFAGDGSRQPTELELQQAFYQGKYLAEVTKKLKS

SEQ ID NO: 9580 - protein, 184 aa, Glycine max
  peptide (1)..(184): Ceres Seq. ID no. 14316410
  misc_feature (1)..(183): NCBI GI NO: 22327957 NR Description: quinone reductase family [Arabidopsis thaliana]
  misc_feature (1)..(183): NCBI GI NO: 15239652 NR Description: quinone reductase, putative [Arabidopsis thaliana]
  misc_feature (1)..(183): NCBI GI NO: 30687535 NR Description: quinone reductase family [Arabidopsis thaliana]
  misc_feature (1)..(183): NCBI GI NO: 21068664 NR Description: putative quinone oxidoreductase [Cicer arietinum]
  misc_feature (1)..(183): NCBI GI NO: 5031275 NR Description: unknown [Prunus armeniaca]
  misc_feature (1)..(183): NCBI GI NO: 34910128 NR Description: putative 1,4-benzoquinone reductase
  misc_feature (1)..(183): NCBI GI NO: 12484052 NR Description: quinone-oxidoreductase QR2
  misc_feature (1)..(183): NCBI GI NO: 38636776 NR Description: putative quinone-oxidoreductase QR2
  misc_feature (1)..(183): NCBI GI NO: 7445353 NR Description: hypothetical protein M4I22
  misc_feature (1)..(182): NCBI GI NO: 15234512 NR Description: quinone reductase family [Arabidopsis thaliana]
MAREVHRGAATVEGVEATLWRVPEMLSELILDKLKAPPKPNDVPDIMPEQFVEADGLIFGFPSRFGMMPSQLKAFFDATSELWASQALAGKPAGIFWSTGFYGGGQELSALTAITQLAHHGMLFVPLGYTFGSGMFEIDEVKGGSAYGAGTFAGDGSRQPTELELQQAFYQGKYLAEVTKKLKS

SEQ ID NO: 9581 - protein, 160 aa, Glycine max
  peptide (1)..(160): Ceres Seq. ID no. 14316411
  misc_feature (1)..(159): NCBI GI NO: 22327957 NR Description: quinone reductase family [Arabidopsis thaliana]
  misc_feature (1)..(159): NCBI GI NO: 15239652 NR Description: quinone reductase, putative [Arabidopsis thaliana]
  misc_feature (1)..(159): NCBI GI NO: 30687535 NR Description: quinone reductase family [Arabidopsis thaliana]
  misc_feature (1)..(159): NCBI GI NO: 21068664 NR Description: putative quinone oxidoreductase [Cicer arietinum]
  misc_feature (1)..(159): NCBI GI NO: 5031275 NR Description: unknown [Prunus armeniaca]
  misc_feature (1)..(159): NCBI GI NO: 34910128 NR Description: putative 1,4-benzoquinone reductase
  misc_feature (1)..(159): NCBI GI NO: 12484052 NR Description: quinone-oxidoreductase QR2
  misc_feature (1)..(159): NCBI GI NO: 38636776 NR Description: putative quinone-oxidoreductase QR2
  misc_feature (1)..(159): NCBI GI NO: 7445353 NR Description: hypothetical protein M4I22
  misc_feature (1)..(158): NCBI GI NO: 15234512 NR Description: quinone reductase family [Arabidopsis thaliana]
MLSELILDKLKAPPKPNDVPDIMPEQFVEADGLIFGFPSRFGMMPSQLKAFFDATSELWASQALAGKPAGIFWSTGFYGGGQELSALTAITQLAHHGMLFVPLGYTFGSGMFEIDEVKGGSAYGAGTFAGDGSRQPTELELQQAFYQGKYLAEVTKKLKS

SEQ ID NO: 9582 - DNA, 717 bp, Glycine max
  misc_feature (1)..(717): Ceres Seq. ID no. 12612239
atctccatcgcagttcgcaacagttcaacacacttacacaaccacacgtatcacctctagatcgatcacatttcgtagtccgtaccacgtccgacgatatggagtaccaggggcagcacggccacgccaccgacaaggtggaggagtacggccagcccgtggccgggcacggcggcgccaccggcggccccacggggacgcacggagctgccggagccggaggcgcgcagctccaggcgacgcgggacgagcacaagaccgacggcgttctgcgccgctccggcagctccagctccagcagctcgtctgaggacgacggcgtgggcgggaggaggaagaaggggatgaaggagaagatcaaggagaagctccccggcggagcccacaaggacgccaccgccgggcagcagcacacggcggtggcgggcgagtacgcgggcacgcacggcaccgaggccaccggcgagaagaagggcgtcatggacaagatcaaggagaagcttcccggcggacaatactgagccagctatgcatgcgtgtctctatgttccgtcaaagctcggctagcatttgcagccatgctttactacggataataaataataagtacaatggactccgatgtacgttgtgtgtacgaccgcgtccgtgtgacgcatttgtgtattcgtatacggtatgatgtgtgtacatacatcgtaatagaaaaacgtttgt

SEQ ID NO: 9583 - protein, 172 aa, Glycine max
  peptide (1)..(172): Ceres Seq. ID no. 12612240
  misc_feature (33)..(172): Pfam Name: Pfam Description:  Dehydrin
  misc_feature (33)..(172): NCBI GI NO: 118483 NR Description: DEHYDRIN DHN1 (B8)
  misc_feature (33)..(172): NCBI GI NO: 421976 NR Description: dehydrin 7 - barley
  misc_feature (33)..(172): NCBI GI NO: 7442078 NR Description: dehydrin - barley
  misc_feature (33)..(172): NCBI GI NO: 6017930 NR Description: dehydrin; Dhn2 [Hordeum vulgare]
  misc_feature (33)..(172): NCBI GI NO: 118486 NR Description: DEHYDRIN DHN2 (B9)
  misc_feature (33)..(172): NCBI GI NO: 4105105 NR Description: dehydrin 2 [Hordeum vulgare]
  misc_feature (33)..(169): NCBI GI NO: 2970213 NR Description: dehydrin-/LEA group 2-like protein
  misc_feature (33)..(169): NCBI GI NO: 82684 NR Description: dehydrin 3 - maize
  misc_feature (33)..(169): NCBI GI NO: 1181292 NR Description: dehydrin [Triticum turgidum subsp. durum]
  misc_feature (33)..(169): NCBI GI NO: 118484 NR Description: DEHYDRIN DHN1 (M3) (RAB-17 PROTEIN)
LHRSSQQFNTLTQPHVSPLDRSHFVVRTTSDDMEYQGQHGHATDKVEEYGQPVAGHGGATGGPTGTHGAAGAGGAQLQATRDEHKTDGVLRRSGSSSSSSSSEDDGVGGRRKKGMKEKIKEKLPGGAHKDATAGQQHTAVAGEYAGTHGTEATGEKKGVMDKIKEKLPGGQY

SEQ ID NO: 9584 - protein, 140 aa, Glycine max
  peptide (1)..(140): Ceres Seq. ID no. 12612241
  misc_feature (1)..(140): Pfam Name: Pfam Description:  Dehydrin
  misc_feature (1)..(140): NCBI GI NO: 118483 NR Description: DEHYDRIN DHN1 (B8)
  misc_feature (1)..(140): NCBI GI NO: 421976 NR Description: dehydrin 7 - barley
  misc_feature (1)..(140): NCBI GI NO: 7442078 NR Description: dehydrin - barley
  misc_feature (1)..(140): NCBI GI NO: 6017930 NR Description: dehydrin; Dhn2 [Hordeum vulgare]
  misc_feature (1)..(140): NCBI GI NO: 118486 NR Description: DEHYDRIN DHN2 (B9)
  misc_feature (1)..(140): NCBI GI NO: 4105105 NR Description: dehydrin 2 [Hordeum vulgare]
  misc_feature (1)..(137): NCBI GI NO: 2970213 NR Description: dehydrin-/LEA group 2-like protein
  misc_feature (1)..(137): NCBI GI NO: 82684 NR Description: dehydrin 3 - maize
  misc_feature (1)..(137): NCBI GI NO: 1181292 NR Description: dehydrin [Triticum turgidum subsp. durum]
  misc_feature (1)..(137): NCBI GI NO: 118484 NR Description: DEHYDRIN DHN1 (M3) (RAB-17 PROTEIN)
MEYQGQHGHATDKVEEYGQPVAGHGGATGGPTGTHGAAGAGGAQLQATRDEHKTDGVLRRSGSSSSSSSSEDDGVGGRRKKGMKEKIKEKLPGGAHKDATAGQQHTAVAGEYAGTHGTEATGEKKGVMDKIKEKLPGGQY

SEQ ID NO: 9585 - protein, 102 aa, Glycine max
  peptide (1)..(102): Ceres Seq. ID no. 12612242
SPSQFATVQHTYTTTRITSRSITFRSPYHVRRYGVPGAARPRHRQGGGVRPARGRARRRHRRPHGDARSCRSRRRAAPGDAGRAQDRRRSAPLRQLQLQQLV

SEQ ID NO: 9586 - DNA, 1423 bp, Glycine max
  misc_feature (1)..(1423): Ceres Seq. ID no. 14315354
gattggagggagtgaagtctttccctccacaagaaaaaaaaatcagaaaaaggaaatgagagattgttggacaccgtgcaaatcaagcactttgcttgttatttcacgcgccctctctccattttgacctccctttcctcttcgttccccactcactgcaacggcgccggagatccgtcgctctcctcctcctcctcctcctcctcctcctcctccgccgcgatgggcgccaattccatgctctccgagtcctctcacgatctcgacgaccagatctcccagctcatgcagtgcaagccactctccgagcaacaggtcagaggtttatgtgagaaggctaaggagattttaatggatgaaagtaatgttcagcctgttaaaagccctgtgacaatttgtggcgatattcatgggcaatttcatgatcttgctgaactgtttcgaattggagggaagtgtccagatactaactacttgtttatgggtgattatgtggaccggggttattattcagttgagactgtatcgctccttgtggcactgaaagttcggtatccccagcgaattactattcttagaggaaaccatgaaagccgtcagattactcaagtatatggattttatgatgaatgccttagaaagtatggtaatgctaatgtttggaagacctttacagacctttttgatttttttccattgactgcattggttgaatctgaaatattctgtttgcatggtggactgtcaccttcaattgagacccttgataacataaggaactttgatcgtgttcaagaggttcctcatgaaggccccatgtgtgatctattgtggtctgacccagatgacagatgtggctggggaatttctcctcgtggtgctggatatacttttggccaggatatatctgaacaattcaatcacactaacagccttaaattgattgctagagctcatcagcttgttatggatggatttaactgggctcatgaacaaaaggtggttaccatttttagtgcacctaactactgttaccgatgtgggaacatggcttccatattggaggttgatgattgcaagggtcacacattcatccagtttgaacctgctcctaggagaggagaacctgatgtcactcgtagaacgcctgattacttcttataatgtagctgttgaatgtcatactgttatatcatggttacctctactgcactaatttcaggcaggtaacattccactgattacactcgaggaattgctggacaccttgtctggagaagtcgccaagatgatgtcataatacgtattgttccagcaaaatgtggtcttttttttttttttttcgtgtttattttttgtatcttatgttcagtaactcccttttatggctttacaagctatatgactggattttgttggtcgc

SEQ ID NO: 9587 - protein, 313 aa, Glycine max
  peptide (1)..(313): Ceres Seq. ID no. 14315355
  misc_feature (54)..(249): Pfam Name: Pfam Description:  Calcineurin-like phosphoesterase
  misc_feature (1)..(313): NCBI GI NO: 7248363 NR Description: type 2A protein phosphatase-3 [Vicia faba]
  misc_feature (1)..(313): NCBI GI NO: 548441 NR Description: SERINE/THREONINE PROTEIN PHOSPHATASE PP2A CATALYTICSUBUNIT
  misc_feature (1)..(313): NCBI GI NO: 18410971 NR Description: protein phosphatase PP2A catalytic subunit
  misc_feature (1)..(313): NCBI GI NO: 18405985 NR Description: protein phosphatase 2A (PP2A)
  misc_feature (8)..(313): NCBI GI NO: 418777 NR Description: phosphoprotein phosphatase (EC 3
  misc_feature (8)..(313): NCBI GI NO: 11133821 NR Description: Serine/threonine protein phosphatase PP2A catalytic subunit
  misc_feature (10)..(313): NCBI GI NO: 11134218 NR Description: Serine/threonine protein phosphatase PP2A-2catalytic subunit
  misc_feature (5)..(313): NCBI GI NO: 1352668 NR Description: SERINE/THREONINE PROTEIN PHOSPHATASE PP2A CATALYTICSUBUNIT
  misc_feature (5)..(313): NCBI GI NO: 81694 NR Description: phosphoprotein phosphatase (EC 3
  misc_feature (1)..(313): NCBI GI NO: 7435135 NR Description: phosphoprotein phosphatase (EC 3
MGANSMLSESSHDLDDQISQLMQCKPLSEQQVRGLCEKAKEILMDESNVQPVKSPVTICGDIHGQFHDLAELFRIGGKCPDTNYLFMGDYVDRGYYSVETVSLLVALKVRYPQRITILRGNHESRQITQVYGFYDECLRKYGNANVWKTFTDLFDFFPLTALVESEIFCLHGGLSPSIETLDNIRNFDRVQEVPHEGPMCDLLWSDPDDRCGWGISPRGAGYTFGQDISEQFNHTNSLKLIARAHQLVMDGFNWAHEQKVVTIFSAPNYCYRCGNMASILEVDDCKGHTFIQFEPAPRRGEPDVTRRTPDYFL

SEQ ID NO: 9588 - protein, 308 aa, Glycine max
  peptide (1)..(308): Ceres Seq. ID no. 14315356
  misc_feature (49)..(244): Pfam Name: Pfam Description:  Calcineurin-like phosphoesterase
  misc_feature (1)..(308): NCBI GI NO: 7248363 NR Description: type 2A protein phosphatase-3 [Vicia faba]
  misc_feature (1)..(308): NCBI GI NO: 548441 NR Description: SERINE/THREONINE PROTEIN PHOSPHATASE PP2A CATALYTICSUBUNIT
  misc_feature (1)..(308): NCBI GI NO: 18410971 NR Description: protein phosphatase PP2A catalytic subunit
  misc_feature (1)..(308): NCBI GI NO: 18405985 NR Description: protein phosphatase 2A (PP2A)
  misc_feature (3)..(308): NCBI GI NO: 418777 NR Description: phosphoprotein phosphatase (EC 3
  misc_feature (3)..(308): NCBI GI NO: 11133821 NR Description: Serine/threonine protein phosphatase PP2A catalytic subunit
  misc_feature (5)..(308): NCBI GI NO: 11134218 NR Description: Serine/threonine protein phosphatase PP2A-2catalytic subunit
  misc_feature (1)..(308): NCBI GI NO: 1352668 NR Description: SERINE/THREONINE PROTEIN PHOSPHATASE PP2A CATALYTICSUBUNIT
  misc_feature (1)..(308): NCBI GI NO: 81694 NR Description: phosphoprotein phosphatase (EC 3
  misc_feature (1)..(308): NCBI GI NO: 7435135 NR Description: phosphoprotein phosphatase (EC 3
MLSESSHDLDDQISQLMQCKPLSEQQVRGLCEKAKEILMDESNVQPVKSPVTICGDIHGQFHDLAELFRIGGKCPDTNYLFMGDYVDRGYYSVETVSLLVALKVRYPQRITILRGNHESRQITQVYGFYDECLRKYGNANVWKTFTDLFDFFPLTALVESEIFCLHGGLSPSIETLDNIRNFDRVQEVPHEGPMCDLLWSDPDDRCGWGISPRGAGYTFGQDISEQFNHTNSLKLIARAHQLVMDGFNWAHEQKVVTIFSAPNYCYRCGNMASILEVDDCKGHTFIQFEPAPRRGEPDVTRRTPDYFL

SEQ ID NO: 9589 - protein, 292 aa, Glycine max
  peptide (1)..(292): Ceres Seq. ID no. 14315357
  misc_feature (33)..(228): Pfam Name: Pfam Description:  Calcineurin-like phosphoesterase
  misc_feature (1)..(292): NCBI GI NO: 7248363 NR Description: type 2A protein phosphatase-3 [Vicia faba]
  misc_feature (1)..(292): NCBI GI NO: 548441 NR Description: SERINE/THREONINE PROTEIN PHOSPHATASE PP2A CATALYTICSUBUNIT
  misc_feature (1)..(292): NCBI GI NO: 18410971 NR Description: protein phosphatase PP2A catalytic subunit
  misc_feature (1)..(292): NCBI GI NO: 18405985 NR Description: protein phosphatase 2A (PP2A)
  misc_feature (1)..(292): NCBI GI NO: 418777 NR Description: phosphoprotein phosphatase (EC 3
  misc_feature (1)..(292): NCBI GI NO: 11133821 NR Description: Serine/threonine protein phosphatase PP2A catalytic subunit
  misc_feature (1)..(292): NCBI GI NO: 11134218 NR Description: Serine/threonine protein phosphatase PP2A-2catalytic subunit
  misc_feature (1)..(292): NCBI GI NO: 1352668 NR Description: SERINE/THREONINE PROTEIN PHOSPHATASE PP2A CATALYTICSUBUNIT
  misc_feature (1)..(292): NCBI GI NO: 81694 NR Description: phosphoprotein phosphatase (EC 3
  misc_feature (1)..(292): NCBI GI NO: 7435135 NR Description: phosphoprotein phosphatase (EC 3
MQCKPLSEQQVRGLCEKAKEILMDESNVQPVKSPVTICGDIHGQFHDLAELFRIGGKCPDTNYLFMGDYVDRGYYSVETVSLLVALKVRYPQRITILRGNHESRQITQVYGFYDECLRKYGNANVWKTFTDLFDFFPLTALVESEIFCLHGGLSPSIETLDNIRNFDRVQEVPHEGPMCDLLWSDPDDRCGWGISPRGAGYTFGQDISEQFNHTNSLKLIARAHQLVMDGFNWAHEQKVVTIFSAPNYCYRCGNMASILEVDDCKGHTFIQFEPAPRRGEPDVTRRTPDYFL

SEQ ID NO: 9590 - DNA, 1228 bp, Glycine max
  misc_feature (1)..(1228): Ceres Seq. ID no. 13594412
attttaactcaaaacatagaattgttgaaggaacaaaacgtgtgtgtctgtcttacaaggtttagtagtgactatggagcagagcattggtggacaatctagcatacaatgcatatttctacgcaaggactgcttctcctcaaagctcgcgtctcttccaacttctccttccgagatgccctttggtcacaaccgttggtttcgcaggttgtcggtttttccacgtttgcaactatgtcaagggctgagaaagggtttctccaaaaacatggcttgcagtgtcagtgtggataattgtgatacggttcatccagcaacagatgcttatgctggagaggcagttgaagctttgaaagctgggaaagtcattgcagtaccaactgatacactctatggatttgcttgtgatgcttgctcaatggaagcagttaacagaatttatgagattaaaggccgtagacatacaagcccagtggctatttgtgtcggtgacgtatcagatatagcccgttttgctgtcactgaccatttacctcatggtctgcttgattccctcctacctgggcctgttacagttgttctaaaacgaggggattcaagtattcttgaacgatctttgaacccaggatttgatagtataggagttagagtgcctgattgcaatttcatcaggatcattgcccgtggttcaggaactgccctagcccttaccagtgcaaacctaagtggccagccaagtagtctttccatcaaagattttgagaacctctgggaacactgtgcttttgtttatgatggtggtttgattccatcaagtcgtgcaggttcaacaattgtggacctcaccacaccacacaaatacagaatacttagacctggaagtgcaaaggaagagacagttgccatcttggagaagcattctttcgttgaggcagagaccacgtaacataagttgtgattcatttgcagtgtcacgttctagctaggcctaatgtttcacttgcaaaaaaaaaaacgcgttataaatgtatggtcattatgcttcaactaagttattctattctatttccattaatagcatagcaatacattcatataaaacttctatctagagcacgtgctatggaattgttgagaaactagtaaaatccaattctatgaatcatttgatgtatggatagcattattgttataatgaaaaaccaatcattactgcagggaatatttg

SEQ ID NO: 9591 - protein, 290 aa, Glycine max
  peptide (1)..(290): Ceres Seq. ID no. 13594413
  misc_feature (90)..(269): Pfam Name: Pfam Description:  yrdC domain
  misc_feature (68)..(290): NCBI GI NO: 9759323 NR Description: gene_id:MUP24
  misc_feature (89)..(281): NCBI GI NO: 23956354 NR Description: hypothetical protein MGC38336 [Mus musculus]
  misc_feature (89)..(281): NCBI GI NO: 30908964 NR Description: ischemia/reperfusion inducible protein
  misc_feature (89)..(281): NCBI GI NO: 30691316 NR Description: YRDC protein [Homo sapiens]
  misc_feature (89)..(281): NCBI GI NO: 31088868 NR Description: ischemia/reperfusion inducible protein
  misc_feature (89)..(286): NCBI GI NO: 28573691 NR Description: CG33005-PB [Drosophila melanogaster]
  misc_feature (22)..(172): NCBI GI NO: 18424373 NR Description: expressed protein [Arabidopsis thaliana]
  misc_feature (104)..(279): NCBI GI NO: 28278078 NR Description: Similar to hypothetical protein MGC38336
  misc_feature (74)..(286): NCBI GI NO: 39591298 NR Description: Hypothetical protein CBG20783
  misc_feature (76)..(288): NCBI GI NO: 17537239 NR Description: yrdC domain containing protein
MEQSIGGQSSIQCIFLRKDCFSSKLASLPTSPSEMPFGHNRWFRRLSVFPRLQLCQGLRKGFSKNMACSVSVDNCDTVHPATDAYAGEAVEALKAGKVIAVPTDTLYGFACDACSMEAVNRIYEIKGRRHTSPVAICVGDVSDIARFAVTDHLPHGLLDSLLPGPVTVVLKRGDSSILERSLNPGFDSIGVRVPDCNFIRIIARGSGTALALTSANLSGQPSSLSIKDFENLWEHCAFVYDGGLIPSSRAGSTIVDLTTPHKYRILRPGSAKEETVAILEKHSFVEAETT

SEQ ID NO: 9592 - protein, 256 aa, Glycine max
  peptide (1)..(256): Ceres Seq. ID no. 13594414
  misc_feature (56)..(235): Pfam Name: Pfam Description:  yrdC domain
  misc_feature (34)..(256): NCBI GI NO: 9759323 NR Description: gene_id:MUP24
  misc_feature (55)..(247): NCBI GI NO: 23956354 NR Description: hypothetical protein MGC38336 [Mus musculus]
  misc_feature (55)..(247): NCBI GI NO: 30908964 NR Description: ischemia/reperfusion inducible protein
  misc_feature (55)..(247): NCBI GI NO: 30691316 NR Description: YRDC protein [Homo sapiens]
  misc_feature (55)..(247): NCBI GI NO: 31088868 NR Description: ischemia/reperfusion inducible protein
  misc_feature (55)..(252): NCBI GI NO: 28573691 NR Description: CG33005-PB [Drosophila melanogaster]
  misc_feature (1)..(138): NCBI GI NO: 18424373 NR Description: expressed protein [Arabidopsis thaliana]
  misc_feature (70)..(245): NCBI GI NO: 28278078 NR Description: Similar to hypothetical protein MGC38336
  misc_feature (40)..(252): NCBI GI NO: 39591298 NR Description: Hypothetical protein CBG20783
  misc_feature (42)..(254): NCBI GI NO: 17537239 NR Description: yrdC domain containing protein
MPFGHNRWFRRLSVFPRLQLCQGLRKGFSKNMACSVSVDNCDTVHPATDAYAGEAVEALKAGKVIAVPTDTLYGFACDACSMEAVNRIYEIKGRRHTSPVAICVGDVSDIARFAVTDHLPHGLLDSLLPGPVTVVLKRGDSSILERSLNPGFDSIGVRVPDCNFIRIIARGSGTALALTSANLSGQPSSLSIKDFENLWEHCAFVYDGGLIPSSRAGSTIVDLTTPHKYRILRPGSAKEETVAILEKHSFVEAETT

SEQ ID NO: 9593 - protein, 225 aa, Glycine max
  peptide (1)..(225): Ceres Seq. ID no. 13594415
  misc_feature (25)..(204): Pfam Name: Pfam Description:  yrdC domain
  misc_feature (3)..(225): NCBI GI NO: 9759323 NR Description: gene_id:MUP24
  misc_feature (24)..(216): NCBI GI NO: 23956354 NR Description: hypothetical protein MGC38336 [Mus musculus]
  misc_feature (24)..(216): NCBI GI NO: 30908964 NR Description: ischemia/reperfusion inducible protein
  misc_feature (24)..(216): NCBI GI NO: 30691316 NR Description: YRDC protein [Homo sapiens]
  misc_feature (24)..(216): NCBI GI NO: 31088868 NR Description: ischemia/reperfusion inducible protein
  misc_feature (24)..(221): NCBI GI NO: 28573691 NR Description: CG33005-PB [Drosophila melanogaster]
  misc_feature (1)..(107): NCBI GI NO: 18424373 NR Description: expressed protein [Arabidopsis thaliana]
  misc_feature (39)..(214): NCBI GI NO: 28278078 NR Description: Similar to hypothetical protein MGC38336
  misc_feature (9)..(221): NCBI GI NO: 39591298 NR Description: Hypothetical protein CBG20783
  misc_feature (11)..(223): NCBI GI NO: 17537239 NR Description: yrdC domain containing protein
MACSVSVDNCDTVHPATDAYAGEAVEALKAGKVIAVPTDTLYGFACDACSMEAVNRIYEIKGRRHTSPVAICVGDVSDIARFAVTDHLPHGLLDSLLPGPVTVVLKRGDSSILERSLNPGFDSIGVRVPDCNFIRIIARGSGTALALTSANLSGQPSSLSIKDFENLWEHCAFVYDGGLIPSSRAGSTIVDLTTPHKYRILRPGSAKEETVAILEKHSFVEAETT

SEQ ID NO: 9594 - DNA, 661 bp, Glycine max
  misc_feature (1)..(661): Ceres Seq. ID no. 15173311
actaaatccagaaggggaaaaaaagagagaaaagaaatcaggggtaaactttctctctctcccttgcttattcctcccaaaagaaaaagacggtttccgttggaaggaagaaagaaagaaattgagtttgagatctgattgtgcggcgacgatggagaacaacgacagcatcatatcgcgggagaagatcgaccaggcagcggtgtggctcggctccgccgtctcttccgctttcttttcctcattggaacgcttttcctgcgtcaacgtcgccacctctgaccccgacaacgacgatgacgacgacgattattactccaccaccaccgccactcccacctccgcatccaccaccaccaccaccgccctcgccaccactcctccctccgttcaggtcaacgggcaaaaaacaaacgacgacgtctccaacctccccgtttgaggcaatataacgacgacgacgtcgttgctgcgctgtgtatagacctttttcccttttcctcctttcgtgtgtgtgttatgtaaggattctcgattttcgttgcttcatacttttgaagtcgtgaaaaagaaaaaacaagatgtgatgcaattttatgcctgtctatttaattaactaattacatgcttatatatttttattaaattgtattattagttc

SEQ ID NO: 9595 - protein, 146 aa, Glycine max
  peptide (1)..(146): Ceres Seq. ID no. 15173312
  misc_feature (49)..(101): NCBI GI NO: 15236936 NR Description: expressed protein [Arabidopsis thaliana]
LNPEGEKKREKKSGVNFLSLPCLFLPKEKDGFRWKEERKKLSLRSDCAATMENNDSIISREKIDQAAVWLGSAVSSAFFSSLERFSCVNVATSDPDNDDDDDDYYSTTTATPTSASTTTTTALATTPPSVQVNGQKTNDDVSNLPV

SEQ ID NO: 9596 - protein, 96 aa, Glycine max
  peptide (1)..(96): Ceres Seq. ID no. 15173313
  misc_feature (1)..(51): NCBI GI NO: 15236936 NR Description: expressed protein [Arabidopsis thaliana]
MENNDSIISREKIDQAAVWLGSAVSSAFFSSLERFSCVNVATSDPDNDDDDDDYYSTTTATPTSASTTTTTALATTPPSVQVNGQKTNDDVSNLPV

SEQ ID NO: 9597 - DNA, 559 bp, Glycine max
  misc_feature (1)..(559): Ceres Seq. ID no. 12608605
attgcaggctcgtagttgtagtgcgaggggacgagttgtttgttcgttaacagttagttaggatggcgagcggtggaaaggtttcgttcaaagtaaccctcacctccgatccaaagcttcccttcaaagtgttcagcgttccagaggctgcacctttcactgccgttctgaaatttgcagcagaagaattcaaagtgcctccccagaccagcgccatcatcaccaatgatggtgttgggataaatcctcagcaaagtgcaggtaatgtcttccttaagcatggttcagagctacgtctgattcctcgtgatagggtcggtgcatatgagatgtttcgagatatctgattagtggctaattaccttcttcattatttatctcgaggagtgtagcttaataaacaccagtattacactattactgatatcatgtagtaattgatttatcggtgtccctatgagataaattttatgtgaataatgaatacatatttgggaaaatgatatatatgtagtcttccctcctttgaacttttaatttatttctgatttttgtcggt

SEQ ID NO: 9598 - protein, 94 aa, Glycine max
  peptide (1)..(94): Ceres Seq. ID no. 12608606
  misc_feature (5)..(80): Pfam Name: UPF0185 Pfam Description: Uncharacterised protein family
  misc_feature (1)..(87): NCBI GI NO: 15217447 NR Description: unknown protein; protein id: At1g77710
  misc_feature (2)..(87): NCBI GI NO: 34905822 NR Description: P0483G10.15
  misc_feature (6)..(92): NCBI GI NO: 20140686 NR Description: Hypothetical protein pr46A
  misc_feature (2)..(88): NCBI GI NO: 39589640 NR Description: Hypothetical protein CBG12253
  misc_feature (3)..(86): NCBI GI NO: 17557033 NR Description: Eukaryotic protein similar to human bone marrowprotein BM-002
  misc_feature (2)..(87): NCBI GI NO: 40889046 NR Description: Chain A, Solution Structure Of Mouse Hypothetical9
  misc_feature (6)..(87): NCBI GI NO: 7705300 NR Description: hypothetical protein BM-002 [Homo sapiens]
  misc_feature (6)..(86): NCBI GI NO: 37595394 NR Description: hypothetical protein BM-002 [Danio rerio]
  misc_feature (6)..(86): NCBI GI NO: 28277496 NR Description: Similar to RIKEN cDNA 1810045K17 gene
  misc_feature (6)..(80): NCBI GI NO: 1235522 NR Description: ORF is homologous to hypothetical 9
MASGGKVSFKVTLTSDPKLPFKVFSVPEAAPFTAVLKFAAEEFKVPPQTSAIITNDGVGINPQQSAGNVFLKHGSELRLIPRDRVGAYEMFRDI

SEQ ID NO: 9599 - DNA, 1918 bp, Glycine max
  misc_feature (1)..(1918): Ceres Seq. ID no. 14315317
aaaatcttcattgcttcctcactcaccggcgcctactcatatcacagatcatagataaataataccaatacttcatagtattcacgaaccattctatttccattcggcagcaacaaaatcaccatccttcttctgcaccgcaatgctcttcctcttccctccgtcattagtttgttagttagattacccttttcccttccatgcttacgtcaccaccgctcaccattcactctctttttacccctaaaccattgaatcgatctaaatctctcccaaatcgcaaaccccttttgctcaattgagtcaattctctccctaagttcctctgtcggcgtctgggtgggtaaaagttgttgttttgtcttctgggttttggagcaaagacaaaagatgggtgagggagaacgtttccagcttgggactgtgggtgcgttgactctttctgtggtctcatctgtgtccattgtgatttgcaataaggcgctgatgagttcactgcatttcattttcgctacaactttgaccagctggcatctgcttgtcacgttttgttcccttcatgtggcgctcaaaatgagattctttgagcacaaaccttttgagcagaaagctgtaatgggattcgggattttaaatgggatctcaattggacttttaaatttgagcctggggttcaattccgttggcttctatcaaatgactaagctggcaatcattccttgtactgtattgttggagaccatttttcttgggaagagattcagtaagagaattcaatttgccctcagtatcctccttttgggtgtcgggattgctactgtcacagatttgcagctcaatgctctgggctctttcttatcttttcttgcagtgattacaacttgtgttgctcagattatgacaaatactatccagaagaagtacaaggtttcttccacccagcttctgtatcaatcatgtccatatcaagcagcaaccctgttaatcgctggtccatatctggataaacttttgaccaaccaaaatgtatttggtttcaagtatacgacacaagtgacggttttcataattctttcctgccttatctccatctctgtcaatttcagtacgttccttgttattggaaagacatctccagtcacctatcaggttcttggacacctgaagacatgccttgtattggcatttggttatatacttctccgagacccatttagctggagaaacatactgggtattttgatagccatgattgggatgattctatattcttactattgcactctcgagaatcagcaaaaaactgttgaagctgcatcacaatcatcccaggcaagagaagatgaatctgatcctctgatgaatgtggaaaatggaagtgcagttgtgagttctaatgtcggacaaagacaaatgtcccctgtatggagcaagagcaaagactagtatgtttaatgggctttgttttagcattgtcaagaacagttttatagtccctatagagggttaacacccgtaatccatgaggaattagaaagtggaagtgctgccaaacacatgtcctagtcatttttaatagctttagtctaatatttttatgaatcgtttgccgaccaacagtattagggaagggaacaagcacatggtcatgtcgtaattctattggccaacaaatatgtcttatagtaacatacatctcctggtgatgttttcatatcatgatacatttatgattttatatagatattcaaactttttcttggcttgaatagcatataaacacctactggtaattctttttctcccttattatctctatttgtattcctatactaatagtagtaatttattcaagtccatttttttattttagaaactgaacttattcgaagcatgaggaccacattatattgttttc

SEQ ID NO: 9600 - protein, 351 aa, Glycine max
  peptide (1)..(351): Ceres Seq. ID no. 14315318
  misc_feature (162)..(295): Pfam Name: Pfam Description:  Integral membrane protein DUF6
  misc_feature (1)..(351): NCBI GI NO: 22329373 NR Description: transporter-related [Arabidopsis thaliana]
  misc_feature (1)..(351): NCBI GI NO: 27311731 NR Description: putative integral membrane protein
  misc_feature (1)..(347): NCBI GI NO: 34896140 NR Description: P0701D05.25
  misc_feature (4)..(347): NCBI GI NO: 13699188 NR Description: putative glucose-6-phosphate/phosphate-tranlocat or
  misc_feature (1)..(328): NCBI GI NO: 30683853 NR Description: transporter-related [Arabidopsis thaliana]
  misc_feature (3)..(335): NCBI GI NO: 13384378 NR Description: putative phosphate translocator
  misc_feature (103)..(351): NCBI GI NO: 25406945 NR Description: hypothetical protein
  misc_feature (103)..(335): NCBI GI NO: 37535412 NR Description: putative glucose-6-phosphate/phosphate-translocator
  misc_feature (12)..(302): NCBI GI NO: 15238957 NR Description: transporter-related [Arabidopsis thaliana]
  misc_feature (1)..(319): NCBI GI NO: 18411172 NR Description: transporter-related [Arabidopsis thaliana]
MGEGERFQLGTVGALTLSVVSSVSIVICNKALMSSLHFIFATTLTSWHLLVTFCSLHVALKMRFFEHKPFEQKAVMGFGILNGISIGLLNLSLGFNSVGFYQMTKLAIIPCTVLLETIFLGKRFSKRIQFALSILLLGVGIATVTDLQLNALGSFLSFLAVITTCVAQIMTNTIQKKYKVSSTQLLYQSCPYQAATLLIAGPYLDKLLTNQNVFGFKYTTQVTVFIILSCLISISVNFSTFLVIGKTSPVTYQVLGHLKTCLVLAFGYILLRDPFSWRNILGILIAMIGMILYSYYCTLENQQKTVEAASQSSQAREDESDPLMNVENGSAVVSSNVGQRQMSPVWSKSKD

SEQ ID NO: 9601 - protein, 319 aa, Glycine max
  peptide (1)..(319): Ceres Seq. ID no. 14315319
  misc_feature (130)..(263): Pfam Name: Pfam Description:  Integral membrane protein DUF6
  misc_feature (1)..(319): NCBI GI NO: 22329373 NR Description: transporter-related [Arabidopsis thaliana]
  misc_feature (1)..(319): NCBI GI NO: 27311731 NR Description: putative integral membrane protein
  misc_feature (1)..(315): NCBI GI NO: 34896140 NR Description: P0701D05.25
  misc_feature (1)..(315): NCBI GI NO: 13699188 NR Description: putative glucose-6-phosphate/phosphate-tranlocat or
  misc_feature (1)..(296): NCBI GI NO: 30683853 NR Description: transporter-related [Arabidopsis thaliana]
  misc_feature (1)..(303): NCBI GI NO: 13384378 NR Description: putative phosphate translocator
  misc_feature (71)..(319): NCBI GI NO: 25406945 NR Description: hypothetical protein
  misc_feature (71)..(303): NCBI GI NO: 37535412 NR Description: putative glucose-6-phosphate/phosphate-translocator
  misc_feature (1)..(270): NCBI GI NO: 15238957 NR Description: transporter-related [Arabidopsis thaliana]
  misc_feature (1)..(287): NCBI GI NO: 18411172 NR Description: transporter-related [Arabidopsis thaliana]
MSSLHFIFATTLTSWHLLVTFCSLHVALKMRFFEHKPFEQKAVMGFGILNGISIGLLNLSLGFNSVGFYQMTKLAIIPCTVLLETIFLGKRFSKRIQFALSILLLGVGIATVTDLQLNALGSFLSFLAVITTCVAQIMTNTIQKKYKVSSTQLLYQSCPYQAATLLIAGPYLDKLLTNQNVFGFKYTTQVTVFIILSCLISISVNFSTFLVIGKTSPVTYQVLGHLKTCLVLAFGYILLRDPFSWRNILGILIAMIGMILYSYYCTLENQQKTVEAASQSSQAREDESDPLMNVENGSAVVSSNVGQRQMSPVWSKSKD

SEQ ID NO: 9602 - protein, 290 aa, Glycine max
  peptide (1)..(290): Ceres Seq. ID no. 14315320
  misc_feature (101)..(234): Pfam Name: Pfam Description:  Integral membrane protein DUF6
  misc_feature (1)..(290): NCBI GI NO: 22329373 NR Description: transporter-related [Arabidopsis thaliana]
  misc_feature (1)..(290): NCBI GI NO: 27311731 NR Description: putative integral membrane protein
  misc_feature (1)..(286): NCBI GI NO: 34896140 NR Description: P0701D05.25
  misc_feature (1)..(286): NCBI GI NO: 13699188 NR Description: putative glucose-6-phosphate/phosphate-tranlocat or
  misc_feature (1)..(267): NCBI GI NO: 30683853 NR Description: transporter-related [Arabidopsis thaliana]
  misc_feature (1)..(274): NCBI GI NO: 13384378 NR Description: putative phosphate translocator
  misc_feature (42)..(290): NCBI GI NO: 25406945 NR Description: hypothetical protein
  misc_feature (42)..(274): NCBI GI NO: 37535412 NR Description: putative glucose-6-phosphate/phosphate-translocator
  misc_feature (1)..(241): NCBI GI NO: 15238957 NR Description: transporter-related [Arabidopsis thaliana]
  misc_feature (1)..(258): NCBI GI NO: 18411172 NR Description: transporter-related [Arabidopsis thaliana]
MRFFEHKPFEQKAVMGFGILNGISIGLLNLSLGFNSVGFYQMTKLAIIPCTVLLETIFLGKRFSKRIQFALSILLLGVGIATVTDLQLNALGSFLSFLAVITTCVAQIMTNTIQKKYKVSSTQLLYQSCPYQAATLLIAGPYLDKLLTNQNVFGFKYTTQVTVFIILSCLISISVNFSTFLVIGKTSPVTYQVLGHLKTCLVLAFGYILLRDPFSWRNILGILIAMIGMILYSYYCTLENQQKTVEAASQSSQAREDESDPLMNVENGSAVVSSNVGQRQMSPVWSKSKD

SEQ ID NO: 9603 - protein, 249 aa, Glycine max
  peptide (1)..(249): Ceres Seq. ID no. 14315321
  misc_feature (60)..(193): Pfam Name: Pfam Description:  Integral membrane protein DUF6
  misc_feature (1)..(249): NCBI GI NO: 22329373 NR Description: transporter-related [Arabidopsis thaliana]
  misc_feature (1)..(249): NCBI GI NO: 27311731 NR Description: putative integral membrane protein
  misc_feature (1)..(245): NCBI GI NO: 34896140 NR Description: P0701D05.25
  misc_feature (1)..(245): NCBI GI NO: 13699188 NR Description: putative glucose-6-phosphate/phosphate-tranlocat or
  misc_feature (1)..(226): NCBI GI NO: 30683853 NR Description: transporter-related [Arabidopsis thaliana]
  misc_feature (1)..(233): NCBI GI NO: 13384378 NR Description: putative phosphate translocator
  misc_feature (1)..(249): NCBI GI NO: 25406945 NR Description: hypothetical protein
  misc_feature (1)..(233): NCBI GI NO: 37535412 NR Description: putative glucose-6-phosphate/phosphate-translocator
  misc_feature (1)..(200): NCBI GI NO: 15238957 NR Description: transporter-related [Arabidopsis thaliana]
  misc_feature (1)..(217): NCBI GI NO: 18411172 NR Description: transporter-related [Arabidopsis thaliana]
MTKLAIIPCTVLLETIFLGKRFSKRIQFALSILLLGVGIATVTDLQLNALGSFLSFLAVITTCVAQIMTNTIQKKYKVSSTQLLYQSCPYQAATLLIAGPYLDKLLTNQNVFGFKYTTQVTVFIILSCLISISVNFSTFLVIGKTSPVTYQVLGHLKTCLVLAFGYILLRDPFSWRNILGILIAMIGMILYSYYCTLENQQKTVEAASQSSQAREDESDPLMNVENGSAVVSSNVGQRQMSPVWSKSKD

SEQ ID NO: 9604 - DNA, 1654 bp, Glycine max
  misc_feature (1)..(1654): Ceres Seq. ID no. 15227091
aatccattatcaaaatcaatcatacccaacaacatcctccgacaccatgttgcacatggaaaaccccctcctgcagtcaacaaactcaattaccttcacattctttgggctgttgttatttctctttgttctttcatccatattcagaaaccgcggtgctgcaacaagaaaagcaccaccagaagcaagaggcgcgtggcctttaattggtcacatccacctcttaggtggctcaaaaccaccccatgtcacgttgggccacatggcggacaaatatggtcccgtcttcaccttgcgtctgggtgctcacaaaacgttggttgtgagcaattgggaaatggccaaacagtgctttaccgtcaacgacaaagcgtttgctagccgtcctaaatcagtgtcctttgaattgttgggatacaactattccatgattgggttcatcccttacggttcttattggcgtcacgtgcgcaaaattatcacgctggagcttctctctactcactgcatagacatgctcaagcacgtgatggtggccgaggttaaggcggcagtgaaagagacttacaagaacctaaagggttccgaaaaggcaacaactgaaatgaagaggtggttcggggacataacgttaaacgttatgttcagaacggtggtaggaaaacgttttgttggtgagaatgaagagaacgaacggatccgaaaggcgctgagagaattttttgacctgacgggggcgttcaatgtgtctgatgctcttccttatttgagatggttggatttggatggcgcagagaagaaaatgaaaaagacggcgaaagagttagatgggtttgttcaagtttggctggaagaacacaaaagtaaaaggaatagtgaagctgaacccaaaagtaaccaggacttgatggacgtgcttcttagccttgttgaggagggtcaagagtttgacggccaggatgctgacaccacaatcaaagctacttgcctgggcttaattttagctggctctgatacgacaacaacaacattgtcttgggctctctcattacttctcaataatcgtgaagtcctaaataaggcaatccacgaattagacacacaaattgggagtgaaaaaattgtagagatatcagacttaaaaaagctagaatatctccaatctatcatcaaggaaacattacgtttgtacccagctgcaccacttaatgtgccacacgagtccttagaagattgcaccgtgggtggatatcatgtaccaactggcacgcgtctgttgactaatatttcaaaacttcaacgagacccttcattataccctaatccattagaattttggccagagagattcttgacaacccacaaggatgtagacatcaaaggtcaacattttgaattaattccatttggtgcaggtagaagaatgtgccctggactttctttcggtcttcaagtaatgcaactaacgcttgctactctattgcatgggtttgacattgtaactagtgatggggaacatgtcgatatgcttgaacaaattggactaaccaacattaaggcctctccactccaagtcattcttacaccacgtctttctggtcatatttatgatgaaatttaaatactaaaaaaataaagaaaaaaaaaaaaaaaa

SEQ ID NO: 9605 - protein, 539 aa, Glycine max
  peptide (1)..(539): Ceres Seq. ID no. 15227092
  misc_feature (60)..(529): Pfam Name: Pfam Description:  Cytochrome P450
  misc_feature (60)..(537): NCBI GI NO: 7430679 NR Description: cytochrome P450 82C1 - soybean
  misc_feature (190)..(539): NCBI GI NO: 9957087 NR Description: wound-inducible P450 hydroxylase [Pisum sativum]
  misc_feature (23)..(187): NCBI GI NO: 9957087 NR Description: wound-inducible P450 hydroxylase [Pisum sativum]
  misc_feature (195)..(539): NCBI GI NO: 18314355 NR Description: Cytochrome P450 82A1 (CYPLXXXII)
  misc_feature (23)..(187): NCBI GI NO: 18314355 NR Description: Cytochrome P450 82A1 (CYPLXXXII)
  misc_feature (23)..(539): NCBI GI NO: 5915844 NR Description: Cytochrome P450 82A3 (P450 CP6)
  misc_feature (187)..(539): NCBI GI NO: 7430689 NR Description: cytochrome P450 monooxygenase (EC 1
  misc_feature (23)..(187): NCBI GI NO: 7430689 NR Description: cytochrome P450 monooxygenase (EC 1
  misc_feature (19)..(539): NCBI GI NO: 5915843 NR Description: Cytochrome P450 82A2 (P450 CP4)
  misc_feature (26)..(536): NCBI GI NO: 5915845 NR Description: Cytochrome P450 82A4 (P450 CP9)
IHYQNQSYPTTSSDTMLHMENPLLQSTNSITFTFFGLLLFLFVLSSIFRNRGAATRKAPPEARGAWPLIGHIHLLGGSKPPHVTLGHMADKYGPVFTLRLGAHKTLVVSNWEMAKQCFTVNDKAFASRPKSVSFELLGYNYSMIGFIPYGSYWRHVRKIITLELLSTHCIDMLKHVMVAEVKAAVKETYKNLKGSEKATTEMKRWFGDITLNVMFRTVVGKRFVGENEENERIRKALREFFDLTGAFNVSDALPYLRWLDLDGAEKKMKKTAKELDGFVQVWLEEHKSKRNSEAEPKSNQDLMDVLLSLVEEGQEFDGQDADTTIKATCLGLILAGSDTTTTTLSWALSLLLNNREVLNKAIHELDTQIGSEKIVEISDLKKLEYLQSIIKETLRLYPAAPLNVPHESLEDCTVGGYHVPTGTRLLTNISKLQRDPSLYPNPLEFWPERFLTTHKDVDIKGQHFELIPFGAGRRMCPGLSFGLQVMQLTLATLLHGFDIVTSDGEHVDMLEQIGLTNIKASPLQVILTPRLSGHIYDEI

SEQ ID NO: 9606 - protein, 524 aa, Glycine max
  peptide (1)..(524): Ceres Seq. ID no. 15227093
  misc_feature (45)..(514): Pfam Name: Pfam Description:  Cytochrome P450
  misc_feature (45)..(522): NCBI GI NO: 7430679 NR Description: cytochrome P450 82C1 - soybean
  misc_feature (175)..(524): NCBI GI NO: 9957087 NR Description: wound-inducible P450 hydroxylase [Pisum sativum]
  misc_feature (8)..(172): NCBI GI NO: 9957087 NR Description: wound-inducible P450 hydroxylase [Pisum sativum]
  misc_feature (180)..(524): NCBI GI NO: 18314355 NR Description: Cytochrome P450 82A1 (CYPLXXXII)
  misc_feature (8)..(172): NCBI GI NO: 18314355 NR Description: Cytochrome P450 82A1 (CYPLXXXII)
  misc_feature (8)..(524): NCBI GI NO: 5915844 NR Description: Cytochrome P450 82A3 (P450 CP6)
  misc_feature (172)..(524): NCBI GI NO: 7430689 NR Description: cytochrome P450 monooxygenase (EC 1
  misc_feature (8)..(172): NCBI GI NO: 7430689 NR Description: cytochrome P450 monooxygenase (EC 1
  misc_feature (4)..(524): NCBI GI NO: 5915843 NR Description: Cytochrome P450 82A2 (P450 CP4)
  misc_feature (11)..(521): NCBI GI NO: 5915845 NR Description: Cytochrome P450 82A4 (P450 CP9)
MLHMENPLLQSTNSITFTFFGLLLFLFVLSSIFRNRGAATRKAPPEARGAWPLIGHIHLLGGSKPPHVTLGHMADKYGPVFTLRLGAHKTLVVSNWEMAKQCFTVNDKAFASRPKSVSFELLGYNYSMIGFIPYGSYWRHVRKIITLELLSTHCIDMLKHVMVAEVKAAVKETYKNLKGSEKATTEMKRWFGDITLNVMFRTVVGKRFVGENEENERIRKALREFFDLTGAFNVSDALPYLRWLDLDGAEKKMKKTAKELDGFVQVWLEEHKSKRNSEAEPKSNQDLMDVLLSLVEEGQEFDGQDADTTIKATCLGLILAGSDTTTTTLSWALSLLLNNREVLNKAIHELDTQIGSEKIVEISDLKKLEYLQSIIKETLRLYPAAPLNVPHESLEDCTVGGYHVPTGTRLLTNISKLQRDPSLYPNPLEFWPERFLTTHKDVDIKGQHFELIPFGAGRRMCPGLSFGLQVMQLTLATLLHGFDIVTSDGEHVDMLEQIGLTNIKASPLQVILTPRLSGHIYDEI

SEQ ID NO: 9607 - protein, 521 aa, Glycine max
  peptide (1)..(521): Ceres Seq. ID no. 15227094
  misc_feature (42)..(511): Pfam Name: Pfam Description:  Cytochrome P450
  misc_feature (42)..(519): NCBI GI NO: 7430679 NR Description: cytochrome P450 82C1 - soybean
  misc_feature (172)..(521): NCBI GI NO: 9957087 NR Description: wound-inducible P450 hydroxylase [Pisum sativum]
  misc_feature (5)..(169): NCBI GI NO: 9957087 NR Description: wound-inducible P450 hydroxylase [Pisum sativum]
  misc_feature (177)..(521): NCBI GI NO: 18314355 NR Description: Cytochrome P450 82A1 (CYPLXXXII)
  misc_feature (5)..(169): NCBI GI NO: 18314355 NR Description: Cytochrome P450 82A1 (CYPLXXXII)
  misc_feature (5)..(521): NCBI GI NO: 5915844 NR Description: Cytochrome P450 82A3 (P450 CP6)
  misc_feature (169)..(521): NCBI GI NO: 7430689 NR Description: cytochrome P450 monooxygenase (EC 1
  misc_feature (5)..(169): NCBI GI NO: 7430689 NR Description: cytochrome P450 monooxygenase (EC 1
  misc_feature (1)..(521): NCBI GI NO: 5915843 NR Description: Cytochrome P450 82A2 (P450 CP4)
  misc_feature (8)..(518): NCBI GI NO: 5915845 NR Description: Cytochrome P450 82A4 (P450 CP9)
MENPLLQSTNSITFTFFGLLLFLFVLSSIFRNRGAATRKAPPEARGAWPLIGHIHLLGGSKPPHVTLGHMADKYGPVFTLRLGAHKTLVVSNWEMAKQCFTVNDKAFASRPKSVSFELLGYNYSMIGFIPYGSYWRHVRKIITLELLSTHCIDMLKHVMVAEVKAAVKETYKNLKGSEKATTEMKRWFGDITLNVMFRTVVGKRFVGENEENERIRKALREFFDLTGAFNVSDALPYLRWLDLDGAEKKMKKTAKELDGFVQVWLEEHKSKRNSEAEPKSNQDLMDVLLSLVEEGQEFDGQDADTTIKATCLGLILAGSDTTTTTLSWALSLLLNNREVLNKAIHELDTQIGSEKIVEISDLKKLEYLQSIIKETLRLYPAAPLNVPHESLEDCTVGGYHVPTGTRLLTNISKLQRDPSLYPNPLEFWPERFLTTHKDVDIKGQHFELIPFGAGRRMCPGLSFGLQVMQLTLATLLHGFDIVTSDGEHVDMLEQIGLTNIKASPLQVILTPRLSGHIYDEI

SEQ ID NO: 9608 - DNA, 1097 bp, Glycine max
  misc_feature (1)..(1097): Ceres Seq. ID no. 14305259
gattcctcttcattcttcaataactccaatgtattccttagctcaacacaagtatacaccaaacttccaccaccaagtttgcaagaaccatccaccccgtcacccgtctcgagtacattgttctaccacaaccactaccaccaccacctctaggtctaagtccaatgctaagtcattggtcattgagacccggctcgtgccggtgccgccaatgccaacggtcgttaccactgagatccaccgtccaatgaacaatgacccaagtttgcaatcaacatggtctcatagagcttgggtggcagctggatgctcaactttggtcatttccttgggagagtccataaagggtgctattgatttgaacatgtgggttgagcccattgtggcaggttgggttggatacatcttagctgatcttggatcaggggtttaccattgggccatcgacaattatggcgatggctcaaccccaatagttggggctcaaattgaagcctttcaaggccaccacaagtggccttggaccatcactaggcgtcaatttgctaacaatttacatgcattggcacgtgcagtgaccttggcagtgcttcctgtagtccttctttgccatgaccctattgttgaaggatttgttgtggtgtgctcaggttgcatcatgtttagccaacagtttcatgcatggtcacatggcactaagagccggcttccgccactcgtggtggcattacaagaggccggcgtgctcgtgtcacggtggcaacatgccgcacaccaccgggcaccatataacaataactattgtatagtgagtggagtgtggaatgagtttttggataagcataaggtctttgaagccatggaaatggtattgtattttaaaacaggagttaggccaaggtcatggagtgaacctgcccctgagtgggttgaggagattgagactccttctcaaatccaaatccaaacccaatgaatgatgtttattctcttctccatttatttttaaaccatttataacacacatgtgtcaatgtagcttttgggtaatgtaaattacattatatttaaattataaagcttgaaaggttaaatac

SEQ ID NO: 9609 - protein, 324 aa, Glycine max
  peptide (1)..(324): Ceres Seq. ID no. 14305260
  misc_feature (29)..(314): NCBI GI NO: 15236949 NR Description: hypothetical protein [Arabidopsis thaliana]
  misc_feature (35)..(315): NCBI GI NO: 15220724 NR Description: hypothetical protein [Arabidopsis thaliana]
  misc_feature (37)..(305): NCBI GI NO: 15227763 NR Description: hypothetical protein [Arabidopsis thaliana]
  misc_feature (69)..(319): NCBI GI NO: 38637069 NR Description: hypothetical protein
  misc_feature (247)..(314): NCBI GI NO: 14488086 NR Description: AT4g27030/F10M23_370 [Arabidopsis thaliana]
  misc_feature (104)..(301): NCBI GI NO: 31232784 NR Description: ENSANGP00000013131 [Anopheles gambiae]
  misc_feature (133)..(300): NCBI GI NO: 19921580 NR Description: CG10723-PA [Drosophila melanogaster]
  misc_feature (113)..(300): NCBI GI NO: 13397952 NR Description: hypothetical protein [Myxococcus xanthus]
  misc_feature (103)..(314): NCBI GI NO: 7208823 NR Description: dJ1185N5
  misc_feature (103)..(314): NCBI GI NO: 40806193 NR Description: ubiquitin-conjugating enzyme variant Kua
IPLHSSITPMYSLAQHKYTPNFHHQVCKNHPPRHPSRVHCSTTTTTTTTSRSKSNAKSLVIETRLVPVPPMPTVVTTEIHRPMNNDPSLQSTWSHRAWVAAGCSTLVISLGESIKGAIDLNMWVEPIVAGWVGYILADLGSGVYHWAIDNYGDGSTPIVGAQIEAFQGHHKWPWTITRRQFANNLHALARAVTLAVLPVVLLCHDPIVEGFVVVCSGCIMFSQQFHAWSHGTKSRLPPLVVALQEAGVLVSRWQHAAHHRAPYNNNYCIVSGVWNEFLDKHKVFEAMEMVLYFKTGVRPRSWSEPAPEWVEEIETPSQIQIQTQ

SEQ ID NO: 9610 - protein, 315 aa, Glycine max
  peptide (1)..(315): Ceres Seq. ID no. 14305261
  misc_feature (20)..(305): NCBI GI NO: 15236949 NR Description: hypothetical protein [Arabidopsis thaliana]
  misc_feature (26)..(306): NCBI GI NO: 15220724 NR Description: hypothetical protein [Arabidopsis thaliana]
  misc_feature (28)..(296): NCBI GI NO: 15227763 NR Description: hypothetical protein [Arabidopsis thaliana]
  misc_feature (60)..(310): NCBI GI NO: 38637069 NR Description: hypothetical protein
  misc_feature (238)..(305): NCBI GI NO: 14488086 NR Description: AT4g27030/F10M23_370 [Arabidopsis thaliana]
  misc_feature (95)..(292): NCBI GI NO: 31232784 NR Description: ENSANGP00000013131 [Anopheles gambiae]
  misc_feature (124)..(291): NCBI GI NO: 19921580 NR Description: CG10723-PA [Drosophila melanogaster]
  misc_feature (104)..(291): NCBI GI NO: 13397952 NR Description: hypothetical protein [Myxococcus xanthus]
  misc_feature (94)..(305): NCBI GI NO: 7208823 NR Description: dJ1185N5
  misc_feature (94)..(305): NCBI GI NO: 40806193 NR Description: ubiquitin-conjugating enzyme variant Kua
MYSLAQHKYTPNFHHQVCKNHPPRHPSRVHCSTTTTTTTTSRSKSNAKSLVIETRLVPVPPMPTVVTTEIHRPMNNDPSLQSTWSHRAWVAAGCSTLVISLGESIKGAIDLNMWVEPIVAGWVGYILADLGSGVYHWAIDNYGDGSTPIVGAQIEAFQGHHKWPWTITRRQFANNLHALARAVTLAVLPVVLLCHDPIVEGFVVVCSGCIMFSQQFHAWSHGTKSRLPPLVVALQEAGVLVSRWQHAAHHRAPYNNNYCIVSGVWNEFLDKHKVFEAMEMVLYFKTGVRPRSWSEPAPEWVEEIETPSQIQIQTQ

SEQ ID NO: 9611 - protein, 254 aa, Glycine max
  peptide (1)..(254): Ceres Seq. ID no. 14305262
  misc_feature (1)..(244): NCBI GI NO: 15236949 NR Description: hypothetical protein [Arabidopsis thaliana]
  misc_feature (1)..(245): NCBI GI NO: 15220724 NR Description: hypothetical protein [Arabidopsis thaliana]
  misc_feature (1)..(235): NCBI GI NO: 15227763 NR Description: hypothetical protein [Arabidopsis thaliana]
  misc_feature (1)..(249): NCBI GI NO: 38637069 NR Description: hypothetical protein
  misc_feature (177)..(244): NCBI GI NO: 14488086 NR Description: AT4g27030/F10M23_370 [Arabidopsis thaliana]
  misc_feature (34)..(231): NCBI GI NO: 31232784 NR Description: ENSANGP00000013131 [Anopheles gambiae]
  misc_feature (63)..(230): NCBI GI NO: 19921580 NR Description: CG10723-PA [Drosophila melanogaster]
  misc_feature (43)..(230): NCBI GI NO: 13397952 NR Description: hypothetical protein [Myxococcus xanthus]
  misc_feature (33)..(244): NCBI GI NO: 7208823 NR Description: dJ1185N5
  misc_feature (33)..(244): NCBI GI NO: 40806193 NR Description: ubiquitin-conjugating enzyme variant Kua
MPTVVTTEIHRPMNNDPSLQSTWSHRAWVAAGCSTLVISLGESIKGAIDLNMWVEPIVAGWVGYILADLGSGVYHWAIDNYGDGSTPIVGAQIEAFQGHHKWPWTITRRQFANNLHALARAVTLAVLPVVLLCHDPIVEGFVVVCSGCIMFSQQFHAWSHGTKSRLPPLVVALQEAGVLVSRWQHAAHHRAPYNNNYCIVSGVWNEFLDKHKVFEAMEMVLYFKTGVRPRSWSEPAPEWVEEIETPSQIQIQTQ

SEQ ID NO: 9612 - DNA, 1860 bp, Glycine max
  misc_feature (1)..(1860): Ceres Seq. ID no. 14316424
tcttccattcatttgcatctcattctgaatcttgcgccgtttccctctcccactcgccagtgttgcggaattttttagaagtgtgaatgttcgttcatgcatgagcggctcttaaagtttccttgcggattcgattgcgatatattgagactgcgatggcctcagccgtcgtgaatttcttgaacgcgacgttggattgggtgacgtttgcgtcggatggtccttctgcgcgagctgtagttttcggagtccatatcggtggacatttgtttatcgaagtgtttttgctagttgtcatacttttcttgctttcacagaaaagttacaagcctcctaaaaggcctttaacaaataaggaaattgatgagttatgtgacgaatgggttccggaaccccttattccttctcttaataaagagttgcagtatgaaccaccagtgctggagagtgctgctgggccacataccataattaatggcaaagaagttgtcaattttgcttcagcaaactatcttgggtttataggtcatccaaagctacttgactcatgttcttctgctttagcgaaatacggtgttggttcttgtggtccccgtggattttatgggacaattgatgtccaccttgactgtgaagcaagaatagcaaaatttttaggaacccctgaatcaattctgtactcttatggactttccaccatgttcagtgcaattcccgctttctctaaaaaaggagatgtaattgtggcggatgagggagtccgctggggaatacagaatggcctttatctttctagaagcacagtggtgtattttaagcacaatgacatggattctttaagagaaactctagagaacattactgccaaatataagaaggccaagaatttgaggcgttatattgttattgaagctgtctaccagaattctggggaaatagcacccttggacgagatcattaaattgaaggaaaaatatcgctttcgtgttttgctagatgagagcaactcattgggtgtgcttggaagttctggaagaggtctcactgaatactgtggagttccagttgagaagatagacattataactgcttctatgggacatgcattggccacagaaggaggattctgcactggaagtacaagagttatagatcaccaacgattgagtagctctggttatgtcttttctgcttctttgcccccatatcttgcaagtgctgcaattacagctattgatgtcctggaggaaaatcccaatctgataaaaaagctgaagaaaaatattgcttttttaagaaaaggattgtcaaaaataccaggcatcacaattacaagtaatccagagtcacctattgtttatttgagattagagaaatcaagaggttccatgaaagatgacctgcatctgcttgaaaatatcgcggaacgggttttgaaagaagaatctgtatttgtggttgtttccaaaagatcaacattggacaaatgccgtttgcctgtgggaattagattgtttgtttctgctgggcattcagagtctgatctgctcaaggcatctgaatcattgaaaaaggttgtagcatcagtcctgggtggtcagaattgaacgctctacatctttctttttcatctaatgtaccaaaacataagttcgattccatgtgtttaggtgagcaattttgaaatccaggcgatagagaaagtcccgtagttcttaatttgtgtagtattttatgttccagtttagggtaacagtattttgtgcgtgttgctcattggttgtctaaagtagtagaataaggatttaatgtttcttgtcatgagttggggaatatacctatgaattacattccgatatc

SEQ ID NO: 9613 - protein, 483 aa, Glycine max
  peptide (1)..(483): Ceres Seq. ID no. 14316425
  misc_feature (141)..(474): Pfam Name: Pfam Description:  Aminotransferase class I and II
  misc_feature (1)..(479): NCBI GI NO: 18419845 NR Description: serine C-palmitoyltransferase family
  misc_feature (1)..(479): NCBI GI NO: 25407728 NR Description: serine C-palmitoyltransferase like protein
  misc_feature (1)..(479): NCBI GI NO: 37531898 NR Description: putative serine palmitoyltransferase
  misc_feature (1)..(479): NCBI GI NO: 15451568 NR Description: Putative serine palmitoyltransferase
  misc_feature (37)..(479): NCBI GI NO: 5454084 NR Description: serine palmitoyltransferase subunit 1 isoform a
  misc_feature (37)..(479): NCBI GI NO: 2853289 NR Description: serine palmitoyltransferase LCB1 subunit
  misc_feature (37)..(479): NCBI GI NO: 6685592 NR Description: Serine palmitoyltransferase 1
  misc_feature (37)..(479): NCBI GI NO: 26354158 NR Description: unnamed protein product [Mus musculus]
  misc_feature (37)..(479): NCBI GI NO: 29244577 NR Description: serine palmitoyltransferase subunit 1
  misc_feature (37)..(479): NCBI GI NO: 6685595 NR Description: Serine palmitoyltransferase 1
MASAVVNFLNATLDWVTFASDGPSARAVVFGVHIGGHLFIEVFLLVVILFLLSQKSYKPPKRPLTNKEIDELCDEWVPEPLIPSLNKELQYEPPVLESAAGPHTIINGKEVVNFASANYLGFIGHPKLLDSCSSALAKYGVGSCGPRGFYGTIDVHLDCEARIAKFLGTPESILYSYGLSTMFSAIPAFSKKGDVIVADEGVRWGIQNGLYLSRSTVVYFKHNDMDSLRETLENITAKYKKAKNLRRYIVIEAVYQNSGEIAPLDEIIKLKEKYRFRVLLDESNSLGVLGSSGRGLTEYCGVPVEKIDIITASMGHALATEGGFCTGSTRVIDHQRLSSSGYVFSASLPPYLASAAITAIDVLEENPNLIKKLKKNIAFLRKGLSKIPGITITSNPESPIVYLRLEKSRGSMKDDLHLLENIAERVLKEESVFVVVSKRSTLDKCRLPVGIRLFVSAGHSESDLLKASESLKKVVASVLGGQN

SEQ ID NO: 9614 - protein, 302 aa, Glycine max
  peptide (1)..(302): Ceres Seq. ID no. 14316426
  misc_feature (1)..(293): Pfam Name: Pfam Description:  Aminotransferase class I and II
  misc_feature (1)..(298): NCBI GI NO: 18419845 NR Description: serine C-palmitoyltransferase family
  misc_feature (1)..(298): NCBI GI NO: 25407728 NR Description: serine C-palmitoyltransferase like protein
  misc_feature (1)..(298): NCBI GI NO: 37531898 NR Description: putative serine palmitoyltransferase
  misc_feature (1)..(298): NCBI GI NO: 15451568 NR Description: Putative serine palmitoyltransferase
  misc_feature (1)..(298): NCBI GI NO: 5454084 NR Description: serine palmitoyltransferase subunit 1 isoform a
  misc_feature (1)..(298): NCBI GI NO: 2853289 NR Description: serine palmitoyltransferase LCB1 subunit
  misc_feature (1)..(298): NCBI GI NO: 6685592 NR Description: Serine palmitoyltransferase 1
  misc_feature (1)..(298): NCBI GI NO: 26354158 NR Description: unnamed protein product [Mus musculus]
  misc_feature (1)..(298): NCBI GI NO: 29244577 NR Description: serine palmitoyltransferase subunit 1
  misc_feature (1)..(298): NCBI GI NO: 6685595 NR Description: Serine palmitoyltransferase 1
MFSAIPAFSKKGDVIVADEGVRWGIQNGLYLSRSTVVYFKHNDMDSLRETLENITAKYKKAKNLRRYIVIEAVYQNSGEIAPLDEIIKLKEKYRFRVLLDESNSLGVLGSSGRGLTEYCGVPVEKIDIITASMGHALATEGGFCTGSTRVIDHQRLSSSGYVFSASLPPYLASAAITAIDVLEENPNLIKKLKKNIAFLRKGLSKIPGITITSNPESPIVYLRLEKSRGSMKDDLHLLENIAERVLKEESVFVVVSKRSTLDKCRLPVGIRLFVSAGHSESDLLKASESLKKVVASVLGGQN

SEQ ID NO: 9615 - protein, 259 aa, Glycine max
  peptide (1)..(259): Ceres Seq. ID no. 14316427
  misc_feature (1)..(250): Pfam Name: Pfam Description:  Aminotransferase class I and II
  misc_feature (1)..(255): NCBI GI NO: 18419845 NR Description: serine C-palmitoyltransferase family
  misc_feature (1)..(255): NCBI GI NO: 25407728 NR Description: serine C-palmitoyltransferase like protein
  misc_feature (1)..(255): NCBI GI NO: 37531898 NR Description: putative serine palmitoyltransferase
  misc_feature (1)..(255): NCBI GI NO: 15451568 NR Description: Putative serine palmitoyltransferase
  misc_feature (1)..(255): NCBI GI NO: 5454084 NR Description: serine palmitoyltransferase subunit 1 isoform a
  misc_feature (1)..(255): NCBI GI NO: 2853289 NR Description: serine palmitoyltransferase LCB1 subunit
  misc_feature (1)..(255): NCBI GI NO: 6685592 NR Description: Serine palmitoyltransferase 1
  misc_feature (1)..(255): NCBI GI NO: 26354158 NR Description: unnamed protein product [Mus musculus]
  misc_feature (1)..(255): NCBI GI NO: 29244577 NR Description: serine palmitoyltransferase subunit 1
  misc_feature (1)..(255): NCBI GI NO: 6685595 NR Description: Serine palmitoyltransferase 1
MDSLRETLENITAKYKKAKNLRRYIVIEAVYQNSGEIAPLDEIIKLKEKYRFRVLLDESNSLGVLGSSGRGLTEYCGVPVEKIDIITASMGHALATEGGFCTGSTRVIDHQRLSSSGYVFSASLPPYLASAAITAIDVLEENPNLIKKLKKNIAFLRKGLSKIPGITITSNPESPIVYLRLEKSRGSMKDDLHLLENIAERVLKEESVFVVVSKRSTLDKCRLPVGIRLFVSAGHSESDLLKASESLKKVVASVLGGQN

SEQ ID NO: 9616 - DNA, 955 bp, Glycine max
  misc_feature (1)..(955): Ceres Seq. ID no. 15173314
caattatgctgtgcacaccctgcttactgaactgaagcgatgatggtgttctgtcctgtgttgaaggaaacgtcgaaacctgaaagcgaaccatgccagaacgagaatccaccaatggttactgcagcagtggcgaagaagacggtgacgccgcttggagagcagcaatcgattccattgctcaaaccaccacctatgtcgcttccaccaccaaacacaatcacccaaatcatcatattgatgatgatgaccacaaacccaacacacaacagcttaagcactaccaactcaaggcacaaaagcttctgaatgaaatattggaaaattcaatagagatagtgagaaaacctgtccctgtcgtggatgaggatcccgagagcaatgaatgcggcattcgcttgtttaaacatgctcagccaggaatagtgtttgatcacgtagatgaactccaaccaccaaggaaacggcctagactacttcctggaggagatattgatgagaaatcaaagaagcagtttagaaaacagattagatctgttgctgttaacgggatagatataatagctgcagcaaatgatgcatacaagaagtcattagctagactagaagctaaagatgccgcagcaaaagctaaagccaagagagaagaggaaagaattgaaaatttgaaaaagattaggggagaaaggtggctaccttccatggccaaggagatgcaggttaaaattcgacactgacatgttatgtctttccatgctcttaacttcgatgctagttttatgtgtaactctataactgattagctttttttatttgttagttgagcacttgagcttgttgtacacaataattttatagaattataacttggttatgaatttttttttcttctttttttctttaacttaactattctgttacattaccgttcacaagttcacatattgaaatatct

SEQ ID NO: 9617 - protein, 214 aa, Glycine max
  peptide (1)..(214): Ceres Seq. ID no. 15173315
  misc_feature (1)..(214): NCBI GI NO: 21593080 NR Description: unknown [Arabidopsis thaliana]
  misc_feature (1)..(214): NCBI GI NO: 15229629 NR Description: expressed protein [Arabidopsis thaliana]
MPERESTNGYCSSGEEDGDAAWRAAIDSIAQTTTYVASTTKHNHPNHHIDDDDHKPNTQQLKHYQLKAQKLLNEILENSIEIVRKPVPVVDEDPESNECGIRLFKHAQPGIVFDHVDELQPPRKRPRLLPGGDIDEKSKKQFRKQIRSVAVNGIDIIAAANDAYKKSLARLEAKDAAAKAKAKREEERIENLKKIRGERWLPSMAKEMQVKIRH

SEQ ID NO: 9618 - DNA, 1146 bp, Glycine max
  misc_feature (1)..(1146): Ceres Seq. ID no. 12608505
cgaaaaatactagaaaatctatctatgattatgagagcgtagttgaaagcaacgactgaaatcgagagggagacgaaaagtttagatcgagagagatgggaaaggagagtagcaaagatacggttccggtgacgcagtggctgaatcgaatggtctcagaaccttactacctcttccatttcttaaccttcttctcctatttcgtcgttcgcagctccgcaacccaaatcttagcgcctcatctcactcaccatctccttcgtcgcgaaatacaaacactgctagtgttcgcgatattggctttcatcaagggaataaaagaagaaacatgggaagcctttatagctgatgtgcttttcctggccaagatttgtctttttctcctagcctttacaatggatcgccgcttagccgtttggtatattcttgtatttttagtgatacatatgttaacacaacaacctccattccaaggactaggtacgtctagcaagctaacaccgttgcagttggaaagcctgctgacagagggaacaactacaagattgtggctggtggaattccgttcttcatattcacctgcttgcattcgctcaagtcagcagtttcctgagctctcaattacatattcaagcaaaaatttatcatttggaatagttgatcttggtctctttcccaatgctgctgaaagatttggaatatctctaagtggaagcatgggccagcttccaacatttatcttatttgagaatgcagctgaagttgcccgctttcctgagttggattttgaagctgcatattttcaccctaaaattacaaaggggcttctttctcgacattttgagcttgatcggcaccttctcgaatatgttagtggtaaataggatgttagtggagcaagttgtccgaaatttagtcatcactgagaatggcaattttggatttccggatatctgaggaggacattttcgtaaatgaactttgaaagttaacgtttgtttaacaccatcacacaagggtcaaagtaatgtcttcagacaacgggggtgtatgtgtaattagattaaatctcaataggtgttattataatttgttctttattttataatctatcatcggttctaagtgaaagtcaaaaaatttggc

SEQ ID NO: 9619 - protein, 262 aa, Glycine max
  peptide (1)..(262): Ceres Seq. ID no. 12608506
  misc_feature (12)..(261): NCBI GI NO: 15239121 NR Description: putative protein; protein id: At5g11640.1
  misc_feature (15)..(260): NCBI GI NO: 34903644 NR Description: B1015E06.5
  misc_feature (24)..(227): NCBI GI NO: 17552500 NR Description: Putative endoplasmic reticulum protein of ancientorigin
  misc_feature (15)..(230): NCBI GI NO: 20130157 NR Description: CG11007-PA [Drosophila melanogaster]
  misc_feature (16)..(230): NCBI GI NO: 7705726 NR Description: CGI-31 protein [Homo sapiens]
  misc_feature (24)..(227): NCBI GI NO: 39591530 NR Description: Hypothetical protein CBG17959
  misc_feature (19)..(230): NCBI GI NO: 31234890 NR Description: ENSANGP00000011893 [Anopheles gambiae]
  misc_feature (57)..(230): NCBI GI NO: 26344562 NR Description: unnamed protein product [Mus musculus]
  misc_feature (57)..(230): NCBI GI NO: 27700999 NR Description: similar to CGI-31 protein
  misc_feature (57)..(230): NCBI GI NO: 21313210 NR Description: RIKEN cDNA 2310042M24 [Mus musculus]
MGKESSKDTVPVTQWLNRMVSEPYYLFHFLTFFSYFVVRSSATQILAPHLTHHLLRREIQTLLVFAILAFIKGIKEETWEAFIADVLFLAKICLFLLAFTMDRRLAVWYILVFLVIHMLTQQPPFQGLGTSSKLTPLQLESLLTEGTTTRLWLVEFRSSYSPACIRSSQQFPELSITYSSKNLSFGIVDLGLFPNAAERFGISLSGSMGQLPTFILFENAAEVARFPELDFEAAYFHPKITKGLLSRHFELDRHLLEYVSGK

SEQ ID NO: 9620 - protein, 244 aa, Glycine max
  peptide (1)..(244): Ceres Seq. ID no. 12608507
  misc_feature (1)..(243): NCBI GI NO: 15239121 NR Description: putative protein; protein id: At5g11640.1
  misc_feature (1)..(242): NCBI GI NO: 34903644 NR Description: B1015E06.5
  misc_feature (6)..(209): NCBI GI NO: 17552500 NR Description: Putative endoplasmic reticulum protein of ancientorigin
  misc_feature (1)..(212): NCBI GI NO: 20130157 NR Description: CG11007-PA [Drosophila melanogaster]
  misc_feature (1)..(212): NCBI GI NO: 7705726 NR Description: CGI-31 protein [Homo sapiens]
  misc_feature (6)..(209): NCBI GI NO: 39591530 NR Description: Hypothetical protein CBG17959
  misc_feature (1)..(212): NCBI GI NO: 31234890 NR Description: ENSANGP00000011893 [Anopheles gambiae]
  misc_feature (39)..(212): NCBI GI NO: 26344562 NR Description: unnamed protein product [Mus musculus]
  misc_feature (39)..(212): NCBI GI NO: 27700999 NR Description: similar to CGI-31 protein
  misc_feature (39)..(212): NCBI GI NO: 21313210 NR Description: RIKEN cDNA 2310042M24 [Mus musculus]
MVSEPYYLFHFLTFFSYFVVRSSATQILAPHLTHHLLRREIQTLLVFAILAFIKGIKEETWEAFIADVLFLAKICLFLLAFTMDRRLAVWYILVFLVIHMLTQQPPFQGLGTSSKLTPLQLESLLTEGTTTRLWLVEFRSSYSPACIRSSQQFPELSITYSSKNLSFGIVDLGLFPNAAERFGISLSGSMGQLPTFILFENAAEVARFPELDFEAAYFHPKITKGLLSRHFELDRHLLEYVSGK

SEQ ID NO: 9621 - protein, 162 aa, Glycine max
  peptide (1)..(162): Ceres Seq. ID no. 12608508
  misc_feature (1)..(161): NCBI GI NO: 15239121 NR Description: putative protein; protein id: At5g11640.1
  misc_feature (1)..(160): NCBI GI NO: 34903644 NR Description: B1015E06.5
  misc_feature (1)..(127): NCBI GI NO: 17552500 NR Description: Putative endoplasmic reticulum protein of ancientorigin
  misc_feature (1)..(130): NCBI GI NO: 20130157 NR Description: CG11007-PA [Drosophila melanogaster]
  misc_feature (1)..(130): NCBI GI NO: 7705726 NR Description: CGI-31 protein [Homo sapiens]
  misc_feature (1)..(127): NCBI GI NO: 39591530 NR Description: Hypothetical protein CBG17959
  misc_feature (1)..(130): NCBI GI NO: 31234890 NR Description: ENSANGP00000011893 [Anopheles gambiae]
  misc_feature (1)..(130): NCBI GI NO: 26344562 NR Description: unnamed protein product [Mus musculus]
  misc_feature (1)..(130): NCBI GI NO: 27700999 NR Description: similar to CGI-31 protein
  misc_feature (1)..(130): NCBI GI NO: 21313210 NR Description: RIKEN cDNA 2310042M24 [Mus musculus]
MDRRLAVWYILVFLVIHMLTQQPPFQGLGTSSKLTPLQLESLLTEGTTTRLWLVEFRSSYSPACIRSSQQFPELSITYSSKNLSFGIVDLGLFPNAAERFGISLSGSMGQLPTFILFENAAEVARFPELDFEAAYFHPKITKGLLSRHFELDRHLLEYVSGK

SEQ ID NO: 9622 - DNA, 1554 bp, Glycine max
  misc_feature (1)..(1554): Ceres Seq. ID no. 15171156
gtatcttccatttgaaaacagcattgtgttgttacctacccccattcattcactcaccaacaccaaacaaacaagtccctgctggtggcggacactccgagggcctctcccctcttcctctccacagtataaaacccaaaactcacacaacccgacccatcacgcaagacaaaagcgcgctcttgtgttccgtttccgtttgtttctgttttctttctctttcagatctcgaaaaatgcagagcgcggctttcactttctctccctctctccctctccgcaacccttcccctaactattggaggagaccttctctctccctccgtctctcggccaaacacggcaacagcaacagcgatgacgtgaactccaatggcgtttcttcaactttcttcactcgccgatcttggactcttcctccttcctcttccttcaagttcaggcctctccctccccgcgccgccgaaagcgccgttcccgaaagtgcgcccgtcgaaaacccgctcttcaaaactctcgaactcggcgccttgtttggcctctggtacctcttcaacatctacttcaacatctacaacaaacaggtgttgaaggcgtttcattacccggtaactgtgactgttgttcagtttgctgttgggactgtgctcgtggcatttatgtggggtttgaatctctataagaggcctaaactcagtggtgctatgcttggagcgattttgccgctggctgcagtgcatactttggggaaccttttcactaatatgagtcttggaaaggtggctgtgtctttcactcacactatcaaagccatggagcctttcttttcagtggtcctttctgccatgttccttggagagtttcctacaccgtgggtggttgattctcttgtgcctattgttggtggagttgcactggcatctgttacagaggcctctttcaattgggctggattttggagtgcaatggcatccaatgtgacaaatcaatctcgtaatgttcttagcaaaaaggccatggttaataaagaggattctatggacaacattactctcttctctatcataacagtaatgtccttcttcttgttagcacctgtggctatcttcatggagggtgtcaaatttactcctgcttacttgcaatctgctggggtgaatgttagacaactttacatcagatctcttcttgctgcactctgtttccatgcgtatcaacaagtttcttatatgatattgcaaagggtatcacctgttacccactccgtgggcaactgtgtgaagcgggttgtggtcattgtgagctctgtcatcttcttccaaacacctgtctcacctgtgaatgcttttggaactgctatagctcttgctggcgttttcctctattcaagggtgaagcgtattaaggcaaagccaaaaacagcttaattttcaattgtaaaattttgttagttgcatcacggaagccaaatagttgcaatctgcaattctgaatttctttgtaggcgagatagggaatttgaagattatctttattgatccttacattttccttt

SEQ ID NO: 9623 - protein, 474 aa, Glycine max
  peptide (1)..(474): Ceres Seq. ID no. 15171157
  misc_feature (183)..(308): Pfam Name: Pfam Description:  Integral membrane protein DUF6
  misc_feature (79)..(473): NCBI GI NO: 7489171 NR Description: phosphate/ phosphoenolpyruvate translocator TABPPT10precursor
  misc_feature (79)..(474): NCBI GI NO: 1706110 NR Description: Triose phosphate/phosphate translocator
  misc_feature (79)..(474): NCBI GI NO: 7489170 NR Description: phosphate/ phosphoenolpyruvate translocatorprecursor
  misc_feature (79)..(474): NCBI GI NO: 15242801 NR Description: triose phosphate/phosphate translocator, putative
  misc_feature (79)..(474): NCBI GI NO: 21554233 NR Description: phosphate/ phosphoenolpyruvate translocatorprecursor
  misc_feature (79)..(474): NCBI GI NO: 1778141 NR Description: phosphate/ phosphoenolpyruvate translocatorprecursor
  misc_feature (79)..(474): NCBI GI NO: 7546829 NR Description: phosphate/phosphoenolpyruvate translocator
  misc_feature (155)..(474): NCBI GI NO: 9295275 NR Description: phosphoenolpyruvate/ phosphate translocatorprecursor
  misc_feature (83)..(474): NCBI GI NO: 13991929 NR Description: phosphoenolpyruvate/phosphate translocator
  misc_feature (165)..(474): NCBI GI NO: 29647427 NR Description: putative phosphoenolpyruvate/phosphate translocator
YLPFENSIVLLPTPIHSLTNTKQTSPCWWRTLRGPLPSSSPQYKTQNSHNPTHHARQKRALVFRFRLFLFSFSFRSRKMQSAAFTFSPSLPLRNPSPNYWRRPSLSLRLSAKHGNSNSDDVNSNGVSSTFFTRRSWTLPPSSSFKFRPLPPRAAESAVPESAPVENPLFKTLELGALFGLWYLFNIYFNIYNKQVLKAFHYPVTVTVVQFAVGTVLVAFMWGLNLYKRPKLSGAMLGAILPLAAVHTLGNLFTNMSLGKVAVSFTHTIKAMEPFFSVVLSAMFLGEFPTPWVVDSLVPIVGGVALASVTEASFNWAGFWSAMASNVTNQSRNVLSKKAMVNKEDSMDNITLFSIITVMSFFLLAPVAIFMEGVKFTPAYLQSAGVNVRQLYIRSLLAALCFHAYQQVSYMILQRVSPVTHSVGNCVKRVVVIVSSVIFFQTPVSPVNAFGTAIALAGVFLYSRVKRIKAKPKTA

SEQ ID NO: 9624 - protein, 396 aa, Glycine max
  peptide (1)..(396): Ceres Seq. ID no. 15171158
  misc_feature (105)..(230): Pfam Name: Pfam Description:  Integral membrane protein DUF6
  misc_feature (1)..(395): NCBI GI NO: 7489171 NR Description: phosphate/ phosphoenolpyruvate translocator TABPPT10precursor
  misc_feature (1)..(396): NCBI GI NO: 1706110 NR Description: Triose phosphate/phosphate translocator
  misc_feature (1)..(396): NCBI GI NO: 7489170 NR Description: phosphate/ phosphoenolpyruvate translocatorprecursor
  misc_feature (1)..(396): NCBI GI NO: 15242801 NR Description: triose phosphate/phosphate translocator, putative
  misc_feature (1)..(396): NCBI GI NO: 21554233 NR Description: phosphate/ phosphoenolpyruvate translocatorprecursor
  misc_feature (1)..(396): NCBI GI NO: 1778141 NR Description: phosphate/ phosphoenolpyruvate translocatorprecursor
  misc_feature (1)..(396): NCBI GI NO: 7546829 NR Description: phosphate/phosphoenolpyruvate translocator
  misc_feature (77)..(396): NCBI GI NO: 9295275 NR Description: phosphoenolpyruvate/ phosphate translocatorprecursor
  misc_feature (5)..(396): NCBI GI NO: 13991929 NR Description: phosphoenolpyruvate/phosphate translocator
  misc_feature (87)..(396): NCBI GI NO: 29647427 NR Description: putative phosphoenolpyruvate/phosphate translocator
MQSAAFTFSPSLPLRNPSPNYWRRPSLSLRLSAKHGNSNSDDVNSNGVSSTFFTRRSWTLPPSSSFKFRPLPPRAAESAVPESAPVENPLFKTLELGALFGLWYLFNIYFNIYNKQVLKAFHYPVTVTVVQFAVGTVLVAFMWGLNLYKRPKLSGAMLGAILPLAAVHTLGNLFTNMSLGKVAVSFTHTIKAMEPFFSVVLSAMFLGEFPTPWVVDSLVPIVGGVALASVTEASFNWAGFWSAMASNVTNQSRNVLSKKAMVNKEDSMDNITLFSIITVMSFFLLAPVAIFMEGVKFTPAYLQSAGVNVRQLYIRSLLAALCFHAYQQVSYMILQRVSPVTHSVGNCVKRVVVIVSSVIFFQTPVSPVNAFGTAIALAGVFLYSRVKRIKAKPKTA

SEQ ID NO: 9625 - protein, 255 aa, Glycine max
  peptide (1)..(255): Ceres Seq. ID no. 15171159
  misc_feature (1)..(89): Pfam Name: Pfam Description:  Integral membrane protein DUF6
  misc_feature (1)..(254): NCBI GI NO: 7489171 NR Description: phosphate/ phosphoenolpyruvate translocator TABPPT10precursor
  misc_feature (1)..(255): NCBI GI NO: 1706110 NR Description: Triose phosphate/phosphate translocator
  misc_feature (1)..(255): NCBI GI NO: 7489170 NR Description: phosphate/ phosphoenolpyruvate translocatorprecursor
  misc_feature (1)..(255): NCBI GI NO: 15242801 NR Description: triose phosphate/phosphate translocator, putative
  misc_feature (1)..(255): NCBI GI NO: 21554233 NR Description: phosphate/ phosphoenolpyruvate translocatorprecursor
  misc_feature (1)..(255): NCBI GI NO: 1778141 NR Description: phosphate/ phosphoenolpyruvate translocatorprecursor
  misc_feature (1)..(255): NCBI GI NO: 7546829 NR Description: phosphate/phosphoenolpyruvate translocator
  misc_feature (1)..(255): NCBI GI NO: 9295275 NR Description: phosphoenolpyruvate/ phosphate translocatorprecursor
  misc_feature (1)..(255): NCBI GI NO: 13991929 NR Description: phosphoenolpyruvate/phosphate translocator
  misc_feature (1)..(255): NCBI GI NO: 29647427 NR Description: putative phosphoenolpyruvate/phosphate translocator
MWGLNLYKRPKLSGAMLGAILPLAAVHTLGNLFTNMSLGKVAVSFTHTIKAMEPFFSVVLSAMFLGEFPTPWVVDSLVPIVGGVALASVTEASFNWAGFWSAMASNVTNQSRNVLSKKAMVNKEDSMDNITLFSIITVMSFFLLAPVAIFMEGVKFTPAYLQSAGVNVRQLYIRSLLAALCFHAYQQVSYMILQRVSPVTHSVGNCVKRVVVIVSSVIFFQTPVSPVNAFGTAIALAGVFLYSRVKRIKAKPKTA

SEQ ID NO: 9626 - DNA, 1360 bp, Glycine max
  misc_feature (1)..(1360): Ceres Seq. ID no. 13638402
ataaaccctgcaccttccaacaatcacttctctcctccttccttctcacttctcacttctcaccaattacgttaccttgcactattattctatacaactgtaaacatccttaattgcaaaccctctctctctctccttaaataattctcataaaaaaataaaataaaaattaaaactaacaaagaaaccattttgcacaaacccaattgagagtttgagacccagatgatgatgatgaacaatactattattccatggtcaaccattggcgttgtgattgcatggtacacttccaacataggggttcttcttctgaacaagtacttgctaagcaactacggctttaggttccccgtgttcctcaccacgtgtcacatgctggtgtgctcgctcttcagctacgttattgtttccgttacggaagctgttccgctgcagcgcgtgcggtccaggagccagttttggaggatcgtggcgctcggcgtcgttttctgcttctccgtcgtttgcgggaacgtgtcgctcaggtacattccggtgtcgtttaatcaggccatcggcgccaccacgccgttcttcaccgccgttttcgcttatgctgtcagcgccaagagggaggcttgggttacgtacgccacgctcttgcccgttgttgcgggcgtcgtcatagctagtgggggtgaaccaagttttcatctgtttggatttataatctgtgtttcatcgactggtgccagagcatttaaatcagtgcttcaagatattttgttgtcctcagagggagaaaagttgaattctatgaacctgctgctttatatggctccaatagcagtgatggtcttacttcctacaatattgttgatggagggaaatgtgattcagatcactatggatcttgccagaaaggatataagaattttttggtatctgcttctcagttcttctcttgcatattttgtgaacctcactaattttttggtgaccaaacatacaagtgcacttacccttcaggttttaggaaatgcaaagggggcagttgctgtggtggtctcaattttgatattcaaaaaccccatttcaatgataggaatgcttggctatgcactcactatcattggagttatcttgtacagtgaaaccaagaagaggtatagcaaaaattagtaaaattaacaagattaccaatcaaagcagggtgtgatttaccacaagcgagagggccaacaagttatacttatgcatacaaaattatgagcttgcagcaaccacttttgttacacgtgaacaagaatatttcccccctaactatttcattcattgcaagcgttttgggagtagtcacactccccataaacccttt

SEQ ID NO: 9627 - protein, 312 aa, Glycine max
  peptide (1)..(312): Ceres Seq. ID no. 13638403
  misc_feature (27)..(150): Pfam Name: Pfam Description:  Integral membrane protein DUF6
  misc_feature (13)..(312): NCBI GI NO: 9759107 NR Description: phosphate/phosphoenolpyruvate translocator protein-like
  misc_feature (13)..(312): NCBI GI NO: 30681126 NR Description: phosphate translocator-related
  misc_feature (13)..(308): NCBI GI NO: 27476065 NR Description: Putative phosphate/phosphoenolpyruvate translocatorprotein
  misc_feature (16)..(309): NCBI GI NO: 15237644 NR Description: phosphate translocator-related
  misc_feature (16)..(309): NCBI GI NO: 17064798 NR Description: phosphate/phosphoenolpyruvate translocator-like
  misc_feature (1)..(309): NCBI GI NO: 15228248 NR Description: phosphate translocator-related
  misc_feature (13)..(308): NCBI GI NO: 15221371 NR Description: phosphate translocator-related
  misc_feature (153)..(308): NCBI GI NO: 15229717 NR Description: phosphate translocator-related
  misc_feature (13)..(301): NCBI GI NO: 15229717 NR Description: phosphate translocator-related
  misc_feature (17)..(302): NCBI GI NO: 38567832 NR Description: OSJNBb0020J19.10
MMMMNNTIIPWSTIGVVIAWYTSNIGVLLLNKYLLSNYGFRFPVFLTTCHMLVCSLFSYVIVSVTEAVPLQRVRSRSQFWRIVALGVVFCFSVVCGNVSLRYIPVSFNQAIGATTPFFTAVFAYAVSAKREAWVTYATLLPVVAGVVIASGGEPSFHLFGFIICVSSTGARAFKSVLQDILLSSEGEKLNSMNLLLYMAPIAVMVLLPTILLMEGNVIQITMDLARKDIRIFWYLLLSSSLAYFVNLTNFLVTKHTSALTLQVLGNAKGAVAVVVSILIFKNPISMIGMLGYALTIIGVILYSETKKRYSKN

SEQ ID NO: 9628 - protein, 311 aa, Glycine max
  peptide (1)..(311): Ceres Seq. ID no. 13638404
  misc_feature (26)..(149): Pfam Name: Pfam Description:  Integral membrane protein DUF6
  misc_feature (12)..(311): NCBI GI NO: 9759107 NR Description: phosphate/phosphoenolpyruvate translocator protein-like
  misc_feature (12)..(311): NCBI GI NO: 30681126 NR Description: phosphate translocator-related
  misc_feature (12)..(307): NCBI GI NO: 27476065 NR Description: Putative phosphate/phosphoenolpyruvate translocatorprotein
  misc_feature (15)..(308): NCBI GI NO: 15237644 NR Description: phosphate translocator-related
  misc_feature (15)..(308): NCBI GI NO: 17064798 NR Description: phosphate/phosphoenolpyruvate translocator-like
  misc_feature (1)..(308): NCBI GI NO: 15228248 NR Description: phosphate translocator-related
  misc_feature (12)..(307): NCBI GI NO: 15221371 NR Description: phosphate translocator-related
  misc_feature (152)..(307): NCBI GI NO: 15229717 NR Description: phosphate translocator-related
  misc_feature (12)..(300): NCBI GI NO: 15229717 NR Description: phosphate translocator-related
  misc_feature (16)..(301): NCBI GI NO: 38567832 NR Description: OSJNBb0020J19.10
MMMNNTIIPWSTIGVVIAWYTSNIGVLLLNKYLLSNYGFRFPVFLTTCHMLVCSLFSYVIVSVTEAVPLQRVRSRSQFWRIVALGVVFCFSVVCGNVSLRYIPVSFNQAIGATTPFFTAVFAYAVSAKREAWVTYATLLPVVAGVVIASGGEPSFHLFGFIICVSSTGARAFKSVLQDILLSSEGEKLNSMNLLLYMAPIAVMVLLPTILLMEGNVIQITMDLARKDIRIFWYLLLSSSLAYFVNLTNFLVTKHTSALTLQVLGNAKGAVAVVVSILIFKNPISMIGMLGYALTIIGVILYSETKKRYSKN

SEQ ID NO: 9629 - protein, 310 aa, Glycine max
  peptide (1)..(310): Ceres Seq. ID no. 13638405
  misc_feature (25)..(148): Pfam Name: Pfam Description:  Integral membrane protein DUF6
  misc_feature (11)..(310): NCBI GI NO: 9759107 NR Description: phosphate/phosphoenolpyruvate translocator protein-like
  misc_feature (11)..(310): NCBI GI NO: 30681126 NR Description: phosphate translocator-related
  misc_feature (11)..(306): NCBI GI NO: 27476065 NR Description: Putative phosphate/phosphoenolpyruvate translocatorprotein
  misc_feature (14)..(307): NCBI GI NO: 15237644 NR Description: phosphate translocator-related
  misc_feature (14)..(307): NCBI GI NO: 17064798 NR Description: phosphate/phosphoenolpyruvate translocator-like
  misc_feature (1)..(307): NCBI GI NO: 15228248 NR Description: phosphate translocator-related
  misc_feature (11)..(306): NCBI GI NO: 15221371 NR Description: phosphate translocator-related
  misc_feature (151)..(306): NCBI GI NO: 15229717 NR Description: phosphate translocator-related
  misc_feature (11)..(299): NCBI GI NO: 15229717 NR Description: phosphate translocator-related
  misc_feature (15)..(300): NCBI GI NO: 38567832 NR Description: OSJNBb0020J19.10
MMNNTIIPWSTIGVVIAWYTSNIGVLLLNKYLLSNYGFRFPVFLTTCHMLVCSLFSYVIVSVTEAVPLQRVRSRSQFWRIVALGVVFCFSVVCGNVSLRYIPVSFNQAIGATTPFFTAVFAYAVSAKREAWVTYATLLPVVAGVVIASGGEPSFHLFGFIICVSSTGARAFKSVLQDILLSSEGEKLNSMNLLLYMAPIAVMVLLPTILLMEGNVIQITMDLARKDIRIFWYLLLSSSLAYFVNLTNFLVTKHTSALTLQVLGNAKGAVAVVVSILIFKNPISMIGMLGYALTIIGVILYSETKKRYSKN

SEQ ID NO: 9630 - DNA, 1292 bp, Glycine max
  misc_feature (1)..(1292): Ceres Seq. ID no. 14316440
acatactcatcaggacagattcaagggagatggatgatgaaattgaaaggttcatcaaagtatggatttcagcaatcttatgtctatgttattgttattacatagcttcaagaataccaaagggcttcttgagacttctctccctccttccaattctctacctcttcatcacccttcccttgaaactctcttcacccaccttagttggatacacttccttcttcatttcttggcttggcactttcaagctcttccttttctccttcaaccaaggccctcttgccctatcacccccaaacattgttcaattcatctccattgcttcccttcccatcacccccaaacaaaacccatcaaccaatgaaaaaaacaccaccaacaaacccaaatggcttttgttcctaaaagttcttatttttgtaatgatcttaggtgtttataactacaaagaaaccttgcatcctgatttcttgttagtcatttattgctgccacgtgtaccttgccttagagcttatgttagtccttgttggagccactgttcaaaccctttttggttttgagatagaacctcaattcaacgaaccctacctttgtacatctcttcaagacttttggggtcgtagatggaacctcacggttactcatattctacggcccaccgtatacgaccctatacgccgtatgtctacgagttttgtcggccccttgtgtgccacgtcagctgccatgttggccacgttccttgtgtccgggcttgtgcacgagttattatattattaccttacacgtgtgcctcccacgtgggaggttacgtgtttttttgtgcttcacggtgtgtgtatggtagtggaggtggctgtgaagaaggtggctctccgtcgtgggtggcagctgcaccgtgctgtgtcggggccgctcgtggtggcgcttttggcggtcaccgcgaattggctgttttttcctcaactgttgaggaatggtttggataggaagtccattgaggagtatgctattttggtggattttgttaagtcaaagttaccatttaagaatgtttaacttgctagggcgaacattgttaaaggatatgattgtgagccaaaagtaatgttcactctaaggactaaggatacttaaacattacgtatgtttaacgtgttagggtgcaaaggggctcattttttacttataaaaaataatataactattaaataagacatgttaattttggaaaacaatgagtgtgatcacccaataataaacatctgaagatgtgcaattcaaaagtct

SEQ ID NO: 9631 - protein, 352 aa, Glycine max
  peptide (1)..(352): Ceres Seq. ID no. 14316441
  misc_feature (59)..(325): Pfam Name: Pfam Description:  MBOAT family
  misc_feature (11)..(346): NCBI GI NO: 27728714 NR Description: wax synthase isoform 1 [Vitis vinifera]
  misc_feature (11)..(346): NCBI GI NO: 27728716 NR Description: wax synthase isoform 2 [Vitis vinifera]
  misc_feature (10)..(344): NCBI GI NO: 15240500 NR Description: long-chain-alcohol O-fatty-acyltransferase
  misc_feature (10)..(348): NCBI GI NO: 27728718 NR Description: wax synthase isoform 3 [Vitis vinifera]
  misc_feature (10)..(344): NCBI GI NO: 15240499 NR Description: long-chain-alcohol O-fatty-acyltransferase
  misc_feature (10)..(346): NCBI GI NO: 15240498 NR Description: long-chain-alcohol O-fatty-acyltransferase
  misc_feature (10)..(344): NCBI GI NO: 15240496 NR Description: long-chain-alcohol O-fatty-acyltransferase
  misc_feature (10)..(346): NCBI GI NO: 15240497 NR Description: long-chain-alcohol O-fatty-acyltransferase
  misc_feature (9)..(347): NCBI GI NO: 11362836 NR Description: wax synthase [imported] - Simmondsia chinensis
  misc_feature (10)..(347): NCBI GI NO: 15240495 NR Description: long-chain-alcohol O-fatty-acyltransferase
ILIRTDSREMDDEIERFIKVWISAILCLCYCYYIASRIPKGFLRLLSLLPILYLFITLPLKLSSPTLVGYTSFFISWLGTFKLFLFSFNQGPLALSPPNIVQFISIASLPITPKQNPSTNEKNTTNKPKWLLFLKVLIFVMILGVYNYKETLHPDFLLVIYCCHVYLALELMLVLVGATVQTLFGFEIEPQFNEPYLCTSLQDFWGRRWNLTVTHILRPTVYDPIRRMSTSFVGPLCATSAAMLATFLVSGLVHELLYYYLTRVPPTWEVTCFFVLHGVCMVVEVAVKKVALRRGWQLHRAVSGPLVVALLAVTANWLFFPQLLRNGLDRKSIEEYAILVDFVKSKLPFKNV

SEQ ID NO: 9632 - protein, 343 aa, Glycine max
  peptide (1)..(343): Ceres Seq. ID no. 14316442
  misc_feature (50)..(316): Pfam Name: Pfam Description:  MBOAT family
  misc_feature (2)..(337): NCBI GI NO: 27728714 NR Description: wax synthase isoform 1 [Vitis vinifera]
  misc_feature (2)..(337): NCBI GI NO: 27728716 NR Description: wax synthase isoform 2 [Vitis vinifera]
  misc_feature (1)..(335): NCBI GI NO: 15240500 NR Description: long-chain-alcohol O-fatty-acyltransferase
  misc_feature (1)..(339): NCBI GI NO: 27728718 NR Description: wax synthase isoform 3 [Vitis vinifera]
  misc_feature (1)..(335): NCBI GI NO: 15240499 NR Description: long-chain-alcohol O-fatty-acyltransferase
  misc_feature (1)..(337): NCBI GI NO: 15240498 NR Description: long-chain-alcohol O-fatty-acyltransferase
  misc_feature (1)..(335): NCBI GI NO: 15240496 NR Description: long-chain-alcohol O-fatty-acyltransferase
  misc_feature (1)..(337): NCBI GI NO: 15240497 NR Description: long-chain-alcohol O-fatty-acyltransferase
  misc_feature (1)..(338): NCBI GI NO: 11362836 NR Description: wax synthase [imported] - Simmondsia chinensis
  misc_feature (1)..(338): NCBI GI NO: 15240495 NR Description: long-chain-alcohol O-fatty-acyltransferase
MDDEIERFIKVWISAILCLCYCYYIASRIPKGFLRLLSLLPILYLFITLPLKLSSPTLVGYTSFFISWLGTFKLFLFSFNQGPLALSPPNIVQFISIASLPITPKQNPSTNEKNTTNKPKWLLFLKVLIFVMILGVYNYKETLHPDFLLVIYCCHVYLALELMLVLVGATVQTLFGFEIEPQFNEPYLCTSLQDFWGRRWNLTVTHILRPTVYDPIRRMSTSFVGPLCATSAAMLATFLVSGLVHELLYYYLTRVPPTWEVTCFFVLHGVCMVVEVAVKKVALRRGWQLHRAVSGPLVVALLAVTANWLFFPQLLRNGLDRKSIEEYAILVDFVKSKLPFKNV

SEQ ID NO: 9633 - protein, 212 aa, Glycine max
  peptide (1)..(212): Ceres Seq. ID no. 14316443
  misc_feature (1)..(185): Pfam Name: Pfam Description:  MBOAT family
  misc_feature (1)..(206): NCBI GI NO: 27728714 NR Description: wax synthase isoform 1 [Vitis vinifera]
  misc_feature (1)..(206): NCBI GI NO: 27728716 NR Description: wax synthase isoform 2 [Vitis vinifera]
  misc_feature (1)..(204): NCBI GI NO: 15240500 NR Description: long-chain-alcohol O-fatty-acyltransferase
  misc_feature (1)..(208): NCBI GI NO: 27728718 NR Description: wax synthase isoform 3 [Vitis vinifera]
  misc_feature (1)..(204): NCBI GI NO: 15240499 NR Description: long-chain-alcohol O-fatty-acyltransferase
  misc_feature (1)..(206): NCBI GI NO: 15240498 NR Description: long-chain-alcohol O-fatty-acyltransferase
  misc_feature (1)..(204): NCBI GI NO: 15240496 NR Description: long-chain-alcohol O-fatty-acyltransferase
  misc_feature (1)..(206): NCBI GI NO: 15240497 NR Description: long-chain-alcohol O-fatty-acyltransferase
  misc_feature (1)..(207): NCBI GI NO: 11362836 NR Description: wax synthase [imported] - Simmondsia chinensis
  misc_feature (1)..(207): NCBI GI NO: 15240495 NR Description: long-chain-alcohol O-fatty-acyltransferase
MILGVYNYKETLHPDFLLVIYCCHVYLALELMLVLVGATVQTLFGFEIEPQFNEPYLCTSLQDFWGRRWNLTVTHILRPTVYDPIRRMSTSFVGPLCATSAAMLATFLVSGLVHELLYYYLTRVPPTWEVTCFFVLHGVCMVVEVAVKKVALRRGWQLHRAVSGPLVVALLAVTANWLFFPQLLRNGLDRKSIEEYAILVDFVKSKLPFKNV

SEQ ID NO: 9634 - DNA, 1619 bp, Glycine max
  misc_feature (1)..(1619): Ceres Seq. ID no. 14316522
aacaacaaaaaaaagtaaacagaaaaggggttaagcgaggaagactgtgtagaaactagaaaccctagagagagagagagatgagaagaactcttctgagaaatgctactctctacactcgcaaccttctccatcactcggcccctgcattcgacgcttcaactcgtccccaactcagactcttctgctccaatgaaacccccccaccggttccccaaatcgacgacgttgacaacaaagagctgaaagcgcagatcgagagctacttcaagggcgacgagcaggtgcttccgtcgatcatggagacgattctgaagcggaagctgtcgggaaagcacgaggacaccgacgacgagctcatggaggagctccgcatgcgccccctggacgacgttgacgaccgggacttcgagtctgacttcgagaacattcacgataccgacgaggagatcgacgatttgtacaacgccagggacgtggtgatgaagaggatggtgaaggacgagtacttcaacatggatgataaaaagtgggatgacattgttgaggacgggatcaagcacgggcttcttagggacaccaaggagtgcgaggagattctcgaggatatgctcagctgggacaaactcctacctgatgagataaaacagaaggtggaagtaaaatttaatgagctaggggacatgtgtgaaagaggtgaacttgaacctgaagaagcttatgaacagtttaagaagtttgaggatgagattgtggcagaatacctggacaaaatggaaaaggaggaggctccacagtttgatgatactactgtgccggataagaaaaaggacttggatgatccaccgggtgaaggtccaattctgcgctggcaaacccgggtagtctttgctcctggtggtgatgcttggcatccaaagaacaggaaagtaaaactgtctgttactgtgaaggagctagggctttcaaaataccaatttcgccgtctcagggaattggttggaaaacgttatcatccagggagagatgagcttacaataactagtgagaggtttgaacatcgagaagaaaacagaaaggactgcttaaggacccttctccatctcattgaggaggcagggaaagctaataaactagtagatgatgctcgatcctcatacgtaaaagagaggcttcgtgccaatccagctttcatggagaggctgcatgccaagtcaatgaggttgcgagaatctaatcaggttcctgcttgaggttttcagatctgatgtatgaattattgaaattcacctgccataattttttattgctccctggttttttgtatgagtcttatcttgggttccagctgcagaaaacaacctccctgcttagagggtaaggcctcatacatctgatccttcctagaccccacaactgcaggggagactcatgcaccggggtacctcttagtcatatctttcgtatttagtgcttgaataatggataattttttttacctcttgttagatattgtatgctagttgactcaaatgttacatttttgtggagtaacattgatcatagaaaaggccggatgatccccaactgaagcaatggatttcaacattttatattat

SEQ ID NO: 9635 - protein, 390 aa, Glycine max
  peptide (1)..(390): Ceres Seq. ID no. 14316523
  misc_feature (47)..(390): NCBI GI NO: 18401816 NR Description: expressed protein [Arabidopsis thaliana]
  misc_feature (47)..(390): NCBI GI NO: 7485722 NR Description: hypothetical protein F18E5
  misc_feature (47)..(390): NCBI GI NO: 18415698 NR Description: expressed protein [Arabidopsis thaliana]
  misc_feature (1)..(127): NCBI GI NO: 15219546 NR Description: hypothetical protein [Arabidopsis thaliana]
MRRTLLRNATLYTRNLLHHSAPAFDASTRPQLRLFCSNETPPPVPQIDDVDNKELKAQIESYFKGDEQVLPSIMETILKRKLSGKHEDTDDELMEELRMRPLDDVDDRDFESDFENIHDTDEEIDDLYNARDVVMKRMVKDEYFNMDDKKWDDIVEDGIKHGLLRDTKECEEILEDMLSWDKLLPDEIKQKVEVKFNELGDMCERGELEPEEAYEQFKKFEDEIVAEYLDKMEKEEAPQFDDTTVPDKKKDLDDPPGEGPILRWQTRVVFAPGGDAWHPKNRKVKLSVTVKELGLSKYQFRRLRELVGKRYHPGRDELTITSERFEHREENRKDCLRTLLHLIEEAGKANKLVDDARSSYVKERLRANPAFMERLHAKSMRLRESNQVPA

SEQ ID NO: 9636 - protein, 317 aa, Glycine max
  peptide (1)..(317): Ceres Seq. ID no. 14316524
  misc_feature (1)..(317): NCBI GI NO: 18401816 NR Description: expressed protein [Arabidopsis thaliana]
  misc_feature (1)..(317): NCBI GI NO: 7485722 NR Description: hypothetical protein F18E5
  misc_feature (1)..(317): NCBI GI NO: 18415698 NR Description: expressed protein [Arabidopsis thaliana]
  misc_feature (1)..(54): NCBI GI NO: 15219546 NR Description: hypothetical protein [Arabidopsis thaliana]
METILKRKLSGKHEDTDDELMEELRMRPLDDVDDRDFESDFENIHDTDEEIDDLYNARDVVMKRMVKDEYFNMDDKKWDDIVEDGIKHGLLRDTKECEEILEDMLSWDKLLPDEIKQKVEVKFNELGDMCERGELEPEEAYEQFKKFEDEIVAEYLDKMEKEEAPQFDDTTVPDKKKDLDDPPGEGPILRWQTRVVFAPGGDAWHPKNRKVKLSVTVKELGLSKYQFRRLRELVGKRYHPGRDELTITSERFEHREENRKDCLRTLLHLIEEAGKANKLVDDARSSYVKERLRANPAFMERLHAKSMRLRESNQVPA

SEQ ID NO: 9637 - protein, 297 aa, Glycine max
  peptide (1)..(297): Ceres Seq. ID no. 14316525
  misc_feature (1)..(297): NCBI GI NO: 18401816 NR Description: expressed protein [Arabidopsis thaliana]
  misc_feature (1)..(297): NCBI GI NO: 7485722 NR Description: hypothetical protein F18E5
  misc_feature (1)..(297): NCBI GI NO: 18415698 NR Description: expressed protein [Arabidopsis thaliana]
  misc_feature (1)..(34): NCBI GI NO: 15219546 NR Description: hypothetical protein [Arabidopsis thaliana]
MEELRMRPLDDVDDRDFESDFENIHDTDEEIDDLYNARDVVMKRMVKDEYFNMDDKKWDDIVEDGIKHGLLRDTKECEEILEDMLSWDKLLPDEIKQKVEVKFNELGDMCERGELEPEEAYEQFKKFEDEIVAEYLDKMEKEEAPQFDDTTVPDKKKDLDDPPGEGPILRWQTRVVFAPGGDAWHPKNRKVKLSVTVKELGLSKYQFRRLRELVGKRYHPGRDELTITSERFEHREENRKDCLRTLLHLIEEAGKANKLVDDARSSYVKERLRANPAFMERLHAKSMRLRESNQVPA

SEQ ID NO: 9638 - DNA, 1237 bp, Glycine max
  misc_feature (1)..(1237): Ceres Seq. ID no. 14311207
gaaattctccaaggaatctctctctctctctctctttctttccctttttcactttctcattcattcttattagtatttctatttcacttcaccaacccactccaccgtttcccctttccttccatgctattatggcttcatcttccatcaaacacactcaccaccttaaccgcacaaaactcttcatgaaagaagaaacccttttgaaaaagaagcatcactatcccaaaatcatacgaatacgtgtcaccgacgccgacgctaccgactcctccagcgacgacgacgagccctccatgtcctccacgcgccgcagagtaaaaaacttcgtcaacgaaattaccatccaaggcggcggcggtggtggtggcgacgttaacgttgtttctaagaaaagaagattcaagtccggtgccggagctccgttatgtcggcggaagacgggggcgaagaagttccggggagtgaggcagcggccatgggggaagtgggcggcggagataagagacccgtcgcgccgcgtccggctgtggctgggaacctacgacaccgccgaggaagctgccattgtgtacgacaacgcggccattcagctgcgtggcgccgacgcgctcaccaatttcataacgccgccgccggagaacagaaaaaccggttactgctccggcgaggagtctcgcaacaacgacgacttgcgttcccccacttcggttcttgggcgctgttcggtgtccgaggaagctgtaactgcaaacgacgtatttggaggctctagtgagtgcgagtattcatgcgtttcggagtcagtgtttcctattcctaacgaggtggtgtttgactttgaaagcacgttagatatgtttgatgaagggattaataatgttgtggcagagactagtatattcttggcggaggatttagatttgggttttacgagttggcatagagagtgtgataatttccaagacattgggggggatttgtttgtttgggatcctcttgtcgctctttgattgagacacagacaccattctctcgtctttgtaattctattgccaacgaaaatgggttgctatcagttttgtttcttttgggggtttaggcaaaaaccttgtgtctaaggagaggttttctaattttttattctagcagtatatgtttattaaccactagttgtaaaaccgtgcttcccacggtgttgccgtctttttgtttcttatataaaattatgtctcat

SEQ ID NO: 9639 - protein, 336 aa, Glycine max
  peptide (1)..(336): Ceres Seq. ID no. 14311208
  misc_feature (150)..(210): Pfam Name: Pfam Description:  AP2 domain
  misc_feature (44)..(335): NCBI GI NO: 22655200 NR Description: putative Ap2 domain protein [Arabidopsis thaliana]
  misc_feature (44)..(335): NCBI GI NO: 15236595 NR Description: AP2 domain transcription factor, putative
  misc_feature (69)..(336): NCBI GI NO: 15237053 NR Description: AP2 domain transcription factor, putative
  misc_feature (49)..(248): NCBI GI NO: 15234337 NR Description: putative protein; protein id: At4g27950.1
  misc_feature (49)..(216): NCBI GI NO: 15238705 NR Description: putative protein; protein id: At5g53290.1
  misc_feature (75)..(246): NCBI GI NO: 15233169 NR Description: AP2 domain transcription factor, putative
  misc_feature (49)..(238): NCBI GI NO: 7531181 NR Description: PATHOGENESIS-RELATED GENES TRANSCRIPTIONALACTIVATOR PTI6
  misc_feature (48)..(273): NCBI GI NO: 7489208 NR Description: Tsi1 protein - common tobacco
  misc_feature (74)..(212): NCBI GI NO: 15225959 NR Description: AP2 domain transcription factor, putative
  misc_feature (76)..(207): NCBI GI NO: 28876021 NR Description: putative AP2 domain containing protein
NSPRNLSLSLSFFPFFTFSFILISISISLHQPTPPFPLSFHAIMASSSIKHTHHLNRTKLFMKEETLLKKKHHYPKIIRIRVTDADATDSSSDDDEPSMSSTRRRVKNFVNEITIQGGGGGGGDVNVVSKKRRFKSGAGAPLCRRKTGAKKFRGVRQRPWGKWAAEIRDPSRRVRLWLGTYDTAEEAAIVYDNAAIQLRGADALTNFITPPPENRKTGYCSGEESRNNDDLRSPTSVLGRCSVSEEAVTANDVFGGSSECEYSCVSESVFPIPNEVVFDFESTLDMFDEGINNVVAETSIFLAEDLDLGFTSWHRECDNFQDIGGDLFVWDPLVAL

SEQ ID NO: 9640 - protein, 293 aa, Glycine max
  peptide (1)..(293): Ceres Seq. ID no. 14311209
  misc_feature (107)..(167): Pfam Name: Pfam Description:  AP2 domain
  misc_feature (1)..(292): NCBI GI NO: 22655200 NR Description: putative Ap2 domain protein [Arabidopsis thaliana]
  misc_feature (1)..(292): NCBI GI NO: 15236595 NR Description: AP2 domain transcription factor, putative
  misc_feature (26)..(293): NCBI GI NO: 15237053 NR Description: AP2 domain transcription factor, putative
  misc_feature (6)..(205): NCBI GI NO: 15234337 NR Description: putative protein; protein id: At4g27950.1
  misc_feature (6)..(173): NCBI GI NO: 15238705 NR Description: putative protein; protein id: At5g53290.1
  misc_feature (32)..(203): NCBI GI NO: 15233169 NR Description: AP2 domain transcription factor, putative
  misc_feature (6)..(195): NCBI GI NO: 7531181 NR Description: PATHOGENESIS-RELATED GENES TRANSCRIPTIONALACTIVATOR PTI6
  misc_feature (5)..(230): NCBI GI NO: 7489208 NR Description: Tsi1 protein - common tobacco
  misc_feature (31)..(169): NCBI GI NO: 15225959 NR Description: AP2 domain transcription factor, putative
  misc_feature (33)..(164): NCBI GI NO: 28876021 NR Description: putative AP2 domain containing protein
MASSSIKHTHHLNRTKLFMKEETLLKKKHHYPKIIRIRVTDADATDSSSDDDEPSMSSTRRRVKNFVNEITIQGGGGGGGDVNVVSKKRRFKSGAGAPLCRRKTGAKKFRGVRQRPWGKWAAEIRDPSRRVRLWLGTYDTAEEAAIVYDNAAIQLRGADALTNFITPPPENRKTGYCSGEESRNNDDLRSPTSVLGRCSVSEEAVTANDVFGGSSECEYSCVSESVFPIPNEVVFDFESTLDMFDEGINNVVAETSIFLAEDLDLGFTSWHRECDNFQDIGGDLFVWDPLVAL

SEQ ID NO: 9641 - protein, 275 aa, Glycine max
  peptide (1)..(275): Ceres Seq. ID no. 14311210
  misc_feature (89)..(149): Pfam Name: Pfam Description:  AP2 domain
  misc_feature (1)..(274): NCBI GI NO: 22655200 NR Description: putative Ap2 domain protein [Arabidopsis thaliana]
  misc_feature (1)..(274): NCBI GI NO: 15236595 NR Description: AP2 domain transcription factor, putative
  misc_feature (8)..(275): NCBI GI NO: 15237053 NR Description: AP2 domain transcription factor, putative
  misc_feature (1)..(187): NCBI GI NO: 15234337 NR Description: putative protein; protein id: At4g27950.1
  misc_feature (1)..(155): NCBI GI NO: 15238705 NR Description: putative protein; protein id: At5g53290.1
  misc_feature (14)..(185): NCBI GI NO: 15233169 NR Description: AP2 domain transcription factor, putative
  misc_feature (1)..(177): NCBI GI NO: 7531181 NR Description: PATHOGENESIS-RELATED GENES TRANSCRIPTIONALACTIVATOR PTI6
  misc_feature (1)..(212): NCBI GI NO: 7489208 NR Description: Tsi1 protein - common tobacco
  misc_feature (13)..(151): NCBI GI NO: 15225959 NR Description: AP2 domain transcription factor, putative
  misc_feature (15)..(146): NCBI GI NO: 28876021 NR Description: putative AP2 domain containing protein
MKEETLLKKKHHYPKIIRIRVTDADATDSSSDDDEPSMSSTRRRVKNFVNEITIQGGGGGGGDVNVVSKKRRFKSGAGAPLCRRKTGAKKFRGVRQRPWGKWAAEIRDPSRRVRLWLGTYDTAEEAAIVYDNAAIQLRGADALTNFITPPPENRKTGYCSGEESRNNDDLRSPTSVLGRCSVSEEAVTANDVFGGSSECEYSCVSESVFPIPNEVVFDFESTLDMFDEGINNVVAETSIFLAEDLDLGFTSWHRECDNFQDIGGDLFVWDPLVAL

SEQ ID NO: 9642 - DNA, 1131 bp, Glycine max
  misc_feature (1)..(1131): Ceres Seq. ID no. 15226789
gaagggatccgtttcacggttattctgatcctttttcactctccaaaaccctaaatccctctcaattgccatgaaccctccacccaccaccagcttccccctgaagggcgaatgcggcaactgcagctcgaaggagcggcgcctcctccaccggctctggatgcgcggcatgaaccgccacctgtgcacatcctgcgtcctccgcctccatccctcctccttctgcccctcctgcttcgacttcttcgaccagcctctctccgtcacctcctccgccttcgcccaccgcttcgtctcatgcaccaaatgctcctccctcactcacctctcctgcctcccttcccctcctccttcccccttcctctgtcccccttgctcccaacaaaccttctccttcttcccagattctaccgctccattagataaacgccgcgccatcatcctcctctgcgcctgcaagatcgcggcggcatccgtctccaaatccctcgccctcgccaggaccagagtcgaacgcaccgtccgcgaggccgccctggcgagaaagagggccagggatgctcttgaccattgctccatcgtcgacaagatcaagcgcctcggacttgaaggcaccttcgaggcttcaaacagcaagtacttgggaatgaatcataatcataacaatgttgtgagtaataaaaaagaagagctcaatggcttcgggggaggtcagggtaaggttaaaactgaggcgatgtccttgactccccctgtcaacaaaaatgggaacaaccacgccaaattgccgaatcgagtagcgtagttcatgttgcctctactaacattttgctctggaaaaaccattcggatttatcaaggtagaggaagagagtgagtgtgttctagagttttgcagtggaattctgagtaagaacacattttatttgttttgggatttttttttcctcaaagcatacggctgattcgtttcattatccactccattattcccttgtaaagcctccgtagtattgtgattatgcgactctatttcattttaagtgccccgcctgtaattacgtcatgcacattttttgttgttccctttgtcagtatcatcatatgttagtccaaaaaaaaaaaaaaaaa

SEQ ID NO: 9643 - protein, 244 aa, Glycine max
  peptide (1)..(244): Ceres Seq. ID no. 15226790
  misc_feature (15)..(172): NCBI GI NO: 18391032 NR Description: expressed protein [Arabidopsis thaliana]
  misc_feature (3)..(207): NCBI GI NO: 34904592 NR Description: B1008C01.29
  misc_feature (14)..(165): NCBI GI NO: 15229050 NR Description: hypothetical protein [Arabidopsis thaliana]
MNPPPTTSFPLKGECGNCSSKERRLLHRLWMRGMNRHLCTSCVLRLHPSSFCPSCFDFFDQPLSVTSSAFAHRFVSCTKCSSLTHLSCLPSPPPSPFLCPPCSQQTFSFFPDSTAPLDKRRAIILLCACKIAAASVSKSLALARTRVERTVREAALARKRARDALDHCSIVDKIKRLGLEGTFEASNSKYLGMNHNHNNVVSNKKEELNGFGGGQGKVKTEAMSLTPPVNKNGNNHAKLPNRVA

SEQ ID NO: 9644 - protein, 214 aa, Glycine max
  peptide (1)..(214): Ceres Seq. ID no. 15226791
  misc_feature (1)..(142): NCBI GI NO: 18391032 NR Description: expressed protein [Arabidopsis thaliana]
  misc_feature (1)..(177): NCBI GI NO: 34904592 NR Description: B1008C01.29
  misc_feature (1)..(135): NCBI GI NO: 15229050 NR Description: hypothetical protein [Arabidopsis thaliana]
MRGMNRHLCTSCVLRLHPSSFCPSCFDFFDQPLSVTSSAFAHRFVSCTKCSSLTHLSCLPSPPPSPFLCPPCSQQTFSFFPDSTAPLDKRRAIILLCACKIAAASVSKSLALARTRVERTVREAALARKRARDALDHCSIVDKIKRLGLEGTFEASNSKYLGMNHNHNNVVSNKKEELNGFGGGQGKVKTEAMSLTPPVNKNGNNHAKLPNRVA

SEQ ID NO: 9645 - protein, 211 aa, Glycine max
  peptide (1)..(211): Ceres Seq. ID no. 15226792
  misc_feature (1)..(139): NCBI GI NO: 18391032 NR Description: expressed protein [Arabidopsis thaliana]
  misc_feature (1)..(174): NCBI GI NO: 34904592 NR Description: B1008C01.29
  misc_feature (1)..(132): NCBI GI NO: 15229050 NR Description: hypothetical protein [Arabidopsis thaliana]
MNRHLCTSCVLRLHPSSFCPSCFDFFDQPLSVTSSAFAHRFVSCTKCSSLTHLSCLPSPPPSPFLCPPCSQQTFSFFPDSTAPLDKRRAIILLCACKIAAASVSKSLALARTRVERTVREAALARKRARDALDHCSIVDKIKRLGLEGTFEASNSKYLGMNHNHNNVVSNKKEELNGFGGGQGKVKTEAMSLTPPVNKNGNNHAKLPNRVA

SEQ ID NO: 9646 - DNA, 851 bp, Glycine max
  misc_feature (1)..(851): Ceres Seq. ID no. 15225453
acactttttgtgacactaagtcattccattgtgacttttctacctcaaagatccaaagaaacacattgagcacttaaattaatattctctcatttgatcaccaacattggtgggggaatatcatggcaccaagaagaattgagatgctgctgagcatgtcccttgtaatggttctttggggtgtcacattggctcaatctgatcaatcaagtagttgcaccaatgtgttcataagtcttgctccatgccttgactatgttacaggaaatgcctctatcccttcttcttcttgttgctctcaacttgcctttgtggtacggtcacagccactgtgcctatgtgaggttgttaatggtggtgcttcatctattgctgcaagtttcaacatcaatcagactagggctttggcactccctactgcttgcaatgttcagacacctcctattacctcctgcagtgcctcggcttcttcctcacaaggtgtttctgtttcctactttccaaattccccttcaggaattggatctagcactgtttcatcaacgatcggaggcagtagaagtgtcggtgcctcatatcatggaaattcaagttcaacaaaattgccatgttctttgcttgtcatcatgtttttccttgcaacgactttgactttcaccttcaagaccatgacctagacaacgtcgttgcacatttttttaaactttgttattatcttctactgcttcgagcatactcacttactggtatcatttgtcctttatccttattaaaaaacttaggattaaaatttcccctgtatatttcatgtacatttttatttctctgtttcttctattgatggctaagac

SEQ ID NO: 9647 - protein, 184 aa, Glycine max
  peptide (1)..(184): Ceres Seq. ID no. 15225454
  misc_feature (32)..(111): Pfam Name: Pfam Description:  Protease inhibitor/seed storage/LTP family
  misc_feature (5)..(180): NCBI GI NO: 18403453 NR Description: protease inhibitor/seed storage/lipid transfer
  misc_feature (1)..(180): NCBI GI NO: 21592774 NR Description: unknown [Arabidopsis thaliana]
  misc_feature (6)..(180): NCBI GI NO: 24417478 NR Description: unknown [Arabidopsis thaliana]
  misc_feature (9)..(180): NCBI GI NO: 21554014 NR Description: unknown [Arabidopsis thaliana]
  misc_feature (1)..(180): NCBI GI NO: 18407534 NR Description: protease inhibitor/seed storage/lipid transfer
  misc_feature (15)..(161): NCBI GI NO: 25553595 NR Description: protease inhibitor-like protein
  misc_feature (14)..(145): NCBI GI NO: 25553602 NR Description: protease inhibitor-like protein
  misc_feature (1)..(138): NCBI GI NO: 21592722 NR Description: unknown [Arabidopsis thaliana]
  misc_feature (1)..(138): NCBI GI NO: 18414320 NR Description: protease inhibitor/seed storage/lipid transfer
  misc_feature (1)..(168): NCBI GI NO: 28269454 NR Description: putative protease inhibitor
MAPRRIEMLLSMSLVMVLWGVTLAQSDQSSSCTNVFISLAPCLDYVTGNASIPSSSCCSQLAFVVRSQPLCLCEVVNGGASSIAASFNINQTRALALPTACNVQTPPITSCSASASSSQGVSVSYFPNSPSGIGSSTVSSTIGGSRSVGASYHGNSSSTKLPCSLLVIMFFLATTLTFTFKTMT

SEQ ID NO: 9648 - protein, 177 aa, Glycine max
  peptide (1)..(177): Ceres Seq. ID no. 15225455
  misc_feature (25)..(104): Pfam Name: Pfam Description:  Protease inhibitor/seed storage/LTP family
  misc_feature (1)..(173): NCBI GI NO: 18403453 NR Description: protease inhibitor/seed storage/lipid transfer
  misc_feature (1)..(173): NCBI GI NO: 21592774 NR Description: unknown [Arabidopsis thaliana]
  misc_feature (1)..(173): NCBI GI NO: 24417478 NR Description: unknown [Arabidopsis thaliana]
  misc_feature (2)..(173): NCBI GI NO: 21554014 NR Description: unknown [Arabidopsis thaliana]
  misc_feature (1)..(173): NCBI GI NO: 18407534 NR Description: protease inhibitor/seed storage/lipid transfer
  misc_feature (8)..(154): NCBI GI NO: 25553595 NR Description: protease inhibitor-like protein
  misc_feature (7)..(138): NCBI GI NO: 25553602 NR Description: protease inhibitor-like protein
  misc_feature (1)..(131): NCBI GI NO: 21592722 NR Description: unknown [Arabidopsis thaliana]
  misc_feature (1)..(131): NCBI GI NO: 18414320 NR Description: protease inhibitor/seed storage/lipid transfer
  misc_feature (1)..(161): NCBI GI NO: 28269454 NR Description: putative protease inhibitor
MLLSMSLVMVLWGVTLAQSDQSSSCTNVFISLAPCLDYVTGNASIPSSSCCSQLAFVVRSQPLCLCEVVNGGASSIAASFNINQTRALALPTACNVQTPPITSCSASASSSQGVSVSYFPNSPSGIGSSTVSSTIGGSRSVGASYHGNSSSTKLPCSLLVIMFFLATTLTFTFKTMT

SEQ ID NO: 9649 - protein, 173 aa, Glycine max
  peptide (1)..(173): Ceres Seq. ID no. 15225456
  misc_feature (21)..(100): Pfam Name: Pfam Description:  Protease inhibitor/seed storage/LTP family
  misc_feature (1)..(169): NCBI GI NO: 18403453 NR Description: protease inhibitor/seed storage/lipid transfer
  misc_feature (1)..(169): NCBI GI NO: 21592774 NR Description: unknown [Arabidopsis thaliana]
  misc_feature (1)..(169): NCBI GI NO: 24417478 NR Description: unknown [Arabidopsis thaliana]
  misc_feature (1)..(169): NCBI GI NO: 21554014 NR Description: unknown [Arabidopsis thaliana]
  misc_feature (1)..(169): NCBI GI NO: 18407534 NR Description: protease inhibitor/seed storage/lipid transfer
  misc_feature (4)..(150): NCBI GI NO: 25553595 NR Description: protease inhibitor-like protein
  misc_feature (3)..(134): NCBI GI NO: 25553602 NR Description: protease inhibitor-like protein
  misc_feature (1)..(127): NCBI GI NO: 21592722 NR Description: unknown [Arabidopsis thaliana]
  misc_feature (1)..(127): NCBI GI NO: 18414320 NR Description: protease inhibitor/seed storage/lipid transfer
  misc_feature (1)..(157): NCBI GI NO: 28269454 NR Description: putative protease inhibitor
MSLVMVLWGVTLAQSDQSSSCTNVFISLAPCLDYVTGNASIPSSSCCSQLAFVVRSQPLCLCEVVNGGASSIAASFNINQTRALALPTACNVQTPPITSCSASASSSQGVSVSYFPNSPSGIGSSTVSSTIGGSRSVGASYHGNSSSTKLPCSLLVIMFFLATTLTFTFKTMT

SEQ ID NO: 9650 - DNA, 1510 bp, Glycine max
  misc_feature (1)..(1510): Ceres Seq. ID no. 15177947
aagagaaacaacaagaaagagatgagaacaaacaagaatcaagagagagaggtgttactacgttagtctatgaacagtcaccccgagagactgaaatttccagaccctcaaatcaaactcttctattctctcatcaatcaatcaatccagttccctctcggttccttcctacagttgaataatgaaatttctggaaaagtgctcgagtgaagaggcattcagcagcatctcaatttataatcgtttcagataggaatgggaatatatctcagcactccaaaaactgaaaagttttctgaagatggtgaaaatgactgtcttagatatggtttatcatccatgcaagggtggcgtgcaacaatggaagatgctcatgctgcatatactgatctggatgagtccacttcattttttggtgtctatgatggccatggaggtaaggtggttgcaaagttttgtgccaagtttcttcatcaacagttgttcaaaagtgagacatacttaactggagatataggagcctcccttcagaaagcctttttgagaatggatgaaatgatgcgtggtcaaaggggatggagggaattatcaatattgggggataagataaacaagtttactgggatgatagaagggttgatttggtctccacgaagcagtgatgggaattgccatgttgatgattgggcttttgaggaggggcctcattctgattttgctggaccaacttcaggaagcactgcctgtgttgcagttattagaaacaaccaacttgttgttgcaaatgctggtgattcgcgttgtgtgatatccaggaagggccaggcatacaatttgtctagagaccacaaacctgatcttgagattgagaaggaaagaatcttaaaagctggtggtttcattcacgtaggacgagtcaatggaagtttaaatcttgcaagagctattggtgacatggaatttaaacagaataagtttctttctgctgaaaaacaaattgtaactgccaatccagacatcaacactgttgagctttgtgacgaagatgagtttgtggtgttagcttgtgatggcatatgggattgcatgtcaagtcaacaactggttgattttgttcatgaacaattgcactcggaaacaaaactttctgccgtgtgtgaaagagtacttgatcggtgtttggcaccatcaactgccagtggtgaaggatgtgacaacatgaccatgattgtggtgcagttcaaaagacctgctcagtccagtgtaccagcagaagagtcctcttcaaactgacaagctgaacctgaaacaaaactagagagaagtgagagttagcattattcctcagtgacagttcaaatattgtatcatatatatatatataatatatatgtgtgtgtttagtgtgcaacagtgattagaatgcgtccgcatggtcatcttcctttcatcccacattatacacaactgctattccaattaccgtaaagaatagtaccagtttttctcc

SEQ ID NO: 9651 - protein, 345 aa, Glycine max
  peptide (1)..(345): Ceres Seq. ID no. 15177948
  misc_feature (22)..(322): Pfam Name: Pfam Description:  Protein phosphatase 2C
  misc_feature (1)..(345): NCBI GI NO: 15236548 NR Description: protein phosphatase 2C (PP2C), putative
  misc_feature (1)..(342): NCBI GI NO: 15224677 NR Description: protein phosphatase 2C (PP2C), putative
  misc_feature (1)..(332): NCBI GI NO: 12003990 NR Description: protein phosphatase type-2C [Zea mays]
  misc_feature (156)..(338): NCBI GI NO: 27697184 NR Description: Similar to protein phosphatase 1G
  misc_feature (1)..(120): NCBI GI NO: 27697184 NR Description: Similar to protein phosphatase 1G
  misc_feature (156)..(342): NCBI GI NO: 19921654 NR Description: CG10417-PA [Drosophila melanogaster]
  misc_feature (1)..(102): NCBI GI NO: 19921654 NR Description: CG10417-PA [Drosophila melanogaster]
  misc_feature (142)..(345): NCBI GI NO: 31216428 NR Description: ENSANGP00000017684 [Anopheles gambiae]
  misc_feature (1)..(119): NCBI GI NO: 31216428 NR Description: ENSANGP00000017684 [Anopheles gambiae]
  misc_feature (156)..(342): NCBI GI NO: 27807391 NR Description: protein phosphatase 1G
MGIYLSTPKTEKFSEDGENDCLRYGLSSMQGWRATMEDAHAAYTDLDESTSFFGVYDGHGGKVVAKFCAKFLHQQLFKSETYLTGDIGASLQKAFLRMDEMMRGQRGWRELSILGDKINKFTGMIEGLIWSPRSSDGNCHVDDWAFEEGPHSDFAGPTSGSTACVAVIRNNQLVVANAGDSRCVISRKGQAYNLSRDHKPDLEIEKERILKAGGFIHVGRVNGSLNLARAIGDMEFKQNKFLSAEKQIVTANPDINTVELCDEDEFVVLACDGIWDCMSSQQLVDFVHEQLHSETKLSAVCERVLDRCLAPSTASGEGCDNMTMIVVQFKRPAQSSVPAEESSSN

SEQ ID NO: 9652 - protein, 317 aa, Glycine max
  peptide (1)..(317): Ceres Seq. ID no. 15177949
  misc_feature (1)..(294): Pfam Name: Pfam Description:  Protein phosphatase 2C
  misc_feature (1)..(317): NCBI GI NO: 15236548 NR Description: protein phosphatase 2C (PP2C), putative
  misc_feature (1)..(314): NCBI GI NO: 15224677 NR Description: protein phosphatase 2C (PP2C), putative
  misc_feature (1)..(304): NCBI GI NO: 12003990 NR Description: protein phosphatase type-2C [Zea mays]
  misc_feature (128)..(310): NCBI GI NO: 27697184 NR Description: Similar to protein phosphatase 1G
  misc_feature (1)..(92): NCBI GI NO: 27697184 NR Description: Similar to protein phosphatase 1G
  misc_feature (128)..(314): NCBI GI NO: 19921654 NR Description: CG10417-PA [Drosophila melanogaster]
  misc_feature (1)..(74): NCBI GI NO: 19921654 NR Description: CG10417-PA [Drosophila melanogaster]
  misc_feature (114)..(317): NCBI GI NO: 31216428 NR Description: ENSANGP00000017684 [Anopheles gambiae]
  misc_feature (1)..(91): NCBI GI NO: 31216428 NR Description: ENSANGP00000017684 [Anopheles gambiae]
  misc_feature (128)..(314): NCBI GI NO: 27807391 NR Description: protein phosphatase 1G
MQGWRATMEDAHAAYTDLDESTSFFGVYDGHGGKVVAKFCAKFLHQQLFKSETYLTGDIGASLQKAFLRMDEMMRGQRGWRELSILGDKINKFTGMIEGLIWSPRSSDGNCHVDDWAFEEGPHSDFAGPTSGSTACVAVIRNNQLVVANAGDSRCVISRKGQAYNLSRDHKPDLEIEKERILKAGGFIHVGRVNGSLNLARAIGDMEFKQNKFLSAEKQIVTANPDINTVELCDEDEFVVLACDGIWDCMSSQQLVDFVHEQLHSETKLSAVCERVLDRCLAPSTASGEGCDNMTMIVVQFKRPAQSSVPAEESSSN

SEQ ID NO: 9653 - protein, 310 aa, Glycine max
  peptide (1)..(310): Ceres Seq. ID no. 15177950
  misc_feature (1)..(287): Pfam Name: Pfam Description:  Protein phosphatase 2C
  misc_feature (1)..(310): NCBI GI NO: 15236548 NR Description: protein phosphatase 2C (PP2C), putative
  misc_feature (1)..(307): NCBI GI NO: 15224677 NR Description: protein phosphatase 2C (PP2C), putative
  misc_feature (1)..(297): NCBI GI NO: 12003990 NR Description: protein phosphatase type-2C [Zea mays]
  misc_feature (121)..(303): NCBI GI NO: 27697184 NR Description: Similar to protein phosphatase 1G
  misc_feature (1)..(85): NCBI GI NO: 27697184 NR Description: Similar to protein phosphatase 1G
  misc_feature (121)..(307): NCBI GI NO: 19921654 NR Description: CG10417-PA [Drosophila melanogaster]
  misc_feature (1)..(67): NCBI GI NO: 19921654 NR Description: CG10417-PA [Drosophila melanogaster]
  misc_feature (107)..(310): NCBI GI NO: 31216428 NR Description: ENSANGP00000017684 [Anopheles gambiae]
  misc_feature (1)..(84): NCBI GI NO: 31216428 NR Description: ENSANGP00000017684 [Anopheles gambiae]
  misc_feature (121)..(307): NCBI GI NO: 27807391 NR Description: protein phosphatase 1G
MEDAHAAYTDLDESTSFFGVYDGHGGKVVAKFCAKFLHQQLFKSETYLTGDIGASLQKAFLRMDEMMRGQRGWRELSILGDKINKFTGMIEGLIWSPRSSDGNCHVDDWAFEEGPHSDFAGPTSGSTACVAVIRNNQLVVANAGDSRCVISRKGQAYNLSRDHKPDLEIEKERILKAGGFIHVGRVNGSLNLARAIGDMEFKQNKFLSAEKQIVTANPDINTVELCDEDEFVVLACDGIWDCMSSQQLVDFVHEQLHSETKLSAVCERVLDRCLAPSTASGEGCDNMTMIVVQFKRPAQSSVPAEESSSN

SEQ ID NO: 9654 - DNA, 814 bp, Glycine max
  misc_feature (1)..(814): Ceres Seq. ID no. 13504026
ataccaaacttaaaattggagaagacgaaacaatttagaaaagaaaaatgaaaatagtagaaaagaaggcattaggttaagagtgaaggcagtgagcgaaagagagcatagtaatacttactgagtgcttacagttgctgcgtcgcaaggtaccggcggcgacggagaactatcttctcaattttcgatcactgcattggttctgttgtcaagggttttgttcttcctgacttgcatacttgatggcttcaaagttgcagaagttgcaggccacagcatctcaagcgtctcaatttgtatgcagtcgtggaactaactactacaagcaattgctggaacagaacaagcaacacattcaggagcctcctacagcagagaaatgcaacctgttggcaaagcaattgttttacactcgccttgctagtattccgagtcgtaatgagtccttttggaaggaacttgattatgccaagaatttgtggaagaacaggaaagagctaaaggttgaagatgcaggaattgctgctttgtttggcctcgaatgctttgcatggttttgcgctggtgagattgttggcagaggatttactttcaccggttactatgtctgataataaccacttggaaagtgtagattttatcagggctaaacactcctaaagccaactgctctggtcatttatacattgtgtggattatggcattctgcatggcaatttttgttatgataagcctcaataaccccttgtagttgaaagcgggatgaaccttgtgatgttctcttattatgttggaaagctagtgatggtactcc

SEQ ID NO: 9655 - protein, 122 aa, Glycine max
  peptide (1)..(122): Ceres Seq. ID no. 13504027
  misc_feature (8)..(121): Pfam Name: Pfam Description:  Mitochondrial ATP synthase g subunit
  misc_feature (1)..(121): NCBI GI NO: 15233603 NR Description: expressed protein [Arabidopsis thaliana]
  misc_feature (1)..(121): NCBI GI NO: 15236143 NR Description: expressed protein [Arabidopsis thaliana]
  misc_feature (1)..(121): NCBI GI NO: 15224821 NR Description: copia-related retroelement pol polyprotein
  misc_feature (1)..(122): NCBI GI NO: 34912342 NR Description: P0518F01.5
MASKLQKLQATASQASQFVCSRGTNYYKQLLEQNKQHIQEPPTAEKCNLLAKQLFYTRLASIPSRNESFWKELDYAKNLWKNRKELKVEDAGIAALFGLECFAWFCAGEIVGRGFTFTGYYV

SEQ ID NO: 9656 - DNA, 877 bp, Glycine max
  misc_feature (1)..(877): Ceres Seq. ID no. 15168318
atcactgctcattactcaatcttcttacactcctaataagtgtttttcatttcacaaacaccctaatctatctataacaacaatggcatcagatcgaggtgtttttttgaacaaaagctggggtgttggtggaagagaaatgaaggacagagattttgatgaagaagatgtgtggagtgtagcaaatgatgatagtggcaaagaaaccacaagggcatgcaaggaatcttgtggttcttcttcttcttcttctgcatggcgtttacctgctgctccaagaaagattccaagggctaataataatgctaatcccctacctgcagcttctgatgctccattggttaaaggatcctcatcagcacctatggacatccctgactggtcaaagatttatggtaagagttgcaagaaagggtcaacagcagatgatggtgcaagcaacaagggtggtgatgatgatgatgatgacgacgatgacatggttcctccacatgaatggattgctaggaagcttgcaaggagccagatttcatctttctctgtgtgtgaagggatggggaggacactcaaaggaagagatcttagtaaggtgaggaatgctattttgaccaaaactggcttcatagagtagtggttaatttaagagatttaattaggttggttgaataatgttaatgagttattgtaaatcttgtgagtttgattcctacttggatgtactaatgtaagctacttggatgtcttcatgtaagcttcaaattttggcatcattagtagccataccacaatcaaatcatccattattgttttactcgggtcccatgcaatcgtttttgttttgattattctcactataatatatagtagtttattagtg

SEQ ID NO: 9657 - protein, 209 aa, Glycine max
  peptide (1)..(209): Ceres Seq. ID no. 15168319
  misc_feature (49)..(209): Pfam Name: Pfam Description:  Protein of unknown function, DUF584
  misc_feature (49)..(209): NCBI GI NO: 18412629 NR Description: expressed protein [Arabidopsis thaliana]
  misc_feature (49)..(209): NCBI GI NO: 25354620 NR Description: hypothetical protein AT4g04630
  misc_feature (49)..(209): NCBI GI NO: 26452217 NR Description: unknown protein [Arabidopsis thaliana]
  misc_feature (98)..(207): NCBI GI NO: 7487830 NR Description: hypothetical protein T8O5
  misc_feature (98)..(207): NCBI GI NO: 15234679 NR Description: hypothetical protein [Arabidopsis thaliana]
  misc_feature (97)..(207): NCBI GI NO: 15239410 NR Description: expressed protein [Arabidopsis thaliana]
  misc_feature (76)..(209): NCBI GI NO: 18400614 NR Description: expressed protein [Arabidopsis thaliana]
  misc_feature (42)..(207): NCBI GI NO: 7487828 NR Description: hypothetical protein T8O5
  misc_feature (42)..(207): NCBI GI NO: 30685620 NR Description: expressed protein [Arabidopsis thaliana]
  misc_feature (79)..(209): NCBI GI NO: 21594619 NR Description: unknown [Arabidopsis thaliana]
SLLITQSSYTPNKCFSFHKHPNLSITTMASDRGVFLNKSWGVGGREMKDRDFDEEDVWSVANDDSGKETTRACKESCGSSSSSSAWRLPAAPRKIPRANNNANPLPAASDAPLVKGSSSAPMDIPDWSKIYGKSCKKGSTADDGASNKGGDDDDDDDDDMVPPHEWIARKLARSQISSFSVCEGMGRTLKGRDLSKVRNAILTKTGFIE

SEQ ID NO: 9658 - protein, 182 aa, Glycine max
  peptide (1)..(182): Ceres Seq. ID no. 15168320
  misc_feature (22)..(182): Pfam Name: Pfam Description:  Protein of unknown function, DUF584
  misc_feature (22)..(182): NCBI GI NO: 18412629 NR Description: expressed protein [Arabidopsis thaliana]
  misc_feature (22)..(182): NCBI GI NO: 25354620 NR Description: hypothetical protein AT4g04630
  misc_feature (22)..(182): NCBI GI NO: 26452217 NR Description: unknown protein [Arabidopsis thaliana]
  misc_feature (71)..(180): NCBI GI NO: 7487830 NR Description: hypothetical protein T8O5
  misc_feature (71)..(180): NCBI GI NO: 15234679 NR Description: hypothetical protein [Arabidopsis thaliana]
  misc_feature (70)..(180): NCBI GI NO: 15239410 NR Description: expressed protein [Arabidopsis thaliana]
  misc_feature (49)..(182): NCBI GI NO: 18400614 NR Description: expressed protein [Arabidopsis thaliana]
  misc_feature (15)..(180): NCBI GI NO: 7487828 NR Description: hypothetical protein T8O5
  misc_feature (15)..(180): NCBI GI NO: 30685620 NR Description: expressed protein [Arabidopsis thaliana]
  misc_feature (52)..(182): NCBI GI NO: 21594619 NR Description: unknown [Arabidopsis thaliana]
MASDRGVFLNKSWGVGGREMKDRDFDEEDVWSVANDDSGKETTRACKESCGSSSSSSAWRLPAAPRKIPRANNNANPLPAASDAPLVKGSSSAPMDIPDWSKIYGKSCKKGSTADDGASNKGGDDDDDDDDDMVPPHEWIARKLARSQISSFSVCEGMGRTLKGRDLSKVRNAILTKTGFIE

SEQ ID NO: 9659 - protein, 163 aa, Glycine max
  peptide (1)..(163): Ceres Seq. ID no. 15168321
  misc_feature (3)..(163): Pfam Name: Pfam Description:  Protein of unknown function, DUF584
  misc_feature (3)..(163): NCBI GI NO: 18412629 NR Description: expressed protein [Arabidopsis thaliana]
  misc_feature (3)..(163): NCBI GI NO: 25354620 NR Description: hypothetical protein AT4g04630
  misc_feature (3)..(163): NCBI GI NO: 26452217 NR Description: unknown protein [Arabidopsis thaliana]
  misc_feature (52)..(161): NCBI GI NO: 7487830 NR Description: hypothetical protein T8O5
  misc_feature (52)..(161): NCBI GI NO: 15234679 NR Description: hypothetical protein [Arabidopsis thaliana]
  misc_feature (51)..(161): NCBI GI NO: 15239410 NR Description: expressed protein [Arabidopsis thaliana]
  misc_feature (30)..(163): NCBI GI NO: 18400614 NR Description: expressed protein [Arabidopsis thaliana]
  misc_feature (1)..(161): NCBI GI NO: 7487828 NR Description: hypothetical protein T8O5
  misc_feature (1)..(161): NCBI GI NO: 30685620 NR Description: expressed protein [Arabidopsis thaliana]
  misc_feature (33)..(163): NCBI GI NO: 21594619 NR Description: unknown [Arabidopsis thaliana]
MKDRDFDEEDVWSVANDDSGKETTRACKESCGSSSSSSAWRLPAAPRKIPRANNNANPLPAASDAPLVKGSSSAPMDIPDWSKIYGKSCKKGSTADDGASNKGGDDDDDDDDDMVPPHEWIARKLARSQISSFSVCEGMGRTLKGRDLSKVRNAILTKTGFIE

SEQ ID NO: 9660 - DNA, 1224 bp, Glycine max
  misc_feature (1)..(1224): Ceres Seq. ID no. 14316497
aaaagtgagaagctttcgcttgttttggtgttccagttccacttagagccatgacagacatctccaagtcccttctctttacctttaccatcatcatcagctttggcttgtgcattctttatgcatctgcagaactccagagatttgcacactcttccaaacatgatggtgctcttagcttcttggtgcttggtgactagggaagaagaggtgcttacaaccaatcactagttgctttccagatgggaaaggttggagagaagcttgatatcgactttgtagtttccactggagacaacttctatgacaatggactgactagtgaccatgacaacgcgtttcaagaatcattcactaaaatttacacagcaaaaagcttgcaaaatcagtggtacagcgtgttaggcaaccacgactataggggtgatgcagaggcccaattgagcccggtccttagagaaattgatagcagatggctttgcttaaggtcctttattgtagattcagagctggttgagattttctttgtagacaccactccttttgttgacgagtacttcactgaaccaccggaacacaagtatgattggcggggcattggcccacaaaaatcttatatttctaacttactcaaggacctagaattggcactgaggggatcaacagcaaaatggaggattgttgttggtcaccatgccattagaagtgttgggcatcatggtgatactcaagaactcataaatcggcctctccctatccttcaggcaaataacgttcacttttacatgaacgggcatgatcattgtcttgagcacattagtgacacggagagccccattcagttcctgactagcggggcagggtcaaaggcttggagaggagacattgaaggaatgaaccgaagaggcgtaaatttcttctatgatggacaaggcttcgtgtcagtgaaattgactcagacggatgccaccattgagttctatgatgtttttggcaacgttttgcacagattgacttcttcaaaacagctacattcttccatgtaaagtttagagctagatactagacattgagattaaatagaccaatccaaattggttgatgaaatttcaaactaatccttgatgtcatgcttgagtatgtacgagaaatgaaaatatgaatgaaggattcttcactgtgattcattcaccgcagtgatgaattgctgtttaaaaagaaaac

SEQ ID NO: 9661 - protein, 267 aa, Glycine max
  peptide (1)..(267): Ceres Seq. ID no. 14316498
  misc_feature (1)..(189): Pfam Name: Pfam Description:  Calcineurin-like phosphoesterase
  misc_feature (1)..(267): NCBI GI NO: 39918795 NR Description: putative acid phosphatase [Lupinus luteus]
  misc_feature (1)..(267): NCBI GI NO: 18401643 NR Description: calcineurin-like phosphoesterase family
  misc_feature (1)..(267): NCBI GI NO: 21536860 NR Description: acid phosphatase type 5 [Arabidopsis thaliana]
  misc_feature (1)..(247): NCBI GI NO: 7331193 NR Description: putative purple acid phosphatase precursor
  misc_feature (1)..(267): NCBI GI NO: 7331195 NR Description: putative purple acid phosphatase precursor
  misc_feature (1)..(255): NCBI GI NO: 30683951 NR Description: calcineurin-like phosphoesterase family
  misc_feature (1)..(255): NCBI GI NO: 30911094 NR Description: putative purple acid phosphatase
  misc_feature (1)..(255): NCBI GI NO: 25752249 NR Description: probable acid phosphatase (EC 3
  misc_feature (1)..(265): NCBI GI NO: 22329781 NR Description: calcineurin-like phosphoesterase family
  misc_feature (1)..(261): NCBI GI NO: 22325419 NR Description: calcineurin-like phosphoesterase family
MGKVGEKLDIDFVVSTGDNFYDNGLTSDHDNAFQESFTKIYTAKSLQNQWYSVLGNHDYRGDAEAQLSPVLREIDSRWLCLRSFIVDSELVEIFFVDTTPFVDEYFTEPPEHKYDWRGIGPQKSYISNLLKDLELALRGSTAKWRIVVGHHAIRSVGHHGDTQELINRPLPILQANNVHFYMNGHDHCLEHISDTESPIQFLTSGAGSKAWRGDIEGMNRRGVNFFYDGQGFVSVKLTQTDATIEFYDVFGNVLHRLTSSKQLHSSM

SEQ ID NO: 9662 - DNA, 942 bp, Glycine max
  misc_feature (1)..(942): Ceres Seq. ID no. 15177207
aacaaattaaaacaaaacagtctccatttgactacaaaacagtctccatttgacacagtcctagtggtgtactacttattatggccacaccagcatccatcactaatgtcactgtggagttccttcaattccccgcactggtgacacctcctggctctaccaaatcctatttccttggcggcgcaggggtgagagggttgaatattcaagaagaatttgtgaagttcacgggaataggtgtttatttggaagacaaggccgtgtcatcactcgctgccaaatggaagggcaagagtgcagctgaattgctcgattcccttgacttctacagagatatcatcaaaggcccctttgagaagttaattcgagggtcaaagttaagaacattggatggtcgtgaatacgtaaggaaggtatcagagaactgtgtggcacatatgcaatctgttgggacttacagtgatgaggaggaaaaagctattgaggaatttagaaatgctttcaaggatcaaaatttcccaccaggctccactgttttctacaaacaatcacccactggaacattggggcttagtttctcgaaagatgagacaataccagaacatgagcatgcagtgatagacaacaagccactttcggaggcagtgctggagactatgatcggagagattcctgtttcccctgctttgaaagagagtttggctacaaggtttcatcagttcttcaaagagttagaggccaatcccaacattgaaaactgagagttgcagcagttgccaactatctttagaagaccttggaaacaagaagaagaacagcaaaaatttgaagagacatctaaataatgtaacccccccccccccccccctccccgcagttatgtgtgcactttggtggatttgtaccccatttaataaacgagcaaaccagttattgctaatc

SEQ ID NO: 9663 - protein, 226 aa, Glycine max
  peptide (1)..(226): Ceres Seq. ID no. 15177208
  misc_feature (5)..(210): Pfam Name: Pfam Description:  Chalcone-flavanone isomerase
  misc_feature (1)..(210): NCBI GI NO: 3041652 NR Description: CHALCONE--FLAVONONE ISOMERASE (CHALCONE ISOMERASE)
  misc_feature (2)..(210): NCBI GI NO: 5921724 NR Description: CHALCONE--FLAVONONE ISOMERASE (CHALCONE ISOMERASE)
  misc_feature (5)..(210): NCBI GI NO: 14582263 NR Description: chalcone isomerase [Glycine max]
  misc_feature (5)..(217): NCBI GI NO: 116134 NR Description: CHALCONE--FLAVONONE ISOMERASE 1
  misc_feature (5)..(217): NCBI GI NO: 22218879 NR Description: Chain A, Chalcone Isomerase--Y106f Mutant
  misc_feature (5)..(217): NCBI GI NO: 22218881 NR Description: Chain A, Chalcone Isomerase--T48a Mutant
  misc_feature (13)..(214): NCBI GI NO: 81864 NR Description: chalcone isomerase (EC 5
  misc_feature (7)..(210): NCBI GI NO: 27530707 NR Description: chalcone isomerase
  misc_feature (2)..(210): NCBI GI NO: 27530601 NR Description: putative chalcone isomerase
  misc_feature (2)..(204): NCBI GI NO: 28804193 NR Description: chalcone isomerase
MATPASITNVTVEFLQFPALVTPPGSTKSYFLGGAGVRGLNIQEEFVKFTGIGVYLEDKAVSSLAAKWKGKSAAELLDSLDFYRDIIKGPFEKLIRGSKLRTLDGREYVRKVSENCVAHMQSVGTYSDEEEKAIEEFRNAFKDQNFPPGSTVFYKQSPTGTLGLSFSKDETIPEHEHAVIDNKPLSEAVLETMIGEIPVSPALKESLATRFHQFFKELEANPNIEN

SEQ ID NO: 9664 - DNA, 912 bp, Glycine max
  misc_feature (1)..(912): Ceres Seq. ID no. 12608745
acccccactttttctagtaataatagtactacattatctagtgttcgagagagagagagttcatagttcaatgctcagttcttcttcggcttcgtttttgaggcagttaagtgcaaaaaaggagggttggaaagagagatactataatagtggtagtggtggctggggaatgagctttggagggtgtgaggcaagtgtgaaactaatggaagggtttaacatgcaggggaatgtggggaggaagagggtgatggtggtggttgatgacacctcacattccaagcatgcaatgttgtgggcactcactcatgttgccaacaagggtgattcccttgactcttcttcacgttgtgcctcctcacaggggtcctgaatcttcttgctccacttatcttgtcaattatcttgggtcactttgcaaagattgcaagccctggggtggaagtggaagcgctcttaaatccaaggaccaaaactggccactgtaatgagccaagtaaagaagctggaggtctctgtcctggtactgggccaaaagaagccatcttctcttttaagctgtctttgtggaagcagcggaagcagtagtacagaggagtttgtggagcattgcatcaataaagcagagtgcttgacaattggagtgaggaagagaagccagggcacgaatggataccttgtcagcactagatggcagaagaacttctggcttttggcttagattgaaagtttagttgctgctagttcagatcttagaggggataaatggggaaatggtaaaattaaccttagtatttgcaacatcatctataatctgagtaaaaataatcatctatatcaccctgtaactagttctaactatatcgtgtactaatgtcactatgagtaaaaataatcaaattgtccatgctc

SEQ ID NO: 9665 - protein, 123 aa, Glycine max
  peptide (1)..(123): Ceres Seq. ID no. 12608746
  misc_feature (34)..(111): NCBI GI NO: 34907308 NR Description: hypothetical protein~similar to Arabidopsisthaliana chromosome 1
  misc_feature (28)..(123): NCBI GI NO: 15219439 NR Description: hypothetical protein; protein id: At1g44760
  misc_feature (81)..(111): NCBI GI NO: 18409190 NR Description: expressed protein; protein id: At1g69080
  misc_feature (81)..(111): NCBI GI NO: 21592322 NR Description: unknown [Arabidopsis thaliana]
  misc_feature (39)..(123): NCBI GI NO: 15237955 NR Description: putative protein; protein id: At5g17390.1
  misc_feature (63)..(123): NCBI GI NO: 15228516 NR Description: hypothetical protein; protein id: At3g03290.1
PPLFLVIIVLHYLVFERERVHSSMLSSSSASFLRQLSAKKEGWKERYYNSGSGGWGMSFGGCEASVKLMEGFNMQGNVGRKRVMVVVDDTSHSKHAMLWALTHVANKGDSLDSSSRCASSQGS

SEQ ID NO: 9666 - protein, 100 aa, Glycine max
  peptide (1)..(100): Ceres Seq. ID no. 12608747
  misc_feature (11)..(88): NCBI GI NO: 34907308 NR Description: hypothetical protein~similar to Arabidopsisthaliana chromosome 1
  misc_feature (5)..(100): NCBI GI NO: 15219439 NR Description: hypothetical protein; protein id: At1g44760
  misc_feature (58)..(88): NCBI GI NO: 18409190 NR Description: expressed protein; protein id: At1g69080
  misc_feature (58)..(88): NCBI GI NO: 21592322 NR Description: unknown [Arabidopsis thaliana]
  misc_feature (16)..(100): NCBI GI NO: 15237955 NR Description: putative protein; protein id: At5g17390.1
  misc_feature (40)..(100): NCBI GI NO: 15228516 NR Description: hypothetical protein; protein id: At3g03290.1
MLSSSSASFLRQLSAKKEGWKERYYNSGSGGWGMSFGGCEASVKLMEGFNMQGNVGRKRVMVVVDDTSHSKHAMLWALTHVANKGDSLDSSSRCASSQGS

SEQ ID NO: 9667 - protein, 77 aa, Glycine max
  peptide (1)..(77): Ceres Seq. ID no. 12608748
  misc_feature (1)..(54): Pfam Name: Pfam Description:  Universal stress protein family
  misc_feature (1)..(77): NCBI GI NO: 34907308 NR Description: hypothetical protein~similar to Arabidopsisthaliana chromosome 1
  misc_feature (1)..(77): NCBI GI NO: 15219439 NR Description: hypothetical protein; protein id: At1g44760
  misc_feature (1)..(77): NCBI GI NO: 18409190 NR Description: expressed protein; protein id: At1g69080
  misc_feature (1)..(77): NCBI GI NO: 21592322 NR Description: unknown [Arabidopsis thaliana]
  misc_feature (1)..(77): NCBI GI NO: 15237955 NR Description: putative protein; protein id: At5g17390.1
  misc_feature (1)..(77): NCBI GI NO: 15228516 NR Description: hypothetical protein; protein id: At3g03290.1
  misc_feature (1)..(77): NCBI GI NO: 37535148 NR Description: unknown protein
MSQVKKLEVSVLVLGQKKPSSLLSCLCGSSGSSSTEEFVEHCINKAECLTIGVRKRSQGTNGYLVSTRWQKNFWLLA

SEQ ID NO: 9668 - DNA, 758 bp, Glycine max
  misc_feature (1)..(758): Ceres Seq. ID no. 13503305
agcagaagaaaacgaaactctcaaaccaagcgaaactatgggcatataactgagagaagaatatatcaatatcatctccaaatacgacgtcgttcaggttggggttttagcacaagatgtcgctgcgaataaaggcggtagtagataagtttgtccaagagttgcaggaagcgttggatgctgatattcaggataggatcatgaaggacagagaaatgcaaagttacattgaggagcgggaacgagaggttgctgagcgtgaagctgcttggaaggctgatctttctcgtcgtgaggcagaaattgctcgtcaagaagcaaggctgaagatggagagagacaatctagagaaagagaaaagtgtcttaatgggaactgcatcaaatcaagataaccaagatggagctcttgaaattacagtaagtggtgaaaagtaccgttgcctcagatttgccaaggcaaaaaaataaggctttgctggggtgacaaaaaggaaaagtatgattttgacttctctcccccagggctagtgctgtcgaggaatcacctgaaatgccaagctcagtttaagtacttctaggattaattattgaaatttaactgtttagttgtggtttataattcctgttagatttgagttaagtgtcatgacttcctcaattaaatttttatttcattcttttctgtgatggtgttgatgctgtttgctgaaattatgtttccgggtaaattatttatgacattagctaaatttagtt

SEQ ID NO: 9669 - protein, 117 aa, Glycine max
  peptide (1)..(117): Ceres Seq. ID no. 13503306
  misc_feature (1)..(117): NCBI GI NO: 18398390 NR Description: expressed protein [Arabidopsis thaliana]
  misc_feature (1)..(115): NCBI GI NO: 25371273 NR Description: hypothetical protein At2g17350
MSLRIKAVVDKFVQELQEALDADIQDRIMKDREMQSYIEEREREVAEREAAWKADLSRREAEIARQEARLKMERDNLEKEKSVLMGTASNQDNQDGALEITVSGEKYRCLRFAKAKK

SEQ ID NO: 9670 - protein, 89 aa, Glycine max
  peptide (1)..(89): Ceres Seq. ID no. 13503307
  misc_feature (1)..(89): NCBI GI NO: 18398390 NR Description: expressed protein [Arabidopsis thaliana]
  misc_feature (1)..(87): NCBI GI NO: 25371273 NR Description: hypothetical protein At2g17350
MKDREMQSYIEEREREVAEREAAWKADLSRREAEIARQEARLKMERDNLEKEKSVLMGTASNQDNQDGALEITVSGEKYRCLRFAKAKK

SEQ ID NO: 9671 - protein, 84 aa, Glycine max
  peptide (1)..(84): Ceres Seq. ID no. 13503308
  misc_feature (1)..(84): NCBI GI NO: 18398390 NR Description: expressed protein [Arabidopsis thaliana]
  misc_feature (1)..(82): NCBI GI NO: 25371273 NR Description: hypothetical protein At2g17350
MQSYIEEREREVAEREAAWKADLSRREAEIARQEARLKMERDNLEKEKSVLMGTASNQDNQDGALEITVSGEKYRCLRFAKAKK

SEQ ID NO: 9672 - DNA, 772 bp, Glycine max
  misc_feature (1)..(772): Ceres Seq. ID no. 12583723
ataataaaccccaaaacaaagttcttctctctctctctctctctctctctcgtgaatcatcacttcgttttccccactttcaacaccgctcatcttctcttctcttttctctgctaatcatggcaaccttgtctactatgaaagtttcccctcattgcacattacaaactgcaagcaaaaatccatccattgttgccaccatagtgaagtgtccttcttctttaaggtctgtgaagagcgtttccagatctttcggcttgaagtcggcctcttcatttagagtcactgccatggcttcttacaaggttaagctgattggcccagatggaacagagaacgagttcgaagccactgacgatacttacatcttagatgcagcagagagtgctggagttgaacttccttactcatgccgagctggagcatgctccacctgtgctgggaagattgtttctggttctgtggaccagtccgatggctcattcctcgatgacaaccaactgaaggaaggctttgttcttacctgtgtctcctatccaactgcagactgtgtaattgaaactcacaaggaaggagatctctactgagcaatgctggccttgaagttgggaactgggaatttaaggtagactttgcaactagtttacttgtgctgctttagaatcaaattttcttttttgattattagtgatttggtgtattgaatttttgtttgtgcagcaagcactgtgatcttaattaataagacgataagcaccttcggttggctttc

SEQ ID NO: 9673 - protein, 194 aa, Glycine max
  peptide (1)..(194): Ceres Seq. ID no. 12583724
  misc_feature (107)..(181): Pfam Name: Pfam Description:  2Fe-2S iron-sulfur cluster binding domain
  misc_feature (43)..(193): NCBI GI NO: 2129915 NR Description: ferredoxin
  misc_feature (43)..(194): NCBI GI NO: 13182955 NR Description: ferredoxin [Impatiens balsamina]
  misc_feature (43)..(194): NCBI GI NO: 119958 NR Description: Ferredoxin III, chloroplast precursor (Fd III)
  misc_feature (43)..(194): NCBI GI NO: 40714664 NR Description: putative ferredoxin
  misc_feature (59)..(194): NCBI GI NO: 7430754 NR Description: ferredoxin [2Fe-2S], root - rice
  misc_feature (73)..(194): NCBI GI NO: 15225888 NR Description: putative ferredoxin; protein id: At2g27510
  misc_feature (43)..(194): NCBI GI NO: 6970498 NR Description: non-photosynthetic ferredoxin [Ipomoea nil]
  misc_feature (100)..(194): NCBI GI NO: 6688560 NR Description: putative ferredoxin [Lycopersicon esculentum]
  misc_feature (43)..(194): NCBI GI NO: 19569591 NR Description: ferredoxin precursor [Triticum aestivum]
  misc_feature (78)..(194): NCBI GI NO: 3023750 NR Description: Ferredoxin VI, chloroplast precursor (Fd VI)
NKPQNKVLLSLSLSLSRESSLRFPHFQHRSSSLLFSLLIMATLSTMKVSPHCTLQTASKNPSIVATIVKCPSSLRSVKSVSRSFGLKSASSFRVTAMASYKVKLIGPDGTENEFEATDDTYILDAAESAGVELPYSCRAGACSTCAGKIVSGSVDQSDGSFLDDNQLKEGFVLTCVSYPTADCVIETHKEGDLY

SEQ ID NO: 9674 - protein, 155 aa, Glycine max
  peptide (1)..(155): Ceres Seq. ID no. 12583725
  misc_feature (68)..(142): Pfam Name: Pfam Description:  2Fe-2S iron-sulfur cluster binding domain
  misc_feature (4)..(154): NCBI GI NO: 2129915 NR Description: ferredoxin
  misc_feature (4)..(155): NCBI GI NO: 13182955 NR Description: ferredoxin [Impatiens balsamina]
  misc_feature (4)..(155): NCBI GI NO: 119958 NR Description: Ferredoxin III, chloroplast precursor (Fd III)
  misc_feature (4)..(155): NCBI GI NO: 40714664 NR Description: putative ferredoxin
  misc_feature (20)..(155): NCBI GI NO: 7430754 NR Description: ferredoxin [2Fe-2S], root - rice
  misc_feature (34)..(155): NCBI GI NO: 15225888 NR Description: putative ferredoxin; protein id: At2g27510
  misc_feature (4)..(155): NCBI GI NO: 6970498 NR Description: non-photosynthetic ferredoxin [Ipomoea nil]
  misc_feature (61)..(155): NCBI GI NO: 6688560 NR Description: putative ferredoxin [Lycopersicon esculentum]
  misc_feature (4)..(155): NCBI GI NO: 19569591 NR Description: ferredoxin precursor [Triticum aestivum]
  misc_feature (39)..(155): NCBI GI NO: 3023750 NR Description: Ferredoxin VI, chloroplast precursor (Fd VI)
MATLSTMKVSPHCTLQTASKNPSIVATIVKCPSSLRSVKSVSRSFGLKSASSFRVTAMASYKVKLIGPDGTENEFEATDDTYILDAAESAGVELPYSCRAGACSTCAGKIVSGSVDQSDGSFLDDNQLKEGFVLTCVSYPTADCVIETHKEGDLY

SEQ ID NO: 9675 - protein, 149 aa, Glycine max
  peptide (1)..(149): Ceres Seq. ID no. 12583726
  misc_feature (62)..(136): Pfam Name: Pfam Description:  2Fe-2S iron-sulfur cluster binding domain
  misc_feature (1)..(148): NCBI GI NO: 2129915 NR Description: ferredoxin
  misc_feature (1)..(149): NCBI GI NO: 13182955 NR Description: ferredoxin [Impatiens balsamina]
  misc_feature (1)..(149): NCBI GI NO: 119958 NR Description: Ferredoxin III, chloroplast precursor (Fd III)
  misc_feature (1)..(149): NCBI GI NO: 40714664 NR Description: putative ferredoxin
  misc_feature (14)..(149): NCBI GI NO: 7430754 NR Description: ferredoxin [2Fe-2S], root - rice
  misc_feature (28)..(149): NCBI GI NO: 15225888 NR Description: putative ferredoxin; protein id: At2g27510
  misc_feature (1)..(149): NCBI GI NO: 6970498 NR Description: non-photosynthetic ferredoxin [Ipomoea nil]
  misc_feature (55)..(149): NCBI GI NO: 6688560 NR Description: putative ferredoxin [Lycopersicon esculentum]
  misc_feature (1)..(149): NCBI GI NO: 19569591 NR Description: ferredoxin precursor [Triticum aestivum]
  misc_feature (33)..(149): NCBI GI NO: 3023750 NR Description: Ferredoxin VI, chloroplast precursor (Fd VI)
MKVSPHCTLQTASKNPSIVATIVKCPSSLRSVKSVSRSFGLKSASSFRVTAMASYKVKLIGPDGTENEFEATDDTYILDAAESAGVELPYSCRAGACSTCAGKIVSGSVDQSDGSFLDDNQLKEGFVLTCVSYPTADCVIETHKEGDLY

SEQ ID NO: 9676 - DNA, 1103 bp, Glycine max
  misc_feature (1)..(1103): Ceres Seq. ID no. 14314867
aatctctgtgctgcttcgtctatccctcccaccgtcctcggctccccggggatcccgccgtcgccgccgccggcccgcgttggtgccgccctggctctttcaacttggaagggctgccaccaccgcctcctccctccgcgccagtccccgcaagcgctcctcggcacccctcctcctgccgtcggatcccctcaccgtagcatctgattggcagtggacagggcaagatgtctggcggcaatcctgcaggtgtggataacactttccgtaggaaatttgacaaggaggagtacttggagcgagctcgacagagagagcgggatgagaaggatgaagcccggagaggcaaggacaggggccctcctgtgcaaagacagcctttgaagcatagggattatgaagttgatcttgagtctcgtcttggtaaaacccaggtggtaaccccaatcgcacctttgagtcagcaggctggatactactgttcagtatgtgagtgtgttgttaaagattcagccaactatttggatcatataaatggcaagaagcatcagagagcattgggcatgtctatgcgtgttgaaagggcgtcactcgaacaggttcaaaaacggtttgaggcacttaagaagaggaaggacccagccagcttcagtgaacaagatttggatgagagaatatggaagcagcagcaagaggaggaggagaagaagcgtcaacgcagagaaaagaagaaagaaaagaagaaagagcaggctggccagaatgaacctgaggacattgaccctgatgttgctgctatgatgggcttcggcgggttcggcacctcttcaaagaagtgaaaattgctgcttcaggtggcgccattccgttggtctgtggctgctgaagacgtcgccgcggctccgtgcacctggatctcagcaaaggccagacacagctctgatgcagtgttgcgagtagtgtactggagccttgttgcaaccgctacctgataatgtcagcgaaacgatacttaatgctggaacaattcagcttctgtaatcggtgaccggtgatcatttgagaagcatttcatctttgagaaatgagatgactaattcgtc

SEQ ID NO: 9677 - protein, 203 aa, Glycine max
  peptide (1)..(203): Ceres Seq. ID no. 14314868
  misc_feature (83)..(107): Pfam Name: Pfam Description:  Zinc finger, C2H2 type
  misc_feature (5)..(202): NCBI GI NO: 34897240 NR Description: unknown protein
  misc_feature (2)..(202): NCBI GI NO: 18397358 NR Description: expressed protein [Arabidopsis thaliana]
  misc_feature (2)..(172): NCBI GI NO: 6714389 NR Description: hypothetical protein [Arabidopsis thaliana]
  misc_feature (1)..(202): NCBI GI NO: 37595334 NR Description: z2610510D14Rik [Danio rerio]
  misc_feature (2)..(202): NCBI GI NO: 13385046 NR Description: RIKEN cDNA 2610510D14 [Mus musculus]
  misc_feature (13)..(202): NCBI GI NO: 34878791 NR Description: similar to histidyl-tRNA synthetase-like
  misc_feature (14)..(202): NCBI GI NO: 21355873 NR Description: CG11586-PA [Drosophila melanogaster]
  misc_feature (14)..(197): NCBI GI NO: 31216822 NR Description: ENSANGP00000020597 [Anopheles gambiae]
  misc_feature (1)..(202): NCBI GI NO: 39581678 NR Description: Hypothetical protein CBG00030
  misc_feature (2)..(202): NCBI GI NO: 17557051 NR Description: putative nuclear protein
MSGGNPAGVDNTFRRKFDKEEYLERARQRERDEKDEARRGKDRGPPVQRQPLKHRDYEVDLESRLGKTQVVTPIAPLSQQAGYYCSVCECVVKDSANYLDHINGKKHQRALGMSMRVERASLEQVQKRFEALKKRKDPASFSEQDLDERIWKQQQEEEEKKRQRREKKKEKKKEQAGQNEPEDIDPDVAAMMGFGGFGTSSKK

SEQ ID NO: 9678 - DNA, 1016 bp, Glycine max
  misc_feature (1)..(1016): Ceres Seq. ID no. 15168868
aacacttgttgttgttagggttttcataattcctgaaacaggggaaggaaatggcctcacaacaacacatcgagaagatgcagctccgccagaacttccgcaatctctggcactctgatcttttgagtacaattcaagctgacaccccttattgttgcttttctctgtggtgtgcaccgtgtgtatcatatctactccgcaaacgagctctttacgatgatatgtcaagatacacatgttgtgctggttacatgccctgcagtggtcggtgtggagaaagtaaatgtcctgaactctgccttggtgcggaggttgtctgctgttttggaaattcagtggcctcaactcgatttctgttacaagatgaatttaatattcaaactacgcaatgtgataattgcattattgctttcatgtttgtccttcaacaacttgcctgcatattttctattattgctttaattgtgggaaatagtgaaattcgacaggcttctcaattgctatcttgtttggctgactttgtctactgcacggtgtgtgcttgcatgcagactcagcataagattgaaatggacaaacgcgatgggaaatttggaccccaatcagtaatgggtgttccccctgttcaacaaatgtcacgctttgatcaggcagtccccccttttgttgggtattgaccacaaccagcatatggacagggctatggttattcacatgcctaagacccttctcatcctcccaactagcctgcccatcatcatcatcatcatcatcatcatccaccagcatatagctacttttggtgatttttttcataagaatgctttaggttgggttgcatttccatcaagtcatacatgtgtggtaaaattagtcagattgattatcaagttgcgtttcccttatacaagacaaacatattataccttgtctagttttatgtatactttgatgtcatattgtcattagactcattactgttcagcccgtggctatatttactttttttcttatgc

SEQ ID NO: 9679 - protein, 208 aa, Glycine max
  peptide (1)..(208): Ceres Seq. ID no. 15168869
  misc_feature (4)..(208): NCBI GI NO: 22328885 NR Description: proline-rich protein family [Arabidopsis thaliana]
  misc_feature (2)..(208): NCBI GI NO: 15222552 NR Description: proline-rich protein family [Arabidopsis thaliana]
  misc_feature (10)..(208): NCBI GI NO: 21554542 NR Description: unknown [Arabidopsis thaliana]
  misc_feature (2)..(208): NCBI GI NO: 37536436 NR Description: hypothetical protein
  misc_feature (3)..(200): NCBI GI NO: 15238071 NR Description: hypothetical protein [Arabidopsis thaliana]
  misc_feature (4)..(161): NCBI GI NO: 7485553 NR Description: hypothetical protein F16G20
  misc_feature (63)..(208): NCBI GI NO: 25446695 NR Description: Unknown protein
  misc_feature (2)..(44): NCBI GI NO: 25446695 NR Description: Unknown protein
  misc_feature (172)..(208): NCBI GI NO: 7485554 NR Description: hypothetical protein F16G20
MASQQHIEKMQLRQNFRNLWHSDLLSTIQADTPYCCFSLWCAPCVSYLLRKRALYDDMSRYTCCAGYMPCSGRCGESKCPELCLGAEVVCCFGNSVASTRFLLQDEFNIQTTQCDNCIIAFMFVLQQLACIFSIIALIVGNSEIRQASQLLSCLADFVYCTVCACMQTQHKIEMDKRDGKFGPQSVMGVPPVQQMSRFDQAVPPFVGY

SEQ ID NO: 9680 - protein, 199 aa, Glycine max
  peptide (1)..(199): Ceres Seq. ID no. 15168870
  misc_feature (1)..(199): NCBI GI NO: 22328885 NR Description: proline-rich protein family [Arabidopsis thaliana]
  misc_feature (1)..(199): NCBI GI NO: 15222552 NR Description: proline-rich protein family [Arabidopsis thaliana]
  misc_feature (1)..(199): NCBI GI NO: 21554542 NR Description: unknown [Arabidopsis thaliana]
  misc_feature (1)..(199): NCBI GI NO: 37536436 NR Description: hypothetical protein
  misc_feature (1)..(191): NCBI GI NO: 15238071 NR Description: hypothetical protein [Arabidopsis thaliana]
  misc_feature (1)..(152): NCBI GI NO: 7485553 NR Description: hypothetical protein F16G20
  misc_feature (54)..(199): NCBI GI NO: 25446695 NR Description: Unknown protein
  misc_feature (1)..(35): NCBI GI NO: 25446695 NR Description: Unknown protein
  misc_feature (163)..(199): NCBI GI NO: 7485554 NR Description: hypothetical protein F16G20
MQLRQNFRNLWHSDLLSTIQADTPYCCFSLWCAPCVSYLLRKRALYDDMSRYTCCAGYMPCSGRCGESKCPELCLGAEVVCCFGNSVASTRFLLQDEFNIQTTQCDNCIIAFMFVLQQLACIFSIIALIVGNSEIRQASQLLSCLADFVYCTVCACMQTQHKIEMDKRDGKFGPQSVMGVPPVQQMSRFDQAVPPFVGY

SEQ ID NO: 9681 - protein, 151 aa, Glycine max
  peptide (1)..(151): Ceres Seq. ID no. 15168871
  misc_feature (1)..(151): NCBI GI NO: 22328885 NR Description: proline-rich protein family [Arabidopsis thaliana]
  misc_feature (1)..(151): NCBI GI NO: 15222552 NR Description: proline-rich protein family [Arabidopsis thaliana]
  misc_feature (1)..(151): NCBI GI NO: 21554542 NR Description: unknown [Arabidopsis thaliana]
  misc_feature (1)..(151): NCBI GI NO: 37536436 NR Description: hypothetical protein
  misc_feature (1)..(143): NCBI GI NO: 15238071 NR Description: hypothetical protein [Arabidopsis thaliana]
  misc_feature (1)..(104): NCBI GI NO: 7485553 NR Description: hypothetical protein F16G20
  misc_feature (6)..(151): NCBI GI NO: 25446695 NR Description: Unknown protein
  misc_feature (115)..(151): NCBI GI NO: 7485554 NR Description: hypothetical protein F16G20
MSRYTCCAGYMPCSGRCGESKCPELCLGAEVVCCFGNSVASTRFLLQDEFNIQTTQCDNCIIAFMFVLQQLACIFSIIALIVGNSEIRQASQLLSCLADFVYCTVCACMQTQHKIEMDKRDGKFGPQSVMGVPPVQQMSRFDQAVPPFVGY

SEQ ID NO: 9682 - DNA, 1033 bp, Glycine max
  misc_feature (1)..(1033): Ceres Seq. ID no. 14311392
aaaaatcattcattcattgaatcccccaaaccgccatttcctttgggtttatggagtgagcgtggaagaggaaagagcaagcagcaacagctcgtggcggttccgattatttattaagatcaatgttgcatgcagtatctgcccctagcttttgtttaagctatcccgggaaccttcattatcctccttcttcatttcaaaaaacatgtttttctgttcgttgttcggtttcacagacaaaaaatggagctaaagtggaatatactccttggctcattgttggcttgggcaatcctggtaacaaataccatggcaccaggcacaatgttggatttgaaataattgatagcctttctcgagcagaagggattcagatgaacacaatacagtcaaaggccctcattggaataggttctattggtgaagtaccgattttgctggcaaagccccaaacatacatgaatttcagtggggaatcggttgggccacttgctgcatattatcaagtacccttgcgtcatattctactagtttttgatgagacaagccttccaaatggtgttttaaggcttcaacctaaaggcggacatggacatcacaatggattgaaaaatgtaatgggccatttggatggttgcagtgcttttcctcgacttgcagtcggaattggaaatcctcctggaactatggatttaagagcttatcttctacaaaaattcagtgtagaggaacgaaagcagattgacgcttcattggagcaagcagttgcagcagtaaggaccgtagtactcaatggttttgaccagcatgtcaatagattcaatttaggacaaaaatacaagtaccataaagtttaaaatgaaccgccaagatgaaattggtggttacattgttgtgtatgttagcagatagcagttatacttcacaaacttgtcatgactagtgcatttttttgtaaagcacaccagtggtcatattctagctctggcagatagttgtttcattgtgagaaatactagttgttgaattgttg

SEQ ID NO: 9683 - protein, 244 aa, Glycine max
  peptide (1)..(244): Ceres Seq. ID no. 14311393
  misc_feature (11)..(244): NCBI GI NO: 15237280 NR Description: CRS2-related protein [Arabidopsis thaliana]
  misc_feature (1)..(244): NCBI GI NO: 15240875 NR Description: CRS2 -related protein [Arabidopsis thaliana]
  misc_feature (1)..(244): NCBI GI NO: 26451849 NR Description: putative CRS2 [Arabidopsis thaliana]
  misc_feature (30)..(244): NCBI GI NO: 6752919 NR Description: CRS2 [Zea mays]
  misc_feature (45)..(244): NCBI GI NO: 40889730 NR Description: Chain A
  misc_feature (45)..(244): NCBI GI NO: 40889731 NR Description: Chain A
  misc_feature (45)..(242): NCBI GI NO: 40889732 NR Description: Chain A
  misc_feature (47)..(243): NCBI GI NO: 30687503 NR Description: expressed protein [Arabidopsis thaliana]
  misc_feature (9)..(234): NCBI GI NO: 30685853 NR Description: expressed protein [Arabidopsis thaliana]
  misc_feature (9)..(234): NCBI GI NO: 26453108 NR Description: unknown protein [Arabidopsis thaliana]
MLHAVSAPSFCLSYPGNLHYPPSSFQKTCFSVRCSVSQTKNGAKVEYTPWLIVGLGNPGNKYHGTRHNVGFEIIDSLSRAEGIQMNTIQSKALIGIGSIGEVPILLAKPQTYMNFSGESVGPLAAYYQVPLRHILLVFDETSLPNGVLRLQPKGGHGHHNGLKNVMGHLDGCSAFPRLAVGIGNPPGTMDLRAYLLQKFSVEERKQIDASLEQAVAAVRTVVLNGFDQHVNRFNLGQKYKYHKV

SEQ ID NO: 9684 - protein, 160 aa, Glycine max
  peptide (1)..(160): Ceres Seq. ID no. 14311394
  misc_feature (1)..(160): NCBI GI NO: 15237280 NR Description: CRS2-related protein [Arabidopsis thaliana]
  misc_feature (1)..(160): NCBI GI NO: 15240875 NR Description: CRS2 -related protein [Arabidopsis thaliana]
  misc_feature (1)..(160): NCBI GI NO: 26451849 NR Description: putative CRS2 [Arabidopsis thaliana]
  misc_feature (1)..(160): NCBI GI NO: 6752919 NR Description: CRS2 [Zea mays]
  misc_feature (1)..(160): NCBI GI NO: 40889730 NR Description: Chain A
  misc_feature (1)..(160): NCBI GI NO: 40889731 NR Description: Chain A
  misc_feature (1)..(158): NCBI GI NO: 40889732 NR Description: Chain A
  misc_feature (1)..(159): NCBI GI NO: 30687503 NR Description: expressed protein [Arabidopsis thaliana]
  misc_feature (1)..(150): NCBI GI NO: 30685853 NR Description: expressed protein [Arabidopsis thaliana]
  misc_feature (1)..(150): NCBI GI NO: 26453108 NR Description: unknown protein [Arabidopsis thaliana]
MNTIQSKALIGIGSIGEVPILLAKPQTYMNFSGESVGPLAAYYQVPLRHILLVFDETSLPNGVLRLQPKGGHGHHNGLKNVMGHLDGCSAFPRLAVGIGNPPGTMDLRAYLLQKFSVEERKQIDASLEQAVAAVRTVVLNGFDQHVNRFNLGQKYKYHKV

SEQ ID NO: 9685 - protein, 132 aa, Glycine max
  peptide (1)..(132): Ceres Seq. ID no. 14311395
  misc_feature (1)..(132): NCBI GI NO: 15237280 NR Description: CRS2-related protein [Arabidopsis thaliana]
  misc_feature (1)..(132): NCBI GI NO: 15240875 NR Description: CRS2 -related protein [Arabidopsis thaliana]
  misc_feature (1)..(132): NCBI GI NO: 26451849 NR Description: putative CRS2 [Arabidopsis thaliana]
  misc_feature (1)..(132): NCBI GI NO: 6752919 NR Description: CRS2 [Zea mays]
  misc_feature (1)..(132): NCBI GI NO: 40889730 NR Description: Chain A
  misc_feature (1)..(132): NCBI GI NO: 40889731 NR Description: Chain A
  misc_feature (1)..(130): NCBI GI NO: 40889732 NR Description: Chain A
  misc_feature (1)..(131): NCBI GI NO: 30687503 NR Description: expressed protein [Arabidopsis thaliana]
  misc_feature (1)..(122): NCBI GI NO: 30685853 NR Description: expressed protein [Arabidopsis thaliana]
  misc_feature (1)..(122): NCBI GI NO: 26453108 NR Description: unknown protein [Arabidopsis thaliana]
MNFSGESVGPLAAYYQVPLRHILLVFDETSLPNGVLRLQPKGGHGHHNGLKNVMGHLDGCSAFPRLAVGIGNPPGTMDLRAYLLQKFSVEERKQIDASLEQAVAAVRTVVLNGFDQHVNRFNLGQKYKYHKV

SEQ ID NO: 9686 - DNA, 736 bp, Glycine max
  misc_feature (1)..(736): Ceres Seq. ID no. 13638466
atgtgtcttaggtgaattactcaagagggctcgacaatcccacaaagtagaaaaagaggttatgttatggcgggcaaaggtgttagttcggtggctaaggcggtagcagaatatcagtatccttggcgtgagaagttggggaaatataaggatgagcttgccaagggtgtgtggggatactggagctggggggcatggaagccgctgagtatcagtgctcggcatcgtgctagaattcgcaaggaagtcctccttgctggggaagattggccctacgatcctgaaaggaaggagatgaagaccaggaggaaaggacacaaatgtgataggatttctgccgaaaagcgcgcaaacacagcgaagttgatggagaagatgccccagatgttgctggattacaagaagagaaggtggcagaagaagatgaaggaggaagacaagggaaaactttgattttgctcctcctctaatttttgcaaggttcagcataaactgtgcctttgagaaatggagtatttaattatgccatgttacacctgtttgtgggcctaatggattattaactttggttatgcttttcaatccttaataacccctttcgagagtatggccttgtgagtatcaggggggaaagggctttactacaatggaaattactgttatgtggttttgtttttatgtatatgcttggatgagtgcttgtcggtactgacaattgcttatttgtgccaagggc

SEQ ID NO: 9687 - protein, 128 aa, Glycine max
  peptide (1)..(128): Ceres Seq. ID no. 13638467
  misc_feature (1)..(127): NCBI GI NO: 18415817 NR Description: expressed protein [Arabidopsis thaliana]
MAGKGVSSVAKAVAEYQYPWREKLGKYKDELAKGVWGYWSWGAWKPLSISARHRARIRKEVLLAGEDWPYDPERKEMKTRRKGHKCDRISAEKRANTAKLMEKMPQMLLDYKKRRWQKKMKEEDKGKL

SEQ ID NO: 9688 - DNA, 601 bp, Glycine max
  misc_feature (1)..(601): Ceres Seq. ID no. 12608730
aacaaattaaactctccactttccacacaaacctaagaagaagcacttgtcaagatgccctcttctgctcatgctcatgctcatggcctcatcatcatctctctcattttggtgtctatttttttacccaatgtgaatctggcaaatggtggtgcaacttccatgcaaatgatgatgatgatgaatgagagcagaaggaaattgggaagcttccagatatgtgcactatgcaactgctgtggtggagccaaagggatctgcttgccctctccatgttgctatgccatcaattgcaacattcccaatagaccttttggcttttgttccttcacccctaaaacctgtaattgctttgaatgccatctttaatgttttctcttgtaaatgtccagttgagaatattggacttaataataatttttcacctttcaatcaacatactaatgaattcaggtgtttaatttggtggggttggaatagaggacagttaagccttagctacaaacctgctagtatatctgtaataggttttgctgtttgtttcataatggataatgtatcaatgcatgagccttggtatgtgtattgttctctctttttc

SEQ ID NO: 9689 - protein, 139 aa, Glycine max
  peptide (1)..(139): Ceres Seq. ID no. 12608731
MRAEGNWEASRYVHYATAVVEPKGSACPLHVAMPSIATFPIDLLAFVPSPLKPVIALNAIFNVFSCKCPVENIGLNNNFSPFNQHTNEFRCLIWWGWNRGQLSLSYKPASISVIGFAVCFIMDNVSMHEPWYVYCSLFF

SEQ ID NO: 9690 - protein, 107 aa, Glycine max
  peptide (1)..(107): Ceres Seq. ID no. 12608732
MPSIATFPIDLLAFVPSPLKPVIALNAIFNVFSCKCPVENIGLNNNFSPFNQHTNEFRCLIWWGWNRGQLSLSYKPASISVIGFAVCFIMDNVSMHEPWYVYCSLFF

SEQ ID NO: 9691 - protein, 104 aa, Glycine max
  peptide (1)..(104): Ceres Seq. ID no. 12608733
  misc_feature (12)..(104): NCBI GI NO: 18408246 NR Description: Expressed protein; protein id: At1g65295
  misc_feature (12)..(104): NCBI GI NO: 21954063 NR Description: unknown protein [Arabidopsis thaliana]
  misc_feature (12)..(104): NCBI GI NO: 21593890 NR Description: unknown [Arabidopsis thaliana]
  misc_feature (41)..(104): NCBI GI NO: 34906984 NR Description: P0413C03.15
  misc_feature (10)..(104): NCBI GI NO: 18412619 NR Description: Expressed protein; protein id: At5g01015
MPSSAHAHAHGLIIISLILVSIFLPNVNLANGGATSMQMMMMMNESRRKLGSFQICALCNCCGGAKGICLPSPCCYAINCNIPNRPFGFCSFTPKTCNCFECHL

SEQ ID NO: 9692 - DNA, 968 bp, Glycine max
  misc_feature (1)..(968): Ceres Seq. ID no. 15175597
atcctcgaaaatgatgaatgaagcggcttgtgaaccctaattagttgtcggtgtttgttggaagagcacatctctgttttcttcgtcatcttcccctcccctccccaaccagagatgcgccccgcaacacatatgtactaaagctttcaactttcagcatcctttcagatgttagcgaaaacccataacaaaggggatggatctaagtccctggctaagatactggcaaaatggaaagaatataatgcccagattgattccagcagtgatgcggataagccagttcgcaaagttcctgccaagggatcgaagaaggggtgcatgaaaggtaaagggggccctgagaactcgcggtgtaactacagaggtgttaggcaaaggacttggggaaagtgggttgctgaaatccgagagccaaacagaggcaataggctttggctaggtactttccccactgccattggagctgcccttgcatatgatgaagcggccagggcaatgtacggttcctgtgcccgtctcaactttcccaatgtttcagtttccagtttctctgaagaatcttccaaagattctccggttgcgaatcattgtggttcgtcaatggcagtgtctgcaaacgagtccatgatttcaccaagtaactcgggggtaggtgcagaagatgatgttgatatggagcccatttccttatccttaactgtaaagcatgagaatggggaaggtgaatcggggataagttcttcccctccttccccatgatgtacattgggacatggctaaattttttagcgcatgtacttgttaatggttagcttaggtttaatcatatttgatcctggagattagctgttgtaaaactaaaatgaactccgttgcaaaaatggtcatttcttttggccacctaatttgcatggatatcctgtctatttttaactcattaggtgtgagtcatacttacctttgcc

SEQ ID NO: 9693 - protein, 197 aa, Glycine max
  peptide (1)..(197): Ceres Seq. ID no. 15175598
  misc_feature (63)..(126): Pfam Name: Pfam Description:  AP2 domain
  misc_feature (10)..(166): NCBI GI NO: 8346773 NR Description: AP2-domain DNA-binding protein
  misc_feature (4)..(142): NCBI GI NO: 25992100 NR Description: dehydration responsive element binding protein
  misc_feature (4)..(134): NCBI GI NO: 15239107 NR Description: DRE binding protein (DREB2A)
  misc_feature (4)..(182): NCBI GI NO: 38099059 NR Description: dehydration-responsive element binding protein 2
  misc_feature (11)..(183): NCBI GI NO: 15228427 NR Description: DRE binding protein (DREB2B)
  misc_feature (4)..(157): NCBI GI NO: 22594971 NR Description: DRE binding protein 2 [Oryza sativa]
  misc_feature (4)..(157): NCBI GI NO: 25989383 NR Description: DREB1 [Oryza sativa]
  misc_feature (4)..(157): NCBI GI NO: 34896106 NR Description: putative AP2-domain DNA-binding protein
  misc_feature (1)..(164): NCBI GI NO: 30313898 NR Description: AP2 transcriptional activator DRF1.1
  misc_feature (10)..(164): NCBI GI NO: 27960760 NR Description: dehydration-responsive AP2 domain transcriptionalactivator
MLAKTHNKGDGSKSLAKILAKWKEYNAQIDSSSDADKPVRKVPAKGSKKGCMKGKGGPENSRCNYRGVRQRTWGKWVAEIREPNRGNRLWLGTFPTAIGAALAYDEAARAMYGSCARLNFPNVSVSSFSEESSKDSPVANHCGSSMAVSANESMISPSNSGVGAEDDVDMEPISLSLTVKHENGEGESGISSSPPSP

SEQ ID NO: 9694 - protein, 146 aa, Glycine max
  peptide (1)..(146): Ceres Seq. ID no. 15175599
  misc_feature (12)..(75): Pfam Name: Pfam Description:  AP2 domain
  misc_feature (1)..(115): NCBI GI NO: 8346773 NR Description: AP2-domain DNA-binding protein
  misc_feature (1)..(91): NCBI GI NO: 25992100 NR Description: dehydration responsive element binding protein
  misc_feature (1)..(83): NCBI GI NO: 15239107 NR Description: DRE binding protein (DREB2A)
  misc_feature (1)..(131): NCBI GI NO: 38099059 NR Description: dehydration-responsive element binding protein 2
  misc_feature (1)..(132): NCBI GI NO: 15228427 NR Description: DRE binding protein (DREB2B)
  misc_feature (1)..(106): NCBI GI NO: 22594971 NR Description: DRE binding protein 2 [Oryza sativa]
  misc_feature (1)..(106): NCBI GI NO: 25989383 NR Description: DREB1 [Oryza sativa]
  misc_feature (1)..(106): NCBI GI NO: 34896106 NR Description: putative AP2-domain DNA-binding protein
  misc_feature (1)..(113): NCBI GI NO: 30313898 NR Description: AP2 transcriptional activator DRF1.1
  misc_feature (1)..(113): NCBI GI NO: 27960760 NR Description: dehydration-responsive AP2 domain transcriptionalactivator
MKGKGGPENSRCNYRGVRQRTWGKWVAEIREPNRGNRLWLGTFPTAIGAALAYDEAARAMYGSCARLNFPNVSVSSFSEESSKDSPVANHCGSSMAVSANESMISPSNSGVGAEDDVDMEPISLSLTVKHENGEGESGISSSPPSP

SEQ ID NO: 9695 - DNA, 1258 bp, Glycine max
  misc_feature (1)..(1258): Ceres Seq. ID no. 14314869
aaacacagttaaagacgcacaagaaaacatctcgctcaacaccaccaacacttcggatctacgtttccactctccgaacatcaaaaaaggaaagaaaaaccgatttacagcgacaacaacgaacgaacgatttctcgaagcgctctcaaaatggcgcgtgcaccctttacttcattccccttcgtcctcattacccttctctcaattctccacctttcgcactgcaagaccctcaagcgtgacgttaaggctttgaacgagatcaaggcttcgcttgggtggagagtggtgtatgcgtgggtcgatgatgatccatgtggagatggggatcttcctccttggtctggtgtcacgtgttccactgtcggtgattatcgtgttgttaccgagcttgaggtgtatgcggtgtcgattgttggaccttttcccactgctgttaccagcttgttggatcttacacggcttgatcttcacaataacaagctgacagggcctattcctcctcaaattggacggttgaagcgccttaaaatattaaatttgaggtggaacaaactacaggatgcaattcctccaaaaattggcgagcttaaaagtttaacacatctgtacctaagcttcaacaatttcaagggagaaattccgaaggagctagcaaatcttcaagaccttcgctatctttatctccatgaaaaccgtttaactggaagaataccaccagaattgggcacactgcaaaatcttcggcacttggatgctggtaacaatcatttagtaggtaccataagggaactcattcgtattgaaggttgctttcctgcactacgcaatctgtatctaaacaataattattttactggaggaatgcctgcacagcttgctaacttaaccagtcttgagatcttgtacctatcctacaacaaaatgtcaggagttataccatcttccgttgctcgtattcctaaattgacatacttgtacttggatcacaatcagttttcagggagaattcctgaacccttttacaagcatccatttttgaaagaaatgtacattgagggaaatgcattccggcccggtgtcaatcccattggcttccataaagtgcttgaagtttctgatggagacttccttgtttaatgaaagctctaaatatttataattttttctcttcaggaagtgcacttgtataattattgaaacaattgttcctctaattatctcaatgaaatagccaaataggtaatccaattttgtc

SEQ ID NO: 9696 - protein, 329 aa, Glycine max
  peptide (1)..(329): Ceres Seq. ID no. 14314870
  misc_feature (101)..(124): Pfam Name: Pfam Description:  Leucine Rich Repeat
  misc_feature (4)..(329): NCBI GI NO: 14626935 NR Description: leucine-rich repeat resistance protein-like protein
  misc_feature (12)..(329): NCBI GI NO: 9757845 NR Description: leucine-rich repeat disease resistance protein-like
  misc_feature (13)..(329): NCBI GI NO: 15222979 NR Description: leucine rich repeat protein family
  misc_feature (13)..(329): NCBI GI NO: 25402771 NR Description: protein F16A14.12
  misc_feature (130)..(329): NCBI GI NO: 15240186 NR Description: leucine rich repeat protein family
  misc_feature (12)..(307): NCBI GI NO: 15240186 NR Description: leucine rich repeat protein family
  misc_feature (65)..(305): NCBI GI NO: 3894387 NR Description: Hcr2-0B [Lycopersicon esculentum]
  misc_feature (65)..(328): NCBI GI NO: 3894383 NR Description: disease resistance protein
  misc_feature (65)..(307): NCBI GI NO: 15219699 NR Description: leucine-rich repeat transmembrane protein kinase
  misc_feature (65)..(316): NCBI GI NO: 7488988 NR Description: disease resistance protein Hcr2-5D - tomato
MARAPFTSFPFVLITLLSILHLSHCKTLKRDVKALNEIKASLGWRVVYAWVDDDPCGDGDLPPWSGVTCSTVGDYRVVTELEVYAVSIVGPFPTAVTSLLDLTRLDLHNNKLTGPIPPQIGRLKRLKILNLRWNKLQDAIPPKIGELKSLTHLYLSFNNFKGEIPKELANLQDLRYLYLHENRLTGRIPPELGTLQNLRHLDAGNNHLVGTIRELIRIEGCFPALRNLYLNNNYFTGGMPAQLANLTSLEILYLSYNKMSGVIPSSVARIPKLTYLYLDHNQFSGRIPEPFYKHPFLKEMYIEGNAFRPGVNPIGFHKVLEVSDGDFLV

SEQ ID NO: 9697 - DNA, 682 bp, Glycine max
  misc_feature (1)..(682): Ceres Seq. ID no. 15225303
tgttgacaatgccaatcttgaatatagctgacgattcagaagtgttcttcaggaatatagtggcatttgaggaatgtcacctttcagatgatacaaacatcattactcaataccgaaagattctagattttcttatcaacactgaaaaagatgtgaatgtactagttgataagaaaattattgtcaattggatgggtgatgctaatgcagtggctacaatggttaacagtctgggctcaaatattgggatgccacgtttcaatccagtgtatttctctctctgcaatagcttaaatgatttctatgaaagtccttgcaacaagtacaaggctatcttcaaacacgattacttcaacactccttggaaaatagcatctacagttgctgcaattgtgcttcttttgctcacattgattcagactatatgttcaataaactcactgttttaattaaggtagctgaggatttgggccgttaacagggaagtggaagtcaattgggggaaggaaacttctgtaatgtgatttagtaccttgttgcttttctttcatcaaataattaaaattctactatccttcttaacattaattatttgttgcaatataacttttatttactctctatattgatctgtattaattttgtatacgctttatatatatagctacttattattattgtt

SEQ ID NO: 9698 - protein, 148 aa, Glycine max
  peptide (1)..(148): Ceres Seq. ID no. 15225304
  misc_feature (1)..(137): Pfam Name: Pfam Description:  Plant protein of unknown function
  misc_feature (1)..(144): NCBI GI NO: 15226899 NR Description: hypothetical protein [Arabidopsis thaliana]
  misc_feature (1)..(144): NCBI GI NO: 15232337 NR Description: hypothetical protein [Arabidopsis thaliana]
  misc_feature (1)..(147): NCBI GI NO: 15239004 NR Description: hypothetical protein [Arabidopsis thaliana]
  misc_feature (1)..(144): NCBI GI NO: 15227658 NR Description: expressed protein [Arabidopsis thaliana]
  misc_feature (1)..(144): NCBI GI NO: 7486946 NR Description: hypothetical protein At2g44930
  misc_feature (1)..(144): NCBI GI NO: 18406666 NR Description: expressed protein [Arabidopsis thaliana]
  misc_feature (1)..(147): NCBI GI NO: 15236618 NR Description: expressed protein [Arabidopsis thaliana]
  misc_feature (1)..(148): NCBI GI NO: 32490273 NR Description: OSJNBb0116K07.15
  misc_feature (1)..(140): NCBI GI NO: 15229681 NR Description: hypothetical protein [Arabidopsis thaliana]
  misc_feature (1)..(148): NCBI GI NO: 15229680 NR Description: hypothetical protein [Arabidopsis thaliana]
LTMPILNIADDSEVFFRNIVAFEECHLSDDTNIITQYRKILDFLINTEKDVNVLVDKKIIVNWMGDANAVATMVNSLGSNIGMPRFNPVYFSLCNSLNDFYESPCNKYKAIFKHDYFNTPWKIASTVAAIVLLLLTLIQTICSINSLF

SEQ ID NO: 9699 - protein, 146 aa, Glycine max
  peptide (1)..(146): Ceres Seq. ID no. 15225305
  misc_feature (1)..(135): Pfam Name: Pfam Description:  Plant protein of unknown function
  misc_feature (1)..(142): NCBI GI NO: 15226899 NR Description: hypothetical protein [Arabidopsis thaliana]
  misc_feature (1)..(142): NCBI GI NO: 15232337 NR Description: hypothetical protein [Arabidopsis thaliana]
  misc_feature (1)..(145): NCBI GI NO: 15239004 NR Description: hypothetical protein [Arabidopsis thaliana]
  misc_feature (1)..(142): NCBI GI NO: 15227658 NR Description: expressed protein [Arabidopsis thaliana]
  misc_feature (1)..(142): NCBI GI NO: 7486946 NR Description: hypothetical protein At2g44930
  misc_feature (1)..(142): NCBI GI NO: 18406666 NR Description: expressed protein [Arabidopsis thaliana]
  misc_feature (1)..(145): NCBI GI NO: 15236618 NR Description: expressed protein [Arabidopsis thaliana]
  misc_feature (1)..(146): NCBI GI NO: 32490273 NR Description: OSJNBb0116K07.15
  misc_feature (1)..(138): NCBI GI NO: 15229681 NR Description: hypothetical protein [Arabidopsis thaliana]
  misc_feature (1)..(146): NCBI GI NO: 15229680 NR Description: hypothetical protein [Arabidopsis thaliana]
MPILNIADDSEVFFRNIVAFEECHLSDDTNIITQYRKILDFLINTEKDVNVLVDKKIIVNWMGDANAVATMVNSLGSNIGMPRFNPVYFSLCNSLNDFYESPCNKYKAIFKHDYFNTPWKIASTVAAIVLLLLTLIQTICSINSLF

SEQ ID NO: 9700 - protein, 85 aa, Glycine max
  peptide (1)..(85): Ceres Seq. ID no. 15225306
  misc_feature (1)..(74): Pfam Name: Pfam Description:  Plant protein of unknown function
  misc_feature (1)..(81): NCBI GI NO: 15226899 NR Description: hypothetical protein [Arabidopsis thaliana]
  misc_feature (1)..(81): NCBI GI NO: 15232337 NR Description: hypothetical protein [Arabidopsis thaliana]
  misc_feature (1)..(84): NCBI GI NO: 15239004 NR Description: hypothetical protein [Arabidopsis thaliana]
  misc_feature (1)..(81): NCBI GI NO: 15227658 NR Description: expressed protein [Arabidopsis thaliana]
  misc_feature (1)..(81): NCBI GI NO: 7486946 NR Description: hypothetical protein At2g44930
  misc_feature (1)..(81): NCBI GI NO: 18406666 NR Description: expressed protein [Arabidopsis thaliana]
  misc_feature (1)..(84): NCBI GI NO: 15236618 NR Description: expressed protein [Arabidopsis thaliana]
  misc_feature (1)..(85): NCBI GI NO: 32490273 NR Description: OSJNBb0116K07.15
  misc_feature (1)..(77): NCBI GI NO: 15229681 NR Description: hypothetical protein [Arabidopsis thaliana]
  misc_feature (1)..(85): NCBI GI NO: 15229680 NR Description: hypothetical protein [Arabidopsis thaliana]
MGDANAVATMVNSLGSNIGMPRFNPVYFSLCNSLNDFYESPCNKYKAIFKHDYFNTPWKIASTVAAIVLLLLTLIQTICSINSLF

SEQ ID NO: 9701 - DNA, 1260 bp, Glycine max
  misc_feature (1)..(1260): Ceres Seq. ID no. 15171501
aaaccttcatgctgagtttcttatttgttgcgtggcaacgcaatgatgatgatgatgatggggttggtgtcttccagagttgtgttcttgtttgttgtttcgattttcgtgatttgggctcaggtggtggatttagcagaaggtggtgctgttcgaaattacattagttgggaagatttgcaggtgaatgaacaaaggttggccgtgaagtcgtcccataaccaggttcgagttataactgttaaccagaatggtgggggacattccaaaactgttcaaggtgctgtgaatatggttcctgataataacagacaaagggtcaaaattttcatttttccaggaatttacagagaaaaagtgcgtgtgcctgtgaccaagccttatgtatcatttatagggaaaagaaatcgaacagcaagtcctataattacttggaacagtaaatcatctgacaaaggcccaaatggcacagcattgggcacctatgcttcagcaacagtgggagtggactcagattatttctgtgcaactgggatcacttttgagaactcagtgattgcatcggctggtggaaaagggatgcaaggagtggcactgagggtaagcagtccaaaagcaatgttctatcgagtgaggattaagggaacacaggacactctcttggacagcacaggaaatcattacttcttaaagtgtcgcatcataggaaaagttgattttatctgtggcagcgcaaaatcactctatgagaagtgtcgtcttcagtcaatagctgagaactatggagcaatagcagcacatcatagggattcaccaacagacgacacaggtttttcttttgtaagttgcagtattagaggatctggcagtgtgtaccttggcagagcatgggggaactactcaagaattatatactccaaatgtaatatggatggcattattaatcctcaagggtggtcagactggaatcattcacataggaagaagactgcagtgtttgctgagtatcaatgcaagggaagaggagcagatagaagacatagggtgccttggtcaaaatcattcagctatccggaagcaagtcctttcctttacaagagcttcatagatggagaccagtggctcagactgtagcattatgatgcaccgattacatgacaattattcattattaatttatatgcttgtttattactatgttacatatcccccaaacgatcattttgatgcttactctttatcttgcaagggatgtttttt

SEQ ID NO: 9702 - protein, 363 aa, Glycine max
  peptide (1)..(363): Ceres Seq. ID no. 15171502
  misc_feature (64)..(358): Pfam Name: Pfam Description:  Pectinesterase
  misc_feature (22)..(363): NCBI GI NO: 15240544 NR Description: pectinesterase family [Arabidopsis thaliana]
  misc_feature (6)..(361): NCBI GI NO: 15238111 NR Description: pectinesterase family [Arabidopsis thaliana]
  misc_feature (62)..(361): NCBI GI NO: 38345478 NR Description: OSJNBa0010H02.16
  misc_feature (6)..(361): NCBI GI NO: 9758778 NR Description: pectin methylesterase-like [Arabidopsis thaliana]
  misc_feature (65)..(363): NCBI GI NO: 34909402 NR Description: putative pectin methylesterase
  misc_feature (40)..(363): NCBI GI NO: 15241163 NR Description: pectinesterase family [Arabidopsis thaliana]
  misc_feature (54)..(361): NCBI GI NO: 9758483 NR Description: pectin methylesterase-like protein
  misc_feature (64)..(362): NCBI GI NO: 15228023 NR Description: pectinesterase family [Arabidopsis thaliana]
  misc_feature (64)..(362): NCBI GI NO: 27754550 NR Description: putative pectinesterase family protein
  misc_feature (63)..(361): NCBI GI NO: 15240781 NR Description: pectinesterase family [Arabidopsis thaliana]
MMMMMMGLVSSRVVFLFVVSIFVIWAQVVDLAEGGAVRNYISWEDLQVNEQRLAVKSSHNQVRVITVNQNGGGHSKTVQGAVNMVPDNNRQRVKIFIFPGIYREKVRVPVTKPYVSFIGKRNRTASPIITWNSKSSDKGPNGTALGTYASATVGVDSDYFCATGITFENSVIASAGGKGMQGVALRVSSPKAMFYRVRIKGTQDTLLDSTGNHYFLKCRIIGKVDFICGSAKSLYEKCRLQSIAENYGAIAAHHRDSPTDDTGFSFVSCSIRGSGSVYLGRAWGNYSRIIYSKCNMDGIINPQGWSDWNHSHRKKTAVFAEYQCKGRGADRRHRVPWSKSFSYPEASPFLYKSFIDGDQWLRL

SEQ ID NO: 9703 - protein, 362 aa, Glycine max
  peptide (1)..(362): Ceres Seq. ID no. 15171503
  misc_feature (63)..(357): Pfam Name: Pfam Description:  Pectinesterase
  misc_feature (21)..(362): NCBI GI NO: 15240544 NR Description: pectinesterase family [Arabidopsis thaliana]
  misc_feature (5)..(360): NCBI GI NO: 15238111 NR Description: pectinesterase family [Arabidopsis thaliana]
  misc_feature (61)..(360): NCBI GI NO: 38345478 NR Description: OSJNBa0010H02.16
  misc_feature (5)..(360): NCBI GI NO: 9758778 NR Description: pectin methylesterase-like [Arabidopsis thaliana]
  misc_feature (64)..(362): NCBI GI NO: 34909402 NR Description: putative pectin methylesterase
  misc_feature (39)..(362): NCBI GI NO: 15241163 NR Description: pectinesterase family [Arabidopsis thaliana]
  misc_feature (53)..(360): NCBI GI NO: 9758483 NR Description: pectin methylesterase-like protein
  misc_feature (63)..(361): NCBI GI NO: 15228023 NR Description: pectinesterase family [Arabidopsis thaliana]
  misc_feature (63)..(361): NCBI GI NO: 27754550 NR Description: putative pectinesterase family protein
  misc_feature (62)..(360): NCBI GI NO: 15240781 NR Description: pectinesterase family [Arabidopsis thaliana]
MMMMMGLVSSRVVFLFVVSIFVIWAQVVDLAEGGAVRNYISWEDLQVNEQRLAVKSSHNQVRVITVNQNGGGHSKTVQGAVNMVPDNNRQRVKIFIFPGIYREKVRVPVTKPYVSFIGKRNRTASPIITWNSKSSDKGPNGTALGTYASATVGVDSDYFCATGITFENSVIASAGGKGMQGVALRVSSPKAMFYRVRIKGTQDTLLDSTGNHYFLKCRIIGKVDFICGSAKSLYEKCRLQSIAENYGAIAAHHRDSPTDDTGFSFVSCSIRGSGSVYLGRAWGNYSRIIYSKCNMDGIINPQGWSDWNHSHRKKTAVFAEYQCKGRGADRRHRVPWSKSFSYPEASPFLYKSFIDGDQWLRL

SEQ ID NO: 9704 - protein, 361 aa, Glycine max
  peptide (1)..(361): Ceres Seq. ID no. 15171504
  misc_feature (62)..(356): Pfam Name: Pfam Description:  Pectinesterase
  misc_feature (20)..(361): NCBI GI NO: 15240544 NR Description: pectinesterase family [Arabidopsis thaliana]
  misc_feature (4)..(359): NCBI GI NO: 15238111 NR Description: pectinesterase family [Arabidopsis thaliana]
  misc_feature (60)..(359): NCBI GI NO: 38345478 NR Description: OSJNBa0010H02.16
  misc_feature (4)..(359): NCBI GI NO: 9758778 NR Description: pectin methylesterase-like [Arabidopsis thaliana]
  misc_feature (63)..(361): NCBI GI NO: 34909402 NR Description: putative pectin methylesterase
  misc_feature (38)..(361): NCBI GI NO: 15241163 NR Description: pectinesterase family [Arabidopsis thaliana]
  misc_feature (52)..(359): NCBI GI NO: 9758483 NR Description: pectin methylesterase-like protein
  misc_feature (62)..(360): NCBI GI NO: 15228023 NR Description: pectinesterase family [Arabidopsis thaliana]
  misc_feature (62)..(360): NCBI GI NO: 27754550 NR Description: putative pectinesterase family protein
  misc_feature (61)..(359): NCBI GI NO: 15240781 NR Description: pectinesterase family [Arabidopsis thaliana]
MMMMGLVSSRVVFLFVVSIFVIWAQVVDLAEGGAVRNYISWEDLQVNEQRLAVKSSHNQVRVITVNQNGGGHSKTVQGAVNMVPDNNRQRVKIFIFPGIYREKVRVPVTKPYVSFIGKRNRTASPIITWNSKSSDKGPNGTALGTYASATVGVDSDYFCATGITFENSVIASAGGKGMQGVALRVSSPKAMFYRVRIKGTQDTLLDSTGNHYFLKCRIIGKVDFICGSAKSLYEKCRLQSIAENYGAIAAHHRDSPTDDTGFSFVSCSIRGSGSVYLGRAWGNYSRIIYSKCNMDGIINPQGWSDWNHSHRKKTAVFAEYQCKGRGADRRHRVPWSKSFSYPEASPFLYKSFIDGDQWLRL

SEQ ID NO: 9705 - DNA, 1486 bp, Glycine max
  misc_feature (1)..(1486): Ceres Seq. ID no. 15172495
gagggcgcatgtgtatgtagcgtgcacccttccacattctttctcgttctcgatctctctcgatttttccttcccttttctccataaacgaggtgcttcagatttgctcacaataggagggaatcgaatcgaatcgaatcgaaaggaaagtgcagaatggatgacatgccgttgccggcgctctttgagcaagcccgcaagatccacgccgcagccaccgattccggcgccgaccaggaggttgtgaagaaggggtgcgaggctctgcatagatgcgaggacatggtcaataatctaggtttgttctctcccaacgagaccaaagaagatatcagcaccacgaatctcaaatacattctggtgccattttatcttgcggagttgacagaaaaaatagcacaggatgacaggatacagattctaaagtcttcccaggcaaaacttaaggagtttatctcattttgtgaagcaatggagctggtcccaaaagaggagttagaatcttacattgatggggcaccaaaaactgttgctgatcagagggccaggaagatcgctaggttcaaacgtcagagagctgcagaatcaaagttgttggaaataaaagagcgaaaggaacgacgtgggcgttctactaaagcagctgccctgtccacccctgttgaggcaggagaggaagaagtattggatgatgatggggaagaagaaagagaggcttggatcactaccatatctttggcaatctgtaaggcactagatatgctggatatgttgaagaaagaggaagagatgctttctgctgtaaaggatagacaatccaaggatggggataaggagttctctaaggatgttcttgatgaacgtgccaagaaagcagaagcttggcatcgtgattctgcagttcgtgcacagtacactaggccatcaccaccaatcacatgtgccactttcgcccaagatgttctagaaggaagagcaaaggcttcacaagaacacgatcacaagcatcaacccctaatatttggaccagctagccttgtaaatggaaacataacaactgagagagaaagaatggcagctcaggtcttccaacctagtcataggatgccaactatgagcattgaggaggccgggctaaaagaaatggaaataatgaacaaatggcaagagagaaatgtcaaactcatggaagaagtcaattcatcttggcacaatgataggaagtcaaagctaggagaagacgatgatgatgaagatgatgatgctgcacaggagaaagcaagggcttgggatgactggaaggatgataatccacgtggtgctggaaataagaaacttaccccttgtgggtaaactgaggtcttccctggcttaagtaacgggcttaggataaaactgtttttaacgaaatcccgtaatttggagttgatatactacttgtagttagattgtgttaagattatatgtataccaggattttcatttg

SEQ ID NO: 9706 - protein, 398 aa, Glycine max
  peptide (1)..(398): Ceres Seq. ID no. 15172496
  misc_feature (4)..(386): Pfam Name: Pfam Description:  TAP42-like family
  misc_feature (1)..(398): NCBI GI NO: 18423459 NR Description: PP2A regulatory subunit; protein id: At5g53000
  misc_feature (1)..(398): NCBI GI NO: 21553995 NR Description: PP2A regulatory subunit [Arabidopsis thaliana]
  misc_feature (1)..(398): NCBI GI NO: 8809589 NR Description: PP2A regulatory subunit [Arabidopsis thaliana]
  misc_feature (3)..(398): NCBI GI NO: 29367365 NR Description: PP2A regulatory subunit-like protein
  misc_feature (3)..(218): NCBI GI NO: 7489459 NR Description: chilling-induced protein - rice
  misc_feature (182)..(398): NCBI GI NO: 7489459 NR Description: chilling-induced protein - rice
  misc_feature (1)..(224): NCBI GI NO: 19075479 NR Description: putative phosphatase component
  misc_feature (299)..(391): NCBI GI NO: 19075479 NR Description: putative phosphatase component
  misc_feature (6)..(213): NCBI GI NO: 4557663 NR Description: immunoglobulin
  misc_feature (361)..(393): NCBI GI NO: 4557663 NR Description: immunoglobulin
MDDMPLPALFEQARKIHAAATDSGADQEVVKKGCEALHRCEDMVNNLGLFSPNETKEDISTTNLKYILVPFYLAELTEKIAQDDRIQILKSSQAKLKEFISFCEAMELVPKEELESYIDGAPKTVADQRARKIARFKRQRAAESKLLEIKERKERRGRSTKAAALSTPVEAGEEEVLDDDGEEEREAWITTISLAICKALDMLDMLKKEEEMLSAVKDRQSKDGDKEFSKDVLDERAKKAEAWHRDSAVRAQYTRPSPPITCATFAQDVLEGRAKASQEHDHKHQPLIFGPASLVNGNITTERERMAAQVFQPSHRMPTMSIEEAGLKEMEIMNKWQERNVKLMEEVNSSWHNDRKSKLGEDDDDEDDDAAQEKARAWDDWKDDNPRGAGNKKLTPCG

SEQ ID NO: 9707 - protein, 395 aa, Glycine max
  peptide (1)..(395): Ceres Seq. ID no. 15172497
  misc_feature (1)..(383): Pfam Name: Pfam Description:  TAP42-like family
  misc_feature (1)..(395): NCBI GI NO: 18423459 NR Description: PP2A regulatory subunit; protein id: At5g53000
  misc_feature (1)..(395): NCBI GI NO: 21553995 NR Description: PP2A regulatory subunit [Arabidopsis thaliana]
  misc_feature (1)..(395): NCBI GI NO: 8809589 NR Description: PP2A regulatory subunit [Arabidopsis thaliana]
  misc_feature (1)..(395): NCBI GI NO: 29367365 NR Description: PP2A regulatory subunit-like protein
  misc_feature (1)..(215): NCBI GI NO: 7489459 NR Description: chilling-induced protein - rice
  misc_feature (179)..(395): NCBI GI NO: 7489459 NR Description: chilling-induced protein - rice
  misc_feature (1)..(221): NCBI GI NO: 19075479 NR Description: putative phosphatase component
  misc_feature (296)..(388): NCBI GI NO: 19075479 NR Description: putative phosphatase component
  misc_feature (3)..(210): NCBI GI NO: 4557663 NR Description: immunoglobulin
  misc_feature (358)..(390): NCBI GI NO: 4557663 NR Description: immunoglobulin
MPLPALFEQARKIHAAATDSGADQEVVKKGCEALHRCEDMVNNLGLFSPNETKEDISTTNLKYILVPFYLAELTEKIAQDDRIQILKSSQAKLKEFISFCEAMELVPKEELESYIDGAPKTVADQRARKIARFKRQRAAESKLLEIKERKERRGRSTKAAALSTPVEAGEEEVLDDDGEEEREAWITTISLAICKALDMLDMLKKEEEMLSAVKDRQSKDGDKEFSKDVLDERAKKAEAWHRDSAVRAQYTRPSPPITCATFAQDVLEGRAKASQEHDHKHQPLIFGPASLVNGNITTERERMAAQVFQPSHRMPTMSIEEAGLKEMEIMNKWQERNVKLMEEVNSSWHNDRKSKLGEDDDDEDDDAAQEKARAWDDWKDDNPRGAGNKKLTPCG

SEQ ID NO: 9708 - protein, 356 aa, Glycine max
  peptide (1)..(356): Ceres Seq. ID no. 15172498
  misc_feature (1)..(344): Pfam Name: Pfam Description:  TAP42-like family
  misc_feature (1)..(356): NCBI GI NO: 18423459 NR Description: PP2A regulatory subunit; protein id: At5g53000
  misc_feature (1)..(356): NCBI GI NO: 21553995 NR Description: PP2A regulatory subunit [Arabidopsis thaliana]
  misc_feature (1)..(356): NCBI GI NO: 8809589 NR Description: PP2A regulatory subunit [Arabidopsis thaliana]
  misc_feature (1)..(356): NCBI GI NO: 29367365 NR Description: PP2A regulatory subunit-like protein
  misc_feature (1)..(176): NCBI GI NO: 7489459 NR Description: chilling-induced protein - rice
  misc_feature (140)..(356): NCBI GI NO: 7489459 NR Description: chilling-induced protein - rice
  misc_feature (1)..(182): NCBI GI NO: 19075479 NR Description: putative phosphatase component
  misc_feature (257)..(349): NCBI GI NO: 19075479 NR Description: putative phosphatase component
  misc_feature (1)..(171): NCBI GI NO: 4557663 NR Description: immunoglobulin
  misc_feature (319)..(351): NCBI GI NO: 4557663 NR Description: immunoglobulin
MVNNLGLFSPNETKEDISTTNLKYILVPFYLAELTEKIAQDDRIQILKSSQAKLKEFISFCEAMELVPKEELESYIDGAPKTVADQRARKIARFKRQRAAESKLLEIKERKERRGRSTKAAALSTPVEAGEEEVLDDDGEEEREAWITTISLAICKALDMLDMLKKEEEMLSAVKDRQSKDGDKEFSKDVLDERAKKAEAWHRDSAVRAQYTRPSPPITCATFAQDVLEGRAKASQEHDHKHQPLIFGPASLVNGNITTERERMAAQVFQPSHRMPTMSIEEAGLKEMEIMNKWQERNVKLMEEVNSSWHNDRKSKLGEDDDDEDDDAAQEKARAWDDWKDDNPRGAGNKKLTPCG

SEQ ID NO: 9709 - DNA, 1258 bp, Glycine max
  misc_feature (1)..(1258): Ceres Seq. ID no. 15170698
aaaaagacgatgatgtcgtcgcagaatgagaataggtcgttggaggaagctggaccctccggctcctccgatggaggggtaggagtgaattggctctgcatgagccctaagcgagatcacaaccccgaaaactatgacgaccttcaattcgagttcaatcctaatctcttcgcctctctcgagcactatttgcctcctcatatgctcaacctctcacgcgatgttaagcttcactacatcaggaacattcttcttcgctatttgcctgagaatgaccgcaactggattcaaaagctgagggaatacaggctaaagatcatattgaattatccatcgttgcataaggagatatttactatggatgctgagaactttttcgtaccatcatttctcagagcaattaaagaaaacacagaagcgaattttagaagtataatggctgaaccttgtaaaggagtttatacatttgaaatgcttcaaccgcaattttgtaaaaaactgatgtctgaggtggatcattttgaaagatgggtccatggtaccaaactcaaaatcatgcgtcctaatgcaatgaataaaaataaacatggtgttatccttgatgattttgcctttgaagccatgcttgacagatttatgtgtgatttcatacgtcctatatctcaagttttctaccctgaacttggtggatcctcattggactctcaccatggttttgttgttgaatatggaattaataaggatgtggaacttggcttacatgaggatgaggcagaagtcaccttaaatgtttgcttgggaaaagaattttctggtggagaactgttcttccagggtgttcgatgtgatgcacatgtaacatcaaatgcgcaaccagaggaggccttcaattattcccatgttccaggacacgcaattcttcatcctggtcgtaaccggcatggtgctagacctacaacatctgggaatcggatgaatttaattctctggtgtagaagttcggtgtttagagagttgaaaagatatcagagagatttttatagctggtgtggagaatgcaaacagaagaaggcggagagagtgtgtttgtcagttatggccaccaaacaggaattactgaagagcgaaatataattggcctcgtgaactttcacatgcaaattatgtttgtatagtttattcccaccattgaacttcttttctgtttctagattatggattatttttaacaaaatgaaatatattgaagttgcaagtc

SEQ ID NO: 9710 - protein, 377 aa, Glycine max
  peptide (1)..(377): Ceres Seq. ID no. 15170699
  misc_feature (234)..(333): Pfam Name: II Pfam Description: 2OG-Fe
  misc_feature (6)..(224): NCBI GI NO: 15219973 NR Description: oxidoreductase, 2OG-Fe(II) oxygenase family
  misc_feature (223)..(374): NCBI GI NO: 15219973 NR Description: oxidoreductase, 2OG-Fe(II) oxygenase family
  misc_feature (32)..(374): NCBI GI NO: 18401806 NR Description: oxidoreductase, 2OG-Fe(II) oxygenase family
  misc_feature (14)..(374): NCBI GI NO: 34914494 NR Description: B1080D07.28
  misc_feature (6)..(224): NCBI GI NO: 25518648 NR Description: hypothetical protein F19G10.9
  misc_feature (223)..(374): NCBI GI NO: 25518648 NR Description: hypothetical protein F19G10.9
  misc_feature (32)..(374): NCBI GI NO: 15239932 NR Description: expressed protein [Arabidopsis thaliana]
  misc_feature (36)..(374): NCBI GI NO: 15221946 NR Description: expressed protein [Arabidopsis thaliana]
  misc_feature (223)..(376): NCBI GI NO: 15221938 NR Description: expressed protein [Arabidopsis thaliana]
  misc_feature (68)..(193): NCBI GI NO: 15221938 NR Description: expressed protein [Arabidopsis thaliana]
KKTMMSSQNENRSLEEAGPSGSSDGGVGVNWLCMSPKRDHNPENYDDLQFEFNPNLFASLEHYLPPHMLNLSRDVKLHYIRNILLRYLPENDRNWIQKLREYRLKIILNYPSLHKEIFTMDAENFFVPSFLRAIKENTEANFRSIMAEPCKGVYTFEMLQPQFCKKLMSEVDHFERWVHGTKLKIMRPNAMNKNKHGVILDDFAFEAMLDRFMCDFIRPISQVFYPELGGSSLDSHHGFVVEYGINKDVELGLHEDEAEVTLNVCLGKEFSGGELFFQGVRCDAHVTSNAQPEEAFNYSHVPGHAILHPGRNRHGARPTTSGNRMNLILWCRSSVFRELKRYQRDFYSWCGECKQKKAERVCLSVMATKQELLKSEI

SEQ ID NO: 9711 - protein, 374 aa, Glycine max
  peptide (1)..(374): Ceres Seq. ID no. 15170700
  misc_feature (231)..(330): Pfam Name: II Pfam Description: 2OG-Fe
  misc_feature (3)..(221): NCBI GI NO: 15219973 NR Description: oxidoreductase, 2OG-Fe(II) oxygenase family
  misc_feature (220)..(371): NCBI GI NO: 15219973 NR Description: oxidoreductase, 2OG-Fe(II) oxygenase family
  misc_feature (29)..(371): NCBI GI NO: 18401806 NR Description: oxidoreductase, 2OG-Fe(II) oxygenase family
  misc_feature (11)..(371): NCBI GI NO: 34914494 NR Description: B1080D07.28
  misc_feature (3)..(221): NCBI GI NO: 25518648 NR Description: hypothetical protein F19G10.9
  misc_feature (220)..(371): NCBI GI NO: 25518648 NR Description: hypothetical protein F19G10.9
  misc_feature (29)..(371): NCBI GI NO: 15239932 NR Description: expressed protein [Arabidopsis thaliana]
  misc_feature (33)..(371): NCBI GI NO: 15221946 NR Description: expressed protein [Arabidopsis thaliana]
  misc_feature (220)..(373): NCBI GI NO: 15221938 NR Description: expressed protein [Arabidopsis thaliana]
  misc_feature (65)..(190): NCBI GI NO: 15221938 NR Description: expressed protein [Arabidopsis thaliana]
MMSSQNENRSLEEAGPSGSSDGGVGVNWLCMSPKRDHNPENYDDLQFEFNPNLFASLEHYLPPHMLNLSRDVKLHYIRNILLRYLPENDRNWIQKLREYRLKIILNYPSLHKEIFTMDAENFFVPSFLRAIKENTEANFRSIMAEPCKGVYTFEMLQPQFCKKLMSEVDHFERWVHGTKLKIMRPNAMNKNKHGVILDDFAFEAMLDRFMCDFIRPISQVFYPELGGSSLDSHHGFVVEYGINKDVELGLHEDEAEVTLNVCLGKEFSGGELFFQGVRCDAHVTSNAQPEEAFNYSHVPGHAILHPGRNRHGARPTTSGNRMNLILWCRSSVFRELKRYQRDFYSWCGECKQKKAERVCLSVMATKQELLKSEI

SEQ ID NO: 9712 - protein, 373 aa, Glycine max
  peptide (1)..(373): Ceres Seq. ID no. 15170701
  misc_feature (230)..(329): Pfam Name: II Pfam Description: 2OG-Fe
  misc_feature (2)..(220): NCBI GI NO: 15219973 NR Description: oxidoreductase, 2OG-Fe(II) oxygenase family
  misc_feature (219)..(370): NCBI GI NO: 15219973 NR Description: oxidoreductase, 2OG-Fe(II) oxygenase family
  misc_feature (28)..(370): NCBI GI NO: 18401806 NR Description: oxidoreductase, 2OG-Fe(II) oxygenase family
  misc_feature (10)..(370): NCBI GI NO: 34914494 NR Description: B1080D07.28
  misc_feature (2)..(220): NCBI GI NO: 25518648 NR Description: hypothetical protein F19G10.9
  misc_feature (219)..(370): NCBI GI NO: 25518648 NR Description: hypothetical protein F19G10.9
  misc_feature (28)..(370): NCBI GI NO: 15239932 NR Description: expressed protein [Arabidopsis thaliana]
  misc_feature (32)..(370): NCBI GI NO: 15221946 NR Description: expressed protein [Arabidopsis thaliana]
  misc_feature (219)..(372): NCBI GI NO: 15221938 NR Description: expressed protein [Arabidopsis thaliana]
  misc_feature (64)..(189): NCBI GI NO: 15221938 NR Description: expressed protein [Arabidopsis thaliana]
MSSQNENRSLEEAGPSGSSDGGVGVNWLCMSPKRDHNPENYDDLQFEFNPNLFASLEHYLPPHMLNLSRDVKLHYIRNILLRYLPENDRNWIQKLREYRLKIILNYPSLHKEIFTMDAENFFVPSFLRAIKENTEANFRSIMAEPCKGVYTFEMLQPQFCKKLMSEVDHFERWVHGTKLKIMRPNAMNKNKHGVILDDFAFEAMLDRFMCDFIRPISQVFYPELGGSSLDSHHGFVVEYGINKDVELGLHEDEAEVTLNVCLGKEFSGGELFFQGVRCDAHVTSNAQPEEAFNYSHVPGHAILHPGRNRHGARPTTSGNRMNLILWCRSSVFRELKRYQRDFYSWCGECKQKKAERVCLSVMATKQELLKSEI

SEQ ID NO: 9713 - DNA, 1226 bp, Glycine max
  misc_feature (1)..(1226): Ceres Seq. ID no. 15178228
agtaaagaaaaaaaaagaagagaaaaccctattcactctgaaagtggcgaagatgagtttgggaaccgcggaggaggaatcgggttccgaaatccacatcccggcggaaatcgactggcacatgctggacaagtcaaaattcttcttcctgggtgcggccttattctccggcgtctcatgcgcactctatcccatggtggtgttgaagacgcggcaacaagtttcctcctcacgtttctcctgcctcaacatctcctgcgccattctccgccacgagggattccgcggcttctacaagggcttccccacctccctcatgggcaccatccccgcgcgtgccctctacatggcctccctcgagttcaccaagaccaacgttggcaccgctttcgtccaattcggcttctccgaaacctccgccgttgcggctgccaacgccgccgcgggcgtcacctccgccatggcggcgcagctcgtgtggacccccatcgacgtcgtgagtcagcggctcatggttcaggggagtggtgggagcaaaaccgtgctcgccaatctcaattctgaaaattacagaaacgggtttgatgcttttaggaaaattctgtgtgccgatggagcgagagggttttatagagggtttgggatttctatattgacttatgcgccttcaaatgctgtttggtggacttcttattctatggttcatagactcatttggggtgcttttggttcttacttggggaataataatttggggggagggtttaggcctgattcgaaggcaatggtggcggttcaagggttgagtgcggttatggcaagtggggtatctgcaattgtgacaatgccgcttgataccattaaaacgaggttgcaggtgttggatcttgaagagaatgggagaagaaggcctttgacttttgttcagacggtgaggaatttggtgaaggaaggtggtttggttgcttgttacagaggattgggtcccagatgggcttccatgtccatgtctgccacaactatgattactacatatgaatttttgaaacgaatgtctaccaagagtcaagaggatttcacttcatcataggccaggcagtgaaacattgttaggaattaggagcaacaatcaacttgtttctttgcttggatttttctctgtcagttgtactagtctagtctacctcatcggacactaaatacaatatgatgatgagagattgtac

SEQ ID NO: 9714 - protein, 362 aa, Glycine max
  peptide (1)..(362): Ceres Seq. ID no. 15178229
  misc_feature (18)..(361): NCBI GI NO: 18410193 NR Description: mitochondrial carrier protein family
  misc_feature (18)..(357): NCBI GI NO: 21594326 NR Description: mitochondrial carrier-like protein
  misc_feature (18)..(357): NCBI GI NO: 15239622 NR Description: mitochondrial carrier protein family
  misc_feature (27)..(357): NCBI GI NO: 7486721 NR Description: hypothetical protein F9D12
  misc_feature (36)..(357): NCBI GI NO: 21326111 NR Description: putative mitochondrial carrier protein
  misc_feature (36)..(351): NCBI GI NO: 18417739 NR Description: mitochondrial carrier protein family
  misc_feature (36)..(351): NCBI GI NO: 21553961 NR Description: putative mitochondrial carrier protein
  misc_feature (22)..(243): NCBI GI NO: 37534064 NR Description: putative Tricarboxylate transport protein
  misc_feature (31)..(357): NCBI GI NO: 12061241 NR Description: 36I5.1 [Oryza sativa (japonica cultivar-group)]
  misc_feature (190)..(354): NCBI GI NO: 37534064 NR Description: putative Tricarboxylate transport protein
VKKKKEEKTLFTLKVAKMSLGTAEEESGSEIHIPAEIDWHMLDKSKFFFLGAALFSGVSCALYPMVVLKTRQQVSSSRFSCLNISCAILRHEGFRGFYKGFPTSLMGTIPARALYMASLEFTKTNVGTAFVQFGFSETSAVAAANAAAGVTSAMAAQLVWTPIDVVSQRLMVQGSGGSKTVLANLNSENYRNGFDAFRKILCADGARGFYRGFGISILTYAPSNAVWWTSYSMVHRLIWGAFGSYLGNNNLGGGFRPDSKAMVAVQGLSAVMASGVSAIVTMPLDTIKTRLQVLDLEENGRRRPLTFVQTVRNLVKEGGLVACYRGLGPRWASMSMSATTMITTYEFLKRMSTKSQEDFTSS

SEQ ID NO: 9715 - protein, 345 aa, Glycine max
  peptide (1)..(345): Ceres Seq. ID no. 15178230
  misc_feature (1)..(344): NCBI GI NO: 18410193 NR Description: mitochondrial carrier protein family
  misc_feature (1)..(340): NCBI GI NO: 21594326 NR Description: mitochondrial carrier-like protein
  misc_feature (1)..(340): NCBI GI NO: 15239622 NR Description: mitochondrial carrier protein family
  misc_feature (10)..(340): NCBI GI NO: 7486721 NR Description: hypothetical protein F9D12
  misc_feature (19)..(340): NCBI GI NO: 21326111 NR Description: putative mitochondrial carrier protein
  misc_feature (19)..(334): NCBI GI NO: 18417739 NR Description: mitochondrial carrier protein family
  misc_feature (19)..(334): NCBI GI NO: 21553961 NR Description: putative mitochondrial carrier protein
  misc_feature (5)..(226): NCBI GI NO: 37534064 NR Description: putative Tricarboxylate transport protein
  misc_feature (14)..(340): NCBI GI NO: 12061241 NR Description: 36I5.1 [Oryza sativa (japonica cultivar-group)]
  misc_feature (173)..(337): NCBI GI NO: 37534064 NR Description: putative Tricarboxylate transport protein
MSLGTAEEESGSEIHIPAEIDWHMLDKSKFFFLGAALFSGVSCALYPMVVLKTRQQVSSSRFSCLNISCAILRHEGFRGFYKGFPTSLMGTIPARALYMASLEFTKTNVGTAFVQFGFSETSAVAAANAAAGVTSAMAAQLVWTPIDVVSQRLMVQGSGGSKTVLANLNSENYRNGFDAFRKILCADGARGFYRGFGISILTYAPSNAVWWTSYSMVHRLIWGAFGSYLGNNNLGGGFRPDSKAMVAVQGLSAVMASGVSAIVTMPLDTIKTRLQVLDLEENGRRRPLTFVQTVRNLVKEGGLVACYRGLGPRWASMSMSATTMITTYEFLKRMSTKSQEDFTSS

SEQ ID NO: 9716 - protein, 322 aa, Glycine max
  peptide (1)..(322): Ceres Seq. ID no. 15178231
  misc_feature (1)..(321): NCBI GI NO: 18410193 NR Description: mitochondrial carrier protein family
  misc_feature (1)..(317): NCBI GI NO: 21594326 NR Description: mitochondrial carrier-like protein
  misc_feature (1)..(317): NCBI GI NO: 15239622 NR Description: mitochondrial carrier protein family
  misc_feature (1)..(317): NCBI GI NO: 7486721 NR Description: hypothetical protein F9D12
  misc_feature (1)..(317): NCBI GI NO: 21326111 NR Description: putative mitochondrial carrier protein
  misc_feature (1)..(311): NCBI GI NO: 18417739 NR Description: mitochondrial carrier protein family
  misc_feature (1)..(311): NCBI GI NO: 21553961 NR Description: putative mitochondrial carrier protein
  misc_feature (1)..(203): NCBI GI NO: 37534064 NR Description: putative Tricarboxylate transport protein
  misc_feature (1)..(317): NCBI GI NO: 12061241 NR Description: 36I5.1 [Oryza sativa (japonica cultivar-group)]
  misc_feature (150)..(314): NCBI GI NO: 37534064 NR Description: putative Tricarboxylate transport protein
MLDKSKFFFLGAALFSGVSCALYPMVVLKTRQQVSSSRFSCLNISCAILRHEGFRGFYKGFPTSLMGTIPARALYMASLEFTKTNVGTAFVQFGFSETSAVAAANAAAGVTSAMAAQLVWTPIDVVSQRLMVQGSGGSKTVLANLNSENYRNGFDAFRKILCADGARGFYRGFGISILTYAPSNAVWWTSYSMVHRLIWGAFGSYLGNNNLGGGFRPDSKAMVAVQGLSAVMASGVSAIVTMPLDTIKTRLQVLDLEENGRRRPLTFVQTVRNLVKEGGLVACYRGLGPRWASMSMSATTMITTYEFLKRMSTKSQEDFTSS

SEQ ID NO: 9717 - DNA, 1953 bp, Glycine max
  misc_feature (1)..(1953): Ceres Seq. ID no. 14308493
aaaattttcaaagtcgaagcgagaacttgccatttcgagggttttagggttagggttttctaaaattgcaagaacatgggtttcaacattcaaccctatgggattcagtccatgctcaaggaaggccataagcacctttctggcctggatgaagcggttctcaagaacatcgacgcctgcaaacaactttccactatcactcgaacttccctcggtcccaatgggatgaataagatggttataaatcacttggacaagctttttgtcacgaacgatgctgggacgattgtgaatgaacttgaagttcagcatcctgctgccaaggttttggttttggctgggaaggctcaacaagaggagattggggatggagctaatttaactatttcatttgctggggagctcctgcagggtgccgaggaacttatcaggatgggtttgcatccgagcgagatcatcagtggatacactaaagcaatcaacaagactgttcaaatattggatgaactagttgaggatggttctgagaatatggatgttcgtgataaggaacaagttatttcaagaatgaaagcagccgttgccagcaagcaatttggtcaagaagatatcatatgttcgcttgttgctgatgcatgcatccaagtgtgccccaaaaaccctgcaaactttaatgtggacaacgttcgtgttgcaaagctcttgggagggggcttgcataacagtactgtagttcgaggattggttctgaaaagtgatgctgtcgggactataaagcaagcagaaaaggcgaaggttgctgtgtttgctagtggtgttgatacatctgcaactgagactaaaggaactgtcctcatacatacagctgagcagctagaaaattattcaaaaactgaagaggctaaagtagaggagctcatcaaggcagtagcagattctggcgccaaagtgattgtcagtggaggagcagtaggagaaatggctttgcatttctgtgagcgttacaagcttatggttctgaaaatcagctcaaagtttgaactacgtcgattttgccggacaaccggctctgttgccatgctaaaactttgccaaccaaacccagatgatcttggatatgtagattccgtttcagttcaggaaattggtggtgtcagggtgaccattgtgaaaaatgaagagggtggaaattctgtagccactgttgttttacgaggaagtactgatagtatactagatgatcttgaaagagcagtggatgatggagtgaacacttacaaggcaatgtgcagggatagccgctttgtacctggagctgcagctactgaaattgagttagctaaaagggtgaaagacttttccttcaaggagacagggttggatcagtatgctattgcaaaatttgctgaaagttttgaaatgattcctagaactttggctgagaatgctggcctaaatgcaatggagatcatatcttctctgtatgcagaacatgcatctggaaatgccaaagttggcattgatttggaagaaggcatatgcaaggatgtctcaaccctgagcatttgggatctccatgtgactaagttatttgctcttaaatatgctgcagatgctgcatgcactgtactacgtgtggaccagattattatggcaaaaccagctggtggtccaaggagagaacagcctgctggtggtatggatgaagactaaaattattgtgggaattgatggtttgctttggtcatgtttgtatctcagcatgatggcttgaatttgccttaggcatgttttcttgatttagactttttagtagtggtggcgatcttaacaaattttgaattttgttttgctatgaaatactaagagatgtggtctgtaaatttacattttattcatagcgttattgtgagtgatgttaatttgctgagcatggcctttgtttgagatttc

SEQ ID NO: 9718 - protein, 545 aa, Glycine max
  peptide (1)..(545): Ceres Seq. ID no. 14308494
  misc_feature (38)..(529): Pfam Name: Pfam Description:  TCP-1/cpn60 chaperonin family
  misc_feature (1)..(545): NCBI GI NO: 18396719 NR Description: chaperonin, putative [Arabidopsis thaliana]
  misc_feature (1)..(524): NCBI GI NO: 6223641 NR Description: putative T-complex protein 1, theta subunit
  misc_feature (10)..(545): NCBI GI NO: 17066726 NR Description: CCT chaperonin theta subunit
  misc_feature (9)..(545): NCBI GI NO: 29791676 NR Description: Similar to chaperonin containing TCP1, subunit 8
  misc_feature (9)..(545): NCBI GI NO: 28829459 NR Description: similar to Physarum polycephalum (Slime mold)
  misc_feature (9)..(545): NCBI GI NO: 27924345 NR Description: Similar to chaperonin containing TCP1, subunit 8
  misc_feature (9)..(545): NCBI GI NO: 1174621 NR Description: T-COMPLEX PROTEIN 1, THETA SUBUNIT
  misc_feature (9)..(545): NCBI GI NO: 31560613 NR Description: chaperonin subunit 8 (theta) [Mus musculus]
  misc_feature (9)..(545): NCBI GI NO: 9988062 NR Description: T-complex protein 1, theta subunit
  misc_feature (9)..(545): NCBI GI NO: 6005727 NR Description: chaperonin containing TCP1, subunit 8
MGFNIQPYGIQSMLKEGHKHLSGLDEAVLKNIDACKQLSTITRTSLGPNGMNKMVINHLDKLFVTNDAGTIVNELEVQHPAAKVLVLAGKAQQEEIGDGANLTISFAGELLQGAEELIRMGLHPSEIISGYTKAINKTVQILDELVEDGSENMDVRDKEQVISRMKAAVASKQFGQEDIICSLVADACIQVCPKNPANFNVDNVRVAKLLGGGLHNSTVVRGLVLKSDAVGTIKQAEKAKVAVFASGVDTSATETKGTVLIHTAEQLENYSKTEEAKVEELIKAVADSGAKVIVSGGAVGEMALHFCERYKLMVLKISSKFELRRFCRTTGSVAMLKLCQPNPDDLGYVDSVSVQEIGGVRVTIVKNEEGGNSVATVVLRGSTDSILDDLERAVDDGVNTYKAMCRDSRFVPGAAATEIELAKRVKDFSFKETGLDQYAIAKFAESFEMIPRTLAENAGLNAMEIISSLYAEHASGNAKVGIDLEEGICKDVSTLSIWDLHVTKLFALKYAADAACTVLRVDQIIMAKPAGGPRREQPAGGMDED

SEQ ID NO: 9719 - protein, 533 aa, Glycine max
  peptide (1)..(533): Ceres Seq. ID no. 14308495
  misc_feature (26)..(517): Pfam Name: Pfam Description:  TCP-1/cpn60 chaperonin family
  misc_feature (1)..(533): NCBI GI NO: 18396719 NR Description: chaperonin, putative [Arabidopsis thaliana]
  misc_feature (1)..(512): NCBI GI NO: 6223641 NR Description: putative T-complex protein 1, theta subunit
  misc_feature (1)..(533): NCBI GI NO: 17066726 NR Description: CCT chaperonin theta subunit
  misc_feature (1)..(533): NCBI GI NO: 29791676 NR Description: Similar to chaperonin containing TCP1, subunit 8
  misc_feature (1)..(533): NCBI GI NO: 28829459 NR Description: similar to Physarum polycephalum (Slime mold)
  misc_feature (1)..(533): NCBI GI NO: 27924345 NR Description: Similar to chaperonin containing TCP1, subunit 8
  misc_feature (1)..(533): NCBI GI NO: 1174621 NR Description: T-COMPLEX PROTEIN 1, THETA SUBUNIT
  misc_feature (1)..(533): NCBI GI NO: 31560613 NR Description: chaperonin subunit 8 (theta) [Mus musculus]
  misc_feature (1)..(533): NCBI GI NO: 9988062 NR Description: T-complex protein 1, theta subunit
  misc_feature (1)..(533): NCBI GI NO: 6005727 NR Description: chaperonin containing TCP1, subunit 8
MLKEGHKHLSGLDEAVLKNIDACKQLSTITRTSLGPNGMNKMVINHLDKLFVTNDAGTIVNELEVQHPAAKVLVLAGKAQQEEIGDGANLTISFAGELLQGAEELIRMGLHPSEIISGYTKAINKTVQILDELVEDGSENMDVRDKEQVISRMKAAVASKQFGQEDIICSLVADACIQVCPKNPANFNVDNVRVAKLLGGGLHNSTVVRGLVLKSDAVGTIKQAEKAKVAVFASGVDTSATETKGTVLIHTAEQLENYSKTEEAKVEELIKAVADSGAKVIVSGGAVGEMALHFCERYKLMVLKISSKFELRRFCRTTGSVAMLKLCQPNPDDLGYVDSVSVQEIGGVRVTIVKNEEGGNSVATVVLRGSTDSILDDLERAVDDGVNTYKAMCRDSRFVPGAAATEIELAKRVKDFSFKETGLDQYAIAKFAESFEMIPRTLAENAGLNAMEIISSLYAEHASGNAKVGIDLEEGICKDVSTLSIWDLHVTKLFALKYAADAACTVLRVDQIIMAKPAGGPRREQPAGGMDED

SEQ ID NO: 9720 - protein, 495 aa, Glycine max
  peptide (1)..(495): Ceres Seq. ID no. 14308496
  misc_feature (1)..(479): Pfam Name: Pfam Description:  TCP-1/cpn60 chaperonin family
  misc_feature (1)..(495): NCBI GI NO: 18396719 NR Description: chaperonin, putative [Arabidopsis thaliana]
  misc_feature (1)..(474): NCBI GI NO: 6223641 NR Description: putative T-complex protein 1, theta subunit
  misc_feature (1)..(495): NCBI GI NO: 17066726 NR Description: CCT chaperonin theta subunit
  misc_feature (1)..(495): NCBI GI NO: 29791676 NR Description: Similar to chaperonin containing TCP1, subunit 8
  misc_feature (1)..(495): NCBI GI NO: 28829459 NR Description: similar to Physarum polycephalum (Slime mold)
  misc_feature (1)..(495): NCBI GI NO: 27924345 NR Description: Similar to chaperonin containing TCP1, subunit 8
  misc_feature (1)..(495): NCBI GI NO: 1174621 NR Description: T-COMPLEX PROTEIN 1, THETA SUBUNIT
  misc_feature (1)..(495): NCBI GI NO: 31560613 NR Description: chaperonin subunit 8 (theta) [Mus musculus]
  misc_feature (1)..(495): NCBI GI NO: 9988062 NR Description: T-complex protein 1, theta subunit
  misc_feature (1)..(495): NCBI GI NO: 6005727 NR Description: chaperonin containing TCP1, subunit 8
MNKMVINHLDKLFVTNDAGTIVNELEVQHPAAKVLVLAGKAQQEEIGDGANLTISFAGELLQGAEELIRMGLHPSEIISGYTKAINKTVQILDELVEDGSENMDVRDKEQVISRMKAAVASKQFGQEDIICSLVADACIQVCPKNPANFNVDNVRVAKLLGGGLHNSTVVRGLVLKSDAVGTIKQAEKAKVAVFASGVDTSATETKGTVLIHTAEQLENYSKTEEAKVEELIKAVADSGAKVIVSGGAVGEMALHFCERYKLMVLKISSKFELRRFCRTTGSVAMLKLCQPNPDDLGYVDSVSVQEIGGVRVTIVKNEEGGNSVATVVLRGSTDSILDDLERAVDDGVNTYKAMCRDSRFVPGAAATEIELAKRVKDFSFKETGLDQYAIAKFAESFEMIPRTLAENAGLNAMEIISSLYAEHASGNAKVGIDLEEGICKDVSTLSIWDLHVTKLFALKYAADAACTVLRVDQIIMAKPAGGPRREQPAGGMDED

SEQ ID NO: 9721 - DNA, 2100 bp, Glycine max
  misc_feature (1)..(2100): Ceres Seq. ID no. 15176685
ttttttctggtgattggaaacattttttttttttgaggaagataataatgggagcggtttgttcggctggtatggtggagaaaaatggtgaacttggagggaagagtttggggttttctgggaagcttaagaaggaaaatagctttgtgaatcggagagaagctttttcagattcaaggtctaatagtggtcatgatagaaagaaaaagaagcatgatactgggttttcccgtgaacttggtctatcgattccttcacctgggggaaaacaggtgaaccagaggggttcttttctgggaaaagcaggtgagagagcagtggaagttctggacacaattggaagtggcatgccaaagttaaacactaatactgggtttgtctctggcacaacttttagagggaataagatatcaatactggcattcgaagtagctaatacaataaccaaaggagcaattttgtttcaatcacttgctgaagaaaacattcagttccttaaaaatgaggttttacaatcggagggggttcagctattggtatcgaatgatgtggagaagttaataactcttgctgaggctgacaaaagggaagaactcaatgtcttctcaagggaagtaattaggtttggaaatatgtgtaaagatccacagtggcacaacctagacagatatttctcaagattagactttgatgtcctggatgacaaacgatatcaggaagatgcagaaaagacgatgcaggagtttaccagcctagttcggaatactgctgaattataccatgagttaaatgcttatgaacgttttgaacaagattatctgcaaaagattaaggaaatggagtccttaaatcttcctctaaaaggggagagtatcacaatgtttcaaagtgagctaaagcaccaaagaaagcttgtgaggagcttgaaaaagaagtctctttggtccagaactttggaagagatagttgaaaagcttgtagatattgttacctatatacatcaagcaatttatgagttcgctggaaatcatggtacagctgcaaccaagcacagtgagggttctgaaagactaggagaagctggtcttgcactgcactatgctaacatcatcaatcagataaatatggttgcatctcgcccaactgctcttcctccaaacaccagagacacattgtatcatggtttgcccaacaatattaaggctgctcttccatcccagttgcaaaccattggtgacatgaaagagctctccatcactcggatcaaagctgaaatggataagattcttcagtggcttgcaccacttgctacaaatacagtcaaagcacatcaaggtttcggatgggttggtgaatgggcaaacgcaagtaatgactttggtgataacacctccaaagaaagtaacctgattcgcctggagacactttattacgctgataagaggaagatagatgtttacatcattgaattgttggcatggcttcaccatttgattagctctgtaaaatctagacagaataccttgagaccaatgcctacaacacggtctcctccaaaaggactcgaacttcagtctaagatgcgacagtttttaattctatctgtggatagtagcaacaagccgttgggaactcaaatttctcatgaggataggagactattggaggaggttattgcaaggagaaagagtccaggacttagcaaaagtgaggatcttggtttggccaagaaaagacacgtcaaacatttgcaagtgaccaaaagtgctgggagttcacctgccaaggaattcttcggtacaagacaagtctttaaccaccaaaactataacgttttggatattatggatgggttgggttactgaaatcttcatctacactcaattgtggttctcacttgtcacctctcagctctgtttttctgctagaattcttactagcccagtctttcttaaggataatattcaacattcatttctatacatagctctagttatgtatatatctatataaacgactaacgccagattcttttaactttataaattaattttgtacaggggatgaaggaaatagttgaattccatttctataaaaaag

SEQ ID NO: 9722 - protein, 620 aa, Glycine max
  peptide (1)..(620): Ceres Seq. ID no. 15176686
  misc_feature (356)..(441): Pfam Name: DUF668 Pfam Description: Protein of unknown function
  misc_feature (16)..(620): NCBI GI NO: 18397646 NR Description: expressed protein [Arabidopsis thaliana]
  misc_feature (53)..(593): NCBI GI NO: 15218580 NR Description: expressed protein [Arabidopsis thaliana]
  misc_feature (16)..(441): NCBI GI NO: 25513510 NR Description: T5I8.21 protein - Arabidopsis thaliana
  misc_feature (90)..(589): NCBI GI NO: 30682523 NR Description: expressed protein [Arabidopsis thaliana]
  misc_feature (234)..(593): NCBI GI NO: 25403424 NR Description: protein F23M19.3 [imported] - Arabidopsis thaliana
  misc_feature (53)..(195): NCBI GI NO: 25403424 NR Description: protein F23M19.3 [imported] - Arabidopsis thaliana
  misc_feature (84)..(499): NCBI GI NO: 38345368 NR Description: OSJNBa0088K19.7
  misc_feature (113)..(616): NCBI GI NO: 34908726 NR Description: P0491F11.23
  misc_feature (136)..(349): NCBI GI NO: 15228977 NR Description: hypothetical protein [Arabidopsis thaliana]
  misc_feature (348)..(528): NCBI GI NO: 15228977 NR Description: hypothetical protein [Arabidopsis thaliana]
FSGDWKHFFFLRKIIMGAVCSAGMVEKNGELGGKSLGFSGKLKKENSFVNRREAFSDSRSNSGHDRKKKKHDTGFSRELGLSIPSPGGKQVNQRGSFLGKAGERAVEVLDTIGSGMPKLNTNTGFVSGTTFRGNKISILAFEVANTITKGAILFQSLAEENIQFLKNEVLQSEGVQLLVSNDVEKLITLAEADKREELNVFSREVIRFGNMCKDPQWHNLDRYFSRLDFDVLDDKRYQEDAEKTMQEFTSLVRNTAELYHELNAYERFEQDYLQKIKEMESLNLPLKGESITMFQSELKHQRKLVRSLKKKSLWSRTLEEIVEKLVDIVTYIHQAIYEFAGNHGTAATKHSEGSERLGEAGLALHYANIINQINMVASRPTALPPNTRDTLYHGLPNNIKAALPSQLQTIGDMKELSITRIKAEMDKILQWLAPLATNTVKAHQGFGWVGEWANASNDFGDNTSKESNLIRLETLYYADKRKIDVYIIELLAWLHHLISSVKSRQNTLRPMPTTRSPPKGLELQSKMRQFLILSVDSSNKPLGTQISHEDRRLLEEVIARRKSPGLSKSEDLGLAKKRHVKHLQVTKSAGSSPAKEFFGTRQVFNHQNYNVLDIMDGLGY

SEQ ID NO: 9723 - protein, 605 aa, Glycine max
  peptide (1)..(605): Ceres Seq. ID no. 15176687
  misc_feature (341)..(426): Pfam Name: DUF668 Pfam Description: Protein of unknown function
  misc_feature (1)..(605): NCBI GI NO: 18397646 NR Description: expressed protein [Arabidopsis thaliana]
  misc_feature (38)..(578): NCBI GI NO: 15218580 NR Description: expressed protein [Arabidopsis thaliana]
  misc_feature (1)..(426): NCBI GI NO: 25513510 NR Description: T5I8.21 protein - Arabidopsis thaliana
  misc_feature (75)..(574): NCBI GI NO: 30682523 NR Description: expressed protein [Arabidopsis thaliana]
  misc_feature (219)..(578): NCBI GI NO: 25403424 NR Description: protein F23M19.3 [imported] - Arabidopsis thaliana
  misc_feature (38)..(180): NCBI GI NO: 25403424 NR Description: protein F23M19.3 [imported] - Arabidopsis thaliana
  misc_feature (69)..(484): NCBI GI NO: 38345368 NR Description: OSJNBa0088K19.7
  misc_feature (98)..(601): NCBI GI NO: 34908726 NR Description: P0491F11.23
  misc_feature (121)..(334): NCBI GI NO: 15228977 NR Description: hypothetical protein [Arabidopsis thaliana]
  misc_feature (333)..(513): NCBI GI NO: 15228977 NR Description: hypothetical protein [Arabidopsis thaliana]
MGAVCSAGMVEKNGELGGKSLGFSGKLKKENSFVNRREAFSDSRSNSGHDRKKKKHDTGFSRELGLSIPSPGGKQVNQRGSFLGKAGERAVEVLDTIGSGMPKLNTNTGFVSGTTFRGNKISILAFEVANTITKGAILFQSLAEENIQFLKNEVLQSEGVQLLVSNDVEKLITLAEADKREELNVFSREVIRFGNMCKDPQWHNLDRYFSRLDFDVLDDKRYQEDAEKTMQEFTSLVRNTAELYHELNAYERFEQDYLQKIKEMESLNLPLKGESITMFQSELKHQRKLVRSLKKKSLWSRTLEEIVEKLVDIVTYIHQAIYEFAGNHGTAATKHSEGSERLGEAGLALHYANIINQINMVASRPTALPPNTRDTLYHGLPNNIKAALPSQLQTIGDMKELSITRIKAEMDKILQWLAPLATNTVKAHQGFGWVGEWANASNDFGDNTSKESNLIRLETLYYADKRKIDVYIIELLAWLHHLISSVKSRQNTLRPMPTTRSPPKGLELQSKMRQFLILSVDSSNKPLGTQISHEDRRLLEEVIARRKSPGLSKSEDLGLAKKRHVKHLQVTKSAGSSPAKEFFGTRQVFNHQNYNVLDIMDGLGY

SEQ ID NO: 9724 - protein, 597 aa, Glycine max
  peptide (1)..(597): Ceres Seq. ID no. 15176688
  misc_feature (333)..(418): Pfam Name: DUF668 Pfam Description: Protein of unknown function
  misc_feature (1)..(597): NCBI GI NO: 18397646 NR Description: expressed protein [Arabidopsis thaliana]
  misc_feature (30)..(570): NCBI GI NO: 15218580 NR Description: expressed protein [Arabidopsis thaliana]
  misc_feature (1)..(418): NCBI GI NO: 25513510 NR Description: T5I8.21 protein - Arabidopsis thaliana
  misc_feature (67)..(566): NCBI GI NO: 30682523 NR Description: expressed protein [Arabidopsis thaliana]
  misc_feature (211)..(570): NCBI GI NO: 25403424 NR Description: protein F23M19.3 [imported] - Arabidopsis thaliana
  misc_feature (30)..(172): NCBI GI NO: 25403424 NR Description: protein F23M19.3 [imported] - Arabidopsis thaliana
  misc_feature (61)..(476): NCBI GI NO: 38345368 NR Description: OSJNBa0088K19.7
  misc_feature (90)..(593): NCBI GI NO: 34908726 NR Description: P0491F11.23
  misc_feature (113)..(326): NCBI GI NO: 15228977 NR Description: hypothetical protein [Arabidopsis thaliana]
  misc_feature (325)..(505): NCBI GI NO: 15228977 NR Description: hypothetical protein [Arabidopsis thaliana]
MVEKNGELGGKSLGFSGKLKKENSFVNRREAFSDSRSNSGHDRKKKKHDTGFSRELGLSIPSPGGKQVNQRGSFLGKAGERAVEVLDTIGSGMPKLNTNTGFVSGTTFRGNKISILAFEVANTITKGAILFQSLAEENIQFLKNEVLQSEGVQLLVSNDVEKLITLAEADKREELNVFSREVIRFGNMCKDPQWHNLDRYFSRLDFDVLDDKRYQEDAEKTMQEFTSLVRNTAELYHELNAYERFEQDYLQKIKEMESLNLPLKGESITMFQSELKHQRKLVRSLKKKSLWSRTLEEIVEKLVDIVTYIHQAIYEFAGNHGTAATKHSEGSERLGEAGLALHYANIINQINMVASRPTALPPNTRDTLYHGLPNNIKAALPSQLQTIGDMKELSITRIKAEMDKILQWLAPLATNTVKAHQGFGWVGEWANASNDFGDNTSKESNLIRLETLYYADKRKIDVYIIELLAWLHHLISSVKSRQNTLRPMPTTRSPPKGLELQSKMRQFLILSVDSSNKPLGTQISHEDRRLLEEVIARRKSPGLSKSEDLGLAKKRHVKHLQVTKSAGSSPAKEFFGTRQVFNHQNYNVLDIMDGLGY

SEQ ID NO: 9725 - DNA, 1118 bp, Glycine max
  misc_feature (1)..(1118): Ceres Seq. ID no. 14315080
actggaaattatgcttccaatatggaaaattttagacagcattctgcaactgtcacttctgctcctggtggtttgttatctactgcacctactgtgcaaataccatctgcctctcattcaacttcatcgatatcaggcttcccccttgactctcttgaaacagccaagagtggcaatcaagtcattaatcttgttaagccttctactttttttgcatcaacgtcttcatcttcactgttagttccacctatttattcatctgtgccgcctagtgcagttgttcatcattccctgaatgtgccacgccaatacggcactccagtacttcaacccttccctccccctaatcctcctctttctcttacccctatttcaagctccactccaaatagacctgtaatcagcagggataatgtccgtgatgcacttttatcattggttcaggaggatcatttcattgacatgatgttccaggcattactgaaggtgagtcattcatgagtaatcaaactctgaaggttggatggaaactgcatataaagttagttctgtatattgtagttacacaccatcacatctaacaagaggtgtaacctagtagtccgtctttagctttagccacaactttgcacgatacatctgaaatggcctattgcacaatatactaacaaatcatatggtgcattaatacactataatcttcaccactgaatttatgtgtgtctacgtgaacaagttacaagagaaaacaatggtaaaaatatagaatgatcttaatcgctaagttgatataacgattgctccacgtttacacacaaaaactaatggtgaaggtgctgtgtattcttacactgtaactctgttgtgtattgtagaaatagtcgtctgtatctgcaaaatgataaaagtgtttcgatgtcagtgtcgccttattaccctttgttgtcttgtctgtactttgtggttttaaatactgtcatggttctgtcgattgagtctttgcattaagttggacaagtcctctctatcgaccaatgaagatgcatgtataatcccatgcttagtatgcattttgatataaataaataaaaatttacctttcaatttagtccttaaag

SEQ ID NO: 9726 - protein, 166 aa, Glycine max
  peptide (1)..(166): Ceres Seq. ID no. 14315081
  misc_feature (1)..(160): NCBI GI NO: 18390886 NR Description: proline-rich protein family [Arabidopsis thaliana]
  misc_feature (1)..(160): NCBI GI NO: 6664305 NR Description: T27G7.7 [Arabidopsis thaliana]
  misc_feature (14)..(160): NCBI GI NO: 25455739 NR Description: hypothetical protein
  misc_feature (21)..(162): NCBI GI NO: 34900778 NR Description: transcription factor-like protein
  misc_feature (21)..(162): NCBI GI NO: 33146979 NR Description: putative transcription factor
TGNYASNMENFRQHSATVTSAPGGLLSTAPTVQIPSASHSTSSISGFPLDSLETAKSGNQVINLVKPSTFFASTSSSSLLVPPIYSSVPPSAVVHHSLNVPRQYGTPVLQPFPPPNPPLSLTPISSSTPNRPVISRDNVRDALLSLVQEDHFIDMMFQALLKVSHS

SEQ ID NO: 9727 - protein, 159 aa, Glycine max
  peptide (1)..(159): Ceres Seq. ID no. 14315082
  misc_feature (1)..(153): NCBI GI NO: 18390886 NR Description: proline-rich protein family [Arabidopsis thaliana]
  misc_feature (1)..(153): NCBI GI NO: 6664305 NR Description: T27G7.7 [Arabidopsis thaliana]
  misc_feature (7)..(153): NCBI GI NO: 25455739 NR Description: hypothetical protein
  misc_feature (14)..(155): NCBI GI NO: 34900778 NR Description: transcription factor-like protein
  misc_feature (14)..(155): NCBI GI NO: 33146979 NR Description: putative transcription factor
MENFRQHSATVTSAPGGLLSTAPTVQIPSASHSTSSISGFPLDSLETAKSGNQVINLVKPSTFFASTSSSSLLVPPIYSSVPPSAVVHHSLNVPRQYGTPVLQPFPPPNPPLSLTPISSSTPNRPVISRDNVRDALLSLVQEDHFIDMMFQALLKVSHS

SEQ ID NO: 9728 - DNA, 1552 bp, Glycine max
  misc_feature (1)..(1552): Ceres Seq. ID no. 15176106
tctgttttttggagtcagcttcactgcacaggatttatgtgatcgcaacatgggagtttgtttgagcgcccaaattaaagctgaaagcccatataacactgggttcaattcaaagtatgtgagtacggatggaaatgatttcggcagcacaaacgataaggtttcagcaaactcaattcctcaaactcctcggagtgagggtgagatcttgcggtcatccaatttgaagagctttcccttgtcagaacttaagacggccactagaaatttccgtccagatagcgtgttaggagaaggtggttttggatcagtttttaaggggtggatcgatgagaattcattgactgctaccaaacctggcactggcattgttattgctgttaaaagacttaatcaagatggcatccagggtcacagggagtggttggctgaagtcaactatcttggacagctttctcatcctcatctagtgagattgattgggttttgccttgaagatgaacatcgccttctcgtctacgaatttatgccacgtggaagcttggaaaaccatttgttcaggagaggctcatattttcaaccactttcttggagcttacgtttgaaggtagctcttgatgctgccaaagggcttgcatttctccacagtgcagaagcaaaagtgatatatagagattttaagacttcaaatatcttgctggattcaaaatataatgcaaaactttctgattttgggctggcaaaggatggaccaacaggtgacaaaagtcatgtctccattagggtaatgggaacctacggatacgcagcacctgaatatctagccacaggtcatcttactgctaagagcgatgtctatagttttggggttgtcctgctggaaatgttgtctggcaagagggctgttgacaagaatagaccatctggacaacacaatttggtggaatgggctaaaccttacctggcaaacaagcgtaagatatttcgtgtgttggacacccggctcgaaggacaatattcaacagatgatgcctgtaagctagccacccttgccttgcggtgcctatcaatagaatccaagttcaggccaaacatggatgaagtggttacaacattggagcagctgcaagttcctaatgtaaatggaggccatcaaaatgggtctcgtgttcgtagaagaagtgctgatgtgaatagaggctatcaaaatccttctgttaatggatctcgagttcgtagaagaagtgccgatgatattagccctatggagactcccacagcttatccccggccttctgcatcccctctctatacttgatattgcaaacttatcatcatgcatctgttgctggtgatctcatccaccaactcagtcacctcagtagctattagcctattgcactctagtattgtacatatcttatttcacataatgtattcagtattgctagtaccaattaatattttcggagttctgttttaagtgtttgtaactactaaactagatgcgaaggcaggtacattatatttgtatgatagctctgattagctc

SEQ ID NO: 9729 - protein, 438 aa, Glycine max
  peptide (1)..(438): Ceres Seq. ID no. 15176107
  misc_feature (90)..(372): Pfam Name: Pfam Description:  Protein kinase domain
  misc_feature (17)..(437): NCBI GI NO: 15222437 NR Description: protein kinase (APK1a) [Arabidopsis thaliana]
  misc_feature (17)..(437): NCBI GI NO: 15227001 NR Description: protein kinase (APK1b) [Arabidopsis thaliana]
  misc_feature (17)..(277): NCBI GI NO: 8778537 NR Description: F22G5.5 [Arabidopsis thaliana]
  misc_feature (277)..(436): NCBI GI NO: 8778537 NR Description: F22G5.5 [Arabidopsis thaliana]
  misc_feature (17)..(414): NCBI GI NO: 14719339 NR Description: putative protein kinase [Oryza sativa]
  misc_feature (15)..(419): NCBI GI NO: 34906046 NR Description: putative serine/threonine-specific protein kinase
  misc_feature (17)..(410): NCBI GI NO: 34897424 NR Description: putative protein kinase
  misc_feature (17)..(390): NCBI GI NO: 15241749 NR Description: protein kinase, putative [Arabidopsis thaliana]
  misc_feature (17)..(390): NCBI GI NO: 166809 NR Description: protein kinase
  misc_feature (17)..(438): NCBI GI NO: 15227042 NR Description: protein kinase (APK2b) [Arabidopsis thaliana]
LFFGVSFTAQDLCDRNMGVCLSAQIKAESPYNTGFNSKYVSTDGNDFGSTNDKVSANSIPQTPRSEGEILRSSNLKSFPLSELKTATRNFRPDSVLGEGGFGSVFKGWIDENSLTATKPGTGIVIAVKRLNQDGIQGHREWLAEVNYLGQLSHPHLVRLIGFCLEDEHRLLVYEFMPRGSLENHLFRRGSYFQPLSWSLRLKVALDAAKGLAFLHSAEAKVIYRDFKTSNILLDSKYNAKLSDFGLAKDGPTGDKSHVSIRVMGTYGYAAPEYLATGHLTAKSDVYSFGVVLLEMLSGKRAVDKNRPSGQHNLVEWAKPYLANKRKIFRVLDTRLEGQYSTDDACKLATLALRCLSIESKFRPNMDEVVTTLEQLQVPNVNGGHQNGSRVRRRSADVNRGYQNPSVNGSRVRRRSADDISPMETPTAYPRPSASPLYT

SEQ ID NO: 9730 - protein, 422 aa, Glycine max
  peptide (1)..(422): Ceres Seq. ID no. 15176108
  misc_feature (74)..(356): Pfam Name: Pfam Description:  Protein kinase domain
  misc_feature (1)..(421): NCBI GI NO: 15222437 NR Description: protein kinase (APK1a) [Arabidopsis thaliana]
  misc_feature (1)..(421): NCBI GI NO: 15227001 NR Description: protein kinase (APK1b) [Arabidopsis thaliana]
  misc_feature (1)..(261): NCBI GI NO: 8778537 NR Description: F22G5.5 [Arabidopsis thaliana]
  misc_feature (261)..(420): NCBI GI NO: 8778537 NR Description: F22G5.5 [Arabidopsis thaliana]
  misc_feature (1)..(398): NCBI GI NO: 14719339 NR Description: putative protein kinase [Oryza sativa]
  misc_feature (1)..(403): NCBI GI NO: 34906046 NR Description: putative serine/threonine-specific protein kinase
  misc_feature (1)..(394): NCBI GI NO: 34897424 NR Description: putative protein kinase
  misc_feature (1)..(374): NCBI GI NO: 15241749 NR Description: protein kinase, putative [Arabidopsis thaliana]
  misc_feature (1)..(374): NCBI GI NO: 166809 NR Description: protein kinase
  misc_feature (1)..(422): NCBI GI NO: 15227042 NR Description: protein kinase (APK2b) [Arabidopsis thaliana]
MGVCLSAQIKAESPYNTGFNSKYVSTDGNDFGSTNDKVSANSIPQTPRSEGEILRSSNLKSFPLSELKTATRNFRPDSVLGEGGFGSVFKGWIDENSLTATKPGTGIVIAVKRLNQDGIQGHREWLAEVNYLGQLSHPHLVRLIGFCLEDEHRLLVYEFMPRGSLENHLFRRGSYFQPLSWSLRLKVALDAAKGLAFLHSAEAKVIYRDFKTSNILLDSKYNAKLSDFGLAKDGPTGDKSHVSIRVMGTYGYAAPEYLATGHLTAKSDVYSFGVVLLEMLSGKRAVDKNRPSGQHNLVEWAKPYLANKRKIFRVLDTRLEGQYSTDDACKLATLALRCLSIESKFRPNMDEVVTTLEQLQVPNVNGGHQNGSRVRRRSADVNRGYQNPSVNGSRVRRRSADDISPMETPTAYPRPSASPLYT

SEQ ID NO: 9731 - protein, 263 aa, Glycine max
  peptide (1)..(263): Ceres Seq. ID no. 15176109
  misc_feature (1)..(197): Pfam Name: Pfam Description:  Protein kinase domain
  misc_feature (1)..(262): NCBI GI NO: 15222437 NR Description: protein kinase (APK1a) [Arabidopsis thaliana]
  misc_feature (1)..(262): NCBI GI NO: 15227001 NR Description: protein kinase (APK1b) [Arabidopsis thaliana]
  misc_feature (1)..(102): NCBI GI NO: 8778537 NR Description: F22G5.5 [Arabidopsis thaliana]
  misc_feature (102)..(261): NCBI GI NO: 8778537 NR Description: F22G5.5 [Arabidopsis thaliana]
  misc_feature (1)..(239): NCBI GI NO: 14719339 NR Description: putative protein kinase [Oryza sativa]
  misc_feature (1)..(244): NCBI GI NO: 34906046 NR Description: putative serine/threonine-specific protein kinase
  misc_feature (1)..(235): NCBI GI NO: 34897424 NR Description: putative protein kinase
  misc_feature (1)..(215): NCBI GI NO: 15241749 NR Description: protein kinase, putative [Arabidopsis thaliana]
  misc_feature (1)..(215): NCBI GI NO: 166809 NR Description: protein kinase
  misc_feature (1)..(263): NCBI GI NO: 15227042 NR Description: protein kinase (APK2b) [Arabidopsis thaliana]
MPRGSLENHLFRRGSYFQPLSWSLRLKVALDAAKGLAFLHSAEAKVIYRDFKTSNILLDSKYNAKLSDFGLAKDGPTGDKSHVSIRVMGTYGYAAPEYLATGHLTAKSDVYSFGVVLLEMLSGKRAVDKNRPSGQHNLVEWAKPYLANKRKIFRVLDTRLEGQYSTDDACKLATLALRCLSIESKFRPNMDEVVTTLEQLQVPNVNGGHQNGSRVRRRSADVNRGYQNPSVNGSRVRRRSADDISPMETPTAYPRPSASPLYT

SEQ ID NO: 9732 - DNA, 1506 bp, Glycine max
  misc_feature (1)..(1506): Ceres Seq. ID no. 14311609
acatgctcataatttagaccaagtctatatcatgagcttaatttggaccactttacttgttgatgcttgtgttgattctatttggacagtaaccaatgtggcttttacccttttgcattcaagatgcagttaaataggtagaataacggatgacaagtgaataatttctaaaattgattgcctttttttgctacagatttgaacctgatatgcttgcattttctggatgtgattatggtggaggggagaaggagcagaaggaactgggtgcaataagaaggaggtggaagacattacatagaagcaatcctgatagggcaaggaggcaggggagatgcccattaacccccgaagaagttggtctcatgctaagagcattgggatatggttctgacattcatatttacgttgcatcaggggaggtatatggaggggaaagaacattggcacctctcaaagcattatttcctaatttccattcaaaagagaccattgctaccaaggaagaattagaaccgttttcttcattttcttctcgcatggctgcactcgacttcattgtttgtgatgaaagtgatgtttttgtaaccaataataatggaaatatggcaaaaatattggctggacgaaggagatactttggccataaaccaaccattcgtccaaatgctaaaaaactttatcgattgttcttgaatagaagtaattcgacttgggaagcttttgcttctagtgtccgaactttccagaaaggcttcatgggagagccaaaggaggttagaccaggtagaggcgggtttcatgagaatccatcatcatgcatatgtgaagattctgcagcagccaaagtggacaaaaattcacaatctagaaaatatgggaaggataatacaacgaagaaaaatgtagcaaatgatgaactggatgttgacaatgtgtctgagtggccagacatggatgatgatgatgatgatcagaatgatctagcagagaagggtacattcaatgaaacaattttggattatgatgctctgaacttcgaggatcccgagttggaggaaattatatcagattagtgaaggtgctttattcagtgctgtacctgttgacttattatggttctttgccagctccatttgacagctgcttataaagctcaaaaacaggaacagaaaaggcacgactttctcgatactggccgaactatagtaaaaagacatctcaaaaatttaatcatacgttcatcttttctgcatttctaaggacataatggtctcagtttgatgctgaatttttggagtgtttagacttgtacgaatctgtaaagaggttatcagaagcgagcaatggaagtagagttagaggacatccatccgaatatagctgcacacaaaattgagtttgctaggaagtaggaaaatctgtatatcttttgcagttgatagactgtacacctttgttcctgtctttcattgacattgatgcagtcaacttctcttttagaac

SEQ ID NO: 9733 - protein, 288 aa, Glycine max
  peptide (1)..(288): Ceres Seq. ID no. 14311610
  misc_feature (1)..(172): Pfam Name: Pfam Description:  Plant protein family
  misc_feature (1)..(288): NCBI GI NO: 6573718 NR Description: T23E18.20 [Arabidopsis thaliana]
  misc_feature (1)..(288): NCBI GI NO: 18411065 NR Description: auxin-independent growth promoter -related
  misc_feature (1)..(288): NCBI GI NO: 25406439 NR Description: hypothetical protein F15M4.23
  misc_feature (1)..(288): NCBI GI NO: 8778600 NR Description: F5M15.13 [Arabidopsis thaliana]
  misc_feature (1)..(288): NCBI GI NO: 8886957 NR Description: F2D10.3 [Arabidopsis thaliana]
  misc_feature (1)..(288): NCBI GI NO: 30686880 NR Description: axi 1 protein -related [Arabidopsis thaliana]
  misc_feature (1)..(211): NCBI GI NO: 322752 NR Description: auxin-independent growth promoter - common tobacco
  misc_feature (1)..(279): NCBI GI NO: 38345930 NR Description: OSJNBb0078D11.5
  misc_feature (1)..(256): NCBI GI NO: 15233840 NR Description: growth regulator protein -related
  misc_feature (1)..(248): NCBI GI NO: 22328730 NR Description: growth regulator like protein
MLAFSGCDYGGGEKEQKELGAIRRRWKTLHRSNPDRARRQGRCPLTPEEVGLMLRALGYGSDIHIYVASGEVYGGERTLAPLKALFPNFHSKETIATKEELEPFSSFSSRMAALDFIVCDESDVFVTNNNGNMAKILAGRRRYFGHKPTIRPNAKKLYRLFLNRSNSTWEAFASSVRTFQKGFMGEPKEVRPGRGGFHENPSSCICEDSAAAKVDKNSQSRKYGKDNTTKKNVANDELDVDNVSEWPDMDDDDDDQNDLAEKGTFNETILDYDALNFEDPELEEIISD

SEQ ID NO: 9734 - protein, 236 aa, Glycine max
  peptide (1)..(236): Ceres Seq. ID no. 14311611
  misc_feature (1)..(120): Pfam Name: Pfam Description:  Plant protein family
  misc_feature (1)..(236): NCBI GI NO: 6573718 NR Description: T23E18.20 [Arabidopsis thaliana]
  misc_feature (1)..(236): NCBI GI NO: 18411065 NR Description: auxin-independent growth promoter -related
  misc_feature (1)..(236): NCBI GI NO: 25406439 NR Description: hypothetical protein F15M4.23
  misc_feature (1)..(236): NCBI GI NO: 8778600 NR Description: F5M15.13 [Arabidopsis thaliana]
  misc_feature (1)..(236): NCBI GI NO: 30686880 NR Description: axi 1 protein -related [Arabidopsis thaliana]
  misc_feature (1)..(236): NCBI GI NO: 8886957 NR Description: F2D10.3 [Arabidopsis thaliana]
  misc_feature (1)..(159): NCBI GI NO: 322752 NR Description: auxin-independent growth promoter - common tobacco
  misc_feature (1)..(227): NCBI GI NO: 38345930 NR Description: OSJNBb0078D11.5
  misc_feature (1)..(204): NCBI GI NO: 15233840 NR Description: growth regulator protein -related
  misc_feature (1)..(196): NCBI GI NO: 22328730 NR Description: growth regulator like protein
MLRALGYGSDIHIYVASGEVYGGERTLAPLKALFPNFHSKETIATKEELEPFSSFSSRMAALDFIVCDESDVFVTNNNGNMAKILAGRRRYFGHKPTIRPNAKKLYRLFLNRSNSTWEAFASSVRTFQKGFMGEPKEVRPGRGGFHENPSSCICEDSAAAKVDKNSQSRKYGKDNTTKKNVANDELDVDNVSEWPDMDDDDDDQNDLAEKGTFNETILDYDALNFEDPELEEIISD

SEQ ID NO: 9735 - protein, 178 aa, Glycine max
  peptide (1)..(178): Ceres Seq. ID no. 14311612
  misc_feature (1)..(62): Pfam Name: Pfam Description:  Plant protein family
  misc_feature (1)..(178): NCBI GI NO: 6573718 NR Description: T23E18.20 [Arabidopsis thaliana]
  misc_feature (1)..(178): NCBI GI NO: 18411065 NR Description: auxin-independent growth promoter -related
  misc_feature (1)..(178): NCBI GI NO: 25406439 NR Description: hypothetical protein F15M4.23
  misc_feature (1)..(178): NCBI GI NO: 8778600 NR Description: F5M15.13 [Arabidopsis thaliana]
  misc_feature (1)..(178): NCBI GI NO: 8886957 NR Description: F2D10.3 [Arabidopsis thaliana]
  misc_feature (1)..(178): NCBI GI NO: 30686880 NR Description: axi 1 protein -related [Arabidopsis thaliana]
  misc_feature (1)..(101): NCBI GI NO: 322752 NR Description: auxin-independent growth promoter - common tobacco
  misc_feature (1)..(169): NCBI GI NO: 38345930 NR Description: OSJNBb0078D11.5
  misc_feature (1)..(146): NCBI GI NO: 15233840 NR Description: growth regulator protein -related
  misc_feature (1)..(138): NCBI GI NO: 22328730 NR Description: growth regulator like protein
MAALDFIVCDESDVFVTNNNGNMAKILAGRRRYFGHKPTIRPNAKKLYRLFLNRSNSTWEAFASSVRTFQKGFMGEPKEVRPGRGGFHENPSSCICEDSAAAKVDKNSQSRKYGKDNTTKKNVANDELDVDNVSEWPDMDDDDDDQNDLAEKGTFNETILDYDALNFEDPELEEIISD

SEQ ID NO: 9736 - DNA, 1403 bp, Glycine max
  misc_feature (1)..(1403): Ceres Seq. ID no. 15225368
ccccccctcgagtcagctacgtaggccccccccccattcatagaacagcacttaatcaagaaggacgttacctcggttaatttcattttctagattgcttatcagtctccaagttgagactttctgagtcagtacacttggatcactacctctggcattggcagagtattccttcaaaggggtaattcatcgtccaaaaattgttggggacaccttgtctttcgagggattgtttgctctacacaaggaattaaacgttatagaatttagtctgcagagaaatttgcaattctgatcagccacattttacctcacttacatccagcatcccaacgatcctgcaacattggtaattacctcatgagattgaggcgtgatatctttgtgtgctgtttcactagcacatcttcagacacaatgcaaaaggaaaagcacagtaagttgaagtggcgaatctttccctacaaggaacttagaaaagccacaaataattttgatcgatttcatttcattggaaagagaggtggaaagacaggccttatcactcaatatcacggttagactatgctgtagccttttatgtgactaagagcctttcatattaagtgttttgagcattgttatttaattaaaattagaatttttccttagtaattcacacaatcaagattgaaattcaaatttggcattaaatacctaagtaaatctataattttgattaacataatcactaaaaggactacatatacctcatgtttttgcattgaacagtttcttctgattatctacattgttataggaaaacttgaggatggacgtgagattacaattcagcgctttaacggagaccagcgctacttattacaacagtttatcaatgaaactattatcctaaattacttgcctcacaaaaatattgtgtcaatttacgggtgtgcttctcatcatgaggaatctctgctagtgacagaatacctatccaatggcaatcttgctgctcatcttcatagtgaaaaggacgaaaagattacactaccttggcttaaacgattggatatagcatttgatattgcaaatgcattgaaccatcttcacaattatggcatcatccaccgcaatgtgaagtccagtaatattttcctagatgcgaacttttgtgcaaaagttggtaaccttcttttgtcgcagaaacttccagatggagttccggtgcatgcgacccatgttactggtgatagggcagggtcaagtggttatatggacccagagtatttgacaaaaggccaacttagcgtaaaaaatgatgtttatagctttggggtggttttgtgtgagcttctatcatcgacgctggcaaaagactggtttctgaatgaagaggataatattgctaccgttttttg

SEQ ID NO: 9737 - protein, 66 aa, Glycine max
  peptide (1)..(66): Ceres Seq. ID no. 15225369
  misc_feature (20)..(66): NCBI GI NO: 38347183 NR Description: OSJNBa0024J22.11
  misc_feature (2)..(66): NCBI GI NO: 38344360 NR Description: OSJNBb0032D24.11
  misc_feature (20)..(65): NCBI GI NO: 37531714 NR Description: putative wall-associated kinase 1
MRLRRDIFVCCFTSTSSDTMQKEKHSKLKWRIFPYKELRKATNNFDRFHFIGKRGGKTGLITQYHG

SEQ ID NO: 9738 - protein, 47 aa, Glycine max
  peptide (1)..(47): Ceres Seq. ID no. 15225370
  misc_feature (1)..(47): NCBI GI NO: 38347183 NR Description: OSJNBa0024J22.11
  misc_feature (1)..(47): NCBI GI NO: 38344360 NR Description: OSJNBb0032D24.11
  misc_feature (1)..(46): NCBI GI NO: 37531714 NR Description: putative wall-associated kinase 1
MQKEKHSKLKWRIFPYKELRKATNNFDRFHFIGKRGGKTGLITQYHG

SEQ ID NO: 9739 - protein, 48 aa, Glycine max
  peptide (1)..(48): Ceres Seq. ID no. 15225371
  misc_feature (1)..(28): NCBI GI NO: 38347183 NR Description: OSJNBa0024J22.11
  misc_feature (1)..(47): NCBI GI NO: 24417464 NR Description: unknown [Arabidopsis thaliana]
  misc_feature (1)..(47): NCBI GI NO: 25404646 NR Description: probable wall-associated kinase T4O24.5
  misc_feature (1)..(47): NCBI GI NO: 22327431 NR Description: serine/threonine protein kinase family
  misc_feature (1)..(35): NCBI GI NO: 15529242 NR Description: At1g25390/F2J7_14 [Arabidopsis thaliana]
  misc_feature (1)..(47): NCBI GI NO: 12597754 NR Description: protein kinase, putative [Arabidopsis thaliana]
  misc_feature (1)..(47): NCBI GI NO: 30697422 NR Description: serine/threonine protein kinase family
  misc_feature (1)..(35): NCBI GI NO: 15222572 NR Description: protein kinase family [Arabidopsis thaliana]
  misc_feature (1)..(47): NCBI GI NO: 10177797 NR Description: contains similarity to proteinkinase~gene_id:MXA21
  misc_feature (1)..(35): NCBI GI NO: 15221764 NR Description: protein kinase family [Arabidopsis thaliana]
MDPEYLTKGQLSVKNDVYSFGVVLCELLSSTLAKDWFLNEEDNIATVF

SEQ ID NO: 9740 - DNA, 1140 bp, Glycine max
  misc_feature (1)..(1140): Ceres Seq. ID no. 15169727
atacaccacagtttccaatttccatcaatctcaatctcatcctctcctaacattctccctataaaatcgccacatccaactcccaacaacacaacaccaacaacctcaaaaaacataattaagcattaacattccacaccttttcacacacacacaaaaaaaacaaccctctaaaatctaagcctcaaagagtgctaaactttgttacaatgaacatgttaggccttagagacctagttttcatagctccaactccttctcaacttcaccaccatcaacaacaccaacccatttcagcagaacaccattcaaacctccctttgccttcacaagcctctctcagtgttggtcttggcattttccctctcctaacagtgccacacaccaatgatgttcaagttcaggttcaagactgtgccaacaacaacaacaacaccaacaccaactattggaacctgaagatgtgtggtgccactgaagtgaattccacaagaaaaggtgttatgaacatggaggatgagggaagcaataagcaaatgatggagagtgaggaaggtgggggtgagtttagggtgtgccaggattgtggcaatagagccaagagagattgcagcttcagaaggtgcaggacttgctgcaagggacgtggctttgattgcagcactcacgtgaagagcacgtgggtccccgcgtctatgagacggggtggtggtggtgatagtagtggtggtgatggcaacagcgatgctggtgcttctaagaggctaagaactttggggtcatcaaagaatgttgctgctagtgctacctctcatagttccacttccaatgctaccccaacaaagagctttgataccagttcttgtcaacaaggtgatttcatttttctcttttaattcaaagatgtttactacaatttcacaaatagtttaattaagtacttgtttaattaaggtttttaattgcactggtattgtcgtgttcttggatattgtgagaaattgcaacaaatacaactcatgcagtcacaattgtaaacactcggataggccaaaatcgcagctgcagaccatttttcaaaaccttgatttccaggttttaaattatggtcgcagtcgcaaattcattgtaattcttgac

SEQ ID NO: 9741 - protein, 228 aa, Glycine max
  peptide (1)..(228): Ceres Seq. ID no. 15169728
  misc_feature (116)..(221): Pfam Name: DUF702 Pfam Description: Domain of unknown function
  misc_feature (1)..(221): NCBI GI NO: 882341 NR Description: LRP1
  misc_feature (1)..(221): NCBI GI NO: 18416839 NR Description: lateral root primordia (LRP1)
  misc_feature (116)..(221): NCBI GI NO: 34906658 NR Description: putative LRP(lateral root primordia) 1
  misc_feature (123)..(204): NCBI GI NO: 15234365 NR Description: expressed protein [Arabidopsis thaliana]
  misc_feature (101)..(224): NCBI GI NO: 15239350 NR Description: zinc finger protein SHI-related
  misc_feature (116)..(165): NCBI GI NO: 15230389 NR Description: expressed protein [Arabidopsis thaliana]
  misc_feature (104)..(165): NCBI GI NO: 15242760 NR Description: hypothetical protein [Arabidopsis thaliana]
  misc_feature (107)..(171): NCBI GI NO: 15232522 NR Description: expressed protein [Arabidopsis thaliana]
  misc_feature (20)..(165): NCBI GI NO: 15222285 NR Description: hypothetical protein [Arabidopsis thaliana]
  misc_feature (21)..(165): NCBI GI NO: 15223669 NR Description: hypothetical protein [Arabidopsis thaliana]
MNMLGLRDLVFIAPTPSQLHHHQQHQPISAEHHSNLPLPSQASLSVGLGIFPLLTVPHTNDVQVQVQDCANNNNNTNTNYWNLKMCGATEVNSTRKGVMNMEDEGSNKQMMESEEGGGEFRVCQDCGNRAKRDCSFRRCRTCCKGRGFDCSTHVKSTWVPASMRRGGGGDSSGGDGNSDAGASKRLRTLGSSKNVAASATSHSSTSNATPTKSFDTSSCQQGDFIFLF

SEQ ID NO: 9742 - protein, 226 aa, Glycine max
  peptide (1)..(226): Ceres Seq. ID no. 15169729
  misc_feature (114)..(219): Pfam Name: DUF702 Pfam Description: Domain of unknown function
  misc_feature (1)..(219): NCBI GI NO: 882341 NR Description: LRP1
  misc_feature (1)..(219): NCBI GI NO: 18416839 NR Description: lateral root primordia (LRP1)
  misc_feature (114)..(219): NCBI GI NO: 34906658 NR Description: putative LRP(lateral root primordia) 1
  misc_feature (121)..(202): NCBI GI NO: 15234365 NR Description: expressed protein [Arabidopsis thaliana]
  misc_feature (99)..(222): NCBI GI NO: 15239350 NR Description: zinc finger protein SHI-related
  misc_feature (114)..(163): NCBI GI NO: 15230389 NR Description: expressed protein [Arabidopsis thaliana]
  misc_feature (102)..(163): NCBI GI NO: 15242760 NR Description: hypothetical protein [Arabidopsis thaliana]
  misc_feature (105)..(169): NCBI GI NO: 15232522 NR Description: expressed protein [Arabidopsis thaliana]
  misc_feature (18)..(163): NCBI GI NO: 15222285 NR Description: hypothetical protein [Arabidopsis thaliana]
  misc_feature (19)..(163): NCBI GI NO: 15223669 NR Description: hypothetical protein [Arabidopsis thaliana]
MLGLRDLVFIAPTPSQLHHHQQHQPISAEHHSNLPLPSQASLSVGLGIFPLLTVPHTNDVQVQVQDCANNNNNTNTNYWNLKMCGATEVNSTRKGVMNMEDEGSNKQMMESEEGGGEFRVCQDCGNRAKRDCSFRRCRTCCKGRGFDCSTHVKSTWVPASMRRGGGGDSSGGDGNSDAGASKRLRTLGSSKNVAASATSHSSTSNATPTKSFDTSSCQQGDFIFLF

SEQ ID NO: 9743 - protein, 144 aa, Glycine max
  peptide (1)..(144): Ceres Seq. ID no. 15169730
  misc_feature (32)..(137): Pfam Name: DUF702 Pfam Description: Domain of unknown function
  misc_feature (1)..(137): NCBI GI NO: 882341 NR Description: LRP1
  misc_feature (1)..(137): NCBI GI NO: 18416839 NR Description: lateral root primordia (LRP1)
  misc_feature (32)..(137): NCBI GI NO: 34906658 NR Description: putative LRP(lateral root primordia) 1
  misc_feature (39)..(120): NCBI GI NO: 15234365 NR Description: expressed protein [Arabidopsis thaliana]
  misc_feature (17)..(140): NCBI GI NO: 15239350 NR Description: zinc finger protein SHI-related
  misc_feature (32)..(81): NCBI GI NO: 15230389 NR Description: expressed protein [Arabidopsis thaliana]
  misc_feature (20)..(81): NCBI GI NO: 15242760 NR Description: hypothetical protein [Arabidopsis thaliana]
  misc_feature (23)..(87): NCBI GI NO: 15232522 NR Description: expressed protein [Arabidopsis thaliana]
  misc_feature (1)..(81): NCBI GI NO: 15222285 NR Description: hypothetical protein [Arabidopsis thaliana]
  misc_feature (1)..(81): NCBI GI NO: 15223669 NR Description: hypothetical protein [Arabidopsis thaliana]
MCGATEVNSTRKGVMNMEDEGSNKQMMESEEGGGEFRVCQDCGNRAKRDCSFRRCRTCCKGRGFDCSTHVKSTWVPASMRRGGGGDSSGGDGNSDAGASKRLRTLGSSKNVAASATSHSSTSNATPTKSFDTSSCQQGDFIFLF

SEQ ID NO: 9744 - DNA, 1329 bp, Glycine max
  misc_feature (1)..(1329): Ceres Seq. ID no. 12582113
cagctacgtaggccccccccccgaaaaactattcatttcttcatcagcaacttcacggaggagagaaaggcatggctggcaatataatagcttcatcagtgcccaagagcgtccaagaaatgtccatggatggtgatgaaccaccatcaagatatgtagttaatggaaatagctttggatctaaagattcttctgtacagtttccaatacccatcattgatgtgcgtctcctctcatcagaagatgagctagagaagcttagatctgctctaagttcagctggatgcttccaggcaattggtcatggaatgtcaagttcatatcttgacaatatacgagaaactgcaaaacaattttttgcactcccagaagaggaaaagcagaagtatgctcgagctgttaatgaatctgaagggtatggaaatgacagagtagtttcagacaaacaggtccttgactggtcctatcgcctaacacttcgagtttttccagaaacaaaacgaaggctttctctttggccaaaaattcctactgattttagtgagaaattagaggagttttctacgaaagtgaaatcaatgatggaatatctcttgagatgcatggcgaggtcactgaatttggaagagggtagcttcgtggaccagtttggggaacaaccgttgatgctatcgaggttcaacttctatccactttgttctagacctgatttggttcttggcgtcaaacctcatacagatagatcaggaatcacagtcctgttgcaagacaaagaagtggaaggtcttcaagttttgatagatgacaattggatcaatgtccccacaatgcctgatgctcttgttgtcaaccttggcgatcaaatgcagatcatgagtaatggaatattcaagagcataatgcacagggttgtgaccaatacagaaaagctgaggatgtctgtagcaatgtttaatgagccagaggccgagaacgagattggacctgtagaaggtctaatagatgagtcacggccaaggttatacagaaacgttaaaaattatggtgatatcaactacaagtgttatcaagagggaaagattgcactagagactgtcaaaattgcagataactctaatcagaggtgagactgtttcatatttgaattcccaaaagacaagattcatctagaccagccggttggaaagtacattaaagtttttgtaatttaagtcaaaccaatgaactaacagaaaaaaaatatgtatggttctcttactgtgaaaccgtaactagtcatacatttcaatctcgcaaaaaaaaaaaaaaaaagaattcctgcagcccggg

SEQ ID NO: 9745 - protein, 351 aa, Glycine max
  peptide (1)..(351): Ceres Seq. ID no. 12582114
  misc_feature (202)..(297): Pfam Name: II Pfam Description: 2OG-Fe
  misc_feature (13)..(344): NCBI GI NO: 2688828 NR Description: ethylene-forming-enzyme-like dioxygenase
  misc_feature (12)..(344): NCBI GI NO: 15222131 NR Description: flavonol synthase, putative; protein id:At1g49390
  misc_feature (12)..(344): NCBI GI NO: 21593366 NR Description: ethylene-forming-enzyme-like dioxygenase-like
  misc_feature (12)..(344): NCBI GI NO: 15241348 NR Description: ethylene-forming-enzyme-like dioxygenase-like
  misc_feature (12)..(336): NCBI GI NO: 15241383 NR Description: ethylene-forming-enzyme-like dioxygenase - like
  misc_feature (12)..(344): NCBI GI NO: 15239524 NR Description: ethylene-forming-enzyme-like dioxygenase
  misc_feature (11)..(321): NCBI GI NO: 24413982 NR Description: ethylene-forming-enzyme-like dioxygenase-like
  misc_feature (11)..(333): NCBI GI NO: 34898470 NR Description: ESTs D47168
  misc_feature (14)..(344): NCBI GI NO: 34898468 NR Description: Similar to Prunus armeniaca ethylene-forming-enzyme-like dioxygenase
  misc_feature (10)..(344): NCBI GI NO: 24413984 NR Description: ethylene-forming-enzyme-like dioxygenase-like
MAGNIIASSVPKSVQEMSMDGDEPPSRYVVNGNSFGSKDSSVQFPIPIIDVRLLSSEDELEKLRSALSSAGCFQAIGHGMSSSYLDNIRETAKQFFALPEEEKQKYARAVNESEGYGNDRVVSDKQVLDWSYRLTLRVFPETKRRLSLWPKIPTDFSEKLEEFSTKVKSMMEYLLRCMARSLNLEEGSFVDQFGEQPLMLSRFNFYPLCSRPDLVLGVKPHTDRSGITVLLQDKEVEGLQVLIDDNWINVPTMPDALVVNLGDQMQIMSNGIFKSIMHRVVTNTEKLRMSVAMFNEPEAENEIGPVEGLIDESRPRLYRNVKNYGDINYKCYQEGKIALETVKIADNSNQR

SEQ ID NO: 9746 - protein, 335 aa, Glycine max
  peptide (1)..(335): Ceres Seq. ID no. 12582115
  misc_feature (186)..(281): Pfam Name: II Pfam Description: 2OG-Fe
  misc_feature (1)..(328): NCBI GI NO: 2688828 NR Description: ethylene-forming-enzyme-like dioxygenase
  misc_feature (1)..(328): NCBI GI NO: 15222131 NR Description: flavonol synthase, putative; protein id:At1g49390
  misc_feature (1)..(328): NCBI GI NO: 21593366 NR Description: ethylene-forming-enzyme-like dioxygenase-like
  misc_feature (1)..(328): NCBI GI NO: 15241348 NR Description: ethylene-forming-enzyme-like dioxygenase-like
  misc_feature (1)..(320): NCBI GI NO: 15241383 NR Description: ethylene-forming-enzyme-like dioxygenase - like
  misc_feature (1)..(328): NCBI GI NO: 15239524 NR Description: ethylene-forming-enzyme-like dioxygenase
  misc_feature (1)..(305): NCBI GI NO: 24413982 NR Description: ethylene-forming-enzyme-like dioxygenase-like
  misc_feature (1)..(317): NCBI GI NO: 34898470 NR Description: ESTs D47168
  misc_feature (1)..(328): NCBI GI NO: 34898468 NR Description: Similar to Prunus armeniaca ethylene-forming-enzyme-like dioxygenase
  misc_feature (1)..(328): NCBI GI NO: 24413984 NR Description: ethylene-forming-enzyme-like dioxygenase-like
MSMDGDEPPSRYVVNGNSFGSKDSSVQFPIPIIDVRLLSSEDELEKLRSALSSAGCFQAIGHGMSSSYLDNIRETAKQFFALPEEEKQKYARAVNESEGYGNDRVVSDKQVLDWSYRLTLRVFPETKRRLSLWPKIPTDFSEKLEEFSTKVKSMMEYLLRCMARSLNLEEGSFVDQFGEQPLMLSRFNFYPLCSRPDLVLGVKPHTDRSGITVLLQDKEVEGLQVLIDDNWINVPTMPDALVVNLGDQMQIMSNGIFKSIMHRVVTNTEKLRMSVAMFNEPEAENEIGPVEGLIDESRPRLYRNVKNYGDINYKCYQEGKIALETVKIADNSNQR

SEQ ID NO: 9747 - protein, 333 aa, Glycine max
  peptide (1)..(333): Ceres Seq. ID no. 12582116
  misc_feature (184)..(279): Pfam Name: II Pfam Description: 2OG-Fe
  misc_feature (1)..(326): NCBI GI NO: 2688828 NR Description: ethylene-forming-enzyme-like dioxygenase
  misc_feature (1)..(326): NCBI GI NO: 15222131 NR Description: flavonol synthase, putative; protein id:At1g49390
  misc_feature (1)..(326): NCBI GI NO: 21593366 NR Description: ethylene-forming-enzyme-like dioxygenase-like
  misc_feature (1)..(326): NCBI GI NO: 15241348 NR Description: ethylene-forming-enzyme-like dioxygenase-like
  misc_feature (1)..(318): NCBI GI NO: 15241383 NR Description: ethylene-forming-enzyme-like dioxygenase - like
  misc_feature (1)..(326): NCBI GI NO: 15239524 NR Description: ethylene-forming-enzyme-like dioxygenase
  misc_feature (1)..(303): NCBI GI NO: 24413982 NR Description: ethylene-forming-enzyme-like dioxygenase-like
  misc_feature (1)..(315): NCBI GI NO: 34898470 NR Description: ESTs D47168
  misc_feature (1)..(326): NCBI GI NO: 34898468 NR Description: Similar to Prunus armeniaca ethylene-forming-enzyme-like dioxygenase
  misc_feature (1)..(326): NCBI GI NO: 24413984 NR Description: ethylene-forming-enzyme-like dioxygenase-like
MDGDEPPSRYVVNGNSFGSKDSSVQFPIPIIDVRLLSSEDELEKLRSALSSAGCFQAIGHGMSSSYLDNIRETAKQFFALPEEEKQKYARAVNESEGYGNDRVVSDKQVLDWSYRLTLRVFPETKRRLSLWPKIPTDFSEKLEEFSTKVKSMMEYLLRCMARSLNLEEGSFVDQFGEQPLMLSRFNFYPLCSRPDLVLGVKPHTDRSGITVLLQDKEVEGLQVLIDDNWINVPTMPDALVVNLGDQMQIMSNGIFKSIMHRVVTNTEKLRMSVAMFNEPEAENEIGPVEGLIDESRPRLYRNVKNYGDINYKCYQEGKIALETVKIADNSNQR

SEQ ID NO: 9748 - DNA, 1398 bp, Glycine max
  misc_feature (1)..(1398): Ceres Seq. ID no. 13639476
aaacgcatagcgcgaatttacaaaactagccaggaacaggccctgtctttccgatattcaccatctctttctctctaatccaaaaaaaaatctgttgtgaacaaacacacattattgtttgttttcatcccacggaaaaatcgatcaggcaaaacaaacaaaggtgaaactgaataggtgcgtgtttgtgttgatgggctaagaggacagagaaaaagaaagaaagagtataaaatcaaatctggcaaatctcgtggggttgagggctcggtcttcgtcgaagcaagcttcccctgatttgcaggacgacgaggaggagtgcaggccttggcgtcgaaggttaataatgtctttctcctggtcctccacccttaggatcaccatcctcctcctcctcctcgccgcggtcatcgtcgcgtgcttcactctccccatcgaaaagatgatgaaggacttcttattatgggtcgatcacgatcttggcccctggggcccacttgttctggctgttgcttacattcctttgactgtcttggctgttccagcttcagtgcttactcttggtggaggttatctttttgggcttccggtgggatttgttgttgactctataggtgcaactgttggtgccggagctgcatttcttcttggtagaacaattgggagatcatttgtcgtttctaggttgaaggattatccacaattcagatcagtggcaattgcaattcgaagatctggttttaagattgtattactgcttcggcttgttccactcctaccgtttaacatgctaaattatctcttgtcggtgactcctgtttcaataggggaatacatgctggcttcctggttaggaatgatgccaataacactggcacttgtatatgttggaacaactcttaaagatctttctgatgttacacatggttggggcgagttctcaaagactcgttgggcgtttatcattcttggtcttgtgatatcggttgttctgatgatatgtgttactagagttgccaaggctgctttagataaagccttggccgaaaatgaagatattgatgggattacttcctcgccagatttacctattgttgctgaaccatcagcagatcttaaccaacctctcataattaagatagattcttctgaagacagtcatgaaaagtgaattctattttgtgtaaattctttcttcactctaccttttataaaggctatggttttaattttaagctttagcggtagctggttgcttctatttattcgcgatttgtacagtttcaacattagaaatatagtttgtgacaggagtgtttaatcctaattcctacaaccaacatgacattatggactttgtgttttatttcttttgacagcagaaaagttcatgctatg

SEQ ID NO: 9749 - protein, 274 aa, Glycine max
  peptide (1)..(274): Ceres Seq. ID no. 13639477
  misc_feature (1)..(274): NCBI GI NO: 23617115 NR Description: contains EST AU173803
  misc_feature (1)..(269): NCBI GI NO: 30687125 NR Description: expressed protein [Arabidopsis thaliana]
  misc_feature (1)..(268): NCBI GI NO: 40823094 NR Description: At1g03260 [Arabidopsis thaliana]
  misc_feature (1)..(268): NCBI GI NO: 30678508 NR Description: expressed protein [Arabidopsis thaliana]
  misc_feature (1)..(268): NCBI GI NO: 25406732 NR Description: protein F15K9.14 [imported] - Arabidopsis thaliana
  misc_feature (31)..(233): NCBI GI NO: 23042280 NR Description: hypothetical protein
  misc_feature (14)..(243): NCBI GI NO: 32476849 NR Description: conserved hypothetical protein [Pirellula sp.]
  misc_feature (6)..(236): NCBI GI NO: 23128176 NR Description: hypothetical protein [Nostoc punctiforme]
  misc_feature (4)..(239): NCBI GI NO: 17229699 NR Description: hypothetical protein [Nostoc sp. PCC 7120]
  misc_feature (31)..(232): NCBI GI NO: 23128177 NR Description: hypothetical protein [Nostoc punctiforme]
MSFSWSSTLRITILLLLLAAVIVACFTLPIEKMMKDFLLWVDHDLGPWGPLVLAVAYIPLTVLAVPASVLTLGGGYLFGLPVGFVVDSIGATVGAGAAFLLGRTIGRSFVVSRLKDYPQFRSVAIAIRRSGFKIVLLLRLVPLLPFNMLNYLLSVTPVSIGEYMLASWLGMMPITLALVYVGTTLKDLSDVTHGWGEFSKTRWAFIILGLVISVVLMICVTRVAKAALDKALAENEDIDGITSSPDLPIVAEPSADLNQPLIIKIDSSEDSHEK

SEQ ID NO: 9750 - protein, 242 aa, Glycine max
  peptide (1)..(242): Ceres Seq. ID no. 13639478
  misc_feature (1)..(242): NCBI GI NO: 23617115 NR Description: contains EST AU173803
  misc_feature (1)..(237): NCBI GI NO: 30687125 NR Description: expressed protein [Arabidopsis thaliana]
  misc_feature (1)..(236): NCBI GI NO: 40823094 NR Description: At1g03260 [Arabidopsis thaliana]
  misc_feature (1)..(236): NCBI GI NO: 30678508 NR Description: expressed protein [Arabidopsis thaliana]
  misc_feature (1)..(236): NCBI GI NO: 25406732 NR Description: protein F15K9.14 [imported] - Arabidopsis thaliana
  misc_feature (1)..(201): NCBI GI NO: 23042280 NR Description: hypothetical protein
  misc_feature (1)..(211): NCBI GI NO: 32476849 NR Description: conserved hypothetical protein [Pirellula sp.]
  misc_feature (1)..(204): NCBI GI NO: 23128176 NR Description: hypothetical protein [Nostoc punctiforme]
  misc_feature (1)..(207): NCBI GI NO: 17229699 NR Description: hypothetical protein [Nostoc sp. PCC 7120]
  misc_feature (1)..(200): NCBI GI NO: 23128177 NR Description: hypothetical protein [Nostoc punctiforme]
MMKDFLLWVDHDLGPWGPLVLAVAYIPLTVLAVPASVLTLGGGYLFGLPVGFVVDSIGATVGAGAAFLLGRTIGRSFVVSRLKDYPQFRSVAIAIRRSGFKIVLLLRLVPLLPFNMLNYLLSVTPVSIGEYMLASWLGMMPITLALVYVGTTLKDLSDVTHGWGEFSKTRWAFIILGLVISVVLMICVTRVAKAALDKALAENEDIDGITSSPDLPIVAEPSADLNQPLIIKIDSSEDSHEK

SEQ ID NO: 9751 - protein, 241 aa, Glycine max
  peptide (1)..(241): Ceres Seq. ID no. 13639479
  misc_feature (1)..(241): NCBI GI NO: 23617115 NR Description: contains EST AU173803
  misc_feature (1)..(236): NCBI GI NO: 30687125 NR Description: expressed protein [Arabidopsis thaliana]
  misc_feature (1)..(235): NCBI GI NO: 40823094 NR Description: At1g03260 [Arabidopsis thaliana]
  misc_feature (1)..(235): NCBI GI NO: 30678508 NR Description: expressed protein [Arabidopsis thaliana]
  misc_feature (1)..(235): NCBI GI NO: 25406732 NR Description: protein F15K9.14 [imported] - Arabidopsis thaliana
  misc_feature (1)..(200): NCBI GI NO: 23042280 NR Description: hypothetical protein
  misc_feature (1)..(210): NCBI GI NO: 32476849 NR Description: conserved hypothetical protein [Pirellula sp.]
  misc_feature (1)..(203): NCBI GI NO: 23128176 NR Description: hypothetical protein [Nostoc punctiforme]
  misc_feature (1)..(206): NCBI GI NO: 17229699 NR Description: hypothetical protein [Nostoc sp. PCC 7120]
  misc_feature (1)..(199): NCBI GI NO: 23128177 NR Description: hypothetical protein [Nostoc punctiforme]
MKDFLLWVDHDLGPWGPLVLAVAYIPLTVLAVPASVLTLGGGYLFGLPVGFVVDSIGATVGAGAAFLLGRTIGRSFVVSRLKDYPQFRSVAIAIRRSGFKIVLLLRLVPLLPFNMLNYLLSVTPVSIGEYMLASWLGMMPITLALVYVGTTLKDLSDVTHGWGEFSKTRWAFIILGLVISVVLMICVTRVAKAALDKALAENEDIDGITSSPDLPIVAEPSADLNQPLIIKIDSSEDSHEK

SEQ ID NO: 9752 - DNA, 1217 bp, Glycine max
  misc_feature (1)..(1217): Ceres Seq. ID no. 15227285
cccgggccccccctcgagtcagctgcaggcccccccccccccaacagcactgagtaacggcaaagtccttgctggttgcttccattcgcgatggcgttgcaggagaggctagacaagttcaagaaacagcaagagaagtgccaaacgacactttcgaccattgcagctaccaaggccgccgcggcaacccaaaagtccgccacacatgcctcggcaaatggaagaaacgctgcccctgcggttaagttttccaacgacaccgagaggcttcagcatattaatagcattcgcaaggcccctgtgggtgctcagatgaagcgtgttattgatcttcttctagagacacgacaagcttttacaccggagcagataaatgaggcatgctatgtcgacatgaaggctaacaaagatgtctttgagaatctgaggaaaaacccaaaagtgaactatgatgggcaacgattatcttacaagtcaaagtatggtattaaggacaaaacagagcttcttcaactggtacgaaagtatcccgagggccttgctgttattgatctcaaggatgcttaccccactgtgatggaagatttgcaggctatgaaagctgcagggcagatttggcttctgtccaacttcgattcacaggaagacattgcctaccctaacgaccccaaagtacacattaaggtggatgatgacctaaaacatcttttccgcagtattgaattgcctcgtgatatgattgatatagagaaggatcttcaaaagaatggaatgaagcccgctaccaacactgcacagaggaggagtgcagctcaaattcaaggcatttcttccaagccaaagcctaagaagaagaagagtgaaatcagcaagagaacgaagcttaccaatgctcatcttccagagctctttcagaatttaaacagttcctgattaactctcatcaagtggttgtgtagttcaaatagatactttatcagccagtctaaactagattagcattgtgaaatattcaggaggttcttgctgctgtgccctacttttatttgtttttttattttatttttttttatttctgtacatcgaggctgcagctaatggactattgtactcgtcctaatttgtgaatccttgtatattatcatcatgttgcatttaaatttttagtcttgcaagtttataaaaaaaaaaaaaaaaaagaattcctgcwgcccttt

SEQ ID NO: 9753 - protein, 280 aa, Glycine max
  peptide (1)..(280): Ceres Seq. ID no. 15227286
  misc_feature (1)..(279): NCBI GI NO: 37534050 NR Description: putative Transcription initiation factor IIE
  misc_feature (1)..(280): NCBI GI NO: 15235379 NR Description: expressed protein [Arabidopsis thaliana]
  misc_feature (1)..(276): NCBI GI NO: 15233477 NR Description: expressed protein [Arabidopsis thaliana]
  misc_feature (1)..(274): NCBI GI NO: 39545898 NR Description: TFIIE-beta 1 [Arabidopsis thaliana]
  misc_feature (3)..(270): NCBI GI NO: 228298 NR Description: transcription factor IIE:SUBUNIT=small 34kD
  misc_feature (56)..(273): NCBI GI NO: 19074285 NR Description: TRANSCRIPTION INITIATION FACTOR TFIIE BETA SUBUNIT
  misc_feature (3)..(270): NCBI GI NO: 267060 NR Description: Transcription initiation factor IIE, beta subunit
MALQERLDKFKKQQEKCQTTLSTIAATKAAAATQKSATHASANGRNAAPAVKFSNDTERLQHINSIRKAPVGAQMKRVIDLLLETRQAFTPEQINEACYVDMKANKDVFENLRKNPKVNYDGQRLSYKSKYGIKDKTELLQLVRKYPEGLAVIDLKDAYPTVMEDLQAMKAAGQIWLLSNFDSQEDIAYPNDPKVHIKVDDDLKHLFRSIELPRDMIDIEKDLQKNGMKPATNTAQRRSAAQIQGISSKPKPKKKKSEISKRTKLTNAHLPELFQNLNSS

SEQ ID NO: 9754 - protein, 206 aa, Glycine max
  peptide (1)..(206): Ceres Seq. ID no. 15227287
  misc_feature (1)..(205): NCBI GI NO: 37534050 NR Description: putative Transcription initiation factor IIE
  misc_feature (1)..(206): NCBI GI NO: 15235379 NR Description: expressed protein [Arabidopsis thaliana]
  misc_feature (1)..(202): NCBI GI NO: 15233477 NR Description: expressed protein [Arabidopsis thaliana]
  misc_feature (1)..(200): NCBI GI NO: 39545898 NR Description: TFIIE-beta 1 [Arabidopsis thaliana]
  misc_feature (1)..(196): NCBI GI NO: 228298 NR Description: transcription factor IIE:SUBUNIT=small 34kD
  misc_feature (1)..(199): NCBI GI NO: 19074285 NR Description: TRANSCRIPTION INITIATION FACTOR TFIIE BETA SUBUNIT
  misc_feature (1)..(196): NCBI GI NO: 267060 NR Description: Transcription initiation factor IIE, beta subunit
MKRVIDLLLETRQAFTPEQINEACYVDMKANKDVFENLRKNPKVNYDGQRLSYKSKYGIKDKTELLQLVRKYPEGLAVIDLKDAYPTVMEDLQAMKAAGQIWLLSNFDSQEDIAYPNDPKVHIKVDDDLKHLFRSIELPRDMIDIEKDLQKNGMKPATNTAQRRSAAQIQGISSKPKPKKKKSEISKRTKLTNAHLPELFQNLNSS

SEQ ID NO: 9755 - protein, 179 aa, Glycine max
  peptide (1)..(179): Ceres Seq. ID no. 15227288
  misc_feature (1)..(178): NCBI GI NO: 37534050 NR Description: putative Transcription initiation factor IIE
  misc_feature (1)..(179): NCBI GI NO: 15235379 NR Description: expressed protein [Arabidopsis thaliana]
  misc_feature (1)..(175): NCBI GI NO: 15233477 NR Description: expressed protein [Arabidopsis thaliana]
  misc_feature (1)..(173): NCBI GI NO: 39545898 NR Description: TFIIE-beta 1 [Arabidopsis thaliana]
  misc_feature (1)..(169): NCBI GI NO: 228298 NR Description: transcription factor IIE:SUBUNIT=small 34kD
  misc_feature (1)..(172): NCBI GI NO: 19074285 NR Description: TRANSCRIPTION INITIATION FACTOR TFIIE BETA SUBUNIT
  misc_feature (1)..(169): NCBI GI NO: 267060 NR Description: Transcription initiation factor IIE, beta subunit
MKANKDVFENLRKNPKVNYDGQRLSYKSKYGIKDKTELLQLVRKYPEGLAVIDLKDAYPTVMEDLQAMKAAGQIWLLSNFDSQEDIAYPNDPKVHIKVDDDLKHLFRSIELPRDMIDIEKDLQKNGMKPATNTAQRRSAAQIQGISSKPKPKKKKSEISKRTKLTNAHLPELFQNLNSS

SEQ ID NO: 9756 - DNA, 1195 bp, Glycine max
  misc_feature (1)..(1195): Ceres Seq. ID no. 13581579
cagctacgtaggccccccccccggaagttccacttaagacatcactcacttccccctctctgctttttgcagtcctcctttacctgcaaaaacagcaaatggctctgcttaacctcatacttgtctggttatttttcttgagtctgtgtctttattcgtgtcctacttcggcccagttaagtagacaccactatgcaaaaacttgccccaatgtagaaaacattgtcagagaagcagtcaaaaagaagtttcatcaaacatttgttacggtccctgccaccattcgtctcttcttccatgattgcttcgtgcagggctgtgatgcctcggttttggttgcatccacaaaaaacaacaaagcagagaaggatcaccctgataatctttcactagctggagatgggtttgatacagtgattaaagcaaaagaagcagtggatgcagttccattgtgcaggaacaaagtttcatgtgctgatattttagctatggcaacccgtgatgttattgcactggctggtgggcctttctacgaggttgaattgggaagatttgatgggctaagatctaaatcttcagatgtaaataggaggctgcctcaggcagagttcaacttgaaccagctgaattcactgtttgcggccaacggcctcacccaaactgaaatgatagctctgtcaggtgctcacactgttggattctcccattgcaacaaattcacgaacagagtatacaatttcaagagcaaaagtcgagtggaccctacactgaacgagaaatacgcaacacagctaaggtcaatgtgcccaaggaatgtggatccaaggattgcaatcgatatggacccaaccactccacggtcattcgacaatgtttatttcaagaatcttcagcaagggaagggcctcttctcttcagaccaagttctcttcacggactcaagatccaaggccacagtaaatgcctttgctagtagcagcaatatctttcatgccaacttcgctgctgccatgaccaaattgggccgagttggagtcaagaatgcacagaatggaaacattcgcaccgattgttctgtcatttaatttacgataaaaacaactcatgttaaggagggacattattatctagtcaggggaattcgttatgtatattatttaccctgtgtttaaaataataagtactgaaagtattt

SEQ ID NO: 9757 - protein, 328 aa, Glycine max
  peptide (1)..(328): Ceres Seq. ID no. 13581580
  misc_feature (43)..(293): Pfam Name: Pfam Description:  Peroxidase
  misc_feature (4)..(328): NCBI GI NO: 7433086 NR Description: peroxidase (EC 1
  misc_feature (5)..(328): NCBI GI NO: 4138647 NR Description: peroxidase [Trifolium repens]
  misc_feature (1)..(328): NCBI GI NO: 2117624 NR Description: peroxidase (EC 1.11.1.7) 2 precursor - alfalfa
  misc_feature (1)..(328): NCBI GI NO: 13992528 NR Description: peroxidase2 [Medicago sativa]
  misc_feature (1)..(325): NCBI GI NO: 14485511 NR Description: putative peroxidase [Solanum tuberosum]
  misc_feature (5)..(327): NCBI GI NO: 7433082 NR Description: probable peroxidase (EC 1
  misc_feature (1)..(325): NCBI GI NO: 15235600 NR Description: peroxidase, putative [Arabidopsis thaliana]
  misc_feature (1)..(325): NCBI GI NO: 17979440 NR Description: putative peroxidase [Arabidopsis thaliana]
  misc_feature (1)..(325): NCBI GI NO: 15235597 NR Description: peroxidase, putative [Arabidopsis thaliana]
  misc_feature (1)..(325): NCBI GI NO: 21554605 NR Description: peroxidase, prxr2 [Arabidopsis thaliana]
MALLNLILVWLFFLSLCLYSCPTSAQLSRHHYAKTCPNVENIVREAVKKKFHQTFVTVPATIRLFFHDCFVQGCDASVLVASTKNNKAEKDHPDNLSLAGDGFDTVIKAKEAVDAVPLCRNKVSCADILAMATRDVIALAGGPFYEVELGRFDGLRSKSSDVNRRLPQAEFNLNQLNSLFAANGLTQTEMIALSGAHTVGFSHCNKFTNRVYNFKSKSRVDPTLNEKYATQLRSMCPRNVDPRIAIDMDPTTPRSFDNVYFKNLQQGKGLFSSDQVLFTDSRSKATVNAFASSSNIFHANFAAAMTKLGRVGVKNAQNGNIRTDCSVI

SEQ ID NO: 9758 - protein, 198 aa, Glycine max
  peptide (1)..(198): Ceres Seq. ID no. 13581581
  misc_feature (1)..(163): Pfam Name: Pfam Description:  Peroxidase
  misc_feature (1)..(198): NCBI GI NO: 7433086 NR Description: peroxidase (EC 1
  misc_feature (1)..(198): NCBI GI NO: 4138647 NR Description: peroxidase [Trifolium repens]
  misc_feature (1)..(198): NCBI GI NO: 2117624 NR Description: peroxidase (EC 1.11.1.7) 2 precursor - alfalfa
  misc_feature (1)..(198): NCBI GI NO: 13992528 NR Description: peroxidase2 [Medicago sativa]
  misc_feature (1)..(195): NCBI GI NO: 14485511 NR Description: putative peroxidase [Solanum tuberosum]
  misc_feature (1)..(197): NCBI GI NO: 7433082 NR Description: probable peroxidase (EC 1
  misc_feature (1)..(195): NCBI GI NO: 15235600 NR Description: peroxidase, putative [Arabidopsis thaliana]
  misc_feature (1)..(195): NCBI GI NO: 17979440 NR Description: putative peroxidase [Arabidopsis thaliana]
  misc_feature (1)..(195): NCBI GI NO: 15235597 NR Description: peroxidase, putative [Arabidopsis thaliana]
  misc_feature (1)..(195): NCBI GI NO: 21554605 NR Description: peroxidase, prxr2 [Arabidopsis thaliana]
MATRDVIALAGGPFYEVELGRFDGLRSKSSDVNRRLPQAEFNLNQLNSLFAANGLTQTEMIALSGAHTVGFSHCNKFTNRVYNFKSKSRVDPTLNEKYATQLRSMCPRNVDPRIAIDMDPTTPRSFDNVYFKNLQQGKGLFSSDQVLFTDSRSKATVNAFASSSNIFHANFAAAMTKLGRVGVKNAQNGNIRTDCSVI

SEQ ID NO: 9759 - DNA, 1346 bp, Glycine max
  misc_feature (1)..(1346): Ceres Seq. ID no. 15171453
atcatggccgcatcgattcaggacgccaagaaccgcatctcgcagatcgagcgtgtcttttgctctaagctccaccctctctttaaatccgacatcgcattgaaacgccgccgcatccagtacctcgaggagttgctgcactccaaagagtccgcgctccgcgactcctaggcgaagcgaaacgccgcgttttcgaagctcgagagctgcgagggcgagaaggcgacgctgctggcgagaattgacgagttggacgagaaattgagattgaagacgcgggagattgaggaggcggacgggaagctactcgagcgcgtggaggcgctgacgtgcgagttaagggatgagaaattgaagaggaatcgcgtgacggaggcgtataagaggcttaagtctcagcacgtttaccttcggagaaaggttggtctcggtgaagagaatgtggttcaggaaaacaaattggagtgtgcaagtgaattggagatgcttcagagtccaatcgtaaaacctggtcttgcattttagaacccaaatatgactatggatcctagtgatagcgatacagctgaagtgaggaaccaaatcccagaggaagattttggaggccttgaaacgaaaactccagatgtgtttgttgccacatgtgtcataaagagagtcaaggagaagccatctgagattgacagagggtgtaatttgagttctccatcttctggttttcgtgatgtcccaaaatgtccatccaatacaaaattagtctctgtatctagtacaaagcgccctgtatcttcctggaggcaaacccggtcccatcaaagtcgagtaggtcctgatcttcatgatgattttcttgatacttctcttgagaatatcagagaaaatttaaataaggatttgaacaaggaagaccaaccatgcctgattcagaaagacattagtgcggacagctcagatgacgaaacacacgatatgaatgccaaaagcagtcctcagaagaagcaaaagcaatcttctgttacagtggccaacacaagaagtttcaagtacgttgaaccagttaggaagaaagctgagcgtgaaaatttaaaaggagttgaatgcaaacaatgcaggaagttctatgatgctgttcttcctaatgctgatggcaaggatgctgacagtaagcagagcttccgctgtgaacaccttgatggtgtttctaggcatcgatataggtatgttcctcccatgactcctgaaggattttggaatattgggtttgaatctgaaatgtaagaatatattttagagagatcagagattactatttgatttataaatggattctgtatccaattaaaaag

SEQ ID NO: 9760 - protein, 247 aa, Glycine max
  peptide (1)..(247): Ceres Seq. ID no. 15171454
  misc_feature (1)..(52): NCBI GI NO: 30693587 NR Description: predicted protein [Arabidopsis thaliana]
  misc_feature (55)..(247): NCBI GI NO: 30693587 NR Description: predicted protein [Arabidopsis thaliana]
  misc_feature (1)..(52): NCBI GI NO: 11357299 NR Description: gamma response I protein
  misc_feature (55)..(247): NCBI GI NO: 11357299 NR Description: gamma response I protein
  misc_feature (1)..(52): NCBI GI NO: 11357298 NR Description: gamma response I protein - Arabidopsis thaliana
  misc_feature (55)..(247): NCBI GI NO: 11357298 NR Description: gamma response I protein - Arabidopsis thaliana
  misc_feature (100)..(247): NCBI GI NO: 34880527 NR Description: similar to Retinoblastoma-binding protein 8
  misc_feature (100)..(247): NCBI GI NO: 29747802 NR Description: Similar to retinoblastoma binding protein 8
  misc_feature (100)..(247): NCBI GI NO: 18044620 NR Description: 9930104E21Rik protein [Mus musculus]
  misc_feature (81)..(247): NCBI GI NO: 4506441 NR Description: retinoblastoma binding protein 8
MTMDPSDSDTAEVRNQIPEEDFGGLETKTPDVFVATCVIKRVKEKPSEIDRGCNLSSPSSGFRDVPKCPSNTKLVSVSSTKRPVSSWRQTRSHQSRVGPDLHDDFLDTSLENIRENLNKDLNKEDQPCLIQKDISADSSDDETHDMNAKSSPQKKQKQSSVTVANTRSFKYVEPVRKKAERENLKGVECKQCRKFYDAVLPNADGKDADSKQSFRCEHLDGVSRHRYRYVPPMTPEGFWNIGFESEM

SEQ ID NO: 9761 - protein, 245 aa, Glycine max
  peptide (1)..(245): Ceres Seq. ID no. 15171455
  misc_feature (1)..(50): NCBI GI NO: 30693587 NR Description: predicted protein [Arabidopsis thaliana]
  misc_feature (53)..(245): NCBI GI NO: 30693587 NR Description: predicted protein [Arabidopsis thaliana]
  misc_feature (1)..(50): NCBI GI NO: 11357299 NR Description: gamma response I protein
  misc_feature (53)..(245): NCBI GI NO: 11357299 NR Description: gamma response I protein
  misc_feature (1)..(50): NCBI GI NO: 11357298 NR Description: gamma response I protein - Arabidopsis thaliana
  misc_feature (53)..(245): NCBI GI NO: 11357298 NR Description: gamma response I protein - Arabidopsis thaliana
  misc_feature (98)..(245): NCBI GI NO: 34880527 NR Description: similar to Retinoblastoma-binding protein 8
  misc_feature (98)..(245): NCBI GI NO: 29747802 NR Description: Similar to retinoblastoma binding protein 8
  misc_feature (98)..(245): NCBI GI NO: 18044620 NR Description: 9930104E21Rik protein [Mus musculus]
  misc_feature (79)..(245): NCBI GI NO: 4506441 NR Description: retinoblastoma binding protein 8
MDPSDSDTAEVRNQIPEEDFGGLETKTPDVFVATCVIKRVKEKPSEIDRGCNLSSPSSGFRDVPKCPSNTKLVSVSSTKRPVSSWRQTRSHQSRVGPDLHDDFLDTSLENIRENLNKDLNKEDQPCLIQKDISADSSDDETHDMNAKSSPQKKQKQSSVTVANTRSFKYVEPVRKKAERENLKGVECKQCRKFYDAVLPNADGKDADSKQSFRCEHLDGVSRHRYRYVPPMTPEGFWNIGFESEM

SEQ ID NO: 9762 - DNA, 1432 bp, Glycine max
  misc_feature (1)..(1432): Ceres Seq. ID no. 14312851
attactgatatttctctgttaatattctgctccaattacccttctaaatctttgcgctcacttgtcagtatctttcctttgttctgcactgcttttcttgtgcatagtagtaagtgataatgctttgaattcgatgatctttctttcttcaggacgatggccgctacttttaaacaccatcctacgggacttcacggttggggcgctccgagatcttctagaaatctcccaagcttcttctcaatgcgtttcccctgcagcactcgccaccatcacattcgtgcttccgtttctcaccactcatcaaccgaggctgagagtgctttgatattgattcgtcatggggagtctttgtggaatgagaagaacttgttcacgggatgttgcgatgtacctttgaccaatagaggtgtagaggaagctattgaagctggtcagaggattagctatatacccattgatatgatctttacgtccgcactcattcgtgcacagatgaccgctatgcttgcaatgactcagcactcccagaagaaggttcctattatcatccatgatgagagtgaacaggcaacaacttggactcaagtttacagtgaaaaaaccaccaagcaatctattccagttattacagcatggcagttgaatgaaagaatgtatggggagttacagggtcttaataagcaggagactgcagaaagatacggaaaggagaaggtgcatgaatggcgtcggagttttgacattcctcctcccaagggtgagagcctggaaatgtgttttcagagagctgttccgtattttaaagattttattgaaccccaactaaaatcaggaaagcacgtgatggttgctgctcatggaaactcattgaggtctattataatgtatctggacggattaacttctcaagaggtcactagtttagagatatcaactgggataccattgctttacatatacaaagaggggaagtttaacagtagaggaagtcctgtggggcctacagaagctggtgtttatgcatacactcagagtttagctgtttacagacaacagttggatgacatgtctagttgttattgatcctgcatttcaaagatcaaaatggtataaatatcgatattcatttttggtgggtgactctctgaatgttcatatgctaaacatcaatttgaaaattactggaaggaattgaccaatccatgacacttttaaatctgcaacctgcatagcgagacgtagaagccctgaaaaatttctgtactgtagcaaccaaagtagcaccaaaacaattttggttaaagagagtgaaaaacgggattagtaaatgacaatgtaagtttagaacttgtttgtgcctgaatggaagtgaacttataggtatagcttccatgtttagaacttacagggaattgaatttacggtaaat

SEQ ID NO: 9763 - protein, 309 aa, Glycine max
  peptide (1)..(309): Ceres Seq. ID no. 14312852
  misc_feature (55)..(277): Pfam Name: Pfam Description:  Phosphoglycerate mutase family
  misc_feature (54)..(306): NCBI GI NO: 18395083 NR Description: expressed protein [Arabidopsis thaliana]
  misc_feature (54)..(306): NCBI GI NO: 21618275 NR Description: unknown [Arabidopsis thaliana]
  misc_feature (54)..(306): NCBI GI NO: 21539557 NR Description: unknown protein [Arabidopsis thaliana]
  misc_feature (47)..(303): NCBI GI NO: 25405021 NR Description: protein F28K19.26
  misc_feature (114)..(303): NCBI GI NO: 15218201 NR Description: phosphoglycerate mutase -related
  misc_feature (57)..(282): NCBI GI NO: 29840659 NR Description: phosphoglycerate mutase
  misc_feature (57)..(282): NCBI GI NO: 15834720 NR Description: phosphoglycerate mutase [Chlamydia muridarum]
  misc_feature (57)..(273): NCBI GI NO: 15618772 NR Description: Phosphoglycerate Mutase
  misc_feature (57)..(282): NCBI GI NO: 15605455 NR Description: Phosphoglycerate Mutase [Chlamydia trachomatis]
  misc_feature (57)..(273): NCBI GI NO: 15836396 NR Description: phosphoglycerate mutase
MAATFKHHPTGLHGWGAPRSSRNLPSFFSMRFPCSTRHHHIRASVSHHSSTEAESALILIRHGESLWNEKNLFTGCCDVPLTNRGVEEAIEAGQRISYIPIDMIFTSALIRAQMTAMLAMTQHSQKKVPIIIHDESEQATTWTQVYSEKTTKQSIPVITAWQLNERMYGELQGLNKQETAERYGKEKVHEWRRSFDIPPPKGESLEMCFQRAVPYFKDFIEPQLKSGKHVMVAAHGNSLRSIIMYLDGLTSQEVTSLEISTGIPLLYIYKEGKFNSRGSPVGPTEAGVYAYTQSLAVYRQQLDDMSSCY

SEQ ID NO: 9764 - protein, 280 aa, Glycine max
  peptide (1)..(280): Ceres Seq. ID no. 14312853
  misc_feature (26)..(248): Pfam Name: Pfam Description:  Phosphoglycerate mutase family
  misc_feature (25)..(277): NCBI GI NO: 18395083 NR Description: expressed protein [Arabidopsis thaliana]
  misc_feature (25)..(277): NCBI GI NO: 21618275 NR Description: unknown [Arabidopsis thaliana]
  misc_feature (25)..(277): NCBI GI NO: 21539557 NR Description: unknown protein [Arabidopsis thaliana]
  misc_feature (18)..(274): NCBI GI NO: 25405021 NR Description: protein F28K19.26
  misc_feature (85)..(274): NCBI GI NO: 15218201 NR Description: phosphoglycerate mutase -related
  misc_feature (28)..(253): NCBI GI NO: 29840659 NR Description: phosphoglycerate mutase
  misc_feature (28)..(253): NCBI GI NO: 15834720 NR Description: phosphoglycerate mutase [Chlamydia muridarum]
  misc_feature (28)..(244): NCBI GI NO: 15618772 NR Description: Phosphoglycerate Mutase
  misc_feature (28)..(253): NCBI GI NO: 15605455 NR Description: Phosphoglycerate Mutase [Chlamydia trachomatis]
  misc_feature (28)..(244): NCBI GI NO: 15836396 NR Description: phosphoglycerate mutase
MRFPCSTRHHHIRASVSHHSSTEAESALILIRHGESLWNEKNLFTGCCDVPLTNRGVEEAIEAGQRISYIPIDMIFTSALIRAQMTAMLAMTQHSQKKVPIIIHDESEQATTWTQVYSEKTTKQSIPVITAWQLNERMYGELQGLNKQETAERYGKEKVHEWRRSFDIPPPKGESLEMCFQRAVPYFKDFIEPQLKSGKHVMVAAHGNSLRSIIMYLDGLTSQEVTSLEISTGIPLLYIYKEGKFNSRGSPVGPTEAGVYAYTQSLAVYRQQLDDMSSCY

SEQ ID NO: 9765 - protein, 207 aa, Glycine max
  peptide (1)..(207): Ceres Seq. ID no. 14312854
  misc_feature (1)..(175): Pfam Name: Pfam Description:  Phosphoglycerate mutase family
  misc_feature (1)..(204): NCBI GI NO: 18395083 NR Description: expressed protein [Arabidopsis thaliana]
  misc_feature (1)..(204): NCBI GI NO: 21618275 NR Description: unknown [Arabidopsis thaliana]
  misc_feature (1)..(204): NCBI GI NO: 21539557 NR Description: unknown protein [Arabidopsis thaliana]
  misc_feature (1)..(201): NCBI GI NO: 25405021 NR Description: protein F28K19.26
  misc_feature (12)..(201): NCBI GI NO: 15218201 NR Description: phosphoglycerate mutase -related
  misc_feature (1)..(180): NCBI GI NO: 29840659 NR Description: phosphoglycerate mutase
  misc_feature (1)..(180): NCBI GI NO: 15834720 NR Description: phosphoglycerate mutase [Chlamydia muridarum]
  misc_feature (1)..(171): NCBI GI NO: 15618772 NR Description: Phosphoglycerate Mutase
  misc_feature (1)..(180): NCBI GI NO: 15605455 NR Description: Phosphoglycerate Mutase [Chlamydia trachomatis]
  misc_feature (1)..(171): NCBI GI NO: 15836396 NR Description: phosphoglycerate mutase
MIFTSALIRAQMTAMLAMTQHSQKKVPIIIHDESEQATTWTQVYSEKTTKQSIPVITAWQLNERMYGELQGLNKQETAERYGKEKVHEWRRSFDIPPPKGESLEMCFQRAVPYFKDFIEPQLKSGKHVMVAAHGNSLRSIIMYLDGLTSQEVTSLEISTGIPLLYIYKEGKFNSRGSPVGPTEAGVYAYTQSLAVYRQQLDDMSSCY

SEQ ID NO: 9766 - DNA, 824 bp, Glycine max
  misc_feature (1)..(824): Ceres Seq. ID no. 13581380
aattcctctgagccagatgttattcttctagaacctgatcaaattcatgaaaacactccatttgtttcttcgaaaacatatgattcatcttggttcgaaactgaaaagaatcccaaagacaactggcaattacctgcttacggtaattctcagtttaggagaagacttatgaatgatcttcaaaggccttatgaccaagaagaatgtgatagacttctgcttgaagtacgtcagaaaaaacaaaaggaacgtcatagagaaacacgtcatggggtggtcaagttttgtcgcactaggggtgtcagcgaatcatatcttgacttgtaccctgatctagctaaagcaattgccgaattcaaaaaaccggaaaaggttttgtttctcttgcgtggatttattttctggttgcaaaatgtgacccacgaaggaaaatttcgaccttggcttgacaagcattgtttggactttttacgacaaatgaaaaattggaatcttgctaaatttggaagcaagagtttaactaacatagtcaacaaagtttacatacgtacagttaaatctatcttggaactttgacctagttgtagaaagaaagatagctagagttgtggttctcatcaggagttctttcatttctgttaaaccgtggttctctttttgtccaccgttttttgtaccattgagaagatggtgataaactgataattgaggggcttaggtggctagcatatgctgtaatataatgttatattcttcctaagctagtttttgttgagcccaaatgcaagatatctaggactctgttcaaaaagactaatttttat

SEQ ID NO: 9767 - protein, 191 aa, Glycine max
  peptide (1)..(191): Ceres Seq. ID no. 13581381
  misc_feature (1)..(154): NCBI GI NO: 15219016 NR Description: expressed protein [Arabidopsis thaliana]
  misc_feature (50)..(152): NCBI GI NO: 38345132 NR Description: OSJNBa0055H05.9
  misc_feature (3)..(157): NCBI GI NO: 22330693 NR Description: expressed protein [Arabidopsis thaliana]
  misc_feature (15)..(148): NCBI GI NO: 15234084 NR Description: hypothetical protein [Arabidopsis thaliana]
  misc_feature (17)..(148): NCBI GI NO: 15231501 NR Description: expressed protein [Arabidopsis thaliana]
NSSEPDVILLEPDQIHENTPFVSSKTYDSSWFETEKNPKDNWQLPAYGNSQFRRRLMNDLQRPYDQEECDRLLLEVRQKKQKERHRETRHGVVKFCRTRGVSESYLDLYPDLAKAIAEFKKPEKVLFLLRGFIFWLQNVTHEGKFRPWLDKHCLDFLRQMKNWNLAKFGSKSLTNIVNKVYIRTVKSILEL

SEQ ID NO: 9768 - protein, 135 aa, Glycine max
  peptide (1)..(135): Ceres Seq. ID no. 13581382
  misc_feature (1)..(98): NCBI GI NO: 15219016 NR Description: expressed protein [Arabidopsis thaliana]
  misc_feature (1)..(96): NCBI GI NO: 38345132 NR Description: OSJNBa0055H05.9
  misc_feature (1)..(101): NCBI GI NO: 22330693 NR Description: expressed protein [Arabidopsis thaliana]
  misc_feature (1)..(92): NCBI GI NO: 15234084 NR Description: hypothetical protein [Arabidopsis thaliana]
  misc_feature (1)..(92): NCBI GI NO: 15231501 NR Description: expressed protein [Arabidopsis thaliana]
MNDLQRPYDQEECDRLLLEVRQKKQKERHRETRHGVVKFCRTRGVSESYLDLYPDLAKAIAEFKKPEKVLFLLRGFIFWLQNVTHEGKFRPWLDKHCLDFLRQMKNWNLAKFGSKSLTNIVNKVYIRTVKSILEL

SEQ ID NO: 9769 - DNA, 1099 bp, Glycine max
  misc_feature (1)..(1099): Ceres Seq. ID no. 15176777
acaaagaaggctgtccaatgttagaagacaatctcagcaggttacggatatggtggtggaaatgcaatctaaaattggcagtaatcgagtgacgcgcatggagttacaagtagaacttgagaaagaaaggtttgccaagaaaagagtggaagagaatctggaggttgctaggagaaagtttacatgccttaaagaacagaatgagggctttttagtaactgaaaagcttcaacaggaacttgaagagtacagggaaattatcaagtgcagtatctgccaagacagggcaaaagaggtggtaattacaaaatgctaccacttgttctgctactcatgtatccagaaagttgctgggagtaggcatcgcaagtgtccacaatgtggtacaagctttggggctaacgatgttaagtctgtttatttgtaactagaaacttggttctctcccggatgtcgagaagaggctggtgttcttttgaaaaagatttggtgtatggatacctacataggaggttcaattgtatgcttagtgccaactgtcgagataaggaacattggcagcgatcaatgagttgcttgtctacatttggaccaaaaatgattattttttgctggtacttaatcttagtaccacctgctcgcatttttgaatctggaatgatgtttagttagcatttttaatagatagaacgaattcggagtcataggaaacgtgatatttgttctttgcagatttatcataatgcatcttccaatgcgatttggagaggggtcatgaaggttggtctttgaccctgcaattaataattcaaattcgaaagcctgaattggccatcatggcaaattttcttggaagttgactccaaaggtggcaaccacgatgcctcacatctgtatttctgtttctcctgctgaaatgacacaagtacaaattttggtttcaggggatttgtatatatgctagagtttataaggggtcgttcaattttgtttataacagcctgtaatttgtgtaatcgtagatgatatgactagatatcattgtaattgatgttgtgaaaagttaagaaagctcaagtttatcatttttttctatttc

SEQ ID NO: 9770 - protein, 141 aa, Glycine max
  peptide (1)..(141): Ceres Seq. ID no. 15176778
  misc_feature (89)..(127): Pfam Name: RING finger Pfam Description: Zinc finger, C3HC4 type
  misc_feature (1)..(141): NCBI GI NO: 38605849 NR Description: OSJNBb0034G17.7
  misc_feature (1)..(141): NCBI GI NO: 7486945 NR Description: hypothetical protein At2g44950
  misc_feature (1)..(141): NCBI GI NO: 30689877 NR Description: zinc finger
  misc_feature (20)..(139): NCBI GI NO: 37536934 NR Description: unknown protein
  misc_feature (34)..(139): NCBI GI NO: 21553880 NR Description: unknown [Arabidopsis thaliana]
  misc_feature (34)..(139): NCBI GI NO: 18405292 NR Description: zinc finger
  misc_feature (34)..(139): NCBI GI NO: 25405809 NR Description: unknown protein, 71207-66119
  misc_feature (11)..(141): NCBI GI NO: 33284892 NR Description: SI:bZ1C10.1.2 (novel ring finger protein)
  misc_feature (22)..(141): NCBI GI NO: 7023699 NR Description: unnamed protein product [Homo sapiens]
  misc_feature (39)..(141): NCBI GI NO: 31199093 NR Description: ENSANGP00000009515 [Anopheles gambiae]
QRRLSNVRRQSQQVTDMVVEMQSKIGSNRVTRMELQVELEKERFAKKRVEENLEVARRKFTCLKEQNEGFLVTEKLQQELEEYREIIKCSICQDRAKEVVITKCYHLFCYSCIQKVAGSRHRKCPQCGTSFGANDVKSVYL

SEQ ID NO: 9771 - protein, 125 aa, Glycine max
  peptide (1)..(125): Ceres Seq. ID no. 15176779
  misc_feature (73)..(111): Pfam Name: RING finger Pfam Description: Zinc finger, C3HC4 type
  misc_feature (1)..(125): NCBI GI NO: 38605849 NR Description: OSJNBb0034G17.7
  misc_feature (1)..(125): NCBI GI NO: 7486945 NR Description: hypothetical protein At2g44950
  misc_feature (1)..(125): NCBI GI NO: 30689877 NR Description: zinc finger
  misc_feature (4)..(123): NCBI GI NO: 37536934 NR Description: unknown protein
  misc_feature (18)..(123): NCBI GI NO: 21553880 NR Description: unknown [Arabidopsis thaliana]
  misc_feature (18)..(123): NCBI GI NO: 18405292 NR Description: zinc finger
  misc_feature (18)..(123): NCBI GI NO: 25405809 NR Description: unknown protein, 71207-66119
  misc_feature (1)..(125): NCBI GI NO: 33284892 NR Description: SI:bZ1C10.1.2 (novel ring finger protein)
  misc_feature (6)..(125): NCBI GI NO: 7023699 NR Description: unnamed protein product [Homo sapiens]
  misc_feature (23)..(125): NCBI GI NO: 31199093 NR Description: ENSANGP00000009515 [Anopheles gambiae]
MVVEMQSKIGSNRVTRMELQVELEKERFAKKRVEENLEVARRKFTCLKEQNEGFLVTEKLQQELEEYREIIKCSICQDRAKEVVITKCYHLFCYSCIQKVAGSRHRKCPQCGTSFGANDVKSVYL

SEQ ID NO: 9772 - protein, 121 aa, Glycine max
  peptide (1)..(121): Ceres Seq. ID no. 15176780
  misc_feature (69)..(107): Pfam Name: RING finger Pfam Description: Zinc finger, C3HC4 type
  misc_feature (1)..(121): NCBI GI NO: 38605849 NR Description: OSJNBb0034G17.7
  misc_feature (1)..(121): NCBI GI NO: 7486945 NR Description: hypothetical protein At2g44950
  misc_feature (1)..(121): NCBI GI NO: 30689877 NR Description: zinc finger
  misc_feature (1)..(119): NCBI GI NO: 37536934 NR Description: unknown protein
  misc_feature (14)..(119): NCBI GI NO: 21553880 NR Description: unknown [Arabidopsis thaliana]
  misc_feature (14)..(119): NCBI GI NO: 18405292 NR Description: zinc finger
  misc_feature (14)..(119): NCBI GI NO: 25405809 NR Description: unknown protein, 71207-66119
  misc_feature (1)..(121): NCBI GI NO: 33284892 NR Description: SI:bZ1C10.1.2 (novel ring finger protein)
  misc_feature (2)..(121): NCBI GI NO: 7023699 NR Description: unnamed protein product [Homo sapiens]
  misc_feature (19)..(121): NCBI GI NO: 31199093 NR Description: ENSANGP00000009515 [Anopheles gambiae]
MQSKIGSNRVTRMELQVELEKERFAKKRVEENLEVARRKFTCLKEQNEGFLVTEKLQQELEEYREIIKCSICQDRAKEVVITKCYHLFCYSCIQKVAGSRHRKCPQCGTSFGANDVKSVYL

SEQ ID NO: 9773 - DNA, 1267 bp, Glycine max
  misc_feature (1)..(1267): Ceres Seq. ID no. 15169045
gatttaaacaaactcctcccacttgcttcaacttcatcttatcaaagcctttcctgtttgcttttttcacaattcacttccttcatagagagtaatagagaaagaaaaaagagagagaaaaacagcacaaggatggagctttctcaacttggttttctggatgagctacttgctccaagaaaagacactagttggagtagtgctttgtccactgggttgaatgagttactactccctagtggttggagctttgactcttttgatgagaaccaaggtttatccactttgaatccctcatttgctgcattttcaactccactagaccacagatttgaatgcccttatggaagtgaagcagcatacccttttgttgatggcttcacattgcctgagcttgattcttcatacaccaggaatgatgagtcagcaccccttttgccacaagaggataacccatcattggaggatgaagagtttggctttctaggaagtgaaagccagagcttggaacaagcaaaaattggctgcaaaattgaggaactgacagagattccagtctttaacatgggcttgggtggggagaaaaggcccaaatcaaagaaactagaagggcagccatcaaagaatctcatggcagaaagaaggagaagaaagcgtttgaatgacaggctttccatgctaaggtcaatagtccctaagattagcaagatggacaggacctccattcttggagacaccattgattacatgaaagagcttctagaaaggataggcaagttgcaagaagaagaaatggaggagggaacaaatcggataaacctcttgggcatttctaaggagctaaagccaaatgaagtaatggtaagaaattcccccaagtttgatgttgagagaagagaccaggacacaaggattagcatctgctgtgccacaaagccaggattactactgtccacagtgaacaccttagaagcattaggccttgagattcaccagtgtgttataagcagcttcaatgatttttcaatgcaagcatcttgcacagaggtagcagagcagagaaattgtatgagccaggaagagataaagcaagcactattcagaaatgcaggttatggtggtagatgtctctaggagaaagatggaaagcagaaataacaatttgctgatgttgaaaaacaagcaaagttttcctcttgtgtaattcaaggaattaggagtgttacaaagtttaatgagatttcccaataagatgatggctttgatt

SEQ ID NO: 9774 - protein, 377 aa, Glycine max
  peptide (1)..(377): Ceres Seq. ID no. 15169046
  misc_feature (205)..(254): Pfam Name: Pfam Description:  Helix-loop-helix DNA-binding domain
  misc_feature (74)..(377): NCBI GI NO: 18424973 NR Description: bHLH protein [Arabidopsis thaliana]
  misc_feature (74)..(377): NCBI GI NO: 21537346 NR Description: unknown [Arabidopsis thaliana]
  misc_feature (195)..(377): NCBI GI NO: 15238199 NR Description: bHLH protein [Arabidopsis thaliana]
  misc_feature (195)..(377): NCBI GI NO: 20127062 NR Description: putative bHLH transcription factor
  misc_feature (108)..(375): NCBI GI NO: 22758263 NR Description: Putative bHLH transcription protein
  misc_feature (98)..(355): NCBI GI NO: 37536566 NR Description: hypothetical protein
  misc_feature (198)..(374): NCBI GI NO: 25513489 NR Description: F13K23.12 protein - Arabidopsis thaliana
  misc_feature (198)..(374): NCBI GI NO: 15222101 NR Description: bHLH protein [Arabidopsis thaliana]
  misc_feature (47)..(263): NCBI GI NO: 22331357 NR Description: bHLH protein family [Arabidopsis thaliana]
  misc_feature (277)..(374): NCBI GI NO: 22331357 NR Description: bHLH protein family [Arabidopsis thaliana]
DLNKLLPLASTSSYQSLSCLLFSQFTSFIESNRERKKREKNSTRMELSQLGFLDELLAPRKDTSWSSALSTGLNELLLPSGWSFDSFDENQGLSTLNPSFAAFSTPLDHRFECPYGSEAAYPFVDGFTLPELDSSYTRNDESAPLLPQEDNPSLEDEEFGFLGSESQSLEQAKIGCKIEELTEIPVFNMGLGGEKRPKSKKLEGQPSKNLMAERRRRKRLNDRLSMLRSIVPKISKMDRTSILGDTIDYMKELLERIGKLQEEEMEEGTNRINLLGISKELKPNEVMVRNSPKFDVERRDQDTRISICCATKPGLLLSTVNTLEALGLEIHQCVISSFNDFSMQASCTEVAEQRNCMSQEEIKQALFRNAGYGGRCL

SEQ ID NO: 9775 - protein, 333 aa, Glycine max
  peptide (1)..(333): Ceres Seq. ID no. 15169047
  misc_feature (161)..(210): Pfam Name: Pfam Description:  Helix-loop-helix DNA-binding domain
  misc_feature (30)..(333): NCBI GI NO: 18424973 NR Description: bHLH protein [Arabidopsis thaliana]
  misc_feature (30)..(333): NCBI GI NO: 21537346 NR Description: unknown [Arabidopsis thaliana]
  misc_feature (151)..(333): NCBI GI NO: 15238199 NR Description: bHLH protein [Arabidopsis thaliana]
  misc_feature (151)..(333): NCBI GI NO: 20127062 NR Description: putative bHLH transcription factor
  misc_feature (64)..(331): NCBI GI NO: 22758263 NR Description: Putative bHLH transcription protein
  misc_feature (54)..(311): NCBI GI NO: 37536566 NR Description: hypothetical protein
  misc_feature (154)..(330): NCBI GI NO: 25513489 NR Description: F13K23.12 protein - Arabidopsis thaliana
  misc_feature (154)..(330): NCBI GI NO: 15222101 NR Description: bHLH protein [Arabidopsis thaliana]
  misc_feature (3)..(219): NCBI GI NO: 22331357 NR Description: bHLH protein family [Arabidopsis thaliana]
  misc_feature (233)..(330): NCBI GI NO: 22331357 NR Description: bHLH protein family [Arabidopsis thaliana]
MELSQLGFLDELLAPRKDTSWSSALSTGLNELLLPSGWSFDSFDENQGLSTLNPSFAAFSTPLDHRFECPYGSEAAYPFVDGFTLPELDSSYTRNDESAPLLPQEDNPSLEDEEFGFLGSESQSLEQAKIGCKIEELTEIPVFNMGLGGEKRPKSKKLEGQPSKNLMAERRRRKRLNDRLSMLRSIVPKISKMDRTSILGDTIDYMKELLERIGKLQEEEMEEGTNRINLLGISKELKPNEVMVRNSPKFDVERRDQDTRISICCATKPGLLLSTVNTLEALGLEIHQCVISSFNDFSMQASCTEVAEQRNCMSQEEIKQALFRNAGYGGRCL

SEQ ID NO: 9776 - protein, 189 aa, Glycine max
  peptide (1)..(189): Ceres Seq. ID no. 15169048
  misc_feature (17)..(66): Pfam Name: Pfam Description:  Helix-loop-helix DNA-binding domain
  misc_feature (1)..(189): NCBI GI NO: 18424973 NR Description: bHLH protein [Arabidopsis thaliana]
  misc_feature (1)..(189): NCBI GI NO: 21537346 NR Description: unknown [Arabidopsis thaliana]
  misc_feature (7)..(189): NCBI GI NO: 15238199 NR Description: bHLH protein [Arabidopsis thaliana]
  misc_feature (7)..(189): NCBI GI NO: 20127062 NR Description: putative bHLH transcription factor
  misc_feature (1)..(187): NCBI GI NO: 22758263 NR Description: Putative bHLH transcription protein
  misc_feature (1)..(167): NCBI GI NO: 37536566 NR Description: hypothetical protein
  misc_feature (10)..(186): NCBI GI NO: 25513489 NR Description: F13K23.12 protein - Arabidopsis thaliana
  misc_feature (10)..(186): NCBI GI NO: 15222101 NR Description: bHLH protein [Arabidopsis thaliana]
  misc_feature (1)..(75): NCBI GI NO: 22331357 NR Description: bHLH protein family [Arabidopsis thaliana]
  misc_feature (89)..(186): NCBI GI NO: 22331357 NR Description: bHLH protein family [Arabidopsis thaliana]
MGLGGEKRPKSKKLEGQPSKNLMAERRRRKRLNDRLSMLRSIVPKISKMDRTSILGDTIDYMKELLERIGKLQEEEMEEGTNRINLLGISKELKPNEVMVRNSPKFDVERRDQDTRISICCATKPGLLLSTVNTLEALGLEIHQCVISSFNDFSMQASCTEVAEQRNCMSQEEIKQALFRNAGYGGRCL

SEQ ID NO: 9777 - DNA, 1943 bp, Glycine max
  misc_feature (1)..(1943): Ceres Seq. ID no. 14308477
tctctatccttctcccccttcctccaaaactgaccaagtcccatactcttccgccatatcactacttttcaacacgctctaatttaaacaatactcccactaccgcacatggatattttcacttcctatacataaccctattccgccatctcttttttcacacttcatttccttcttcttctctgattttggttcatggcgtgggcgaagaagccaggtgactcaaataatgtaggctttatgagatggttagcgttggtgttggtgttggtgttgttatcgggcttttggtgtgtttcgggtgtgaaagaaggaaaaaggaatgcgtacgcgacaatgatgtacgtaggtacgccgagggactacgaattctacatagccatacgcgtgcttctgaaatcgctggctacgctcgacgctcaagccgatcttgttgtcattgcttcccttgatgttcctcctcgctggattcgtgctcttgaaaaggaagatggtgcgaaagtagtgagagtggaaaatctggacaacccctacaagcatcaagataattttgacaagaggttcaagttatcgttgaacaaactctacgcatggagcttagtggactatgacagggtggtgatgttggacgctgataacctcttccttcaaaacacggacgagttgtttcaatgtggacaattctgtgcggtctttatcaatccttgtgtgttccacacaggactcttcgtcttgcagccatcgatgaccgtgttcaaggacatggttcatgaattacgtaatgggagagaaaatcctgatggtgcagaccagggtttcatagctagctatttcccagagttacttgataagccaatgtttcacccaccacctaatggcaccaagcttgatggaacatataggcttcctttgggttatcagatggatgcttcttactattatcttaaacttcgctggagcataccctgtggaccaaatagtgtgatcacattcccaggggcaccatggttgaagccatggtattggtggtcctggcctgttctgccattaggcctccagtggcatgataaacgtcgccaaactttagggtatggtgcggagatggctgtgatacttattcaatcggcaatatatttgggaataatagcaatgactcgttttgcaaggccaagtctctcaaagctatgctataggcgctctgacaagagcatcaacttggtgcagaacatcctcaaattggtggcattgtggagcatccttgcggcttacacaacacccttcttcatcattcctcacacggttcaccctttgttaggatggcctctctacttgcttggtgtctttgcattgtgctctattgcagtcaatgcctttctgctgccaatgttgccggttctgatgccgtggctcgggatcaccggtgctttgattgtcatggcttttccttggtattcagatggggtggtgagagcattgtgcgtttttggttatgcattctgtgctgcaccgtgtgtgtgggcatctatgactaggataatggcagggcttcaccagtctctagaaagggaagcttttttgccaagattaggagaatcttcaccaccctcttggtttaacaagttatattgagctgtctgattgagcatgattgaatgcttggggacatagatgacaagctcattggaaactgaaggggaggaagtgccatggatttagaaccattatgatgttacggtcgaaattatatacatttttcttggagcgagatggccatgttgcacttactaggaggaggaacaacgcggagttagtgtgtgtatataaagataaagattgttttgctatttttcacatacatatgtatcaattattgcacgattggttcttgtattcaaatttttaaacttgttagacagtgagataagatcagagagttcggcatc

SEQ ID NO: 9778 - protein, 477 aa, Glycine max
  peptide (1)..(477): Ceres Seq. ID no. 14308478
  misc_feature (42)..(477): NCBI GI NO: 17380986 NR Description: unknown protein [Arabidopsis thaliana]
  misc_feature (48)..(477): NCBI GI NO: 38345479 NR Description: OSJNBa0010H02.17
  misc_feature (42)..(477): NCBI GI NO: 37536746 NR Description: hypothetical protein
  misc_feature (96)..(477): NCBI GI NO: 18403930 NR Description: glycogenin glucosyltransferase
  misc_feature (42)..(254): NCBI GI NO: 15235811 NR Description: glycogenin glucosyltransferase
  misc_feature (283)..(477): NCBI GI NO: 15235811 NR Description: glycogenin glucosyltransferase
  misc_feature (42)..(248): NCBI GI NO: 25408409 NR Description: probable glycogenin
  misc_feature (283)..(475): NCBI GI NO: 25408409 NR Description: probable glycogenin
  misc_feature (18)..(293): NCBI GI NO: 22326882 NR Description: glycogenin glucosyltransferase
  misc_feature (18)..(293): NCBI GI NO: 18087513 NR Description: AT5g18480/F20L16_200 [Arabidopsis thaliana]
MAWAKKPGDSNNVGFMRWLALVLVLVLLSGFWCVSGVKEGKRNAYATMMYVGTPRDYEFYIAIRVLLKSLATLDAQADLVVIASLDVPPRWIRALEKEDGAKVVRVENLDNPYKHQDNFDKRFKLSLNKLYAWSLVDYDRVVMLDADNLFLQNTDELFQCGQFCAVFINPCVFHTGLFVLQPSMTVFKDMVHELRNGRENPDGADQGFIASYFPELLDKPMFHPPPNGTKLDGTYRLPLGYQMDASYYYLKLRWSIPCGPNSVITFPGAPWLKPWYWWSWPVLPLGLQWHDKRRQTLGYGAEMAVILIQSAIYLGIIAMTRFARPSLSKLCYRRSDKSINLVQNILKLVALWSILAAYTTPFFIIPHTVHPLLGWPLYLLGVFALCSIAVNAFLLPMLPVLMPWLGITGALIVMAFPWYSDGVVRALCVFGYAFCAAPCVWASMTRIMAGLHQSLEREAFLPRLGESSPPSWFNKLY

SEQ ID NO: 9779 - protein, 462 aa, Glycine max
  peptide (1)..(462): Ceres Seq. ID no. 14308479
  misc_feature (27)..(462): NCBI GI NO: 17380986 NR Description: unknown protein [Arabidopsis thaliana]
  misc_feature (33)..(462): NCBI GI NO: 38345479 NR Description: OSJNBa0010H02.17
  misc_feature (27)..(462): NCBI GI NO: 37536746 NR Description: hypothetical protein
  misc_feature (81)..(462): NCBI GI NO: 18403930 NR Description: glycogenin glucosyltransferase
  misc_feature (27)..(239): NCBI GI NO: 15235811 NR Description: glycogenin glucosyltransferase
  misc_feature (268)..(462): NCBI GI NO: 15235811 NR Description: glycogenin glucosyltransferase
  misc_feature (27)..(233): NCBI GI NO: 25408409 NR Description: probable glycogenin
  misc_feature (268)..(460): NCBI GI NO: 25408409 NR Description: probable glycogenin
  misc_feature (3)..(278): NCBI GI NO: 22326882 NR Description: glycogenin glucosyltransferase
  misc_feature (3)..(278): NCBI GI NO: 18087513 NR Description: AT5g18480/F20L16_200 [Arabidopsis thaliana]
MRWLALVLVLVLLSGFWCVSGVKEGKRNAYATMMYVGTPRDYEFYIAIRVLLKSLATLDAQADLVVIASLDVPPRWIRALEKEDGAKVVRVENLDNPYKHQDNFDKRFKLSLNKLYAWSLVDYDRVVMLDADNLFLQNTDELFQCGQFCAVFINPCVFHTGLFVLQPSMTVFKDMVHELRNGRENPDGADQGFIASYFPELLDKPMFHPPPNGTKLDGTYRLPLGYQMDASYYYLKLRWSIPCGPNSVITFPGAPWLKPWYWWSWPVLPLGLQWHDKRRQTLGYGAEMAVILIQSAIYLGIIAMTRFARPSLSKLCYRRSDKSINLVQNILKLVALWSILAAYTTPFFIIPHTVHPLLGWPLYLLGVFALCSIAVNAFLLPMLPVLMPWLGITGALIVMAFPWYSDGVVRALCVFGYAFCAAPCVWASMTRIMAGLHQSLEREAFLPRLGESSPPSWFNKLY

SEQ ID NO: 9780 - protein, 430 aa, Glycine max
  peptide (1)..(430): Ceres Seq. ID no. 14308480
  misc_feature (1)..(430): NCBI GI NO: 17380986 NR Description: unknown protein [Arabidopsis thaliana]
  misc_feature (1)..(430): NCBI GI NO: 38345479 NR Description: OSJNBa0010H02.17
  misc_feature (1)..(430): NCBI GI NO: 37536746 NR Description: hypothetical protein
  misc_feature (49)..(430): NCBI GI NO: 18403930 NR Description: glycogenin glucosyltransferase
  misc_feature (1)..(207): NCBI GI NO: 15235811 NR Description: glycogenin glucosyltransferase
  misc_feature (236)..(430): NCBI GI NO: 15235811 NR Description: glycogenin glucosyltransferase
  misc_feature (1)..(201): NCBI GI NO: 25408409 NR Description: probable glycogenin
  misc_feature (236)..(428): NCBI GI NO: 25408409 NR Description: probable glycogenin
  misc_feature (1)..(246): NCBI GI NO: 22326882 NR Description: glycogenin glucosyltransferase
  misc_feature (1)..(246): NCBI GI NO: 18087513 NR Description: AT5g18480/F20L16_200 [Arabidopsis thaliana]
MMYVGTPRDYEFYIAIRVLLKSLATLDAQADLVVIASLDVPPRWIRALEKEDGAKVVRVENLDNPYKHQDNFDKRFKLSLNKLYAWSLVDYDRVVMLDADNLFLQNTDELFQCGQFCAVFINPCVFHTGLFVLQPSMTVFKDMVHELRNGRENPDGADQGFIASYFPELLDKPMFHPPPNGTKLDGTYRLPLGYQMDASYYYLKLRWSIPCGPNSVITFPGAPWLKPWYWWSWPVLPLGLQWHDKRRQTLGYGAEMAVILIQSAIYLGIIAMTRFARPSLSKLCYRRSDKSINLVQNILKLVALWSILAAYTTPFFIIPHTVHPLLGWPLYLLGVFALCSIAVNAFLLPMLPVLMPWLGITGALIVMAFPWYSDGVVRALCVFGYAFCAAPCVWASMTRIMAGLHQSLEREAFLPRLGESSPPSWFNKLY

SEQ ID NO: 9781 - DNA, 1457 bp, Glycine max
  misc_feature (1)..(1457): Ceres Seq. ID no. 14310483
gagagatcattgtccattatcacagaaatgggtgaagtaagagttctctcttacacaaaaaattcttgtctatatttattcttaatcaatctgtctctttccttttttcgacaacttttgctttgaaaactaactacaccacgggactaggatcgtgttttttaaacttttatgatcttttgtatataatgtctgttttatgatgtatatggtggcatcattatcaagtaatgcatgccacacacacacacacacacatatatatatactctagttctacacatggtggagatttttcaatcacatctttgctatatctaattaatgttctatatatttgcggagaacaaggaagaagaaaagaaagaagagaccacagaggaaaagaaggaaaaagagcctccagagatagtgctcaaggttgatatgcactgtgaagcttgtgcaaggaaagttgcaaaagcattgaaaggatttgaaggagtggaggaggtgactgcagatagcaaggcaagcaaagtggtagtgaaaggaaaggcagcagaccccataaaggtgtgtgagagactacaaaagaaaagtggcaagaaagtagagctcatttcacctttgcctaaacctccagaggagaaaaaagaagaagaaatcaaagaagaaccgcagccagaggagaaaaaggaggagctccctcctgtggtaacagtagtcctcaaagttcgaatgcattgtgaagcatgtgctcaagttatacaaaagcgaatccgcaagattcaaggagtagagtcagtggagacaagcttgggaaatgatcaagtcatagtaaaaggtgtgattgacccagcaaagctagttgattatgtgtacaagaggaccaaaaagcaagcttctatagtgaaagaggaggaaaaggaaaagaaggaagaagaggagaagaaagaggaggagaaaaaggaagagaaagaagaagagaaaaaaggagaagatggtgaagaggttgatactaaaactgacatcaagcgaagtgaatactggccattaagatcccacgttgactacgttgactacccttatgcttctcagattttcagtgatgagaacccaaatgcatgcactgtaatgtagatcagtcttttgtactaactcagtattttatagtagctgatcgatcaactgaagcaacttgtgctgtgtcgttggagcgtggaataagatgcatggttgtgaatgttttcaaggctttgtatatgatttcgcatccctcggagttggcattctatggagatagatgccttatttcttgtgttttatgagctttctacatatttccttggcaaagggtggctagaatcagttgtgttagtgtgtactgaattttggcctacaacttcaattatgtacctaaatgatgacatcaattagtaattttaagtcgtcatgtcatgataaaacttgctgcg

SEQ ID NO: 9782 - protein, 265 aa, Glycine max
  peptide (1)..(265): Ceres Seq. ID no. 14310484
  misc_feature (9)..(234): Pfam Name: HRPII/III Pfam Description: Plasmodium histidine-rich protein
  misc_feature (9)..(264): NCBI GI NO: 37532382 NR Description: putative ATFP3
  misc_feature (11)..(234): NCBI GI NO: 38344582 NR Description: OSJNBa0053B21.14
  misc_feature (235)..(265): NCBI GI NO: 38344582 NR Description: OSJNBa0053B21.14
  misc_feature (7)..(234): NCBI GI NO: 9758294 NR Description: contains similarity to ATFP3~gene_id:MLE2.16
  misc_feature (7)..(234): NCBI GI NO: 18424719 NR Description: copper chaperone (CCH)-related
  misc_feature (26)..(234): NCBI GI NO: 4097547 NR Description: ATFP3 [Arabidopsis thaliana]
  misc_feature (9)..(152): NCBI GI NO: 15241256 NR Description: copper chaperone (CCH)-related
  misc_feature (7)..(265): NCBI GI NO: 22327990 NR Description: heavy-metal-associated domain-containing protein
  misc_feature (6)..(216): NCBI GI NO: 15233023 NR Description: copper-binding protein - related
  misc_feature (10)..(223): NCBI GI NO: 21594005 NR Description: unknown [Arabidopsis thaliana]
MFYIFAENKEEEKKEETTEEKKEKEPPEIVLKVDMHCEACARKVAKALKGFEGVEEVTADSKASKVVVKGKAADPIKVCERLQKKSGKKVELISPLPKPPEEKKEEEIKEEPQPEEKKEELPPVVTVVLKVRMHCEACAQVIQKRIRKIQGVESVETSLGNDQVIVKGVIDPAKLVDYVYKRTKKQASIVKEEEKEKKEEEEKKEEEKKEEKEEEKKGEDGEEVDTKTDIKRSEYWPLRSHVDYVDYPYASQIFSDENPNACTVM

SEQ ID NO: 9783 - protein, 231 aa, Glycine max
  peptide (1)..(231): Ceres Seq. ID no. 14310485
  misc_feature (1)..(200): Pfam Name: HRPII/III Pfam Description: Plasmodium histidine-rich protein
  misc_feature (1)..(230): NCBI GI NO: 37532382 NR Description: putative ATFP3
  misc_feature (1)..(200): NCBI GI NO: 38344582 NR Description: OSJNBa0053B21.14
  misc_feature (201)..(231): NCBI GI NO: 38344582 NR Description: OSJNBa0053B21.14
  misc_feature (1)..(200): NCBI GI NO: 9758294 NR Description: contains similarity to ATFP3~gene_id:MLE2.16
  misc_feature (1)..(200): NCBI GI NO: 18424719 NR Description: copper chaperone (CCH)-related
  misc_feature (1)..(200): NCBI GI NO: 4097547 NR Description: ATFP3 [Arabidopsis thaliana]
  misc_feature (1)..(118): NCBI GI NO: 15241256 NR Description: copper chaperone (CCH)-related
  misc_feature (1)..(231): NCBI GI NO: 22327990 NR Description: heavy-metal-associated domain-containing protein
  misc_feature (1)..(182): NCBI GI NO: 15233023 NR Description: copper-binding protein - related
  misc_feature (1)..(189): NCBI GI NO: 21594005 NR Description: unknown [Arabidopsis thaliana]
MHCEACARKVAKALKGFEGVEEVTADSKASKVVVKGKAADPIKVCERLQKKSGKKVELISPLPKPPEEKKEEEIKEEPQPEEKKEELPPVVTVVLKVRMHCEACAQVIQKRIRKIQGVESVETSLGNDQVIVKGVIDPAKLVDYVYKRTKKQASIVKEEEKEKKEEEEKKEEEKKEEKEEEKKGEDGEEVDTKTDIKRSEYWPLRSHVDYVDYPYASQIFSDENPNACTVM

SEQ ID NO: 9784 - protein, 133 aa, Glycine max
  peptide (1)..(133): Ceres Seq. ID no. 14310486
  misc_feature (1)..(102): Pfam Name: HRPII/III Pfam Description: Plasmodium histidine-rich protein
  misc_feature (1)..(132): NCBI GI NO: 37532382 NR Description: putative ATFP3
  misc_feature (1)..(102): NCBI GI NO: 38344582 NR Description: OSJNBa0053B21.14
  misc_feature (103)..(133): NCBI GI NO: 38344582 NR Description: OSJNBa0053B21.14
  misc_feature (1)..(102): NCBI GI NO: 9758294 NR Description: contains similarity to ATFP3~gene_id:MLE2.16
  misc_feature (1)..(102): NCBI GI NO: 18424719 NR Description: copper chaperone (CCH)-related
  misc_feature (1)..(102): NCBI GI NO: 4097547 NR Description: ATFP3 [Arabidopsis thaliana]
  misc_feature (1)..(20): NCBI GI NO: 15241256 NR Description: copper chaperone (CCH)-related
  misc_feature (1)..(133): NCBI GI NO: 22327990 NR Description: heavy-metal-associated domain-containing protein
  misc_feature (1)..(84): NCBI GI NO: 15233023 NR Description: copper-binding protein - related
  misc_feature (1)..(91): NCBI GI NO: 21594005 NR Description: unknown [Arabidopsis thaliana]
MHCEACAQVIQKRIRKIQGVESVETSLGNDQVIVKGVIDPAKLVDYVYKRTKKQASIVKEEEKEKKEEEEKKEEEKKEEKEEEKKGEDGEEVDTKTDIKRSEYWPLRSHVDYVDYPYASQIFSDENPNACTVM

SEQ ID NO: 9785 - DNA, 1508 bp, Glycine max
  misc_feature (1)..(1508): Ceres Seq. ID no. 15169013
gtaacaaaatatcccaaactctcactcgtcgacggccaccggatcgacctcaattcgccgtcgtccaatcgctctcagttccaccgcctccgccgccggcatccaattcagtttggccttgcatctctctcaggtattaagattctactaaaaaaaaggttgatcagcgtaaagatggagctcactattacacagcctgatgattggcatcttcacctccgtgatggttcccttcttgaagctgtcctccctcacagtgcgaagcattttggaagggccatagtaatgccaaatttgaaaccacccatcactaccacgtctgctgctgtcgcttatcgagagtccattttgaaagcaatacctaaagatagcaacttcactcctctcatgtcactttacctcacagacgtgactacccctgatgagattaaacttgcaaaaaaaagtggacttgtttatggtgtgaagttgtatcctgctggtgctacaacaaactcccaagatggtgttacagatctttttggaaattgtttttctgttcttgaggaaatggctgagcaaaatttaccattattggttcacggagaggttacagattcaaacgttgatatttttgaccgagaaaaagtctttattgaaacaattttaatgcctttaattcaaagacttccacagctgaaggttgtgatggagcatatcactactgcagatgctgttaaatttgtagagtcttgcaaagaaggttatgtagcagcaactgttacaccacagcatcttcttctgaatcgtaatgctttgttccaaggtggcttacagcctcacaattactgtcttccagtgctcaaaagagagatccatagacaggctattgtttcggctgtcactagtggaagtaaacgatttttccttggaactgatagtgctccacatgataggcgtaaaaaggaatgttcctgtggatgtgctggcatatacaactcaccggttgctctatcactatatgccaaagtttttgaagaggctggtgcacttgataagctagaggcttttacaagctttaacggacctgacttctatggcctccccagaaacaagtcaaagattaaactgaggaaagctccttggaaagtacctgattatttgtcatttccatttggagacatcgttcccatgtttgctggtgaaacccttgaatgggaggcattgccttgttgatttgctgtgtctatttgaaagtttggtatccttcagcttaaattattgattgctgagatgagaatttatgcagcgttcaagaactagagtcaagcaattttgttctaattttatcagtcagttctgcatttattttgcagattgttctcatttctatttcctaggtcaggtgaatttaagtatgaaccagaacacccactgtgactaataaattatgggaatttatatagtattcagagctatggtaattttgtagttctaatcagatcaatcaactaggcagagtttttcag

SEQ ID NO: 9786 - protein, 404 aa, Glycine max
  peptide (1)..(404): Ceres Seq. ID no. 15169014
  misc_feature (58)..(402): Pfam Name: Pfam Description:  Amidohydrolase family
  misc_feature (38)..(402): NCBI GI NO: 15235865 NR Description: dihydroorotase [Arabidopsis thaliana]
  misc_feature (59)..(400): NCBI GI NO: 17977977 NR Description: dihydroorotase [Beta vulgaris]
  misc_feature (60)..(399): NCBI GI NO: 34909480 NR Description: putative dihydroorotase
  misc_feature (56)..(399): NCBI GI NO: 34499785 NR Description: dihydroorotase
  misc_feature (60)..(400): NCBI GI NO: 30248736 NR Description: Dihydroorotase homodimeric type
  misc_feature (60)..(400): NCBI GI NO: 16331133 NR Description: dihydroorotase [Synechocystis sp. PCC 6803]
  misc_feature (61)..(399): NCBI GI NO: 22988480 NR Description: hypothetical protein [Burkholderia fungorum]
  misc_feature (44)..(403): NCBI GI NO: 23026307 NR Description: hypothetical protein
  misc_feature (68)..(404): NCBI GI NO: 21309874 NR Description: dihydroorotase [Toxoplasma gondii]
VTKYPKLSLVDGHRIDLNSPSSNRSQFHRLRRRHPIQFGLASLSGIKILLKKRLISVKMELTITQPDDWHLHLRDGSLLEAVLPHSAKHFGRAIVMPNLKPPITTTSAAVAYRESILKAIPKDSNFTPLMSLYLTDVTTPDEIKLAKKSGLVYGVKLYPAGATTNSQDGVTDLFGNCFSVLEEMAEQNLPLLVHGEVTDSNVDIFDREKVFIETILMPLIQRLPQLKVVMEHITTADAVKFVESCKEGYVAATVTPQHLLLNRNALFQGGLQPHNYCLPVLKREIHRQAIVSAVTSGSKRFFLGTDSAPHDRRKKECSCGCAGIYNSPVALSLYAKVFEEAGALDKLEAFTSFNGPDFYGLPRNKSKIKLRKAPWKVPDYLSFPFGDIVPMFAGETLEWEALPC

SEQ ID NO: 9787 - protein, 346 aa, Glycine max
  peptide (1)..(346): Ceres Seq. ID no. 15169015
  misc_feature (1)..(344): Pfam Name: Pfam Description:  Amidohydrolase family
  misc_feature (1)..(344): NCBI GI NO: 15235865 NR Description: dihydroorotase [Arabidopsis thaliana]
  misc_feature (1)..(342): NCBI GI NO: 17977977 NR Description: dihydroorotase [Beta vulgaris]
  misc_feature (2)..(341): NCBI GI NO: 34909480 NR Description: putative dihydroorotase
  misc_feature (1)..(341): NCBI GI NO: 34499785 NR Description: dihydroorotase
  misc_feature (2)..(342): NCBI GI NO: 30248736 NR Description: Dihydroorotase homodimeric type
  misc_feature (2)..(342): NCBI GI NO: 16331133 NR Description: dihydroorotase [Synechocystis sp. PCC 6803]
  misc_feature (3)..(341): NCBI GI NO: 22988480 NR Description: hypothetical protein [Burkholderia fungorum]
  misc_feature (1)..(345): NCBI GI NO: 23026307 NR Description: hypothetical protein
  misc_feature (10)..(346): NCBI GI NO: 21309874 NR Description: dihydroorotase [Toxoplasma gondii]
MELTITQPDDWHLHLRDGSLLEAVLPHSAKHFGRAIVMPNLKPPITTTSAAVAYRESILKAIPKDSNFTPLMSLYLTDVTTPDEIKLAKKSGLVYGVKLYPAGATTNSQDGVTDLFGNCFSVLEEMAEQNLPLLVHGEVTDSNVDIFDREKVFIETILMPLIQRLPQLKVVMEHITTADAVKFVESCKEGYVAATVTPQHLLLNRNALFQGGLQPHNYCLPVLKREIHRQAIVSAVTSGSKRFFLGTDSAPHDRRKKECSCGCAGIYNSPVALSLYAKVFEEAGALDKLEAFTSFNGPDFYGLPRNKSKIKLRKAPWKVPDYLSFPFGDIVPMFAGETLEWEALPC

SEQ ID NO: 9788 - protein, 309 aa, Glycine max
  peptide (1)..(309): Ceres Seq. ID no. 15169016
  misc_feature (1)..(307): Pfam Name: Pfam Description:  Amidohydrolase family
  misc_feature (1)..(307): NCBI GI NO: 15235865 NR Description: dihydroorotase [Arabidopsis thaliana]
  misc_feature (1)..(305): NCBI GI NO: 17977977 NR Description: dihydroorotase [Beta vulgaris]
  misc_feature (1)..(304): NCBI GI NO: 34909480 NR Description: putative dihydroorotase
  misc_feature (1)..(304): NCBI GI NO: 34499785 NR Description: dihydroorotase
  misc_feature (1)..(305): NCBI GI NO: 30248736 NR Description: Dihydroorotase homodimeric type
  misc_feature (1)..(305): NCBI GI NO: 16331133 NR Description: dihydroorotase [Synechocystis sp. PCC 6803]
  misc_feature (1)..(304): NCBI GI NO: 22988480 NR Description: hypothetical protein [Burkholderia fungorum]
  misc_feature (1)..(308): NCBI GI NO: 23026307 NR Description: hypothetical protein
  misc_feature (1)..(309): NCBI GI NO: 21309874 NR Description: dihydroorotase [Toxoplasma gondii]
MPNLKPPITTTSAAVAYRESILKAIPKDSNFTPLMSLYLTDVTTPDEIKLAKKSGLVYGVKLYPAGATTNSQDGVTDLFGNCFSVLEEMAEQNLPLLVHGEVTDSNVDIFDREKVFIETILMPLIQRLPQLKVVMEHITTADAVKFVESCKEGYVAATVTPQHLLLNRNALFQGGLQPHNYCLPVLKREIHRQAIVSAVTSGSKRFFLGTDSAPHDRRKKECSCGCAGIYNSPVALSLYAKVFEEAGALDKLEAFTSFNGPDFYGLPRNKSKIKLRKAPWKVPDYLSFPFGDIVPMFAGETLEWEALPC

SEQ ID NO: 9789 - DNA, 1827 bp, Glycine max
  misc_feature (1)..(1827): Ceres Seq. ID no. 13502573
ttttttgccatatttcccaaataaaattccccgattaaccttcgtgctacccacgaaatctatttttcttcccatttttttctgagcatttagctgtcgcttctttttgtttgtttttgtcatcctcggcagatcaggttttgtttttgcttctgctccagctttggaagatccacaatctctctctgagtggatggtttagtgtatatttttaagatactgatataaaagtatgggaagcagtgagatggataaaactacaaaagagaaggagtcaaagacgccgccaccacctacatcacaggagcagtcttcgaccaccggcactggaacaattaatcctgagtggcctggctttcaggcatattctcctatacctccacatggtttcttggcatcaagtccccaggctcacccttatatgtggggtgtccagcaatttatgcctccctatggtactccaccacatccctatgttgcaatgtatccccctggtggcatttatgctcatccatccatgcctccgggatcttatccttttaatccttttgccatgccttctcctaatggcattgctgaggcttcaggaaacactcctggcagcatggaagctgatggcaagccttctgaggtgaaggaaaaattgccaatcaaaagatcaaaaggaagtttgggtagtttgaatatgatcacagggaaaaataatgaacatggtaaaacactggggacatctgctaatggaattcattcaaagagtggtgagagtgctagtgaaggtgaaggtaccagtgaaggaagtgatgcaaattctcagaatgactctcaattaaaatcagggggccggcaggattcttttgaagatgaaccctctcaaaatggcagttcagcatatactcctcaaaatgggggactaaatatacctcatacagtggtcaatcaaaccatgtctatcatacctatctctgcaggtggtgctcctggagctgttcctggtcccacgacaaacttaaatataggaatggattattggggtacaccaggttcatccaacattcctggacttggcagaaaggttccatctactgcagttgctggagggatggttactgttggatcacgggatagtgctcagtcacaactctggctacaggatgaaagagagcttaaaaggcaaaggcggaagcagtctaacagggaatctgctcgcaggtccaggttgcgcaagcaggccgagtgtgatgagttagctcagcgtgctgaggctttgaaggaagaaaatgcttctctccggtcagaagtaaatcgaatcaggagtgattatgagcagctactctccgagaatgcagctctcaaggagagacttggggaactacctccgaatgatgatcatcatcataggtctggcaggaatgatcagcatgtgggtaatgacactcaacagagtgggcagacagaggccgtgcagggtggtcattagcaccaaccaaccacttcatgctgcctttcagggagataatctaacttaaatagcaagagcaagatcttgtttcggataggttgtagttcaaattgtattaatgctgaccatttatcgtcttaagatctgtttaatgttatgtgatccttcattcctaatttaccttttttttaactcattcaaaacgacctggattgtatgtagtgtgtgaattctgtgtcataccttatctgcagcttcaaagttagtgttctcattaagtaagcaatatagttaacgaacctgggtgttgtccattatatcatttcctgtacaaataatttatcgggaaaataaataaaagagaaaat

SEQ ID NO: 9790 - protein, 414 aa, Glycine max
  peptide (1)..(414): Ceres Seq. ID no. 13502574
  misc_feature (308)..(372): Pfam Name: Pfam Description:  bZIP transcription factor
  misc_feature (1)..(414): NCBI GI NO: 13775109 NR Description: bZIP transcription factor 3 [Phaseolus vulgaris]
  misc_feature (1)..(414): NCBI GI NO: 13775107 NR Description: bZIP transcription factor 2 [Phaseolus vulgaris]
  misc_feature (1)..(414): NCBI GI NO: 7488943 NR Description: bZIP DNA-binding protein - parsley
  misc_feature (1)..(406): NCBI GI NO: 5381313 NR Description: G-Box binding protein 2 [Catharanthus roseus]
  misc_feature (1)..(408): NCBI GI NO: 7488942 NR Description: bZIP DNA-binding protein - parsley
  misc_feature (1)..(395): NCBI GI NO: 30686443 NR Description: G-box binding bZIP transcription factor -related
  misc_feature (1)..(374): NCBI GI NO: 25344493 NR Description: hypothetical protein At2g35530
  misc_feature (23)..(408): NCBI GI NO: 629667 NR Description: G-box-binding protein - tomato
  misc_feature (1)..(355): NCBI GI NO: 28393494 NR Description: putative G-Box binding protein
  misc_feature (1)..(355): NCBI GI NO: 15222576 NR Description: G-Box binding protein -related
MGSSEMDKTTKEKESKTPPPPTSQEQSSTTGTGTINPEWPGFQAYSPIPPHGFLASSPQAHPYMWGVQQFMPPYGTPPHPYVAMYPPGGIYAHPSMPPGSYPFNPFAMPSPNGIAEASGNTPGSMEADGKPSEVKEKLPIKRSKGSLGSLNMITGKNNEHGKTLGTSANGIHSKSGESASEGEGTSEGSDANSQNDSQLKSGGRQDSFEDEPSQNGSSAYTPQNGGLNIPHTVVNQTMSIIPISAGGAPGAVPGPTTNLNIGMDYWGTPGSSNIPGLGRKVPSTAVAGGMVTVGSRDSAQSQLWLQDERELKRQRRKQSNRESARRSRLRKQAECDELAQRAEALKEENASLRSEVNRIRSDYEQLLSENAALKERLGELPPNDDHHHRSGRNDQHVGNDTQQSGQTEAVQGGH

SEQ ID NO: 9791 - protein, 409 aa, Glycine max
  peptide (1)..(409): Ceres Seq. ID no. 13502575
  misc_feature (303)..(367): Pfam Name: Pfam Description:  bZIP transcription factor
  misc_feature (1)..(409): NCBI GI NO: 13775109 NR Description: bZIP transcription factor 3 [Phaseolus vulgaris]
  misc_feature (1)..(409): NCBI GI NO: 13775107 NR Description: bZIP transcription factor 2 [Phaseolus vulgaris]
  misc_feature (1)..(409): NCBI GI NO: 7488943 NR Description: bZIP DNA-binding protein - parsley
  misc_feature (1)..(401): NCBI GI NO: 5381313 NR Description: G-Box binding protein 2 [Catharanthus roseus]
  misc_feature (1)..(403): NCBI GI NO: 7488942 NR Description: bZIP DNA-binding protein - parsley
  misc_feature (1)..(390): NCBI GI NO: 30686443 NR Description: G-box binding bZIP transcription factor -related
  misc_feature (1)..(369): NCBI GI NO: 25344493 NR Description: hypothetical protein At2g35530
  misc_feature (18)..(403): NCBI GI NO: 629667 NR Description: G-box-binding protein - tomato
  misc_feature (1)..(350): NCBI GI NO: 28393494 NR Description: putative G-Box binding protein
  misc_feature (1)..(350): NCBI GI NO: 15222576 NR Description: G-Box binding protein -related
MDKTTKEKESKTPPPPTSQEQSSTTGTGTINPEWPGFQAYSPIPPHGFLASSPQAHPYMWGVQQFMPPYGTPPHPYVAMYPPGGIYAHPSMPPGSYPFNPFAMPSPNGIAEASGNTPGSMEADGKPSEVKEKLPIKRSKGSLGSLNMITGKNNEHGKTLGTSANGIHSKSGESASEGEGTSEGSDANSQNDSQLKSGGRQDSFEDEPSQNGSSAYTPQNGGLNIPHTVVNQTMSIIPISAGGAPGAVPGPTTNLNIGMDYWGTPGSSNIPGLGRKVPSTAVAGGMVTVGSRDSAQSQLWLQDERELKRQRRKQSNRESARRSRLRKQAECDELAQRAEALKEENASLRSEVNRIRSDYEQLLSENAALKERLGELPPNDDHHHRSGRNDQHVGNDTQQSGQTEAVQGGH

SEQ ID NO: 9792 - protein, 351 aa, Glycine max
  peptide (1)..(351): Ceres Seq. ID no. 13502576
  misc_feature (245)..(309): Pfam Name: Pfam Description:  bZIP transcription factor
  misc_feature (1)..(351): NCBI GI NO: 13775109 NR Description: bZIP transcription factor 3 [Phaseolus vulgaris]
  misc_feature (1)..(351): NCBI GI NO: 13775107 NR Description: bZIP transcription factor 2 [Phaseolus vulgaris]
  misc_feature (1)..(351): NCBI GI NO: 7488943 NR Description: bZIP DNA-binding protein - parsley
  misc_feature (1)..(343): NCBI GI NO: 5381313 NR Description: G-Box binding protein 2 [Catharanthus roseus]
  misc_feature (1)..(345): NCBI GI NO: 7488942 NR Description: bZIP DNA-binding protein - parsley
  misc_feature (1)..(332): NCBI GI NO: 30686443 NR Description: G-box binding bZIP transcription factor -related
  misc_feature (1)..(311): NCBI GI NO: 25344493 NR Description: hypothetical protein At2g35530
  misc_feature (1)..(345): NCBI GI NO: 629667 NR Description: G-box-binding protein - tomato
  misc_feature (1)..(292): NCBI GI NO: 28393494 NR Description: putative G-Box binding protein
  misc_feature (1)..(292): NCBI GI NO: 15222576 NR Description: G-Box binding protein -related
MWGVQQFMPPYGTPPHPYVAMYPPGGIYAHPSMPPGSYPFNPFAMPSPNGIAEASGNTPGSMEADGKPSEVKEKLPIKRSKGSLGSLNMITGKNNEHGKTLGTSANGIHSKSGESASEGEGTSEGSDANSQNDSQLKSGGRQDSFEDEPSQNGSSAYTPQNGGLNIPHTVVNQTMSIIPISAGGAPGAVPGPTTNLNIGMDYWGTPGSSNIPGLGRKVPSTAVAGGMVTVGSRDSAQSQLWLQDERELKRQRRKQSNRESARRSRLRKQAECDELAQRAEALKEENASLRSEVNRIRSDYEQLLSENAALKERLGELPPNDDHHHRSGRNDQHVGNDTQQSGQTEAVQGGH

SEQ ID NO: 9793 - DNA, 1232 bp, Glycine max
  misc_feature (1)..(1232): Ceres Seq. ID no. 14316340
ttatttttttttaccaccatgtccgagtttcgaaaacaaccggcttctagaccgaagcaaaagcttcgccaacagcactcctcgaaagagtcaaaggcgatgagaaaacttcgcatcatttgcgacgatcctgaggctactgattcatccgaagatgagtctgagagggttcagaagccgagaagagtaaaaagaagcgtgttggagatgtctcttccccctctccctcaaacattcaccaccactactcctgatactagctcctgtgaggtgaatagcagcaaaaatgcaacattgaaggtttgcactgaaggtcaaccccagagcaagaagagggttttgactcacactccatcaacgagaaggagcacttgtgggaaatatagaggtgttaggcagagaaaatggggtaaatgggctgcagaaattcgtgacccgtttcagtgtactcgtatatggcttggcactttcaacactgcagaagaggcttccaaagcctatgaaaccagaaggcttgagtttgaagccatggcaaagactcaaactctaaaaactggttctgaacctttgtctacaacttctgataagagtaactgctgtaactcctctgctgctgccgccgccgatgtgtctgtgtctgaaaagttttctactacttctgatgactcggaagagagtatgttgtcacacaattcaccatcctctgtgcttgagttggatacctcggcttccaaatccgttgagaagggtaatggttcaactgaggaagctactggggctaataatttggtggctgaacttgcagggcttgagataccagatttgagtctgttgaacctgccaccaccaccatctgttgctgcggatgctgctgggattgagccaaattttgggcttgattttgattggctgtcgtttaatgattatggacagggttttgaggatttcggtggcttggagaacattcatattggtgggtttgatgacactgagcctagtgagcttcctgacttcgattttggtgattttggtgctgatgagtttgctggttggattgaggaacccctcaatataccttgtgcctaagttttgttatttgttatggcctcaagttctgttagttttgttttttgttttatttattatttgtgagatctcaggaatttgcaataccaatttctgagcgagtgaatgttactttatgcgttttatattttcatttgtttttgagg

SEQ ID NO: 9794 - protein, 361 aa, Glycine max
  peptide (1)..(361): Ceres Seq. ID no. 14316341
  misc_feature (130)..(177): Pfam Name: Pfam Description:  AP2 domain
  misc_feature (12)..(226): NCBI GI NO: 15230928 NR Description: AP2 domain transcription factor, putative
  misc_feature (130)..(278): NCBI GI NO: 15221435 NR Description: AP2 domain transcription factor, putative
  misc_feature (19)..(113): NCBI GI NO: 15221435 NR Description: AP2 domain transcription factor, putative
  misc_feature (35)..(324): NCBI GI NO: 15236595 NR Description: AP2 domain transcription factor, putative
  misc_feature (35)..(324): NCBI GI NO: 22655200 NR Description: putative Ap2 domain protein [Arabidopsis thaliana]
  misc_feature (20)..(245): NCBI GI NO: 15234337 NR Description: putative protein; protein id: At4g27950.1
  misc_feature (36)..(237): NCBI GI NO: 34904146 NR Description: unnamed protein product
  misc_feature (35)..(225): NCBI GI NO: 34911974 NR Description: P0694A04.17
  misc_feature (113)..(284): NCBI GI NO: 15218649 NR Description: ethylene responsive element binding factor 11
  misc_feature (113)..(284): NCBI GI NO: 25403338 NR Description: protein F3M18.20 [imported] - Arabidopsis thaliana
LFFFTTMSEFRKQPASRPKQKLRQQHSSKESKAMRKLRIICDDPEATDSSEDESERVQKPRRVKRSVLEMSLPPLPQTFTTTTPDTSSCEVNSSKNATLKVCTEGQPQSKKRVLTHTPSTRRSTCGKYRGVRQRKWGKWAAEIRDPFQCTRIWLGTFNTAEEASKAYETRRLEFEAMAKTQTLKTGSEPLSTTSDKSNCCNSSAAAAADVSVSEKFSTTSDDSEESMLSHNSPSSVLELDTSASKSVEKGNGSTEEATGANNLVAELAGLEIPDLSLLNLPPPPSVAADAAGIEPNFGLDFDWLSFNDYGQGFEDFGGLENIHIGGFDDTEPSELPDFDFGDFGADEFAGWIEEPLNIPCA

SEQ ID NO: 9795 - protein, 355 aa, Glycine max
  peptide (1)..(355): Ceres Seq. ID no. 14316342
  misc_feature (124)..(171): Pfam Name: Pfam Description:  AP2 domain
  misc_feature (6)..(220): NCBI GI NO: 15230928 NR Description: AP2 domain transcription factor, putative
  misc_feature (124)..(272): NCBI GI NO: 15221435 NR Description: AP2 domain transcription factor, putative
  misc_feature (13)..(107): NCBI GI NO: 15221435 NR Description: AP2 domain transcription factor, putative
  misc_feature (29)..(318): NCBI GI NO: 15236595 NR Description: AP2 domain transcription factor, putative
  misc_feature (29)..(318): NCBI GI NO: 22655200 NR Description: putative Ap2 domain protein [Arabidopsis thaliana]
  misc_feature (14)..(239): NCBI GI NO: 15234337 NR Description: putative protein; protein id: At4g27950.1
  misc_feature (30)..(231): NCBI GI NO: 34904146 NR Description: unnamed protein product
  misc_feature (29)..(219): NCBI GI NO: 34911974 NR Description: P0694A04.17
  misc_feature (107)..(278): NCBI GI NO: 15218649 NR Description: ethylene responsive element binding factor 11
  misc_feature (107)..(278): NCBI GI NO: 25403338 NR Description: protein F3M18.20 [imported] - Arabidopsis thaliana
MSEFRKQPASRPKQKLRQQHSSKESKAMRKLRIICDDPEATDSSEDESERVQKPRRVKRSVLEMSLPPLPQTFTTTTPDTSSCEVNSSKNATLKVCTEGQPQSKKRVLTHTPSTRRSTCGKYRGVRQRKWGKWAAEIRDPFQCTRIWLGTFNTAEEASKAYETRRLEFEAMAKTQTLKTGSEPLSTTSDKSNCCNSSAAAAADVSVSEKFSTTSDDSEESMLSHNSPSSVLELDTSASKSVEKGNGSTEEATGANNLVAELAGLEIPDLSLLNLPPPPSVAADAAGIEPNFGLDFDWLSFNDYGQGFEDFGGLENIHIGGFDDTEPSELPDFDFGDFGADEFAGWIEEPLNIPCA

SEQ ID NO: 9796 - protein, 328 aa, Glycine max
  peptide (1)..(328): Ceres Seq. ID no. 14316343
  misc_feature (97)..(144): Pfam Name: Pfam Description:  AP2 domain
  misc_feature (1)..(193): NCBI GI NO: 15230928 NR Description: AP2 domain transcription factor, putative
  misc_feature (97)..(245): NCBI GI NO: 15221435 NR Description: AP2 domain transcription factor, putative
  misc_feature (1)..(80): NCBI GI NO: 15221435 NR Description: AP2 domain transcription factor, putative
  misc_feature (2)..(291): NCBI GI NO: 15236595 NR Description: AP2 domain transcription factor, putative
  misc_feature (2)..(291): NCBI GI NO: 22655200 NR Description: putative Ap2 domain protein [Arabidopsis thaliana]
  misc_feature (1)..(212): NCBI GI NO: 15234337 NR Description: putative protein; protein id: At4g27950.1
  misc_feature (3)..(204): NCBI GI NO: 34904146 NR Description: unnamed protein product
  misc_feature (2)..(192): NCBI GI NO: 34911974 NR Description: P0694A04.17
  misc_feature (80)..(251): NCBI GI NO: 15218649 NR Description: ethylene responsive element binding factor 11
  misc_feature (80)..(251): NCBI GI NO: 25403338 NR Description: protein F3M18.20 [imported] - Arabidopsis thaliana
MRKLRIICDDPEATDSSEDESERVQKPRRVKRSVLEMSLPPLPQTFTTTTPDTSSCEVNSSKNATLKVCTEGQPQSKKRVLTHTPSTRRSTCGKYRGVRQRKWGKWAAEIRDPFQCTRIWLGTFNTAEEASKAYETRRLEFEAMAKTQTLKTGSEPLSTTSDKSNCCNSSAAAAADVSVSEKFSTTSDDSEESMLSHNSPSSVLELDTSASKSVEKGNGSTEEATGANNLVAELAGLEIPDLSLLNLPPPPSVAADAAGIEPNFGLDFDWLSFNDYGQGFEDFGGLENIHIGGFDDTEPSELPDFDFGDFGADEFAGWIEEPLNIPCA

SEQ ID NO: 9797 - DNA, 1571 bp, Glycine max
  misc_feature (1)..(1571): Ceres Seq. ID no. 14312057
aacgcagaggcgaagcagcaacaacagaagaatgctccgttcaactccatttccggcaccgtacaattcggcgccagttctctctcgcgcacgcacgtgcccctctccagcactcgcacgtgcccttcattctcattcctctttggtttggcggctcgtcttcccacaattccaccaacacaacgtaaatatttccggcggagtgtttgtcgcggccgccgcgaagaagcaacaacggcgcggcggcgctgagctcgccgtaatggacggcggtttcgacgacggtgatttttatgatgcttacgatgatgatgaagaagaagaagaatttgatgatgatgatgatgaagaagaagggatgcttccgttggatgacatgaacaaatggttcgagaagaagccgaggggttttggagaagggaaagtgtacgacacttcggttgaggataagctgctcgaggaaatgcgccagagtagaatagcgcaggctgaaaacttgacgaagcttaagagcaatcctgtgaagcatgcttcaaacgaaagtgttcaaaagaagaaagattcagaacttgttccaattggaggtcgagtgtgcttggtgaacctaccaaagaaaaagaacatccataaagatctgaaatcagccttgcaagggattcctggcataactaatatagtcccagctgttactggaaacaagaagacgagggacccaatctgcaagggttttgcatacgttgatttcgagtgtgaagaagatgcaattaggtttgttgagttatacactggacaagctattacttttggtaaaattcagaagcagataaaatgtgagcttctaaatgtacagtcttcatcttcttctctgaaattaagcaaaaaccttaatgctgctccgcaacttgtggcccgctttgaagaagtttcaaatgaggattctaacttggatggttctgcccttagttcctgggatgaggccaactcttcagatgatttggatgacctggactatcagatgaatggagaagaacaggaagatgatgaggacaatcaagagtctgtctccactttgggggtggatcatgatgatagtgtggaaatgaggatcgatcctgaaatttgttctcttccctcagagcaggttgacagaaaccatgcagctgagcagaagtcatctgccaaggttaaacaggagaatgcccgtaagaaaaaaccaacttccaaagatagagacaaaaaagttttaggtgttcctggatcctcaagaaggttaaagatcagggaaaaggctgttttaagtgacgttttctccaagtacggattaaaagctactcttgcttcaaaagataattagtaaattgctaatgaggtgagatcgccaaagtctaaatcatctcccagcacgtagggtctaaaaactaaaaggtcatattagatgcaatgggactttctagttggccatggatgctagtttttgattcagtgtacaatcaaattgtagcataagagtcttgtagaaaaattgatgatagtagattattatttttatgaatatcaaaacattctttatt

SEQ ID NO: 9798 - protein, 450 aa, Glycine max
  peptide (1)..(450): Ceres Seq. ID no. 14312058
  misc_feature (306)..(437): Pfam Name: Pfam Description:  Mpp10 protein
  misc_feature (39)..(373): NCBI GI NO: 25406039 NR Description: F20P5.8 [imported] - Arabidopsis thaliana
  misc_feature (39)..(373): NCBI GI NO: 30698005 NR Description: RNA recognition motif (RRM)-containing protein
TQRRSSNNRRMLRSTPFPAPYNSAPVLSRARTCPSPALARALHSHSSLVWRLVFPQFHQHNVNISGGVFVAAAAKKQQRRGGAELAVMDGGFDDGDFYDAYDDDEEEEEFDDDDDEEEGMLPLDDMNKWFEKKPRGFGEGKVYDTSVEDKLLEEMRQSRIAQAENLTKLKSNPVKHASNESVQKKKDSELVPIGGRVCLVNLPKKKNIHKDLKSALQGIPGITNIVPAVTGNKKTRDPICKGFAYVDFECEEDAIRFVELYTGQAITFGKIQKQIKCELLNVQSSSSSLKLSKNLNAAPQLVARFEEVSNEDSNLDGSALSSWDEANSSDDLDDLDYQMNGEEQEDDEDNQESVSTLGVDHDDSVEMRIDPEICSLPSEQVDRNHAAEQKSSAKVKQENARKKKPTSKDRDKKVLGVPGSSRRLKIREKAVLSDVFSKYGLKATLASKDN

SEQ ID NO: 9799 - protein, 440 aa, Glycine max
  peptide (1)..(440): Ceres Seq. ID no. 14312059
  misc_feature (296)..(427): Pfam Name: Pfam Description:  Mpp10 protein
  misc_feature (29)..(363): NCBI GI NO: 25406039 NR Description: F20P5.8 [imported] - Arabidopsis thaliana
  misc_feature (29)..(363): NCBI GI NO: 30698005 NR Description: RNA recognition motif (RRM)-containing protein
MLRSTPFPAPYNSAPVLSRARTCPSPALARALHSHSSLVWRLVFPQFHQHNVNISGGVFVAAAAKKQQRRGGAELAVMDGGFDDGDFYDAYDDDEEEEEFDDDDDEEEGMLPLDDMNKWFEKKPRGFGEGKVYDTSVEDKLLEEMRQSRIAQAENLTKLKSNPVKHASNESVQKKKDSELVPIGGRVCLVNLPKKKNIHKDLKSALQGIPGITNIVPAVTGNKKTRDPICKGFAYVDFECEEDAIRFVELYTGQAITFGKIQKQIKCELLNVQSSSSSLKLSKNLNAAPQLVARFEEVSNEDSNLDGSALSSWDEANSSDDLDDLDYQMNGEEQEDDEDNQESVSTLGVDHDDSVEMRIDPEICSLPSEQVDRNHAAEQKSSAKVKQENARKKKPTSKDRDKKVLGVPGSSRRLKIREKAVLSDVFSKYGLKATLASKDN

SEQ ID NO: 9800 - protein, 363 aa, Glycine max
  peptide (1)..(363): Ceres Seq. ID no. 14312060
  misc_feature (219)..(350): Pfam Name: Pfam Description:  Mpp10 protein
  misc_feature (1)..(286): NCBI GI NO: 25406039 NR Description: F20P5.8 [imported] - Arabidopsis thaliana
  misc_feature (1)..(286): NCBI GI NO: 30698005 NR Description: RNA recognition motif (RRM)-containing protein
MDGGFDDGDFYDAYDDDEEEEEFDDDDDEEEGMLPLDDMNKWFEKKPRGFGEGKVYDTSVEDKLLEEMRQSRIAQAENLTKLKSNPVKHASNESVQKKKDSELVPIGGRVCLVNLPKKKNIHKDLKSALQGIPGITNIVPAVTGNKKTRDPICKGFAYVDFECEEDAIRFVELYTGQAITFGKIQKQIKCELLNVQSSSSSLKLSKNLNAAPQLVARFEEVSNEDSNLDGSALSSWDEANSSDDLDDLDYQMNGEEQEDDEDNQESVSTLGVDHDDSVEMRIDPEICSLPSEQVDRNHAAEQKSSAKVKQENARKKKPTSKDRDKKVLGVPGSSRRLKIREKAVLSDVFSKYGLKATLASKDN

SEQ ID NO: 9801 - DNA, 1812 bp, Glycine max
  misc_feature (1)..(1812): Ceres Seq. ID no. 15175762
  misc_feature (1809)..(1809): n is a, c, t, g, unknown, or other
ttttcaaattctttagaatttatcatttcctaagtattatgtttatatgctgtcataaaaaaatgtttatatgctcaatatttgctgtcagcatgacatgatgaaacaagttgcaacgatagtttagtttatcctattatatagctgcaactaagtgattcttaagcatgatattggctatttaatcattttttgtttatcgctactcttgaagttggcttaatgtgaatattcactgccaaacaaaaatgtgaactgaatttcatatgactggagctttgagaatcccgcgtataacggaatcctggttaactttgatgttgatctgagtttcaaaatattacaccatgttcttcatcttgatcaaactctttatcacttgttgagacttgagaaggttcctcatactctgtcgaaaaaatagttgtatagagagaacagcccacatgcatgaagagacatagaaagcccttagtgtctcataatgtactgacattgagaacataattttattcatacatttggaaagtgttcattgtcatatacaacatggcttacaaaacgttgatcagaaaattgttgccttgctgataatataaaattgagttctcttgatcttaacatgagaaaacttatgtctctagctttctggacctatgtaagtcctcatggtacaagcataccagttatatttgagtgagcgtacaagaagttgtctgactttggcagggtgaaactctgcggataatgatgattcttggcctgctttattttgatgctcagaagcatcctacttgttcatcttatctgttccatgcctggtggttgactatcaggaatgttttagttttgacacttgacagcagtgtggaggattgagttatatactacaaatatgcatgaattccgaagtttattactagacgacatagtattagatgtcacctgtatgttaagtggtcgccatgctttgagaaagcgacttgaagagcttggttatgaacttaatgacgaccaagttcagactttattttggtgttttaaagcagtggctgagcaaaaaaagagggttactgatgctgacctcagagcattggtatcagatgaagtttttcaagcagagcctgtctggaaacttggtgatttgcaggtgacttgtggaactcttggcctttctacagcaactgtcaaacttttgagtagtgatggtagcacacacgttgcctgttccattggtacaggaccagtggattcggcttacaaggctgttgatctgattgtgaaggagcaagtaacacttcttgagtactcgatgaatgcagtgacagaaggcattgatgcaattgccactacccgggttgtaattcgtggggagagtgaaacaagtactattactacccatgctttaacgggagaaactgttattcgaacatttagtgggactggagcgggaatggatgttgttgtttccagtgtcaaggcctatattgctgcactaaacaagatgtcgggtttcaaggaatcctctcaatctgctgaaaaaatttcaatttcttcattgaagatttgagaattgtgtggtgcttctttggtaacaattgtttgtgttaaaccacgaagaggaagacaatgttgcagcagcatccttgcctctcgcagttctccatattaagggttgtccctgtattttgaccggaatatatttgcaacctgtaatttattgattcacccaagtagcctttgcaaagaatgtaacttaagtccgttttaaatattcagactacagggattctttcccttttcattttncat

SEQ ID NO: 9802 - protein, 224 aa, Glycine max
  peptide (1)..(224): Ceres Seq. ID no. 15175763
  misc_feature (20)..(224): NCBI GI NO: 15221125 NR Description: 2-isopropylmalate synthase -related
  misc_feature (32)..(217): NCBI GI NO: 15221794 NR Description: 2-isopropylmalate synthase -related
  misc_feature (32)..(217): NCBI GI NO: 6714306 NR Description: F15H18.3 [Arabidopsis thaliana]
  misc_feature (20)..(209): NCBI GI NO: 7387849 NR Description: 2-isopropylmalate synthase B
  misc_feature (20)..(209): NCBI GI NO: 7387848 NR Description: 2-isopropylmalate synthase A
  misc_feature (20)..(214): NCBI GI NO: 2492792 NR Description: Probable 2-isopropylmalate synthase
  misc_feature (21)..(221): NCBI GI NO: 22971943 NR Description: hypothetical protein [Chloroflexus aurantiacus]
  misc_feature (21)..(218): NCBI GI NO: 23125269 NR Description: hypothetical protein [Nostoc punctiforme]
  misc_feature (21)..(204): NCBI GI NO: 37521859 NR Description: 2-isopropylmalate synthase [Gloeobacter violaceus]
  misc_feature (21)..(204): NCBI GI NO: 17232332 NR Description: 2-isopropylmalate synthase [Nostoc sp. PCC 7120]
MHEFRSLLLDDIVLDVTCMLSGRHALRKRLEELGYELNDDQVQTLFWCFKAVAEQKKRVTDADLRALVSDEVFQAEPVWKLGDLQVTCGTLGLSTATVKLLSSDGSTHVACSIGTGPVDSAYKAVDLIVKEQVTLLEYSMNAVTEGIDAIATTRVVIRGESETSTITTHALTGETVIRTFSGTGAGMDVVVSSVKAYIAALNKMSGFKESSQSAEKISISSLKI

SEQ ID NO: 9803 - protein, 206 aa, Glycine max
  peptide (1)..(206): Ceres Seq. ID no. 15175764
  misc_feature (2)..(206): NCBI GI NO: 15221125 NR Description: 2-isopropylmalate synthase -related
  misc_feature (14)..(199): NCBI GI NO: 15221794 NR Description: 2-isopropylmalate synthase -related
  misc_feature (14)..(199): NCBI GI NO: 6714306 NR Description: F15H18.3 [Arabidopsis thaliana]
  misc_feature (2)..(191): NCBI GI NO: 7387849 NR Description: 2-isopropylmalate synthase B
  misc_feature (2)..(191): NCBI GI NO: 7387848 NR Description: 2-isopropylmalate synthase A
  misc_feature (2)..(196): NCBI GI NO: 2492792 NR Description: Probable 2-isopropylmalate synthase
  misc_feature (3)..(203): NCBI GI NO: 22971943 NR Description: hypothetical protein [Chloroflexus aurantiacus]
  misc_feature (3)..(200): NCBI GI NO: 23125269 NR Description: hypothetical protein [Nostoc punctiforme]
  misc_feature (3)..(186): NCBI GI NO: 37521859 NR Description: 2-isopropylmalate synthase [Gloeobacter violaceus]
  misc_feature (3)..(186): NCBI GI NO: 17232332 NR Description: 2-isopropylmalate synthase [Nostoc sp. PCC 7120]
MLSGRHALRKRLEELGYELNDDQVQTLFWCFKAVAEQKKRVTDADLRALVSDEVFQAEPVWKLGDLQVTCGTLGLSTATVKLLSSDGSTHVACSIGTGPVDSAYKAVDLIVKEQVTLLEYSMNAVTEGIDAIATTRVVIRGESETSTITTHALTGETVIRTFSGTGAGMDVVVSSVKAYIAALNKMSGFKESSQSAEKISISSLKI

SEQ ID NO: 9804 - DNA, 1419 bp, Glycine max
  misc_feature (1)..(1419): Ceres Seq. ID no. 14307571
atttattggacccgtcgtgaaccgtgtttggatatacggctctatcaaattcataaaactaaaatcctaacttgataatgacataaaccttgtggtgtcatacatgttgcctagaaacatgatcgttgaagaacaagccaagaaaaggaaaatgtttatatattttgtttgcttgtcaaaaacagaattatttttttttcttcttaaaatattaaagtaaaattaattcaatttaaaaataaaaaagtgctgatcttgtaaaaaaaaactcaccttcgttgtctcccttctttctcttctccattaaaagcttctaacagttttactagaagtagtttatgatttggcatatccaaacccaattccatcgtgatataagctttgttcaaatcacatgcaaaagagaggaagatattataaaatttgatattcatctggcagtttgaaggcattctgtgtttcatatgttttagcaatagtaaattacaaaaattaggtctgcctatgcttactgaattgtaaattttgtaggagcattgtttggtgacacattaattatacagtgcagagtgtacacaatgagtttgtttagttcttcaaagatattatgtttataccattctcaagccctaagtgttctggctttattgctaaatacaaactaagatttgagaacaagtgaagtttatttaaataatcatcacagctctctgcttctggagacagtggaatgcctgaagtggtagctgatcctcaaggtgaagtttccaagatattccaaaatctaggagtatgtgttgttcagcagtgtgccaaaatacgccaacaagtttcaactgcggtcacctatgataaatcaatcaaggcaatcaaagtgaaggtaccagattcaaaggaagaattctttctgcatcctgcaacagtgagacggaatgatcgctctgctcaaagtgtggatgaatggacgggggagcagaaattgcagtacggtgatgttcctgaagatattgaacctgaagaaattcgaccaatgggaaattatgcagtttcaataacttggcctgatgggtttagtcagattgctccttatgatcaattgcagatgattgaacggctagttgatgtttttgaaccaagtgtacaagcatgatgaaaaaaaaacgtcagatgggttgtactgatgtaggtgttggtatatggcaaaaatcatatatacatgtatgatagcctcaattcatagtccttcaacaagtaggggatattagaagtttgatagagcattctgcaaaggtataggttggccttgagattcactgcaatcctcaacttttttccttggtttttgttgtcccattgggtacaaagcttttatttctcaactgtgaacagaagtgtattatatatgtgtcattttcattc

SEQ ID NO: 9805 - protein, 139 aa, Glycine max
  peptide (1)..(139): Ceres Seq. ID no. 14307572
  misc_feature (1)..(132): NCBI GI NO: 34910672 NR Description: putative MRP protein (ATP/GTP-binding protein)
  misc_feature (1)..(132): NCBI GI NO: 11994706 NR Description: contains similarity to nucleotide-bindingprotein~gene_id:K7M2
  misc_feature (1)..(132): NCBI GI NO: 15230111 NR Description: mrp protein -related [Arabidopsis thaliana]
  misc_feature (1)..(132): NCBI GI NO: 21592386 NR Description: mrp protein, putative [Arabidopsis thaliana]
MPEVVADPQGEVSKIFQNLGVCVVQQCAKIRQQVSTAVTYDKSIKAIKVKVPDSKEEFFLHPATVRRNDRSAQSVDEWTGEQKLQYGDVPEDIEPEEIRPMGNYAVSITWPDGFSQIAPYDQLQMIERLVDVFEPSVQA

SEQ ID NO: 9806 - DNA, 1243 bp, Glycine max
  misc_feature (1)..(1243): Ceres Seq. ID no. 14307530
atccaacctcttaacaattcgcatggtttcgtacccacacaactgaactcacacaaacttctccaccacaccgacaacctcgccggaaaattcctcgccgtttccggttaccggcgatggcctcggcgacgtcgtttttgggcctcggtcttcgcccctccgtcccaatttgcgccaacagaaacaacggcattcgattctctcagtttcaagtctcctttggctttcgtgagaactccacttccctcaagactttgaattcaacaccgttgaagaaaagagaagctttctcaaatgggtcttcgagaacgcgaagaaacccgttgttctctgttcgctgcacagtttcatcaagtggaaagattacacaacaggaattcacggaaatggcatggcaagcaattatctcggcaccagaagtggctaaggagaacaagcatcagattgtggagactgagcacttgatgaaagcattgttggagcaaaagaatggacttgctcgccggatcttttctaaggttggggtagataatactcggcttctagaggccactgataagcacattcagcggcaacccaaggttgtaggggaatctgctggttcaatgctagggcgtgatttggaggcattgattcagagagccagggacttcaagaaagaatatggggactcatttgtgtcggttgagcactttgttcttggttttgcccaagataaacgatttgggaagatattgtttagagattttcaaatatctcagcaagctctaaaatctgccatagaatccataaggggacgccagtcagttattgaccaagatcctgaaggaaagtatgaagccttggaaaagtatgggaaagatttgacggcaatggctaaagcaggaaaacttgacccagtcataggaagagatgatgaaatacgcaggtgcattcagattctctccaggaggacaaagaacaatcctgttctaattggggagcctggtgttggaaagactgcaatctctgaagggctgctactgttatctgtttcctgaatttcatgtgtgacctgtttcatacatacaagaatggcacctgtgatggtgtgaaacaaaatataaaaattatttgaacacgacagttcaattttttgttaatatttttaagaaacaaatgatagttgtttcaaatattacattctgtatgaaagtataatatgtcaaaatagaaattccataaaagtaggaagtaagtttag

SEQ ID NO: 9807 - protein, 307 aa, Glycine max
  peptide (1)..(307): Ceres Seq. ID no. 14307531
  misc_feature (99)..(151): Pfam Name: Pfam Description:  Clp amino terminal domain
  misc_feature (1)..(301): NCBI GI NO: 18417676 NR Description: HSP100/ClpB, putative [Arabidopsis thaliana]
  misc_feature (68)..(301): NCBI GI NO: 9651530 NR Description: ClpB [Phaseolus lunatus]
  misc_feature (13)..(301): NCBI GI NO: 18400735 NR Description: HSP100/ClpB, putative [Arabidopsis thaliana]
  misc_feature (87)..(301): NCBI GI NO: 22298932 NR Description: ClpB protein [Thermosynechococcus elongatus BP-1]
  misc_feature (91)..(301): NCBI GI NO: 25289888 NR Description: probable ATP-dependent CLPB protein
  misc_feature (86)..(307): NCBI GI NO: 23128455 NR Description: hypothetical protein [Nostoc punctiforme]
  misc_feature (87)..(301): NCBI GI NO: 23040907 NR Description: hypothetical protein
  misc_feature (87)..(307): NCBI GI NO: 37523146 NR Description: endopeptidase Clp ATP-binding chain B
  misc_feature (87)..(301): NCBI GI NO: 1705924 NR Description: CLPB PROTEIN
  misc_feature (87)..(301): NCBI GI NO: 23123825 NR Description: hypothetical protein [Nostoc punctiforme]
MASATSFLGLGLRPSVPICANRNNGIRFSQFQVSFGFRENSTSLKTLNSTPLKKREAFSNGSSRTRRNPLFSVRCTVSSSGKITQQEFTEMAWQAIISAPEVAKENKHQIVETEHLMKALLEQKNGLARRIFSKVGVDNTRLLEATDKHIQRQPKVVGESAGSMLGRDLEALIQRARDFKKEYGDSFVSVEHFVLGFAQDKRFGKILFRDFQISQQALKSAIESIRGRQSVIDQDPEGKYEALEKYGKDLTAMAKAGKLDPVIGRDDEIRRCIQILSRRTKNNPVLIGEPGVGKTAISEGLLLLSVS

SEQ ID NO: 9808 - protein, 217 aa, Glycine max
  peptide (1)..(217): Ceres Seq. ID no. 14307532
  misc_feature (9)..(61): Pfam Name: Pfam Description:  Clp amino terminal domain
  misc_feature (1)..(211): NCBI GI NO: 18417676 NR Description: HSP100/ClpB, putative [Arabidopsis thaliana]
  misc_feature (1)..(211): NCBI GI NO: 9651530 NR Description: ClpB [Phaseolus lunatus]
  misc_feature (1)..(211): NCBI GI NO: 18400735 NR Description: HSP100/ClpB, putative [Arabidopsis thaliana]
  misc_feature (1)..(211): NCBI GI NO: 22298932 NR Description: ClpB protein [Thermosynechococcus elongatus BP-1]
  misc_feature (1)..(211): NCBI GI NO: 25289888 NR Description: probable ATP-dependent CLPB protein
  misc_feature (1)..(217): NCBI GI NO: 23128455 NR Description: hypothetical protein [Nostoc punctiforme]
  misc_feature (1)..(211): NCBI GI NO: 23040907 NR Description: hypothetical protein
  misc_feature (1)..(217): NCBI GI NO: 37523146 NR Description: endopeptidase Clp ATP-binding chain B
  misc_feature (1)..(211): NCBI GI NO: 1705924 NR Description: CLPB PROTEIN
  misc_feature (1)..(211): NCBI GI NO: 23123825 NR Description: hypothetical protein [Nostoc punctiforme]
MAWQAIISAPEVAKENKHQIVETEHLMKALLEQKNGLARRIFSKVGVDNTRLLEATDKHIQRQPKVVGESAGSMLGRDLEALIQRARDFKKEYGDSFVSVEHFVLGFAQDKRFGKILFRDFQISQQALKSAIESIRGRQSVIDQDPEGKYEALEKYGKDLTAMAKAGKLDPVIGRDDEIRRCIQILSRRTKNNPVLIGEPGVGKTAISEGLLLLSVS

SEQ ID NO: 9809 - protein, 191 aa, Glycine max
  peptide (1)..(191): Ceres Seq. ID no. 14307533
  misc_feature (1)..(185): NCBI GI NO: 18417676 NR Description: HSP100/ClpB, putative [Arabidopsis thaliana]
  misc_feature (1)..(185): NCBI GI NO: 9651530 NR Description: ClpB [Phaseolus lunatus]
  misc_feature (1)..(185): NCBI GI NO: 18400735 NR Description: HSP100/ClpB, putative [Arabidopsis thaliana]
  misc_feature (1)..(185): NCBI GI NO: 22298932 NR Description: ClpB protein [Thermosynechococcus elongatus BP-1]
  misc_feature (1)..(185): NCBI GI NO: 25289888 NR Description: probable ATP-dependent CLPB protein
  misc_feature (1)..(191): NCBI GI NO: 23128455 NR Description: hypothetical protein [Nostoc punctiforme]
  misc_feature (1)..(185): NCBI GI NO: 23040907 NR Description: hypothetical protein
  misc_feature (1)..(191): NCBI GI NO: 37523146 NR Description: endopeptidase Clp ATP-binding chain B
  misc_feature (1)..(185): NCBI GI NO: 1705924 NR Description: CLPB PROTEIN
  misc_feature (1)..(185): NCBI GI NO: 23123825 NR Description: hypothetical protein [Nostoc punctiforme]
MKALLEQKNGLARRIFSKVGVDNTRLLEATDKHIQRQPKVVGESAGSMLGRDLEALIQRARDFKKEYGDSFVSVEHFVLGFAQDKRFGKILFRDFQISQQALKSAIESIRGRQSVIDQDPEGKYEALEKYGKDLTAMAKAGKLDPVIGRDDEIRRCIQILSRRTKNNPVLIGEPGVGKTAISEGLLLLSVS

SEQ ID NO: 9810 - DNA, 1153 bp, Glycine max
  misc_feature (1)..(1153): Ceres Seq. ID no. 14308467
gaaccaaaacaaaaccattaattccatttgtttccttcatatggctaacaacattcttaccatgacaaacctcaatttcgaacttgattgcaagagaactcatgattctttggggagtttgagtcaattgaccacatctctggcttgtgtaacccaccatgaaagacaacaactcagggagacctttaaggcagtgaatggagaagacttgataagtcatcttcaaagatatgaagatgcgttttattctccttcttcttcttcttcttcttcttcttcttcttcttcttcttcttcttcttcttctatgaactgttctgctatttccttgtggatgcttgacacacatgacagggatgctgttgtggctagagaagctctccaacaagatgagaccaatttcaaggctcttgtggagatttttgtgggtagaaaatcaagtcatgttcttctcatctcacaggcctaccagaaaatgttcaaaagacacttggaccaagatattatcaatttggaccctccacacccctttcaaaagattattgtggcattggctgcatcacacaaagctcatcaagcagatgtcaaccatcatatatccaagtgtgatgctaggaggctctatgagactggggagggaagcttaggaactgtaattgaagctgttgtgttagaaattttaagcaagaggagcattccccaactgaagctaacattttttagttataaacacatttatggacatgactacacaaagtctatcaagagggggaaatacggtcaatttggtaaagctttaaaggtggttgtgaaatgcatttgtaatccagcacactattatgcaaagatactgtactcaagcatcaaaggggaaacaagggacagaagagttttggcacgaacattggtaagcagggctgagatagacatagatgaaattagaagggttttcaaagaaaagtatgggaaggaacttgctgatgctatatgtgaaggctttccatctggtgactactacagagactttcttgttgccttggctacaagatctaagtagaccctgttgcatctgatcttaacttgtattgcaacaaaatttgttgagaatagtataattcatatcaactttttgagtttcttttgtgggtaaaat

SEQ ID NO: 9811 - protein, 351 aa, Glycine max
  peptide (1)..(351): Ceres Seq. ID no. 14308468
  misc_feature (279)..(343): Pfam Name: Pfam Description:  Annexin
  misc_feature (97)..(346): NCBI GI NO: 6753062 NR Description: annexin A7; annexin VII [Mus musculus]
  misc_feature (97)..(346): NCBI GI NO: 346651 NR Description: annexin VII - mouse
  misc_feature (97)..(346): NCBI GI NO: 26346446 NR Description: unnamed protein product [Mus musculus]
  misc_feature (97)..(346): NCBI GI NO: 4502111 NR Description: annexin VII isoform 1; annexin VII
  misc_feature (97)..(346): NCBI GI NO: 4809279 NR Description: annexin VII isoform 2; annexin VII
  misc_feature (97)..(346): NCBI GI NO: 30584789 NR Description: Homo sapiens annexin A7 [synthetic construct]
  misc_feature (106)..(338): NCBI GI NO: 3881978 NR Description: annexin-like protein [Medicago sativa]
  misc_feature (97)..(346): NCBI GI NO: 18426844 NR Description: annexin A7 [Rattus norvegicus]
  misc_feature (97)..(346): NCBI GI NO: 34868934 NR Description: hypothetical protein XP_346470 [Rattus norvegicus]
  misc_feature (99)..(346): NCBI GI NO: 13397835 NR Description: annexin A13 isoform b [Homo sapiens]
NQNKTINSICFLHMANNILTMTNLNFELDCKRTHDSLGSLSQLTTSLACVTHHERQQLRETFKAVNGEDLISHLQRYEDAFYSPSSSSSSSSSSSSSSSSSSMNCSAISLWMLDTHDRDAVVAREALQQDETNFKALVEIFVGRKSSHVLLISQAYQKMFKRHLDQDIINLDPPHPFQKIIVALAASHKAHQADVNHHISKCDARRLYETGEGSLGTVIEAVVLEILSKRSIPQLKLTFFSYKHIYGHDYTKSIKRGKYGQFGKALKVVVKCICNPAHYYAKILYSSIKGETRDRRVLARTLVSRAEIDIDEIRRVFKEKYGKELADAICEGFPSGDYYRDFLVALATRSK

SEQ ID NO: 9812 - protein, 338 aa, Glycine max
  peptide (1)..(338): Ceres Seq. ID no. 14308469
  misc_feature (266)..(330): Pfam Name: Pfam Description:  Annexin
  misc_feature (84)..(333): NCBI GI NO: 6753062 NR Description: annexin A7; annexin VII [Mus musculus]
  misc_feature (84)..(333): NCBI GI NO: 346651 NR Description: annexin VII - mouse
  misc_feature (84)..(333): NCBI GI NO: 26346446 NR Description: unnamed protein product [Mus musculus]
  misc_feature (84)..(333): NCBI GI NO: 4502111 NR Description: annexin VII isoform 1; annexin VII
  misc_feature (84)..(333): NCBI GI NO: 30584789 NR Description: Homo sapiens annexin A7 [synthetic construct]
  misc_feature (84)..(333): NCBI GI NO: 4809279 NR Description: annexin VII isoform 2; annexin VII
  misc_feature (93)..(325): NCBI GI NO: 3881978 NR Description: annexin-like protein [Medicago sativa]
  misc_feature (84)..(333): NCBI GI NO: 18426844 NR Description: annexin A7 [Rattus norvegicus]
  misc_feature (84)..(333): NCBI GI NO: 34868934 NR Description: hypothetical protein XP_346470 [Rattus norvegicus]
  misc_feature (86)..(333): NCBI GI NO: 13397835 NR Description: annexin A13 isoform b [Homo sapiens]
MANNILTMTNLNFELDCKRTHDSLGSLSQLTTSLACVTHHERQQLRETFKAVNGEDLISHLQRYEDAFYSPSSSSSSSSSSSSSSSSSSMNCSAISLWMLDTHDRDAVVAREALQQDETNFKALVEIFVGRKSSHVLLISQAYQKMFKRHLDQDIINLDPPHPFQKIIVALAASHKAHQADVNHHISKCDARRLYETGEGSLGTVIEAVVLEILSKRSIPQLKLTFFSYKHIYGHDYTKSIKRGKYGQFGKALKVVVKCICNPAHYYAKILYSSIKGETRDRRVLARTLVSRAEIDIDEIRRVFKEKYGKELADAICEGFPSGDYYRDFLVALATRSK

SEQ ID NO: 9813 - protein, 331 aa, Glycine max
  peptide (1)..(331): Ceres Seq. ID no. 14308470
  misc_feature (259)..(323): Pfam Name: Pfam Description:  Annexin
  misc_feature (77)..(326): NCBI GI NO: 6753062 NR Description: annexin A7; annexin VII [Mus musculus]
  misc_feature (77)..(326): NCBI GI NO: 346651 NR Description: annexin VII - mouse
  misc_feature (77)..(326): NCBI GI NO: 26346446 NR Description: unnamed protein product [Mus musculus]
  misc_feature (77)..(326): NCBI GI NO: 4502111 NR Description: annexin VII isoform 1; annexin VII
  misc_feature (77)..(326): NCBI GI NO: 30584789 NR Description: Homo sapiens annexin A7 [synthetic construct]
  misc_feature (77)..(326): NCBI GI NO: 4809279 NR Description: annexin VII isoform 2; annexin VII
  misc_feature (86)..(318): NCBI GI NO: 3881978 NR Description: annexin-like protein [Medicago sativa]
  misc_feature (77)..(326): NCBI GI NO: 18426844 NR Description: annexin A7 [Rattus norvegicus]
  misc_feature (77)..(326): NCBI GI NO: 34868934 NR Description: hypothetical protein XP_346470 [Rattus norvegicus]
  misc_feature (79)..(326): NCBI GI NO: 13397835 NR Description: annexin A13 isoform b [Homo sapiens]
MTNLNFELDCKRTHDSLGSLSQLTTSLACVTHHERQQLRETFKAVNGEDLISHLQRYEDAFYSPSSSSSSSSSSSSSSSSSSMNCSAISLWMLDTHDRDAVVAREALQQDETNFKALVEIFVGRKSSHVLLISQAYQKMFKRHLDQDIINLDPPHPFQKIIVALAASHKAHQADVNHHISKCDARRLYETGEGSLGTVIEAVVLEILSKRSIPQLKLTFFSYKHIYGHDYTKSIKRGKYGQFGKALKVVVKCICNPAHYYAKILYSSIKGETRDRRVLARTLVSRAEIDIDEIRRVFKEKYGKELADAICEGFPSGDYYRDFLVALATRSK

SEQ ID NO: 9814 - DNA, 1257 bp, Glycine max
  misc_feature (1)..(1257): Ceres Seq. ID no. 15170635
agctaaagcgcacacatcactcctcactcactcggcggcacacacaaaaccctttctcagtcactcactcggcaaagagaagcgtcgacggtctgcacggtgggtgcttcatcgacggcagcgacctgtggcggaggacagggttcccttcgctcttggagttcgcatcgggcagagaagcttctctgcattgcgctgggacgcaaaaccctggcagcaatcagcaccacggcgcagccgcacacctctgagacgccaccgcaatcaggatgagtgaacttctttttgatgacattttcaaggtcgagaaggtagaccctgatggtaaaaagtatgacaaggtttctcggattgtggcacggagtgagaagtgtgacatgaacatgcttctagatgtaaataccgagatttatccaatgggggaaaaagaaagattcttgatggctttgtctccttcacttgttttgaatactaaggatggttcagtgtcaattcaagacaagtttgaatacatcatgcacgggaggttatataacattacgaaacctcagcttgaaaagaaagaaaagaaagagaaacgttcagaatctcagcctgaagagaatgaggaatgttcaaaacctcagcttgaagtggaggtatatgcatcgtttggtgggcttcagttgatgctgaaaggacatgcttcccactgtgttaagtttgcagtcgatcagaagttgtttttacttataaggaaggttgaaagttgatgttggtgatgggcctgaaaagaaaaacatgctagcattaagttttaagtaatctgtataaaataaattgatttttcagaagaatgatttttgtgttttgaaagtttctctgaagttagttttttggtacattagataatttttaggcattctcttatatttattaaactgaaatatttttgccatatatatataaggaatcaacttacattaagaataactcttttagagtttcttttcattctcttcattcatttttaaaaatctaatgattgtaatgtcattaattttatctgttagattacaagaaaatgaagataaggatgaagtgtagctctaaaagagttagttagtgtaagttgatccccctttctctattttttaattggtaggaatctaaaatggtatcaaaagggttataatagtcgtatatcattttcaattaattaagttagacccttctctatatgtgttattaggaatctgtaatttatattttcattat

SEQ ID NO: 9815 - protein, 160 aa, Glycine max
  peptide (1)..(160): Ceres Seq. ID no. 15170636
  misc_feature (1)..(158): NCBI GI NO: 34897522 NR Description: putative RNA polymerase
  misc_feature (4)..(158): NCBI GI NO: 15231714 NR Description: expressed protein [Arabidopsis thaliana]
  misc_feature (4)..(158): NCBI GI NO: 15221759 NR Description: RNA polymerase II subunit -related
  misc_feature (1)..(158): NCBI GI NO: 31239495 NR Description: ENSANGP00000011232 [Anopheles gambiae]
  misc_feature (1)..(158): NCBI GI NO: 14589953 NR Description: RNA polymerase II, polypeptide H [Homo sapiens]
  misc_feature (1)..(159): NCBI GI NO: 39591722 NR Description: Hypothetical protein CBG18189
  misc_feature (1)..(158): NCBI GI NO: 1017823 NR Description: RNA polymerase II subunit
  misc_feature (1)..(159): NCBI GI NO: 17553210 NR Description: rna polymerase (17.0 kD) (3G6)
  misc_feature (1)..(158): NCBI GI NO: 21358365 NR Description: CG11246-PA [Drosophila melanogaster]
  misc_feature (1)..(88): NCBI GI NO: 32416516 NR Description: hypothetical protein [Neurospora crassa]
MSELLFDDIFKVEKVDPDGKKYDKVSRIVARSEKCDMNMLLDVNTEIYPMGEKERFLMALSPSLVLNTKDGSVSIQDKFEYIMHGRLYNITKPQLEKKEKKEKRSESQPEENEECSKPQLEVEVYASFGGLQLMLKGHASHCVKFAVDQKLFLLIRKVES

SEQ ID NO: 9816 - protein, 124 aa, Glycine max
  peptide (1)..(124): Ceres Seq. ID no. 15170637
  misc_feature (1)..(122): NCBI GI NO: 34897522 NR Description: putative RNA polymerase
  misc_feature (1)..(122): NCBI GI NO: 15231714 NR Description: expressed protein [Arabidopsis thaliana]
  misc_feature (1)..(122): NCBI GI NO: 15221759 NR Description: RNA polymerase II subunit -related
  misc_feature (1)..(122): NCBI GI NO: 31239495 NR Description: ENSANGP00000011232 [Anopheles gambiae]
  misc_feature (1)..(122): NCBI GI NO: 14589953 NR Description: RNA polymerase II, polypeptide H [Homo sapiens]
  misc_feature (1)..(123): NCBI GI NO: 39591722 NR Description: Hypothetical protein CBG18189
  misc_feature (1)..(122): NCBI GI NO: 1017823 NR Description: RNA polymerase II subunit
  misc_feature (1)..(123): NCBI GI NO: 17553210 NR Description: rna polymerase (17.0 kD) (3G6)
  misc_feature (1)..(122): NCBI GI NO: 21358365 NR Description: CG11246-PA [Drosophila melanogaster]
  misc_feature (1)..(52): NCBI GI NO: 32416516 NR Description: hypothetical protein [Neurospora crassa]
MNMLLDVNTEIYPMGEKERFLMALSPSLVLNTKDGSVSIQDKFEYIMHGRLYNITKPQLEKKEKKEKRSESQPEENEECSKPQLEVEVYASFGGLQLMLKGHASHCVKFAVDQKLFLLIRKVES

SEQ ID NO: 9817 - protein, 122 aa, Glycine max
  peptide (1)..(122): Ceres Seq. ID no. 15170638
  misc_feature (1)..(120): NCBI GI NO: 34897522 NR Description: putative RNA polymerase
  misc_feature (1)..(120): NCBI GI NO: 15231714 NR Description: expressed protein [Arabidopsis thaliana]
  misc_feature (1)..(120): NCBI GI NO: 15221759 NR Description: RNA polymerase II subunit -related
  misc_feature (1)..(120): NCBI GI NO: 31239495 NR Description: ENSANGP00000011232 [Anopheles gambiae]
  misc_feature (1)..(120): NCBI GI NO: 14589953 NR Description: RNA polymerase II, polypeptide H [Homo sapiens]
  misc_feature (1)..(121): NCBI GI NO: 39591722 NR Description: Hypothetical protein CBG18189
  misc_feature (1)..(120): NCBI GI NO: 1017823 NR Description: RNA polymerase II subunit
  misc_feature (1)..(121): NCBI GI NO: 17553210 NR Description: rna polymerase (17.0 kD) (3G6)
  misc_feature (1)..(120): NCBI GI NO: 21358365 NR Description: CG11246-PA [Drosophila melanogaster]
  misc_feature (1)..(50): NCBI GI NO: 32416516 NR Description: hypothetical protein [Neurospora crassa]
MLLDVNTEIYPMGEKERFLMALSPSLVLNTKDGSVSIQDKFEYIMHGRLYNITKPQLEKKEKKEKRSESQPEENEECSKPQLEVEVYASFGGLQLMLKGHASHCVKFAVDQKLFLLIRKVES

SEQ ID NO: 9818 - DNA, 1640 bp, Glycine max
  misc_feature (1)..(1640): Ceres Seq. ID no. 15226295
acaaattgggtaccggkycccccctcgagtcagctacgtaggccccccccccgcagcagccaaaaaacccgaaaccaaaaacaacaaagttctattctattgaagagctccagcacgatggcttccctctctacattgctcccgaacccgaaccttatttccaagcacaacagcaccctttcttccactcacccatgtgcttattcctggaaaaacaaaaccccaaccagtaagggtcggttctccgtttcttgttcttcttcgtctcaagcatacgacgtcgtcgtagttggcgctggcgtcattggcttaaccatcgctcgccacttcctcgtttcttccgacctttctgtcgccgtagtcgataaggctgtcccttgttccggtgccactggcgcagggcagggacatctgtggatggtaaacaaaacccctgggagtgctacgtgggatcttgcgtcaaggagtcatcaactttggaagacgctggtacagagcatagaagagcaaggtttggatcctatggtggagttgggttggaaacagtctggaagcctattaattggtaggactgatgctgagtcagacgtgctaaaagggagggtgaaactactatgtgaggctgggttgaaagcagagtacctgtgtagcagtgatttgattaaagaggaacctgatctactggtggacaaagacagtgcagctgcatttctaccagatgactgccaaatagatgcttatcgcactgttgcatatattgaaaagactaacaggagttttgcatcaaaaggaagatatacagaattttatgatgacccagtgaaatgtttcatcaggtcagatagcaatggagaggtcaaagctgttcagacttccaagaacacaatatacagcaagaaagcagttatagttgcagctggttgttggactggttctttgatgcaggacttgtttagaaattggggaatggatttacatgttccagtaatgcccagaaagggtcacctacttgtggttcaaaatttcaatttccttcaaatgaatcatggcttgatggaggcagattatctcaaccatccaacaatttctggttcagaatcccctgatcatcaaaagaacttatctgtttcaatggtagcaagtatagatgcagcaggaaatcttcttcttgggagtagccgtgaatttgttggtttcaacaccaatttggacgagtctgttgtcagttacatatggaagcgagttggagaattctttcccaaattgaaaacacttccactttcagatctaagtgcaagtagaaaagtcagaataggattacgaccttacatgcctaatgggaagccagtgattgggcctgtgcctggcttgtcaaatgtgtaccttgcagctggacatgaagggagtggacttttaatggctttggggactgctgaaatgatcgttgagatggtgttgggatatccagcaaaagttgatagcacacctttcgctgtgcagaaagttcttgtttaaaatttgcacaactttggagaattctaagtaattagctctagttttatgtgaacaaggtattgaaattcatgcttaaataatttgctcataagctcttcttatattgtaataaaaagaaaacggtc

SEQ ID NO: 9819 - protein, 504 aa, Glycine max
  peptide (1)..(504): Ceres Seq. ID no. 15226296
  misc_feature (92)..(490): Pfam Name: Pfam Description:  FAD dependent oxidoreductase
  misc_feature (65)..(500): NCBI GI NO: 15238972 NR Description: FAD dependent oxidoreductase family
  misc_feature (93)..(313): NCBI GI NO: 29828276 NR Description: putative secreted oxidoreductase
  misc_feature (325)..(501): NCBI GI NO: 29828276 NR Description: putative secreted oxidoreductase
  misc_feature (94)..(307): NCBI GI NO: 16263212 NR Description: putative oxidoreductase [Sinorhizobium meliloti]
  misc_feature (331)..(497): NCBI GI NO: 16263212 NR Description: putative oxidoreductase [Sinorhizobium meliloti]
  misc_feature (259)..(485): NCBI GI NO: 30020955 NR Description: Sarcosine oxidase beta subunit
  misc_feature (278)..(485): NCBI GI NO: 21400731 NR Description: DAO, FAD dependent oxidoreductase
  misc_feature (331)..(498): NCBI GI NO: 21231851 NR Description: D-amino acid oxidase
  misc_feature (331)..(498): NCBI GI NO: 21243282 NR Description: D-amino acid oxidase
  misc_feature (94)..(486): NCBI GI NO: 23041848 NR Description: COG0665: Glycine/D-amino acid oxidases
  misc_feature (6)..(6): Xaa is any aa, unknown or other
TNWVPXPPSSQLRRPPPRSSQKTRNQKQQSSILLKSSSTMASLSTLLPNPNLISKHNSTLSSTHPCAYSWKNKTPTSKGRFSVSCSSSSQAYDVVVVGAGVIGLTIARHFLVSSDLSVAVVDKAVPCSGATGAGQGHLWMVNKTPGSATWDLASRSHQLWKTLVQSIEEQGLDPMVELGWKQSGSLLIGRTDAESDVLKGRVKLLCEAGLKAEYLCSSDLIKEEPDLLVDKDSAAAFLPDDCQIDAYRTVAYIEKTNRSFASKGRYTEFYDDPVKCFIRSDSNGEVKAVQTSKNTIYSKKAVIVAAGCWTGSLMQDLFRNWGMDLHVPVMPRKGHLLVVQNFNFLQMNHGLMEADYLNHPTISGSESPDHQKNLSVSMVASIDAAGNLLLGSSREFVGFNTNLDESVVSYIWKRVGEFFPKLKTLPLSDLSASRKVRIGLRPYMPNGKPVIGPVPGLSNVYLAAGHEGSGLLMALGTAEMIVEMVLGYPAKVDSTPFAVQKVLV

SEQ ID NO: 9820 - protein, 465 aa, Glycine max
  peptide (1)..(465): Ceres Seq. ID no. 15226297
  misc_feature (53)..(451): Pfam Name: Pfam Description:  FAD dependent oxidoreductase
  misc_feature (26)..(461): NCBI GI NO: 15238972 NR Description: FAD dependent oxidoreductase family
  misc_feature (54)..(274): NCBI GI NO: 29828276 NR Description: putative secreted oxidoreductase
  misc_feature (286)..(462): NCBI GI NO: 29828276 NR Description: putative secreted oxidoreductase
  misc_feature (55)..(268): NCBI GI NO: 16263212 NR Description: putative oxidoreductase [Sinorhizobium meliloti]
  misc_feature (292)..(458): NCBI GI NO: 16263212 NR Description: putative oxidoreductase [Sinorhizobium meliloti]
  misc_feature (220)..(446): NCBI GI NO: 30020955 NR Description: Sarcosine oxidase beta subunit
  misc_feature (239)..(446): NCBI GI NO: 21400731 NR Description: DAO, FAD dependent oxidoreductase
  misc_feature (292)..(459): NCBI GI NO: 21231851 NR Description: D-amino acid oxidase
  misc_feature (292)..(459): NCBI GI NO: 21243282 NR Description: D-amino acid oxidase
  misc_feature (55)..(447): NCBI GI NO: 23041848 NR Description: COG0665: Glycine/D-amino acid oxidases
MASLSTLLPNPNLISKHNSTLSSTHPCAYSWKNKTPTSKGRFSVSCSSSSQAYDVVVVGAGVIGLTIARHFLVSSDLSVAVVDKAVPCSGATGAGQGHLWMVNKTPGSATWDLASRSHQLWKTLVQSIEEQGLDPMVELGWKQSGSLLIGRTDAESDVLKGRVKLLCEAGLKAEYLCSSDLIKEEPDLLVDKDSAAAFLPDDCQIDAYRTVAYIEKTNRSFASKGRYTEFYDDPVKCFIRSDSNGEVKAVQTSKNTIYSKKAVIVAAGCWTGSLMQDLFRNWGMDLHVPVMPRKGHLLVVQNFNFLQMNHGLMEADYLNHPTISGSESPDHQKNLSVSMVASIDAAGNLLLGSSREFVGFNTNLDESVVSYIWKRVGEFFPKLKTLPLSDLSASRKVRIGLRPYMPNGKPVIGPVPGLSNVYLAAGHEGSGLLMALGTAEMIVEMVLGYPAKVDSTPFAVQKVLV

SEQ ID NO: 9821 - protein, 365 aa, Glycine max
  peptide (1)..(365): Ceres Seq. ID no. 15226298
  misc_feature (1)..(351): Pfam Name: Pfam Description:  FAD dependent oxidoreductase
  misc_feature (1)..(361): NCBI GI NO: 15238972 NR Description: FAD dependent oxidoreductase family
  misc_feature (1)..(174): NCBI GI NO: 29828276 NR Description: putative secreted oxidoreductase
  misc_feature (186)..(362): NCBI GI NO: 29828276 NR Description: putative secreted oxidoreductase
  misc_feature (1)..(168): NCBI GI NO: 16263212 NR Description: putative oxidoreductase [Sinorhizobium meliloti]
  misc_feature (192)..(358): NCBI GI NO: 16263212 NR Description: putative oxidoreductase [Sinorhizobium meliloti]
  misc_feature (120)..(346): NCBI GI NO: 30020955 NR Description: Sarcosine oxidase beta subunit
  misc_feature (139)..(346): NCBI GI NO: 21400731 NR Description: DAO, FAD dependent oxidoreductase
  misc_feature (192)..(359): NCBI GI NO: 21231851 NR Description: D-amino acid oxidase
  misc_feature (192)..(359): NCBI GI NO: 21243282 NR Description: D-amino acid oxidase
  misc_feature (1)..(347): NCBI GI NO: 23041848 NR Description: COG0665: Glycine/D-amino acid oxidases
MVNKTPGSATWDLASRSHQLWKTLVQSIEEQGLDPMVELGWKQSGSLLIGRTDAESDVLKGRVKLLCEAGLKAEYLCSSDLIKEEPDLLVDKDSAAAFLPDDCQIDAYRTVAYIEKTNRSFASKGRYTEFYDDPVKCFIRSDSNGEVKAVQTSKNTIYSKKAVIVAAGCWTGSLMQDLFRNWGMDLHVPVMPRKGHLLVVQNFNFLQMNHGLMEADYLNHPTISGSESPDHQKNLSVSMVASIDAAGNLLLGSSREFVGFNTNLDESVVSYIWKRVGEFFPKLKTLPLSDLSASRKVRIGLRPYMPNGKPVIGPVPGLSNVYLAAGHEGSGLLMALGTAEMIVEMVLGYPAKVDSTPFAVQKVLV

SEQ ID NO: 9822 - DNA, 1411 bp, Glycine max
  misc_feature (1)..(1411): Ceres Seq. ID no. 13594180
aaaagcgtcgatttagcttcatccctagctactagctagcactttcacttccgttaatttaacagtagaccattaacttgaaaatttcaaaacaccgcatcaaaattttcttctgaaggcactaccgaagaatggctgtttttgcatcttcatcatctttacaaacccatttgcattcctcgctcttggcaccttcttttgaaggtgcacatgatcacaactcgtggtgggtgcgagcgagatcacagaaacgcattggtcaaagattacacacacaggacatagctagagggctgagaataaaagtccagagtgcagcaacaaaaccagcaaaatctccagctgaagaagattggaaggttaagcgagaatttctgcttcagaaaagggtaagaagtgtggaagtaaaggaagctctgcgccttcagaaagaaaacagttttgtattacttgatgtaagaccagaagcagagttcaaggaggcacatcctccaggtgcaatcaatgtgcaaatatataggctcataaaagagtggacagcatgggacattgcaagacgtgctgcatttttgttttttggtattttttctgggacagaagagaaccctgagttcatcaagaatgttgaagcaaaaatagataaagatgcaaagataatagtagcttgcacatcagggggtacattgagaccatcacaaaatttgcccgaaggtcaacaatcaaggtactaaattttctctctctcacccgaacatccggaatatatttatatagggctatttttatatgatactaagtggaagaaataaattttgatcctagatggataatctagattgaaggttaatatgacttttttgtttaatttctccattcatttaaatgtttaatgtttattgcagaccatactaataaattgttaatcattaaagtctgataatagtatctatcaatgtacatagagatgcaaaatcatggagtattgtaaagttgtataactgcttgatctaaactgcatcaattccatctacagaccgcaatttacaagtagctcttaaatctaaattattctgcaacagctaaaatacgccaccgcatttgtccatttgatattaccaagaatgtttactttcatgtcaaaagcttaaattgtcagtgaaaacacaactcttgacattaaacacatggaaacatgtcaaacctagaatatgaaccaaaacaccatctaaagccaaatgatatgaccaagagcgtttaccattatgttaaaaatttaagttgttaacagggacaaaatagttgagatataacactatgttctaaacataggcttttttctatttaagctattgggcatggaccactaaattgaacttgagttgggtttaagactgaaaaatatgaaatagat

SEQ ID NO: 9823 - protein, 199 aa, Glycine max
  peptide (1)..(199): Ceres Seq. ID no. 15221316
  misc_feature (91)..(198): Pfam Name: Pfam Description:  Rhodanese-like domain
  misc_feature (57)..(198): NCBI GI NO: 18417050 NR Description: rhodanese-like domain protein
  misc_feature (57)..(198): NCBI GI NO: 21553366 NR Description: unknown [Arabidopsis thaliana]
  misc_feature (57)..(198): NCBI GI NO: 7487511 NR Description: hypothetical protein T29A15
MAVFASSSSLQTHLHSSLLAPSFEGAHDHNSWWVRARSQKRIGQRLHTQDIARGLRIKVQSAATKPAKSPAEEDWKVKREFLLQKRVRSVEVKEALRLQKENSFVLLDVRPEAEFKEAHPPGAINVQIYRLIKEWTAWDIARRAAFLFFGIFSGTEENPEFIKNVEAKIDKDAKIIVACTSGGTLRPSQNLPEGQQSRY

SEQ ID NO: 9824 - DNA, 1450 bp, Glycine max
  misc_feature (1)..(1450): Ceres Seq. ID no. 13638029
ttgtaatacagatacctcctattaaaattttttcaggccatcttatatggagaaaaaaaaaattcagacatgaactagtgaaatttgcaggtttcattgaaataaaccatcaagggaaaactattgggtaatttgcaggtttcattaatctcaagggaagttagtgaaatttactagtcttaatgattgctcgaatgagtatggataccctatttgtgttgtgacaacagaccttcaaacactaaatgtattgtttgttgttcattattcgtaatagtttgcatggagttgacaaaaacactgatctcaaataggtattgcagattataactctagcagaagtcgtaagccaattgctgtggttggtgaagctgagatgagaccaacaagtactgcagattataactctagtagaagtcgtaagccaattgctgtggttggtgaagctgggttgagaccacctgatttccagcaagaccctaatcagaaagcagatgcaaatctacaatccaaaccacctcaagaaagagctgaagacaaggctagtagtagttcaggcacaaggccaaaagaagttgtggaatctgttcctgttcaaaatcaagcagctgcccaaaagttacttcagaagttaaatcacccaagtcagaatgatcgacatcataggggttggaaacataggggcaagggraaacaagaagatccagttgtattcactctggaagaatatgaaaacagaaaggcccagacaaagccttctattaaagactgggatctagatatcagtcgtgatgagcatcttgctagacagcttcaaaatcaactagaccttgaagattctcgggtaggaaggggtacttatgaagacaaggcacaagatattaggatgagtatgttcgcatatgaaagggattctgacagcagccatcaaatggggcaaggaggaaggggaaggggaaggggaagaggaaagggtagaggaagggggagaggaagacatggttaactatcatgattttggtttcaagtgtttcttgtgaagatgaaaatcttggcttcagaatatgttaagagttccttgggcaaaatccaacgacaagacaatcgatagcatagggttcagttttcaaggtgatcaacctttgtgctttctttgttaaatgtatcataaattgggtatttatattcttttctttccatatagattgatcagtgaacttatcaccacatttcttattttgaatatactgaagcagagttcgagtgcttataagctatagtttgactagcctccctgatattctcaactccaaccttaccgaatctygtcatccaataawatacttgccttgttttggggtaaaaaaaaaaaaaaaaaaaaaaaaaaaaaaaaaaaaaaggaaaaaaaaaaaaaaaaagaattcctgctgtttaaacacaataaagtggg

SEQ ID NO: 9825 - protein, 209 aa, Glycine max
  peptide (1)..(209): Ceres Seq. ID no. 15220397
  misc_feature (8)..(207): NCBI GI NO: 18420083 NR Description: expressed protein [Arabidopsis thaliana]
  misc_feature (1)..(157): NCBI GI NO: 34906132 NR Description: P0509B06.3
  misc_feature (105)..(105): Xaa is any aa, unknown or other
MRPTSTADYNSSRSRKPIAVVGEAGLRPPDFQQDPNQKADANLQSKPPQERAEDKASSSSGTRPKEVVESVPVQNQAAAQKLLQKLNHPSQNDRHHRGWKHRGKXKQEDPVVFTLEEYENRKAQTKPSIKDWDLDISRDEHLARQLQNQLDLEDSRVGRGTYEDKAQDIRMSMFAYERDSDSSHQMGQGGRGRGRGRGKGRGRGRGRHG

SEQ ID NO: 9826 - DNA, 823 bp, Glycine max
  misc_feature (1)..(823): Ceres Seq. ID no. 13595723
atgctgtagcaaaccaaggtgtgaacactgaggttcataaatcagaaagttcagatcaacgggtaacaagtctgggcagagtgcctcctgcgaaaatgaccatgtcaaatgaaacccgacatgctctgccaattgccctgaagaaactttttcagactcacaaagtttgcagcttcaaattgatatgcgaaggattgcgcgaaatggcagtttccaaagctatgctttcaaagggagattctaaaatggctgtggatgcagctcacagtcttgatggtccccataatgagttgatggctgtcataagtgaagttgcatgcgaaatcaatggttcttatgtgctgaagtcatcacccgatgatccattcagggatgttgtaattgatatgctttgtggaagtggacccaatgccaagctgaagaaggctgagatacttgaagctgccagaagaaaactcggtagggaggtcgctagcaatgaatataccaaggtcatgagcgagttatgtgtgtcaaaaggttctgtttgggtcttgaaaagcggtgatggaagtaagtaagcaatgatccgaggtccccgaggattgaactgcccacctgctcatgaatggaagtcatactctgctttctcatgagactaccagagtttagtttattggtcatagtcattattctcaaatattcaaatcttttccaactttttagctttagataaggaataaatttaaagagaatattttttattgttcgaatcaaaagaaaaaggtagagaagttagatgaaagaaaacaggaatggacaaagattgccctgttagctatta

SEQ ID NO: 9827 - protein, 185 aa, Glycine max
  peptide (1)..(185): Ceres Seq. ID no. 13595724
  misc_feature (34)..(179): NCBI GI NO: 15240503 NR Description: expressed protein [Arabidopsis thaliana]
  misc_feature (31)..(165): NCBI GI NO: 9858778 NR Description: BAC19.10 [Lycopersicon esculentum]
AVANQGVNTEVHKSESSDQRVTSLGRVPPAKMTMSNETRHALPIALKKLFQTHKVCSFKLICEGLREMAVSKAMLSKGDSKMAVDAAHSLDGPHNELMAVISEVACEINGSYVLKSSPDDPFRDVVIDMLCGSGPNAKLKKAEILEAARRKLGREVASNEYTKVMSELCVSKGSVWVLKSGDGSK

SEQ ID NO: 9828 - protein, 154 aa, Glycine max
  peptide (1)..(154): Ceres Seq. ID no. 13595725
  misc_feature (3)..(148): NCBI GI NO: 15240503 NR Description: expressed protein [Arabidopsis thaliana]
  misc_feature (1)..(134): NCBI GI NO: 9858778 NR Description: BAC19.10 [Lycopersicon esculentum]
MTMSNETRHALPIALKKLFQTHKVCSFKLICEGLREMAVSKAMLSKGDSKMAVDAAHSLDGPHNELMAVISEVACEINGSYVLKSSPDDPFRDVVIDMLCGSGPNAKLKKAEILEAARRKLGREVASNEYTKVMSELCVSKGSVWVLKSGDGSK

SEQ ID NO: 9829 - protein, 152 aa, Glycine max
  peptide (1)..(152): Ceres Seq. ID no. 13595726
  misc_feature (1)..(146): NCBI GI NO: 15240503 NR Description: expressed protein [Arabidopsis thaliana]
  misc_feature (1)..(132): NCBI GI NO: 9858778 NR Description: BAC19.10 [Lycopersicon esculentum]
MSNETRHALPIALKKLFQTHKVCSFKLICEGLREMAVSKAMLSKGDSKMAVDAAHSLDGPHNELMAVISEVACEINGSYVLKSSPDDPFRDVVIDMLCGSGPNAKLKKAEILEAARRKLGREVASNEYTKVMSELCVSKGSVWVLKSGDGSK

SEQ ID NO: 9830 - DNA, 1386 bp, Glycine max
  misc_feature (1)..(1386): Ceres Seq. ID no. 15177987
aatttcggtcgcaaaagtttctaataccacaaagtcgtcatttttaattggggaccgtattcgtagggttgctagtaaacttactggttcaccctctatggtgaagagttctggtgatcggtctcagaagaccgatggaagcgctgatggtttttctgggaatggacctgatttttcttttgaggaggctcagaggtcaaatatggttgccccaacagagtattcatctctggacgatttgctatcttcacttcgtttggtggctcaagaaccccttggagattacagcttcctgaatcctattgtaagcttcttctatgatttcaggaattcgatagttgtggctgatgattctgtaaaagatatattttgtaaagaaaaagttggtactaaaaggaagaaaccgctcacggctggattgcccgaaacatttgaatttgaggatatgagtgacacatattggacagacagggtcattgacaatggtagtgaagcacaaccagcgcaaccgtgtcaaccaccacaaccagcacggagaaaccggaaaaaagaccatcaacttgttcctactgagccagggaagcctgttcaagttagtcgtaggccatattccaggaaacagtattctaacaacaatcacattgaggctcctgcaaaacctcctggttatatagatgagaatgcccctgctgaacttgttatgaactttgctgagttgggttctgttccctcagaaacaaaccttaataaaatgtttaggcgttttggacctctaaaggaagcagagacagaagttgatacagtaagcagccgagcaagagtggtttttaaaaagtgtgttgatgcagaggttgcttgtagtagtgctcaaaagttcaacatatttggcccaatacttgtaaattaccagcttaattatactcctagtgcattgttcaaagcttcatctgttgccacaacacaggaccaggagatgcatcttgatctctccaattttgaggttaatataattgggagtgttgacgatgatgtggcggctaagtttggctgaatgaattgctgaagcaaaattttacctagtggctgctgaagtaggtaggtaaccagaatgttaattcatctggtcatccatttttctgttaagagatatttttggttgtaggattcctttagttgtagttctggtagttttgtaattcattttctagttttctgtatagccttgtcaactgaccctcttttgtagttgccatcattctccatccggatcattttgaattttctagtctgaacactggttctatatcaagatctttcgaattctctagtctgaacactggttctgtatcaaaatcaatagtcattcggcaattatagttaacaaag

SEQ ID NO: 9831 - protein, 349 aa, Glycine max
  peptide (1)..(349): Ceres Seq. ID no. 15177988
  misc_feature (73)..(324): NCBI GI NO: 15232577 NR Description: Putative protein [Arabidopsis thaliana]
  misc_feature (1)..(41): NCBI GI NO: 15232577 NR Description: Putative protein [Arabidopsis thaliana]
  misc_feature (225)..(306): NCBI GI NO: 15242573 NR Description: PWWP domain protein [Arabidopsis thaliana]
  misc_feature (215)..(308): NCBI GI NO: 34394029 NR Description: PWWP domain protein-like
ISVAKVSNTTKSSFLIGDRIRRVASKLTGSPSMVKSSGDRSQKTDGSADGFSGNGPDFSFEEAQRSNMVAPTEYSSLDDLLSSLRLVAQEPLGDYSFLNPIVSFFYDFRNSIVVADDSVKDIFCKEKVGTKRKKPLTAGLPETFEFEDMSDTYWTDRVIDNGSEAQPAQPCQPPQPARRNRKKDHQLVPTEPGKPVQVSRRPYSRKQYSNNNHIEAPAKPPGYIDENAPAELVMNFAELGSVPSETNLNKMFRRFGPLKEAETEVDTVSSRARVVFKKCVDAEVACSSAQKFNIFGPILVNYQLNYTPSALFKASSVATTQDQEMHLDLSNFEVNIIGSVDDDVAAKFG

SEQ ID NO: 9832 - protein, 317 aa, Glycine max
  peptide (1)..(317): Ceres Seq. ID no. 15177989
  misc_feature (41)..(292): NCBI GI NO: 15232577 NR Description: Putative protein [Arabidopsis thaliana]
  misc_feature (193)..(274): NCBI GI NO: 15242573 NR Description: PWWP domain protein [Arabidopsis thaliana]
  misc_feature (183)..(276): NCBI GI NO: 34394029 NR Description: PWWP domain protein-like
MVKSSGDRSQKTDGSADGFSGNGPDFSFEEAQRSNMVAPTEYSSLDDLLSSLRLVAQEPLGDYSFLNPIVSFFYDFRNSIVVADDSVKDIFCKEKVGTKRKKPLTAGLPETFEFEDMSDTYWTDRVIDNGSEAQPAQPCQPPQPARRNRKKDHQLVPTEPGKPVQVSRRPYSRKQYSNNNHIEAPAKPPGYIDENAPAELVMNFAELGSVPSETNLNKMFRRFGPLKEAETEVDTVSSRARVVFKKCVDAEVACSSAQKFNIFGPILVNYQLNYTPSALFKASSVATTQDQEMHLDLSNFEVNIIGSVDDDVAAKFG

SEQ ID NO: 9833 - protein, 282 aa, Glycine max
  peptide (1)..(282): Ceres Seq. ID no. 15177990
  misc_feature (6)..(257): NCBI GI NO: 15232577 NR Description: Putative protein [Arabidopsis thaliana]
  misc_feature (158)..(239): NCBI GI NO: 15242573 NR Description: PWWP domain protein [Arabidopsis thaliana]
  misc_feature (148)..(241): NCBI GI NO: 34394029 NR Description: PWWP domain protein-like
MVAPTEYSSLDDLLSSLRLVAQEPLGDYSFLNPIVSFFYDFRNSIVVADDSVKDIFCKEKVGTKRKKPLTAGLPETFEFEDMSDTYWTDRVIDNGSEAQPAQPCQPPQPARRNRKKDHQLVPTEPGKPVQVSRRPYSRKQYSNNNHIEAPAKPPGYIDENAPAELVMNFAELGSVPSETNLNKMFRRFGPLKEAETEVDTVSSRARVVFKKCVDAEVACSSAQKFNIFGPILVNYQLNYTPSALFKASSVATTQDQEMHLDLSNFEVNIIGSVDDDVAAKFG

SEQ ID NO: 9834 - DNA, 1137 bp, Glycine max
  misc_feature (1)..(1137): Ceres Seq. ID no. 15171460
gactcttcttccttcctaggatgctgctcatggcctctaccctccctttcccaacactttccattcttcctcacaaggcacactgcaaatcaacaccaaaacttcatccacttcctcacatctcttcaagattgaatgttgtttcaaaagatcctcccatattattagatcaatcttgcaatgttctaaaaaatgcctctctttccctcacatcaatcacactcccctttttattggaacaaaaggatgtggcacttgctgttgaaggggaatttgggatattggaaggaagaacatttgctctcatacaccccattgtgatggcttctttgttcttgtacaccttgtgggcaggatatttggggtggcagtggaggagagtgaggactattcagaatgagattaatgagttaaagaaacaagtgaagcctaccccagtcaccccagaagaagtgccaccaccatcagaaattgagctcaaaattcagcaacttactgaggagaggaaagagctgctaaaagggtcttacaaggataggcattataatgcaggatccatacttctaggatttggggtgcttgaggctgttggtggaggattgaacacttggattaggacagggaagctattcccaggcccacatttgtttggaggagcagctattgcagtgttgtgggcactttcagcagcattggtaccatcaatgcagagagggagtgaaacagcaagaagtcttcacattgctttgaatacattaaacgtgctgctatttgtgtcacagcttcccactggatttgacattttattgaaagtgtttgagttcacaaactggccttgaatgatgtttcccttagatgtactccaatttgcaacaccaaaatcaccccaatttcatagtttaagatcacactttttctttttcttgaataaggtgtagaagtgtgtttaattaaaagtgaaggagacgaatataaatgtcattgtaattaattgggtagttgtagagtagtgaaatcagattccaaaagtaacttcgggatttatggcaatgtaaatcgtttttattttcctcggtgacatgacagtggacccatcagccaatgttgtctatcttaatctgatactctctttacaag

SEQ ID NO: 9835 - protein, 278 aa, Glycine max
  peptide (1)..(278): Ceres Seq. ID no. 15171461
  misc_feature (10)..(278): NCBI GI NO: 15228623 NR Description: expressed protein [Arabidopsis thaliana]
  misc_feature (166)..(271): NCBI GI NO: 22299036 NR Description: ORF_ID:tll1493~hypothetical protein
  misc_feature (98)..(142): NCBI GI NO: 22299036 NR Description: ORF_ID:tll1493~hypothetical protein
  misc_feature (166)..(271): NCBI GI NO: 23130190 NR Description: hypothetical protein [Nostoc punctiforme]
  misc_feature (166)..(271): NCBI GI NO: 17230241 NR Description: hypothetical protein [Nostoc sp. PCC 7120]
  misc_feature (166)..(271): NCBI GI NO: 16330950 NR Description: hypothetical protein [Synechocystis sp. PCC 6803]
  misc_feature (166)..(272): NCBI GI NO: 33864786 NR Description: conserved hypothetical protein
LFFLPRMLLMASTLPFPTLSILPHKAHCKSTPKLHPLPHISSRLNVVSKDPPILLDQSCNVLKNASLSLTSITLPFLLEQKDVALAVEGEFGILEGRTFALIHPIVMASLFLYTLWAGYLGWQWRRVRTIQNEINELKKQVKPTPVTPEEVPPPSEIELKIQQLTEERKELLKGSYKDRHYNAGSILLGFGVLEAVGGGLNTWIRTGKLFPGPHLFGGAAIAVLWALSAALVPSMQRGSETARSLHIALNTLNVLLFVSQLPTGFDILLKVFEFTNWP

SEQ ID NO: 9836 - protein, 272 aa, Glycine max
  peptide (1)..(272): Ceres Seq. ID no. 15171462
  misc_feature (4)..(272): NCBI GI NO: 15228623 NR Description: expressed protein [Arabidopsis thaliana]
  misc_feature (160)..(265): NCBI GI NO: 22299036 NR Description: ORF_ID:tll1493~hypothetical protein
  misc_feature (92)..(136): NCBI GI NO: 22299036 NR Description: ORF_ID:tll1493~hypothetical protein
  misc_feature (160)..(265): NCBI GI NO: 23130190 NR Description: hypothetical protein [Nostoc punctiforme]
  misc_feature (160)..(265): NCBI GI NO: 17230241 NR Description: hypothetical protein [Nostoc sp. PCC 7120]
  misc_feature (160)..(265): NCBI GI NO: 16330950 NR Description: hypothetical protein [Synechocystis sp. PCC 6803]
  misc_feature (160)..(266): NCBI GI NO: 33864786 NR Description: conserved hypothetical protein
MLLMASTLPFPTLSILPHKAHCKSTPKLHPLPHISSRLNVVSKDPPILLDQSCNVLKNASLSLTSITLPFLLEQKDVALAVEGEFGILEGRTFALIHPIVMASLFLYTLWAGYLGWQWRRVRTIQNEINELKKQVKPTPVTPEEVPPPSEIELKIQQLTEERKELLKGSYKDRHYNAGSILLGFGVLEAVGGGLNTWIRTGKLFPGPHLFGGAAIAVLWALSAALVPSMQRGSETARSLHIALNTLNVLLFVSQLPTGFDILLKVFEFTNWP

SEQ ID NO: 9837 - protein, 269 aa, Glycine max
  peptide (1)..(269): Ceres Seq. ID no. 15171463
  misc_feature (1)..(269): NCBI GI NO: 15228623 NR Description: expressed protein [Arabidopsis thaliana]
  misc_feature (157)..(262): NCBI GI NO: 22299036 NR Description: ORF_ID:tll1493~hypothetical protein
  misc_feature (89)..(133): NCBI GI NO: 22299036 NR Description: ORF_ID:tll1493~hypothetical protein
  misc_feature (157)..(262): NCBI GI NO: 23130190 NR Description: hypothetical protein [Nostoc punctiforme]
  misc_feature (157)..(262): NCBI GI NO: 17230241 NR Description: hypothetical protein [Nostoc sp. PCC 7120]
  misc_feature (157)..(262): NCBI GI NO: 16330950 NR Description: hypothetical protein [Synechocystis sp. PCC 6803]
  misc_feature (157)..(263): NCBI GI NO: 33864786 NR Description: conserved hypothetical protein
MASTLPFPTLSILPHKAHCKSTPKLHPLPHISSRLNVVSKDPPILLDQSCNVLKNASLSLTSITLPFLLEQKDVALAVEGEFGILEGRTFALIHPIVMASLFLYTLWAGYLGWQWRRVRTIQNEINELKKQVKPTPVTPEEVPPPSEIELKIQQLTEERKELLKGSYKDRHYNAGSILLGFGVLEAVGGGLNTWIRTGKLFPGPHLFGGAAIAVLWALSAALVPSMQRGSETARSLHIALNTLNVLLFVSQLPTGFDILLKVFEFTNWP

SEQ ID NO: 9838 - DNA, 1317 bp, Glycine max
  misc_feature (1)..(1317): Ceres Seq. ID no. 15176197
gggaaaaaagtatatgccaaactcattttatattctcttccaccttactccatcctcgatcatgtgaaaaaagtttattttaccaaaaattgtggttatggttctgactgaaaccagtttatgattggcgtatatgcaaaatttgaatggtctaataatgccgattaaatttccgagctaattcctgagattgtgttgttatgcattgttgcagatgaaggtgaaaaagcagaagaggcataggaagattttgacgttttacactgcttgcttcggttttcggaagcctttcaaggttctatgtgatggcacattcgtgcatcaccttcttgtgaatcgaataacccctgctgacacggccattggcaatgttctcagtgctacggtcaagctctacacaacaagatgtgttctagctgagttgaatcgactcggtagctcgtattctgaggctctggaggcagctcataaacttatagttgcaagatgtgagcatgaaaaatgtaagagtgcagatgcttgcatcatggaggttgttggaggaaaaaactctgagcatttctttgttgctagtcaggacactgacctgcggaaaaagttgcaagaggtacctggtgtgcctctcatatttggtcttagaaatgctcttttccttgaatctccatctgcatttcagcggcaatatgtcaaaacttctgaagaaggacgattgcatatgactcagaaggagtaccagatatttaaggatagggtaattaatagattgactggtgaggaagctaaccattccatttctcaaataatggaaaatgacgattcagaagatcagaccataaatgtgcaggcagtaaagaagggtattactgcaaggaatcatatggaaatcaaggataaacctcagttcaagagaaaaagagctaagggcccgaacccactttcatgcaagaagaagaaaagtgaaaaacaaaatattggtcctttgaaggaaacagatggagacaactcagtgaagagaagtaggaaaagaaagaggtcacagagacggaaaatgccaacagaaacaggcagttaggtggatcttttttatatatacagttacaaataggaatttttagagagcttcttgactttactgcttctgttgagtggagagaaaagcaagttttacttttgatccatgctgacatgggaggggaaagtgtatctagattagttgcatgttgaattttatactgtttctattttgctggcgatcgtatttttacttaactatggatacccaaatagccgttggtcacaaaattgcttctgatattt

SEQ ID NO: 9839 - protein, 285 aa, Glycine max
  peptide (1)..(285): Ceres Seq. ID no. 15176198
  misc_feature (53)..(150): Pfam Name: Pfam Description:  Protein of unknown function, DUF652
  misc_feature (1)..(284): NCBI GI NO: 30686117 NR Description: expressed protein [Arabidopsis thaliana]
  misc_feature (1)..(270): NCBI GI NO: 25408336 NR Description: hypothetical protein At2g34570
  misc_feature (1)..(251): NCBI GI NO: 21313442 NR Description: RIKEN cDNA D530033C11 [Mus musculus]
  misc_feature (1)..(251): NCBI GI NO: 26335161 NR Description: unnamed protein product [Mus musculus]
  misc_feature (1)..(252): NCBI GI NO: 14150118 NR Description: hypothetical protein MGC14595 [Homo sapiens]
  misc_feature (1)..(227): NCBI GI NO: 19075891 NR Description: conserved protein
  misc_feature (1)..(251): NCBI GI NO: 31222167 NR Description: ENSANGP00000006696 [Anopheles gambiae]
  misc_feature (1)..(236): NCBI GI NO: 6324577 NR Description: Protein required for cell viability; Yor004wp
  misc_feature (1)..(159): NCBI GI NO: 24580927 NR Description: CG17652-PA [Drosophila melanogaster]
  misc_feature (1)..(139): NCBI GI NO: 17552478 NR Description: protein required for cell viability like (26
MKVKKQKRHRKILTFYTACFGFRKPFKVLCDGTFVHHLLVNRITPADTAIGNVLSATVKLYTTRCVLAELNRLGSSYSEALEAAHKLIVARCEHEKCKSADACIMEVVGGKNSEHFFVASQDTDLRKKLQEVPGVPLIFGLRNALFLESPSAFQRQYVKTSEEGRLHMTQKEYQIFKDRVINRLTGEEANHSISQIMENDDSEDQTINVQAVKKGITARNHMEIKDKPQFKRKRAKGPNPLSCKKKKSEKQNIGPLKETDGDNSVKRSRKRKRSQRRKMPTETGS

SEQ ID NO: 9840 - protein, 181 aa, Glycine max
  peptide (1)..(181): Ceres Seq. ID no. 15176199
  misc_feature (1)..(180): NCBI GI NO: 30686117 NR Description: expressed protein [Arabidopsis thaliana]
  misc_feature (1)..(166): NCBI GI NO: 25408336 NR Description: hypothetical protein At2g34570
  misc_feature (1)..(147): NCBI GI NO: 21313442 NR Description: RIKEN cDNA D530033C11 [Mus musculus]
  misc_feature (1)..(147): NCBI GI NO: 26335161 NR Description: unnamed protein product [Mus musculus]
  misc_feature (1)..(148): NCBI GI NO: 14150118 NR Description: hypothetical protein MGC14595 [Homo sapiens]
  misc_feature (1)..(123): NCBI GI NO: 19075891 NR Description: conserved protein
  misc_feature (1)..(147): NCBI GI NO: 31222167 NR Description: ENSANGP00000006696 [Anopheles gambiae]
  misc_feature (1)..(132): NCBI GI NO: 6324577 NR Description: Protein required for cell viability; Yor004wp
  misc_feature (1)..(55): NCBI GI NO: 24580927 NR Description: CG17652-PA [Drosophila melanogaster]
  misc_feature (1)..(35): NCBI GI NO: 17552478 NR Description: protein required for cell viability like (26
MEVVGGKNSEHFFVASQDTDLRKKLQEVPGVPLIFGLRNALFLESPSAFQRQYVKTSEEGRLHMTQKEYQIFKDRVINRLTGEEANHSISQIMENDDSEDQTINVQAVKKGITARNHMEIKDKPQFKRKRAKGPNPLSCKKKKSEKQNIGPLKETDGDNSVKRSRKRKRSQRRKMPTETGS

SEQ ID NO: 9841 - DNA, 2182 bp, Glycine max
  misc_feature (1)..(2182): Ceres Seq. ID no. 13594171
acatctaactaccctccttcaaaactcatctcgaaaccctaagcactcgctcgggttcgtgtagtgccaaaccctagggctcattttccagatctattcagtttttctctcctctcttttccgatccaccgttggagatcgaagatggtgtccgacgccagcaagaagaaggccgcacagaagaaggccgccgccgccgccaagagaggtggcaaagctgccgccgctgccgttatggccgccacctcttccaaagccgccgacaaggtcgccaacggaatcgccgatattcagatttcggatcggacctgcaccggcgtcctctgttcgcatcctctctccagagatattcgaatagagtctctatccgtcacattccatggacatgatctcattgttgattctgaattggagctgaattatggaaggcgttatggcttactcggattaaatggttgtggaaaatctacactgcttacagccatcggttgtcgggaacttccaattcccgaccacatggacatatatcatctaaccagggagattgatgcctctgatatgtctgcattggaagctgtcataagctgtgacgaagaaagattgaaattggagaaagaagcagaagctttagctgcacaggatgatggaggtggtgaatcccttgaacgcatttatgaacgattggatgccctagatgcagccactgcagaaaagcgtgctgctgaaatcttacatggtcttggctttgacaagcaaatgcaggcaaagaagacacgtgatttttccggtggctggagaatgaggattgcattagcgcgagctctatttatgaacccaaccattcttctacttgatgaaccaaccaatcaccttgatttggaagcttgtgtgtggctggaggagagtttgaagaagtttgaacgtattctggttgtgatttcacactctcaggactttcttaatggtgtctgcacaaatattatccacatgcaaagcaaaaaactgaagctctacactggtaattatgatcaatatgttcagacacgttctgagctagaagagaaccagatgaaacagtacaagtgggagcaggagcagattgcctcaatgaaggaatacattgcccgatttggccatggttcggctaaactagctcgccaggcacagagtaaggagaaaacactggcaaaaatggaacgtggtggacttgcagagaaggtggtcagagacaaagttttggtatttcgttttactgatgttgggaaacttccccctccagttctccagtttgttgaggtgtcatttggttatactcctgataatctcatctacaagaacattgactttggggttgatttagattctcgggttgcgctggttgggcccaatggtgctgggaagagtacactactgaagctaatgacaggtgacttgatgcctagtgatggcatggtccgacgtcataatcatcttcgaattgcacaatatcaccagcatttggccgaaaagctagacatggaaatgtctgctctccagtttatgattaaagaataccctggaaacgaggaagagaagatgagggcggcgattgggaagtttgggctgtcaggtaaagcgcaggtgatgccaatgaagaacttgtcagatggacagaggagccgagttatatttgcttggttagcttggagacagcctcagatgcttcttttggatgagccaactaatcatttggatattgagacaattgactcgttggccgaggcattgaatgaatgggacggtggcttggtgcttgtcagccatgattttaggctcataaatcaggtggcgcatgagatatgggtatgtgctaatcaatctgtgaccagatgggagggtgacattatggaattcaaggcgcatctaaagtcgaaggcgggtttatctgactgaaacaatacgagtgtggatgctgccggtgtgtagtagtattacattaaaaggttatgatttttgttcgagcagagatccgtaataattttttttagttactatttcttgtgcttatcatttatttgcctggttgttaacaagcgtggatgaatgggatttcaccttgaggaaacgaagcttattctacaaatgaactatttcaaccgagaatattattatttgtggtattataattacgttaattcctctc

SEQ ID NO: 9842 - protein, 595 aa, Glycine max
  peptide (1)..(595): Ceres Seq. ID no. 15221313
  misc_feature (94)..(285): Pfam Name: Pfam Description:  ABC transporter
  misc_feature (1)..(595): NCBI GI NO: 28071305 NR Description: putative ABC transporter
  misc_feature (1)..(595): NCBI GI NO: 15239436 NR Description: ABC transporter family protein
  misc_feature (1)..(546): NCBI GI NO: 7573600 NR Description: ABC transporter homolog [Populus nigra]
  misc_feature (1)..(592): NCBI GI NO: 28436765 NR Description: Similar to ATP-binding cassette, sub-family F
  misc_feature (1)..(590): NCBI GI NO: 10179834 NR Description: iron inhibited ABC transporter 2 [Homo sapiens]
  misc_feature (1)..(590): NCBI GI NO: 10947137 NR Description: ATP-binding cassette
  misc_feature (1)..(590): NCBI GI NO: 27881506 NR Description: ATP-binding cassette
  misc_feature (1)..(590): NCBI GI NO: 28502799 NR Description: Similar to ATP-binding cassette, sub-family F
  misc_feature (34)..(590): NCBI GI NO: 27707592 NR Description: similar to ATP-binding cassette
  misc_feature (34)..(590): NCBI GI NO: 23956078 NR Description: ATP-binding cassette, sub-family F
MVSDASKKKAAQKKAAAAAKRGGKAAAAAVMAATSSKAADKVANGIADIQISDRTCTGVLCSHPLSRDIRIESLSVTFHGHDLIVDSELELNYGRRYGLLGLNGCGKSTLLTAIGCRELPIPDHMDIYHLTREIDASDMSALEAVISCDEERLKLEKEAEALAAQDDGGGESLERIYERLDALDAATAEKRAAEILHGLGFDKQMQAKKTRDFSGGWRMRIALARALFMNPTILLLDEPTNHLDLEACVWLEESLKKFERILVVISHSQDFLNGVCTNIIHMQSKKLKLYTGNYDQYVQTRSELEENQMKQYKWEQEQIASMKEYIARFGHGSAKLARQAQSKEKTLAKMERGGLAEKVVRDKVLVFRFTDVGKLPPPVLQFVEVSFGYTPDNLIYKNIDFGVDLDSRVALVGPNGAGKSTLLKLMTGDLMPSDGMVRRHNHLRIAQYHQHLAEKLDMEMSALQFMIKEYPGNEEEKMRAAIGKFGLSGKAQVMPMKNLSDGQRSRVIFAWLAWRQPQMLLLDEPTNHLDIETIDSLAEALNEWDGGLVLVSHDFRLINQVAHEIWVCANQSVTRWEGDIMEFKAHLKSKAGLSD

SEQ ID NO: 9843 - protein, 565 aa, Glycine max
  peptide (1)..(565): Ceres Seq. ID no. 15221314
  misc_feature (64)..(255): Pfam Name: Pfam Description:  ABC transporter
  misc_feature (1)..(565): NCBI GI NO: 28071305 NR Description: putative ABC transporter
  misc_feature (1)..(565): NCBI GI NO: 15239436 NR Description: ABC transporter family protein
  misc_feature (1)..(516): NCBI GI NO: 7573600 NR Description: ABC transporter homolog [Populus nigra]
  misc_feature (1)..(562): NCBI GI NO: 28436765 NR Description: Similar to ATP-binding cassette, sub-family F
  misc_feature (1)..(560): NCBI GI NO: 10179834 NR Description: iron inhibited ABC transporter 2 [Homo sapiens]
  misc_feature (1)..(560): NCBI GI NO: 10947137 NR Description: ATP-binding cassette
  misc_feature (1)..(560): NCBI GI NO: 27881506 NR Description: ATP-binding cassette
  misc_feature (1)..(560): NCBI GI NO: 28502799 NR Description: Similar to ATP-binding cassette, sub-family F
  misc_feature (4)..(560): NCBI GI NO: 27707592 NR Description: similar to ATP-binding cassette
  misc_feature (4)..(560): NCBI GI NO: 23956078 NR Description: ATP-binding cassette, sub-family F
MAATSSKAADKVANGIADIQISDRTCTGVLCSHPLSRDIRIESLSVTFHGHDLIVDSELELNYGRRYGLLGLNGCGKSTLLTAIGCRELPIPDHMDIYHLTREIDASDMSALEAVISCDEERLKLEKEAEALAAQDDGGGESLERIYERLDALDAATAEKRAAEILHGLGFDKQMQAKKTRDFSGGWRMRIALARALFMNPTILLLDEPTNHLDLEACVWLEESLKKFERILVVISHSQDFLNGVCTNIIHMQSKKLKLYTGNYDQYVQTRSELEENQMKQYKWEQEQIASMKEYIARFGHGSAKLARQAQSKEKTLAKMERGGLAEKVVRDKVLVFRFTDVGKLPPPVLQFVEVSFGYTPDNLIYKNIDFGVDLDSRVALVGPNGAGKSTLLKLMTGDLMPSDGMVRRHNHLRIAQYHQHLAEKLDMEMSALQFMIKEYPGNEEEKMRAAIGKFGLSGKAQVMPMKNLSDGQRSRVIFAWLAWRQPQMLLLDEPTNHLDIETIDSLAEALNEWDGGLVLVSHDFRLINQVAHEIWVCANQSVTRWEGDIMEFKAHLKSKAGLSD

SEQ ID NO: 9844 - protein, 471 aa, Glycine max
  peptide (1)..(471): Ceres Seq. ID no. 15221315
  misc_feature (1)..(161): Pfam Name: Pfam Description:  ABC transporter
  misc_feature (1)..(471): NCBI GI NO: 28071305 NR Description: putative ABC transporter
  misc_feature (1)..(471): NCBI GI NO: 15239436 NR Description: ABC transporter family protein
  misc_feature (1)..(422): NCBI GI NO: 7573600 NR Description: ABC transporter homolog [Populus nigra]
  misc_feature (1)..(468): NCBI GI NO: 28436765 NR Description: Similar to ATP-binding cassette, sub-family F
  misc_feature (1)..(466): NCBI GI NO: 10179834 NR Description: iron inhibited ABC transporter 2 [Homo sapiens]
  misc_feature (1)..(466): NCBI GI NO: 10947137 NR Description: ATP-binding cassette
  misc_feature (1)..(466): NCBI GI NO: 27881506 NR Description: ATP-binding cassette
  misc_feature (1)..(466): NCBI GI NO: 28502799 NR Description: Similar to ATP-binding cassette, sub-family F
  misc_feature (1)..(466): NCBI GI NO: 27707592 NR Description: similar to ATP-binding cassette
  misc_feature (1)..(466): NCBI GI NO: 23956078 NR Description: ATP-binding cassette, sub-family F
MDIYHLTREIDASDMSALEAVISCDEERLKLEKEAEALAAQDDGGGESLERIYERLDALDAATAEKRAAEILHGLGFDKQMQAKKTRDFSGGWRMRIALARALFMNPTILLLDEPTNHLDLEACVWLEESLKKFERILVVISHSQDFLNGVCTNIIHMQSKKLKLYTGNYDQYVQTRSELEENQMKQYKWEQEQIASMKEYIARFGHGSAKLARQAQSKEKTLAKMERGGLAEKVVRDKVLVFRFTDVGKLPPPVLQFVEVSFGYTPDNLIYKNIDFGVDLDSRVALVGPNGAGKSTLLKLMTGDLMPSDGMVRRHNHLRIAQYHQHLAEKLDMEMSALQFMIKEYPGNEEEKMRAAIGKFGLSGKAQVMPMKNLSDGQRSRVIFAWLAWRQPQMLLLDEPTNHLDIETIDSLAEALNEWDGGLVLVSHDFRLINQVAHEIWVCANQSVTRWEGDIMEFKAHLKSKAGLSD

SEQ ID NO: 9845 - DNA, 1293 bp, Glycine max
  misc_feature (1)..(1293): Ceres Seq. ID no. 13594172
ttcatcctttcttcactcctaccaatatcaaatatggtatcaaccgaagcagatgcctcaacacaaaaggttctgttttgtgcctctgcaagtccaatgaatctgaatctcaagctccccaaccaggagatattcgtaaacaagaactgctagcccaaattgccatgcttcaaactcagaaagtttgtctcacagattattttgatgagagatctgaatacttaacccagtttggtgaagaagccaaggccgagtttgacaagattggaaaagatgccctccaaggattagatgaagctagtgccattgtatgcttcaacttttgagttaacaatgtagtgtatttttggtttttgcatttggaaagtctcaaaccatggtttggtaaaagtctgtctcttgtgccatacacactagccaatcaatcatcaagcacggcatggaggaaaatcgatatgtgaaaggtattttagtaatgaccgcttattgtgttcatttgtgtttggcagataacagcaaacatagagagccagatggtggagtttgaggaatctgcagaacttaacagacaagagattcaggagcatgaaaaagaactaggtgaatttgaagttcaaatggaggatggaagaaatgaagggctgttctttaagaacctcagaaggaggacacctgttgacaaatcaaaagccaaggaggaggcagagaaaatcaaagatgtagccagagaaaaagctggtagcagaacaaggaaaggcttttacctcctctttattggcctactgacctttgcaatagttgattctattgcctcatcatcaactgattggaaaaaaatagcagttcttggagctactcttgtggctttagtttctcagttcatctacgaacagaatgtcattagaaactggagaaaaaagaaagaccgacacagaagaggaaaataactgaagtttaattgttactgagattcaatgcaagtttctgtggaagacaaaaagtataatggatgttgcgtgatacaataaacccaagtggaagcttataacttgggcctgataacatcatgctaatttgctttggcatcaacaacagcagatattggtgatataactacaatcaccaaaatctgagtaactgggttaccaagtgatgctgatgaaacttttcacatcttatgtcaatacaaaaaaacatactcttattatcatactagtttttagacatgtacatttggaacctgacgtgtatctctgtgtcttatgtcatatatacaattaatgagaaactaat

SEQ ID NO: 9846 - protein, 137 aa, Glycine max
  peptide (1)..(137): Ceres Seq. ID no. 13594173
  misc_feature (1)..(134): NCBI GI NO: 15232007 NR Description: expressed protein [Arabidopsis thaliana]
  misc_feature (1)..(130): NCBI GI NO: 34908370 NR Description: P0529E05.11
MVEFEESAELNRQEIQEHEKELGEFEVQMEDGRNEGLFFKNLRRRTPVDKSKAKEEAEKIKDVAREKAGSRTRKGFYLLFIGLLTFAIVDSIASSSTDWKKIAVLGATLVALVSQFIYEQNVIRNWRKKKDRHRRGK

SEQ ID NO: 9847 - protein, 109 aa, Glycine max
  peptide (1)..(109): Ceres Seq. ID no. 13594174
  misc_feature (1)..(106): NCBI GI NO: 15232007 NR Description: expressed protein [Arabidopsis thaliana]
  misc_feature (1)..(102): NCBI GI NO: 34908370 NR Description: P0529E05.11
MEDGRNEGLFFKNLRRRTPVDKSKAKEEAEKIKDVAREKAGSRTRKGFYLLFIGLLTFAIVDSIASSSTDWKKIAVLGATLVALVSQFIYEQNVIRNWRKKKDRHRRGK

SEQ ID NO: 9848 - protein, 107 aa, Glycine max
  peptide (1)..(107): Ceres Seq. ID no. 13594175
  misc_feature (5)..(106): NCBI GI NO: 15232007 NR Description: expressed protein [Arabidopsis thaliana]
  misc_feature (55)..(98): NCBI GI NO: 34908370 NR Description: P0529E05.11
HPFFTPTNIKYGINRSRCLNTKGSVLCLCKSNESESQAPQPGDIRKQELLAQIAMLQTQKVCLTDYFDERSEYLTQFGEEAKAEFDKIGKDALQGLDEASAIVCFNF

SEQ ID NO: 9849 - DNA, 1234 bp, Glycine max
  misc_feature (1)..(1234): Ceres Seq. ID no. 14308120
gatcagaagttagctgcataacccagagaaaagtaaacactgcaataggaagagttttcaaatggcagagggaaaaggtagagtttgtgtcactggaggcactgggttccttggttcatggatcatcaagagactccttgaagatggatatgctgttaacaccactattagatctgacccaggacgaaagagagatgttagcttcctcacaaacctaccaggcgcatccgaaaagctaaaaattttcaacgctgatctcagcgaccctgaaagttttgatccagcagttgagggatgtgttggaattttccacacagccacgccaattgattttgcagtgaacgagcctgaggaagtggtaaccaaaagagccatcgatggagcactaggcataatgaaagcaggcctaaaagcaaagacagtgaagagggttgtttacacttctagtggctccaccgtttccttcagcagccttgaagaaaaagatgtggtggatgagagtgtttggagtgatgtggatatgcttaggagtgtaaagccttttggttggtcctatgcagtttcaaaggtgttgactgagaaggctgtgcttgaatttggagaacataatgggttggaagttgcaactgttattgctccttttattgttggtccttttgtttgtcccaagcttcctgactctattgaaaaagctctgcttatggtgttgggcaaaaaagaagaaattggtgtcattcgttaccatatggtacatgtggatgatgtggctagagcacatatcttcctgcttgagcatcctaatccaaaagggagatataattgctcaccattcattgtacccattgaagagatgggtgaacttctttcagccaaatacccggaatttcaactaccaacagtagacgagctgaagggaattaaaggtgccaagcaaccacatttaacctccaagaaacttgttgatgctggttttgagttcaagtatagcttagaggacatgtttcaggatgcaattgaatgctgcaaggaaaagggttatctttaatcgaatttagccatgaagttgacaaaataaaattgatgcatatggttgttagtttgaactatttcagatcgatggcaatcatggctaatgacatatatgtacatctaggaatgcatgatgttactcgtaatagatgaatgaggaaaataatcttcttcgtttgtctaaatgctaaataaaccatttaac

SEQ ID NO: 9850 - protein, 327 aa, Glycine max
  peptide (1)..(327): Ceres Seq. ID no. 14308121
  misc_feature (10)..(179): Pfam Name: Pfam Description:  NAD dependent epimerase/dehydratase family
  misc_feature (1)..(327): NCBI GI NO: 7431411 NR Description: 2'-hydroxydihydrodaidzein reductase - soybean
  misc_feature (1)..(327): NCBI GI NO: 2129859 NR Description: vestitone reductase - alfalfa
  misc_feature (1)..(327): NCBI GI NO: 4336887 NR Description: sophorol reductase [Pisum sativum]
  misc_feature (1)..(327): NCBI GI NO: 6573167 NR Description: 2'-hydroxy isoflavone/dihydroflavonol reductase homolog
  misc_feature (6)..(327): NCBI GI NO: 15225469 NR Description: dihydroflavonol 4-reductase
  misc_feature (1)..(327): NCBI GI NO: 1332411 NR Description: dihydroflavonol 4-reductase [Rosa hybrid cultivar]
  misc_feature (1)..(327): NCBI GI NO: 5852933 NR Description: dihydroflavonol-4-reductase DFR1 [Glycine max]
  misc_feature (8)..(327): NCBI GI NO: 4588781 NR Description: dihydroflavonol reductase [Malus x domestica]
  misc_feature (8)..(327): NCBI GI NO: 28629480 NR Description: dihydroflavonol 4-reductase [Malus x domestica]
  misc_feature (8)..(327): NCBI GI NO: 27465024 NR Description: dihydroflavonol reductase [Populus tremuloides]
MAEGKGRVCVTGGTGFLGSWIIKRLLEDGYAVNTTIRSDPGRKRDVSFLTNLPGASEKLKIFNADLSDPESFDPAVEGCVGIFHTATPIDFAVNEPEEVVTKRAIDGALGIMKAGLKAKTVKRVVYTSSGSTVSFSSLEEKDVVDESVWSDVDMLRSVKPFGWSYAVSKVLTEKAVLEFGEHNGLEVATVIAPFIVGPFVCPKLPDSIEKALLMVLGKKEEIGVIRYHMVHVDDVARAHIFLLEHPNPKGRYNCSPFIVPIEEMGELLSAKYPEFQLPTVDELKGIKGAKQPHLTSKKLVDAGFEFKYSLEDMFQDAIECCKEKGYL

SEQ ID NO: 9851 - protein, 216 aa, Glycine max
  peptide (1)..(216): Ceres Seq. ID no. 14308122
  misc_feature (1)..(68): Pfam Name: Pfam Description:  NAD dependent epimerase/dehydratase family
  misc_feature (1)..(216): NCBI GI NO: 7431411 NR Description: 2'-hydroxydihydrodaidzein reductase - soybean
  misc_feature (1)..(216): NCBI GI NO: 2129859 NR Description: vestitone reductase - alfalfa
  misc_feature (1)..(216): NCBI GI NO: 4336887 NR Description: sophorol reductase [Pisum sativum]
  misc_feature (1)..(216): NCBI GI NO: 6573167 NR Description: 2'-hydroxy isoflavone/dihydroflavonol reductase homolog
  misc_feature (1)..(216): NCBI GI NO: 15225469 NR Description: dihydroflavonol 4-reductase
  misc_feature (1)..(216): NCBI GI NO: 1332411 NR Description: dihydroflavonol 4-reductase [Rosa hybrid cultivar]
  misc_feature (1)..(216): NCBI GI NO: 5852933 NR Description: dihydroflavonol-4-reductase DFR1 [Glycine max]
  misc_feature (1)..(216): NCBI GI NO: 4588781 NR Description: dihydroflavonol reductase [Malus x domestica]
  misc_feature (1)..(216): NCBI GI NO: 28629480 NR Description: dihydroflavonol 4-reductase [Malus x domestica]
  misc_feature (1)..(216): NCBI GI NO: 27465024 NR Description: dihydroflavonol reductase [Populus tremuloides]
MKAGLKAKTVKRVVYTSSGSTVSFSSLEEKDVVDESVWSDVDMLRSVKPFGWSYAVSKVLTEKAVLEFGEHNGLEVATVIAPFIVGPFVCPKLPDSIEKALLMVLGKKEEIGVIRYHMVHVDDVARAHIFLLEHPNPKGRYNCSPFIVPIEEMGELLSAKYPEFQLPTVDELKGIKGAKQPHLTSKKLVDAGFEFKYSLEDMFQDAIECCKEKGYL

SEQ ID NO: 9852 - protein, 174 aa, Glycine max
  peptide (1)..(174): Ceres Seq. ID no. 14308123
  misc_feature (1)..(90): Pfam Name: Pfam Description:  3-beta hydroxysteroid dehydrogenase/ isomerase family
  misc_feature (1)..(174): NCBI GI NO: 7431411 NR Description: 2'-hydroxydihydrodaidzein reductase - soybean
  misc_feature (1)..(174): NCBI GI NO: 2129859 NR Description: vestitone reductase - alfalfa
  misc_feature (1)..(174): NCBI GI NO: 4336887 NR Description: sophorol reductase [Pisum sativum]
  misc_feature (1)..(174): NCBI GI NO: 6573167 NR Description: 2'-hydroxy isoflavone/dihydroflavonol reductase homolog
  misc_feature (1)..(174): NCBI GI NO: 15225469 NR Description: dihydroflavonol 4-reductase
  misc_feature (1)..(174): NCBI GI NO: 1332411 NR Description: dihydroflavonol 4-reductase [Rosa hybrid cultivar]
  misc_feature (1)..(174): NCBI GI NO: 5852933 NR Description: dihydroflavonol-4-reductase DFR1 [Glycine max]
  misc_feature (1)..(174): NCBI GI NO: 4588781 NR Description: dihydroflavonol reductase [Malus x domestica]
  misc_feature (1)..(174): NCBI GI NO: 28629480 NR Description: dihydroflavonol 4-reductase [Malus x domestica]
  misc_feature (1)..(174): NCBI GI NO: 27465024 NR Description: dihydroflavonol reductase [Populus tremuloides]
MLRSVKPFGWSYAVSKVLTEKAVLEFGEHNGLEVATVIAPFIVGPFVCPKLPDSIEKALLMVLGKKEEIGVIRYHMVHVDDVARAHIFLLEHPNPKGRYNCSPFIVPIEEMGELLSAKYPEFQLPTVDELKGIKGAKQPHLTSKKLVDAGFEFKYSLEDMFQDAIECCKEKGYL

SEQ ID NO: 9853 - DNA, 1817 bp, Glycine max
  misc_feature (1)..(1817): Ceres Seq. ID no. 14308221
agtcacaacacacacacacatagcaatggcatctatggcggctataggttctctcaatgttccacgttctgcttcttcccgttcatcctttgtgggaagaaaaagcgttccacgcagcctttccttctctgcatcacaactttgtggagacaagattcccacagattcagttttattggcaccaaaaataggtcgcagtccagttatcgttactcctaaagcagtttctgattcccaaaactcacaaacgtgccttgatcccgatgctagcagaagtgtgcttggcattatacttggaggtggtgctgggactcggctttatccactcaccaagaagagggcaaagccagctgttcctcttggagctaactataggcttattgatattcctgttagcaactgcttgaatagcaatgtctccaagatctatgttctcactcaattcaattctgcgtcgttaaaccgacacctttctcgtgcttatgcaagcaacatgggtggctacaaaaatgagggatttgttgaggttcttgctgctcagcagagtcctgagaatcctaattggttccagggtactgcagatgctgtgaggcagtatttgtggctttttgaagagcacaatgttttggaattcttggttctggctggtgaccatttgtatcgaatggattacgagaaatttatccaagcgcatagggaaactgatgctgatatcactgtggctgcattgccaatggatgaagcgcgtgccactgcatttggtttgatgaagattgatgaagaggggcgtataattgaatttgctgaaaagccaaaaggagaacagttgaaagctatgaaggttgatactacaattttgggtcttgatgacgagagagcaaaagaaatgccttatattgctagcatgggtatatatgttgttagcaaaaatgtgatgttagacctgctccgtgagaagtttcctggtgcaaatgactttgggagtgaagtgattcctggtgctacttctattggaatgagagtgcaagcttacttgtatgatggctactgggaagacattggtacaatcgaggctttctataatgcaaatctgggaatcaccaaaaagcctgtgcctgacttcagtttctatgatcgttcatctccaatctacacccaaccacgatatttgcctccctctaagatgcttgatgctgatgtcactgatagtgttattggtgaaggatgtgtgactaagaactgcaaaattcaccattctgtggttgggctgcgatcttgcatatcagaaggtgcaattattgaagacacgttattaatgggggcagattattacgagacggaggctgataagaggtttctggctgccaaaggcagtgttccaattggtataggcaggaactctcatatcaaaagggcaattattgacaagaatgctcgaattggggaaaatgtcaagattattaacagtgacaatgtccaagaagctgcaagggaaacagatgggtatttcataaaaagtgggattgtcacagtaatcaaggatgctttaattcctagtggaacagtcatctaaacacaaccacctccccaaaaaatttcttgtaccccaaatcctaatggtgactgcgaagctcattaccaccgcaggagagtttatcaagctctgcttccacgtctaagataggcttttgtgtttcatgatatatatttttgggcagtggcttgtaaataatagcggaagagaaggcccgctatgagcaatcacgctgtaaagttcgttaatcaattcaataaaacaagtttctttatttcgtacc

SEQ ID NO: 9854 - protein, 523 aa, Glycine max
  peptide (1)..(523): Ceres Seq. ID no. 14308222
  misc_feature (94)..(369): Pfam Name: Pfam Description:  Nucleotidyl transferase
  misc_feature (9)..(523): NCBI GI NO: 29421116 NR Description: ADP-glucose pyrophosphorylase small subunit PvAGPS1
  misc_feature (9)..(523): NCBI GI NO: 1237080 NR Description: ADP-glucose pyrophosphorylase [Pisum sativum]
  misc_feature (9)..(523): NCBI GI NO: 13487787 NR Description: ADP-glucose pyrophosphorylase small subunit CagpS1
  misc_feature (9)..(523): NCBI GI NO: 17865468 NR Description: Glucose-1-phosphate adenylyltransferase small subunit
  misc_feature (12)..(523): NCBI GI NO: 1707944 NR Description: Glucose-1-phosphate adenylyltransferase small subunit 2
  misc_feature (9)..(523): NCBI GI NO: 1237082 NR Description: ADP-glucose pyrophosphorylase [Pisum sativum]
  misc_feature (20)..(523): NCBI GI NO: 16950559 NR Description: ADP-glucose pyrophosphorylase small subunit CagpS2
  misc_feature (9)..(523): NCBI GI NO: 1707943 NR Description: Glucose-1-phosphate adenylyltransferase small subunit 1
  misc_feature (9)..(523): NCBI GI NO: 13487709 NR Description: ADP-glucose pyrophosphorylase small subunit
  misc_feature (10)..(523): NCBI GI NO: 7434871 NR Description: glucose-1-phosphate adenylyltransferase (EC2
VTTHTHIAMASMAAIGSLNVPRSASSRSSFVGRKSVPRSLSFSASQLCGDKIPTDSVLLAPKIGRSPVIVTPKAVSDSQNSQTCLDPDASRSVLGIILGGGAGTRLYPLTKKRAKPAVPLGANYRLIDIPVSNCLNSNVSKIYVLTQFNSASLNRHLSRAYASNMGGYKNEGFVEVLAAQQSPENPNWFQGTADAVRQYLWLFEEHNVLEFLVLAGDHLYRMDYEKFIQAHRETDADITVAALPMDEARATAFGLMKIDEEGRIIEFAEKPKGEQLKAMKVDTTILGLDDERAKEMPYIASMGIYVVSKNVMLDLLREKFPGANDFGSEVIPGATSIGMRVQAYLYDGYWEDIGTIEAFYNANLGITKKPVPDFSFYDRSSPIYTQPRYLPPSKMLDADVTDSVIGEGCVTKNCKIHHSVVGLRSCISEGAIIEDTLLMGADYYETEADKRFLAAKGSVPIGIGRNSHIKRAIIDKNARIGENVKIINSDNVQEAARETDGYFIKSGIVTVIKDALIPSGTVI

SEQ ID NO: 9855 - protein, 515 aa, Glycine max
  peptide (1)..(515): Ceres Seq. ID no. 14308223
  misc_feature (86)..(361): Pfam Name: Pfam Description:  Nucleotidyl transferase
  misc_feature (1)..(515): NCBI GI NO: 29421116 NR Description: ADP-glucose pyrophosphorylase small subunit PvAGPS1
  misc_feature (1)..(515): NCBI GI NO: 1237080 NR Description: ADP-glucose pyrophosphorylase [Pisum sativum]
  misc_feature (1)..(515): NCBI GI NO: 13487787 NR Description: ADP-glucose pyrophosphorylase small subunit CagpS1
  misc_feature (1)..(515): NCBI GI NO: 17865468 NR Description: Glucose-1-phosphate adenylyltransferase small subunit
  misc_feature (4)..(515): NCBI GI NO: 1707944 NR Description: Glucose-1-phosphate adenylyltransferase small subunit 2
  misc_feature (1)..(515): NCBI GI NO: 1237082 NR Description: ADP-glucose pyrophosphorylase [Pisum sativum]
  misc_feature (12)..(515): NCBI GI NO: 16950559 NR Description: ADP-glucose pyrophosphorylase small subunit CagpS2
  misc_feature (1)..(515): NCBI GI NO: 1707943 NR Description: Glucose-1-phosphate adenylyltransferase small subunit 1
  misc_feature (1)..(515): NCBI GI NO: 13487709 NR Description: ADP-glucose pyrophosphorylase small subunit
  misc_feature (2)..(515): NCBI GI NO: 7434871 NR Description: glucose-1-phosphate adenylyltransferase (EC2
MASMAAIGSLNVPRSASSRSSFVGRKSVPRSLSFSASQLCGDKIPTDSVLLAPKIGRSPVIVTPKAVSDSQNSQTCLDPDASRSVLGIILGGGAGTRLYPLTKKRAKPAVPLGANYRLIDIPVSNCLNSNVSKIYVLTQFNSASLNRHLSRAYASNMGGYKNEGFVEVLAAQQSPENPNWFQGTADAVRQYLWLFEEHNVLEFLVLAGDHLYRMDYEKFIQAHRETDADITVAALPMDEARATAFGLMKIDEEGRIIEFAEKPKGEQLKAMKVDTTILGLDDERAKEMPYIASMGIYVVSKNVMLDLLREKFPGANDFGSEVIPGATSIGMRVQAYLYDGYWEDIGTIEAFYNANLGITKKPVPDFSFYDRSSPIYTQPRYLPPSKMLDADVTDSVIGEGCVTKNCKIHHSVVGLRSCISEGAIIEDTLLMGADYYETEADKRFLAAKGSVPIGIGRNSHIKRAIIDKNARIGENVKIINSDNVQEAARETDGYFIKSGIVTVIKDALIPSGTVI

SEQ ID NO: 9856 - protein, 512 aa, Glycine max
  peptide (1)..(512): Ceres Seq. ID no. 14308224
  misc_feature (83)..(358): Pfam Name: Pfam Description:  Nucleotidyl transferase
  misc_feature (1)..(512): NCBI GI NO: 29421116 NR Description: ADP-glucose pyrophosphorylase small subunit PvAGPS1
  misc_feature (1)..(512): NCBI GI NO: 1237080 NR Description: ADP-glucose pyrophosphorylase [Pisum sativum]
  misc_feature (1)..(512): NCBI GI NO: 13487787 NR Description: ADP-glucose pyrophosphorylase small subunit CagpS1
  misc_feature (1)..(512): NCBI GI NO: 17865468 NR Description: Glucose-1-phosphate adenylyltransferase small subunit
  misc_feature (1)..(512): NCBI GI NO: 1707944 NR Description: Glucose-1-phosphate adenylyltransferase small subunit 2
  misc_feature (1)..(512): NCBI GI NO: 1237082 NR Description: ADP-glucose pyrophosphorylase [Pisum sativum]
  misc_feature (9)..(512): NCBI GI NO: 16950559 NR Description: ADP-glucose pyrophosphorylase small subunit CagpS2
  misc_feature (1)..(512): NCBI GI NO: 1707943 NR Description: Glucose-1-phosphate adenylyltransferase small subunit 1
  misc_feature (1)..(512): NCBI GI NO: 13487709 NR Description: ADP-glucose pyrophosphorylase small subunit
  misc_feature (1)..(512): NCBI GI NO: 7434871 NR Description: glucose-1-phosphate adenylyltransferase (EC2
MAAIGSLNVPRSASSRSSFVGRKSVPRSLSFSASQLCGDKIPTDSVLLAPKIGRSPVIVTPKAVSDSQNSQTCLDPDASRSVLGIILGGGAGTRLYPLTKKRAKPAVPLGANYRLIDIPVSNCLNSNVSKIYVLTQFNSASLNRHLSRAYASNMGGYKNEGFVEVLAAQQSPENPNWFQGTADAVRQYLWLFEEHNVLEFLVLAGDHLYRMDYEKFIQAHRETDADITVAALPMDEARATAFGLMKIDEEGRIIEFAEKPKGEQLKAMKVDTTILGLDDERAKEMPYIASMGIYVVSKNVMLDLLREKFPGANDFGSEVIPGATSIGMRVQAYLYDGYWEDIGTIEAFYNANLGITKKPVPDFSFYDRSSPIYTQPRYLPPSKMLDADVTDSVIGEGCVTKNCKIHHSVVGLRSCISEGAIIEDTLLMGADYYETEADKRFLAAKGSVPIGIGRNSHIKRAIIDKNARIGENVKIINSDNVQEAARETDGYFIKSGIVTVIKDALIPSGTVI

SEQ ID NO: 9857 - DNA, 768 bp, Glycine max
  misc_feature (1)..(768): Ceres Seq. ID no. 15226758
accggsccccmcctcgagtcagctacgtaggcccccccccgagagttgttgatatcactcactcctcaaagcgcagaacacacattaagaaacattatatctaatatccatcgagagagtgacacaaaaccctaaccaaaacgacaccgtgggatctgttcctcctctcagattttgctgcaatgggcaagaaaaagttagattcaaagtccgatcgcaaattcgaaaagaaggtccaattttattccaaggtgaaagatgctgttacctccttgagtgcccaaaagtctattactaagaaaaagaaaaagagcaaacaacaaaggcggcagaagaaattgaaggcatataatctatcttcacttttagagtcccttcctgaggtgaaggcatcaaagaaaccaggttgtgcgaatgacagcaaacttacgtgtaaatccaggcagatgctagtattgactgaaagagatcgaatttctgctgttctcaatgatcctaactttcaagcagatcccctgtctgccattcatcaatatatacagaagaaacaaccggtagtagaggaacaacccaagaaaaaagtgaacaaaaatggatccaggaagaagaaatcaaaggcttcaactgggctacaatctatggaaatgtagtgtcttgtgtggctgctataatgatcaactttttttgaaggtctttcaataattttactacttctgtaaaacattagattactcgaattatgaatgcaaataactatggtaattggtc

SEQ ID NO: 9858 - protein, 155 aa, Glycine max
  peptide (1)..(155): Ceres Seq. ID no. 15226759
  misc_feature (1)..(148): NCBI GI NO: 18379269 NR Description: expressed protein [Arabidopsis thaliana]
MGKKKLDSKSDRKFEKKVQFYSKVKDAVTSLSAQKSITKKKKKSKQQRRQKKLKAYNLSSLLESLPEVKASKKPGCANDSKLTCKSRQMLVLTERDRISAVLNDPNFQADPLSAIHQYIQKKQPVVEEQPKKKVNKNGSRKKKSKASTGLQSMEM

SEQ ID NO: 9859 - DNA, 1121 bp, Glycine max
  misc_feature (1)..(1121): Ceres Seq. ID no. 12612090
tgagaaataaattgggcatttatgcatattttaggttacctcgttaccttagaagcctaaagaatgctgctgggagcaggagaaccaaactgttgtttctccctaacggaatgtcgagaagagagaagaatcggtctcaatatgaccagcggaagaagtttatatcttggacaattgaattacattttcactcaacagatattgttttactcgaccatgaagttgatgaaaatacaagcttttactccattctagagaagcacctcaagcctggtccttggaagaatcagctaaggcaattttgtgaagtccagctggattgtctaaagcttttcattcgtaaatacccgaaaggtcccaagtcatctttcaaggagttagatataaaagcgccaatcagacagcaattagcaaatatagtcattttggagtttcctgttgtttttgttttcttgccatctcacagaatcaattttgaagttattaaggatgtcaataccagcaaacataaatcactgcagaaagattgtgaagacaaccaattccctcaaggtttatcttttagggaggaagtgatagaagatgacaacaactctgcagatcctcaggtttttgatctcatgaagcaagtggaatcaagtttatcacatgaagtgatgacccaaaatatgagttctgagaaagcaccaaatgattccccagagaagtctctgtttgaaggagcttctgggggtaatctttcacattctttgacggaaaccaatgaactaaaattctctgaagatatgacatttgactttgatcaggatttgatggatttctatactgatatcttggatcaaacaaatcctggtgatctttttgattttgatggtgaattttcaaagaaaacagaaaatgaaatagatttaattggtactagtgatttattccctatgccagaggaattggaggaaggggaaattttagaataattggtagctataattcacttctgttgaatagttggagagaaaatgagaaaacattgacaacatcaatactattatatgttttgaggttgaggtccattgattcccataatgggtttgaagccgagtttccagttgtgtggacatgat

SEQ ID NO: 9860 - protein, 323 aa, Glycine max
  peptide (1)..(323): Ceres Seq. ID no. 12612091
  misc_feature (118)..(323): NCBI GI NO: 25406822 NR Description: hypothetical protein
  misc_feature (7)..(116): NCBI GI NO: 25406822 NR Description: hypothetical protein
  misc_feature (65)..(323): NCBI GI NO: 15220356 NR Description: unknown protein; protein id: At1g04940.1
  misc_feature (8)..(172): NCBI GI NO: 7021009 NR Description: unnamed protein product [Homo sapiens]
  misc_feature (8)..(172): NCBI GI NO: 7021062 NR Description: unnamed protein product [Homo sapiens]
  misc_feature (8)..(172): NCBI GI NO: 20149643 NR Description: hypothetical protein FLJ20729 [Homo sapiens]
RNKLGIYAYFRLPRYLRSLKNAAGSRRTKLLFLPNGMSRREKNRSQYDQRKKFISWTIELHFHSTDIVLLDHEVDENTSFYSILEKHLKPGPWKNQLRQFCEVQLDCLKLFIRKYPKGPKSSFKELDIKAPIRQQLANIVILEFPVVFVFLPSHRINFEVIKDVNTSKHKSLQKDCEDNQFPQGLSFREEVIEDDNNSADPQVFDLMKQVESSLSHEVMTQNMSSEKAPNDSPEKSLFEGASGGNLSHSLTETNELKFSEDMTFDFDQDLMDFYTDILDQTNPGDLFDFDGEFSKKTENEIDLIGTSDLFPMPEELEEGEILE

SEQ ID NO: 9861 - protein, 287 aa, Glycine max
  peptide (1)..(287): Ceres Seq. ID no. 12612092
  misc_feature (82)..(287): NCBI GI NO: 25406822 NR Description: hypothetical protein
  misc_feature (1)..(80): NCBI GI NO: 25406822 NR Description: hypothetical protein
  misc_feature (29)..(287): NCBI GI NO: 15220356 NR Description: unknown protein; protein id: At1g04940.1
  misc_feature (1)..(136): NCBI GI NO: 7021009 NR Description: unnamed protein product [Homo sapiens]
  misc_feature (1)..(136): NCBI GI NO: 7021062 NR Description: unnamed protein product [Homo sapiens]
  misc_feature (1)..(136): NCBI GI NO: 20149643 NR Description: hypothetical protein FLJ20729 [Homo sapiens]
MSRREKNRSQYDQRKKFISWTIELHFHSTDIVLLDHEVDENTSFYSILEKHLKPGPWKNQLRQFCEVQLDCLKLFIRKYPKGPKSSFKELDIKAPIRQQLANIVILEFPVVFVFLPSHRINFEVIKDVNTSKHKSLQKDCEDNQFPQGLSFREEVIEDDNNSADPQVFDLMKQVESSLSHEVMTQNMSSEKAPNDSPEKSLFEGASGGNLSHSLTETNELKFSEDMTFDFDQDLMDFYTDILDQTNPGDLFDFDGEFSKKTENEIDLIGTSDLFPMPEELEEGEILE

SEQ ID NO: 9862 - DNA, 1234 bp, Glycine max
  misc_feature (1)..(1234): Ceres Seq. ID no. 15177588
gaaagggatgataattgggctagtggagtgacagagagaaaccggagcagagcagagaagagaaacaaaaggtggggtcagtggaaattatcatcatacaatttcacttaacccttcaagctcaagacagcacagcaatcacatcgcatgtcccttatatatatacttattcattgcctctgaaccttatcaaaacacttctcaatctctctctctccaatggccaaagacctcgaaacggagattcaaagtgggttgcctcacaaggactaccacgacccaccccccgccccattctacgaccccgccgagctccgaaagtggtccttcttccgagccctcatcgccgagttcgtcgccaccctcctcttcctctacgtcaccatcctcaccgtcatcggctacaaccaccagacagccaccgccgccgagccctgcagcggcgtcggcgtcctcggcatcgcttgggcctttggaggcatgatttttgtcctcgtctattgcaccgccggcatatcagggggacacataaacccggcggtgacgttcgggttgtttttggcgaggaaggtgtcgctgacaagagctgttgggtacatggtggctcaggtgttgggggccataagtggggtggggcttgtgaaggctttgcagaagagctactacaacaggtacaaaggtggcgtgaacatgctcgctgatggttacagcaaaggaaccggtttgggcgctgagattattggcacctttattcttgtctacaccgtcttctctgctaccgatcccaagagagtagcaagagactcccatgttcccgtgttggcaccacttccaattgggtttgcggtgttcatggttcacttggccaccatccctatcaccggcactggcatcaacccagctagaagccttgggcctgctgtcatattcaacaacgagaaggcttgggatgaccagtggatcttctgggttggacccttcatcggtgctgctcttgctgcattctaccaccagtccgtgttgatggcccaagcagcaaaggctctagggtctttcaggagctcctcaaacctgtaattctggccaagctatttgagctacgagagacatgcttcatttaattgtgttcttaattaatttgcttatacatggtggattggaataatctgtatatcctcgtcactatgtttatttaatttatgtttactatatttgtggtgacgtccatctcaac

SEQ ID NO: 9863 - protein, 285 aa, Glycine max
  peptide (1)..(285): Ceres Seq. ID no. 15177589
  misc_feature (31)..(264): Pfam Name: Pfam Description:  Major intrinsic protein
  misc_feature (1)..(282): NCBI GI NO: 8071620 NR Description: putative aquaporin PIP2-1
  misc_feature (1)..(284): NCBI GI NO: 12006845 NR Description: putative PIP2 [Nicotiana glauca]
  misc_feature (1)..(285): NCBI GI NO: 3158476 NR Description: aquaporin 2 [Samanea saman]
  misc_feature (1)..(285): NCBI GI NO: 28395420 NR Description: plasma intrinsic protein 2,2 [Juglans regia]
  misc_feature (1)..(285): NCBI GI NO: 13486942 NR Description: plasma membrane intrinsic protein 2-2
  misc_feature (1)..(285): NCBI GI NO: 28395418 NR Description: plasma intrinsic protein 2,1 [Juglans regia]
  misc_feature (1)..(284): NCBI GI NO: 17940746 NR Description: aquaporin-like protein [Petunia x hybrida]
  misc_feature (1)..(285): NCBI GI NO: 5081421 NR Description: plasma membrane intrinsic protein 1
  misc_feature (1)..(283): NCBI GI NO: 13486938 NR Description: plasma membrane intrinsic protein 2-1
  misc_feature (1)..(283): NCBI GI NO: 7441275 NR Description: mipC protein - common ice plant
MAKDLETEIQSGLPHKDYHDPPPAPFYDPAELRKWSFFRALIAEFVATLLFLYVTILTVIGYNHQTATAAEPCSGVGVLGIAWAFGGMIFVLVYCTAGISGGHINPAVTFGLFLARKVSLTRAVGYMVAQVLGAISGVGLVKALQKSYYNRYKGGVNMLADGYSKGTGLGAEIIGTFILVYTVFSATDPKRVARDSHVPVLAPLPIGFAVFMVHLATIPITGTGINPARSLGPAVIFNNEKAWDDQWIFWVGPFIGAALAAFYHQSVLMAQAAKALGSFRSSSNL

SEQ ID NO: 9864 - protein, 198 aa, Glycine max
  peptide (1)..(198): Ceres Seq. ID no. 15177590
  misc_feature (1)..(177): Pfam Name: Pfam Description:  Major intrinsic protein
  misc_feature (1)..(195): NCBI GI NO: 8071620 NR Description: putative aquaporin PIP2-1
  misc_feature (1)..(197): NCBI GI NO: 12006845 NR Description: putative PIP2 [Nicotiana glauca]
  misc_feature (1)..(198): NCBI GI NO: 3158476 NR Description: aquaporin 2 [Samanea saman]
  misc_feature (1)..(198): NCBI GI NO: 28395420 NR Description: plasma intrinsic protein 2,2 [Juglans regia]
  misc_feature (1)..(198): NCBI GI NO: 13486942 NR Description: plasma membrane intrinsic protein 2-2
  misc_feature (1)..(198): NCBI GI NO: 28395418 NR Description: plasma intrinsic protein 2,1 [Juglans regia]
  misc_feature (1)..(197): NCBI GI NO: 17940746 NR Description: aquaporin-like protein [Petunia x hybrida]
  misc_feature (1)..(198): NCBI GI NO: 5081421 NR Description: plasma membrane intrinsic protein 1
  misc_feature (1)..(196): NCBI GI NO: 13486938 NR Description: plasma membrane intrinsic protein 2-1
  misc_feature (1)..(196): NCBI GI NO: 7441275 NR Description: mipC protein - common ice plant
MIFVLVYCTAGISGGHINPAVTFGLFLARKVSLTRAVGYMVAQVLGAISGVGLVKALQKSYYNRYKGGVNMLADGYSKGTGLGAEIIGTFILVYTVFSATDPKRVARDSHVPVLAPLPIGFAVFMVHLATIPITGTGINPARSLGPAVIFNNEKAWDDQWIFWVGPFIGAALAAFYHQSVLMAQAAKALGSFRSSSNL

SEQ ID NO: 9865 - protein, 159 aa, Glycine max
  peptide (1)..(159): Ceres Seq. ID no. 15177591
  misc_feature (1)..(138): Pfam Name: Pfam Description:  Major intrinsic protein
  misc_feature (1)..(156): NCBI GI NO: 8071620 NR Description: putative aquaporin PIP2-1
  misc_feature (1)..(158): NCBI GI NO: 12006845 NR Description: putative PIP2 [Nicotiana glauca]
  misc_feature (1)..(159): NCBI GI NO: 3158476 NR Description: aquaporin 2 [Samanea saman]
  misc_feature (1)..(159): NCBI GI NO: 28395420 NR Description: plasma intrinsic protein 2,2 [Juglans regia]
  misc_feature (1)..(159): NCBI GI NO: 13486942 NR Description: plasma membrane intrinsic protein 2-2
  misc_feature (1)..(159): NCBI GI NO: 28395418 NR Description: plasma intrinsic protein 2,1 [Juglans regia]
  misc_feature (1)..(158): NCBI GI NO: 17940746 NR Description: aquaporin-like protein [Petunia x hybrida]
  misc_feature (1)..(159): NCBI GI NO: 5081421 NR Description: plasma membrane intrinsic protein 1
  misc_feature (1)..(157): NCBI GI NO: 13486938 NR Description: plasma membrane intrinsic protein 2-1
  misc_feature (1)..(157): NCBI GI NO: 7441275 NR Description: mipC protein - common ice plant
MVAQVLGAISGVGLVKALQKSYYNRYKGGVNMLADGYSKGTGLGAEIIGTFILVYTVFSATDPKRVARDSHVPVLAPLPIGFAVFMVHLATIPITGTGINPARSLGPAVIFNNEKAWDDQWIFWVGPFIGAALAAFYHQSVLMAQAAKALGSFRSSSNL

SEQ ID NO: 9866 - DNA, 1497 bp, Glycine max
  misc_feature (1)..(1497): Ceres Seq. ID no. 15170493
aaaattccgattccgccgctaacaaaccctaataaagcttaattagcttggactgttaacttgactcagcgcaccacaaccccagtgtggttcccggaaccggaaggtactggcttggctaggttagttgcagcagcaacaccacacaacagccaaggtagggccagtttgaatatttgctcaacacaagcgtttactagggttttttccgctgaaaagtacgtgtcccattcttgtcaacaaacgtggcgcgcttcttaacataagcacttgcaatggcggattcagagcgaatccaaaattcgtggatggcttcggatcaaactgcaattgaaatgagcggcgagggcacaggttccagggaatgctcttctctccctccgccgccgcaaaaaccattcaattctgatcaattgggaatcggagaacgagctttctccgccgccggcgccgccttcctctccgccattattgtcaatcccctcgacgttgccaagacaaggttgcaagcacaagcggcaggggtcgcatattctcatccactcagtaatatgaccagtagaatggcttgttttgggccaaatatgatatttgctgatttaaaatgttctccatcatgccaccgggctggattccagggcacagtgtccatttgtcctcccgagtgttttcgctacaaaggaacactagatgttatctacaaaattataaaacaggagggaatttctaggctatggagaggcacaaatgctggcctggctcttgcagtaccaactgtgggaatataccttccttgctatgacatactccgcaattggttggaggaattcacagctaaaaaggcaccaaccacaactacttatgtacctctagtagctggttcattggcacgctctctagcttgcactacttgctaccctattgaacttgctaaaactcgtatgcaggcatttaaagagactcaaattggtaaaaagcctcctggagtgatccagactctgctaggtgttgtttcaaatgtcaagagcacaaacactccacagaacagcttgcaaggttatcgtgttttgtggactggcatgggagctcaacttgcccgtgatgtacccttctctgctatttgttggtcgacacttgaaccgactagaagaaaacttcttggtttgattggaggtgatgatgccaatgcattgagtgttcttggggcaaattttggagctgggtttgttgcaggaaccttagcagctggagccacatgtccgctagatgttgtaaaaactcgaaggcagatagagagggatcctgttagggcattgaaaatgactacaagacagacactgatggaggtgtggagagatggaggcttgaaaggattgtttacaggtgttggtccacgagttggtcgagcaggcccctctgttggaattgtgatttcattttatgaagttgtaaagtttgttctacatcatcagtacacataatcatgattttctgcac

SEQ ID NO: 9867 - protein, 401 aa, Glycine max; identical to SEQ ID NO: 5240
  peptide (1)..(401): Ceres Seq. ID no. 15170494
  misc_feature (1)..(397): NCBI GI NO: 18417093 NR Description: mitochondrial carrier protein family
  misc_feature (23)..(400): NCBI GI NO: 40253478 NR Description: putative mitochondrial carrier protein
  misc_feature (37)..(399): NCBI GI NO: 30690323 NR Description: mitochondrial carrier protein family
  misc_feature (37)..(399): NCBI GI NO: 19310377 NR Description: At2g46320/F11C10.1 [Arabidopsis thaliana]
  misc_feature (37)..(399): NCBI GI NO: 25408981 NR Description: hypothetical protein At2g46320
  misc_feature (127)..(400): NCBI GI NO: 34904154 NR Description: P0417G05.20
  misc_feature (147)..(399): NCBI GI NO: 30690327 NR Description: mitochondrial carrier protein family
  misc_feature (88)..(340): NCBI GI NO: 7486963 NR Description: hypothetical protein T13J8
  misc_feature (20)..(150): NCBI GI NO: 7486963 NR Description: hypothetical protein T13J8
  misc_feature (44)..(395): NCBI GI NO: 6321696 NR Description: Hypothetical ORF; Ygr257cp

SEQ ID NO: 9868 - protein, 390 aa, Glycine max; identical to SEQ ID NO: 5241
  peptide (1)..(390): Ceres Seq. ID no. 15170495
  misc_feature (1)..(386): NCBI GI NO: 18417093 NR Description: mitochondrial carrier protein family
  misc_feature (12)..(389): NCBI GI NO: 40253478 NR Description: putative mitochondrial carrier protein
  misc_feature (26)..(388): NCBI GI NO: 30690323 NR Description: mitochondrial carrier protein family
  misc_feature (26)..(388): NCBI GI NO: 19310377 NR Description: At2g46320/F11C10.1 [Arabidopsis thaliana]
  misc_feature (26)..(388): NCBI GI NO: 25408981 NR Description: hypothetical protein At2g46320
  misc_feature (116)..(389): NCBI GI NO: 34904154 NR Description: P0417G05.20
  misc_feature (136)..(388): NCBI GI NO: 30690327 NR Description: mitochondrial carrier protein family
  misc_feature (77)..(329): NCBI GI NO: 7486963 NR Description: hypothetical protein T13J8
  misc_feature (9)..(139): NCBI GI NO: 7486963 NR Description: hypothetical protein T13J8
  misc_feature (33)..(384): NCBI GI NO: 6321696 NR Description: Hypothetical ORF; Ygr257cp

SEQ ID NO: 9869 - protein, 381 aa, Glycine max; identical to SEQ ID NO: 5242
  peptide (1)..(381): Ceres Seq. ID no. 15170496
  misc_feature (1)..(377): NCBI GI NO: 18417093 NR Description: mitochondrial carrier protein family
  misc_feature (3)..(380): NCBI GI NO: 40253478 NR Description: putative mitochondrial carrier protein
  misc_feature (17)..(379): NCBI GI NO: 30690323 NR Description: mitochondrial carrier protein family
  misc_feature (17)..(379): NCBI GI NO: 19310377 NR Description: At2g46320/F11C10.1 [Arabidopsis thaliana]
  misc_feature (17)..(379): NCBI GI NO: 25408981 NR Description: hypothetical protein At2g46320
  misc_feature (107)..(380): NCBI GI NO: 34904154 NR Description: P0417G05.20
  misc_feature (127)..(379): NCBI GI NO: 30690327 NR Description: mitochondrial carrier protein family
  misc_feature (68)..(320): NCBI GI NO: 7486963 NR Description: hypothetical protein T13J8
  misc_feature (1)..(130): NCBI GI NO: 7486963 NR Description: hypothetical protein T13J8
  misc_feature (24)..(375): NCBI GI NO: 6321696 NR Description: Hypothetical ORF; Ygr257cp

SEQ ID NO: 9870 - DNA, 1325 bp, Glycine max
  misc_feature (1)..(1325): Ceres Seq. ID no. 15177592
actacttctccctctctccctctctaatagtaacagtaatagtaatatacataacataaccaatggaagcacgtgcaggagccaatcaacgtattgcaagaatctctgctcatcttcagccttcaaatttccaggaagggagtgatgttcttcttaagagaggtgagtgcagagcaaaaggtggggcacctggattcaaagttgcaattttgggggctgctggaggaattggtcaatccctttctttgctgatgaagatgaacccattggtttcagttcttcatctttatgatgttgtcaacacccctggtgtcacagctgatgttagccacatggacactggtgctgtggttcgtggctttctggggcagcaacaacttgagagtgcactcactggcatggacttggtaatcatacctgctggggtgccaaggaaacctgggatgacaagagatgatttatttaaaataaatgctggaattgtgaggaccctttctgaaggaattgccaagtgctgccccaatgcaattgtcaacttgattagtaatccagtgaattccacagttgctattgctgcggaggttttcaagaaagccggtacatatgatccaaagcgactactgggtgttacaacccttgatgttgtgagggcaaatacttttgtggcagagatacttggagttgatccaagagaggttgatgttccagtggttggaggtcatgctggagtcacaattttgcctcttttgtcacaggttaagcctcccagtagcttcactgcagaagaaactgaatacctgacaaatcgcatccaaaatggtggaactgaagttgttgaggcaaaagctggggctggttctgcaacactgtcaatggcatatgcagctgccaagtttgctggtgcatgcctccgtggcttaaaaggagaagctggggtagtggagtgtgcttttgttgattctcaggttacagaacttcccttctttgcaaccaaagtgcgtctaggtcgtgctggagcagaagaagtttatcaactgggtcccctgaatgagtatgaaaggattggattggaaaaagcaaagagagagttagcaggaagcatccagaagggtgtagagttcatcagaaaataaatgtgataaggaaaaactagtttttgtctcttatatttaaggaccatgtgtaatacttctctttgttcatagatttttttcttcttcttaagaatagtactctaaatttttggtgtcatccgtaattgctgatgataacggatttgacatcaataatctcagaaagatactaaaatatcagccttttgtact

SEQ ID NO: 9871 - protein, 356 aa, Glycine max
  peptide (1)..(356): Ceres Seq. ID no. 15177593
  misc_feature (190)..(354): Pfam Name: Pfam Description:  lactate/malate dehydrogenase
  misc_feature (1)..(356): NCBI GI NO: 15242466 NR Description: malate dehydrogenase, glyoxysomal
  misc_feature (1)..(356): NCBI GI NO: 16323157 NR Description: AT5g09660/F17I14_150 [Arabidopsis thaliana]
  misc_feature (1)..(356): NCBI GI NO: 11133654 NR Description: Malate dehydrogenase 2, glyoxysomal precursor
  misc_feature (1)..(355): NCBI GI NO: 1170897 NR Description: MALATE DEHYDROGENASE, GLYOXYSOMAL PRECURSOR
  misc_feature (1)..(356): NCBI GI NO: 12644436 NR Description: Malate dehydrogenase 1, glyoxysomal precursor
  misc_feature (1)..(355): NCBI GI NO: 126894 NR Description: MALATE DEHYDROGENASE, GLYOXYSOMAL PRECURSOR
  misc_feature (1)..(356): NCBI GI NO: 3183079 NR Description: MALATE DEHYDROGENASE, GLYOXYSOMAL PRECURSOR
  misc_feature (1)..(356): NCBI GI NO: 1346501 NR Description: MALATE DEHYDROGENASE, GLYOXYSOMAL PRECURSOR
  misc_feature (5)..(356): NCBI GI NO: 169977 NR Description: malate dehydrogenase
  misc_feature (8)..(356): NCBI GI NO: 15227752 NR Description: malate dehydrogenase, glyoxysomal, putative
MEARAGANQRIARISAHLQPSNFQEGSDVLLKRGECRAKGGAPGFKVAILGAAGGIGQSLSLLMKMNPLVSVLHLYDVVNTPGVTADVSHMDTGAVVRGFLGQQQLESALTGMDLVIIPAGVPRKPGMTRDDLFKINAGIVRTLSEGIAKCCPNAIVNLISNPVNSTVAIAAEVFKKAGTYDPKRLLGVTTLDVVRANTFVAEILGVDPREVDVPVVGGHAGVTILPLLSQVKPPSSFTAEETEYLTNRIQNGGTEVVEAKAGAGSATLSMAYAAAKFAGACLRGLKGEAGVVECAFVDSQVTELPFFATKVRLGRAGAEEVYQLGPLNEYERIGLEKAKRELAGSIQKGVEFIRK

SEQ ID NO: 9872 - protein, 293 aa, Glycine max
  peptide (1)..(293): Ceres Seq. ID no. 15177594
  misc_feature (127)..(291): Pfam Name: Pfam Description:  lactate/malate dehydrogenase
  misc_feature (1)..(293): NCBI GI NO: 15242466 NR Description: malate dehydrogenase, glyoxysomal
  misc_feature (1)..(293): NCBI GI NO: 16323157 NR Description: AT5g09660/F17I14_150 [Arabidopsis thaliana]
  misc_feature (1)..(293): NCBI GI NO: 11133654 NR Description: Malate dehydrogenase 2, glyoxysomal precursor
  misc_feature (1)..(292): NCBI GI NO: 1170897 NR Description: MALATE DEHYDROGENASE, GLYOXYSOMAL PRECURSOR
  misc_feature (1)..(293): NCBI GI NO: 12644436 NR Description: Malate dehydrogenase 1, glyoxysomal precursor
  misc_feature (1)..(292): NCBI GI NO: 126894 NR Description: MALATE DEHYDROGENASE, GLYOXYSOMAL PRECURSOR
  misc_feature (1)..(293): NCBI GI NO: 3183079 NR Description: MALATE DEHYDROGENASE, GLYOXYSOMAL PRECURSOR
  misc_feature (1)..(293): NCBI GI NO: 1346501 NR Description: MALATE DEHYDROGENASE, GLYOXYSOMAL PRECURSOR
  misc_feature (1)..(293): NCBI GI NO: 169977 NR Description: malate dehydrogenase
  misc_feature (1)..(293): NCBI GI NO: 15227752 NR Description: malate dehydrogenase, glyoxysomal, putative
MKMNPLVSVLHLYDVVNTPGVTADVSHMDTGAVVRGFLGQQQLESALTGMDLVIIPAGVPRKPGMTRDDLFKINAGIVRTLSEGIAKCCPNAIVNLISNPVNSTVAIAAEVFKKAGTYDPKRLLGVTTLDVVRANTFVAEILGVDPREVDVPVVGGHAGVTILPLLSQVKPPSSFTAEETEYLTNRIQNGGTEVVEAKAGAGSATLSMAYAAAKFAGACLRGLKGEAGVVECAFVDSQVTELPFFATKVRLGRAGAEEVYQLGPLNEYERIGLEKAKRELAGSIQKGVEFIRK

SEQ ID NO: 9873 - protein, 291 aa, Glycine max
  peptide (1)..(291): Ceres Seq. ID no. 15177595
  misc_feature (125)..(289): Pfam Name: Pfam Description:  lactate/malate dehydrogenase
  misc_feature (1)..(291): NCBI GI NO: 15242466 NR Description: malate dehydrogenase, glyoxysomal
  misc_feature (1)..(291): NCBI GI NO: 16323157 NR Description: AT5g09660/F17I14_150 [Arabidopsis thaliana]
  misc_feature (1)..(291): NCBI GI NO: 11133654 NR Description: Malate dehydrogenase 2, glyoxysomal precursor
  misc_feature (1)..(290): NCBI GI NO: 1170897 NR Description: MALATE DEHYDROGENASE, GLYOXYSOMAL PRECURSOR
  misc_feature (1)..(291): NCBI GI NO: 12644436 NR Description: Malate dehydrogenase 1, glyoxysomal precursor
  misc_feature (1)..(290): NCBI GI NO: 126894 NR Description: MALATE DEHYDROGENASE, GLYOXYSOMAL PRECURSOR
  misc_feature (1)..(291): NCBI GI NO: 3183079 NR Description: MALATE DEHYDROGENASE, GLYOXYSOMAL PRECURSOR
  misc_feature (1)..(291): NCBI GI NO: 1346501 NR Description: MALATE DEHYDROGENASE, GLYOXYSOMAL PRECURSOR
  misc_feature (1)..(291): NCBI GI NO: 169977 NR Description: malate dehydrogenase
  misc_feature (1)..(291): NCBI GI NO: 15227752 NR Description: malate dehydrogenase, glyoxysomal, putative
MNPLVSVLHLYDVVNTPGVTADVSHMDTGAVVRGFLGQQQLESALTGMDLVIIPAGVPRKPGMTRDDLFKINAGIVRTLSEGIAKCCPNAIVNLISNPVNSTVAIAAEVFKKAGTYDPKRLLGVTTLDVVRANTFVAEILGVDPREVDVPVVGGHAGVTILPLLSQVKPPSSFTAEETEYLTNRIQNGGTEVVEAKAGAGSATLSMAYAAAKFAGACLRGLKGEAGVVECAFVDSQVTELPFFATKVRLGRAGAEEVYQLGPLNEYERIGLEKAKRELAGSIQKGVEFIRK

SEQ ID NO: 9874 - DNA, 1421 bp, Glycine max
  misc_feature (1)..(1421): Ceres Seq. ID no. 15169191
gaactatccttctctctctctctcatccacgccccaaatcttagggttttcaccaaataaaacaaccccaattcctcgaactcttcgattcgattacccaaccccacacgctgattccacatcctccatgagatttggttgattggatcgtacgatggcggcgccgaggaatgtgacggcgacgagggacgaagagaagggcgaggacgatgattcgccctccgcgaagaagcccaaatcggagaggttcccgctgaacacgtgggaattcgccgtcgccgtcgccgtcttcttggtgttctccaccggcctcttctgcatttacctcaccatggcctcgggcgcttacaccaacctcaaactcccccgcaccctctccgatcttcgcctcctcaaggaacatctttcgacgtatgcgagtaaccaccctgcgcagttcattcttgggtactgctccacctacatcttcatgcaaactttcatgattcttgggacaatcttcatgtccctcttggctggggcgctttttggagttgtacgaggaatcctattggttgttttcaacgccactgcgggtgcatcttcctgtttctttttgtctaagttaattgggaggcctttggtttcttggttgtggcctgaaaagctaaggttcttccaagctgagattgcgaagcgtagggataggctgctgaattacatgctttttctgaggataaccccgacattgccgaatctgttcatcaatttggcgtctcccatcgttgatgttcccttccatatattcttttcggcgacattgattgggctcgttccagcctcttatattactgtcagagctggccttgctcttggggatctaaagtcaattaaggatctatatgattttaagaccttatcagtacttttcctcattggttttgtttccatagctccaacacttttgaagcggaagcgagtatatgaatgaaggtttcctggctcagcttgcacaatcaagtttgtcaaaaggcaagttacgtgatctaattagatgatgaagacagtggatcagagaagataatatttaagaaagatatccatgaaaaaggaatgtattgttattaacttaaacagtggcatatgctccattttattttctgtggtggagcctaagtttttttgtttcccttttcattttttgatcgtgtggagagagtaaggttagacttagctgattggtgtacaatcaattcagctaaggttacgaggctttgttggagcattaaattatgtattggccttgatgtcatcaggaagattgtggtgattgtttagcggtgctgtatgtatgtgcttcgcaccaaataggatctgactttttaccctgtagtattgctttattcaattataagatattatcgtagaaaatttcaagtatc

SEQ ID NO: 9875 - protein, 271 aa, Glycine max
  peptide (1)..(271): Ceres Seq. ID no. 15169192
  misc_feature (1)..(271): NCBI GI NO: 30681121 NR Description: expressed protein [Arabidopsis thaliana]
  misc_feature (3)..(271): NCBI GI NO: 18409951 NR Description: expressed protein [Arabidopsis thaliana]
  misc_feature (12)..(268): NCBI GI NO: 18414967 NR Description: expressed protein [Arabidopsis thaliana]
  misc_feature (12)..(268): NCBI GI NO: 21593768 NR Description: unknown [Arabidopsis thaliana]
  misc_feature (1)..(173): NCBI GI NO: 25407510 NR Description: hypothetical protein AT4g09580
  misc_feature (33)..(267): NCBI GI NO: 28850296 NR Description: similar to Mus musculus (Mouse)
  misc_feature (1)..(267): NCBI GI NO: 34858940 NR Description: similar to D7Ertd743e protein [Rattus norvegicus]
  misc_feature (41)..(267): NCBI GI NO: 436224 NR Description: KIAA0033 [Homo sapiens]
  misc_feature (41)..(267): NCBI GI NO: 20558053 NR Description: similar to KIAA0033 [Homo sapiens]
  misc_feature (69)..(271): NCBI GI NO: 7510437 NR Description: hypothetical protein Y71A12C
MAAPRNVTATRDEEKGEDDDSPSAKKPKSERFPLNTWEFAVAVAVFLVFSTGLFCIYLTMASGAYTNLKLPRTLSDLRLLKEHLSTYASNHPAQFILGYCSTYIFMQTFMILGTIFMSLLAGALFGVVRGILLVVFNATAGASSCFFLSKLIGRPLVSWLWPEKLRFFQAEIAKRRDRLLNYMLFLRITPTLPNLFINLASPIVDVPFHIFFSATLIGLVPASYITVRAGLALGDLKSIKDLYDFKTLSVLFLIGFVSIAPTLLKRKRVYE

SEQ ID NO: 9876 - protein, 212 aa, Glycine max
  peptide (1)..(212): Ceres Seq. ID no. 15169193
  misc_feature (1)..(212): NCBI GI NO: 30681121 NR Description: expressed protein [Arabidopsis thaliana]
  misc_feature (1)..(212): NCBI GI NO: 18409951 NR Description: expressed protein [Arabidopsis thaliana]
  misc_feature (1)..(209): NCBI GI NO: 18414967 NR Description: expressed protein [Arabidopsis thaliana]
  misc_feature (1)..(209): NCBI GI NO: 21593768 NR Description: unknown [Arabidopsis thaliana]
  misc_feature (1)..(114): NCBI GI NO: 25407510 NR Description: hypothetical protein AT4g09580
  misc_feature (1)..(208): NCBI GI NO: 28850296 NR Description: similar to Mus musculus (Mouse)
  misc_feature (1)..(208): NCBI GI NO: 34858940 NR Description: similar to D7Ertd743e protein [Rattus norvegicus]
  misc_feature (1)..(208): NCBI GI NO: 436224 NR Description: KIAA0033 [Homo sapiens]
  misc_feature (1)..(208): NCBI GI NO: 20558053 NR Description: similar to KIAA0033 [Homo sapiens]
  misc_feature (10)..(212): NCBI GI NO: 7510437 NR Description: hypothetical protein Y71A12C
MASGAYTNLKLPRTLSDLRLLKEHLSTYASNHPAQFILGYCSTYIFMQTFMILGTIFMSLLAGALFGVVRGILLVVFNATAGASSCFFLSKLIGRPLVSWLWPEKLRFFQAEIAKRRDRLLNYMLFLRITPTLPNLFINLASPIVDVPFHIFFSATLIGLVPASYITVRAGLALGDLKSIKDLYDFKTLSVLFLIGFVSIAPTLLKRKRVYE

SEQ ID NO: 9877 - protein, 166 aa, Glycine max
  peptide (1)..(166): Ceres Seq. ID no. 15169194
  misc_feature (1)..(166): NCBI GI NO: 30681121 NR Description: expressed protein [Arabidopsis thaliana]
  misc_feature (1)..(166): NCBI GI NO: 18409951 NR Description: expressed protein [Arabidopsis thaliana]
  misc_feature (1)..(163): NCBI GI NO: 18414967 NR Description: expressed protein [Arabidopsis thaliana]
  misc_feature (1)..(163): NCBI GI NO: 21593768 NR Description: unknown [Arabidopsis thaliana]
  misc_feature (1)..(68): NCBI GI NO: 25407510 NR Description: hypothetical protein AT4g09580
  misc_feature (1)..(162): NCBI GI NO: 28850296 NR Description: similar to Mus musculus (Mouse)
  misc_feature (1)..(162): NCBI GI NO: 34858940 NR Description: similar to D7Ertd743e protein [Rattus norvegicus]
  misc_feature (1)..(162): NCBI GI NO: 436224 NR Description: KIAA0033 [Homo sapiens]
  misc_feature (1)..(162): NCBI GI NO: 20558053 NR Description: similar to KIAA0033 [Homo sapiens]
  misc_feature (1)..(166): NCBI GI NO: 7510437 NR Description: hypothetical protein Y71A12C
MQTFMILGTIFMSLLAGALFGVVRGILLVVFNATAGASSCFFLSKLIGRPLVSWLWPEKLRFFQAEIAKRRDRLLNYMLFLRITPTLPNLFINLASPIVDVPFHIFFSATLIGLVPASYITVRAGLALGDLKSIKDLYDFKTLSVLFLIGFVSIAPTLLKRKRVYE

SEQ ID NO: 9878 - DNA, 1307 bp, Glycine max
  misc_feature (1)..(1307): Ceres Seq. ID no. 15225111
ccgggccccccctcgagtcagctacgtaggcccccccccaatatctctcttcctttctctttattctctcacacaaaataatggacaagaagcttggcaacacgtctcatgatcctgaagtgagaaaggggccatggacaatggaagaagacttaatcttgatcacctatattgccaatcacggggaaggggtttggaactctttggccaaggctgctggacttaaacgtaccggaaagagttgccggctccggtggctaaactacctccgtcctgatgttagaagagggaatattacacccgaggaacagcttttgatcatggaacttcatgcaaagtggggaaacaggtggtccaaaattgccaagcatctacccggaaggactgataatgagattaagaactactggaggacaaggatccagaagcacctcaagcaagcttccagcagcttccagcaacagagtagtaattctgagataatttatcatccccaagcttgcactagccaagtgtccaccatggcgcagcccatagaaacctattctccacccagttatcaaggaatgttagatccattttcaattcagttcccaacaaatcctcatcattctagttgttgtaccaatgacgacgacaacaacaactattggagcatggaggatatctggtcaatgcaattagccaattactgaacgggaattaaacctataaacataaatataaataatatatataaacctaagtgtctaagttccataaattaagctgtagtctctggcttaaaacatgttaggtttgtttatacaagtagttggatgtttggagtacttcggtcttttgcgtaccatcaatatttaagaactaagttagttatgttccgtaacttatgggctcttaattaaactatatctgcacaaaattatatatatatcaaatgtgatggtatgtggactataaaaagatatggttgagaaccacaaactttgaaacttcgaataatatattgccagtgacagtcttgttgatttgttatagcaagtcctattttcttaatcattgctttgttttaacgtacctagatttcataacttttgtctttgtctcaagctgaacctaatgatgatagtaatattaacttattgtataggggtatttcataggataaaaaatgatgtgcaattacgtgtagaccaaatattacttgatgacagatggataaatatttcrwrwwrwwmmaaaaawrrgaattcctgccagccckgrggatccactarttctasagcggmcgccaccgcassggakct

SEQ ID NO: 9879 - protein, 204 aa, Glycine max
  peptide (1)..(204): Ceres Seq. ID no. 15225112
  misc_feature (16)..(63): Pfam Name: Pfam Description:  Myb-like DNA-binding domain
  misc_feature (1)..(203): NCBI GI NO: 7438338 NR Description: Myb26 protein - garden pea
  misc_feature (1)..(203): NCBI GI NO: 40643882 NR Description: MYB8 protein [Gerbera hybrid cv. 'Terra Regina']
  misc_feature (1)..(203): NCBI GI NO: 82306 NR Description: myb-related protein 305 - garden snapdragon
  misc_feature (1)..(203): NCBI GI NO: 82311 NR Description: myb-related protein 340 - garden snapdragon
  misc_feature (6)..(203): NCBI GI NO: 21554734 NR Description: putative transcription factor MYB24
  misc_feature (6)..(203): NCBI GI NO: 15242669 NR Description: myb family transcription factor
  misc_feature (8)..(203): NCBI GI NO: 30688935 NR Description: myb family transcription factor (ATMYB3)
  misc_feature (8)..(203): NCBI GI NO: 2280528 NR Description: ATMYB3 [Arabidopsis thaliana]
  misc_feature (1)..(200): NCBI GI NO: 13537530 NR Description: LhMyb [Lilium hybrid division I]
  misc_feature (14)..(203): NCBI GI NO: 15232137 NR Description: myb family transcription factor
MDKKLGNTSHDPEVRKGPWTMEEDLILITYIANHGEGVWNSLAKAAGLKRTGKSCRLRWLNYLRPDVRRGNITPEEQLLIMELHAKWGNRWSKIAKHLPGRTDNEIKNYWRTRIQKHLKQASSSFQQQSSNSEIIYHPQACTSQVSTMAQPIETYSPPSYQGMLDPFSIQFPTNPHHSSCCTNDDDNNNYWSMEDIWSMQLANY

SEQ ID NO: 9880 - protein, 184 aa, Glycine max
  peptide (1)..(184): Ceres Seq. ID no. 15225113
  misc_feature (1)..(43): Pfam Name: Pfam Description:  Myb-like DNA-binding domain
  misc_feature (1)..(183): NCBI GI NO: 7438338 NR Description: Myb26 protein - garden pea
  misc_feature (1)..(183): NCBI GI NO: 40643882 NR Description: MYB8 protein [Gerbera hybrid cv. 'Terra Regina']
  misc_feature (1)..(183): NCBI GI NO: 82306 NR Description: myb-related protein 305 - garden snapdragon
  misc_feature (1)..(183): NCBI GI NO: 82311 NR Description: myb-related protein 340 - garden snapdragon
  misc_feature (1)..(183): NCBI GI NO: 21554734 NR Description: putative transcription factor MYB24
  misc_feature (1)..(183): NCBI GI NO: 15242669 NR Description: myb family transcription factor
  misc_feature (1)..(183): NCBI GI NO: 30688935 NR Description: myb family transcription factor (ATMYB3)
  misc_feature (1)..(183): NCBI GI NO: 2280528 NR Description: ATMYB3 [Arabidopsis thaliana]
  misc_feature (1)..(180): NCBI GI NO: 13537530 NR Description: LhMyb [Lilium hybrid division I]
  misc_feature (1)..(183): NCBI GI NO: 15232137 NR Description: myb family transcription factor
MEEDLILITYIANHGEGVWNSLAKAAGLKRTGKSCRLRWLNYLRPDVRRGNITPEEQLLIMELHAKWGNRWSKIAKHLPGRTDNEIKNYWRTRIQKHLKQASSSFQQQSSNSEIIYHPQACTSQVSTMAQPIETYSPPSYQGMLDPFSIQFPTNPHHSSCCTNDDDNNNYWSMEDIWSMQLANY

SEQ ID NO: 9881 - protein, 124 aa, Glycine max
  peptide (1)..(124): Ceres Seq. ID no. 15225114
  misc_feature (1)..(123): NCBI GI NO: 7438338 NR Description: Myb26 protein - garden pea
  misc_feature (1)..(123): NCBI GI NO: 40643882 NR Description: MYB8 protein [Gerbera hybrid cv. 'Terra Regina']
  misc_feature (1)..(123): NCBI GI NO: 82306 NR Description: myb-related protein 305 - garden snapdragon
  misc_feature (1)..(123): NCBI GI NO: 82311 NR Description: myb-related protein 340 - garden snapdragon
  misc_feature (1)..(123): NCBI GI NO: 21554734 NR Description: putative transcription factor MYB24
  misc_feature (1)..(123): NCBI GI NO: 15242669 NR Description: myb family transcription factor
  misc_feature (1)..(123): NCBI GI NO: 30688935 NR Description: myb family transcription factor (ATMYB3)
  misc_feature (1)..(123): NCBI GI NO: 2280528 NR Description: ATMYB3 [Arabidopsis thaliana]
  misc_feature (1)..(120): NCBI GI NO: 13537530 NR Description: LhMyb [Lilium hybrid division I]
  misc_feature (1)..(123): NCBI GI NO: 15232137 NR Description: myb family transcription factor
MELHAKWGNRWSKIAKHLPGRTDNEIKNYWRTRIQKHLKQASSSFQQQSSNSEIIYHPQACTSQVSTMAQPIETYSPPSYQGMLDPFSIQFPTNPHHSSCCTNDDDNNNYWSMEDIWSMQLANY

SEQ ID NO: 9882 - DNA, 1317 bp, Glycine max
  misc_feature (1)..(1317): Ceres Seq. ID no. 14311993
gttttaaaaatgttcatattccgttcttcacttttggacatgtataaaaaaatacattacaccttttgatgaggtagtaattctctaggagaaagaaataaagaagtagctttttggagggttgacatggaagaacggtatgagccattgaaggagcttggtgctgggaattttggtgtggcaaggttggcaaaagacaagaaaactggagagcttgttgcggtcaaatacatagagaggggcaaaaagattgatgagaatgttcagagggagataattaaccaccgatctttaaggcatccaaatataatcaggtttaaagaggtgttactgacccctacacatttagctatcgtcttggagtatgcttcaggtggtgaactttttgagaggatttgtactgctggtcgatttagcgaagatgaggcaagatatttcttccagcagctaatatctggggttagctactgtcattcaatggaaatttgtcatagagatctaaaattggaaaacactctcttggatggaaatccatctcctcggcttaaaatttgtgactttggttattccaagtctgctctactgcactctcaacctaaatcaacagttggaactcctgcatacattgctccggaggttctgtcgcgaaaggagtatgatggaaagatttcagatgtttggtcctgtggagtgactctttatgtcatgttagttggtgcatacccatttgaagatccagaagatcctagaaatttcagaaagactattgggagaataatcggtattcagtactccatacccgactatgttcgtgtttcttctgactgtaggaatcttctctctcgcatctttgttgctgatcctgccaagaggatcaccatcccagagataaaacagtatccttggtttctgaagaatatgcctaaagagatcatcgaagctgaaagaaaaggattcgaggaaacaaccaaagaccaaccaaaccagaaggtggaggaaatcatgaggataattcaagcggcaaggataccaggacaaggatccaaagctggagaaggtggacaagctggcactggatcattagatattgaggatgatgaggaaattgatgttagtggtgactatgaacaagtgtgatcgagaacttgattagttgatatggctagattgtctataagacatagtcagcattattaacatctatcacagtgtgcaacactggtgttctaaagatacttgttataccaggcttgaaataggattttgtgtttatttaaatgaataatattaagaaaaggctgctatttcagtttcagt

SEQ ID NO: 9883 - protein, 336 aa, Glycine max
  peptide (1)..(336): Ceres Seq. ID no. 14311994
  misc_feature (5)..(261): Pfam Name: Pfam Description:  Protein kinase domain
  misc_feature (1)..(333): NCBI GI NO: 310580 NR Description: protein kinase 2
  misc_feature (1)..(326): NCBI GI NO: 37536914 NR Description: protein kinase REK
  misc_feature (1)..(333): NCBI GI NO: 3811293 NR Description: putative serine/threonine protein kinase
  misc_feature (1)..(333): NCBI GI NO: 1362050 NR Description: serine/threonine-specific protein kinase SPK-1
  misc_feature (1)..(326): NCBI GI NO: 7446428 NR Description: probable serine/threonine-specific protein kinase
  misc_feature (1)..(326): NCBI GI NO: 7446429 NR Description: probable serine/threonine-specific protein kinase
  misc_feature (1)..(333): NCBI GI NO: 4098174 NR Description: PK11-C5 [Nicotiana tabacum]
  misc_feature (1)..(333): NCBI GI NO: 29164823 NR Description: abcisic acid-inducible protein kinanase
  misc_feature (3)..(336): NCBI GI NO: 18418337 NR Description: protein kinase, putative [Arabidopsis thaliana]
  misc_feature (3)..(336): NCBI GI NO: 32487487 NR Description: OSJNBb0020J19.1
MEERYEPLKELGAGNFGVARLAKDKKTGELVAVKYIERGKKIDENVQREIINHRSLRHPNIIRFKEVLLTPTHLAIVLEYASGGELFERICTAGRFSEDEARYFFQQLISGVSYCHSMEICHRDLKLENTLLDGNPSPRLKICDFGYSKSALLHSQPKSTVGTPAYIAPEVLSRKEYDGKISDVWSCGVTLYVMLVGAYPFEDPEDPRNFRKTIGRIIGIQYSIPDYVRVSSDCRNLLSRIFVADPAKRITIPEIKQYPWFLKNMPKEIIEAERKGFEETTKDQPNQKVEEIMRIIQAARIPGQGSKAGEGGQAGTGSLDIEDDEEIDVSGDYEQV

SEQ ID NO: 9884 - protein, 219 aa, Glycine max
  peptide (1)..(219): Ceres Seq. ID no. 14311995
  misc_feature (1)..(144): Pfam Name: Pfam Description:  Protein kinase domain
  misc_feature (1)..(216): NCBI GI NO: 310580 NR Description: protein kinase 2
  misc_feature (1)..(209): NCBI GI NO: 37536914 NR Description: protein kinase REK
  misc_feature (1)..(216): NCBI GI NO: 3811293 NR Description: putative serine/threonine protein kinase
  misc_feature (1)..(216): NCBI GI NO: 1362050 NR Description: serine/threonine-specific protein kinase SPK-1
  misc_feature (1)..(209): NCBI GI NO: 7446428 NR Description: probable serine/threonine-specific protein kinase
  misc_feature (1)..(209): NCBI GI NO: 7446429 NR Description: probable serine/threonine-specific protein kinase
  misc_feature (1)..(216): NCBI GI NO: 4098174 NR Description: PK11-C5 [Nicotiana tabacum]
  misc_feature (1)..(216): NCBI GI NO: 29164823 NR Description: abcisic acid-inducible protein kinanase
  misc_feature (1)..(219): NCBI GI NO: 18418337 NR Description: protein kinase, putative [Arabidopsis thaliana]
  misc_feature (1)..(219): NCBI GI NO: 32487487 NR Description: OSJNBb0020J19.1
MEICHRDLKLENTLLDGNPSPRLKICDFGYSKSALLHSQPKSTVGTPAYIAPEVLSRKEYDGKISDVWSCGVTLYVMLVGAYPFEDPEDPRNFRKTIGRIIGIQYSIPDYVRVSSDCRNLLSRIFVADPAKRITIPEIKQYPWFLKNMPKEIIEAERKGFEETTKDQPNQKVEEIMRIIQAARIPGQGSKAGEGGQAGTGSLDIEDDEEIDVSGDYEQV

SEQ ID NO: 9885 - DNA, 1251 bp, Glycine max
  misc_feature (1)..(1251): Ceres Seq. ID no. 12582076
cagctacgtaggccccccccccgagcagcatttgaactctactatcgttttctccgttctttctcaaagccgcactcaactttctaaaaccaaatcggtttgaatcctcatttcccgcctctcactggaaagcagcaaaatcacctttctctactatctatctgttccttttgtactctgagtgggtagaagtcatggtaaggctcactgctgacttgatttggaaaagccctcatttcttcaacacgattaaagagcgtgagttagatctcagaggcaacaagatagctgtaattgaaaacttgggtgctactgaggaccaatttgacacaatagacttatctgacaatgagattgttaaacttgaaaatgtaccatatcttaaccggttgggcacaatgctcattaacaacaacaggattactagaattaatcccaacatcggagagttcttgccaaatttacacactctagttctcacaaacaacagaattgtaaacttggttgaaattgatcctttagcatctcttccaaagctgcacttccttagtctgctggacaacaatattacaaagaaacctaattacaggctttatgttattaacaacctgaaatccctccgggtgttagatttcaagaaagtgaaaaataaggaacggttggaagccaaaaacttgtttgcttcaaaagaagttatagaagagattcaaaggacaccagcaaaaacattttcaactggtgaaactccaaatgtttctgaagcgattgaggaacaacagacgcccaaagtggttgctcctacacctgagcaaattattgctattaaggctgccattgtgaattctcagactcttgaagaggttgctaggcttgaaaaggcattgaagtctggtcagcttcctgcagatttaaaaagcttgagtgataatataatgttggataatgttgatgaaaaacatgaggacatgattcatgatgatagaagtcaagctgatggcaaatcgaatgatacacaagagcagagaaatactgattctgcttcaatggaacaggattagagtgaaaaggttttcaaatagtcctagcactgtggacttctttaatgtcaggttctagagttagactcttggtaattttccatgaggtgtactttatgaatcttccattacttgagaactggatgtttcaatttcactcgtggtgaatcattgctttggcctttatatatgtgttaaattgtattatttttac

SEQ ID NO: 9886 - protein, 287 aa, Glycine max
  peptide (1)..(287): Ceres Seq. ID no. 12582077
  misc_feature (1)..(239): NCBI GI NO: 322619 NR Description: U2 snRNP protein A' - Arabidopsis thaliana
  misc_feature (1)..(239): NCBI GI NO: 15218274 NR Description: putative U2 small nuclear ribonucleoprotein A
  misc_feature (1)..(275): NCBI GI NO: 3955033 NR Description: U2 snRNP-specific A' protein [Salmo salar]
  misc_feature (1)..(259): NCBI GI NO: 4507121 NR Description: u2 small nuclear ribonucleoprotein polypeptide A'
  misc_feature (1)..(259): NCBI GI NO: 31077165 NR Description: U2 small nuclear ribonucleoprotein A'
  misc_feature (1)..(259): NCBI GI NO: 7263962 NR Description: bA395L14
  misc_feature (1)..(257): NCBI GI NO: 34857187 NR Description: similar to U2 small nuclear ribonucleoproteinpolypeptide A
  misc_feature (1)..(236): NCBI GI NO: 31077178 NR Description: U2 small nuclear ribonucleoprotein A'
  misc_feature (1)..(236): NCBI GI NO: 7021537 NR Description: U2 small nuclear ribonucleoprotein A'
  misc_feature (1)..(236): NCBI GI NO: 31981942 NR Description: U2 small nuclear ribonucleoprotein polypeptide A'
MVRLTADLIWKSPHFFNTIKERELDLRGNKIAVIENLGATEDQFDTIDLSDNEIVKLENVPYLNRLGTMLINNNRITRINPNIGEFLPNLHTLVLTNNRIVNLVEIDPLASLPKLHFLSLLDNNITKKPNYRLYVINNLKSLRVLDFKKVKNKERLEAKNLFASKEVIEEIQRTPAKTFSTGETPNVSEAIEEQQTPKVVAPTPEQIIAIKAAIVNSQTLEEVARLEKALKSGQLPADLKSLSDNIMLDNVDEKHEDMIHDDRSQADGKSNDTQEQRNTDSASMEQD

SEQ ID NO: 9887 - protein, 219 aa, Glycine max
  peptide (1)..(219): Ceres Seq. ID no. 12582078
  misc_feature (1)..(171): NCBI GI NO: 322619 NR Description: U2 snRNP protein A' - Arabidopsis thaliana
  misc_feature (1)..(171): NCBI GI NO: 15218274 NR Description: putative U2 small nuclear ribonucleoprotein A
  misc_feature (1)..(207): NCBI GI NO: 3955033 NR Description: U2 snRNP-specific A' protein [Salmo salar]
  misc_feature (1)..(191): NCBI GI NO: 4507121 NR Description: u2 small nuclear ribonucleoprotein polypeptide A'
  misc_feature (1)..(191): NCBI GI NO: 31077165 NR Description: U2 small nuclear ribonucleoprotein A'
  misc_feature (1)..(191): NCBI GI NO: 7263962 NR Description: bA395L14
  misc_feature (1)..(189): NCBI GI NO: 34857187 NR Description: similar to U2 small nuclear ribonucleoproteinpolypeptide A
  misc_feature (1)..(168): NCBI GI NO: 31077178 NR Description: U2 small nuclear ribonucleoprotein A'
  misc_feature (1)..(168): NCBI GI NO: 7021537 NR Description: U2 small nuclear ribonucleoprotein A'
  misc_feature (1)..(168): NCBI GI NO: 31981942 NR Description: U2 small nuclear ribonucleoprotein polypeptide A'
MLINNNRITRINPNIGEFLPNLHTLVLTNNRIVNLVEIDPLASLPKLHFLSLLDNNITKKPNYRLYVINNLKSLRVLDFKKVKNKERLEAKNLFASKEVIEEIQRTPAKTFSTGETPNVSEAIEEQQTPKVVAPTPEQIIAIKAAIVNSQTLEEVARLEKALKSGQLPADLKSLSDNIMLDNVDEKHEDMIHDDRSQADGKSNDTQEQRNTDSASMEQD

SEQ ID NO: 9888 - DNA, 1538 bp, Glycine max
  misc_feature (1)..(1538): Ceres Seq. ID no. 14315261
actctcaaatttgtgtcagccaacattcccatcatcttgttaactttatccaaaccatcacaaaaaccacaacatttccagcttctgctactgtgaagcacaccctgtaccatgaccatccatctgctatatctgccaaatatcgcctacacaccctgcagcaatcacctcactgctcatcaccaccacaaagccgccttcaatctcaattctcaactaaacaacacctctcctttcacagtgagcaccacctcctcaatggatagttcccaacacctcagccccacattccacgtcttgaaccaaaatagctgcacaacattctctgagacaaattttcaccatcctcaacctttgtggcattgacattcttgccactaaactaaccttctcactggaatttaccattcttgagtggatcactctctagagttgcatgaaccactatcaatggaactttccacttctgagaaaaataagagagatgtggcaaacctttgctgctaggatggaggagaatgagagaagaacaagggaaagggtttagggcttatatttctgaaatttatagttcatgttcttggtgaggcttttgtttttaccacaaatgatcatggaggtagtataaagtgctactggaatcaccttgtttctccaaacttgtggacattgtctgagtcattcatgattgtagttgtttataactctcatgttagattttgaaaaagacatgcttttaagttttcaccttgacttcaaccttatatctcattgcctgttgttggtttttggtaatatatattttttcacagattccaacaaatcctgctggtcttattgaatatagggcacatccattctggatccagaaatattgccctactcacgaacatgatggtactacacgctgttgcagctgcgagcgaatggaggttagtatggatggagtatatttatctgataaaatattatttgtagtcttgcctagggaaaggtggatgaacttgtacagtgcaaagtgaatagaatgtaaaattttctctcatcatatgcagtcccaagaggcaggatatattgctcttaaggatggccggaagctctgcttagagtgtcttgattctgctatcatggatactaatgaatgccaaccccttcatgctgatatacaaagattttatgaaagcctaaatatgaaactggaccaacaaattccacttctattggttgaaagacaagcactgaatgaagcaagagaaggagagaagaatgtaagagaaaatgcatttccatctgtttgctataaatataataactgataatttgattgtaatgacattcagctgtctgacatactaggaactattttttggtgtttggcattgtctgcacaactaatattaaaagtaaaataatgccttttgctattgatagctttgagaatgctatctctgatgaaggtttttctattcgtgatatgttaaccacatgctatgtcaaatagttcaatatgactagcacgatatagaaaatttaagagt

SEQ ID NO: 9889 - protein, 88 aa, Glycine max
  peptide (1)..(88): Ceres Seq. ID no. 14315262
  misc_feature (1)..(73): NCBI GI NO: 29367477 NR Description: disease resistance-like protein
  misc_feature (1)..(73): NCBI GI NO: 15221983 NR Description: expressed protein [Arabidopsis thaliana]
  misc_feature (1)..(73): NCBI GI NO: 25518496 NR Description: hypothetical protein T29M8
  misc_feature (1)..(73): NCBI GI NO: 17065046 NR Description: Unknown protein [Arabidopsis thaliana]
  misc_feature (1)..(71): NCBI GI NO: 29893641 NR Description: hypothetical protein
  misc_feature (1)..(74): NCBI GI NO: 15225574 NR Description: expressed protein [Arabidopsis thaliana]
  misc_feature (1)..(73): NCBI GI NO: 22329212 NR Description: expressed protein [Arabidopsis thaliana]
  misc_feature (1)..(73): NCBI GI NO: 25407769 NR Description: hypothetical protein AT4g36860
  misc_feature (1)..(72): NCBI GI NO: 15240018 NR Description: hypothetical protein [Arabidopsis thaliana]
  misc_feature (8)..(72): NCBI GI NO: 10177891 NR Description: emb|CAB16816
MQSQEAGYIALKDGRKLCLECLDSAIMDTNECQPLHADIQRFYESLNMKLDQQIPLLLVERQALNEAREGEKNVRENAFPSVCYKYNN

SEQ ID NO: 9890 - protein, 87 aa, Glycine max
  peptide (1)..(87): Ceres Seq. ID no. 14315263
SQICVSQHSHHLVNFIQTITKTTTFPASATVKHTLYHDHPSAISAKYRLHTLQQSPHCSSPPQSRLQSQFSTKQHLSFHSEHHLLNG

SEQ ID NO: 9891 - protein, 84 aa, Glycine max
  peptide (1)..(84): Ceres Seq. ID no. 14315264
MTIHLLYLPNIAYTPCSNHLTAHHHHKAAFNLNSQLNNTSPFTVSTTSSMDSSQHLSPTFHVLNQNSCTTFSETNFHHPQPLWH

SEQ ID NO: 9892 - DNA, 1544 bp, Glycine max
  misc_feature (1)..(1544): Ceres Seq. ID no. 15176012
actaccaccatagcagctggaaagcaagagaggaacatgatgaaagttgcacctacgagtccgcttcccacgaggcacgtgcggtttctgtttcaccgcacgtgccttgagcattcaataattaccaccaactcgccaaagtcacttaattataaacgcggaacgcatttcaccaggagaagcagaaccatcgctcaagctcacactcacagtaaaatccaaaccaaaatggcggaaaataaagccattgaagaagctcagagcaagttccgttcagagttccttcaagttctgcgtagtaggcgacccgctcaagttccattaacagtcgaattcgcgaagccagtggtgaatcctttgcatcagaactctcctccatcgatcgaagagatcaagataatggagtcgtgtccgagaactgatatagagaaccttgaagacttgctcgaggaggagaatctctatttgaatatagaggaaggagagcaaggacggttgcctttgttgattttgaagttgaaggaaagcgataagcagagaaaaaggcctgcagttgtttttcttcacagtacgaacaaatacaaagaagtcctacgtccattgcttaaggcgtatgcttcgcgaggatatatagcaatttctgttgattctcgttaccatggagaacgtgctaccagcgcaaccacctatcgcgatgcacttatttctgcatggaaaactggtgagacgatgccattcatatttgacacggtctgggacttgattagattggcagattatctaacacagagagaggatatagacccttctaggataggaatcactggaatatcacttggaggaatgcatgcatggtttgctgcagttgctgatactcgctatgctgtggttgctcctctgattggcattcagggatttcaatgggccataggcaacgataaatggcaggctcgagttgatagtataaagcctctttttgaggcggctcgtgatgatttgggtaaaggtgctattgacaaagaagtggtggagaaggtgtgggaccgaattgctcctggtttagcttcccaatttgactcaccttattcagttccaactatcgcaccacgtcctttgcttattgttaatggtgcggaagatcctcggtgtcccgttgcaggcttggaaattccaagggcacaagcaagccaggcatatggacagtttgactgtttagataatttcaagattattacagaacctggagttggacaccaattaacgagacttcaagtgaaagaatcatcttattggtttgacaggttcttgaacccttagcccgtgccctcatatgtgttcatcaagccctgtgtggttgttgctctagctcattgcctcatttctattgtcattgtgtcatgatatcaaagtcaataaattgtcaaatagaaatcatcatcatgatgactcttaaggtacagtcaataaatttattatgtatgatggtgtgtaattgaatgatagtaaaaaaaaaattatattgtcattgcatatattatttattc

SEQ ID NO: 9893 - protein, 438 aa, Glycine max
  peptide (1)..(438): Ceres Seq. ID no. 15176013
  misc_feature (90)..(436): NCBI GI NO: 30689997 NR Description: expressed protein [Arabidopsis thaliana]
  misc_feature (232)..(436): NCBI GI NO: 34898368 NR Description: ESTs C19441
  misc_feature (75)..(207): NCBI GI NO: 34898368 NR Description: ESTs C19441
  misc_feature (156)..(301): NCBI GI NO: 23098650 NR Description: hypothetical protein
  misc_feature (364)..(436): NCBI GI NO: 23098650 NR Description: hypothetical protein
TTTIAAGKQERNMMKVAPTSPLPTRHVRFLFHRTCLEHSIITTNSPKSLNYKRGTHFTRRSRTIAQAHTHSKIQTKMAENKAIEEAQSKFRSEFLQVLRSRRPAQVPLTVEFAKPVVNPLHQNSPPSIEEIKIMESCPRTDIENLEDLLEEENLYLNIEEGEQGRLPLLILKLKESDKQRKRPAVVFLHSTNKYKEVLRPLLKAYASRGYIAISVDSRYHGERATSATTYRDALISAWKTGETMPFIFDTVWDLIRLADYLTQREDIDPSRIGITGISLGGMHAWFAAVADTRYAVVAPLIGIQGFQWAIGNDKWQARVDSIKPLFEAARDDLGKGAIDKEVVEKVWDRIAPGLASQFDSPYSVPTIAPRPLLIVNGAEDPRCPVAGLEIPRAQASQAYGQFDCLDNFKIITEPGVGHQLTRLQVKESSYWFDRFLNP

SEQ ID NO: 9894 - protein, 426 aa, Glycine max
  peptide (1)..(426): Ceres Seq. ID no. 15176014
  misc_feature (78)..(424): NCBI GI NO: 30689997 NR Description: expressed protein [Arabidopsis thaliana]
  misc_feature (220)..(424): NCBI GI NO: 34898368 NR Description: ESTs C19441
  misc_feature (63)..(195): NCBI GI NO: 34898368 NR Description: ESTs C19441
  misc_feature (144)..(289): NCBI GI NO: 23098650 NR Description: hypothetical protein
  misc_feature (352)..(424): NCBI GI NO: 23098650 NR Description: hypothetical protein
MMKVAPTSPLPTRHVRFLFHRTCLEHSIITTNSPKSLNYKRGTHFTRRSRTIAQAHTHSKIQTKMAENKAIEEAQSKFRSEFLQVLRSRRPAQVPLTVEFAKPVVNPLHQNSPPSIEEIKIMESCPRTDIENLEDLLEEENLYLNIEEGEQGRLPLLILKLKESDKQRKRPAVVFLHSTNKYKEVLRPLLKAYASRGYIAISVDSRYHGERATSATTYRDALISAWKTGETMPFIFDTVWDLIRLADYLTQREDIDPSRIGITGISLGGMHAWFAAVADTRYAVVAPLIGIQGFQWAIGNDKWQARVDSIKPLFEAARDDLGKGAIDKEVVEKVWDRIAPGLASQFDSPYSVPTIAPRPLLIVNGAEDPRCPVAGLEIPRAQASQAYGQFDCLDNFKIITEPGVGHQLTRLQVKESSYWFDRFLNP

SEQ ID NO: 9895 - protein, 425 aa, Glycine max
  peptide (1)..(425): Ceres Seq. ID no. 15176015
  misc_feature (77)..(423): NCBI GI NO: 30689997 NR Description: expressed protein [Arabidopsis thaliana]
  misc_feature (219)..(423): NCBI GI NO: 34898368 NR Description: ESTs C19441
  misc_feature (62)..(194): NCBI GI NO: 34898368 NR Description: ESTs C19441
  misc_feature (143)..(288): NCBI GI NO: 23098650 NR Description: hypothetical protein
  misc_feature (351)..(423): NCBI GI NO: 23098650 NR Description: hypothetical protein
MKVAPTSPLPTRHVRFLFHRTCLEHSIITTNSPKSLNYKRGTHFTRRSRTIAQAHTHSKIQTKMAENKAIEEAQSKFRSEFLQVLRSRRPAQVPLTVEFAKPVVNPLHQNSPPSIEEIKIMESCPRTDIENLEDLLEEENLYLNIEEGEQGRLPLLILKLKESDKQRKRPAVVFLHSTNKYKEVLRPLLKAYASRGYIAISVDSRYHGERATSATTYRDALISAWKTGETMPFIFDTVWDLIRLADYLTQREDIDPSRIGITGISLGGMHAWFAAVADTRYAVVAPLIGIQGFQWAIGNDKWQARVDSIKPLFEAARDDLGKGAIDKEVVEKVWDRIAPGLASQFDSPYSVPTIAPRPLLIVNGAEDPRCPVAGLEIPRAQASQAYGQFDCLDNFKIITEPGVGHQLTRLQVKESSYWFDRFLNP

SEQ ID NO: 9896 - DNA, 660 bp, Glycine max
  misc_feature (1)..(660): Ceres Seq. ID no. 14308791
tctctctctcagaattttctcctctctccgattccttttattaattggagttttctcgctcctttttctttccctgaaaacatttcatcttcgtattgatgtcggaaaagggtcggccacttcccaaatttggtgaatgggatgtcaatgatccagcctcagctgaggggttcacagtgatttttaataaggccagggatgagaaaaagacaggtggcaacccagagtcaccaggaaagactgctactgatcctcatagcaaacctgcagtagagcctggcaaaactcagactaaaaaatggttttgctgcatgcaaaacccttctgccgaatcatagcatagcaatggttgctcctgtgaaaagcctgaacagaagaacaatgtttatgtgtaactagcgtcacagtattttctcaaagataagagctgtagagccataagcgaattctacggaatttatattttgtgatgtaaaagtgagctgcaatgggggaaagaaaagaagacagactattatttatgtgtgtgtatcaatgttgtggtttattattaggagccagggttgcttcctgttttgccttgtcttgcgctatgagctagagcgttgcttgtcacattgtattgcttgtattatgaaacaaatcctattttatgaaccc

SEQ ID NO: 9897 - protein, 79 aa, Glycine max
  peptide (1)..(79): Ceres Seq. ID no. 14308792
  misc_feature (1)..(72): Pfam Name: Pfam Description:  Nitrate-induced NOI protein
  misc_feature (1)..(79): NCBI GI NO: 15241050 NR Description: NOI protein, nitrate-induced
  misc_feature (1)..(79): NCBI GI NO: 7489517 NR Description: NOI protein - rice
  misc_feature (1)..(79): NCBI GI NO: 7489791 NR Description: NOI protein, nitrate-induced - maize
  misc_feature (1)..(47): NCBI GI NO: 28188707 NR Description: unknown protein [Arabidopsis thaliana]
  misc_feature (3)..(71): NCBI GI NO: 18422009 NR Description: expressed protein [Arabidopsis thaliana]
  misc_feature (1)..(70): NCBI GI NO: 15242695 NR Description: hypothetical protein [Arabidopsis thaliana]
  misc_feature (2)..(70): NCBI GI NO: 15227879 NR Description: expressed protein [Arabidopsis thaliana]
  misc_feature (3)..(71): NCBI GI NO: 38344338 NR Description: OSJNBa0058K23.20
  misc_feature (3)..(58): NCBI GI NO: 9758092 NR Description: gene_id:MNF13
  misc_feature (4)..(70): NCBI GI NO: 18408633 NR Description: expressed protein [Arabidopsis thaliana]
MSEKGRPLPKFGEWDVNDPASAEGFTVIFNKARDEKKTGGNPESPGKTATDPHSKPAVEPGKTQTKKWFCCMQNPSAES

SEQ ID NO: 9898 - protein, 44 aa, Glycine max
  peptide (1)..(44): Ceres Seq. ID no. 14308793
LSLRIFSSLRFLLLIGVFSLLFLSLKTFHLRIDVGKGSATSQIW

SEQ ID NO: 9899 - protein, 42 aa, Glycine max
  peptide (1)..(42): Ceres Seq. ID no. 14308794
MLWFIIRSQGCFLFCLVLRYELERCLSHCIACIMKQILFYEP

SEQ ID NO: 9900 - DNA, 1169 bp, Glycine max
  misc_feature (1)..(1169): Ceres Seq. ID no. 15225928
gggaagctaaatccagaacatgatactatctttctcaaagtgcaaatttccgacaaggatggttcttgtaggaatgtatactttccttttgacatatacacagacactcccattgatgttgcaatggagatggtgaaggaattggagatcacagatttgaagccttctgatattgcaaatatgattgaaggagagatwtskgtrccgggccccccctcragtcagctactaggcccccccccttatgatcgggcagaaatttttttcataaatcataaactgtgcagcctccttgtgttgatcaacctttgcaatgaatcattaaaaaatgttccaaagtaatgggacacgccaatactcaatgggacacaccaatactcaccaagaacataaattctataaaaaaagttgccactttgcaatgaaagttacatgctatatttgaactagaattgcaaataatgaggtatgcaattatggatccatatcacctgtcctcattgactatcccaccacttaaaatatgctagcattaatactataataacacaatttatcagctgacactttaatgttcgcttttctttggtgagagtagaactagaggtatggaatggggacaggtgatcttcatccctatgattatgtttacaattatgaattaattattcttttcattttatttatgtatggaatgatgctgcttgccattattttttacctgttttatttgctctagagctttaaatatctaactgcttttgttcatagacgcttcttcaataatagagaacaatttagtttgtatcaaccgtgactatgcagattttatcatatctgtcatgtggatcttttgctggataaacttgcaacataattttattgatttttggatacaggcttttacgagactcgaattgcatattatgcatggaggggtgctaaaggataccgcttttctgccatccctgattattagagtgttataataaatgaacaatagagctataccttgaaaacttaaattatcaaatttggttgcaacttgtatgcttcaatggcacagatcgaagtaaatggtagaaaagtgtaatcgtactactactcgatacttaagtaattaattcggtgacaaaatttataaaaattatgcattgaagtttgagttc

SEQ ID NO: 9901 - protein, 113 aa, Glycine max
  peptide (1)..(113): Ceres Seq. ID no. 15225929
  misc_feature (1)..(71): NCBI GI NO: 14194095 NR Description: AT3g51630/T18N14_10 [Arabidopsis thaliana]
  misc_feature (1)..(71): NCBI GI NO: 11358499 NR Description: MAP kinase - Arabidopsis thaliana
  misc_feature (1)..(71): NCBI GI NO: 30693513 NR Description: MAP kinase [Arabidopsis thaliana]
  misc_feature (1)..(66): NCBI GI NO: 27542950 NR Description: mitogen-activated protein kinase
  misc_feature (1)..(66): NCBI GI NO: 15237174 NR Description: protein kinase family [Arabidopsis thaliana]
  misc_feature (1)..(66): NCBI GI NO: 15241127 NR Description: protein kinase family [Arabidopsis thaliana]
  misc_feature (6)..(71): NCBI GI NO: 34393548 NR Description: putative mitogen activated protein kinase kinase
  misc_feature (6)..(71): NCBI GI NO: 7489544 NR Description: probable mitogen activated protein kinase - rice
  misc_feature (6)..(71): NCBI GI NO: 34393547 NR Description: mitogen activated protein kinase kinase
  misc_feature (10)..(77): NCBI GI NO: 15229843 NR Description: protein kinase family [Arabidopsis thaliana]
  misc_feature (66)..(66): Xaa is any aa, unknown or other
  misc_feature (67)..(67): Xaa is any aa, unknown or other
  misc_feature (68)..(68): Xaa is any aa, unknown or other
  misc_feature (73)..(73): Xaa is any aa, unknown or other
GKLNPEHDTIFLKVQISDKDGSCRNVYFPFDIYTDTPIDVAMEMVKELEITDLKPSDIANMIEGEXXXPGPPXSQLLGPPPYDRAEIFFINHKLCSLLVLINLCNESLKNVPK

SEQ ID NO: 9902 - protein, 72 aa, Glycine max
  peptide (1)..(72): Ceres Seq. ID no. 15225930
  misc_feature (1)..(30): NCBI GI NO: 14194095 NR Description: AT3g51630/T18N14_10 [Arabidopsis thaliana]
  misc_feature (1)..(30): NCBI GI NO: 11358499 NR Description: MAP kinase - Arabidopsis thaliana
  misc_feature (1)..(30): NCBI GI NO: 30693513 NR Description: MAP kinase [Arabidopsis thaliana]
  misc_feature (1)..(25): NCBI GI NO: 27542950 NR Description: mitogen-activated protein kinase
  misc_feature (1)..(25): NCBI GI NO: 15237174 NR Description: protein kinase family [Arabidopsis thaliana]
  misc_feature (1)..(25): NCBI GI NO: 15241127 NR Description: protein kinase family [Arabidopsis thaliana]
  misc_feature (1)..(30): NCBI GI NO: 34393548 NR Description: putative mitogen activated protein kinase kinase
  misc_feature (1)..(30): NCBI GI NO: 7489544 NR Description: probable mitogen activated protein kinase - rice
  misc_feature (1)..(30): NCBI GI NO: 34393547 NR Description: mitogen activated protein kinase kinase
  misc_feature (1)..(36): NCBI GI NO: 15229843 NR Description: protein kinase family [Arabidopsis thaliana]
  misc_feature (25)..(25): Xaa is any aa, unknown or other
  misc_feature (26)..(26): Xaa is any aa, unknown or other
  misc_feature (27)..(27): Xaa is any aa, unknown or other
  misc_feature (32)..(32): Xaa is any aa, unknown or other
MEMVKELEITDLKPSDIANMIEGEXXXPGPPXSQLLGPPPYDRAEIFFINHKLCSLLVLINLCNESLKNVPK

SEQ ID NO: 9903 - protein, 70 aa, Glycine max
  peptide (1)..(70): Ceres Seq. ID no. 15225931
  misc_feature (1)..(28): NCBI GI NO: 14194095 NR Description: AT3g51630/T18N14_10 [Arabidopsis thaliana]
  misc_feature (1)..(28): NCBI GI NO: 11358499 NR Description: MAP kinase - Arabidopsis thaliana
  misc_feature (1)..(28): NCBI GI NO: 30693513 NR Description: MAP kinase [Arabidopsis thaliana]
  misc_feature (1)..(23): NCBI GI NO: 27542950 NR Description: mitogen-activated protein kinase
  misc_feature (1)..(23): NCBI GI NO: 15237174 NR Description: protein kinase family [Arabidopsis thaliana]
  misc_feature (1)..(23): NCBI GI NO: 15241127 NR Description: protein kinase family [Arabidopsis thaliana]
  misc_feature (1)..(28): NCBI GI NO: 34393548 NR Description: putative mitogen activated protein kinase kinase
  misc_feature (1)..(28): NCBI GI NO: 7489544 NR Description: probable mitogen activated protein kinase - rice
  misc_feature (1)..(28): NCBI GI NO: 34393547 NR Description: mitogen activated protein kinase kinase
  misc_feature (1)..(34): NCBI GI NO: 15229843 NR Description: protein kinase family [Arabidopsis thaliana]
  misc_feature (23)..(23): Xaa is any aa, unknown or other
  misc_feature (24)..(24): Xaa is any aa, unknown or other
  misc_feature (25)..(25): Xaa is any aa, unknown or other
  misc_feature (30)..(30): Xaa is any aa, unknown or other
MVKELEITDLKPSDIANMIEGEXXXPGPPXSQLLGPPPYDRAEIFFINHKLCSLLVLINLCNESLKNVPK

SEQ ID NO: 9904 - DNA, 731 bp, Glycine max
  misc_feature (1)..(731): Ceres Seq. ID no. 15226667
ccgggccccccctcgagtcagctacgtaggccccccccccccctaataaaattttgaattaataatcagcataagttactaaaataaaatttcaatattgattgaagaacaacactaaaaacaattaagaaactactagcccacttcgtatcaaagatataaataatatcagtcttcttaatgattctaaaaattaagtataaggttagtaaccaggtatgattgttactgcagattggctggaattgccaggtgctttgattcttcttatcgtcgtagctccttctctaattgcaagcacttttagagacaacattgttggggtggtggtgtgcctcatcattgcatgctatttgctgcaagaacacattcgggcttctggtggtttcagaaactccttcactaaagctcacggcgtatcaaattccatcggcataatacttctgttggtttatcccatctgggcactggttgtcatacttttttaggcaccaccatttggacttgttgattcgtgtgaattaaaccaattgttttctgtaccattcatttgttggaacttgatatctataaacaccccgccattgttttgcgattcatctttgtcctaaagttagcatgtgtaaaaaagtggaataaaatctcagttgtagtcttctggtttcgtagaatgtaaaaaaaacaaaatatgaagaggattggtgtggtgtctttctagctgtcgtgtattc

SEQ ID NO: 9905 - protein, 89 aa, Glycine max
  peptide (1)..(89): Ceres Seq. ID no. 15226668
  misc_feature (6)..(76): Pfam Name: Pfam Description:  Cold acclimation protein WCOR413
  misc_feature (6)..(86): NCBI GI NO: 10121845 NR Description: cold acclimation protein WCOR413-like protein
  misc_feature (6)..(86): NCBI GI NO: 27902673 NR Description: cold acclimation protein COR413-PM1 [Zea mays]
  misc_feature (6)..(88): NCBI GI NO: 16555360 NR Description: cold acclimation protein WCOR413-like protein betaform
  misc_feature (6)..(85): NCBI GI NO: 15226654 NR Description: cold acclimation protein WCOR413
  misc_feature (6)..(86): NCBI GI NO: 15230325 NR Description: cold acclimation protein -related
  misc_feature (6)..(89): NCBI GI NO: 15235477 NR Description: cold acclimation protein homolog
  misc_feature (6)..(86): NCBI GI NO: 7489665 NR Description: cold acclimation protein WCOR413 - wheat
  misc_feature (8)..(86): NCBI GI NO: 21360378 NR Description: stress-regulated protein SAP1 [Xerophyta viscosa]
  misc_feature (8)..(89): NCBI GI NO: 15224052 NR Description: cold acclimation protein WCOR413
  misc_feature (8)..(84): NCBI GI NO: 16356677 NR Description: cold acclimation protein WCOR413-like protein
MIVTADWLELPGALILLIVVAPSLIASTFRDNIVGVVVCLIIACYLLQEHIRASGGFRNSFTKAHGVSNSIGIILLLVYPIWALVVILF

SEQ ID NO: 9906 - DNA, 2029 bp, Glycine max
  misc_feature (1)..(2029): Ceres Seq. ID no. 14310803
ggttttcaatttggggaaataaaaatagggggaaatattctggagagagtgtgtagaaaatatggttgtcgatgatatgacgctgtgcatcatcgtcggctatggaggttcctcttcttctcgtttctccgatgcttatcccaaaaggggtttgatggaggggagatatagtggggattgatatgatgaaggtgtttataaggttgttttgttgaattgtgtttttgggatggcaatattgtacgaaccagcaataaaactcatccaccagatgagctagcatgggcgattcttgtcttacttctatgtcaatggagaatcaccacccctccacgctcttgtcaatggactcaagtgcatcttctcacgaggaactggatttggagatgaatcgccaaatcatactcactcgtccgcccgatattaacctgcccctctccgccgagcgcagcccgccgccacagccgtggaattctgagccctgtgatattctggatgttggtcttggtactcaaggctacgagactgagagttttcttaatctgcccaaagctggtaggaagtgcgcgaagcgtgttgatagcatatggggtgcttggtttttcttcagtttttactttaaacctgctttgaacgataagtccaaggccaagattgtcagggacagcaatggtgtctcagggttcgataagtctgatctgaagctggatgttttcatggttcagcacgacatggaaaacatgtacatgtgggttttcaaggagaggccggagaacgcacttggtaagatgcagctgaggagttacatgaatgggcattctcgccaaggggagcgcccgtttccgttcagtgttgacaagggttttgctcggtcccacaggatgcagcgaaagcattatagaggactatcaaaccctcagtgcgtgcatggtgttgaggttgtttttgcacccagtctgatgaccctggatgaggatgatcgaaaaaggtggatagaactcactggccgggatttgaatttcacaatcccacctgaagcaagtgatttcagttcatggagaaatcttcccaacacggactttgagcttgagagaccacctcccccaatcaagagtggtcctaatgcacacccgaagaagctgcttaatggatccggacttaatggatctggacttcatctatctaaccacagtaatggtgatgggttggacctctctcctgtcagcagcaaaaaaaggaaggactttttccctcatggaaatgaagaagaatgttacttggctgttaatcctccatctgatcgtataccagatatagaaatgcacccaaccgagccacactggttgaatgacttcagcggggtgataaagagtgtttatggacctgttacagctgcaaaaactatttatgaggatgaacaaggttacttgattattatcagtctgccctttgtagatcttccaagtgtgaaagtttcatggaggaacactctgactcacggtatcataaaggtttcttgtatgagcacatctcggaagcctctcatcaagagacatgataggacattcaagcttacagatccatcgtcagagcactgcccccctggagagttcgtccgagaaatccctctttcaactcgaattcctgaagatgccaacatagaagcatactacgatgggccaggatcagtgcttgagatcctggtgccaaaacatcgcgtgggaccagaagagcatgaagtccgggtttgcctccgccctcatctgggagggaatgatctcaagttaacttgagataggcacttaaaaaaatttgttagggattccggtatggttcgtatgtcattgtttttctaactttgtaccatacagtgttatttgcaatagaattgtgtctcttatgtttgtctctagcaattttagctcactgactgccctggttcttttgttccggtgcatctgtattatgcttttgattgtaagcagtattgaacagctagttctcataatttataagaaattaccaaatc

SEQ ID NO: 9907 - protein, 503 aa, Glycine max
  peptide (1)..(503): Ceres Seq. ID no. 14310804
  misc_feature (1)..(503): NCBI GI NO: 11611667 NR Description: SLT1 protein [Nicotiana tabacum]
  misc_feature (11)..(503): NCBI GI NO: 18404463 NR Description: SLT1 protein [Arabidopsis thaliana]
  misc_feature (1)..(493): NCBI GI NO: 18399669 NR Description: expressed protein [Arabidopsis thaliana]
  misc_feature (1)..(496): NCBI GI NO: 18413934 NR Description: expressed protein [Arabidopsis thaliana]
  misc_feature (11)..(496): NCBI GI NO: 11280862 NR Description: hypothetical protein T22P11
  misc_feature (31)..(503): NCBI GI NO: 34895866 NR Description: P0009G03.13
  misc_feature (14)..(503): NCBI GI NO: 34908142 NR Description: putative SLT1 protein
MGDSCLTSMSMENHHPSTLLSMDSSASSHEELDLEMNRQIILTRPPDINLPLSAERSPPPQPWNSEPCDILDVGLGTQGYETESFLNLPKAGRKCAKRVDSIWGAWFFFSFYFKPALNDKSKAKIVRDSNGVSGFDKSDLKLDVFMVQHDMENMYMWVFKERPENALGKMQLRSYMNGHSRQGERPFPFSVDKGFARSHRMQRKHYRGLSNPQCVHGVEVVFAPSLMTLDEDDRKRWIELTGRDLNFTIPPEASDFSSWRNLPNTDFELERPPPPIKSGPNAHPKKLLNGSGLNGSGLHLSNHSNGDGLDLSPVSSKKRKDFFPHGNEEECYLAVNPPSDRIPDIEMHPTEPHWLNDFSGVIKSVYGPVTAAKTIYEDEQGYLIIISLPFVDLPSVKVSWRNTLTHGIIKVSCMSTSRKPLIKRHDRTFKLTDPSSEHCPPGEFVREIPLSTRIPEDANIEAYYDGPGSVLEILVPKHRVGPEEHEVRVCLRPHLGGNDLKLT

SEQ ID NO: 9908 - protein, 495 aa, Glycine max
  peptide (1)..(495): Ceres Seq. ID no. 14310805
  misc_feature (1)..(495): NCBI GI NO: 11611667 NR Description: SLT1 protein [Nicotiana tabacum]
  misc_feature (3)..(495): NCBI GI NO: 18404463 NR Description: SLT1 protein [Arabidopsis thaliana]
  misc_feature (1)..(485): NCBI GI NO: 18399669 NR Description: expressed protein [Arabidopsis thaliana]
  misc_feature (1)..(488): NCBI GI NO: 18413934 NR Description: expressed protein [Arabidopsis thaliana]
  misc_feature (3)..(488): NCBI GI NO: 11280862 NR Description: hypothetical protein T22P11
  misc_feature (23)..(495): NCBI GI NO: 34895866 NR Description: P0009G03.13
  misc_feature (6)..(495): NCBI GI NO: 34908142 NR Description: putative SLT1 protein
MSMENHHPSTLLSMDSSASSHEELDLEMNRQIILTRPPDINLPLSAERSPPPQPWNSEPCDILDVGLGTQGYETESFLNLPKAGRKCAKRVDSIWGAWFFFSFYFKPALNDKSKAKIVRDSNGVSGFDKSDLKLDVFMVQHDMENMYMWVFKERPENALGKMQLRSYMNGHSRQGERPFPFSVDKGFARSHRMQRKHYRGLSNPQCVHGVEVVFAPSLMTLDEDDRKRWIELTGRDLNFTIPPEASDFSSWRNLPNTDFELERPPPPIKSGPNAHPKKLLNGSGLNGSGLHLSNHSNGDGLDLSPVSSKKRKDFFPHGNEEECYLAVNPPSDRIPDIEMHPTEPHWLNDFSGVIKSVYGPVTAAKTIYEDEQGYLIIISLPFVDLPSVKVSWRNTLTHGIIKVSCMSTSRKPLIKRHDRTFKLTDPSSEHCPPGEFVREIPLSTRIPEDANIEAYYDGPGSVLEILVPKHRVGPEEHEVRVCLRPHLGGNDLKLT

SEQ ID NO: 9909 - protein, 493 aa, Glycine max
  peptide (1)..(493): Ceres Seq. ID no. 14310806
  misc_feature (1)..(493): NCBI GI NO: 11611667 NR Description: SLT1 protein [Nicotiana tabacum]
  misc_feature (1)..(493): NCBI GI NO: 18404463 NR Description: SLT1 protein [Arabidopsis thaliana]
  misc_feature (1)..(483): NCBI GI NO: 18399669 NR Description: expressed protein [Arabidopsis thaliana]
  misc_feature (1)..(486): NCBI GI NO: 18413934 NR Description: expressed protein [Arabidopsis thaliana]
  misc_feature (1)..(486): NCBI GI NO: 11280862 NR Description: hypothetical protein T22P11
  misc_feature (21)..(493): NCBI GI NO: 34895866 NR Description: P0009G03.13
  misc_feature (4)..(493): NCBI GI NO: 34908142 NR Description: putative SLT1 protein
MENHHPSTLLSMDSSASSHEELDLEMNRQIILTRPPDINLPLSAERSPPPQPWNSEPCDILDVGLGTQGYETESFLNLPKAGRKCAKRVDSIWGAWFFFSFYFKPALNDKSKAKIVRDSNGVSGFDKSDLKLDVFMVQHDMENMYMWVFKERPENALGKMQLRSYMNGHSRQGERPFPFSVDKGFARSHRMQRKHYRGLSNPQCVHGVEVVFAPSLMTLDEDDRKRWIELTGRDLNFTIPPEASDFSSWRNLPNTDFELERPPPPIKSGPNAHPKKLLNGSGLNGSGLHLSNHSNGDGLDLSPVSSKKRKDFFPHGNEEECYLAVNPPSDRIPDIEMHPTEPHWLNDFSGVIKSVYGPVTAAKTIYEDEQGYLIIISLPFVDLPSVKVSWRNTLTHGIIKVSCMSTSRKPLIKRHDRTFKLTDPSSEHCPPGEFVREIPLSTRIPEDANIEAYYDGPGSVLEILVPKHRVGPEEHEVRVCLRPHLGGNDLKLT

SEQ ID NO: 9910 - DNA, 1106 bp, Glycine max
  misc_feature (1)..(1106): Ceres Seq. ID no. 15224967
ccttgttcatttccttcacataagatacagccaagcttcattctatttgtttttgtccctggacgcagcacctttcttttgttctgttttaggtccttgtgcattttacttttgggagaattccaaaaaagttattattcatacataacatgaaggaagaatgattacttggtgtggttattcaaaccaaaattaaccaaaataatatgatgactaaaaccactttggtgttttctctccctcttcgtattaaatatttttaacactagttccttacttgaaatcataccttttatttttttggtgacttagccttaagccctcataaaaactgtcctttgatttcagccttttttcttcttcaaaaactgttgtaggatggaatgctaaaacacaaaggtacatatgaaataatatcacctgaggacattggacttgaaagaaccaatgaagtaggtattgtactgggaaagcttaggtatgtaattttcttttctctagaacacttatttttgcatggatcttgtacacactgctaatccctatgttctcttcatcctaacatgagaaaaattttatctctagctttctggacttatgtaagtcctcatggtacaagcataccggttatatttgagtgagtgcacaagaagttgtctgactatggcaggatgaaactctgcggataatgatgattcttggcctgctttattttgatgctcagaagcattctacttgttcatccatgcctggtggttgatatcagtggttgccatgctttgagaaagcgacttgaagttactatcacagtactttttgaggaagatggttatgtcgtgcatgagtggccctgtataggggaaaatcccacttgaattacggacttgacctgagaagaatgtttgaggattattactcttctcattcttctagacttctagttatttttcttatttgtattttattactatttcagtacgttatatttaaatccattcccatctgattggatgatcatgaattaccttcctgcttgtatggattatacattattatagatatatactagctcttactttctttgtgtcaaaaaaaaaaaaaaaaaa

SEQ ID NO: 9911 - protein, 52 aa, Glycine max
  peptide (1)..(52): Ceres Seq. ID no. 15224968
MLRSILLVHPCLVVDISGCHALRKRLEVTITVLFEEDGYVVHEWPCIGENPT

SEQ ID NO: 9912 - protein, 51 aa, Glycine max
  peptide (1)..(51): Ceres Seq. ID no. 15224969
  misc_feature (1)..(50): NCBI GI NO: 6714306 NR Description: F15H18.3 [Arabidopsis thaliana]
  misc_feature (1)..(50): NCBI GI NO: 15221794 NR Description: 2-isopropylmalate synthase -related
  misc_feature (1)..(31): NCBI GI NO: 7387848 NR Description: 2-isopropylmalate synthase A
  misc_feature (1)..(31): NCBI GI NO: 15221125 NR Description: 2-isopropylmalate synthase -related
  misc_feature (1)..(31): NCBI GI NO: 2492792 NR Description: Probable 2-isopropylmalate synthase
MLKHKGTYEIISPEDIGLERTNEVGIVLGKLRYVIFFSLEHLFLHGSCTHC

SEQ ID NO: 9913 - protein, 50 aa, Glycine max
  peptide (1)..(50): Ceres Seq. ID no. 15224970
PCSFPSHKIQPSFILFVFVPGRSTFLLFCFRSLCILLLGEFQKSYYSYIT

SEQ ID NO: 9914 - DNA, 1106 bp, Glycine max
  misc_feature (1)..(1106): Ceres Seq. ID no. 13638152
ggagagagagaaaaaaaaaaaaaagtctctgtttcttcacttgctcacaagccgcaactgctactgtgtacccaatctgagcccaacgagatgggggggcagaatctttccccaaaggaaaggagtagagattggattggagttcttatgaacagcagctttggttattgtacttatcaccatgatcttcgatctaatgagatgaatgtgttctgcgtggactgtgcacttaggatgtgtaggcactgtaaggaagctcattccctacatagaaggtttcagatttacaaatattcctaccaggatgtcttccgccatgccgagctgcagaagtattttgattgctccaaaattcagacttacatatccaataatgaaaggattgtgcatctcaaacctcggccttcaatcaccaaatctaagtctgctgatctaagtcccgactctaaatacaaagagaccggcatagcaacaagaccaaagtcagggggcacgtgtgaagaatgtggaaaacacttacaagatgagcgtaatcgcttctgctccattacatgcaagatctcagtgcatccagtggagacccaataccaaggtcaaaatcaatgttcaccaaaccaccaaagtgctagaggcatcatcaatccaaaacctgaaggcattgactttacaatgaatgataaccataattcagaaccggagtcatctatctctgaagctgagccatatgggtgggttgaagttgtgaatttcagaaagcgtccaaggaaaagtatccctcagaggcctgtctttgttttcacgtcttagaataagatacactactctaatggttttcttcattttttttttttgactttacatttcttgaacatttgagggaagctcaaccccgttatgccccatattgggatttaggtatatataacttgggagtttgagattcagttgctattagcaaagtaactagccgagcttgtatagcacaaggacaaaggtaatgctactaacacacttccgacactactactacttaatatctgtatagttttcagcatcttactgtactcccttcgccccacatctaatatctattaatgtttgaggtt

SEQ ID NO: 9915 - protein, 268 aa, Glycine max
  peptide (1)..(268): Ceres Seq. ID no. 13638153
  misc_feature (45)..(135): Pfam Name: Pfam Description:  Protein of unknown function, DUF597
  misc_feature (45)..(239): NCBI GI NO: 20805059 NR Description: B1108H10.20
  misc_feature (45)..(135): NCBI GI NO: 15232396 NR Description: hypothetical protein [Arabidopsis thaliana]
  misc_feature (35)..(141): NCBI GI NO: 16117799 NR Description: zinc-binding protein [Pisum sativum]
  misc_feature (32)..(135): NCBI GI NO: 38346725 NR Description: OSJNBa0086O06.23
  misc_feature (45)..(134): NCBI GI NO: 9755373 NR Description: F17F8.4 [Arabidopsis thaliana]
  misc_feature (32)..(135): NCBI GI NO: 15236696 NR Description: expressed protein [Arabidopsis thaliana]
  misc_feature (42)..(139): NCBI GI NO: 18394936 NR Description: expressed protein [Arabidopsis thaliana]
  misc_feature (42)..(139): NCBI GI NO: 25337907 NR Description: hypothetical protein F9H16
  misc_feature (42)..(139): NCBI GI NO: 21537073 NR Description: unknown [Arabidopsis thaliana]
  misc_feature (30)..(139): NCBI GI NO: 18411153 NR Description: expressed protein [Arabidopsis thaliana]
GEREKKKKVSVSSLAHKPQLLLCTQSEPNEMGGQNLSPKERSRDWIGVLMNSSFGYCTYHHDLRSNEMNVFCVDCALRMCRHCKEAHSLHRRFQIYKYSYQDVFRHAELQKYFDCSKIQTYISNNERIVHLKPRPSITKSKSADLSPDSKYKETGIATRPKSGGTCEECGKHLQDERNRFCSITCKISVHPVETQYQGQNQCSPNHQSARGIINPKPEGIDFTMNDNHNSEPESSISEAEPYGWVEVVNFRKRPRKSIPQRPVFVFTS

SEQ ID NO: 9916 - protein, 238 aa, Glycine max
  peptide (1)..(238): Ceres Seq. ID no. 13638154
  misc_feature (15)..(105): Pfam Name: Pfam Description:  Protein of unknown function, DUF597
  misc_feature (15)..(209): NCBI GI NO: 20805059 NR Description: B1108H10.20
  misc_feature (15)..(105): NCBI GI NO: 15232396 NR Description: hypothetical protein [Arabidopsis thaliana]
  misc_feature (5)..(111): NCBI GI NO: 16117799 NR Description: zinc-binding protein [Pisum sativum]
  misc_feature (2)..(105): NCBI GI NO: 38346725 NR Description: OSJNBa0086O06.23
  misc_feature (15)..(104): NCBI GI NO: 9755373 NR Description: F17F8.4 [Arabidopsis thaliana]
  misc_feature (2)..(105): NCBI GI NO: 15236696 NR Description: expressed protein [Arabidopsis thaliana]
  misc_feature (12)..(109): NCBI GI NO: 18394936 NR Description: expressed protein [Arabidopsis thaliana]
  misc_feature (12)..(109): NCBI GI NO: 25337907 NR Description: hypothetical protein F9H16
  misc_feature (12)..(109): NCBI GI NO: 21537073 NR Description: unknown [Arabidopsis thaliana]
  misc_feature (1)..(109): NCBI GI NO: 18411153 NR Description: expressed protein [Arabidopsis thaliana]
MGGQNLSPKERSRDWIGVLMNSSFGYCTYHHDLRSNEMNVFCVDCALRMCRHCKEAHSLHRRFQIYKYSYQDVFRHAELQKYFDCSKIQTYISNNERIVHLKPRPSITKSKSADLSPDSKYKETGIATRPKSGGTCEECGKHLQDERNRFCSITCKISVHPVETQYQGQNQCSPNHQSARGIINPKPEGIDFTMNDNHNSEPESSISEAEPYGWVEVVNFRKRPRKSIPQRPVFVFTS

SEQ ID NO: 9917 - protein, 219 aa, Glycine max
  peptide (1)..(219): Ceres Seq. ID no. 13638155
  misc_feature (1)..(86): Pfam Name: Pfam Description:  Protein of unknown function, DUF597
  misc_feature (1)..(190): NCBI GI NO: 20805059 NR Description: B1108H10.20
  misc_feature (1)..(86): NCBI GI NO: 15232396 NR Description: hypothetical protein [Arabidopsis thaliana]
  misc_feature (1)..(92): NCBI GI NO: 16117799 NR Description: zinc-binding protein [Pisum sativum]
  misc_feature (1)..(86): NCBI GI NO: 38346725 NR Description: OSJNBa0086O06.23
  misc_feature (1)..(85): NCBI GI NO: 9755373 NR Description: F17F8.4 [Arabidopsis thaliana]
  misc_feature (1)..(86): NCBI GI NO: 15236696 NR Description: expressed protein [Arabidopsis thaliana]
  misc_feature (1)..(90): NCBI GI NO: 18394936 NR Description: expressed protein [Arabidopsis thaliana]
  misc_feature (1)..(90): NCBI GI NO: 25337907 NR Description: hypothetical protein F9H16
  misc_feature (1)..(90): NCBI GI NO: 21537073 NR Description: unknown [Arabidopsis thaliana]
  misc_feature (1)..(90): NCBI GI NO: 18411153 NR Description: expressed protein [Arabidopsis thaliana]
MNSSFGYCTYHHDLRSNEMNVFCVDCALRMCRHCKEAHSLHRRFQIYKYSYQDVFRHAELQKYFDCSKIQTYISNNERIVHLKPRPSITKSKSADLSPDSKYKETGIATRPKSGGTCEECGKHLQDERNRFCSITCKISVHPVETQYQGQNQCSPNHQSARGIINPKPEGIDFTMNDNHNSEPESSISEAEPYGWVEVVNFRKRPRKSIPQRPVFVFTS

SEQ ID NO: 9918 - DNA, 1286 bp, Glycine max
  misc_feature (1)..(1286): Ceres Seq. ID no. 14316251
gattaaaaaaaaaaacacaaaaaaattacaatgcaaaattaaagtgagcagggaggattgaattgtccccgctattcgatttgagaaattcgacgttttcaaagaattggaaactggaaacttcactttcattcgatcaatcatgagaactcgaaacgccgattccgcctccaaatccgcaacccctaagaagacgccgccgaagaaatcccctgcggccaagcgcaccaccgccaccaaaaccagagccaccaagaagaacgagctctcgcccgcacccgattccaaccccgatcaatctcctctggaacagaaatcgttaggcagtgctagcagcgcaaaatctgtgaaaaagaagactccggggagatcgagaagtaaagcaatcaatactccgaattcggaagaacaatgtgaggcagtagctgatgaaactccaattgaagatgataccgaggtagcagagaaagtggaagatgttggagtggttgatgcagataatgttgagggtgagaaggaggggggaaaaggtgttggttctgttggattgtctgatgagacggatcgtaagtcgatggaagtggatgaacttgttcaaaaggtttgtgaatctgtgggaaaggaaaatgatgtaatggaagttgaagtagctgcttgctgggatgcttctgtttcttttaggcgaccagggcgacctattgtggatctcaatatatctgcggataatgaagattgtactggtgaaaaggagggagagaaatggaaggaagagttgaaagatcaagagggggacaaagggaaggaagagttgaaaaaacaggaaggagacaacgggaaggaagagttgaaagaactggaaggagagaaaggagaggaagagttgaaagaactggaaggagaaaaaggtgaggaagagttgacagaactggaaggagagaaaggaaatgttgaattgaaagaacagaaaggagacaaaggaaaggaaaagttgaaagagcaggagccagagaaagcaaagggagaggaaacaaacctttttggacatgaagagaactctgagtcttttggtgtagaaggtgaagcccagatgcaaaaagaagatgctaatcctattaaagatggcggtgaaggaccaaagattggtgaaaattcagatcttggagaacaagggaaggtggagcttgttgaagatccagaagaaaaccctgaagaagatccagaggaacctccataagaaacttcggcattggaggaggagcatagggaattggaggctattgcaaatc

SEQ ID NO: 9919 - protein, 363 aa, Glycine max
  peptide (1)..(363): Ceres Seq. ID no. 14316252
  misc_feature (86)..(363): Pfam Name: Pfam Description:  S-antigen protein
  misc_feature (1)..(363): NCBI GI NO: 27805831 NR Description: cylicin
  misc_feature (56)..(363): NCBI GI NO: 9837379 NR Description: retinitis pigmentosa GTPase regulator
  misc_feature (27)..(363): NCBI GI NO: 9837385 NR Description: retinitis pigmentosa GTPase regulator-like protein
  misc_feature (70)..(363): NCBI GI NO: 9837379 NR Description: retinitis pigmentosa GTPase regulator
  misc_feature (101)..(361): NCBI GI NO: 9626004 NR Description: ORF 48~EDLF5~sim. to EBV BRRF2
  misc_feature (101)..(363): NCBI GI NO: 20452161 NR Description: retinitis pigmentosa GTPase regulator
  misc_feature (43)..(363): NCBI GI NO: 9837385 NR Description: retinitis pigmentosa GTPase regulator-like protein
  misc_feature (56)..(361): NCBI GI NO: 9837379 NR Description: retinitis pigmentosa GTPase regulator
  misc_feature (36)..(363): NCBI GI NO: 9837385 NR Description: retinitis pigmentosa GTPase regulator-like protein
  misc_feature (92)..(363): NCBI GI NO: 20452161 NR Description: retinitis pigmentosa GTPase regulator
MRTRNADSASKSATPKKTPPKKSPAAKRTTATKTRATKKNELSPAPDSNPDQSPLEQKSLGSASSAKSVKKKTPGRSRSKAINTPNSEEQCEAVADETPIEDDTEVAEKVEDVGVVDADNVEGEKEGGKGVGSVGLSDETDRKSMEVDELVQKVCESVGKENDVMEVEVAACWDASVSFRRPGRPIVDLNISADNEDCTGEKEGEKWKEELKDQEGDKGKEELKKQEGDNGKEELKELEGEKGEEELKELEGEKGEEELTELEGEKGNVELKEQKGDKGKEKLKEQEPEKAKGEETNLFGHEENSESFGVEGEAQMQKEDANPIKDGGEGPKIGENSDLGEQGKVELVEDPEENPEEDPEEPP

SEQ ID NO: 9920 - protein, 219 aa, Glycine max
  peptide (1)..(219): Ceres Seq. ID no. 14316253
  misc_feature (1)..(219): Pfam Name: Pfam Description:  S-antigen protein
  misc_feature (1)..(219): NCBI GI NO: 27805831 NR Description: cylicin
  misc_feature (1)..(219): NCBI GI NO: 9837379 NR Description: retinitis pigmentosa GTPase regulator
  misc_feature (1)..(219): NCBI GI NO: 9837385 NR Description: retinitis pigmentosa GTPase regulator-like protein
  misc_feature (1)..(219): NCBI GI NO: 9837379 NR Description: retinitis pigmentosa GTPase regulator
  misc_feature (1)..(217): NCBI GI NO: 9626004 NR Description: ORF 48~EDLF5~sim. to EBV BRRF2
  misc_feature (1)..(219): NCBI GI NO: 20452161 NR Description: retinitis pigmentosa GTPase regulator
  misc_feature (1)..(219): NCBI GI NO: 9837385 NR Description: retinitis pigmentosa GTPase regulator-like protein
  misc_feature (1)..(217): NCBI GI NO: 9837379 NR Description: retinitis pigmentosa GTPase regulator
  misc_feature (1)..(219): NCBI GI NO: 9837385 NR Description: retinitis pigmentosa GTPase regulator-like protein
  misc_feature (1)..(219): NCBI GI NO: 20452161 NR Description: retinitis pigmentosa GTPase regulator
MEVDELVQKVCESVGKENDVMEVEVAACWDASVSFRRPGRPIVDLNISADNEDCTGEKEGEKWKEELKDQEGDKGKEELKKQEGDNGKEELKELEGEKGEEELKELEGEKGEEELTELEGEKGNVELKEQKGDKGKEKLKEQEPEKAKGEETNLFGHEENSESFGVEGEAQMQKEDANPIKDGGEGPKIGENSDLGEQGKVELVEDPEENPEEDPEEPP

SEQ ID NO: 9921 - protein, 199 aa, Glycine max
  peptide (1)..(199): Ceres Seq. ID no. 14316254
  misc_feature (1)..(199): Pfam Name: Pfam Description:  S-antigen protein
  misc_feature (1)..(199): NCBI GI NO: 27805831 NR Description: cylicin
  misc_feature (1)..(199): NCBI GI NO: 9837379 NR Description: retinitis pigmentosa GTPase regulator
  misc_feature (1)..(199): NCBI GI NO: 9837385 NR Description: retinitis pigmentosa GTPase regulator-like protein
  misc_feature (1)..(199): NCBI GI NO: 9837379 NR Description: retinitis pigmentosa GTPase regulator
  misc_feature (1)..(197): NCBI GI NO: 9626004 NR Description: ORF 48~EDLF5~sim. to EBV BRRF2
  misc_feature (1)..(199): NCBI GI NO: 20452161 NR Description: retinitis pigmentosa GTPase regulator
  misc_feature (1)..(199): NCBI GI NO: 9837385 NR Description: retinitis pigmentosa GTPase regulator-like protein
  misc_feature (1)..(197): NCBI GI NO: 9837379 NR Description: retinitis pigmentosa GTPase regulator
  misc_feature (1)..(199): NCBI GI NO: 9837385 NR Description: retinitis pigmentosa GTPase regulator-like protein
  misc_feature (1)..(199): NCBI GI NO: 20452161 NR Description: retinitis pigmentosa GTPase regulator
MEVEVAACWDASVSFRRPGRPIVDLNISADNEDCTGEKEGEKWKEELKDQEGDKGKEELKKQEGDNGKEELKELEGEKGEEELKELEGEKGEEELTELEGEKGNVELKEQKGDKGKEKLKEQEPEKAKGEETNLFGHEENSESFGVEGEAQMQKEDANPIKDGGEGPKIGENSDLGEQGKVELVEDPEENPEEDPEEPP

SEQ ID NO: 9922 - DNA, 1438 bp, Glycine max
  misc_feature (1)..(1438): Ceres Seq. ID no. 15178046
aaaactgaaggctgtgctttgctctgcttctgaatgaagaaaatgaagacacatagtcgttaccaggacaatttggattctgattcaaagagtaagagatcatgcttctgtggaatcgttccagcggtttctttactttgtgttgtcttgcttttctcgactttattctttgcacaacgctacaacgagaaactattaaggtggaaaatgaacatcaagaaattgaaaaatgacaattgcaagaaccagtgcaggactggtggaagtcatgcattacctgaaggcataatctccaacacttctgatttggaaatgcggcatttgtgggatcttcctatgactaagacaatagagaataaggaaaatgcatcaaccaatttgtttgcaatggcagttgggataaagcagaaagatcttgtgaacaaattggtcaaaaagtttctatcaagcaatttcgttgtaatgctcttccactacgatggtattgttgacgaatggaatgactttgaatggaataatcatgtcattcatgtggctgtagccaatcaaagtaaatggtggtttgcaaagcgtttcttacaccctgacatagttgcagaatatggttatattttcctatgggatgaggatcttggagttgaacacttccacccggataggtatgtttctattataaaaagtgaaggactggaaatatcacaaccagcacttgatagtaacaaatcagaggtacatcatcagattactgcacgtgggaggaggtcgaatgtgcacagaaggatttacaaaactggtggtagtggcaaacgttgtgatgaaagtagcactgctcctccttgcacagggtgggttgaaatgatggcctttgttttctcaagagctgcatggcgttgcgtttggtatatgatccagaatgacttgatccatgcatggggtctagatatgcagctaggctactgtgctcagggtgatcgaacaaaaaatgttggtgttgtggatgctgaatacatagtccactacggtcatcctactcttggaggcttagatgtgaatgaggtttcatctcggacaaaggatcatagagttgatgtgaggagactgtcttaccgtgaattacaagtttttagaaaacgatggcagaaggcagttgaggaggatgattgttgggtcgatccatttcaataacaaatactgatagtcaaaattgtgtatagattttatgaaaatacacaaatatgtaaggagaagcaaattcaattggcagataaaacaaatgttgatcatggagaggggagtagttaaaaaagcctagaggagtttttttagcatctcaagggcaagcatgacttcatggggaaaaaattcttctcaattgagtttggtgcatttttgtttaacctttcattttttaatagtttccaaatggaattgtttattc

SEQ ID NO: 9923 - protein, 383 aa, Glycine max
  peptide (1)..(383): Ceres Seq. ID no. 15178047
  misc_feature (69)..(382): Pfam Name: DUF707 Pfam Description: Protein of unknown function
  misc_feature (1)..(381): NCBI GI NO: 22329488 NR Description: expressed protein [Arabidopsis thaliana]
  misc_feature (69)..(382): NCBI GI NO: 19386727 NR Description: P0678F11.16
  misc_feature (1)..(380): NCBI GI NO: 15219892 NR Description: expressed protein [Arabidopsis thaliana]
  misc_feature (81)..(380): NCBI GI NO: 24636978 NR Description: lysine ketoglutarate reductase trans-splicingrelated 1
  misc_feature (34)..(382): NCBI GI NO: 33146749 NR Description: putative lysine ketoglutarate reductase trans-splicing related 1
  misc_feature (92)..(248): NCBI GI NO: 34899756 NR Description: OJ1773_H01.1
  misc_feature (272)..(348): NCBI GI NO: 34899756 NR Description: OJ1773_H01.1
  misc_feature (348)..(382): NCBI GI NO: 34899756 NR Description: OJ1773_H01.1
  misc_feature (173)..(382): NCBI GI NO: 34903420 NR Description: hypothetical protein~similar to Oryza sativachromosome 1
  misc_feature (76)..(155): NCBI GI NO: 34903420 NR Description: hypothetical protein~similar to Oryza sativachromosome 1
MKKMKTHSRYQDNLDSDSKSKRSCFCGIVPAVSLLCVVLLFSTLFFAQRYNEKLLRWKMNIKKLKNDNCKNQCRTGGSHALPEGIISNTSDLEMRHLWDLPMTKTIENKENASTNLFAMAVGIKQKDLVNKLVKKFLSSNFVVMLFHYDGIVDEWNDFEWNNHVIHVAVANQSKWWFAKRFLHPDIVAEYGYIFLWDEDLGVEHFHPDRYVSIIKSEGLEISQPALDSNKSEVHHQITARGRRSNVHRRIYKTGGSGKRCDESSTAPPCTGWVEMMAFVFSRAAWRCVWYMIQNDLIHAWGLDMQLGYCAQGDRTKNVGVVDAEYIVHYGHPTLGGLDVNEVSSRTKDHRVDVRRLSYRELQVFRKRWQKAVEEDDCWVDPFQ

SEQ ID NO: 9924 - protein, 380 aa, Glycine max
  peptide (1)..(380): Ceres Seq. ID no. 15178048
  misc_feature (66)..(379): Pfam Name: DUF707 Pfam Description: Protein of unknown function
  misc_feature (1)..(378): NCBI GI NO: 22329488 NR Description: expressed protein [Arabidopsis thaliana]
  misc_feature (66)..(379): NCBI GI NO: 19386727 NR Description: P0678F11.16
  misc_feature (1)..(377): NCBI GI NO: 15219892 NR Description: expressed protein [Arabidopsis thaliana]
  misc_feature (78)..(377): NCBI GI NO: 24636978 NR Description: lysine ketoglutarate reductase trans-splicingrelated 1
  misc_feature (31)..(379): NCBI GI NO: 33146749 NR Description: putative lysine ketoglutarate reductase trans-splicing related 1
  misc_feature (89)..(245): NCBI GI NO: 34899756 NR Description: OJ1773_H01.1
  misc_feature (269)..(345): NCBI GI NO: 34899756 NR Description: OJ1773_H01.1
  misc_feature (345)..(379): NCBI GI NO: 34899756 NR Description: OJ1773_H01.1
  misc_feature (170)..(379): NCBI GI NO: 34903420 NR Description: hypothetical protein~similar to Oryza sativachromosome 1
  misc_feature (73)..(152): NCBI GI NO: 34903420 NR Description: hypothetical protein~similar to Oryza sativachromosome 1
MKTHSRYQDNLDSDSKSKRSCFCGIVPAVSLLCVVLLFSTLFFAQRYNEKLLRWKMNIKKLKNDNCKNQCRTGGSHALPEGIISNTSDLEMRHLWDLPMTKTIENKENASTNLFAMAVGIKQKDLVNKLVKKFLSSNFVVMLFHYDGIVDEWNDFEWNNHVIHVAVANQSKWWFAKRFLHPDIVAEYGYIFLWDEDLGVEHFHPDRYVSIIKSEGLEISQPALDSNKSEVHHQITARGRRSNVHRRIYKTGGSGKRCDESSTAPPCTGWVEMMAFVFSRAAWRCVWYMIQNDLIHAWGLDMQLGYCAQGDRTKNVGVVDAEYIVHYGHPTLGGLDVNEVSSRTKDHRVDVRRLSYRELQVFRKRWQKAVEEDDCWVDPFQ

SEQ ID NO: 9925 - protein, 325 aa, Glycine max
  peptide (1)..(325): Ceres Seq. ID no. 15178049
  misc_feature (11)..(324): Pfam Name: DUF707 Pfam Description: Protein of unknown function
  misc_feature (1)..(323): NCBI GI NO: 22329488 NR Description: expressed protein [Arabidopsis thaliana]
  misc_feature (11)..(324): NCBI GI NO: 19386727 NR Description: P0678F11.16
  misc_feature (1)..(322): NCBI GI NO: 15219892 NR Description: expressed protein [Arabidopsis thaliana]
  misc_feature (23)..(322): NCBI GI NO: 24636978 NR Description: lysine ketoglutarate reductase trans-splicingrelated 1
  misc_feature (1)..(324): NCBI GI NO: 33146749 NR Description: putative lysine ketoglutarate reductase trans-splicing related 1
  misc_feature (34)..(190): NCBI GI NO: 34899756 NR Description: OJ1773_H01.1
  misc_feature (214)..(290): NCBI GI NO: 34899756 NR Description: OJ1773_H01.1
  misc_feature (290)..(324): NCBI GI NO: 34899756 NR Description: OJ1773_H01.1
  misc_feature (115)..(324): NCBI GI NO: 34903420 NR Description: hypothetical protein~similar to Oryza sativachromosome 1
  misc_feature (18)..(97): NCBI GI NO: 34903420 NR Description: hypothetical protein~similar to Oryza sativachromosome 1
MNIKKLKNDNCKNQCRTGGSHALPEGIISNTSDLEMRHLWDLPMTKTIENKENASTNLFAMAVGIKQKDLVNKLVKKFLSSNFVVMLFHYDGIVDEWNDFEWNNHVIHVAVANQSKWWFAKRFLHPDIVAEYGYIFLWDEDLGVEHFHPDRYVSIIKSEGLEISQPALDSNKSEVHHQITARGRRSNVHRRIYKTGGSGKRCDESSTAPPCTGWVEMMAFVFSRAAWRCVWYMIQNDLIHAWGLDMQLGYCAQGDRTKNVGVVDAEYIVHYGHPTLGGLDVNEVSSRTKDHRVDVRRLSYRELQVFRKRWQKAVEEDDCWVDPFQ

SEQ ID NO: 9926 - DNA, 1471 bp, Glycine max
  misc_feature (1)..(1471): Ceres Seq. ID no. 15226540
atccttaacaacatttcacgcttcctctgtttgctcgcacacgtcgtttttttctttttgttgcttcggagccaactcaacaacaacgccgtgcctaatccttaagaataacgaattacaacaaccaaccatgttgcattgtctcaacacttcctgttcggacatcacagtcttggaaagacaacgggaagcaaccatcaagtgccagaaccaccaaccaccctacttaacggactttaacgccgtcttcccttcttcttcttcttcttcttcttcttcctcttcttcttctcatagtcagggcttgctcatgatgtgctcggattcctcgctcggccaggtcctaactcactccgtcaaacccgatccgggcgtctggcccgaattcggttttctacccgccatttcgagaacttgtagcagagacggagacttggtttcgcccaaggaaaacatggccagtgggaaagaaaatgctaagaagagaaagcctcagaactccaaggttgttgcggagattgataataacaaggacaaggacaagagagtcaaagtaactggcgaggaaggagaatccaaagtaaccgagcaccataccagaaacaagaatgccaaatccaacgcaaataagaacaacagagaaacctctgcggacacttccaaaggctccgaggttcaaaatcagaaaccagactacattcatgtccgagcgcgtcgtggacaagccacggatagtcatagcttagctgaaagagtaaggagggagaagattagcgagagaatgaagtatttgcaagatttaataccgggttgcaacaaagttgcagggaaagctggaatgcttgatgaaattattaactatgttcagtctcttcaacgccaagttgagttcttgtcaatgaaattagcggctgtaaacccaaggcttgacttcaacattgacgaactgtttgccaaagaggtgtttccttcttgtgctcaaagttttccaaacatagggattccctcagatatgagtattagtaacaacccttcgtatcttcagttcaattcagcgcagcaacttgtatcgtgctgtggtggattaataaacagcatgggaataagccctcccaacatgggactccgaacgaacattattagtactagcactgtacctttgcccgaaacttttcttgactcttcctgtttcactcaaattctaccctcctcaaattgggaaggtggtgatttccaaagcctttacaacgttgcttttgatcaagggcgaacagcatcttttccccctcagccatttacaggtctagttgaagctagcaatctaaaaatggagatgtaaaccagataatccattattacaatatgttggattaggtcactcggaatgcctttgtcaagatttttttctattagagtacatcgcatatattggttgtatactgctccgtagaataaataagatcatattaac

SEQ ID NO: 9927 - protein, 445 aa, Glycine max
  peptide (1)..(445): Ceres Seq. ID no. 15226541
  misc_feature (242)..(292): Pfam Name: Pfam Description:  Helix-loop-helix DNA-binding domain
  misc_feature (132)..(355): NCBI GI NO: 7487656 NR Description: hypothetical protein T4L20
  misc_feature (132)..(355): NCBI GI NO: 20127066 NR Description: putative bHLH transcription factor
  misc_feature (132)..(355): NCBI GI NO: 22329164 NR Description: bHLH protein [Arabidopsis thaliana]
  misc_feature (132)..(355): NCBI GI NO: 21539493 NR Description: unknown protein [Arabidopsis thaliana]
  misc_feature (144)..(376): NCBI GI NO: 20127044 NR Description: putative bHLH transcription factor
  misc_feature (130)..(394): NCBI GI NO: 15239013 NR Description: bHLH protein family [Arabidopsis thaliana]
  misc_feature (144)..(376): NCBI GI NO: 30697769 NR Description: DNA-binding protein -related
  misc_feature (144)..(376): NCBI GI NO: 15221563 NR Description: DNA-binding protein -related
  misc_feature (130)..(394): NCBI GI NO: 20127085 NR Description: putative bHLH transcription factor
  misc_feature (140)..(444): NCBI GI NO: 29647487 NR Description: OJ1191_A10.7
SLTTFHASSVCSHTSFFSFCCFGANSTTTPCLILKNNELQQPTMLHCLNTSCSDITVLERQREATIKCQNHQPPYLTDFNAVFPSSSSSSSSSSSSSHSQGLLMMCSDSSLGQVLTHSVKPDPGVWPEFGFLPAISRTCSRDGDLVSPKENMASGKENAKKRKPQNSKVVAEIDNNKDKDKRVKVTGEEGESKVTEHHTRNKNAKSNANKNNRETSADTSKGSEVQNQKPDYIHVRARRGQATDSHSLAERVRREKISERMKYLQDLIPGCNKVAGKAGMLDEIINYVQSLQRQVEFLSMKLAAVNPRLDFNIDELFAKEVFPSCAQSFPNIGIPSDMSISNNPSYLQFNSAQQLVSCCGGLINSMGISPPNMGLRTNIISTSTVPLPETFLDSSCFTQILPSSNWEGGDFQSLYNVAFDQGRTASFPPQPFTGLVEASNLKMEM

SEQ ID NO: 9928 - protein, 402 aa, Glycine max
  peptide (1)..(402): Ceres Seq. ID no. 15226542
  misc_feature (199)..(249): Pfam Name: Pfam Description:  Helix-loop-helix DNA-binding domain
  misc_feature (89)..(312): NCBI GI NO: 7487656 NR Description: hypothetical protein T4L20
  misc_feature (89)..(312): NCBI GI NO: 20127066 NR Description: putative bHLH transcription factor
  misc_feature (89)..(312): NCBI GI NO: 22329164 NR Description: bHLH protein [Arabidopsis thaliana]
  misc_feature (89)..(312): NCBI GI NO: 21539493 NR Description: unknown protein [Arabidopsis thaliana]
  misc_feature (101)..(333): NCBI GI NO: 20127044 NR Description: putative bHLH transcription factor
  misc_feature (87)..(351): NCBI GI NO: 15239013 NR Description: bHLH protein family [Arabidopsis thaliana]
  misc_feature (101)..(333): NCBI GI NO: 30697769 NR Description: DNA-binding protein -related
  misc_feature (101)..(333): NCBI GI NO: 15221563 NR Description: DNA-binding protein -related
  misc_feature (87)..(351): NCBI GI NO: 20127085 NR Description: putative bHLH transcription factor
  misc_feature (97)..(401): NCBI GI NO: 29647487 NR Description: OJ1191_A10.7
MLHCLNTSCSDITVLERQREATIKCQNHQPPYLTDFNAVFPSSSSSSSSSSSSSHSQGLLMMCSDSSLGQVLTHSVKPDPGVWPEFGFLPAISRTCSRDGDLVSPKENMASGKENAKKRKPQNSKVVAEIDNNKDKDKRVKVTGEEGESKVTEHHTRNKNAKSNANKNNRETSADTSKGSEVQNQKPDYIHVRARRGQATDSHSLAERVRREKISERMKYLQDLIPGCNKVAGKAGMLDEIINYVQSLQRQVEFLSMKLAAVNPRLDFNIDELFAKEVFPSCAQSFPNIGIPSDMSISNNPSYLQFNSAQQLVSCCGGLINSMGISPPNMGLRTNIISTSTVPLPETFLDSSCFTQILPSSNWEGGDFQSLYNVAFDQGRTASFPPQPFTGLVEASNLKMEM

SEQ ID NO: 9929 - protein, 342 aa, Glycine max
  peptide (1)..(342): Ceres Seq. ID no. 15226543
  misc_feature (139)..(189): Pfam Name: Pfam Description:  Helix-loop-helix DNA-binding domain
  misc_feature (29)..(252): NCBI GI NO: 7487656 NR Description: hypothetical protein T4L20
  misc_feature (29)..(252): NCBI GI NO: 22329164 NR Description: bHLH protein [Arabidopsis thaliana]
  misc_feature (29)..(252): NCBI GI NO: 20127066 NR Description: putative bHLH transcription factor
  misc_feature (29)..(252): NCBI GI NO: 21539493 NR Description: unknown protein [Arabidopsis thaliana]
  misc_feature (41)..(273): NCBI GI NO: 20127044 NR Description: putative bHLH transcription factor
  misc_feature (27)..(291): NCBI GI NO: 15239013 NR Description: bHLH protein family [Arabidopsis thaliana]
  misc_feature (41)..(273): NCBI GI NO: 30697769 NR Description: DNA-binding protein -related
  misc_feature (41)..(273): NCBI GI NO: 15221563 NR Description: DNA-binding protein -related
  misc_feature (27)..(291): NCBI GI NO: 20127085 NR Description: putative bHLH transcription factor
  misc_feature (37)..(341): NCBI GI NO: 29647487 NR Description: OJ1191_A10.7
MMCSDSSLGQVLTHSVKPDPGVWPEFGFLPAISRTCSRDGDLVSPKENMASGKENAKKRKPQNSKVVAEIDNNKDKDKRVKVTGEEGESKVTEHHTRNKNAKSNANKNNRETSADTSKGSEVQNQKPDYIHVRARRGQATDSHSLAERVRREKISERMKYLQDLIPGCNKVAGKAGMLDEIINYVQSLQRQVEFLSMKLAAVNPRLDFNIDELFAKEVFPSCAQSFPNIGIPSDMSISNNPSYLQFNSAQQLVSCCGGLINSMGISPPNMGLRTNIISTSTVPLPETFLDSSCFTQILPSSNWEGGDFQSLYNVAFDQGRTASFPPQPFTGLVEASNLKMEM

SEQ ID NO: 9930 - DNA, 1351 bp, Glycine max
  misc_feature (1)..(1351): Ceres Seq. ID no. 15169380
atgagtattacaagacaatttaacaattgatgcaatgaagaacattaaaaaatgaagataaaatagtgtatcttgcagccatgattgggaaaacaagccataagcatagagtttaattgaaatctattgtcagttgaaactgagtagttatcagtggaaagatgagggaagggtgcagcaaagtatgcgtcacaggagctagtggttacatagcttcctctctggtgaagaagctcttggccaagggtcacagcgtccatgcaactctcagagacttgaagaacgagtcaaaggtgagcctcttaaagagccttccacaatcagaagggaaactggtgctgtttgaagctgatatttacaacccaaatgactttgaccatgcaattgaaggctgtgagtttgtctttcatgttgctactcccatgatccatgatcctggctcccagtacaagaatacttctgaagcggcaatggctgcgtcaaaaagcattgccctgtcttgtgtgagagcagggacggtgaagcgtctcatctacaccgcgtctgttgtttctgcttcttctttgaaagaagatgggagtggtttcaaagatgcaatggatgaaacttgctggacccctctaaatgattccttggcatatgtatacccagatgatcctttttataaggactatacttattcaaagacactgtcggagaaacatgtgttgagctacgggaacgatgaaaatggtggaggattggaggtggtaacactcccttgtgggctagtgggaggcgacacccttcaatcttctacacccgttagcggagtagtttgtatcgcacagatcatgcaagatgcaagggcgtacatatcactcaagttcctaaagaaattgctggggaaaattcctcttgtacacattgatgatgtctgtgaagctcatattttctgcatggaaagtacctcgatcagtggaagattcttgtgtgcaagttcatatatttcattagaagagatggctaatcatttcgctcttcattatccagaattcaatgtgaaacaagaatatgaagatgagctgaagaaggatatcaagtgggcctcaacaaagctgtgtgacaaaggatttgtatacaaatatgacgccaagatgatattagatgattgtatcaaatgtgcaagaaggatgggtgatctctagtctccatctacacccatgcttgccatatctgcttgtaatacgatatatagcaggcgtctgcctcatttcttctcgttccctatccaaatgttattaccattgtttttgtcattttgttaaaaaataaactcagtttcaaatcaattagaaaagtgaattaactg

SEQ ID NO: 9931 - protein, 341 aa, Glycine max
  peptide (1)..(341): Ceres Seq. ID no. 15169381
  misc_feature (8)..(128): Pfam Name: Pfam Description:  NAD dependent epimerase/dehydratase family
  misc_feature (6)..(341): NCBI GI NO: 33146534 NR Description: putative NADPH HC toxin reductase
  misc_feature (6)..(341): NCBI GI NO: 33146535 NR Description: putative NADPH HC toxin reductase
  misc_feature (7)..(339): NCBI GI NO: 34393584 NR Description: putative NADPH HC toxin reductase
  misc_feature (8)..(339): NCBI GI NO: 33146536 NR Description: putative NADPH HC toxin reductase
  misc_feature (7)..(341): NCBI GI NO: 2911362 NR Description: NADPH HC toxin reductase [Zea mays]
  misc_feature (7)..(341): NCBI GI NO: 7431412 NR Description: HC-toxin reductase (EC 1.-.-.-) - barley
  misc_feature (7)..(341): NCBI GI NO: 7431417 NR Description: NADPH HC toxin reductase hm1 - maize
  misc_feature (7)..(341): NCBI GI NO: 7431414 NR Description: NADPH HC toxin reductase - maize
  misc_feature (7)..(341): NCBI GI NO: 7431416 NR Description: NADPH HC toxin reductase - maize
  misc_feature (4)..(333): NCBI GI NO: 6689826 NR Description: DFR-like protein [Arabidopsis thaliana]
MREGCSKVCVTGASGYIASSLVKKLLAKGHSVHATLRDLKNESKVSLLKSLPQSEGKLVLFEADIYNPNDFDHAIEGCEFVFHVATPMIHDPGSQYKNTSEAAMAASKSIALSCVRAGTVKRLIYTASVVSASSLKEDGSGFKDAMDETCWTPLNDSLAYVYPDDPFYKDYTYSKTLSEKHVLSYGNDENGGGLEVVTLPCGLVGGDTLQSSTPVSGVVCIAQIMQDARAYISLKFLKKLLGKIPLVHIDDVCEAHIFCMESTSISGRFLCASSYISLEEMANHFALHYPEFNVKQEYEDELKKDIKWASTKLCDKGFVYKYDAKMILDDCIKCARRMGDL

SEQ ID NO: 9932 - protein, 254 aa, Glycine max
  peptide (1)..(254): Ceres Seq. ID no. 15169382
  misc_feature (1)..(254): NCBI GI NO: 33146534 NR Description: putative NADPH HC toxin reductase
  misc_feature (1)..(254): NCBI GI NO: 33146535 NR Description: putative NADPH HC toxin reductase
  misc_feature (1)..(252): NCBI GI NO: 34393584 NR Description: putative NADPH HC toxin reductase
  misc_feature (1)..(252): NCBI GI NO: 33146536 NR Description: putative NADPH HC toxin reductase
  misc_feature (1)..(254): NCBI GI NO: 2911362 NR Description: NADPH HC toxin reductase [Zea mays]
  misc_feature (1)..(254): NCBI GI NO: 7431412 NR Description: HC-toxin reductase (EC 1.-.-.-) - barley
  misc_feature (1)..(254): NCBI GI NO: 7431417 NR Description: NADPH HC toxin reductase hm1 - maize
  misc_feature (1)..(254): NCBI GI NO: 7431414 NR Description: NADPH HC toxin reductase - maize
  misc_feature (1)..(254): NCBI GI NO: 7431416 NR Description: NADPH HC toxin reductase - maize
  misc_feature (1)..(246): NCBI GI NO: 6689826 NR Description: DFR-like protein [Arabidopsis thaliana]
MIHDPGSQYKNTSEAAMAASKSIALSCVRAGTVKRLIYTASVVSASSLKEDGSGFKDAMDETCWTPLNDSLAYVYPDDPFYKDYTYSKTLSEKHVLSYGNDENGGGLEVVTLPCGLVGGDTLQSSTPVSGVVCIAQIMQDARAYISLKFLKKLLGKIPLVHIDDVCEAHIFCMESTSISGRFLCASSYISLEEMANHFALHYPEFNVKQEYEDELKKDIKWASTKLCDKGFVYKYDAKMILDDCIKCARRMGDL

SEQ ID NO: 9933 - protein, 238 aa, Glycine max
  peptide (1)..(238): Ceres Seq. ID no. 15169383
  misc_feature (1)..(238): NCBI GI NO: 33146534 NR Description: putative NADPH HC toxin reductase
  misc_feature (1)..(238): NCBI GI NO: 33146535 NR Description: putative NADPH HC toxin reductase
  misc_feature (1)..(236): NCBI GI NO: 34393584 NR Description: putative NADPH HC toxin reductase
  misc_feature (1)..(236): NCBI GI NO: 33146536 NR Description: putative NADPH HC toxin reductase
  misc_feature (1)..(238): NCBI GI NO: 2911362 NR Description: NADPH HC toxin reductase [Zea mays]
  misc_feature (1)..(238): NCBI GI NO: 7431412 NR Description: HC-toxin reductase (EC 1.-.-.-) - barley
  misc_feature (1)..(238): NCBI GI NO: 7431417 NR Description: NADPH HC toxin reductase hm1 - maize
  misc_feature (1)..(238): NCBI GI NO: 7431414 NR Description: NADPH HC toxin reductase - maize
  misc_feature (1)..(238): NCBI GI NO: 7431416 NR Description: NADPH HC toxin reductase - maize
  misc_feature (1)..(230): NCBI GI NO: 6689826 NR Description: DFR-like protein [Arabidopsis thaliana]
MAASKSIALSCVRAGTVKRLIYTASVVSASSLKEDGSGFKDAMDETCWTPLNDSLAYVYPDDPFYKDYTYSKTLSEKHVLSYGNDENGGGLEVVTLPCGLVGGDTLQSSTPVSGVVCIAQIMQDARAYISLKFLKKLLGKIPLVHIDDVCEAHIFCMESTSISGRFLCASSYISLEEMANHFALHYPEFNVKQEYEDELKKDIKWASTKLCDKGFVYKYDAKMILDDCIKCARRMGDL

SEQ ID NO: 9934 - DNA, 1450 bp, Glycine max
  misc_feature (1)..(1450): Ceres Seq. ID no. 14308594
accgatattcaaaagatgggcatccaacatgtgctggttttgccatttcctgctcaagggcatgtcaatcctctgatgctcttgtcaaaaaaactagctgaacatggcttcaaagtcacttttgtcaacacagatttcaaccacaagagagtgttgagtgcaacaaatgaggagggatcagcagtgagattaatctcaatcccagatggtttaggccctgaggatgacagaaataacgtggtcaatttatgttcggaatccttaagcagtaccatgacttctgcccttgagaaggtcataaaggatattgatgcacttgatagtgctagtgagaaaatcacaggtatagtggctgatgtgaacatggcatgggccttggaactcacagataagctaggaatcaaaggtgctgtcttctgccctgcttcagcagctgttttagtcttgggtgagaacattccaaacctcattcaagatgggatcataaataccgaagggttcccgattataaaagggaaatttcaactatccccagaaatgccaattatggacacagctgacattccatggtgcagcttaggtgacccaaccatgcacaaggttatatataatcatgcgtcaaagattatacgatattcacatttaacagattggtggcttggaaacaccacaagtgaccttgaacctggtgctatatctttgtctccaaagatcctaccaattggtccactcatagggagtggtaatgacattagatcattggggcaattctgggaagaagacgtctcttgcttgacctggcttgatcaacaaccaccttgttctgtcatatacgttgcctttggtagctctactatttttgaccctcatcaactcaaggaactagctcttggacttgacctcacaaacaggccttttctgtgggttgttcgtgaggatgccagtggaagcaccaaaatcacatacccagatgaattccaaggcacttgtggtaaaattgttaaatgggcacctcaacaaaaggtgttaagccaccctgcaatagcttgttttattagtcactgtggttggaattctaccttggaaggtgtgtccaatggggtacctttcttgtgttggccatattatactgaccaattagttgacaaggcttacatttgtgatatgtggaaggtgggtttgggattcgatttggatgacaaagggctgatatcacgttgggagataaagaagaaagtagaccaaatccttggagatgagaacataaggggaaggtctcaaaaactgaaggaaatggttctaagtaacattgcagaagggggacaatcctatgagaattttaacaagtttgtggagtggctcaaggaataaaaatgtatttgttgatgccctgatgttgtgaacaatgtttatgatgttcctgaaaaatattgaacatttaaatttagcc

SEQ ID NO: 9935 - protein, 456 aa, Glycine max
  peptide (1)..(456): Ceres Seq. ID no. 14308595
  misc_feature (11)..(455): Pfam Name: Pfam Description:  UDP-glucoronosyl and UDP-glucosyl transferase
  misc_feature (11)..(456): NCBI GI NO: 10953887 NR Description: UDP-glucosyltransferase HRA25 [Phaseolus vulgaris]
  misc_feature (6)..(455): NCBI GI NO: 21326124 NR Description: putative glucosyl transferase [Sorghum bicolor]
  misc_feature (10)..(456): NCBI GI NO: 13236650 NR Description: putative glucosyltransferase [Oryza sativa]
  misc_feature (6)..(456): NCBI GI NO: 21326123 NR Description: putative glucosyl transferase [Sorghum bicolor]
  misc_feature (10)..(456): NCBI GI NO: 13236653 NR Description: putative glucosyltransferase [Oryza sativa]
  misc_feature (6)..(455): NCBI GI NO: 21326125 NR Description: putative glucosyl transferase [Sorghum bicolor]
  misc_feature (4)..(455): NCBI GI NO: 15232846 NR Description: glycosyltransferase family [Arabidopsis thaliana]
  misc_feature (11)..(456): NCBI GI NO: 21326127 NR Description: putative glucosyl transferase [Sorghum bicolor]
  misc_feature (10)..(456): NCBI GI NO: 13236656 NR Description: putative glucosyltransferase [Oryza sativa]
  misc_feature (7)..(455): NCBI GI NO: 13236658 NR Description: putative glucosyltransferase [Oryza sativa]
TDIQKMGIQHVLVLPFPAQGHVNPLMLLSKKLAEHGFKVTFVNTDFNHKRVLSATNEEGSAVRLISIPDGLGPEDDRNNVVNLCSESLSSTMTSALEKVIKDIDALDSASEKITGIVADVNMAWALELTDKLGIKGAVFCPASAAVLVLGENIPNLIQDGIINTEGFPIIKGKFQLSPEMPIMDTADIPWCSLGDPTMHKVIYNHASKIIRYSHLTDWWLGNTTSDLEPGAISLSPKILPIGPLIGSGNDIRSLGQFWEEDVSCLTWLDQQPPCSVIYVAFGSSTIFDPHQLKELALGLDLTNRPFLWVVREDASGSTKITYPDEFQGTCGKIVKWAPQQKVLSHPAIACFISHCGWNSTLEGVSNGVPFLCWPYYTDQLVDKAYICDMWKVGLGFDLDDKGLISRWEIKKKVDQILGDENIRGRSQKLKEMVLSNIAEGGQSYENFNKFVEWLKE

SEQ ID NO: 9936 - protein, 451 aa, Glycine max
  peptide (1)..(451): Ceres Seq. ID no. 14308596
  misc_feature (6)..(450): Pfam Name: Pfam Description:  UDP-glucoronosyl and UDP-glucosyl transferase
  misc_feature (6)..(451): NCBI GI NO: 10953887 NR Description: UDP-glucosyltransferase HRA25 [Phaseolus vulgaris]
  misc_feature (1)..(450): NCBI GI NO: 21326124 NR Description: putative glucosyl transferase [Sorghum bicolor]
  misc_feature (5)..(451): NCBI GI NO: 13236650 NR Description: putative glucosyltransferase [Oryza sativa]
  misc_feature (1)..(451): NCBI GI NO: 21326123 NR Description: putative glucosyl transferase [Sorghum bicolor]
  misc_feature (5)..(451): NCBI GI NO: 13236653 NR Description: putative glucosyltransferase [Oryza sativa]
  misc_feature (1)..(450): NCBI GI NO: 21326125 NR Description: putative glucosyl transferase [Sorghum bicolor]
  misc_feature (1)..(450): NCBI GI NO: 15232846 NR Description: glycosyltransferase family [Arabidopsis thaliana]
  misc_feature (6)..(451): NCBI GI NO: 21326127 NR Description: putative glucosyl transferase [Sorghum bicolor]
  misc_feature (5)..(451): NCBI GI NO: 13236656 NR Description: putative glucosyltransferase [Oryza sativa]
  misc_feature (2)..(450): NCBI GI NO: 13236658 NR Description: putative glucosyltransferase [Oryza sativa]
MGIQHVLVLPFPAQGHVNPLMLLSKKLAEHGFKVTFVNTDFNHKRVLSATNEEGSAVRLISIPDGLGPEDDRNNVVNLCSESLSSTMTSALEKVIKDIDALDSASEKITGIVADVNMAWALELTDKLGIKGAVFCPASAAVLVLGENIPNLIQDGIINTEGFPIIKGKFQLSPEMPIMDTADIPWCSLGDPTMHKVIYNHASKIIRYSHLTDWWLGNTTSDLEPGAISLSPKILPIGPLIGSGNDIRSLGQFWEEDVSCLTWLDQQPPCSVIYVAFGSSTIFDPHQLKELALGLDLTNRPFLWVVREDASGSTKITYPDEFQGTCGKIVKWAPQQKVLSHPAIACFISHCGWNSTLEGVSNGVPFLCWPYYTDQLVDKAYICDMWKVGLGFDLDDKGLISRWEIKKKVDQILGDENIRGRSQKLKEMVLSNIAEGGQSYENFNKFVEWLKE

SEQ ID NO: 9937 - protein, 431 aa, Glycine max
  peptide (1)..(431): Ceres Seq. ID no. 14308597
  misc_feature (1)..(430): Pfam Name: Pfam Description:  UDP-glucoronosyl and UDP-glucosyl transferase
  misc_feature (1)..(431): NCBI GI NO: 10953887 NR Description: UDP-glucosyltransferase HRA25 [Phaseolus vulgaris]
  misc_feature (1)..(430): NCBI GI NO: 21326124 NR Description: putative glucosyl transferase [Sorghum bicolor]
  misc_feature (1)..(431): NCBI GI NO: 13236650 NR Description: putative glucosyltransferase [Oryza sativa]
  misc_feature (1)..(431): NCBI GI NO: 21326123 NR Description: putative glucosyl transferase [Sorghum bicolor]
  misc_feature (1)..(431): NCBI GI NO: 13236653 NR Description: putative glucosyltransferase [Oryza sativa]
  misc_feature (1)..(430): NCBI GI NO: 21326125 NR Description: putative glucosyl transferase [Sorghum bicolor]
  misc_feature (1)..(430): NCBI GI NO: 15232846 NR Description: glycosyltransferase family [Arabidopsis thaliana]
  misc_feature (1)..(431): NCBI GI NO: 21326127 NR Description: putative glucosyl transferase [Sorghum bicolor]
  misc_feature (1)..(431): NCBI GI NO: 13236656 NR Description: putative glucosyltransferase [Oryza sativa]
  misc_feature (1)..(430): NCBI GI NO: 13236658 NR Description: putative glucosyltransferase [Oryza sativa]
MLLSKKLAEHGFKVTFVNTDFNHKRVLSATNEEGSAVRLISIPDGLGPEDDRNNVVNLCSESLSSTMTSALEKVIKDIDALDSASEKITGIVADVNMAWALELTDKLGIKGAVFCPASAAVLVLGENIPNLIQDGIINTEGFPIIKGKFQLSPEMPIMDTADIPWCSLGDPTMHKVIYNHASKIIRYSHLTDWWLGNTTSDLEPGAISLSPKILPIGPLIGSGNDIRSLGQFWEEDVSCLTWLDQQPPCSVIYVAFGSSTIFDPHQLKELALGLDLTNRPFLWVVREDASGSTKITYPDEFQGTCGKIVKWAPQQKVLSHPAIACFISHCGWNSTLEGVSNGVPFLCWPYYTDQLVDKAYICDMWKVGLGFDLDDKGLISRWEIKKKVDQILGDENIRGRSQKLKEMVLSNIAEGGQSYENFNKFVEWLKE

SEQ ID NO: 9938 - DNA, 1838 bp, Glycine max
  misc_feature (1)..(1838): Ceres Seq. ID no. 14312951
aacgctgcctccaaggtgatcgatcatcaatccatccatttaattgcatttctagaaattgaattattagtttttttctcctccttggtctgcatttgcttgattccgtgatttagttttgtaacagaaaacacaagagggtaaaatctttgactctaataagtacaattattgaatagggttttggaacagaaatgagaatagggtaaatgaatatatattaggaaaaaaagttaaatacatttttagtcctttaagctatgtttgagattaaaaatctattatatttgtagagattaaaaatatttaatattttaaaatattattaagataaatatattgtcaatttacatgtaatttttttacaatatcaattaattataagtcatacaaattgatataaattaaagtaattattataaaaatgagcaaacttttatcattcagcgcaagaatttgtgattgattagacaataattgtgcattctaattataattaatagtttttttttataatttttatcttttaataattgagtataattaacatgatatgggagttttaaaaagaatagttaaagggtaaagtaaggaaataattaaaagataaagtagtgaatagtttcgaaagtagttaaagaataaaatagtctagttaaaaacaaatgttttgtctgtgttaatttgttcctaatgctacgaagaagcaaatgtagtccttgggtaaatttaatttttctaatgttaaggaccaaatttaccagtattgtaaatttcagggacaaaatagtgttaataatgtcaaggacccaaattgatcgtttgtgccaaactagattaaattgatgttttgcttattcttcttatggtattcatggaataaacattagagtgcttgtaaatgagtaatgactactggcccaatatttcttcaaaaaaaatatgtttggggctctttgaaaatttaactaaaacattcattagttgttctctccccttctatctgagaaaattagtcactacacattgtcaagggtgtggacagtgttcacaagtcaatggatgcggttgaagcagcaaagttgttagctcggacaagtggtgcaatagttgcagtgtcaggagccacggacattgtcacagatggaaatcgagttgttggggctcataatggggtggcgatgatgcagaaaataacagcaacgggatgttcagtcactgcactgattgctgcctttgttgccgttgacaaaagccatgctttggatgccgcagtgtctgcattagctgtatttggtgttgctggtgagctaggaatgaagatggctaaaggtcctgcatcgcttcgaatgcacttgatagatgaactctatgggcttgatgaatctgccttgaattctcatgttaatgtcaccagtttgtgatgaaatgtgaagatctgcattcaaattgataattaattatcataaaattcgcatgtatcatagttgatagttgtctatcaatggtgtccattggttgaattggaaggtggatcgtattagttagcaatagagatccctctataatttatgtcaataataatcactggtagctacctctggtaataacagtttgttcctgtagttaaaaatatctcatggtttcagcccttaatttagtttggtcaacattttgtatgtataggtttattttgttgaaagttaacttcgtaatttctgtttgatgtataggaatgggtttggtggaaattgtttatgaactcctgatgcattgttaatcagattgtgaaccggtaaagttgagtgtatatatgaattaacaaataacattttctc

SEQ ID NO: 9939 - protein, 121 aa, Glycine max
  peptide (1)..(121): Ceres Seq. ID no. 14312952
  misc_feature (1)..(110): Pfam Name: Pfam Description:  Hydroxyethylthiazole kinase family
  misc_feature (1)..(121): NCBI GI NO: 15229565 NR Description: hydoxyethylthiazole kinase -related
  misc_feature (1)..(119): NCBI GI NO: 34915114 NR Description: putative hydoxyethylthiazole kinase
  misc_feature (1)..(118): NCBI GI NO: 28899986 NR Description: putative hydroxyethylthiazole kinase
  misc_feature (1)..(113): NCBI GI NO: 22960557 NR Description: hypothetical protein [Rhodobacter sphaeroides]
  misc_feature (1)..(121): NCBI GI NO: 21229336 NR Description: Hydroxyethylthiazole kinase
  misc_feature (1)..(118): NCBI GI NO: 23111999 NR Description: hypothetical protein
  misc_feature (1)..(117): NCBI GI NO: 23049619 NR Description: hypothetical protein [Methanosarcina barkeri]
  misc_feature (1)..(114): NCBI GI NO: 20808607 NR Description: Hydroxyethylthiazole kinase, sugar kinase family
  misc_feature (1)..(118): NCBI GI NO: 19552679 NR Description: hydroxyethylthiazole kinase
  misc_feature (1)..(117): NCBI GI NO: 20091547 NR Description: hydroxyethylthiazole kinase
MDAVEAAKLLARTSGAIVAVSGATDIVTDGNRVVGAHNGVAMMQKITATGCSVTALIAAFVAVDKSHALDAAVSALAVFGVAGELGMKMAKGPASLRMHLIDELYGLDESALNSHVNVTSL

SEQ ID NO: 9940 - protein, 80 aa, Glycine max
  peptide (1)..(80): Ceres Seq. ID no. 14312953
  misc_feature (1)..(69): Pfam Name: Pfam Description:  Hydroxyethylthiazole kinase family
  misc_feature (1)..(80): NCBI GI NO: 15229565 NR Description: hydoxyethylthiazole kinase -related
  misc_feature (1)..(78): NCBI GI NO: 34915114 NR Description: putative hydoxyethylthiazole kinase
  misc_feature (1)..(77): NCBI GI NO: 28899986 NR Description: putative hydroxyethylthiazole kinase
  misc_feature (1)..(72): NCBI GI NO: 22960557 NR Description: hypothetical protein [Rhodobacter sphaeroides]
  misc_feature (1)..(80): NCBI GI NO: 21229336 NR Description: Hydroxyethylthiazole kinase
  misc_feature (1)..(77): NCBI GI NO: 23111999 NR Description: hypothetical protein
  misc_feature (1)..(76): NCBI GI NO: 23049619 NR Description: hypothetical protein [Methanosarcina barkeri]
  misc_feature (1)..(73): NCBI GI NO: 20808607 NR Description: Hydroxyethylthiazole kinase, sugar kinase family
  misc_feature (1)..(77): NCBI GI NO: 19552679 NR Description: hydroxyethylthiazole kinase
  misc_feature (1)..(76): NCBI GI NO: 20091547 NR Description: hydroxyethylthiazole kinase
MMQKITATGCSVTALIAAFVAVDKSHALDAAVSALAVFGVAGELGMKMAKGPASLRMHLIDELYGLDESALNSHVNVTSL

SEQ ID NO: 9941 - protein, 79 aa, Glycine max
  peptide (1)..(79): Ceres Seq. ID no. 14312954
  misc_feature (1)..(68): Pfam Name: Pfam Description:  Hydroxyethylthiazole kinase family
  misc_feature (1)..(79): NCBI GI NO: 15229565 NR Description: hydoxyethylthiazole kinase -related
  misc_feature (1)..(77): NCBI GI NO: 34915114 NR Description: putative hydoxyethylthiazole kinase
  misc_feature (1)..(76): NCBI GI NO: 28899986 NR Description: putative hydroxyethylthiazole kinase
  misc_feature (1)..(71): NCBI GI NO: 22960557 NR Description: hypothetical protein [Rhodobacter sphaeroides]
  misc_feature (1)..(79): NCBI GI NO: 21229336 NR Description: Hydroxyethylthiazole kinase
  misc_feature (1)..(76): NCBI GI NO: 23111999 NR Description: hypothetical protein
  misc_feature (1)..(75): NCBI GI NO: 23049619 NR Description: hypothetical protein [Methanosarcina barkeri]
  misc_feature (1)..(72): NCBI GI NO: 20808607 NR Description: Hydroxyethylthiazole kinase, sugar kinase family
  misc_feature (1)..(76): NCBI GI NO: 19552679 NR Description: hydroxyethylthiazole kinase
  misc_feature (1)..(75): NCBI GI NO: 20091547 NR Description: hydroxyethylthiazole kinase
MQKITATGCSVTALIAAFVAVDKSHALDAAVSALAVFGVAGELGMKMAKGPASLRMHLIDELYGLDESALNSHVNVTSL

SEQ ID NO: 9942 - DNA, 1290 bp, Glycine max
  misc_feature (1)..(1290): Ceres Seq. ID no. 15169419
aaagcactatccattccattccacgttccaagctaagatctgggctttggcttaaaggaatattccgtggggtgatcatagtttttaccctgttcttatgatgggtgactcagaggtggcaaagttcggcttaaaagtcgggaagaatgagaaaaatgggttcccaaggggactagatcctgcaatatccaagttttttgtgcagctccaaagtgttgttaagtctcgacttagtagattagcaaaacaggatggaatgagtttgatgagttctgtccaaagaaaaggggataagtctttcagttactctgaagctgaactaaatgagcaactgcaagcatggagagaaaatccatcttgggttgacaagcctccactaataaaggtcactgctcccaaaggttctctttgcaaccttgatgtagaagttgatgttggcctaccccctgatgcagtatataatatagtgatagatcctgacaataggagagttttcaaaaatatcaaagaagtggtatccagaaaagtgttggttgatgagggtcataggcaagtggttgatcttgaccaagcagccatttggaaatttctttggtggtctgggactatatcaatcaatgttttggtagatcaaaacagaaaggtcagttctatgaagttcaagcaaaccaaggctggattcatgaaaaaatttgagggctgctggagagtagagcctttatttgttgacgaagcaatgtgccatccctttaagccagtgacaaaggaagactattatgcatgtgcaagaggcaaaggaagaattggatctaaagttagcctgaaacaaacacttcagccatccattgtccctccccctcccctatcatggtatttgaggggaattaccgcccggacgactgagatgcttataaatgatatgcttgcagaaactgctagaatcagaggaggatatgaggctgaaaagtctaaggcagaggagcttcagggaaaacctggtgaaaatgtggacctggtttctaacacaagtgacattaaagaaagatggaaattgcgtagagaaaatgcaaagcatagccatagaagactgctgaccaagtgatattcctatgtttgttttattttttcagcaatctatctagattgttacatgtagtccagtttaaaggattctaatgtatgcattacacaatgttaaagtcactaattccagctcattgcatgacatttcagtcggatgagttgatgtatccaatagcatagcaagagggaaacattgcagttcttttc

SEQ ID NO: 9943 - protein, 334 aa, Glycine max
  peptide (1)..(334): Ceres Seq. ID no. 15169420
  misc_feature (167)..(266): Pfam Name: Pfam Description:  Domain of unknown function DUF220
  misc_feature (11)..(331): NCBI GI NO: 21592433 NR Description: unknown [Arabidopsis thaliana]
  misc_feature (11)..(331): NCBI GI NO: 18409585 NR Description: expressed protein [Arabidopsis thaliana]
  misc_feature (33)..(281): NCBI GI NO: 2129655 NR Description: hypothetical protein OBP32 - Arabidopsis thaliana
  misc_feature (2)..(333): NCBI GI NO: 18395257 NR Description: expressed protein [Arabidopsis thaliana]
  misc_feature (2)..(333): NCBI GI NO: 21554971 NR Description: unknown [Arabidopsis thaliana]
  misc_feature (2)..(333): NCBI GI NO: 8778583 NR Description: F28C11.19 [Arabidopsis thaliana]
  misc_feature (57)..(284): NCBI GI NO: 15220781 NR Description: OBP32pep protein -related [Arabidopsis thaliana]
  misc_feature (38)..(282): NCBI GI NO: 15220845 NR Description: OBP32pep protein -related [Arabidopsis thaliana]
  misc_feature (42)..(282): NCBI GI NO: 15220802 NR Description: OBP32pep protein -related [Arabidopsis thaliana]
  misc_feature (136)..(326): NCBI GI NO: 8778583 NR Description: F28C11.19 [Arabidopsis thaliana]
MMGDSEVAKFGLKVGKNEKNGFPRGLDPAISKFFVQLQSVVKSRLSRLAKQDGMSLMSSVQRKGDKSFSYSEAELNEQLQAWRENPSWVDKPPLIKVTAPKGSLCNLDVEVDVGLPPDAVYNIVIDPDNRRVFKNIKEVVSRKVLVDEGHRQVVDLDQAAIWKFLWWSGTISINVLVDQNRKVSSMKFKQTKAGFMKKFEGCWRVEPLFVDEAMCHPFKPVTKEDYYACARGKGRIGSKVSLKQTLQPSIVPPPPLSWYLRGITARTTEMLINDMLAETARIRGGYEAEKSKAEELQGKPGENVDLVSNTSDIKERWKLRRENAKHSHRRLLTK

SEQ ID NO: 9944 - protein, 333 aa, Glycine max
  peptide (1)..(333): Ceres Seq. ID no. 15169421
  misc_feature (166)..(265): Pfam Name: Pfam Description:  Domain of unknown function DUF220
  misc_feature (10)..(330): NCBI GI NO: 21592433 NR Description: unknown [Arabidopsis thaliana]
  misc_feature (10)..(330): NCBI GI NO: 18409585 NR Description: expressed protein [Arabidopsis thaliana]
  misc_feature (32)..(280): NCBI GI NO: 2129655 NR Description: hypothetical protein OBP32 - Arabidopsis thaliana
  misc_feature (1)..(332): NCBI GI NO: 18395257 NR Description: expressed protein [Arabidopsis thaliana]
  misc_feature (1)..(332): NCBI GI NO: 21554971 NR Description: unknown [Arabidopsis thaliana]
  misc_feature (1)..(332): NCBI GI NO: 8778583 NR Description: F28C11.19 [Arabidopsis thaliana]
  misc_feature (56)..(283): NCBI GI NO: 15220781 NR Description: OBP32pep protein -related [Arabidopsis thaliana]
  misc_feature (37)..(281): NCBI GI NO: 15220845 NR Description: OBP32pep protein -related [Arabidopsis thaliana]
  misc_feature (41)..(281): NCBI GI NO: 15220802 NR Description: OBP32pep protein -related [Arabidopsis thaliana]
  misc_feature (135)..(325): NCBI GI NO: 8778583 NR Description: F28C11.19 [Arabidopsis thaliana]
MGDSEVAKFGLKVGKNEKNGFPRGLDPAISKFFVQLQSVVKSRLSRLAKQDGMSLMSSVQRKGDKSFSYSEAELNEQLQAWRENPSWVDKPPLIKVTAPKGSLCNLDVEVDVGLPPDAVYNIVIDPDNRRVFKNIKEVVSRKVLVDEGHRQVVDLDQAAIWKFLWWSGTISINVLVDQNRKVSSMKFKQTKAGFMKKFEGCWRVEPLFVDEAMCHPFKPVTKEDYYACARGKGRIGSKVSLKQTLQPSIVPPPPLSWYLRGITARTTEMLINDMLAETARIRGGYEAEKSKAEELQGKPGENVDLVSNTSDIKERWKLRRENAKHSHRRLLTK

SEQ ID NO: 9945 - protein, 281 aa, Glycine max
  peptide (1)..(281): Ceres Seq. ID no. 15169422
  misc_feature (114)..(213): Pfam Name: Pfam Description:  Domain of unknown function DUF220
  misc_feature (1)..(278): NCBI GI NO: 21592433 NR Description: unknown [Arabidopsis thaliana]
  misc_feature (1)..(278): NCBI GI NO: 18409585 NR Description: expressed protein [Arabidopsis thaliana]
  misc_feature (1)..(228): NCBI GI NO: 2129655 NR Description: hypothetical protein OBP32 - Arabidopsis thaliana
  misc_feature (1)..(280): NCBI GI NO: 18395257 NR Description: expressed protein [Arabidopsis thaliana]
  misc_feature (1)..(280): NCBI GI NO: 21554971 NR Description: unknown [Arabidopsis thaliana]
  misc_feature (1)..(280): NCBI GI NO: 8778583 NR Description: F28C11.19 [Arabidopsis thaliana]
  misc_feature (4)..(231): NCBI GI NO: 15220781 NR Description: OBP32pep protein -related [Arabidopsis thaliana]
  misc_feature (1)..(229): NCBI GI NO: 15220845 NR Description: OBP32pep protein -related [Arabidopsis thaliana]
  misc_feature (1)..(229): NCBI GI NO: 15220802 NR Description: OBP32pep protein -related [Arabidopsis thaliana]
  misc_feature (83)..(273): NCBI GI NO: 8778583 NR Description: F28C11.19 [Arabidopsis thaliana]
MSLMSSVQRKGDKSFSYSEAELNEQLQAWRENPSWVDKPPLIKVTAPKGSLCNLDVEVDVGLPPDAVYNIVIDPDNRRVFKNIKEVVSRKVLVDEGHRQVVDLDQAAIWKFLWWSGTISINVLVDQNRKVSSMKFKQTKAGFMKKFEGCWRVEPLFVDEAMCHPFKPVTKEDYYACARGKGRIGSKVSLKQTLQPSIVPPPPLSWYLRGITARTTEMLINDMLAETARIRGGYEAEKSKAEELQGKPGENVDLVSNTSDIKERWKLRRENAKHSHRRLLTK

SEQ ID NO: 9946 - DNA, 1290 bp, Glycine max
  misc_feature (1)..(1290): Ceres Seq. ID no. 15176294
gtatggatgtagaagtgtacagaaagactaggaccccacaagagggtcacacgcaagatttctctctatcttctcatccaccatttctccaattggaagcacacgccaacgatcctattgctctactattttcaccactattcagtgttgttcatagccataccattccacaccacaacccttcttcttctaccttgcttttcctattatctatccattgagacccccaaatggcctctgccactgccaccactctcttcacccctaaccccatgttttcaactgaacaccactctctctctccatctccaaccattcccaaatcctttactggcctctgcaagcccttccattcaagggttcccacttccatccccttcttccactgcagaagacccaagttctttgtcagggccacagttataaagtggagatgtccaaagcaaactatccctcccaatgataccggttttcaaaagaaactcctgtatctggaatccatcggtattgactctttcttgcttattgaaaaccatccaacagtgatcacaacctctcttgctgacataagatccaccgtggagtacattacctccttggatttcactgcaattgagtttcggcgtatggttggcatgtgccccgagattctgaccacccaagtctcagacctcatacctgtcttcaccttccttcatcgtgaggttcatgtgcctggctcggatattaagcgtgtaataaatcgtcgtcccaggttgcttgtcagcagtgttagtaagcgacttcgtcctaccctgtacttcctccaaagtattggcatagaagaggtaaacaagcacactgacttgctatcatgtagtgttgaggaaaagttcatgcccaggattgattactttgagaatattgggttttctcgccgtgatgcaacttcaatgttccgaagatttcctcagctattttgttatagtattaaaaataacttggagcctaaatacagttactttgtggtggagatggggagagatctgaaggagctgaaagaattcccacagtatttctcatttagcctagagaataggattaagcctaggcataaacagtgtgtagaaatgggggtgtgttttcctctccctgccttgttaaaaacaagtgaagtgaaatttcaaagtagattagacgtatgtgtaaattcttcaacccccttgaaaacatcccctctgtggtctgctggctgtgatgtttatgacgtatagaataacatttgcattgtatatttaattgcttttgtgc

SEQ ID NO: 9947 - protein, 340 aa, Glycine max
  peptide (1)..(340): Ceres Seq. ID no. 15176295
  misc_feature (78)..(312): Pfam Name: Pfam Description:  mTERF
  misc_feature (78)..(330): NCBI GI NO: 30686631 NR Description: expressed protein [Arabidopsis thaliana]
  misc_feature (78)..(317): NCBI GI NO: 21537209 NR Description: unknown [Arabidopsis thaliana]
  misc_feature (78)..(317): NCBI GI NO: 30686636 NR Description: expressed protein [Arabidopsis thaliana]
  misc_feature (82)..(315): NCBI GI NO: 15226787 NR Description: expressed protein [Arabidopsis thaliana]
  misc_feature (91)..(315): NCBI GI NO: 28392870 NR Description: unknown protein [Arabidopsis thaliana]
  misc_feature (77)..(311): NCBI GI NO: 15227524 NR Description: hypothetical protein [Arabidopsis thaliana]
  misc_feature (77)..(311): NCBI GI NO: 28204784 NR Description: hypothetical protein [Arabidopsis thaliana]
  misc_feature (79)..(314): NCBI GI NO: 15230219 NR Description: hypothetical protein [Arabidopsis thaliana]
  misc_feature (82)..(314): NCBI GI NO: 27817836 NR Description: OJ1127_E01.4
  misc_feature (82)..(339): NCBI GI NO: 15240542 NR Description: expressed protein [Arabidopsis thaliana]
MASATATTLFTPNPMFSTEHHSLSPSPTIPKSFTGLCKPFHSRVPTSIPFFHCRRPKFFVRATVIKWRCPKQTIPPNDTGFQKKLLYLESIGIDSFLLIENHPTVITTSLADIRSTVEYITSLDFTAIEFRRMVGMCPEILTTQVSDLIPVFTFLHREVHVPGSDIKRVINRRPRLLVSSVSKRLRPTLYFLQSIGIEEVNKHTDLLSCSVEEKFMPRIDYFENIGFSRRDATSMFRRFPQLFCYSIKNNLEPKYSYFVVEMGRDLKELKEFPQYFSFSLENRIKPRHKQCVEMGVCFPLPALLKTSEVKFQSRLDVCVNSSTPLKTSPLWSAGCDVYDV

SEQ ID NO: 9948 - protein, 326 aa, Glycine max
  peptide (1)..(326): Ceres Seq. ID no. 15176296
  misc_feature (64)..(298): Pfam Name: Pfam Description:  mTERF
  misc_feature (64)..(316): NCBI GI NO: 30686631 NR Description: expressed protein [Arabidopsis thaliana]
  misc_feature (64)..(303): NCBI GI NO: 21537209 NR Description: unknown [Arabidopsis thaliana]
  misc_feature (64)..(303): NCBI GI NO: 30686636 NR Description: expressed protein [Arabidopsis thaliana]
  misc_feature (68)..(301): NCBI GI NO: 15226787 NR Description: expressed protein [Arabidopsis thaliana]
  misc_feature (77)..(301): NCBI GI NO: 28392870 NR Description: unknown protein [Arabidopsis thaliana]
  misc_feature (63)..(297): NCBI GI NO: 15227524 NR Description: hypothetical protein [Arabidopsis thaliana]
  misc_feature (63)..(297): NCBI GI NO: 28204784 NR Description: hypothetical protein [Arabidopsis thaliana]
  misc_feature (65)..(300): NCBI GI NO: 15230219 NR Description: hypothetical protein [Arabidopsis thaliana]
  misc_feature (68)..(300): NCBI GI NO: 27817836 NR Description: OJ1127_E01.4
  misc_feature (68)..(325): NCBI GI NO: 15240542 NR Description: expressed protein [Arabidopsis thaliana]
MFSTEHHSLSPSPTIPKSFTGLCKPFHSRVPTSIPFFHCRRPKFFVRATVIKWRCPKQTIPPNDTGFQKKLLYLESIGIDSFLLIENHPTVITTSLADIRSTVEYITSLDFTAIEFRRMVGMCPEILTTQVSDLIPVFTFLHREVHVPGSDIKRVINRRPRLLVSSVSKRLRPTLYFLQSIGIEEVNKHTDLLSCSVEEKFMPRIDYFENIGFSRRDATSMFRRFPQLFCYSIKNNLEPKYSYFVVEMGRDLKELKEFPQYFSFSLENRIKPRHKQCVEMGVCFPLPALLKTSEVKFQSRLDVCVNSSTPLKTSPLWSAGCDVYDV

SEQ ID NO: 9949 - protein, 208 aa, Glycine max
  peptide (1)..(208): Ceres Seq. ID no. 15176297
  misc_feature (1)..(180): Pfam Name: Pfam Description:  mTERF
  misc_feature (1)..(198): NCBI GI NO: 30686631 NR Description: expressed protein [Arabidopsis thaliana]
  misc_feature (1)..(185): NCBI GI NO: 21537209 NR Description: unknown [Arabidopsis thaliana]
  misc_feature (1)..(185): NCBI GI NO: 30686636 NR Description: expressed protein [Arabidopsis thaliana]
  misc_feature (1)..(183): NCBI GI NO: 15226787 NR Description: expressed protein [Arabidopsis thaliana]
  misc_feature (1)..(183): NCBI GI NO: 28392870 NR Description: unknown protein [Arabidopsis thaliana]
  misc_feature (1)..(179): NCBI GI NO: 15227524 NR Description: hypothetical protein [Arabidopsis thaliana]
  misc_feature (1)..(179): NCBI GI NO: 28204784 NR Description: hypothetical protein [Arabidopsis thaliana]
  misc_feature (1)..(182): NCBI GI NO: 15230219 NR Description: hypothetical protein [Arabidopsis thaliana]
  misc_feature (1)..(182): NCBI GI NO: 27817836 NR Description: OJ1127_E01.4
  misc_feature (1)..(207): NCBI GI NO: 15240542 NR Description: expressed protein [Arabidopsis thaliana]
MVGMCPEILTTQVSDLIPVFTFLHREVHVPGSDIKRVINRRPRLLVSSVSKRLRPTLYFLQSIGIEEVNKHTDLLSCSVEEKFMPRIDYFENIGFSRRDATSMFRRFPQLFCYSIKNNLEPKYSYFVVEMGRDLKELKEFPQYFSFSLENRIKPRHKQCVEMGVCFPLPALLKTSEVKFQSRLDVCVNSSTPLKTSPLWSAGCDVYDV

SEQ ID NO: 9950 - DNA, 1785 bp, Glycine max
  misc_feature (1)..(1785): Ceres Seq. ID no. 14311183
aataaaccatctcattccctctctccctaaaatggccactcttccctcctacgaccacctcatcttcactgccttagctttcttcttatctggccttattttcttcctcaaacacaaatccaaatccaaatccaaaaaattcaacctccctccaggaccccctggatggcctattgttggaaacctcttccaagttgctcgttccgggaaacctttctttgaatacgtgaacgatgtgagactcaaatatggctcaatcttcaccctcaagatggggacaaggaccatgatcatcctcaccgactcaaaactggtccacgaggccatgatacaaaagggtgcaacctacgccaccaggcctccagagaatcccaccagaaccatcttcagcgaaaacaagttcaccgtgaatgctgccacctatggccccgtgtggaagtctctcaggaggaacatggtgcagaacatgctcagctcaacaagacttaaggagtttcgcagcgttcgcgacaatgcgatggacaagctcatcaacaggctcaaggacgaagccgagaataataatggtgcggtttgggttctcaaagatgctaggtttgctgttttttgcatacttgtggctatgtgttttggtcttgagatggatgaggagacagttgagagaatcgatcaggttatgaagagtgttctcatcaccttggatccgagaattgatgactatcttccaattctaagtccgtttttctcaaagcaaagaaagaaagccttggaggttcgtagagaacaagttgagttcttagttccaattatagaacaaagaagaagagcaatccaaaacccgggttcagatcacaccgccacaacgttttcctacctagacacactttttgatctcaaagttgaagggaagaaatcagcaccttctgatgcagaattggtttcactgtgctcagagtttctcaacggtggcacagacacaacagcaacagcggttgagtggggcatagcacagctcatagcaaaccctcacgttcagaaaaagctctatgaagaaataaagaggacggtgggagagaagaaagtggatgaaaaggatgttgagaaaatgccatacctacacgctgtggtgaaggagcttcttagaaagcaccctccaacacactttgtgctaacacatgctgtgactgaacccaccactttgggtggttatgacataccaattgatgcaagtgttgaggtgtacacaccagccattgctggtgacccgaaaaattggtcaaaccctgagaagtttgaccccgagaggttcatctctgggggtgaggaagcagacataaccggggtaactggggtgaagatgatgccttttggtgttgggagaaggatttgccctggcttggctatggccacagtgcatattcacctcatgatggctaggatggtgcaggagtttgagtgggatgcttacccaccagagaagaagttggatttcactggcaagtgggagttcactgtggtcatgaaagagtctctaagagcaaccatcaaaccaagaggaggaggaggagaaaaagtgcacttgtaaaattttgttgctcctcctcctttctggtttttaatttcacagataacataaatattattgttgctattgttattattatatatggatacatcatcgtggtttgtggtggatttgcatacagagtactgcaagtttcatcacatcattatattgccttcttaattggtccggtttgttggagaaatatttgttttgatgac

SEQ ID NO: 9951 - protein, 527 aa, Glycine max
  peptide (1)..(527): Ceres Seq. ID no. 14311184
  misc_feature (50)..(517): Pfam Name: Pfam Description:  Cytochrome P450
  misc_feature (11)..(527): NCBI GI NO: 5915821 NR Description: Cytochrome P450 77A3
  misc_feature (20)..(518): NCBI GI NO: 15238249 NR Description: cytochrome P450, putative [Arabidopsis thaliana]
  misc_feature (20)..(518): NCBI GI NO: 21595357 NR Description: cytochrom P450-like protein [Arabidopsis thaliana]
  misc_feature (20)..(518): NCBI GI NO: 15228331 NR Description: cytochrome P450, putative [Arabidopsis thaliana]
  misc_feature (12)..(518): NCBI GI NO: 584867 NR Description: Cytochrome P450 77A2 (CYPLXXVIIA2) (P-450EG5)
  misc_feature (20)..(518): NCBI GI NO: 28393336 NR Description: putative cytochrome p450 [Arabidopsis thaliana]
  misc_feature (21)..(518): NCBI GI NO: 584866 NR Description: Cytochrome P450 77A1 (CYPLXXVIIA1) (P-450EG6)
  misc_feature (21)..(518): NCBI GI NO: 542070 NR Description: cytochrome P450 77A1 - eggplant (fragment)
  misc_feature (11)..(518): NCBI GI NO: 15238242 NR Description: cytochrome P450, putative [Arabidopsis thaliana]
  misc_feature (19)..(518): NCBI GI NO: 15228330 NR Description: cytochrome P450, putative [Arabidopsis thaliana]
INHLIPSLPKMATLPSYDHLIFTALAFFLSGLIFFLKHKSKSKSKKFNLPPGPPGWPIVGNLFQVARSGKPFFEYVNDVRLKYGSIFTLKMGTRTMIILTDSKLVHEAMIQKGATYATRPPENPTRTIFSENKFTVNAATYGPVWKSLRRNMVQNMLSSTRLKEFRSVRDNAMDKLINRLKDEAENNNGAVWVLKDARFAVFCILVAMCFGLEMDEETVERIDQVMKSVLITLDPRIDDYLPILSPFFSKQRKKALEVRREQVEFLVPIIEQRRRAIQNPGSDHTATTFSYLDTLFDLKVEGKKSAPSDAELVSLCSEFLNGGTDTTATAVEWGIAQLIANPHVQKKLYEEIKRTVGEKKVDEKDVEKMPYLHAVVKELLRKHPPTHFVLTHAVTEPTTLGGYDIPIDASVEVYTPAIAGDPKNWSNPEKFDPERFISGGEEADITGVTGVKMMPFGVGRRICPGLAMATVHIHLMMARMVQEFEWDAYPPEKKLDFTGKWEFTVVMKESLRATIKPRGGGGEKVHL

SEQ ID NO: 9952 - protein, 517 aa, Glycine max
  peptide (1)..(517): Ceres Seq. ID no. 14311185
  misc_feature (40)..(507): Pfam Name: Pfam Description:  Cytochrome P450
  misc_feature (1)..(517): NCBI GI NO: 5915821 NR Description: Cytochrome P450 77A3
  misc_feature (10)..(508): NCBI GI NO: 15238249 NR Description: cytochrome P450, putative [Arabidopsis thaliana]
  misc_feature (10)..(508): NCBI GI NO: 21595357 NR Description: cytochrom P450-like protein [Arabidopsis thaliana]
  misc_feature (10)..(508): NCBI GI NO: 15228331 NR Description: cytochrome P450, putative [Arabidopsis thaliana]
  misc_feature (2)..(508): NCBI GI NO: 584867 NR Description: Cytochrome P450 77A2 (CYPLXXVIIA2) (P-450EG5)
  misc_feature (10)..(508): NCBI GI NO: 28393336 NR Description: putative cytochrome p450 [Arabidopsis thaliana]
  misc_feature (11)..(508): NCBI GI NO: 584866 NR Description: Cytochrome P450 77A1 (CYPLXXVIIA1) (P-450EG6)
  misc_feature (11)..(508): NCBI GI NO: 542070 NR Description: cytochrome P450 77A1 - eggplant (fragment)
  misc_feature (1)..(508): NCBI GI NO: 15238242 NR Description: cytochrome P450, putative [Arabidopsis thaliana]
  misc_feature (9)..(508): NCBI GI NO: 15228330 NR Description: cytochrome P450, putative [Arabidopsis thaliana]
MATLPSYDHLIFTALAFFLSGLIFFLKHKSKSKSKKFNLPPGPPGWPIVGNLFQVARSGKPFFEYVNDVRLKYGSIFTLKMGTRTMIILTDSKLVHEAMIQKGATYATRPPENPTRTIFSENKFTVNAATYGPVWKSLRRNMVQNMLSSTRLKEFRSVRDNAMDKLINRLKDEAENNNGAVWVLKDARFAVFCILVAMCFGLEMDEETVERIDQVMKSVLITLDPRIDDYLPILSPFFSKQRKKALEVRREQVEFLVPIIEQRRRAIQNPGSDHTATTFSYLDTLFDLKVEGKKSAPSDAELVSLCSEFLNGGTDTTATAVEWGIAQLIANPHVQKKLYEEIKRTVGEKKVDEKDVEKMPYLHAVVKELLRKHPPTHFVLTHAVTEPTTLGGYDIPIDASVEVYTPAIAGDPKNWSNPEKFDPERFISGGEEADITGVTGVKMMPFGVGRRICPGLAMATVHIHLMMARMVQEFEWDAYPPEKKLDFTGKWEFTVVMKESLRATIKPRGGGGEKVHL

SEQ ID NO: 9953 - protein, 437 aa, Glycine max
  peptide (1)..(437): Ceres Seq. ID no. 14311186
  misc_feature (1)..(427): Pfam Name: Pfam Description:  Cytochrome P450
  misc_feature (1)..(437): NCBI GI NO: 5915821 NR Description: Cytochrome P450 77A3
  misc_feature (1)..(428): NCBI GI NO: 15238249 NR Description: cytochrome P450, putative [Arabidopsis thaliana]
  misc_feature (1)..(428): NCBI GI NO: 21595357 NR Description: cytochrom P450-like protein [Arabidopsis thaliana]
  misc_feature (1)..(428): NCBI GI NO: 15228331 NR Description: cytochrome P450, putative [Arabidopsis thaliana]
  misc_feature (1)..(428): NCBI GI NO: 584867 NR Description: Cytochrome P450 77A2 (CYPLXXVIIA2) (P-450EG5)
  misc_feature (1)..(428): NCBI GI NO: 28393336 NR Description: putative cytochrome p450 [Arabidopsis thaliana]
  misc_feature (1)..(428): NCBI GI NO: 584866 NR Description: Cytochrome P450 77A1 (CYPLXXVIIA1) (P-450EG6)
  misc_feature (1)..(428): NCBI GI NO: 542070 NR Description: cytochrome P450 77A1 - eggplant (fragment)
  misc_feature (1)..(428): NCBI GI NO: 15238242 NR Description: cytochrome P450, putative [Arabidopsis thaliana]
  misc_feature (1)..(428): NCBI GI NO: 15228330 NR Description: cytochrome P450, putative [Arabidopsis thaliana]
MGTRTMIILTDSKLVHEAMIQKGATYATRPPENPTRTIFSENKFTVNAATYGPVWKSLRRNMVQNMLSSTRLKEFRSVRDNAMDKLINRLKDEAENNNGAVWVLKDARFAVFCILVAMCFGLEMDEETVERIDQVMKSVLITLDPRIDDYLPILSPFFSKQRKKALEVRREQVEFLVPIIEQRRRAIQNPGSDHTATTFSYLDTLFDLKVEGKKSAPSDAELVSLCSEFLNGGTDTTATAVEWGIAQLIANPHVQKKLYEEIKRTVGEKKVDEKDVEKMPYLHAVVKELLRKHPPTHFVLTHAVTEPTTLGGYDIPIDASVEVYTPAIAGDPKNWSNPEKFDPERFISGGEEADITGVTGVKMMPFGVGRRICPGLAMATVHIHLMMARMVQEFEWDAYPPEKKLDFTGKWEFTVVMKESLRATIKPRGGGGEKVHL

SEQ ID NO: 9954 - DNA, 1642 bp, Glycine max
  misc_feature (1)..(1642): Ceres Seq. ID no. 15172446
aaatccctacagagagagagaaagatgcagaagagagagcagggcaagtccggcggatccgccggaggaggggcggcgccacctgcgaagagaggccgtcccttcggcagcggtaacaacagttcctctgccgcggcttcagccgcggattcggcggctccgtcaaccctccttggtccttcccttcacgttcacaactccttcgccgatcagaacaacaaaagaattgtcttggctcttcaaagtggtctgaagaatgagctaacatgggctttgaatacacttacgctgctctcctttaaagaaaaggatgacatgcgcaaggatgcgactccccttgcgaaaattcccggcttgcttgatgcgctcctacaagttatagatgattggcgtgatatagcactcccgaaggaatttgccaagacaacgaggatcaggactttaggtgcaaattctgttgtaagtggatttgggagtgaatatcaggcgctgggctcaactggtactccccaccgccctggtgtaggatctggctctgctggtatagaatcaacgcaacagaatggcatgacaaaatctcgtttttctgagttgtggcttgatgaagatagtttatttaatttagatgatgaagggcgagcagaaaagcagcaatgtgctgttgctgcttcaaatatcatcaggaacttctctttcatgccagataatgaagttataatggcccaacatcgccattgtttggaaacagccttccaatgcatagaagatcatcttgtagaggatgaggaacttgtaacaaatgctctagagacaattgttaacttagctccacttctggatcttcgaatatttagctcttccaaaccttcatttattaaaataacagaaaaacgtgcagttcaggccatcatggggatgttggaatctgcagtcaaagcatggcattgtgctgctgctgaattacttgggcgtttgatcattaatcctgacaatgaacctttcttgcttccattttttccacagatacacaaacgcttaattgatctcatcagcatgccagctctagatgctcaggcagctgctataggtgcactctataaccttgctgaagttaatatggactgcagattgaagattgctaacgagagatgggctattgatcggttgcttaaagtgataaagatgccacatccagttccagaagtttgccggaaatctgccatgatattggagagtcttgtgtctgagccgcaaaacagaagtttgctgctagcatatgagaatgcttttgcagagatagttttcactgatggaagatattccgatacatttgcgaggatattgtatgaactaacatctagaccaagtaacaaagtggcagcggctcgtggcatatggggtatgtaaacatcaaactgtgaaatgactttgattagtgatcagtgctatatatagttttgcgacttggatggcttttggacgacttttgaagattcaaaatgtacatgtcttctgtgtaggattgtactataccttaagcatattcaagttgtcatgtactccagttgtatgatgataacttcagaattattcttgtgtttaagacgatgtgaagattagaaacttcatttcctagataaag

SEQ ID NO: 9955 - protein, 468 aa, Glycine max
  peptide (1)..(468): Ceres Seq. ID no. 15172447
  misc_feature (9)..(468): NCBI GI NO: 21537098 NR Description: unknown [Arabidopsis thaliana]
  misc_feature (9)..(468): NCBI GI NO: 18403609 NR Description: expressed protein [Arabidopsis thaliana]
  misc_feature (17)..(467): NCBI GI NO: 14192867 NR Description: Unknown protein [Oryza sativa]
KSLQRERKMQKREQGKSGGSAGGGAAPPAKRGRPFGSGNNSSSAAASAADSAAPSTLLGPSLHVHNSFADQNNKRIVLALQSGLKNELTWALNTLTLLSFKEKDDMRKDATPLAKIPGLLDALLQVIDDWRDIALPKEFAKTTRIRTLGANSVVSGFGSEYQALGSTGTPHRPGVGSGSAGIESTQQNGMTKSRFSELWLDEDSLFNLDDEGRAEKQQCAVAASNIIRNFSFMPDNEVIMAQHRHCLETAFQCIEDHLVEDEELVTNALETIVNLAPLLDLRIFSSSKPSFIKITEKRAVQAIMGMLESAVKAWHCAAAELLGRLIINPDNEPFLLPFFPQIHKRLIDLISMPALDAQAAAIGALYNLAEVNMDCRLKIANERWAIDRLLKVIKMPHPVPEVCRKSAMILESLVSEPQNRSLLLAYENAFAEIVFTDGRYSDTFARILYELTSRPSNKVAAARGIWGM

SEQ ID NO: 9956 - protein, 460 aa, Glycine max
  peptide (1)..(460): Ceres Seq. ID no. 15172448
  misc_feature (1)..(460): NCBI GI NO: 21537098 NR Description: unknown [Arabidopsis thaliana]
  misc_feature (1)..(460): NCBI GI NO: 18403609 NR Description: expressed protein [Arabidopsis thaliana]
  misc_feature (9)..(459): NCBI GI NO: 14192867 NR Description: Unknown protein [Oryza sativa]
MQKREQGKSGGSAGGGAAPPAKRGRPFGSGNNSSSAAASAADSAAPSTLLGPSLHVHNSFADQNNKRIVLALQSGLKNELTWALNTLTLLSFKEKDDMRKDATPLAKIPGLLDALLQVIDDWRDIALPKEFAKTTRIRTLGANSVVSGFGSEYQALGSTGTPHRPGVGSGSAGIESTQQNGMTKSRFSELWLDEDSLFNLDDEGRAEKQQCAVAASNIIRNFSFMPDNEVIMAQHRHCLETAFQCIEDHLVEDEELVTNALETIVNLAPLLDLRIFSSSKPSFIKITEKRAVQAIMGMLESAVKAWHCAAAELLGRLIINPDNEPFLLPFFPQIHKRLIDLISMPALDAQAAAIGALYNLAEVNMDCRLKIANERWAIDRLLKVIKMPHPVPEVCRKSAMILESLVSEPQNRSLLLAYENAFAEIVFTDGRYSDTFARILYELTSRPSNKVAAARGIWGM

SEQ ID NO: 9957 - protein, 363 aa, Glycine max
  peptide (1)..(363): Ceres Seq. ID no. 15172449
  misc_feature (1)..(363): NCBI GI NO: 21537098 NR Description: unknown [Arabidopsis thaliana]
  misc_feature (1)..(363): NCBI GI NO: 18403609 NR Description: expressed protein [Arabidopsis thaliana]
  misc_feature (1)..(362): NCBI GI NO: 14192867 NR Description: Unknown protein [Oryza sativa]
MRKDATPLAKIPGLLDALLQVIDDWRDIALPKEFAKTTRIRTLGANSVVSGFGSEYQALGSTGTPHRPGVGSGSAGIESTQQNGMTKSRFSELWLDEDSLFNLDDEGRAEKQQCAVAASNIIRNFSFMPDNEVIMAQHRHCLETAFQCIEDHLVEDEELVTNALETIVNLAPLLDLRIFSSSKPSFIKITEKRAVQAIMGMLESAVKAWHCAAAELLGRLIINPDNEPFLLPFFPQIHKRLIDLISMPALDAQAAAIGALYNLAEVNMDCRLKIANERWAIDRLLKVIKMPHPVPEVCRKSAMILESLVSEPQNRSLLLAYENAFAEIVFTDGRYSDTFARILYELTSRPSNKVAAARGIWGM

SEQ ID NO: 9958 - DNA, 1103 bp, Glycine max
  misc_feature (1)..(1103): Ceres Seq. ID no. 12582229
cagctacgtaggccccccccccgatgatgagaagcgaagtgctgttactgccatggacagtatattttctgtgctaacccattacagtgaggccacagggagattggtgtgtagaaagaggtccagcattcctgacgtgggtcttttaagcacatccttgattatttctcttggtagaatcaaacaaagctttgtattgtgagttattggaaatgtctagttttgttattactttaccgcaagctttatgcttttttgcagacccttaatttgttgtttgtatgattttgagtttccatgcagaactaatccgcatttaccagacatgcctattgtttatgctagtgacgccttcttgaaattgacaggttatgcaaaaaatgaagttttgggccacaactgtagatttttaggtggaacagataccgatacctcgactttacatctggtgatacacttcttctcgccataggttttttaattttgtcttgtaatttggcaacttagagtcttagactaatgggaatggaccattttgttatgcctttctcttattgcttacgttcagataagggaaagcattaaaacagaacaaccatgcacagtacgtattttgaattacaggaaggacaaaagctcattttggaattttcttcatatctcacccgttcgtgatgcttctggcaaggttgcatactttgtgggagttcaaatagaagacaacaataaaaacgatgatagccattgtttgagtcctgagaagagacaacttagtgtggttggtgtagtcaaggttgcagtgaggagtttatcaatgactgcgggatcttctgagtcgtagcaaaaggatcatgtgagtttggaacaaataatatttgcctacttcccagaaatattaatccattcgaaaaaataatcaatctcaattggtgattgttgagatgatagaaaggtaaaagaattaatttgtgaagaagaaaaaaaaagagagtccatactgtcaattgtaagaaaacattctctgttggacgtgtataaataaaatgtattatatttcctaactgcatttattttccgtaatgtagcaataaaagttgacttgt

SEQ ID NO: 9959 - protein, 74 aa, Glycine max
  peptide (1)..(74): Ceres Seq. ID no. 12582230
  misc_feature (20)..(66): NCBI GI NO: 30678020 NR Description: receptor-related protein kinase
  misc_feature (20)..(66): NCBI GI NO: 18395411 NR Description: putative receptor-like protein kinase
  misc_feature (20)..(71): NCBI GI NO: 7487253 NR Description: probable receptor-like protein kinase
  misc_feature (20)..(65): NCBI GI NO: 30678020 NR Description: receptor-related protein kinase
  misc_feature (20)..(65): NCBI GI NO: 18395411 NR Description: putative receptor-like protein kinase
  misc_feature (24)..(61): NCBI GI NO: 33357429 NR Description: Chain A
  misc_feature (20)..(68): NCBI GI NO: 13786959 NR Description: Chain A
  misc_feature (20)..(65): NCBI GI NO: 21243288 NR Description: sensor histidine kinase
  misc_feature (20)..(68): NCBI GI NO: 24899170 NR Description: phototropin [Vicia faba]
  misc_feature (20)..(68): NCBI GI NO: 541825 NR Description: serine/threonine protein kinase (EC 2
MLFCRPLICCLYDFEFPCRTNPHLPDMPIVYASDAFLKLTGYAKNEVLGHNCRFLGGTDTDTSTLHLVIHFFSP

SEQ ID NO: 9960 - protein, 66 aa, Glycine max
  peptide (1)..(66): Ceres Seq. ID no. 12582231
  misc_feature (8)..(66): NCBI GI NO: 30678020 NR Description: receptor-related protein kinase
  misc_feature (8)..(66): NCBI GI NO: 18395411 NR Description: putative receptor-like protein kinase
  misc_feature (8)..(66): NCBI GI NO: 7487253 NR Description: probable receptor-like protein kinase
SYVGPPPDDEKRSAVTAMDSIFSVLTHYSEATGRLVCRKRSSIPDVGLLSTSLIISLGRIKQSFVL

SEQ ID NO: 9961 - protein, 49 aa, Glycine max
  peptide (1)..(49): Ceres Seq. ID no. 12582232
  misc_feature (1)..(49): NCBI GI NO: 30678020 NR Description: receptor-related protein kinase
  misc_feature (1)..(49): NCBI GI NO: 18395411 NR Description: putative receptor-like protein kinase
  misc_feature (1)..(49): NCBI GI NO: 7487253 NR Description: probable receptor-like protein kinase
MDSIFSVLTHYSEATGRLVCRKRSSIPDVGLLSTSLIISLGRIKQSFVL

SEQ ID NO: 9962 - DNA, 2188 bp, Glycine max
  misc_feature (1)..(2188): Ceres Seq. ID no. 14310784
atgagtgagtgaactttggataagtaagtgttgtgtgaagattttgtatgagtacttgagcttctttgccttgtcagcttttgatttttgatgttgtggtgtggcagtggaagtcatactaaaaaaggtgattcttttgcagtggcaagcatggcaagaggaagagcagatgtgaactccagaaaaaaattggtcacagctgtgttggttttggtgattgttggtggttttttctatttctattctcagaatagtgattcatcttctgttgtgtatggtgataaatctttgagccactttggtttgggaggggacaaagatgatggtgaatcttcctccacagttgttggaggagagggcagtgttgtaccaaagagcattccagtctgtgatgatcgattatccgagctgattccttgtctggacagaaatctcatataccaaacaagattgaagcttgatttatctttgatggagcactatgagagacactgcccaacacctgataggagatacaattgtttaattcctcctcctccagggtacaaggttcctatcaagtggcccaaaagcagagaccaggtgtggaaggcaaatatacctcatacccatctagcaactgaaaaatctgaccagaactggatggttgtgaaaggtgaaacaatagtgtttcctggtggaggaacccacttccattatggtgctggtaaatacattgcttcaattgctaatatgcttaattttccaaacaatgatataaacaatgggggaagagtcaggtctgttcttgatgttggctgtggggttgctagctttggaggatatcttatttcctctaatgtgatagcaatgtcattggcaccaaatgatgttcatcaaaatcaaatccagtttgccttagagaggggaattccagcatatcttggtgtcttggggacccaaagactcccttatccaagtagatcattcgaacttgctcattgctctcgctgtagaatcgattggcttcagagagatggtatacttctgcttgagctggataggttactgaggccaggaggttatttcgcgtactcatctcctgaagcctatgcacaggatgaagaggataggaggatatggcgagaaatgagcactcttgtggagaggatgtgctggaaaatagcttctaagaaggatcagactgttatttgggtcaagcctctcactaatagctgctacttaaagagattgcctggtactaagcctccactctgcaggtctgatgatgatcctgatgctgtttggggagttaaaatgaaagtttgcatctcacgttattcagatcaaatgcacaaagcaaaaggaagtgatttggctccttggcctgctcgattgactactccacctcctcgtctggcagaaattcactattctactgaaatgtttgagaaggacatggaagtttggaaacaacgagttcgtaattactggagcaagctagccagtaagattaagccagacacaattcggaacgtgatggatatgaaggcaaacttgggttcatttgcagcagctttgaaggacaaagatgtttgggttatgaatgtagtgccagaaaatgaacaaaaaactctcaagattatatacgacagaggacttataggaacagttcacaactggtgtgaagctttttcaacctaccctcgaacgtatgatctactccatgcatggactgtgttttctgatattattaagaaagaatgcagtccagaggatttattaattgagatggatagaatcctaaggccaaagggtttcatcattgtccatgataagcgttcagtggtggagtatataaagaaatacttgccagcattacactgggaggctgtgaccatatatgatgtagatgatgatgatacagtgattataattcaaaagaaaatgtggctcacaagtcaaagcatcaaggtctctgaatagtgtcataatattcacttgtataagttaccagtgctactaggtgtataagtgtattatgtagctctattcctaaggcctaagctttcagtgtagctctcttcactatagacgcaagtcacagtgaaagctcacccaaatcgtctttatctttttttgcatttattgaattttgtacgcttcaacatttatatccactctgaagaaatattctaatttaaaaatt

SEQ ID NO: 9963 - protein, 624 aa, Glycine max
  peptide (1)..(624): Ceres Seq. ID no. 14310785
  misc_feature (106)..(611): Pfam Name: Pfam Description:  Putative methyltransferase
  misc_feature (23)..(624): NCBI GI NO: 18414198 NR Description: dehydration-induced protein-related
  misc_feature (23)..(621): NCBI GI NO: 22331280 NR Description: dehydration-induced protein-related
  misc_feature (39)..(624): NCBI GI NO: 7488052 NR Description: probable ankyrin - Arabidopsis thaliana
  misc_feature (21)..(624): NCBI GI NO: 18390392 NR Description: dehydration-induced protein-related
  misc_feature (23)..(624): NCBI GI NO: 21536697 NR Description: ankyrin-like protein [Arabidopsis thaliana]
  misc_feature (21)..(624): NCBI GI NO: 14423548 NR Description: Unknown protein [Arabidopsis thaliana]
  misc_feature (99)..(414): NCBI GI NO: 25406781 NR Description: hypothetical protein
  misc_feature (415)..(624): NCBI GI NO: 25406781 NR Description: hypothetical protein
  misc_feature (28)..(623): NCBI GI NO: 22326809 NR Description: dehydration-induced protein-related
  misc_feature (97)..(623): NCBI GI NO: 11357548 NR Description: hypothetical protein F18O22
MLWCGSGSHTKKGDSFAVASMARGRADVNSRKKLVTAVLVLVIVGGFFYFYSQNSDSSSVVYGDKSLSHFGLGGDKDDGESSSTVVGGEGSVVPKSIPVCDDRLSELIPCLDRNLIYQTRLKLDLSLMEHYERHCPTPDRRYNCLIPPPPGYKVPIKWPKSRDQVWKANIPHTHLATEKSDQNWMVVKGETIVFPGGGTHFHYGAGKYIASIANMLNFPNNDINNGGRVRSVLDVGCGVASFGGYLISSNVIAMSLAPNDVHQNQIQFALERGIPAYLGVLGTQRLPYPSRSFELAHCSRCRIDWLQRDGILLLELDRLLRPGGYFAYSSPEAYAQDEEDRRIWREMSTLVERMCWKIASKKDQTVIWVKPLTNSCYLKRLPGTKPPLCRSDDDPDAVWGVKMKVCISRYSDQMHKAKGSDLAPWPARLTTPPPRLAEIHYSTEMFEKDMEVWKQRVRNYWSKLASKIKPDTIRNVMDMKANLGSFAAALKDKDVWVMNVVPENEQKTLKIIYDRGLIGTVHNWCEAFSTYPRTYDLLHAWTVFSDIIKKECSPEDLLIEMDRILRPKGFIIVHDKRSVVEYIKKYLPALHWEAVTIYDVDDDDTVIIIQKKMWLTSQSIKVSE

SEQ ID NO: 9964 - protein, 604 aa, Glycine max
  peptide (1)..(604): Ceres Seq. ID no. 14310786
  misc_feature (86)..(591): Pfam Name: Pfam Description:  Putative methyltransferase
  misc_feature (3)..(604): NCBI GI NO: 18414198 NR Description: dehydration-induced protein-related
  misc_feature (3)..(601): NCBI GI NO: 22331280 NR Description: dehydration-induced protein-related
  misc_feature (19)..(604): NCBI GI NO: 7488052 NR Description: probable ankyrin - Arabidopsis thaliana
  misc_feature (1)..(604): NCBI GI NO: 18390392 NR Description: dehydration-induced protein-related
  misc_feature (3)..(604): NCBI GI NO: 21536697 NR Description: ankyrin-like protein [Arabidopsis thaliana]
  misc_feature (1)..(604): NCBI GI NO: 14423548 NR Description: Unknown protein [Arabidopsis thaliana]
  misc_feature (79)..(394): NCBI GI NO: 25406781 NR Description: hypothetical protein
  misc_feature (395)..(604): NCBI GI NO: 25406781 NR Description: hypothetical protein
  misc_feature (8)..(603): NCBI GI NO: 22326809 NR Description: dehydration-induced protein-related
  misc_feature (77)..(603): NCBI GI NO: 11357548 NR Description: hypothetical protein F18O22
MARGRADVNSRKKLVTAVLVLVIVGGFFYFYSQNSDSSSVVYGDKSLSHFGLGGDKDDGESSSTVVGGEGSVVPKSIPVCDDRLSELIPCLDRNLIYQTRLKLDLSLMEHYERHCPTPDRRYNCLIPPPPGYKVPIKWPKSRDQVWKANIPHTHLATEKSDQNWMVVKGETIVFPGGGTHFHYGAGKYIASIANMLNFPNNDINNGGRVRSVLDVGCGVASFGGYLISSNVIAMSLAPNDVHQNQIQFALERGIPAYLGVLGTQRLPYPSRSFELAHCSRCRIDWLQRDGILLLELDRLLRPGGYFAYSSPEAYAQDEEDRRIWREMSTLVERMCWKIASKKDQTVIWVKPLTNSCYLKRLPGTKPPLCRSDDDPDAVWGVKMKVCISRYSDQMHKAKGSDLAPWPARLTTPPPRLAEIHYSTEMFEKDMEVWKQRVRNYWSKLASKIKPDTIRNVMDMKANLGSFAAALKDKDVWVMNVVPENEQKTLKIIYDRGLIGTVHNWCEAFSTYPRTYDLLHAWTVFSDIIKKECSPEDLLIEMDRILRPKGFIIVHDKRSVVEYIKKYLPALHWEAVTIYDVDDDDTVIIIQKKMWLTSQSIKVSE

SEQ ID NO: 9965 - protein, 497 aa, Glycine max
  peptide (1)..(497): Ceres Seq. ID no. 14310787
  misc_feature (1)..(484): Pfam Name: Pfam Description:  Putative methyltransferase
  misc_feature (1)..(497): NCBI GI NO: 18414198 NR Description: dehydration-induced protein-related
  misc_feature (1)..(494): NCBI GI NO: 22331280 NR Description: dehydration-induced protein-related
  misc_feature (1)..(497): NCBI GI NO: 7488052 NR Description: probable ankyrin - Arabidopsis thaliana
  misc_feature (1)..(497): NCBI GI NO: 18390392 NR Description: dehydration-induced protein-related
  misc_feature (1)..(497): NCBI GI NO: 21536697 NR Description: ankyrin-like protein [Arabidopsis thaliana]
  misc_feature (1)..(497): NCBI GI NO: 14423548 NR Description: Unknown protein [Arabidopsis thaliana]
  misc_feature (1)..(287): NCBI GI NO: 25406781 NR Description: hypothetical protein
  misc_feature (288)..(497): NCBI GI NO: 25406781 NR Description: hypothetical protein
  misc_feature (1)..(496): NCBI GI NO: 22326809 NR Description: dehydration-induced protein-related
  misc_feature (1)..(496): NCBI GI NO: 11357548 NR Description: hypothetical protein F18O22
MEHYERHCPTPDRRYNCLIPPPPGYKVPIKWPKSRDQVWKANIPHTHLATEKSDQNWMVVKGETIVFPGGGTHFHYGAGKYIASIANMLNFPNNDINNGGRVRSVLDVGCGVASFGGYLISSNVIAMSLAPNDVHQNQIQFALERGIPAYLGVLGTQRLPYPSRSFELAHCSRCRIDWLQRDGILLLELDRLLRPGGYFAYSSPEAYAQDEEDRRIWREMSTLVERMCWKIASKKDQTVIWVKPLTNSCYLKRLPGTKPPLCRSDDDPDAVWGVKMKVCISRYSDQMHKAKGSDLAPWPARLTTPPPRLAEIHYSTEMFEKDMEVWKQRVRNYWSKLASKIKPDTIRNVMDMKANLGSFAAALKDKDVWVMNVVPENEQKTLKIIYDRGLIGTVHNWCEAFSTYPRTYDLLHAWTVFSDIIKKECSPEDLLIEMDRILRPKGFIIVHDKRSVVEYIKKYLPALHWEAVTIYDVDDDDTVIIIQKKMWLTSQSIKVSE

SEQ ID NO: 9966 - DNA, 1315 bp, Glycine max
  misc_feature (1)..(1315): Ceres Seq. ID no. 14308339
gtttggtcattgccttattctcttgtgctaagacatactactgaggaggtactagatgcatgcatggaagcaattgagccggaacatgctgcaataacatctgaactccggaagaaagtaatgaatgatcttatggagggtttgaaggaccacaattggtttaccgggtttgatattgctgatgatctgcctgtgaaattttcattaaggcagtggatcaagctagccaaggaagtccaagcaacagtttttattgcagtgcatggaggcattggagaagatggtacacttcaatctttgctggatgctgaaggagtgccctacacaggtcctggtgcaatggcatcaaagatttgtatggacaaagttgcaacctctgtggctttaaaacatcttgcaaattcgggagttcttaccataaataaggatgtcaggcaaaaagatgatctctctaataagcccataaatgatacatggcatgacctcaccagaaagctacagtgccaaacattatgtgtcaaaccagcaaaagatggatgctcaactggggtagcaagactatgctgtcccgaggaccttgcaatatatgtcaaagctctggaggactgtctactaagaattcctccaaattgcttatcaaaggcacatggtatgattgagatgccaaaccctcctccagaacacttaatcttcgaacctttcatagagacggatgaaataattgtgacatccaaatttgaggatgcaactggtcatggcctcacttggaaaggacacagcagatgggtggaaataactgttggcgtcataggaaaacgtggatcaatgcactcgctaagtcctagtgtaactgtcaaggaatctggtgatattttgtcacttgaggagaagttccaaggtgggactggcatcaatctgactccgcctcccttgtcaattatgagtgagaatgctttgaagagatgtaaacagcatattgaactgattgcaaacactcttcaattggaaggattttcacgcattgatgcatttgtaaatgttgacagtggagaggttttgattatagaggtaaatactgtgcctggaatgacaccttccactgttctgattcatcaggcactagtagagcaaccaccgttgtatcctcatcaattcttccgtaagcttcttgatttggcatctgaaaggtccatgtaaatctatttaatagaatgtttacattgtctatcaaatgttgttaccacttgaagttattgtgaaactttaatttcctatctggaacttgcgtccctttataatgtgaaactttaatttc

SEQ ID NO: 9967 - protein, 398 aa, Glycine max
  peptide (1)..(398): Ceres Seq. ID no. 14308340
  misc_feature (84)..(194): Pfam Name: Pfam Description:  D-ala D-ala ligase
  misc_feature (1)..(397): NCBI GI NO: 33146883 NR Description: unknown protein
  misc_feature (160)..(397): NCBI GI NO: 34898182 NR Description: P0034A04.1
  misc_feature (1)..(170): NCBI GI NO: 34898182 NR Description: P0034A04.1
  misc_feature (1)..(299): NCBI GI NO: 26452707 NR Description: unknown protein [Arabidopsis thaliana]
  misc_feature (41)..(300): NCBI GI NO: 15231971 NR Description: expressed protein [Arabidopsis thaliana]
  misc_feature (75)..(184): NCBI GI NO: 34898182 NR Description: P0034A04.1
  misc_feature (254)..(396): NCBI GI NO: 23136007 NR Description: hypothetical protein [Cytophaga hutchinsonii]
  misc_feature (74)..(200): NCBI GI NO: 23136007 NR Description: hypothetical protein [Cytophaga hutchinsonii]
  misc_feature (77)..(122): NCBI GI NO: 23136007 NR Description: hypothetical protein [Cytophaga hutchinsonii]
  misc_feature (264)..(396): NCBI GI NO: 21674167 NR Description: D-alanine-D-alanine ligase A
VWSLPYSLVLRHTTEEVLDACMEAIEPEHAAITSELRKKVMNDLMEGLKDHNWFTGFDIADDLPVKFSLRQWIKLAKEVQATVFIAVHGGIGEDGTLQSLLDAEGVPYTGPGAMASKICMDKVATSVALKHLANSGVLTINKDVRQKDDLSNKPINDTWHDLTRKLQCQTLCVKPAKDGCSTGVARLCCPEDLAIYVKALEDCLLRIPPNCLSKAHGMIEMPNPPPEHLIFEPFIETDEIIVTSKFEDATGHGLTWKGHSRWVEITVGVIGKRGSMHSLSPSVTVKESGDILSLEEKFQGGTGINLTPPPLSIMSENALKRCKQHIELIANTLQLEGFSRIDAFVNVDSGEVLIIEVNTVPGMTPSTVLIHQALVEQPPLYPHQFFRKLLDLASERSM

SEQ ID NO: 9968 - protein, 377 aa, Glycine max
  peptide (1)..(377): Ceres Seq. ID no. 14308341
  misc_feature (63)..(173): Pfam Name: Pfam Description:  D-ala D-ala ligase
  misc_feature (1)..(376): NCBI GI NO: 33146883 NR Description: unknown protein
  misc_feature (139)..(376): NCBI GI NO: 34898182 NR Description: P0034A04.1
  misc_feature (1)..(149): NCBI GI NO: 34898182 NR Description: P0034A04.1
  misc_feature (1)..(278): NCBI GI NO: 26452707 NR Description: unknown protein [Arabidopsis thaliana]
  misc_feature (20)..(279): NCBI GI NO: 15231971 NR Description: expressed protein [Arabidopsis thaliana]
  misc_feature (54)..(163): NCBI GI NO: 34898182 NR Description: P0034A04.1
  misc_feature (233)..(375): NCBI GI NO: 23136007 NR Description: hypothetical protein [Cytophaga hutchinsonii]
  misc_feature (53)..(179): NCBI GI NO: 23136007 NR Description: hypothetical protein [Cytophaga hutchinsonii]
  misc_feature (56)..(101): NCBI GI NO: 23136007 NR Description: hypothetical protein [Cytophaga hutchinsonii]
  misc_feature (243)..(375): NCBI GI NO: 21674167 NR Description: D-alanine-D-alanine ligase A
MEAIEPEHAAITSELRKKVMNDLMEGLKDHNWFTGFDIADDLPVKFSLRQWIKLAKEVQATVFIAVHGGIGEDGTLQSLLDAEGVPYTGPGAMASKICMDKVATSVALKHLANSGVLTINKDVRQKDDLSNKPINDTWHDLTRKLQCQTLCVKPAKDGCSTGVARLCCPEDLAIYVKALEDCLLRIPPNCLSKAHGMIEMPNPPPEHLIFEPFIETDEIIVTSKFEDATGHGLTWKGHSRWVEITVGVIGKRGSMHSLSPSVTVKESGDILSLEEKFQGGTGINLTPPPLSIMSENALKRCKQHIELIANTLQLEGFSRIDAFVNVDSGEVLIIEVNTVPGMTPSTVLIHQALVEQPPLYPHQFFRKLLDLASERSM

SEQ ID NO: 9969 - protein, 358 aa, Glycine max
  peptide (1)..(358): Ceres Seq. ID no. 14308342
  misc_feature (44)..(154): Pfam Name: Pfam Description:  D-ala D-ala ligase
  misc_feature (1)..(357): NCBI GI NO: 33146883 NR Description: unknown protein
  misc_feature (120)..(357): NCBI GI NO: 34898182 NR Description: P0034A04.1
  misc_feature (1)..(130): NCBI GI NO: 34898182 NR Description: P0034A04.1
  misc_feature (1)..(259): NCBI GI NO: 26452707 NR Description: unknown protein [Arabidopsis thaliana]
  misc_feature (1)..(260): NCBI GI NO: 15231971 NR Description: expressed protein [Arabidopsis thaliana]
  misc_feature (35)..(144): NCBI GI NO: 34898182 NR Description: P0034A04.1
  misc_feature (214)..(356): NCBI GI NO: 23136007 NR Description: hypothetical protein [Cytophaga hutchinsonii]
  misc_feature (34)..(160): NCBI GI NO: 23136007 NR Description: hypothetical protein [Cytophaga hutchinsonii]
  misc_feature (37)..(82): NCBI GI NO: 23136007 NR Description: hypothetical protein [Cytophaga hutchinsonii]
  misc_feature (224)..(356): NCBI GI NO: 21674167 NR Description: D-alanine-D-alanine ligase A
MNDLMEGLKDHNWFTGFDIADDLPVKFSLRQWIKLAKEVQATVFIAVHGGIGEDGTLQSLLDAEGVPYTGPGAMASKICMDKVATSVALKHLANSGVLTINKDVRQKDDLSNKPINDTWHDLTRKLQCQTLCVKPAKDGCSTGVARLCCPEDLAIYVKALEDCLLRIPPNCLSKAHGMIEMPNPPPEHLIFEPFIETDEIIVTSKFEDATGHGLTWKGHSRWVEITVGVIGKRGSMHSLSPSVTVKESGDILSLEEKFQGGTGINLTPPPLSIMSENALKRCKQHIELIANTLQLEGFSRIDAFVNVDSGEVLIIEVNTVPGMTPSTVLIHQALVEQPPLYPHQFFRKLLDLASERSM

SEQ ID NO: 9970 - DNA, 1212 bp, Glycine max
  misc_feature (1)..(1212): Ceres Seq. ID no. 14310756
agttgcattcgttcattcactccctaacatagcaattactaccatttaccaaagtaaacccagagatggagtggtgtgtgtcaatgccaaagattgagctgcatgctcacctcaatggatccatccgagactccacacttcttgaactcactaaggctttgattggaaagggtgtcatgaatttctccgaagtggagcatatcatcctcaaatataaccgttccctaaaagaagttttcaagctgttcgacctaatccacattctcaccactgatcacaacactgttacaagaattaccagagaagttattgaggattttgcatcagagaatgttgtctatctggagttgaggaccactccaaagaaaaatgattctgtgggaatgagcaaacactcttatgttgaagctgtactgaaaggtctaagatcaatcacttcagttgatgtggatttcattccacattgtgaagattcaaagactctttttactcctgcaccggttattaatggacatgtgagaaaaaaaatctttgttaggcttctcttgagcattgacagaagggagacaacagaagctgcaatggaaactgtcaagcttgcattggaaatgaggccttatggggtagttggaattgacctctctggaaatccaagtattggtgattggaccacatatttgccagcattgaaatttgctcgagaacaaggtctttatgtaacacttcattgtggcgagttacctaattcaaaggagataaaaaatatgcttgacttccgtccccaaaggattggacatgcttgtttctttgaggatgaacactggagacagctgaagtcgtcgaacattccggttgaaatttgcttgacatcaaacgttaggacaatgactgttccatctatagatgttcaccactttgctcatttgtacaacgcaaaacatcctttagccctgtgtactgatgactcgggagtcttctctacctgtctctccaaggaatacaaaattgctgctgattcatttgggctgggaaggagggaaatgtttgagctatcaaggaatgctgttgagcatatattcgcagatagcaaagtaaaggaggatttaagaaaaattttcaattcagtggcaaaaaaatatggaagtgtaaccacagtttcatctttagagaatatctgcatttagatataattaatattagagctttgttgac

SEQ ID NO: 9971 - protein, 372 aa, Glycine max
  peptide (1)..(372): Ceres Seq. ID no. 14310757
  misc_feature (1)..(358): NCBI GI NO: 22328354 NR Description: adenosine deaminase -related
  misc_feature (1)..(183): NCBI GI NO: 25407300 NR Description: probable adenosine deaminase
  misc_feature (176)..(348): NCBI GI NO: 25407300 NR Description: probable adenosine deaminase
  misc_feature (2)..(357): NCBI GI NO: 34899120 NR Description: putative adenosine deaminase
  misc_feature (7)..(352): NCBI GI NO: 37540847 NR Description: similar to Adenosine deaminase CG11994-PA
  misc_feature (1)..(284): NCBI GI NO: 4115949 NR Description: contains similarity to adenosine deaminases
  misc_feature (52)..(357): NCBI GI NO: 29747908 NR Description: Unknown (protein for MGC:63264) [Mus musculus]
  misc_feature (60)..(357): NCBI GI NO: 12854977 NR Description: unnamed protein product [Mus musculus]
  misc_feature (154)..(342): NCBI GI NO: 24645260 NR Description: Adenosine deaminase CG11994-PA
  misc_feature (6)..(350): NCBI GI NO: 32403822 NR Description: hypothetical protein [Neurospora crassa]
MEWCVSMPKIELHAHLNGSIRDSTLLELTKALIGKGVMNFSEVEHIILKYNRSLKEVFKLFDLIHILTTDHNTVTRITREVIEDFASENVVYLELRTTPKKNDSVGMSKHSYVEAVLKGLRSITSVDVDFIPHCEDSKTLFTPAPVINGHVRKKIFVRLLLSIDRRETTEAAMETVKLALEMRPYGVVGIDLSGNPSIGDWTTYLPALKFAREQGLYVTLHCGELPNSKEIKNMLDFRPQRIGHACFFEDEHWRQLKSSNIPVEICLTSNVRTMTVPSIDVHHFAHLYNAKHPLALCTDDSGVFSTCLSKEYKIAADSFGLGRREMFELSRNAVEHIFADSKVKEDLRKIFNSVAKKYGSVTTVSSLENICI

SEQ ID NO: 9972 - protein, 366 aa, Glycine max
  peptide (1)..(366): Ceres Seq. ID no. 14310758
  misc_feature (1)..(352): NCBI GI NO: 22328354 NR Description: adenosine deaminase -related
  misc_feature (1)..(177): NCBI GI NO: 25407300 NR Description: probable adenosine deaminase
  misc_feature (170)..(342): NCBI GI NO: 25407300 NR Description: probable adenosine deaminase
  misc_feature (1)..(351): NCBI GI NO: 34899120 NR Description: putative adenosine deaminase
  misc_feature (1)..(346): NCBI GI NO: 37540847 NR Description: similar to Adenosine deaminase CG11994-PA
  misc_feature (1)..(278): NCBI GI NO: 4115949 NR Description: contains similarity to adenosine deaminases
  misc_feature (46)..(351): NCBI GI NO: 29747908 NR Description: Unknown (protein for MGC:63264) [Mus musculus]
  misc_feature (54)..(351): NCBI GI NO: 12854977 NR Description: unnamed protein product [Mus musculus]
  misc_feature (148)..(336): NCBI GI NO: 24645260 NR Description: Adenosine deaminase CG11994-PA
  misc_feature (1)..(344): NCBI GI NO: 32403822 NR Description: hypothetical protein [Neurospora crassa]
MPKIELHAHLNGSIRDSTLLELTKALIGKGVMNFSEVEHIILKYNRSLKEVFKLFDLIHILTTDHNTVTRITREVIEDFASENVVYLELRTTPKKNDSVGMSKHSYVEAVLKGLRSITSVDVDFIPHCEDSKTLFTPAPVINGHVRKKIFVRLLLSIDRRETTEAAMETVKLALEMRPYGVVGIDLSGNPSIGDWTTYLPALKFAREQGLYVTLHCGELPNSKEIKNMLDFRPQRIGHACFFEDEHWRQLKSSNIPVEICLTSNVRTMTVPSIDVHHFAHLYNAKHPLALCTDDSGVFSTCLSKEYKIAADSFGLGRREMFELSRNAVEHIFADSKVKEDLRKIFNSVAKKYGSVTTVSSLENICI

SEQ ID NO: 9973 - protein, 335 aa, Glycine max
  peptide (1)..(335): Ceres Seq. ID no. 14310759
  misc_feature (1)..(321): NCBI GI NO: 22328354 NR Description: adenosine deaminase -related
  misc_feature (1)..(146): NCBI GI NO: 25407300 NR Description: probable adenosine deaminase
  misc_feature (139)..(311): NCBI GI NO: 25407300 NR Description: probable adenosine deaminase
  misc_feature (1)..(320): NCBI GI NO: 34899120 NR Description: putative adenosine deaminase
  misc_feature (1)..(315): NCBI GI NO: 37540847 NR Description: similar to Adenosine deaminase CG11994-PA
  misc_feature (1)..(247): NCBI GI NO: 4115949 NR Description: contains similarity to adenosine deaminases
  misc_feature (15)..(320): NCBI GI NO: 29747908 NR Description: Unknown (protein for MGC:63264) [Mus musculus]
  misc_feature (23)..(320): NCBI GI NO: 12854977 NR Description: unnamed protein product [Mus musculus]
  misc_feature (117)..(305): NCBI GI NO: 24645260 NR Description: Adenosine deaminase CG11994-PA
  misc_feature (1)..(313): NCBI GI NO: 32403822 NR Description: hypothetical protein [Neurospora crassa]
MNFSEVEHIILKYNRSLKEVFKLFDLIHILTTDHNTVTRITREVIEDFASENVVYLELRTTPKKNDSVGMSKHSYVEAVLKGLRSITSVDVDFIPHCEDSKTLFTPAPVINGHVRKKIFVRLLLSIDRRETTEAAMETVKLALEMRPYGVVGIDLSGNPSIGDWTTYLPALKFAREQGLYVTLHCGELPNSKEIKNMLDFRPQRIGHACFFEDEHWRQLKSSNIPVEICLTSNVRTMTVPSIDVHHFAHLYNAKHPLALCTDDSGVFSTCLSKEYKIAADSFGLGRREMFELSRNAVEHIFADSKVKEDLRKIFNSVAKKYGSVTTVSSLENICI

SEQ ID NO: 9974 - DNA, 1632 bp, Glycine max
  misc_feature (1)..(1632): Ceres Seq. ID no. 15178169
tttttttctgtgggaagaagaaaatgctggttcggaggagggtgatgagttggagaagggtggcgaaggcccttcaggctctggtagctcatgtcttacttttctccttcactatttcccttgctctcaagcttgaccatgtcattcgtcactcatggtggaaggtattttttcctctatgggtttttcatgctgtggtagcacgaggcaggttttccttgcccgctccttcgatgcctcatgatcgccgatgggctccttttcattcactcgtagcaactcctctacttgttgcatttgagctacttctttgtatgcatctcgggagcagttatgtgatgaatttaagaattgtcttcatgcccctgatatttcttgaaatggcgattttgtttgataatgtcaggatgtgtagggctttgatgcctggagatgatgaaaatttgaccgacgaagcagtatgggaaactcttccgcacttctgggtttcaatatccatggtcttctttattgctgccacagtgttcacccttctaaagatatgtggtgatgttgcagctctagggtggtgggacttgtttattaacttcggcattgcacagtgctttgcgtttcttgtttgtacaaagtggcacaatccaactattcatggaggctgtcatattacagaaccgtgttcatcatcaaataccataagatacctagacttgaggacaggaggcttagttgtttacacagatgaagatagacagcaaaatgggttctgcaatctgcaggatatcggcagccatattatgaaaattccattcattggtttccaaatacttctttttatgcatttagagggaacaccatccagtgcaaaaaatctgccacactgggtcattatttccccactatttttgttgcaaggagctggggttttatttgcagcttatagattaatagagaagatagttcttttactctacattggagatattcctgaaagatactcagctatagcatcaaaatcccgtgagtgctttgggttctttcgacgtgggtcaaggttgcttggttggtggtcaatagatgaaggaagtagagaggaagaagctagacttttttgtgctgggagtcctgggtataatactttcacccctgagacggtgaagaaaatgcctagaacagatctggttgaggagatttggagactacaagctgcactgggtgagcagacacacgttacaaaatttagccaggaggagtatgaaagacttcaaaatgagaagatcttatgcagaatttgctttgaggagcagatcaacgtggtcctacttccctgcaggcatcacattctttgtagcacttgctgcgaaaaatgtaaaaggtgccctgtctgccgtggatccattgaagaaaggatgcctgtatatgatgtatagaccgagttcaatgaagatgtataggtatcttactgatcatccagcttgtgattttagatgaggcaagcgctgagaattatcaatttctcttctcatagatatgatgaacatcagaagttgtatagaattttaaacgtgttactccccctccctcctaatttttcttccatagtgcatttttgcaattctgaagggattgccaatg

SEQ ID NO: 9975 - protein, 474 aa, Glycine max
  peptide (1)..(474): Ceres Seq. ID no. 15178170
  misc_feature (427)..(461): Pfam Name: RING finger Pfam Description: Zinc finger, C3HC4 type
  misc_feature (8)..(474): NCBI GI NO: 18409134 NR Description: expressed protein [Arabidopsis thaliana]
  misc_feature (15)..(474): NCBI GI NO: 18394611 NR Description: zinc finger
  misc_feature (17)..(474): NCBI GI NO: 22330616 NR Description: zinc finger
  misc_feature (11)..(474): NCBI GI NO: 13937305 NR Description: unknown protein [Oryza sativa]
  misc_feature (17)..(239): NCBI GI NO: 25373333 NR Description: unknown protein F2P9.18
  misc_feature (361)..(422): NCBI GI NO: 25373333 NR Description: unknown protein F2P9.18
  misc_feature (280)..(350): NCBI GI NO: 25373333 NR Description: unknown protein F2P9.18
  misc_feature (231)..(474): NCBI GI NO: 12324138 NR Description: hypothetical protein; 29936-28688
  misc_feature (26)..(474): NCBI GI NO: 6714286 NR Description: F15H18.5 [Arabidopsis thaliana]
  misc_feature (55)..(158): NCBI GI NO: 6714286 NR Description: F15H18.5 [Arabidopsis thaliana]
FFCGKKKMLVRRRVMSWRRVAKALQALVAHVLLFSFTISLALKLDHVIRHSWWKVFFPLWVFHAVVARGRFSLPAPSMPHDRRWAPFHSLVATPLLVAFELLLCMHLGSSYVMNLRIVFMPLIFLEMAILFDNVRMCRALMPGDDENLTDEAVWETLPHFWVSISMVFFIAATVFTLLKICGDVAALGWWDLFINFGIAQCFAFLVCTKWHNPTIHGGCHITEPCSSSNTIRYLDLRTGGLVVYTDEDRQQNGFCNLQDIGSHIMKIPFIGFQILLFMHLEGTPSSAKNLPHWVIISPLFLLQGAGVLFAAYRLIEKIVLLLYIGDIPERYSAIASKSRECFGFFRRGSRLLGWWSIDEGSREEEARLFCAGSPGYNTFTPETVKKMPRTDLVEEIWRLQAALGEQTHVTKFSQEEYERLQNEKILCRICFEEQINVVLLPCRHHILCSTCCEKCKRCPVCRGSIEERMPVYDV

SEQ ID NO: 9976 - protein, 467 aa, Glycine max
  peptide (1)..(467): Ceres Seq. ID no. 15178171
  misc_feature (420)..(454): Pfam Name: RING finger Pfam Description: Zinc finger, C3HC4 type
  misc_feature (1)..(467): NCBI GI NO: 18409134 NR Description: expressed protein [Arabidopsis thaliana]
  misc_feature (8)..(467): NCBI GI NO: 18394611 NR Description: zinc finger
  misc_feature (10)..(467): NCBI GI NO: 22330616 NR Description: zinc finger
  misc_feature (4)..(467): NCBI GI NO: 13937305 NR Description: unknown protein [Oryza sativa]
  misc_feature (10)..(232): NCBI GI NO: 25373333 NR Description: unknown protein F2P9.18
  misc_feature (354)..(415): NCBI GI NO: 25373333 NR Description: unknown protein F2P9.18
  misc_feature (273)..(343): NCBI GI NO: 25373333 NR Description: unknown protein F2P9.18
  misc_feature (224)..(467): NCBI GI NO: 12324138 NR Description: hypothetical protein; 29936-28688
  misc_feature (19)..(467): NCBI GI NO: 6714286 NR Description: F15H18.5 [Arabidopsis thaliana]
  misc_feature (48)..(151): NCBI GI NO: 6714286 NR Description: F15H18.5 [Arabidopsis thaliana]
MLVRRRVMSWRRVAKALQALVAHVLLFSFTISLALKLDHVIRHSWWKVFFPLWVFHAVVARGRFSLPAPSMPHDRRWAPFHSLVATPLLVAFELLLCMHLGSSYVMNLRIVFMPLIFLEMAILFDNVRMCRALMPGDDENLTDEAVWETLPHFWVSISMVFFIAATVFTLLKICGDVAALGWWDLFINFGIAQCFAFLVCTKWHNPTIHGGCHITEPCSSSNTIRYLDLRTGGLVVYTDEDRQQNGFCNLQDIGSHIMKIPFIGFQILLFMHLEGTPSSAKNLPHWVIISPLFLLQGAGVLFAAYRLIEKIVLLLYIGDIPERYSAIASKSRECFGFFRRGSRLLGWWSIDEGSREEEARLFCAGSPGYNTFTPETVKKMPRTDLVEEIWRLQAALGEQTHVTKFSQEEYERLQNEKILCRICFEEQINVVLLPCRHHILCSTCCEKCKRCPVCRGSIEERMPVYDV

SEQ ID NO: 9977 - protein, 460 aa, Glycine max
  peptide (1)..(460): Ceres Seq. ID no. 15178172
  misc_feature (413)..(447): Pfam Name: RING finger Pfam Description: Zinc finger, C3HC4 type
  misc_feature (1)..(460): NCBI GI NO: 18409134 NR Description: expressed protein [Arabidopsis thaliana]
  misc_feature (1)..(460): NCBI GI NO: 18394611 NR Description: zinc finger
  misc_feature (3)..(460): NCBI GI NO: 22330616 NR Description: zinc finger
  misc_feature (1)..(460): NCBI GI NO: 13937305 NR Description: unknown protein [Oryza sativa]
  misc_feature (3)..(225): NCBI GI NO: 25373333 NR Description: unknown protein F2P9.18
  misc_feature (347)..(408): NCBI GI NO: 25373333 NR Description: unknown protein F2P9.18
  misc_feature (266)..(336): NCBI GI NO: 25373333 NR Description: unknown protein F2P9.18
  misc_feature (217)..(460): NCBI GI NO: 12324138 NR Description: hypothetical protein; 29936-28688
  misc_feature (12)..(460): NCBI GI NO: 6714286 NR Description: F15H18.5 [Arabidopsis thaliana]
  misc_feature (41)..(144): NCBI GI NO: 6714286 NR Description: F15H18.5 [Arabidopsis thaliana]
MSWRRVAKALQALVAHVLLFSFTISLALKLDHVIRHSWWKVFFPLWVFHAVVARGRFSLPAPSMPHDRRWAPFHSLVATPLLVAFELLLCMHLGSSYVMNLRIVFMPLIFLEMAILFDNVRMCRALMPGDDENLTDEAVWETLPHFWVSISMVFFIAATVFTLLKICGDVAALGWWDLFINFGIAQCFAFLVCTKWHNPTIHGGCHITEPCSSSNTIRYLDLRTGGLVVYTDEDRQQNGFCNLQDIGSHIMKIPFIGFQILLFMHLEGTPSSAKNLPHWVIISPLFLLQGAGVLFAAYRLIEKIVLLLYIGDIPERYSAIASKSRECFGFFRRGSRLLGWWSIDEGSREEEARLFCAGSPGYNTFTPETVKKMPRTDLVEEIWRLQAALGEQTHVTKFSQEEYERLQNEKILCRICFEEQINVVLLPCRHHILCSTCCEKCKRCPVCRGSIEERMPVYDV

SEQ ID NO: 9978 - DNA, 1369 bp, Glycine max
  misc_feature (1)..(1369): Ceres Seq. ID no. 14313591
aaaaaagaagagtgtatttggaggaaggaaggtaaaggaagccagaggagatggaagaagagggttctcagcagccacagttggtgcttgccgagaagctattccttctccgacaacccgttcaagacattgacaaggttcgctacaaggaggatgttttcactcacatcaaggaaaacgagatggtccctttgtacgagaccctagtcgccgattccgtgttggacttggatcgtgcccttttggacttcatgcgcgctaaaattgaagacgagctcaccaagctcgacgaaaagattgctgatgctgaggaaaacttaggagagagtgaagttcgtgaggctcacttggcaaaatccttgttttttatccggattatggacaaggagaaagccttggaacatctcaagataacagaaaccaagacagttgcagttggccagaaaatggacttggtgttttatacattgcagcttggtttcttcgacatggattttgatctcgtttccaaaagcattgacaaagccaaaaacttgtttgaagaaggtggtgattgggaaaggaagaataggctgaaagtgtacgaaggcctgtactgcatgtccactcgaaatttcaagaaggctgccaagttgtttttggattctatttcaacctttaccacctgtgaactttttccctatgacacctttatattttatacagttttgaccagcattatatcattggatagagtttccctaaagcaaaaggtagtggatgctccagagatcttgacagtgattggcaaaatcccatatctttcagagtttttgaactccttatatgattgtcaatacaagtcttttttctcagcatttgctggcctgacagagcaaattaagttggaccgctatctgcatccacacttccgatattacatgagggaggtcagaaccgttgtttattcccaatttttggaatcttacaagagtgtgacaattgaagccatggcaaaagcctttggagtgacagaggatttcattgatgtggagctatcacgctttattgcagcagggaagcttcattgtaagattgataaagttgaaggtgttcttgaaactaatcgccctgatgctaagaatgctctttaccaagcaactattaagcaaggggacttcctattgaatcggatccagaaattgtcacgtgtgatagatctttaggtcattttttgcattttagactaaaagtttattggaaaggcagagataacgacaatttcacggtattttactacgagggtgaggcacggcatttctgtagtccatttgatgtgcaaatatgattaattaaatttgccaaatccaaatatatcaatcagttttcg

SEQ ID NO: 9979 - protein, 384 aa, Glycine max
  peptide (1)..(384): Ceres Seq. ID no. 14313592
  misc_feature (249)..(353): Pfam Name: Pfam Description:  PCI domain
  misc_feature (4)..(384): NCBI GI NO: 18416433 NR Description: 26S proteasome regulatory subunit (RPN7), putative
  misc_feature (4)..(270): NCBI GI NO: 7484780 NR Description: 26S proteasome regulatory particle chain RPN7 homolog F6I7
  misc_feature (270)..(384): NCBI GI NO: 7484780 NR Description: 26S proteasome regulatory particle chain RPN7 homolog F6I7
  misc_feature (3)..(384): NCBI GI NO: 20978545 NR Description: 26S proteasome non-ATPase regulatory subunit 6
  misc_feature (153)..(384): NCBI GI NO: 2982297 NR Description: KIAA0107-like protein [Picea mariana]
  misc_feature (1)..(384): NCBI GI NO: 21313464 NR Description: RIKEN cDNA 2400006A19 [Mus musculus]
  misc_feature (1)..(384): NCBI GI NO: 7661914 NR Description: KIAA0107 gene product [Homo sapiens]
  misc_feature (1)..(384): NCBI GI NO: 20978552 NR Description: 26S proteasome non-ATPase regulatory subunit 6
  misc_feature (1)..(384): NCBI GI NO: 29436940 NR Description: Unknown (protein for MGC:56471) [Danio rerio]
  misc_feature (1)..(384): NCBI GI NO: 38454206 NR Description: Unknown (protein for MGC:72968)
MEEEGSQQPQLVLAEKLFLLRQPVQDIDKVRYKEDVFTHIKENEMVPLYETLVADSVLDLDRALLDFMRAKIEDELTKLDEKIADAEENLGESEVREAHLAKSLFFIRIMDKEKALEHLKITETKTVAVGQKMDLVFYTLQLGFFDMDFDLVSKSIDKAKNLFEEGGDWERKNRLKVYEGLYCMSTRNFKKAAKLFLDSISTFTTCELFPYDTFIFYTVLTSIISLDRVSLKQKVVDAPEILTVIGKIPYLSEFLNSLYDCQYKSFFSAFAGLTEQIKLDRYLHPHFRYYMREVRTVVYSQFLESYKSVTIEAMAKAFGVTEDFIDVELSRFIAAGKLHCKIDKVEGVLETNRPDAKNALYQATIKQGDFLLNRIQKLSRVIDL

SEQ ID NO: 9980 - protein, 340 aa, Glycine max
  peptide (1)..(340): Ceres Seq. ID no. 14313593
  misc_feature (205)..(309): Pfam Name: Pfam Description:  PCI domain
  misc_feature (1)..(340): NCBI GI NO: 18416433 NR Description: 26S proteasome regulatory subunit (RPN7), putative
  misc_feature (1)..(226): NCBI GI NO: 7484780 NR Description: 26S proteasome regulatory particle chain RPN7 homolog F6I7
  misc_feature (226)..(340): NCBI GI NO: 7484780 NR Description: 26S proteasome regulatory particle chain RPN7 homolog F6I7
  misc_feature (1)..(340): NCBI GI NO: 20978545 NR Description: 26S proteasome non-ATPase regulatory subunit 6
  misc_feature (109)..(340): NCBI GI NO: 2982297 NR Description: KIAA0107-like protein [Picea mariana]
  misc_feature (1)..(340): NCBI GI NO: 21313464 NR Description: RIKEN cDNA 2400006A19 [Mus musculus]
  misc_feature (1)..(340): NCBI GI NO: 7661914 NR Description: KIAA0107 gene product [Homo sapiens]
  misc_feature (1)..(340): NCBI GI NO: 20978552 NR Description: 26S proteasome non-ATPase regulatory subunit 6
  misc_feature (1)..(340): NCBI GI NO: 29436940 NR Description: Unknown (protein for MGC:56471) [Danio rerio]
  misc_feature (1)..(340): NCBI GI NO: 38454206 NR Description: Unknown (protein for MGC:72968)
MVPLYETLVADSVLDLDRALLDFMRAKIEDELTKLDEKIADAEENLGESEVREAHLAKSLFFIRIMDKEKALEHLKITETKTVAVGQKMDLVFYTLQLGFFDMDFDLVSKSIDKAKNLFEEGGDWERKNRLKVYEGLYCMSTRNFKKAAKLFLDSISTFTTCELFPYDTFIFYTVLTSIISLDRVSLKQKVVDAPEILTVIGKIPYLSEFLNSLYDCQYKSFFSAFAGLTEQIKLDRYLHPHFRYYMREVRTVVYSQFLESYKSVTIEAMAKAFGVTEDFIDVELSRFIAAGKLHCKIDKVEGVLETNRPDAKNALYQATIKQGDFLLNRIQKLSRVIDL

SEQ ID NO: 9981 - protein, 317 aa, Glycine max
  peptide (1)..(317): Ceres Seq. ID no. 14313594
  misc_feature (182)..(286): Pfam Name: Pfam Description:  PCI domain
  misc_feature (1)..(317): NCBI GI NO: 18416433 NR Description: 26S proteasome regulatory subunit (RPN7), putative
  misc_feature (1)..(203): NCBI GI NO: 7484780 NR Description: 26S proteasome regulatory particle chain RPN7 homolog F6I7
  misc_feature (203)..(317): NCBI GI NO: 7484780 NR Description: 26S proteasome regulatory particle chain RPN7 homolog F6I7
  misc_feature (1)..(317): NCBI GI NO: 20978545 NR Description: 26S proteasome non-ATPase regulatory subunit 6
  misc_feature (86)..(317): NCBI GI NO: 2982297 NR Description: KIAA0107-like protein [Picea mariana]
  misc_feature (1)..(317): NCBI GI NO: 21313464 NR Description: RIKEN cDNA 2400006A19 [Mus musculus]
  misc_feature (1)..(317): NCBI GI NO: 7661914 NR Description: KIAA0107 gene product [Homo sapiens]
  misc_feature (1)..(317): NCBI GI NO: 20978552 NR Description: 26S proteasome non-ATPase regulatory subunit 6
  misc_feature (1)..(317): NCBI GI NO: 29436940 NR Description: Unknown (protein for MGC:56471) [Danio rerio]
  misc_feature (1)..(317): NCBI GI NO: 38454206 NR Description: Unknown (protein for MGC:72968)
MRAKIEDELTKLDEKIADAEENLGESEVREAHLAKSLFFIRIMDKEKALEHLKITETKTVAVGQKMDLVFYTLQLGFFDMDFDLVSKSIDKAKNLFEEGGDWERKNRLKVYEGLYCMSTRNFKKAAKLFLDSISTFTTCELFPYDTFIFYTVLTSIISLDRVSLKQKVVDAPEILTVIGKIPYLSEFLNSLYDCQYKSFFSAFAGLTEQIKLDRYLHPHFRYYMREVRTVVYSQFLESYKSVTIEAMAKAFGVTEDFIDVELSRFIAAGKLHCKIDKVEGVLETNRPDAKNALYQATIKQGDFLLNRIQKLSRVIDL

SEQ ID NO: 9982 - DNA, 1584 bp, Glycine max
  misc_feature (1)..(1584): Ceres Seq. ID no. 13493536
  misc_feature (1540)..(1540): n is a, c, t, g, unknown, or other
  misc_feature (1536)..(1536): n is a, c, t, g, unknown, or other
gtgtcagaaagcaaatattgcctattcggcaatatggcggaaaatggttcaattgagctgaacaagtttgtgttgttttgtttgttgttgctaatacaagtggcagtttctgaaatcatttttgaagagcgatttgatgatggatggcgaagtaggtgggtgaaatcagactggaaaagcagtgagggcaaagcaggttcattcaagcacacagctggaaaatgggctggtgatccagatgacaaaggtattcaaacatccagtgatgccaaacactttgccatctctgcaaaaataccagaattcacaaacaagaacagaacattggtccttcagtattctgtaaaatttgagcaagagattgaatgtggtggagggtacatcaagcttctctctggatttgttaatcaaaagaagtttggtggggatacaccatatattttaatgtttggaccagatttatgtggcacggatacaaagaagctccatgtgatactctcctaccacggtcaaaattaccccataaagaaggacctgcaatgtgaaactgacaggttaactcatttctacacattcattctcaggccagatgccacatacagtgtcctggttgataatagagagagagattctggaagcatgtatacagattgggatattcttcctccacgaaaaatcaaatatgtcaaggccaaaaagcctgcagactgggaggaaagagaatacattgaagaccctgatgatgtcaaacctgagggatatgattcaatcccaagagaaattcctgacccaaatgctaaagagcctgaaaactgggatgaagaggaagatgggaaatggaaaccaccaaagataccaaatccagcatacaaaggaccatggaaaagaaagaaaatcaagaaccctaactacaaagggaaatggaaaactccatggatagataatccagagtttgaagacgaccctgatctttatgtgcttaagcctatcaagtatgtaggtattgaagtttggcaggttaaaggcggttcagtttttgacaacgttttgatttgtgacgaccctgattatgcaaaacaagttgttgaggaggtgtttgccaacagggagattgaaaaggaaggttttgaggaagcagagaaagtgagaaaagccaaagaggaggaggaggctcaaagagcaagagaagaaggtgaaaggcgtagacgagagagaggtcatgatcgacgatatcgggacagatatagagacaaatatagaaggcatcgctatgattacgatggtcatgacgagctttgatgggataaaacgtccttctcaattatctggttgacaaatttcaagattgttatgaattatagttacattgatagtccatctcatgttactttccaagggaaactttttaattttaaataaaagtggtttatttgtcgcatatctatataggagtattatttttgtcttgtcttcagttgtcatgcatttactatagactggggaatataaacccaaacccaatttgccatcgataanaagnttgcaacaagggctatagaaatgtgcacgagttttttttttttt

SEQ ID NO: 9983 - protein, 432 aa, Glycine max
  peptide (1)..(432): Ceres Seq. ID no. 13493537
  misc_feature (39)..(351): Pfam Name: Pfam Description:  Calreticulin family
  misc_feature (21)..(432): NCBI GI NO: 18390896 NR Description: calreticulin 3 (CRT3) [Arabidopsis thaliana]
  misc_feature (21)..(432): NCBI GI NO: 12643531 NR Description: Calreticulin 3 precursor
  misc_feature (21)..(432): NCBI GI NO: 27311777 NR Description: calreticulin, putative [Arabidopsis thaliana]
  misc_feature (25)..(392): NCBI GI NO: 11131745 NR Description: Calreticulin precursor
  misc_feature (23)..(431): NCBI GI NO: 9858814 NR Description: calreticulin [Pinus taeda]
  misc_feature (30)..(432): NCBI GI NO: 11131769 NR Description: Calreticulin precursor
  misc_feature (24)..(432): NCBI GI NO: 12643243 NR Description: CALRETICULIN 2 PRECURSOR
  misc_feature (25)..(432): NCBI GI NO: 11131631 NR Description: Calreticulin precursor
  misc_feature (28)..(432): NCBI GI NO: 11131949 NR Description: Calreticulin precursor
  misc_feature (19)..(408): NCBI GI NO: 15223517 NR Description: calreticulin 1 (CRT1) [Arabidopsis thaliana]
VSESKYCLFGNMAENGSIELNKFVLFCLLLLIQVAVSEIIFEERFDDGWRSRWVKSDWKSSEGKAGSFKHTAGKWAGDPDDKGIQTSSDAKHFAISAKIPEFTNKNRTLVLQYSVKFEQEIECGGGYIKLLSGFVNQKKFGGDTPYILMFGPDLCGTDTKKLHVILSYHGQNYPIKKDLQCETDRLTHFYTFILRPDATYSVLVDNRERDSGSMYTDWDILPPRKIKYVKAKKPADWEEREYIEDPDDVKPEGYDSIPREIPDPNAKEPENWDEEEDGKWKPPKIPNPAYKGPWKRKKIKNPNYKGKWKTPWIDNPEFEDDPDLYVLKPIKYVGIEVWQVKGGSVFDNVLICDDPDYAKQVVEEVFANREIEKEGFEEAEKVRKAKEEEEAQRAREEGERRRRERGHDRRYRDRYRDKYRRHRYDYDGHDEL

SEQ ID NO: 9984 - protein, 421 aa, Glycine max
  peptide (1)..(421): Ceres Seq. ID no. 13493538
  misc_feature (28)..(340): Pfam Name: Pfam Description:  Calreticulin family
  misc_feature (10)..(421): NCBI GI NO: 18390896 NR Description: calreticulin 3 (CRT3) [Arabidopsis thaliana]
  misc_feature (10)..(421): NCBI GI NO: 12643531 NR Description: Calreticulin 3 precursor
  misc_feature (10)..(421): NCBI GI NO: 27311777 NR Description: calreticulin, putative [Arabidopsis thaliana]
  misc_feature (14)..(381): NCBI GI NO: 11131745 NR Description: Calreticulin precursor
  misc_feature (12)..(420): NCBI GI NO: 9858814 NR Description: calreticulin [Pinus taeda]
  misc_feature (19)..(421): NCBI GI NO: 11131769 NR Description: Calreticulin precursor
  misc_feature (13)..(421): NCBI GI NO: 12643243 NR Description: CALRETICULIN 2 PRECURSOR
  misc_feature (14)..(421): NCBI GI NO: 11131631 NR Description: Calreticulin precursor
  misc_feature (17)..(421): NCBI GI NO: 11131949 NR Description: Calreticulin precursor
  misc_feature (8)..(397): NCBI GI NO: 15223517 NR Description: calreticulin 1 (CRT1) [Arabidopsis thaliana]
MAENGSIELNKFVLFCLLLLIQVAVSEIIFEERFDDGWRSRWVKSDWKSSEGKAGSFKHTAGKWAGDPDDKGIQTSSDAKHFAISAKIPEFTNKNRTLVLQYSVKFEQEIECGGGYIKLLSGFVNQKKFGGDTPYILMFGPDLCGTDTKKLHVILSYHGQNYPIKKDLQCETDRLTHFYTFILRPDATYSVLVDNRERDSGSMYTDWDILPPRKIKYVKAKKPADWEEREYIEDPDDVKPEGYDSIPREIPDPNAKEPENWDEEEDGKWKPPKIPNPAYKGPWKRKKIKNPNYKGKWKTPWIDNPEFEDDPDLYVLKPIKYVGIEVWQVKGGSVFDNVLICDDPDYAKQVVEEVFANREIEKEGFEEAEKVRKAKEEEEAQRAREEGERRRRERGHDRRYRDRYRDKYRRHRYDYDGHDEL

SEQ ID NO: 9985 - protein, 284 aa, Glycine max
  peptide (1)..(284): Ceres Seq. ID no. 13493539
  misc_feature (1)..(203): Pfam Name: Pfam Description:  Calreticulin family
  misc_feature (1)..(284): NCBI GI NO: 18390896 NR Description: calreticulin 3 (CRT3) [Arabidopsis thaliana]
  misc_feature (1)..(284): NCBI GI NO: 12643531 NR Description: Calreticulin 3 precursor
  misc_feature (1)..(284): NCBI GI NO: 27311777 NR Description: calreticulin, putative [Arabidopsis thaliana]
  misc_feature (1)..(244): NCBI GI NO: 11131745 NR Description: Calreticulin precursor
  misc_feature (1)..(283): NCBI GI NO: 9858814 NR Description: calreticulin [Pinus taeda]
  misc_feature (1)..(284): NCBI GI NO: 11131769 NR Description: Calreticulin precursor
  misc_feature (1)..(284): NCBI GI NO: 12643243 NR Description: CALRETICULIN 2 PRECURSOR
  misc_feature (1)..(284): NCBI GI NO: 11131631 NR Description: Calreticulin precursor
  misc_feature (1)..(284): NCBI GI NO: 11131949 NR Description: Calreticulin precursor
  misc_feature (1)..(260): NCBI GI NO: 15223517 NR Description: calreticulin 1 (CRT1) [Arabidopsis thaliana]
MFGPDLCGTDTKKLHVILSYHGQNYPIKKDLQCETDRLTHFYTFILRPDATYSVLVDNRERDSGSMYTDWDILPPRKIKYVKAKKPADWEEREYIEDPDDVKPEGYDSIPREIPDPNAKEPENWDEEEDGKWKPPKIPNPAYKGPWKRKKIKNPNYKGKWKTPWIDNPEFEDDPDLYVLKPIKYVGIEVWQVKGGSVFDNVLICDDPDYAKQVVEEVFANREIEKEGFEEAEKVRKAKEEEEAQRAREEGERRRRERGHDRRYRDRYRDKYRRHRYDYDGHDEL

SEQ ID NO: 9986 - DNA, 1336 bp, Glycine max
  misc_feature (1)..(1336): Ceres Seq. ID no. 15226515
atagtatcttcagaatgctttctgtgagggatttttggaggcggcataggaggaaggttttcgtcactgttggtgttttaggaagtgggtatcttttgtataagctctacggtgctcacaggcatggggttcaggaacttgaaagagaactcgcagttcagagggaaactgaggagcttatgaaggctcagatgcaagctcactttgagaatattcagaggatgtctgatgtaacattgccgcatgctatgcacgagttaagttgtcggatcacagaagagttggatctttctcaccttcttgaaaggttaatacaaggaaagggtcaaccaaacaccttaacccaatcagagaaactagatttatggagtagactcaaaattctaagttttacaagaatgacattgtcagtatgggctacaacaatgcttagcttatatacaaaagttcaagtcaatatactaggaaggcatttatacattgatacagcacgaagccttggaatctctgattcagtagaaagtggagatgtggtcgatagggaggaccagaagaaatttctagatagtgttgattttctctctcagcatggtatgcctgccttgatttctgatatggaagcagcaacaaaagaagttctcaaaggaaagcagttgagtactttcttcaacagcacaacgcttcatgaaactatcatgcagatactcaacaccttcatgagcatggggactccaaattcctggataaagtatatgatacctgaagatgttagaccgtattccacaacctctggcagtgatgacccggtaccatttgacgtgactgaatttgaacaacttatgattgaagcacgggcagtattatcaagtgctgaatttggaagcattgtagagatatctctgaaagcagtggtggatacactggtggagcttatgaggactaaatttagtggaggaagtgtagctgagggcatgccgctggccagagtgttgcctcaagttgcacagatgtgtcctttgctcctcggagaacccagcaaaaatcagttcatccaaatcattaaaaatatacaggaggttgaactttttttcactctcctctatgcaaatatgccacatgagtagtgattaattatttatgtttccaaccaaagagattaaatttattgcatgaaaggcatcgggcagtgtacaaaaaattagacgaggttcaaaagagagatataggtgctaaattgttagctttcatcttttcaatatgacatttcccatttgttgtaattagtgattagtgatgcataatgctcccactttggctcaaacgtggcatttggtgg

SEQ ID NO: 9987 - protein, 373 aa, Glycine max
  peptide (1)..(373): Ceres Seq. ID no. 15226516
  misc_feature (8)..(370): Pfam Name: Pfam Description:  Peroxin-3
  misc_feature (8)..(371): NCBI GI NO: 22330115 NR Description: expressed protein [Arabidopsis thaliana]
  misc_feature (8)..(371): NCBI GI NO: 18401790 NR Description: expressed protein [Arabidopsis thaliana]
  misc_feature (8)..(371): NCBI GI NO: 21554142 NR Description: unknown [Arabidopsis thaliana]
  misc_feature (63)..(360): NCBI GI NO: 12597815 NR Description: lysine and histidine specific transporter
  misc_feature (15)..(66): NCBI GI NO: 12597815 NR Description: lysine and histidine specific transporter
  misc_feature (63)..(348): NCBI GI NO: 12321594 NR Description: hypothetical protein, 3' partial
  misc_feature (15)..(66): NCBI GI NO: 12321594 NR Description: hypothetical protein, 3' partial
  misc_feature (176)..(371): NCBI GI NO: 9294071 NR Description: gene_id:MRC8.15~unknown protein
  misc_feature (7)..(367): NCBI GI NO: 4505727 NR Description: peroxisomal biogenesis factor 3 [Homo sapiens]
  misc_feature (7)..(367): NCBI GI NO: 12230450 NR Description: Peroxisomal assembly protein PEX3 (Peroxin-3)
SIFRMLSVRDFWRRHRRKVFVTVGVLGSGYLLYKLYGAHRHGVQELERELAVQRETEELMKAQMQAHFENIQRMSDVTLPHAMHELSCRITEELDLSHLLERLIQGKGQPNTLTQSEKLDLWSRLKILSFTRMTLSVWATTMLSLYTKVQVNILGRHLYIDTARSLGISDSVESGDVVDREDQKKFLDSVDFLSQHGMPALISDMEAATKEVLKGKQLSTFFNSTTLHETIMQILNTFMSMGTPNSWIKYMIPEDVRPYSTTSGSDDPVPFDVTEFEQLMIEARAVLSSAEFGSIVEISLKAVVDTLVELMRTKFSGGSVAEGMPLARVLPQVAQMCPLLLGEPSKNQFIQIIKNIQEVELFFTLLYANMPHE

SEQ ID NO: 9988 - protein, 369 aa, Glycine max
  peptide (1)..(369): Ceres Seq. ID no. 15226517
  misc_feature (4)..(366): Pfam Name: Pfam Description:  Peroxin-3
  misc_feature (4)..(367): NCBI GI NO: 22330115 NR Description: expressed protein [Arabidopsis thaliana]
  misc_feature (4)..(367): NCBI GI NO: 18401790 NR Description: expressed protein [Arabidopsis thaliana]
  misc_feature (4)..(367): NCBI GI NO: 21554142 NR Description: unknown [Arabidopsis thaliana]
  misc_feature (59)..(356): NCBI GI NO: 12597815 NR Description: lysine and histidine specific transporter
  misc_feature (11)..(62): NCBI GI NO: 12597815 NR Description: lysine and histidine specific transporter
  misc_feature (59)..(344): NCBI GI NO: 12321594 NR Description: hypothetical protein, 3' partial
  misc_feature (11)..(62): NCBI GI NO: 12321594 NR Description: hypothetical protein, 3' partial
  misc_feature (172)..(367): NCBI GI NO: 9294071 NR Description: gene_id:MRC8.15~unknown protein
  misc_feature (3)..(363): NCBI GI NO: 4505727 NR Description: peroxisomal biogenesis factor 3 [Homo sapiens]
  misc_feature (3)..(363): NCBI GI NO: 12230450 NR Description: Peroxisomal assembly protein PEX3 (Peroxin-3)
MLSVRDFWRRHRRKVFVTVGVLGSGYLLYKLYGAHRHGVQELERELAVQRETEELMKAQMQAHFENIQRMSDVTLPHAMHELSCRITEELDLSHLLERLIQGKGQPNTLTQSEKLDLWSRLKILSFTRMTLSVWATTMLSLYTKVQVNILGRHLYIDTARSLGISDSVESGDVVDREDQKKFLDSVDFLSQHGMPALISDMEAATKEVLKGKQLSTFFNSTTLHETIMQILNTFMSMGTPNSWIKYMIPEDVRPYSTTSGSDDPVPFDVTEFEQLMIEARAVLSSAEFGSIVEISLKAVVDTLVELMRTKFSGGSVAEGMPLARVLPQVAQMCPLLLGEPSKNQFIQIIKNIQEVELFFTLLYANMPHE

SEQ ID NO: 9989 - protein, 314 aa, Glycine max
  peptide (1)..(314): Ceres Seq. ID no. 15226518
  misc_feature (1)..(311): Pfam Name: Pfam Description:  Peroxin-3
  misc_feature (1)..(312): NCBI GI NO: 22330115 NR Description: expressed protein [Arabidopsis thaliana]
  misc_feature (1)..(312): NCBI GI NO: 18401790 NR Description: expressed protein [Arabidopsis thaliana]
  misc_feature (1)..(312): NCBI GI NO: 21554142 NR Description: unknown [Arabidopsis thaliana]
  misc_feature (4)..(301): NCBI GI NO: 12597815 NR Description: lysine and histidine specific transporter
  misc_feature (4)..(289): NCBI GI NO: 12321594 NR Description: hypothetical protein, 3' partial
  misc_feature (117)..(312): NCBI GI NO: 9294071 NR Description: gene_id:MRC8.15~unknown protein
  misc_feature (1)..(308): NCBI GI NO: 4505727 NR Description: peroxisomal biogenesis factor 3 [Homo sapiens]
  misc_feature (1)..(308): NCBI GI NO: 12230450 NR Description: Peroxisomal assembly protein PEX3 (Peroxin-3)
  misc_feature (1)..(308): NCBI GI NO: 13786194 NR Description: peroxisomal biogenesis factor 3
  misc_feature (1)..(308): NCBI GI NO: 9910484 NR Description: peroxisomal biogenesis factor 3
MKAQMQAHFENIQRMSDVTLPHAMHELSCRITEELDLSHLLERLIQGKGQPNTLTQSEKLDLWSRLKILSFTRMTLSVWATTMLSLYTKVQVNILGRHLYIDTARSLGISDSVESGDVVDREDQKKFLDSVDFLSQHGMPALISDMEAATKEVLKGKQLSTFFNSTTLHETIMQILNTFMSMGTPNSWIKYMIPEDVRPYSTTSGSDDPVPFDVTEFEQLMIEARAVLSSAEFGSIVEISLKAVVDTLVELMRTKFSGGSVAEGMPLARVLPQVAQMCPLLLGEPSKNQFIQIIKNIQEVELFFTLLYANMPHE

SEQ ID NO: 9990 - DNA, 1299 bp, Glycine max
  misc_feature (1)..(1299): Ceres Seq. ID no. 13637958
agatgaagtaggcgaaggctgaaggaaacctctggaattttctttggccaacggcgattccactaataaatatacgtttgttgtgtttccgaggcctgtgaatcggaattggggtttcttcaatcggaatcgcgaacaacatggaagtgagaattgggcaaagggtgtctcgcggaatgctccctctcctcgctctccacaccgtcagcgagtattaccgctccgaccacaaacctccgttcaccgccgccctcatcgccgccaacaccctcatctacctccgcccctccttcctcgatcccctcattccccccattgaacaagtctggttcaacccccacctcatcctcaagaacaaggacttgaaacgcttcttgttgtcgccgttttaccatatcggagaaccgcacctggtttacaacatgctatcccttctctggaaggggtttcagttggaaacctcaatgggaagcgtcgatttcgcttccatagtcgcttccttgctcgttctctcccagggcgtaaccctaatgttatccaaatcactgcttctgttcttcgactacgagagatcctactacagcgaatactccgtcggattctccggcgtcctcttcgccatgaaagtcgttctcaactcccaatcggagaactacacctccgtctacggaattatcgttccgtcccgttacgctgcgtgggctgaattggttctcgctcagcttctcgtgccgggcgtgtcgtttctcggccatctcggtggcattctggcggggcttctttatctgaagctgaggagtacttattcgggttctaaccctataaaagttctcatcagagggattgttgatgctgtgaagtggccttttaagttcttgcggcggaggcggggacggatcaccggaaggggaacagttggaagtaacagggcgtggagatgccagacgtgtacctatgacaacaacaatggttccctgagagtgtgtgagatttgtgggacgattagggttgtcaatggagtgtcctcttttcagaggagctcccgttctgatgggcttcctttggatgagttgcgccgccggagaatcgacaggtttggaggcaggtgatcgtggttagttttgagttcgctgcagcttctggtaaataatactattggatattgagattcaacacatgttagacttttttgtttcgacatatatatgttagttgtagaagtatgacgactgagcaatgaatgttttcatgctatgctagattgtttggcattttcaagaaaaaaaaaatgaaatttgg

SEQ ID NO: 9991 - protein, 322 aa, Glycine max
  peptide (1)..(322): Ceres Seq. ID no. 13637959
  misc_feature (6)..(319): NCBI GI NO: 9294149 NR Description: gene_id:MKP6.17~unknown protein
  misc_feature (6)..(319): NCBI GI NO: 30684602 NR Description: expressed protein [Arabidopsis thaliana]
  misc_feature (11)..(319): NCBI GI NO: 34902516 NR Description: P0581F09.16
  misc_feature (31)..(185): NCBI GI NO: 18419592 NR Description: unknown [Narcissus pseudonarcissus]
  misc_feature (7)..(215): NCBI GI NO: 16041108 NR Description: hypothetical protein [Macaca fascicularis]
  misc_feature (7)..(215): NCBI GI NO: 33300639 NR Description: hypothetical protein DKFZp547E052 [Homo sapiens]
  misc_feature (7)..(215): NCBI GI NO: 12853402 NR Description: unnamed protein product [Mus musculus]
  misc_feature (7)..(215): NCBI GI NO: 26325686 NR Description: unnamed protein product [Mus musculus]
  misc_feature (7)..(215): NCBI GI NO: 34876979 NR Description: hypothetical protein XP_237331 [Rattus norvegicus]
  misc_feature (33)..(248): NCBI GI NO: 18410961 NR Description: expressed protein [Arabidopsis thaliana]
MEVRIGQRVSRGMLPLLALHTVSEYYRSDHKPPFTAALIAANTLIYLRPSFLDPLIPPIEQVWFNPHLILKNKDLKRFLLSPFYHIGEPHLVYNMLSLLWKGFQLETSMGSVDFASIVASLLVLSQGVTLMLSKSLLLFFDYERSYYSEYSVGFSGVLFAMKVVLNSQSENYTSVYGIIVPSRYAAWAELVLAQLLVPGVSFLGHLGGILAGLLYLKLRSTYSGSNPIKVLIRGIVDAVKWPFKFLRRRRGRITGRGTVGSNRAWRCQTCTYDNNNGSLRVCEICGTIRVVNGVSSFQRSSRSDGLPLDELRRRRIDRFGGR

SEQ ID NO: 9992 - protein, 310 aa, Glycine max
  peptide (1)..(310): Ceres Seq. ID no. 13637960
  misc_feature (1)..(307): NCBI GI NO: 9294149 NR Description: gene_id:MKP6.17~unknown protein
  misc_feature (1)..(307): NCBI GI NO: 30684602 NR Description: expressed protein [Arabidopsis thaliana]
  misc_feature (1)..(307): NCBI GI NO: 34902516 NR Description: P0581F09.16
  misc_feature (19)..(173): NCBI GI NO: 18419592 NR Description: unknown [Narcissus pseudonarcissus]
  misc_feature (1)..(203): NCBI GI NO: 16041108 NR Description: hypothetical protein [Macaca fascicularis]
  misc_feature (1)..(203): NCBI GI NO: 33300639 NR Description: hypothetical protein DKFZp547E052 [Homo sapiens]
  misc_feature (1)..(203): NCBI GI NO: 12853402 NR Description: unnamed protein product [Mus musculus]
  misc_feature (1)..(203): NCBI GI NO: 26325686 NR Description: unnamed protein product [Mus musculus]
  misc_feature (1)..(203): NCBI GI NO: 34876979 NR Description: hypothetical protein XP_237331 [Rattus norvegicus]
  misc_feature (21)..(236): NCBI GI NO: 18410961 NR Description: expressed protein [Arabidopsis thaliana]
MLPLLALHTVSEYYRSDHKPPFTAALIAANTLIYLRPSFLDPLIPPIEQVWFNPHLILKNKDLKRFLLSPFYHIGEPHLVYNMLSLLWKGFQLETSMGSVDFASIVASLLVLSQGVTLMLSKSLLLFFDYERSYYSEYSVGFSGVLFAMKVVLNSQSENYTSVYGIIVPSRYAAWAELVLAQLLVPGVSFLGHLGGILAGLLYLKLRSTYSGSNPIKVLIRGIVDAVKWPFKFLRRRRGRITGRGTVGSNRAWRCQTCTYDNNNGSLRVCEICGTIRVVNGVSSFQRSSRSDGLPLDELRRRRIDRFGGR

SEQ ID NO: 9993 - protein, 228 aa, Glycine max
  peptide (1)..(228): Ceres Seq. ID no. 13637961
  misc_feature (1)..(225): NCBI GI NO: 9294149 NR Description: gene_id:MKP6.17~unknown protein
  misc_feature (1)..(225): NCBI GI NO: 30684602 NR Description: expressed protein [Arabidopsis thaliana]
  misc_feature (1)..(225): NCBI GI NO: 34902516 NR Description: P0581F09.16
  misc_feature (1)..(91): NCBI GI NO: 18419592 NR Description: unknown [Narcissus pseudonarcissus]
  misc_feature (1)..(121): NCBI GI NO: 16041108 NR Description: hypothetical protein [Macaca fascicularis]
  misc_feature (1)..(121): NCBI GI NO: 33300639 NR Description: hypothetical protein DKFZp547E052 [Homo sapiens]
  misc_feature (1)..(121): NCBI GI NO: 12853402 NR Description: unnamed protein product [Mus musculus]
  misc_feature (1)..(121): NCBI GI NO: 26325686 NR Description: unnamed protein product [Mus musculus]
  misc_feature (1)..(121): NCBI GI NO: 34876979 NR Description: hypothetical protein XP_237331 [Rattus norvegicus]
  misc_feature (1)..(154): NCBI GI NO: 18410961 NR Description: expressed protein [Arabidopsis thaliana]
MLSLLWKGFQLETSMGSVDFASIVASLLVLSQGVTLMLSKSLLLFFDYERSYYSEYSVGFSGVLFAMKVVLNSQSENYTSVYGIIVPSRYAAWAELVLAQLLVPGVSFLGHLGGILAGLLYLKLRSTYSGSNPIKVLIRGIVDAVKWPFKFLRRRRGRITGRGTVGSNRAWRCQTCTYDNNNGSLRVCEICGTIRVVNGVSSFQRSSRSDGLPLDELRRRRIDRFGGR

SEQ ID NO: 9994 - DNA, 876 bp, Glycine max
  misc_feature (1)..(876): Ceres Seq. ID no. 14309686
gggcaggaagatctgcagacaacatttggacgcggtagagaagaaagaaaggaaagggtagggtagatcaggcaggcttcagttcagccatgagaactcacactcacacttacacttatactattttctctctaattcttctctccttatttcttcgaacccattccgaggttataacgttaacctctgatacatttaatgataagatcaaggagaaagacactgcatggtttgtgaaattctgcgttccctggtgcaagcattgtaagaatcttggttcattgtgggatgatttggggaaagcaatggaaggagaagatgaaatagaggttggagaagtcgattgcggcatggacaaagcagtatgttccaaagttgatattcactcctatcctacctttaaggttttctatgatggtgaagaagtagccagataccaaggtacaagagatgttgaatcaatgaaaacctttgttttggaagaagctgaaaaggcagcagcaaaagcacttgaaagtaacaaagaattataacaacttttgaggtgcagtcattatctggattacaactagctctttactgtgggtggtgcacatcccagataagtaatcacctttgggttcaggctgagacattcattcttctctgttctgatcaacatttgtttgtttgacgtagcagttgtgagttaagaactaatttcgtacactaccacaatttctttctgctatactccacaattttcttttttaggtttatttatactctactaaactgatagtggcttgtcatgtttaaagtttcaatataatgatcagtgaattatgaatcgtacctcaggatttgtttatataatcatttggtcttttgaatgct

SEQ ID NO: 9995 - protein, 147 aa, Glycine max
  peptide (1)..(147): Ceres Seq. ID no. 14309687
  misc_feature (27)..(134): Pfam Name: Pfam Description:  Thioredoxin
  misc_feature (15)..(147): NCBI GI NO: 15223058 NR Description: protein disulfide isomerase - related
  misc_feature (15)..(131): NCBI GI NO: 1532175 NR Description: similar to protein disulfide isomerase
  misc_feature (39)..(147): NCBI GI NO: 8778824 NR Description: T6D22.5 [Arabidopsis thaliana]
  misc_feature (28)..(134): NCBI GI NO: 19353593 NR Description: similar to thioredoxin related protein
  misc_feature (28)..(134): NCBI GI NO: 21703732 NR Description: thioredoxin domain containing 5 [Mus musculus]
  misc_feature (28)..(134): NCBI GI NO: 37574006 NR Description: Txndc5 protein [Mus musculus]
  misc_feature (28)..(134): NCBI GI NO: 29839593 NR Description: Thioredoxin domain containing protein 5 precursor
  misc_feature (28)..(134): NCBI GI NO: 34875200 NR Description: similar to expressed sequence AL022641
  misc_feature (28)..(134): NCBI GI NO: 13540604 NR Description: thioredoxin domain containing 5
  misc_feature (28)..(134): NCBI GI NO: 21740140 NR Description: hypothetical protein [Homo sapiens]
MRTHTHTYTYTIFSLILLSLFLRTHSEVITLTSDTFNDKIKEKDTAWFVKFCVPWCKHCKNLGSLWDDLGKAMEGEDEIEVGEVDCGMDKAVCSKVDIHSYPTFKVFYDGEEVARYQGTRDVESMKTFVLEEAEKAAAKALESNKEL

SEQ ID NO: 9996 - protein, 75 aa, Glycine max
  peptide (1)..(75): Ceres Seq. ID no. 14309688
  misc_feature (1)..(62): Pfam Name: Pfam Description:  Thioredoxin
  misc_feature (1)..(75): NCBI GI NO: 15223058 NR Description: protein disulfide isomerase - related
  misc_feature (1)..(59): NCBI GI NO: 1532175 NR Description: similar to protein disulfide isomerase
  misc_feature (1)..(75): NCBI GI NO: 8778824 NR Description: T6D22.5 [Arabidopsis thaliana]
  misc_feature (1)..(62): NCBI GI NO: 19353593 NR Description: similar to thioredoxin related protein
  misc_feature (1)..(62): NCBI GI NO: 21703732 NR Description: thioredoxin domain containing 5 [Mus musculus]
  misc_feature (1)..(62): NCBI GI NO: 37574006 NR Description: Txndc5 protein [Mus musculus]
  misc_feature (1)..(62): NCBI GI NO: 29839593 NR Description: Thioredoxin domain containing protein 5 precursor
  misc_feature (1)..(62): NCBI GI NO: 34875200 NR Description: similar to expressed sequence AL022641
  misc_feature (1)..(62): NCBI GI NO: 13540604 NR Description: thioredoxin domain containing 5
  misc_feature (1)..(62): NCBI GI NO: 21740140 NR Description: hypothetical protein [Homo sapiens]
MEGEDEIEVGEVDCGMDKAVCSKVDIHSYPTFKVFYDGEEVARYQGTRDVESMKTFVLEEAEKAAAKALESNKEL

SEQ ID NO: 9997 - DNA, 1375 bp, Glycine max
  misc_feature (1)..(1375): Ceres Seq. ID no. 15171508
acatgccaactattccaaagtcattacttcaccctctcatcgtatcaaaagagtgttttacttcaaggttcttggcaaaatcacctgtatctctaagtgtgtaatacaattagtcatctctgtccaattgttttctgtttttagaacctagcacttcaattcttaagctgagaacatataagatagagtaatcaatcatgccatttggtttggtctcactctcggcctggaacaagcgccgtagaagcaaatctcaagatcatacagatccctgggtttacaaacctgcacagctttggcaacttgaagatcaaacaccacgacctacaaaaaggctacatggatcatctgtttacacactcaaggagatggaggaggcaacatgttcattcagtgatgagaatctgcttggaaaaggaggatttggcaaagtctatcggggcactttgcggtcaggagaggttgtagcaatcaagaaaatggagttgccagcaattaaagcagctgagggggaacgcgagtttcgagtcgaagttgacatcttgagcagacttgaccacccaaatcttgtttctttgataggctactgtgctgatggaaagcatagattcctagtatatgaatatatgcgtaaagggaacctgcaggatcatttgaatggaattggggaaagaaacatggattggcctcgaagactccaagtggcactgggagctgcaaaaggacttgcttatctccattcaagttctgatgttggaattcctattgttcatagggatttcaaatcgaccaatattctcttagacgataactttgaagcaaagatatctgattttggactcgcgaagttaatgccagaagggcaagagacacatgtgactgccagagtgcttggtacctttggctattttgatcccgagtatacatcgactgggaaactcactctacagagtgatgtttatgcttttggtgttgttcttttggagcttttgactggacgtcgagctgtagatctaaaccaaggtcccaacgatcaaaaccttgtactacaggtgaggcacatactgcatgaccgcaagaagcttcgtaaggtgatagatccagagatggctcgaaattcttacaccattcagtctatagtcatgtttgccaatctggcatcaagatgcgttcgtactgagagtaatgaaagaccttcaatcgtagaatgtataaaagaactcctaatgattatctatacaaattcaaaaggcttgggaatggttatgcatagtttgagaatgatctagtgaaatcacaagtttagacattggaattatgatgatttcttgatgagaataaaaagtgaactccaaaagtgatcagtacaaagcac

SEQ ID NO: 9998 - protein, 363 aa, Glycine max
  peptide (1)..(363): Ceres Seq. ID no. 15171509
  misc_feature (1)..(363): NCBI GI NO: 30102706 NR Description: At1g24030 [Arabidopsis thaliana]
  misc_feature (58)..(363): NCBI GI NO: 25287587 NR Description: protein T23E23.18
  misc_feature (58)..(363): NCBI GI NO: 15221649 NR Description: protein kinase family [Arabidopsis thaliana]
  misc_feature (30)..(342): NCBI GI NO: 15238886 NR Description: protein kinase family [Arabidopsis thaliana]
  misc_feature (50)..(342): NCBI GI NO: 34899302 NR Description: putative protein serine/threonine kinase
  misc_feature (50)..(342): NCBI GI NO: 34395193 NR Description: putative protein serine/threonine kinase
  misc_feature (49)..(342): NCBI GI NO: 8778594 NR Description: F5M15.3 [Arabidopsis thaliana]
  misc_feature (49)..(342): NCBI GI NO: 15217992 NR Description: protein kinase -related [Arabidopsis thaliana]
  misc_feature (48)..(337): NCBI GI NO: 34902958 NR Description: putative protein kinase
  misc_feature (53)..(342): NCBI GI NO: 15240038 NR Description: protein kinase family [Arabidopsis thaliana]
MPFGLVSLSAWNKRRRSKSQDHTDPWVYKPAQLWQLEDQTPRPTKRLHGSSVYTLKEMEEATCSFSDENLLGKGGFGKVYRGTLRSGEVVAIKKMELPAIKAAEGEREFRVEVDILSRLDHPNLVSLIGYCADGKHRFLVYEYMRKGNLQDHLNGIGERNMDWPRRLQVALGAAKGLAYLHSSSDVGIPIVHRDFKSTNILLDDNFEAKISDFGLAKLMPEGQETHVTARVLGTFGYFDPEYTSTGKLTLQSDVYAFGVVLLELLTGRRAVDLNQGPNDQNLVLQVRHILHDRKKLRKVIDPEMARNSYTIQSIVMFANLASRCVRTESNERPSIVECIKELLMIIYTNSKGLGMVMHSLRMI

SEQ ID NO: 9999 - protein, 306 aa, Glycine max
  peptide (1)..(306): Ceres Seq. ID no. 15171510
  misc_feature (1)..(306): NCBI GI NO: 30102706 NR Description: At1g24030 [Arabidopsis thaliana]
  misc_feature (1)..(306): NCBI GI NO: 25287587 NR Description: protein T23E23.18
  misc_feature (1)..(306): NCBI GI NO: 15221649 NR Description: protein kinase family [Arabidopsis thaliana]
  misc_feature (1)..(285): NCBI GI NO: 15238886 NR Description: protein kinase family [Arabidopsis thaliana]
  misc_feature (1)..(285): NCBI GI NO: 34899302 NR Description: putative protein serine/threonine kinase
  misc_feature (1)..(285): NCBI GI NO: 34395193 NR Description: putative protein serine/threonine kinase
  misc_feature (1)..(285): NCBI GI NO: 8778594 NR Description: F5M15.3 [Arabidopsis thaliana]
  misc_feature (1)..(285): NCBI GI NO: 15217992 NR Description: protein kinase -related [Arabidopsis thaliana]
  misc_feature (1)..(280): NCBI GI NO: 34902958 NR Description: putative protein kinase
  misc_feature (1)..(285): NCBI GI NO: 15240038 NR Description: protein kinase family [Arabidopsis thaliana]
MEEATCSFSDENLLGKGGFGKVYRGTLRSGEVVAIKKMELPAIKAAEGEREFRVEVDILSRLDHPNLVSLIGYCADGKHRFLVYEYMRKGNLQDHLNGIGERNMDWPRRLQVALGAAKGLAYLHSSSDVGIPIVHRDFKSTNILLDDNFEAKISDFGLAKLMPEGQETHVTARVLGTFGYFDPEYTSTGKLTLQSDVYAFGVVLLELLTGRRAVDLNQGPNDQNLVLQVRHILHDRKKLRKVIDPEMARNSYTIQSIVMFANLASRCVRTESNERPSIVECIKELLMIIYTNSKGLGMVMHSLRMI

SEQ ID NO: 10000 - protein, 269 aa, Glycine max
  peptide (1)..(269): Ceres Seq. ID no. 15171511
  misc_feature (1)..(269): NCBI GI NO: 30102706 NR Description: At1g24030 [Arabidopsis thaliana]
  misc_feature (1)..(269): NCBI GI NO: 25287587 NR Description: protein T23E23.18
  misc_feature (1)..(269): NCBI GI NO: 15221649 NR Description: protein kinase family [Arabidopsis thaliana]
  misc_feature (1)..(248): NCBI GI NO: 15238886 NR Description: protein kinase family [Arabidopsis thaliana]
  misc_feature (1)..(248): NCBI GI NO: 34899302 NR Description: putative protein serine/threonine kinase
  misc_feature (1)..(248): NCBI GI NO: 34395193 NR Description: putative protein serine/threonine kinase
  misc_feature (1)..(248): NCBI GI NO: 8778594 NR Description: F5M15.3 [Arabidopsis thaliana]
  misc_feature (1)..(248): NCBI GI NO: 15217992 NR Description: protein kinase -related [Arabidopsis thaliana]
  misc_feature (1)..(243): NCBI GI NO: 34902958 NR Description: putative protein kinase
  misc_feature (1)..(248): NCBI GI NO: 15240038 NR Description: protein kinase family [Arabidopsis thaliana]
MELPAIKAAEGEREFRVEVDILSRLDHPNLVSLIGYCADGKHRFLVYEYMRKGNLQDHLNGIGERNMDWPRRLQVALGAAKGLAYLHSSSDVGIPIVHRDFKSTNILLDDNFEAKISDFGLAKLMPEGQETHVTARVLGTFGYFDPEYTSTGKLTLQSDVYAFGVVLLELLTGRRAVDLNQGPNDQNLVLQVRHILHDRKKLRKVIDPEMARNSYTIQSIVMFANLASRCVRTESNERPSIVECIKELLMIIYTNSKGLGMVMHSLRMI

SEQ ID NO: 10001 - DNA, 1183 bp, Glycine max
  misc_feature (1)..(1183): Ceres Seq. ID no. 15224554
accgggccccccctcgagtcagctacgtaggcccccccccccctgttaaaaagattaggactagcagttgcacctaagagaaagatgggtgatgctgatgctgaaggacatttgtctactagccctaatcagttagatggtgacaaaagagctaccaatcataaatcagtgaatttggagggaagcctgttggttcagcacctgcaaaaaaagaagagagtccaggctttcaatgaagctcaagaagctctgatcaaagttctatatgagcaattcaaggatcacagaagatgcagttacatgatagccaatgcactggatgaggatggtaaaatcactgctgctcaagtctctcgaaaacttaagcaacttggtttatctcttcctcagaagagttctggaggcaaaatgcacccaaaggatgcagatctcatggatctttcaaatgataggattaatgaatctgatgatgagacattggtaacattgataaaaaggaagaaaatggagaatgacaaattatcaaggggacagttacatggacaaatcagtgaggatagattgtcaatagatgattctgatgatgaaatgctcagctctgttctcaaggaaaaaataaatagcaaagtatcaactgaacaattacttgaacccatcaatgtggatgcattgtcaagagatgattctgatgatgaaatgcccagctctgctctcaaaagaactagaagatcctctcttaattcaaagcaagttgagcttgaaaatatccaaattcaggagagaataatgggcgatgattctttcaatgaaggcaaaacagatgctttggaaagggataatcgtgttgattctatgaattcctcccaaatagaacatcagcaaatggatgacttagcagattcagaagatgaagtggctgttagtggatttcctgacaatgccagatctagaaggcagctgagaatggtgattgatcctgaggatgatgactgaaggagaaagcatgattagggtccaggtttctttatttttgcatatattttctactaaactgaaggagaaagcattgattagtgagtgttgcagagacaagatatgaggatgtttacaagttgccatccttattacaacatatcagttctatatttatagagtataattataactgttataaactttcatt

SEQ ID NO: 10002 - protein, 302 aa, Glycine max
  peptide (1)..(302): Ceres Seq. ID no. 15224555
  misc_feature (17)..(239): Pfam Name: Pfam Description:  Timeless protein C terminal region
  misc_feature (17)..(239): NCBI GI NO: 15237300 NR Description: expressed protein [Arabidopsis thaliana]
  misc_feature (42)..(222): NCBI GI NO: 15237300 NR Description: expressed protein [Arabidopsis thaliana]
MGDADAEGHLSTSPNQLDGDKRATNHKSVNLEGSLLVQHLQKKKRVQAFNEAQEALIKVLYEQFKDHRRCSYMIANALDEDGKITAAQVSRKLKQLGLSLPQKSSGGKMHPKDADLMDLSNDRINESDDETLVTLIKRKKMENDKLSRGQLHGQISEDRLSIDDSDDEMLSSVLKEKINSKVSTEQLLEPINVDALSRDDSDDEMPSSALKRTRRSSLNSKQVELENIQIQERIMGDDSFNEGKTDALERDNRVDSMNSSQIEHQQMDDLADSEDEVAVSGFPDNARSRRQLRMVIDPEDDD

SEQ ID NO: 10003 - protein, 230 aa, Glycine max
  peptide (1)..(230): Ceres Seq. ID no. 15224556
  misc_feature (1)..(167): Pfam Name: Pfam Description:  Timeless protein C terminal region
  misc_feature (1)..(167): NCBI GI NO: 15237300 NR Description: expressed protein [Arabidopsis thaliana]
  misc_feature (1)..(150): NCBI GI NO: 15237300 NR Description: expressed protein [Arabidopsis thaliana]
MIANALDEDGKITAAQVSRKLKQLGLSLPQKSSGGKMHPKDADLMDLSNDRINESDDETLVTLIKRKKMENDKLSRGQLHGQISEDRLSIDDSDDEMLSSVLKEKINSKVSTEQLLEPINVDALSRDDSDDEMPSSALKRTRRSSLNSKQVELENIQIQERIMGDDSFNEGKTDALERDNRVDSMNSSQIEHQQMDDLADSEDEVAVSGFPDNARSRRQLRMVIDPEDDD

SEQ ID NO: 10004 - protein, 194 aa, Glycine max
  peptide (1)..(194): Ceres Seq. ID no. 15224557
  misc_feature (1)..(131): Pfam Name: Pfam Description:  Timeless protein C terminal region
  misc_feature (1)..(131): NCBI GI NO: 15237300 NR Description: expressed protein [Arabidopsis thaliana]
  misc_feature (1)..(114): NCBI GI NO: 15237300 NR Description: expressed protein [Arabidopsis thaliana]
MHPKDADLMDLSNDRINESDDETLVTLIKRKKMENDKLSRGQLHGQISEDRLSIDDSDDEMLSSVLKEKINSKVSTEQLLEPINVDALSRDDSDDEMPSSALKRTRRSSLNSKQVELENIQIQERIMGDDSFNEGKTDALERDNRVDSMNSSQIEHQQMDDLADSEDEVAVSGFPDNARSRRQLRMVIDPEDDD

SEQ ID NO: 10005 - DNA, 1423 bp, Glycine max
  misc_feature (1)..(1423): Ceres Seq. ID no. 15170741
agttaatgaagtgatagcccttgcagacagtggatttactagggatgaaatttgttcggaaccccaacaaaaagggatggttgcctcattggatactgaagaaaaatcaagtgaaacaatgggtagaaaattctctgaaccaaggcagcaacaagaaagtcctattttaaaaggaaaccttgactgtgttagggagtgttctacgtctgttgagggtaacttatcaagtccgggaacaagtaaaactggagagagaagacgggttaaagcagagaaaactataactttgcaagttcttagacaatattttgctggaagcctaaaagatgctgccaagaatattggtgtttgtactacaactttgaaaaggatctgccggcagcatgggataaagcgttggccttctcgaaagatcaaaaaggttggccactccttacaaaaacttcaacttgtcatcgactcggttcaaggtgcctctggtgcatttcaaatcaattccttctattcaaacttcccggatctagcttctccaaatttatcaggaactggcttcttctcaactttgaatcaaagtgataatccaaactcaacaagcacgcagcctgaacatggctcattgagcccagaaggtgcatcaaaatcaccctcttcgtcgagcagccagagttccatttcaagccattcctgctctagcatgtcagagctacaacagcagcacacaactaacattgccagtgacaaagatcctgccacggttggtgaatattctgctgatgttgtgttgaagttgatcagaaacgaggcaaagcttaaaagccttagtcaagatagagcaaagctcttgccaagatcactgagccaggaaacacttggtgaacacccgaaaactcagtatcaactgcctttattgaaaaccagtagcagcaaggtggattctcacagagtaaaagtcacatatggagatgagaaaacccggtttcggatgctgaaaaattgggtctatgaagatcttctgcaggaaattggtaggaaatttaatgtgagtgacatgagcaaatttgatgtcaaatacttggatgatgattgtgagtggatactactcacttgtgatgctgatttagaggagtgcattgatgtttgtcaatcttccgagagtggtaccatcaaacttagtctacaaccttctagtcatagtgtgagaagttttttagaatttagataacagattgattgtaaattataagatctttgtcatgtatgtgaagcagtcttagaaaaggcacaattatttttttgtgaaaaaaattattattttggcagaatgtaaggataaacttttgcttatccttgtgctccaagcaataagcaaattcagcttttgtttgattggtataatataataccatttgtgcaattgaattct

SEQ ID NO: 10006 - protein, 406 aa, Glycine max
  peptide (1)..(406): Ceres Seq. ID no. 15170742
  misc_feature (314)..(395): Pfam Name: Pfam Description:  PB1 domain
  misc_feature (3)..(401): NCBI GI NO: 33468530 NR Description: NIN-like protein 1
  misc_feature (20)..(396): NCBI GI NO: 30690272 NR Description: RWP-RK domain containing protein
  misc_feature (45)..(396): NCBI GI NO: 25367427 NR Description: hypothetical protein At2g17150
  misc_feature (45)..(396): NCBI GI NO: 30679885 NR Description: RWP-RK domain containing protein
  misc_feature (16)..(396): NCBI GI NO: 6448579 NR Description: nodule inception protein
  misc_feature (75)..(395): NCBI GI NO: 20503001 NR Description: Putataive nodule inception protein
  misc_feature (16)..(402): NCBI GI NO: 23504757 NR Description: nodule inception protein [Pisum sativum]
  misc_feature (16)..(402): NCBI GI NO: 23504759 NR Description: nodule inception protein [Pisum sativum]
  misc_feature (16)..(402): NCBI GI NO: 23504753 NR Description: nodule inception protein [Pisum sativum]
  misc_feature (16)..(402): NCBI GI NO: 23504755 NR Description: nodule inception protein [Pisum sativum]
VNEVIALADSGFTRDEICSEPQQKGMVASLDTEEKSSETMGRKFSEPRQQQESPILKGNLDCVRECSTSVEGNLSSPGTSKTGERRRVKAEKTITLQVLRQYFAGSLKDAAKNIGVCTTTLKRICRQHGIKRWPSRKIKKVGHSLQKLQLVIDSVQGASGAFQINSFYSNFPDLASPNLSGTGFFSTLNQSDNPNSTSTQPEHGSLSPEGASKSPSSSSSQSSISSHSCSSMSELQQQHTTNIASDKDPATVGEYSADVVLKLIRNEAKLKSLSQDRAKLLPRSLSQETLGEHPKTQYQLPLLKTSSSKVDSHRVKVTYGDEKTRFRMLKNWVYEDLLQEIGRKFNVSDMSKFDVKYLDDDCEWILLTCDADLEECIDVCQSSESGTIKLSLQPSSHSVRSFLEFR

SEQ ID NO: 10007 - protein, 381 aa, Glycine max
  peptide (1)..(381): Ceres Seq. ID no. 15170743
  misc_feature (289)..(370): Pfam Name: Pfam Description:  PB1 domain
  misc_feature (1)..(376): NCBI GI NO: 33468530 NR Description: NIN-like protein 1
  misc_feature (1)..(371): NCBI GI NO: 30690272 NR Description: RWP-RK domain containing protein
  misc_feature (20)..(371): NCBI GI NO: 25367427 NR Description: hypothetical protein At2g17150
  misc_feature (20)..(371): NCBI GI NO: 30679885 NR Description: RWP-RK domain containing protein
  misc_feature (1)..(371): NCBI GI NO: 6448579 NR Description: nodule inception protein
  misc_feature (50)..(370): NCBI GI NO: 20503001 NR Description: Putataive nodule inception protein
  misc_feature (1)..(377): NCBI GI NO: 23504757 NR Description: nodule inception protein [Pisum sativum]
  misc_feature (1)..(377): NCBI GI NO: 23504759 NR Description: nodule inception protein [Pisum sativum]
  misc_feature (1)..(377): NCBI GI NO: 23504753 NR Description: nodule inception protein [Pisum sativum]
  misc_feature (1)..(377): NCBI GI NO: 23504755 NR Description: nodule inception protein [Pisum sativum]
MVASLDTEEKSSETMGRKFSEPRQQQESPILKGNLDCVRECSTSVEGNLSSPGTSKTGERRRVKAEKTITLQVLRQYFAGSLKDAAKNIGVCTTTLKRICRQHGIKRWPSRKIKKVGHSLQKLQLVIDSVQGASGAFQINSFYSNFPDLASPNLSGTGFFSTLNQSDNPNSTSTQPEHGSLSPEGASKSPSSSSSQSSISSHSCSSMSELQQQHTTNIASDKDPATVGEYSADVVLKLIRNEAKLKSLSQDRAKLLPRSLSQETLGEHPKTQYQLPLLKTSSSKVDSHRVKVTYGDEKTRFRMLKNWVYEDLLQEIGRKFNVSDMSKFDVKYLDDDCEWILLTCDADLEECIDVCQSSESGTIKLSLQPSSHSVRSFLEFR

SEQ ID NO: 10008 - protein, 367 aa, Glycine max
  peptide (1)..(367): Ceres Seq. ID no. 15170744
  misc_feature (275)..(356): Pfam Name: Pfam Description:  PB1 domain
  misc_feature (1)..(362): NCBI GI NO: 33468530 NR Description: NIN-like protein 1
  misc_feature (1)..(357): NCBI GI NO: 30690272 NR Description: RWP-RK domain containing protein
  misc_feature (6)..(357): NCBI GI NO: 25367427 NR Description: hypothetical protein At2g17150
  misc_feature (6)..(357): NCBI GI NO: 30679885 NR Description: RWP-RK domain containing protein
  misc_feature (1)..(357): NCBI GI NO: 6448579 NR Description: nodule inception protein
  misc_feature (36)..(356): NCBI GI NO: 20503001 NR Description: Putataive nodule inception protein
  misc_feature (1)..(363): NCBI GI NO: 23504757 NR Description: nodule inception protein [Pisum sativum]
  misc_feature (1)..(363): NCBI GI NO: 23504759 NR Description: nodule inception protein [Pisum sativum]
  misc_feature (1)..(363): NCBI GI NO: 23504753 NR Description: nodule inception protein [Pisum sativum]
  misc_feature (1)..(363): NCBI GI NO: 23504755 NR Description: nodule inception protein [Pisum sativum]
MGRKFSEPRQQQESPILKGNLDCVRECSTSVEGNLSSPGTSKTGERRRVKAEKTITLQVLRQYFAGSLKDAAKNIGVCTTTLKRICRQHGIKRWPSRKIKKVGHSLQKLQLVIDSVQGASGAFQINSFYSNFPDLASPNLSGTGFFSTLNQSDNPNSTSTQPEHGSLSPEGASKSPSSSSSQSSISSHSCSSMSELQQQHTTNIASDKDPATVGEYSADVVLKLIRNEAKLKSLSQDRAKLLPRSLSQETLGEHPKTQYQLPLLKTSSSKVDSHRVKVTYGDEKTRFRMLKNWVYEDLLQEIGRKFNVSDMSKFDVKYLDDDCEWILLTCDADLEECIDVCQSSESGTIKLSLQPSSHSVRSFLEFR

SEQ ID NO: 10009 - DNA, 1849 bp, Glycine max
  misc_feature (1)..(1849): Ceres Seq. ID no. 15176273
aaaacaaaatacaataaatttggtaaagggcaatggcactttaaagggaagaaagcaccacctgaaaccagaagtggaaagtgctcctaacattagattagaccctctaccatgctcctctgcctctgaagtctgaacctcccacaggaatggcaatggagaagacaacattgtttgtgttgttgctgaatgtgcttgtgttcagtgcctctcttgtgtcctcggagcaaagtcatgtctcagctgtaggggacccaggaatgcagagagatggtctgagggtggcctttgaggcttggaacttctgcaatgaagttggtcaagaagctcctcacatgggtagtccaagagctgctgattgttttgatctttcaggttctctgactcacaaggtcacagaagctgataacagacttggggtgggggactcatttcctggtttaaaaccagaaaatatcaacaacacagacctttatgcaattgaaaaggaattgtatttgggttctttatgtgaagttgcagacaccccaaggccttggcagttttggatggtaatgctgaaaaatggtaactatgacaccaggtcggggttatgtcctcaggacgggaaaaaggtacccccttttagcccgggaaggtttccttgttttggacaagggtgcatgaatcaacccatcttgtgtcatcaatggacacagctcaaagatggcacaatgcaaggggggttcagtggtacttatgatttggattctggttgtggaggtgaacacgatggtgtgtcttactatgaggtagtttgggagaagaaagttaatgttgggagttgggtgttcaaacacaaactaaggacttcaaagaagtacccttggttgatgttgtaccttagagctgatgcaaccaaaggattctctggaggttaccattatgacactaggggaatgctaaaaactcttccaaagtcaccaaatttcaaggtgaggttgagcttggatatcaagaaggggggaggggccaagagccagttctatctgttagacattggaagctgctggaagaacaatggtgctccttgtgatggagatgtactcactgatgtcactagatatagtgagatgatcataaaccctgaaaccccagcttggtgcagccccaaaggcttggttaactgtccaccatttcacatcactccagacaacaaaaaaatatacagaaatgacacagccaatttcccctactcagcatatcactactactgtgctcctgggaatgctcaacacttggagcaaccagtgagcacttgtgatccttacagcaatcctcatgctcaagagatagttcagttgcttcctcaccctacttggggtgagtatggctatcccaccaaaaaaggtgatggttgggtgggggatgcaaggacttgggagcttgatgttggagggctatcaagtagactctacttttatcaggacccaggcactcctcctgccaagagaatatggacatctattgattctggtactgagatatttgttagtgacaaagatgaagaagcagagtggactcttagtgactttgacgtcattctaacacaatcagggaccaacttgatgaacaaggctgagagaaagaagtaaggaatattgataatggactaaacttttgggattttagatagtccaccaagtgtaggcttttaaatcataggcgttacagacacatttacacgaaaataattttcattggtcaaatcctgatcataggatcttgagttgtgcatgtttggactgtaatttgcacattccaaatcttagtttggagattgtgaatgttacatccacaaaataacgtc

SEQ ID NO: 10010 - protein, 494 aa, Glycine max
  peptide (1)..(494): Ceres Seq. ID no. 15176274
  misc_feature (75)..(480): NCBI GI NO: 16612271 NR Description: At2g47010/F14M4.16 [Arabidopsis thaliana]
  misc_feature (31)..(94): NCBI GI NO: 16612271 NR Description: At2g47010/F14M4.16 [Arabidopsis thaliana]
  misc_feature (75)..(437): NCBI GI NO: 18407231 NR Description: expressed protein [Arabidopsis thaliana]
  misc_feature (31)..(94): NCBI GI NO: 18407231 NR Description: expressed protein [Arabidopsis thaliana]
  misc_feature (75)..(429): NCBI GI NO: 7459476 NR Description: hypothetical protein At2g47010
  misc_feature (31)..(94): NCBI GI NO: 7459476 NR Description: hypothetical protein At2g47010
  misc_feature (28)..(479): NCBI GI NO: 30685122 NR Description: expressed protein [Arabidopsis thaliana]
  misc_feature (38)..(479): NCBI GI NO: 25335639 NR Description: F20D23.27 protein - Arabidopsis thaliana
  misc_feature (361)..(480): NCBI GI NO: 7459476 NR Description: hypothetical protein At2g47010
  misc_feature (412)..(484): NCBI GI NO: 22328547 NR Description: hypothetical protein [Arabidopsis thaliana]
MAMEKTTLFVLLLNVLVFSASLVSSEQSHVSAVGDPGMQRDGLRVAFEAWNFCNEVGQEAPHMGSPRAADCFDLSGSLTHKVTEADNRLGVGDSFPGLKPENINNTDLYAIEKELYLGSLCEVADTPRPWQFWMVMLKNGNYDTRSGLCPQDGKKVPPFSPGRFPCFGQGCMNQPILCHQWTQLKDGTMQGGFSGTYDLDSGCGGEHDGVSYYEVVWEKKVNVGSWVFKHKLRTSKKYPWLMLYLRADATKGFSGGYHYDTRGMLKTLPKSPNFKVRLSLDIKKGGGAKSQFYLLDIGSCWKNNGAPCDGDVLTDVTRYSEMIINPETPAWCSPKGLVNCPPFHITPDNKKIYRNDTANFPYSAYHYYCAPGNAQHLEQPVSTCDPYSNPHAQEIVQLLPHPTWGEYGYPTKKGDGWVGDARTWELDVGGLSSRLYFYQDPGTPPAKRIWTSIDSGTEIFVSDKDEEAEWTLSDFDVILTQSGTNLMNKAERKK

SEQ ID NO: 10011 - protein, 492 aa, Glycine max
  peptide (1)..(492): Ceres Seq. ID no. 15176275
  misc_feature (73)..(478): NCBI GI NO: 16612271 NR Description: At2g47010/F14M4.16 [Arabidopsis thaliana]
  misc_feature (29)..(92): NCBI GI NO: 16612271 NR Description: At2g47010/F14M4.16 [Arabidopsis thaliana]
  misc_feature (73)..(435): NCBI GI NO: 18407231 NR Description: expressed protein [Arabidopsis thaliana]
  misc_feature (29)..(92): NCBI GI NO: 18407231 NR Description: expressed protein [Arabidopsis thaliana]
  misc_feature (73)..(427): NCBI GI NO: 7459476 NR Description: hypothetical protein At2g47010
  misc_feature (29)..(92): NCBI GI NO: 7459476 NR Description: hypothetical protein At2g47010
  misc_feature (26)..(477): NCBI GI NO: 30685122 NR Description: expressed protein [Arabidopsis thaliana]
  misc_feature (36)..(477): NCBI GI NO: 25335639 NR Description: F20D23.27 protein - Arabidopsis thaliana
  misc_feature (359)..(478): NCBI GI NO: 7459476 NR Description: hypothetical protein At2g47010
  misc_feature (410)..(482): NCBI GI NO: 22328547 NR Description: hypothetical protein [Arabidopsis thaliana]
MEKTTLFVLLLNVLVFSASLVSSEQSHVSAVGDPGMQRDGLRVAFEAWNFCNEVGQEAPHMGSPRAADCFDLSGSLTHKVTEADNRLGVGDSFPGLKPENINNTDLYAIEKELYLGSLCEVADTPRPWQFWMVMLKNGNYDTRSGLCPQDGKKVPPFSPGRFPCFGQGCMNQPILCHQWTQLKDGTMQGGFSGTYDLDSGCGGEHDGVSYYEVVWEKKVNVGSWVFKHKLRTSKKYPWLMLYLRADATKGFSGGYHYDTRGMLKTLPKSPNFKVRLSLDIKKGGGAKSQFYLLDIGSCWKNNGAPCDGDVLTDVTRYSEMIINPETPAWCSPKGLVNCPPFHITPDNKKIYRNDTANFPYSAYHYYCAPGNAQHLEQPVSTCDPYSNPHAQEIVQLLPHPTWGEYGYPTKKGDGWVGDARTWELDVGGLSSRLYFYQDPGTPPAKRIWTSIDSGTEIFVSDKDEEAEWTLSDFDVILTQSGTNLMNKAERKK

SEQ ID NO: 10012 - protein, 457 aa, Glycine max
  peptide (1)..(457): Ceres Seq. ID no. 15176276
  misc_feature (38)..(443): NCBI GI NO: 16612271 NR Description: At2g47010/F14M4.16 [Arabidopsis thaliana]
  misc_feature (1)..(57): NCBI GI NO: 16612271 NR Description: At2g47010/F14M4.16 [Arabidopsis thaliana]
  misc_feature (38)..(400): NCBI GI NO: 18407231 NR Description: expressed protein [Arabidopsis thaliana]
  misc_feature (1)..(57): NCBI GI NO: 18407231 NR Description: expressed protein [Arabidopsis thaliana]
  misc_feature (38)..(392): NCBI GI NO: 7459476 NR Description: hypothetical protein At2g47010
  misc_feature (1)..(57): NCBI GI NO: 7459476 NR Description: hypothetical protein At2g47010
  misc_feature (1)..(442): NCBI GI NO: 30685122 NR Description: expressed protein [Arabidopsis thaliana]
  misc_feature (1)..(442): NCBI GI NO: 25335639 NR Description: F20D23.27 protein - Arabidopsis thaliana
  misc_feature (324)..(443): NCBI GI NO: 7459476 NR Description: hypothetical protein At2g47010
  misc_feature (375)..(447): NCBI GI NO: 22328547 NR Description: hypothetical protein [Arabidopsis thaliana]
MQRDGLRVAFEAWNFCNEVGQEAPHMGSPRAADCFDLSGSLTHKVTEADNRLGVGDSFPGLKPENINNTDLYAIEKELYLGSLCEVADTPRPWQFWMVMLKNGNYDTRSGLCPQDGKKVPPFSPGRFPCFGQGCMNQPILCHQWTQLKDGTMQGGFSGTYDLDSGCGGEHDGVSYYEVVWEKKVNVGSWVFKHKLRTSKKYPWLMLYLRADATKGFSGGYHYDTRGMLKTLPKSPNFKVRLSLDIKKGGGAKSQFYLLDIGSCWKNNGAPCDGDVLTDVTRYSEMIINPETPAWCSPKGLVNCPPFHITPDNKKIYRNDTANFPYSAYHYYCAPGNAQHLEQPVSTCDPYSNPHAQEIVQLLPHPTWGEYGYPTKKGDGWVGDARTWELDVGGLSSRLYFYQDPGTPPAKRIWTSIDSGTEIFVSDKDEEAEWTLSDFDVILTQSGTNLMNKAERKK

SEQ ID NO: 10013 - DNA, 1577 bp, Glycine max
  misc_feature (1)..(1577): Ceres Seq. ID no. 14312016
gttcaggttctccttttaacatcttcatcttctcttttcttttgttgtcttctgtgcgcgctctctctctatgcattgatactgtttcttttattttcatctggggttcgccgcttcagctgccaccgttctcggtatctcatgtgatcttcaaagtttgttgctttcagccttttcaagctgtccatttaagtttttgagagcaagcagttttttatgaggaccgaataaaagattcaaatttctatgacgtctatcaaatcattgagatggctgatgagaaaaaagagtggattgtctgatgggggtaaatcaagtttcaagatgaaacatctgccttttctggcagttttgtgcacgataatgttattcattgtgtatagaaccacaaagtatcagtatcaccaagaagagattgacaaaaaatggagtttctggggacaaccaaaggtgtatccttcaacttatgggaagttgaaaggcttgccacgaggtataatacatgataattcagatttggagttaagaccattatggtcaagaagtagttcaagatcaaaggctgtttactctaactctaacttactggcagttccagttggtattaaacaaaagcagaatgttgatgctatggtgcaaaagtttcttcaagaaaacttcacaattattttattccattatgatggcaatgtggatggatggtggaatcttgactggagtagcaaggccatacacattattgctcggaatcaaacaaagtggtggtttgcaaaaaggtttctacatccagatatagtgtctatttatgattatatctttctctgggatgaggatctaggtgtggagcatttttcaccttcaagatatgttgaaattataaagagagaaggtttggagatatctcaaccagctcttgacccaaattcaacagagatacaccatagaattacaattagagctagaaccaagaaatttcatagagtctatgaacgcagaggcagtacaaggtgttcagatttaagtgagggaccgccgtgcactgggtttgtggaaggtatggctcctgttttctctcaatctgcctggtactgcacttggcatcttatacagaatgaccttgtccatggatggggagttgatatgaagctaggatattgtgcacagggagatcgaactaaaaaggtgggagttgttgacagcgaatatgtttttcacaagggaatacaaactctgggggggagtggtcacagaatgacaaaggtttcgaaactacaaaggacaactatgaaacaaggtggagtaggaattgatgtgcgaactgagataagaaggcaatcgacatgggaatttgaaatcttcaaagagcgttggaataaagccattggtgcagacaaaaactgggttgatccatttaagagtgaccaaagacgcataagaaaatggcgtgacacgcaacgccttgctaagaacaatatttaactctgttgcatatcttacagtttcattcacagggcattaccttttatttataggcataatttagtttgtgtagatgagtaaaaattcattcaattttg

SEQ ID NO: 10014 - protein, 410 aa, Glycine max
  peptide (1)..(410): Ceres Seq. ID no. 14312017
  misc_feature (76)..(387): Pfam Name: DUF707 Pfam Description: Protein of unknown function
  misc_feature (1)..(404): NCBI GI NO: 15219892 NR Description: expressed protein [Arabidopsis thaliana]
  misc_feature (1)..(404): NCBI GI NO: 22329488 NR Description: expressed protein [Arabidopsis thaliana]
  misc_feature (76)..(404): NCBI GI NO: 24636978 NR Description: lysine ketoglutarate reductase trans-splicingrelated 1
  misc_feature (33)..(403): NCBI GI NO: 33146749 NR Description: putative lysine ketoglutarate reductase trans-splicing related 1
  misc_feature (91)..(248): NCBI GI NO: 34899756 NR Description: OJ1773_H01.1
  misc_feature (267)..(403): NCBI GI NO: 34899756 NR Description: OJ1773_H01.1
  misc_feature (80)..(389): NCBI GI NO: 19386727 NR Description: P0678F11.16
  misc_feature (173)..(404): NCBI GI NO: 25402652 NR Description: hypothetical protein
  misc_feature (109)..(389): NCBI GI NO: 34903420 NR Description: hypothetical protein~similar to Oryza sativachromosome 1
  misc_feature (68)..(333): NCBI GI NO: 18408876 NR Description: F12A21.2 [Arabidopsis thaliana]
MTSIKSLRWLMRKKSGLSDGGKSSFKMKHLPFLAVLCTIMLFIVYRTTKYQYHQEEIDKKWSFWGQPKVYPSTYGKLKGLPRGIIHDNSDLELRPLWSRSSSRSKAVYSNSNLLAVPVGIKQKQNVDAMVQKFLQENFTIILFHYDGNVDGWWNLDWSSKAIHIIARNQTKWWFAKRFLHPDIVSIYDYIFLWDEDLGVEHFSPSRYVEIIKREGLEISQPALDPNSTEIHHRITIRARTKKFHRVYERRGSTRCSDLSEGPPCTGFVEGMAPVFSQSAWYCTWHLIQNDLVHGWGVDMKLGYCAQGDRTKKVGVVDSEYVFHKGIQTLGGSGHRMTKVSKLQRTTMKQGGVGIDVRTEIRRQSTWEFEIFKERWNKAIGADKNWVDPFKSDQRRIRKWRDTQRLAKNNI

SEQ ID NO: 10015 - protein, 400 aa, Glycine max
  peptide (1)..(400): Ceres Seq. ID no. 14312018
  misc_feature (66)..(377): Pfam Name: DUF707 Pfam Description: Protein of unknown function
  misc_feature (1)..(394): NCBI GI NO: 15219892 NR Description: expressed protein [Arabidopsis thaliana]
  misc_feature (1)..(394): NCBI GI NO: 22329488 NR Description: expressed protein [Arabidopsis thaliana]
  misc_feature (66)..(394): NCBI GI NO: 24636978 NR Description: lysine ketoglutarate reductase trans-splicingrelated 1
  misc_feature (23)..(393): NCBI GI NO: 33146749 NR Description: putative lysine ketoglutarate reductase trans-splicing related 1
  misc_feature (81)..(238): NCBI GI NO: 34899756 NR Description: OJ1773_H01.1
  misc_feature (257)..(393): NCBI GI NO: 34899756 NR Description: OJ1773_H01.1
  misc_feature (70)..(379): NCBI GI NO: 19386727 NR Description: P0678F11.16
  misc_feature (163)..(394): NCBI GI NO: 25402652 NR Description: hypothetical protein
  misc_feature (99)..(379): NCBI GI NO: 34903420 NR Description: hypothetical protein~similar to Oryza sativachromosome 1
  misc_feature (58)..(323): NCBI GI NO: 18408876 NR Description: F12A21.2 [Arabidopsis thaliana]
MRKKSGLSDGGKSSFKMKHLPFLAVLCTIMLFIVYRTTKYQYHQEEIDKKWSFWGQPKVYPSTYGKLKGLPRGIIHDNSDLELRPLWSRSSSRSKAVYSNSNLLAVPVGIKQKQNVDAMVQKFLQENFTIILFHYDGNVDGWWNLDWSSKAIHIIARNQTKWWFAKRFLHPDIVSIYDYIFLWDEDLGVEHFSPSRYVEIIKREGLEISQPALDPNSTEIHHRITIRARTKKFHRVYERRGSTRCSDLSEGPPCTGFVEGMAPVFSQSAWYCTWHLIQNDLVHGWGVDMKLGYCAQGDRTKKVGVVDSEYVFHKGIQTLGGSGHRMTKVSKLQRTTMKQGGVGIDVRTEIRRQSTWEFEIFKERWNKAIGADKNWVDPFKSDQRRIRKWRDTQRLAKNNI

SEQ ID NO: 10016 - protein, 384 aa, Glycine max
  peptide (1)..(384): Ceres Seq. ID no. 14312019
  misc_feature (50)..(361): Pfam Name: DUF707 Pfam Description: Protein of unknown function
  misc_feature (1)..(378): NCBI GI NO: 15219892 NR Description: expressed protein [Arabidopsis thaliana]
  misc_feature (1)..(378): NCBI GI NO: 22329488 NR Description: expressed protein [Arabidopsis thaliana]
  misc_feature (50)..(378): NCBI GI NO: 24636978 NR Description: lysine ketoglutarate reductase trans-splicingrelated 1
  misc_feature (7)..(377): NCBI GI NO: 33146749 NR Description: putative lysine ketoglutarate reductase trans-splicing related 1
  misc_feature (65)..(222): NCBI GI NO: 34899756 NR Description: OJ1773_H01.1
  misc_feature (241)..(377): NCBI GI NO: 34899756 NR Description: OJ1773_H01.1
  misc_feature (54)..(363): NCBI GI NO: 19386727 NR Description: P0678F11.16
  misc_feature (147)..(378): NCBI GI NO: 25402652 NR Description: hypothetical protein
  misc_feature (83)..(363): NCBI GI NO: 34903420 NR Description: hypothetical protein~similar to Oryza sativachromosome 1
  misc_feature (42)..(307): NCBI GI NO: 18408876 NR Description: F12A21.2 [Arabidopsis thaliana]
MKHLPFLAVLCTIMLFIVYRTTKYQYHQEEIDKKWSFWGQPKVYPSTYGKLKGLPRGIIHDNSDLELRPLWSRSSSRSKAVYSNSNLLAVPVGIKQKQNVDAMVQKFLQENFTIILFHYDGNVDGWWNLDWSSKAIHIIARNQTKWWFAKRFLHPDIVSIYDYIFLWDEDLGVEHFSPSRYVEIIKREGLEISQPALDPNSTEIHHRITIRARTKKFHRVYERRGSTRCSDLSEGPPCTGFVEGMAPVFSQSAWYCTWHLIQNDLVHGWGVDMKLGYCAQGDRTKKVGVVDSEYVFHKGIQTLGGSGHRMTKVSKLQRTTMKQGGVGIDVRTEIRRQSTWEFEIFKERWNKAIGADKNWVDPFKSDQRRIRKWRDTQRLAKNNI

SEQ ID NO: 10017 - DNA, 1597 bp, Glycine max
  misc_feature (1)..(1597): Ceres Seq. ID no. 14308615
aaaaaaaaaaaaaaagtctacacactactatgatgtatctaacattctaaatttctaactttcctctctctctctctctctctccgaggtcttagatctctgctctgtctctatctctacttgaggcctttccctctgttccgttggcgggtgggtctttcttctctcaaaatggccaccggagtgaccagaaaaatttctgctgcatcagctcgggcccacaccagaagggcgaagaaaaccaattctctaccccttccttcaggaattcttggaacagcactagcagtgttgtttattgggtttctagcatgggcttatcaggttattcaacctccccctcccaagatatgcggcactcctgatggaccacctataacagcaccaagaatcaaattaagagacggaaggcatttggcatacaaagagcatggtgttccaaaagatgcagccaagtataaaatcatctctgtacatggttttaatagttgcaggcatgatgctgtgattgccgataccctatcaccggatgttgttgaggagctggggatctacattgtatctttcgacagacctggttatggggaaagtgatcctgatccaaatcgtacactaaaaagcattgctctagatatacaagagcttgcagatcagctgggattgggctccaaattctatgtagttggtgtctccatgggtggacaagttgtttggaactgccttaagtacatacctcacaggctgacaggtgcagtacttgtcgccccagttgtcaactactggtggcctggtctacctgcaaacttaactactgaagcctatgaccaacaaaaattacaagaccaatgggcacttcgtgttgctcactacgtaccatggctaacttactggtggaacactcagcgatggttcccaggatctagtgtaattgctcatagtccacatatcttttctcatcaagacaaagaacttctgcctaagttgttgtccgatagaaagagttatgcggcacaggtaatacagcaaggtgattatgaaaccatccacctcgacataaatattggatttggtaactgggaatatagtccccttgatcttgaaaacccatttccaaataacgaaggctctgtccatctttggcaaggagatgaggatatgatggttccagttacactgcaacgatacatagcacaaaaccttccatggattaactatcatgaactccaaggttctggtcacatttttgctcatgctgatggtatgagtgatactatcatcaagtcacttttacgtgcgaagtaggcttcttttatgttagttactgtctgtgagaagttggcggcttctatattggttacggtctatctcaggtcagtttcagcatttaatatctcagttttggaggattcaaactgttgaacagaatgatgtatgatcaactttgaacaacattgtgtacacttaatggtagggagaattcaattactcaataattgtatgaactatattcttttgtgtgggaagttgtttaacagaaattggcttgtttaagttactctgaagctgacactatggcgatgagtagcactatttttgc

SEQ ID NO: 10018 - protein, 376 aa, Glycine max
  peptide (1)..(376): Ceres Seq. ID no. 14308616
  misc_feature (127)..(371): Pfam Name: Pfam Description:  alpha/beta hydrolase fold
  misc_feature (24)..(373): NCBI GI NO: 18404095 NR Description: hydrolase, alpha/beta fold family
  misc_feature (24)..(373): NCBI GI NO: 28416665 NR Description: At2g36290 [Arabidopsis thaliana]
  misc_feature (34)..(373): NCBI GI NO: 21592662 NR Description: unknown [Arabidopsis thaliana]
  misc_feature (8)..(373): NCBI GI NO: 15228377 NR Description: hydrolase, alpha/beta fold family
  misc_feature (34)..(373): NCBI GI NO: 18410582 NR Description: esterase/lipase/thioesterase family
  misc_feature (18)..(373): NCBI GI NO: 21537089 NR Description: unknown [Arabidopsis thaliana]
  misc_feature (18)..(373): NCBI GI NO: 18410575 NR Description: hydrolase, alpha/beta fold family
  misc_feature (21)..(373): NCBI GI NO: 15221193 NR Description: esterase/lipase/thioesterase family
  misc_feature (32)..(372): NCBI GI NO: 37536162 NR Description: putative alpha/beta hydrolase
  misc_feature (34)..(373): NCBI GI NO: 34908462 NR Description: P0683F02.22
MATGVTRKISAASARAHTRRAKKTNSLPLPSGILGTALAVLFIGFLAWAYQVIQPPPPKICGTPDGPPITAPRIKLRDGRHLAYKEHGVPKDAAKYKIISVHGFNSCRHDAVIADTLSPDVVEELGIYIVSFDRPGYGESDPDPNRTLKSIALDIQELADQLGLGSKFYVVGVSMGGQVVWNCLKYIPHRLTGAVLVAPVVNYWWPGLPANLTTEAYDQQKLQDQWALRVAHYVPWLTYWWNTQRWFPGSSVIAHSPHIFSHQDKELLPKLLSDRKSYAAQVIQQGDYETIHLDINIGFGNWEYSPLDLENPFPNNEGSVHLWQGDEDMMVPVTLQRYIAQNLPWINYHELQGSGHIFAHADGMSDTIIKSLLRAK

SEQ ID NO: 10019 - protein, 202 aa, Glycine max
  peptide (1)..(202): Ceres Seq. ID no. 14308617
  misc_feature (1)..(197): Pfam Name: Pfam Description:  alpha/beta hydrolase fold
  misc_feature (1)..(199): NCBI GI NO: 18404095 NR Description: hydrolase, alpha/beta fold family
  misc_feature (1)..(199): NCBI GI NO: 28416665 NR Description: At2g36290 [Arabidopsis thaliana]
  misc_feature (1)..(199): NCBI GI NO: 21592662 NR Description: unknown [Arabidopsis thaliana]
  misc_feature (1)..(199): NCBI GI NO: 15228377 NR Description: hydrolase, alpha/beta fold family
  misc_feature (1)..(199): NCBI GI NO: 18410582 NR Description: esterase/lipase/thioesterase family
  misc_feature (1)..(199): NCBI GI NO: 21537089 NR Description: unknown [Arabidopsis thaliana]
  misc_feature (1)..(199): NCBI GI NO: 18410575 NR Description: hydrolase, alpha/beta fold family
  misc_feature (1)..(199): NCBI GI NO: 15221193 NR Description: esterase/lipase/thioesterase family
  misc_feature (1)..(198): NCBI GI NO: 37536162 NR Description: putative alpha/beta hydrolase
  misc_feature (1)..(199): NCBI GI NO: 34908462 NR Description: P0683F02.22
MGGQVVWNCLKYIPHRLTGAVLVAPVVNYWWPGLPANLTTEAYDQQKLQDQWALRVAHYVPWLTYWWNTQRWFPGSSVIAHSPHIFSHQDKELLPKLLSDRKSYAAQVIQQGDYETIHLDINIGFGNWEYSPLDLENPFPNNEGSVHLWQGDEDMMVPVTLQRYIAQNLPWINYHELQGSGHIFAHADGMSDTIIKSLLRAK

SEQ ID NO: 10020 - DNA, 2112 bp, Glycine max
  misc_feature (1)..(2112): Ceres Seq. ID no. 14308618
gaccttgtgttgtttcagattgcatttgcagatagattgaatgttgtgaacaaacaatgggttcatccaaggccttatgcagtgtttctctgctccatttgttcatagtggtttgccttgtcttccaatgctttgctactaaaaaccatgctgacctgaccacaactctaactgtgaatgcttctgatgcatctggaaagccaataccagagacactttttggcatattctttgaggagattaatcatgctggagctgggggattgtgggctgagcttgtgagcaacagaggatttgaagctggcggtcctaacactccttcaaatattgatccttggtcaattattggaaatgaatcattgataaatgttgaaactgatcgtacctcttgctttgaccgtaataaggttgcacttcgattggaggtatcatgtgacagcgaaggtgacaacatctgcccagctgatggtgttggtgtttataatcctggtttctggggcatgaatattgagcaagggaagaaatacaaagtggtcttctatgttcgttcaactgaatcacttaatctaacagtttcattgactggatccaatggtgtaggaaacctggcttcatctgtgatcacaggttctgcacttgatttttcaaactggacaaaggtggagaagatactggttgccaaggcaacagataataactcaagacttcaattaacaaccaccaccaaaggtgtgatatggttggaccaagtgtctgctatgccactggacacatataagggacatggtttccgaactgaccttgttgaaatgctgacagctttgaaaccaagatttatcagatttccgggcggttgttttgttgaaggagaatggttaagaaatgcatttcgatggaaaacatccattggaccatgggaggagagacctgggcactttggtgatgtttggatgtactggactgatgatggacttggttattatgagtttctccaacttgcagaggacttgggtgcttcaccaatatgggtatttaataatggtgtcagtcataatgatcaagttgatacatcggcggtcttacctcttgtgcaagaagcccttgatggaattgagttcgcgagaggtgatcccacttcaaaatggggttcccttagagctgctatgggacatcctgagccatttgacctcagatatgttgctgttgggaatgaagattgtggaaaaaagaattatcgaggaaactacctgaaattctatagtgcaataaaaagtgcttatccagatatccaaattatctcaaactgtgatggttcttctcgacctttagatcatccagctgatatgtatgattatcatgtttatacaaatgcgaatgacatgttttatagagctaacacatttgatcatacatcacgaaatggtccaaaggcttttgtaagtgagtatgccgtgactggaaaagatgctgggacaggaagcctcttggcagccctagctgaagctggcttcctaattggactggaaaagaacagtgatgttatccaaatggccagctatgctccactttttgttaatgccaatgataggaggtggaacctggatgcaattgtattcaactcctttcagctctatggaactcctagctattgggtgcaactatttttctcagagtcaagtggagcaacacttctaagtacatcacttcaagcaccttcctcaaattcacttgttgcatcagcaattacatttcaaaattctgtagataagaaaaattacatacgaataaaggttgtgaacttcggtaccactgccgtgaacctcaaaatctctcttgatggactggaaccaaactcattgcagttatctgggtcaacaaagactgtgcttacatctgcaaatgtaatggatgagaactccttctcacagccaaagaaggtggtgccaatccaaagtctacttcagaatgttgagaaggacatgaatgtcacagtcccacctcgttcgttcacatcatttgatctgctgaaacaatccagtaatttgaagatggcagggagcgattcttccacgtggtcttctatttaacgttattaaaaatttgaccaaaagc

SEQ ID NO: 10021 - protein, 676 aa, Glycine max
  peptide (1)..(676): Ceres Seq. ID no. 14308619
  misc_feature (72)..(236): Pfam Name: Pfam Description:  Carbohydrate binding domain
  misc_feature (1)..(676): NCBI GI NO: 33151175 NR Description: alpha-L-arabinofuranosidase [Malus x domestica]
  misc_feature (1)..(672): NCBI GI NO: 15228368 NR Description: glycosyl hydrolase family 51
  misc_feature (1)..(672): NCBI GI NO: 13937191 NR Description: AT3g10740/T7M13_18 [Arabidopsis thaliana]
  misc_feature (1)..(672): NCBI GI NO: 29825623 NR Description: alpha-L-arabinofuranosidase [Arabidopsis thaliana]
  misc_feature (1)..(662): NCBI GI NO: 16417958 NR Description: arabinosidase ARA-1 [Lycopersicon esculentum]
  misc_feature (3)..(670): NCBI GI NO: 22327075 NR Description: glycosyl hydrolase family 51
  misc_feature (11)..(663): NCBI GI NO: 13398412 NR Description: arabinoxylan arabinofuranohydrolase isoenzyme AXAH-I
  misc_feature (1)..(663): NCBI GI NO: 13398414 NR Description: arabinoxylan arabinofuranohydrolase isoenzyme AXAH-II
  misc_feature (1)..(656): NCBI GI NO: 38347003 NR Description: OSJNBb0058J09.4
  misc_feature (32)..(661): NCBI GI NO: 22324432 NR Description: putative arabinoxylan narabinofuranohydrolaseisoenzyme AXAH-I
MGSSKALCSVSLLHLFIVVCLVFQCFATKNHADLTTTLTVNASDASGKPIPETLFGIFFEEINHAGAGGLWAELVSNRGFEAGGPNTPSNIDPWSIIGNESLINVETDRTSCFDRNKVALRLEVSCDSEGDNICPADGVGVYNPGFWGMNIEQGKKYKVVFYVRSTESLNLTVSLTGSNGVGNLASSVITGSALDFSNWTKVEKILVAKATDNNSRLQLTTTTKGVIWLDQVSAMPLDTYKGHGFRTDLVEMLTALKPRFIRFPGGCFVEGEWLRNAFRWKTSIGPWEERPGHFGDVWMYWTDDGLGYYEFLQLAEDLGASPIWVFNNGVSHNDQVDTSAVLPLVQEALDGIEFARGDPTSKWGSLRAAMGHPEPFDLRYVAVGNEDCGKKNYRGNYLKFYSAIKSAYPDIQIISNCDGSSRPLDHPADMYDYHVYTNANDMFYRANTFDHTSRNGPKAFVSEYAVTGKDAGTGSLLAALAEAGFLIGLEKNSDVIQMASYAPLFVNANDRRWNLDAIVFNSFQLYGTPSYWVQLFFSESSGATLLSTSLQAPSSNSLVASAITFQNSVDKKNYIRIKVVNFGTTAVNLKISLDGLEPNSLQLSGSTKTVLTSANVMDENSFSQPKKVVPIQSLLQNVEKDMNVTVPPRSFTSFDLLKQSSNLKMAGSDSSTWSSI

SEQ ID NO: 10022 - protein, 528 aa, Glycine max
  peptide (1)..(528): Ceres Seq. ID no. 14308620
  misc_feature (1)..(88): Pfam Name: Pfam Description:  Carbohydrate binding domain
  misc_feature (1)..(528): NCBI GI NO: 33151175 NR Description: alpha-L-arabinofuranosidase [Malus x domestica]
  misc_feature (1)..(524): NCBI GI NO: 15228368 NR Description: glycosyl hydrolase family 51
  misc_feature (1)..(524): NCBI GI NO: 13937191 NR Description: AT3g10740/T7M13_18 [Arabidopsis thaliana]
  misc_feature (1)..(524): NCBI GI NO: 29825623 NR Description: alpha-L-arabinofuranosidase [Arabidopsis thaliana]
  misc_feature (1)..(514): NCBI GI NO: 16417958 NR Description: arabinosidase ARA-1 [Lycopersicon esculentum]
  misc_feature (1)..(522): NCBI GI NO: 22327075 NR Description: glycosyl hydrolase family 51
  misc_feature (1)..(515): NCBI GI NO: 13398412 NR Description: arabinoxylan arabinofuranohydrolase isoenzyme AXAH-I
  misc_feature (1)..(515): NCBI GI NO: 13398414 NR Description: arabinoxylan arabinofuranohydrolase isoenzyme AXAH-II
  misc_feature (1)..(508): NCBI GI NO: 38347003 NR Description: OSJNBb0058J09.4
  misc_feature (1)..(513): NCBI GI NO: 22324432 NR Description: putative arabinoxylan narabinofuranohydrolaseisoenzyme AXAH-I
MNIEQGKKYKVVFYVRSTESLNLTVSLTGSNGVGNLASSVITGSALDFSNWTKVEKILVAKATDNNSRLQLTTTTKGVIWLDQVSAMPLDTYKGHGFRTDLVEMLTALKPRFIRFPGGCFVEGEWLRNAFRWKTSIGPWEERPGHFGDVWMYWTDDGLGYYEFLQLAEDLGASPIWVFNNGVSHNDQVDTSAVLPLVQEALDGIEFARGDPTSKWGSLRAAMGHPEPFDLRYVAVGNEDCGKKNYRGNYLKFYSAIKSAYPDIQIISNCDGSSRPLDHPADMYDYHVYTNANDMFYRANTFDHTSRNGPKAFVSEYAVTGKDAGTGSLLAALAEAGFLIGLEKNSDVIQMASYAPLFVNANDRRWNLDAIVFNSFQLYGTPSYWVQLFFSESSGATLLSTSLQAPSSNSLVASAITFQNSVDKKNYIRIKVVNFGTTAVNLKISLDGLEPNSLQLSGSTKTVLTSANVMDENSFSQPKKVVPIQSLLQNVEKDMNVTVPPRSFTSFDLLKQSSNLKMAGSDSSTWSSI

SEQ ID NO: 10023 - protein, 442 aa, Glycine max
  peptide (1)..(442): Ceres Seq. ID no. 14308621
  misc_feature (1)..(442): NCBI GI NO: 33151175 NR Description: alpha-L-arabinofuranosidase [Malus x domestica]
  misc_feature (1)..(438): NCBI GI NO: 15228368 NR Description: glycosyl hydrolase family 51
  misc_feature (1)..(438): NCBI GI NO: 13937191 NR Description: AT3g10740/T7M13_18 [Arabidopsis thaliana]
  misc_feature (1)..(438): NCBI GI NO: 29825623 NR Description: alpha-L-arabinofuranosidase [Arabidopsis thaliana]
  misc_feature (1)..(428): NCBI GI NO: 16417958 NR Description: arabinosidase ARA-1 [Lycopersicon esculentum]
  misc_feature (1)..(436): NCBI GI NO: 22327075 NR Description: glycosyl hydrolase family 51
  misc_feature (1)..(429): NCBI GI NO: 13398412 NR Description: arabinoxylan arabinofuranohydrolase isoenzyme AXAH-I
  misc_feature (1)..(429): NCBI GI NO: 13398414 NR Description: arabinoxylan arabinofuranohydrolase isoenzyme AXAH-II
  misc_feature (1)..(422): NCBI GI NO: 38347003 NR Description: OSJNBb0058J09.4
  misc_feature (1)..(427): NCBI GI NO: 22324432 NR Description: putative arabinoxylan narabinofuranohydrolaseisoenzyme AXAH-I
MPLDTYKGHGFRTDLVEMLTALKPRFIRFPGGCFVEGEWLRNAFRWKTSIGPWEERPGHFGDVWMYWTDDGLGYYEFLQLAEDLGASPIWVFNNGVSHNDQVDTSAVLPLVQEALDGIEFARGDPTSKWGSLRAAMGHPEPFDLRYVAVGNEDCGKKNYRGNYLKFYSAIKSAYPDIQIISNCDGSSRPLDHPADMYDYHVYTNANDMFYRANTFDHTSRNGPKAFVSEYAVTGKDAGTGSLLAALAEAGFLIGLEKNSDVIQMASYAPLFVNANDRRWNLDAIVFNSFQLYGTPSYWVQLFFSESSGATLLSTSLQAPSSNSLVASAITFQNSVDKKNYIRIKVVNFGTTAVNLKISLDGLEPNSLQLSGSTKTVLTSANVMDENSFSQPKKVVPIQSLLQNVEKDMNVTVPPRSFTSFDLLKQSSNLKMAGSDSSTWSSI

SEQ ID NO: 10024 - DNA, 1392 bp, Glycine max
  misc_feature (1)..(1392): Ceres Seq. ID no. 14308598
aaaatatcacattgacgaagaagcccatacttgtgggagatagatggcacgcttgtcactgctcattttcgcgttctgcgccgtcgccgtcgccgtcgccgtcgcgggctcctccttcgatgatgccaaccctatccgtttagcgtcggacttggagtcgcaggtgctggacgtgatcggacagagccgccacgctctctccttcgcccgcttcgctcgccgccacggcaagcgctaccgttccgtcgacgagatccgcaaccgcttccggatcttctctgataatcttaaactcatcagatccaccaacaggaggtctctcacctacacgctcggcgtcaatcattttgctgactggacttgggaggagttcaccagacacaagctcggcgctcctcagaattgctctgccacgctcaaaggcaaccacaggctcaccgatgctgttcttcctgacgagaaagactggagaaaagaaggtatagtcagccaagttaaagatcaaggcaactgcggatcttgctggacattcagcacaactggtgcattggaggcagcttacgcacaggcctttgggaagaatatcagtctttctgagcagcagctagtggactgtgccggtgctttcaataactttggctgtaatggtggtttgccatcccaagcctttgaatacattaaatacaatggtggcctcgacacagaagaagcatatccctacaccggaaaagatggtgtctgcaaatttacagctaaaaacgttgctgttcgagtcattgactctatcaatatcactttgggtgctgaggatgaattgaaacaagcggttgcttttgttcggccagttagtgtggcatttgaggtagcgaaggacttccgattctacaataatggagtttacactagtaccatttgtggtagcacgcccatggatgtaaatcatgctgttcttgctgttgggtatggagttgaagatggtgttccatattggatcattaaaaattcatggggaagcaactggggtgacaatggttacttcaagatggaattagggaagaatatgtgcggtgttgcaacttgtgcatcttatcctgttgtggcttaaatgtatgcagagagatgtggtgcccgatatgcccgtgtaactgcaccttgcacgtcatgcttcgtatcgtccatcttaaagggtgaaacattgtactgcgataaaaatttacagtatatgttgatgtttatctgtaaaataagtttggaattgggatgttcattctccttgagctgaatcacattacaaaatcgtactgtaaatcatttgtcacatagaggtatcatagaaattataaactgtgttatgctccccaatctctagcaatgtaaggatagcgtgctgtg

SEQ ID NO: 10025 - protein, 353 aa, Glycine max
  peptide (1)..(353): Ceres Seq. ID no. 14308599
  misc_feature (136)..(351): Pfam Name: Pfam Description:  Papain family cysteine protease
  misc_feature (1)..(353): NCBI GI NO: 7435779 NR Description: cysteine proteinase (EC 3.4.22.-) - garden pea
  misc_feature (1)..(353): NCBI GI NO: 14422331 NR Description: early leaf senescence abundant cysteine protease
  misc_feature (1)..(353): NCBI GI NO: 2677828 NR Description: cysteine protease [Prunus armeniaca]
  misc_feature (1)..(353): NCBI GI NO: 8347420 NR Description: cysteine protease [Nicotiana tabacum]
  misc_feature (5)..(353): NCBI GI NO: 18407961 NR Description: cysteine proteinase AALP, putative
  misc_feature (1)..(353): NCBI GI NO: 28192371 NR Description: NTCP23-like cysteine proteinase
  misc_feature (1)..(353): NCBI GI NO: 2499879 NR Description: Cysteine proteinase 3 precursor
  misc_feature (1)..(353): NCBI GI NO: 18424347 NR Description: cysteine proteinase AALP [Arabidopsis thaliana]
  misc_feature (1)..(353): NCBI GI NO: 18141289 NR Description: senescence-associated cysteine protease
  misc_feature (17)..(353): NCBI GI NO: 23397070 NR Description: putative cysteine proteinase AALP
MARLSLLIFAFCAVAVAVAVAGSSFDDANPIRLASDLESQVLDVIGQSRHALSFARFARRHGKRYRSVDEIRNRFRIFSDNLKLIRSTNRRSLTYTLGVNHFADWTWEEFTRHKLGAPQNCSATLKGNHRLTDAVLPDEKDWRKEGIVSQVKDQGNCGSCWTFSTTGALEAAYAQAFGKNISLSEQQLVDCAGAFNNFGCNGGLPSQAFEYIKYNGGLDTEEAYPYTGKDGVCKFTAKNVAVRVIDSINITLGAEDELKQAVAFVRPVSVAFEVAKDFRFYNNGVYTSTICGSTPMDVNHAVLAVGYGVEDGVPYWIIKNSWGSNWGDNGYFKMELGKNMCGVATCASYPVVA

SEQ ID NO: 10026 - DNA, 1530 bp, Glycine max
  misc_feature (1)..(1530): Ceres Seq. ID no. 15177965
aagattttcttggacgtgttagaaaatacagtagccgttgaccaaaaccaacaaaaaaaaaaatagtattatatgaacgtgaaccagcgtcacaaagaagtttgtgagcataaagaaacatctcaatctcaaaagaagcatctcgtgtattgtctcttaaaaacaatggaattgatgtgccattgttcgagctttcttcttccgccggagaatcctaacacgacgtgttcgctttctctaaagtacgctctcgttgttctcaaccaaagcctaccgagatttgctcctctgctctgggaccacgctcaagtacgagtttgcgctgatggaggtgccaatagggtgtatgatgaaatgcctcttttcttccctcatcaacaaccttcccatgttcgcaccaggtacaagcctgatgtaattaaaggagacatggattcaatcaggacagaagtacttgacttctatgcaaagctgggaactaagataattgatgagtctcatgatcaggacaccacagatttacacaaatgtgtggcatacatacgtgacctcaccccaaatgttgatggatcagaactatgcattcttgttgctggagcacttggtgggagattcgaccatgagattggaaatattaatgtgctgtgccgattttccaacacacgaattatccttctatctgatgattgcctcattcatcttcttccaaagaatcattgtcatcaaatctttattgaatcttctgttgagggtccgcattgtggactcattcccattgggatgccttctggaagctctacatccacaggactcaaatgggatctcaatgacacagcgatgagttttggaggtttagtaagtacatccaatattgtaaaaggggaaatagttacagtacagtctgattcagatcttctttggactatttctattaagaagctcgaggttttacatggtgcatagtgcggtgatttttcagatcttcaataccaatttatatgggccctatattccagttaaaagccagagcttctgctgacctttataactttacgtttcattctttcaatttactctgaattatgggagggtggaagggaattaggaaattattctttaaattaggaagttctattcctagtaactgtgccttgaaagtcagttttcaaaaggctacttacattccttggctcagttgtattgtatgttattgttatccgtaaatgaaatagcaggaataagatgagcaagaaaaagaaggagaaaaccatgtcatgtactattgcttatgcatacagaacagttactgtcaattgaaatggttaatggattgttagttgccactctacactgcaggaccatgacgggtcaataattctggttaatatctagtatgtgattagtgatatggatttttgaattagaagaatgagttgaaatttgattatacattgtaacgggagtaattattatatgtgagacgggtttttcaatttacaagaacgagttaataaaatttgattatgcagg

SEQ ID NO: 10027 - protein, 296 aa, Glycine max
  peptide (1)..(296): Ceres Seq. ID no. 15177966
  misc_feature (64)..(204): Pfam Name: Pfam Description:  Thiamin pyrophosphokinase, catalytic domain
  misc_feature (28)..(289): NCBI GI NO: 30689827 NR Description: thiamin pyrophosphokinase -related
  misc_feature (32)..(289): NCBI GI NO: 7488367 NR Description: probable thiamin pyrophosphokinase At2g44750
  misc_feature (28)..(289): NCBI GI NO: 18406621 NR Description: thiamin pyrophosphokinase -related
  misc_feature (29)..(289): NCBI GI NO: 30678415 NR Description: thiamin pyrophosphokinase -related
  misc_feature (32)..(289): NCBI GI NO: 18379026 NR Description: thiamin pyrophosphokinase -related
  misc_feature (135)..(290): NCBI GI NO: 34915046 NR Description: putative thiamin pyrophosphokinase
  misc_feature (32)..(110): NCBI GI NO: 34915046 NR Description: putative thiamin pyrophosphokinase
  misc_feature (110)..(289): NCBI GI NO: 30678410 NR Description: thiamin pyrophosphokinase -related
  misc_feature (35)..(288): NCBI GI NO: 34907130 NR Description: putative thiamine pyrophosphokinase
  misc_feature (13)..(291): NCBI GI NO: 28571654 NR Description: CG14721-PA [Drosophila melanogaster]
MNVNQRHKEVCEHKETSQSQKKHLVYCLLKTMELMCHCSSFLLPPENPNTTCSLSLKYALVVLNQSLPRFAPLLWDHAQVRVCADGGANRVYDEMPLFFPHQQPSHVRTRYKPDVIKGDMDSIRTEVLDFYAKLGTKIIDESHDQDTTDLHKCVAYIRDLTPNVDGSELCILVAGALGGRFDHEIGNINVLCRFSNTRIILLSDDCLIHLLPKNHCHQIFIESSVEGPHCGLIPIGMPSGSSTSTGLKWDLNDTAMSFGGLVSTSNIVKGEIVTVQSDSDLLWTISIKKLEVLHGA

SEQ ID NO: 10028 - protein, 265 aa, Glycine max
  peptide (1)..(265): Ceres Seq. ID no. 15177967
  misc_feature (33)..(173): Pfam Name: Pfam Description:  Thiamin pyrophosphokinase, catalytic domain
  misc_feature (1)..(258): NCBI GI NO: 30689827 NR Description: thiamin pyrophosphokinase -related
  misc_feature (1)..(258): NCBI GI NO: 7488367 NR Description: probable thiamin pyrophosphokinase At2g44750
  misc_feature (1)..(258): NCBI GI NO: 18406621 NR Description: thiamin pyrophosphokinase -related
  misc_feature (1)..(258): NCBI GI NO: 30678415 NR Description: thiamin pyrophosphokinase -related
  misc_feature (1)..(258): NCBI GI NO: 18379026 NR Description: thiamin pyrophosphokinase -related
  misc_feature (104)..(259): NCBI GI NO: 34915046 NR Description: putative thiamin pyrophosphokinase
  misc_feature (1)..(79): NCBI GI NO: 34915046 NR Description: putative thiamin pyrophosphokinase
  misc_feature (79)..(258): NCBI GI NO: 30678410 NR Description: thiamin pyrophosphokinase -related
  misc_feature (4)..(257): NCBI GI NO: 34907130 NR Description: putative thiamine pyrophosphokinase
  misc_feature (1)..(260): NCBI GI NO: 28571654 NR Description: CG14721-PA [Drosophila melanogaster]
MELMCHCSSFLLPPENPNTTCSLSLKYALVVLNQSLPRFAPLLWDHAQVRVCADGGANRVYDEMPLFFPHQQPSHVRTRYKPDVIKGDMDSIRTEVLDFYAKLGTKIIDESHDQDTTDLHKCVAYIRDLTPNVDGSELCILVAGALGGRFDHEIGNINVLCRFSNTRIILLSDDCLIHLLPKNHCHQIFIESSVEGPHCGLIPIGMPSGSSTSTGLKWDLNDTAMSFGGLVSTSNIVKGEIVTVQSDSDLLWTISIKKLEVLHGA

SEQ ID NO: 10029 - protein, 262 aa, Glycine max
  peptide (1)..(262): Ceres Seq. ID no. 15177968
  misc_feature (30)..(170): Pfam Name: Pfam Description:  Thiamin pyrophosphokinase, catalytic domain
  misc_feature (1)..(255): NCBI GI NO: 30689827 NR Description: thiamin pyrophosphokinase -related
  misc_feature (1)..(255): NCBI GI NO: 7488367 NR Description: probable thiamin pyrophosphokinase At2g44750
  misc_feature (1)..(255): NCBI GI NO: 18406621 NR Description: thiamin pyrophosphokinase -related
  misc_feature (1)..(255): NCBI GI NO: 30678415 NR Description: thiamin pyrophosphokinase -related
  misc_feature (1)..(255): NCBI GI NO: 18379026 NR Description: thiamin pyrophosphokinase -related
  misc_feature (101)..(256): NCBI GI NO: 34915046 NR Description: putative thiamin pyrophosphokinase
  misc_feature (1)..(76): NCBI GI NO: 34915046 NR Description: putative thiamin pyrophosphokinase
  misc_feature (76)..(255): NCBI GI NO: 30678410 NR Description: thiamin pyrophosphokinase -related
  misc_feature (1)..(254): NCBI GI NO: 34907130 NR Description: putative thiamine pyrophosphokinase
  misc_feature (1)..(257): NCBI GI NO: 28571654 NR Description: CG14721-PA [Drosophila melanogaster]
MCHCSSFLLPPENPNTTCSLSLKYALVVLNQSLPRFAPLLWDHAQVRVCADGGANRVYDEMPLFFPHQQPSHVRTRYKPDVIKGDMDSIRTEVLDFYAKLGTKIIDESHDQDTTDLHKCVAYIRDLTPNVDGSELCILVAGALGGRFDHEIGNINVLCRFSNTRIILLSDDCLIHLLPKNHCHQIFIESSVEGPHCGLIPIGMPSGSSTSTGLKWDLNDTAMSFGGLVSTSNIVKGEIVTVQSDSDLLWTISIKKLEVLHGA

SEQ ID NO: 10030 - DNA, 523 bp, Glycine max
  misc_feature (1)..(523): Ceres Seq. ID no. 15177774
acatatatcttaatggtcaggaaaatgcctcgaatgtatgtttagaggtagtgaaaacactgccacagttgcaacagaaagagccacaatcaagaggtggcagatttggtgataatggtggtcgtggtgggaactacaggtttggtggaagaggtggaggaggcaggaatggtaggttctccaatggtggtgggcgtggcggcaactggggtggaaagagatggtgaagctgagaagggactttgggagttgagtgttttcactctgctcggtgtgggatcataactgcgtgacgaccacgtggggatgaatacttcagtcgtgaatgaagaaacagttgatgttggttaaggcccacggaggattcgagttcaagatggattcaatgtgtcccctaacaacatattctatgtttcatttttgttttgttattttttattcttttgcggggaagcgtaagtttagatttttatattctgtctttcacaggagaaattttgatgtagtagtatatacttttacg

SEQ ID NO: 10031 - protein, 74 aa, Glycine max
  peptide (1)..(74): Ceres Seq. ID no. 15177775
  misc_feature (2)..(74): NCBI GI NO: 7211427 NR Description: RNA helicase [Vigna radiata]
  misc_feature (2)..(71): NCBI GI NO: 7484683 NR Description: RNA helicase prh75 - spinach
  misc_feature (14)..(73): NCBI GI NO: 9506713 NR Description: nucleolar protein family A, member 1; GAR1 protein
  misc_feature (1)..(72): NCBI GI NO: 1488521 NR Description: RNA helicase [Arabidopsis thaliana]
  misc_feature (1)..(72): NCBI GI NO: 15241726 NR Description: DEAD box RNA helicase (prh75), putative
  misc_feature (1)..(72): NCBI GI NO: 14517482 NR Description: AT5g62190/mmi9_10 [Arabidopsis thaliana]
  misc_feature (14)..(72): NCBI GI NO: 28279152 NR Description: Similar to nucleolar protein family A, member 1
  misc_feature (32)..(72): NCBI GI NO: 17559334 NR Description: putative secreted or extracellular proteinprecursor
  misc_feature (32)..(71): NCBI GI NO: 18256903 NR Description: Nola1 protein [Mus musculus]
  misc_feature (31)..(72): NCBI GI NO: 17559334 NR Description: putative secreted or extracellular proteinprecursor
IYLNGQENASNVCLEVVKTLPQLQQKEPQSRGGRFGDNGGRGGNYRFGGRGGGGRNGRFSNGGGRGGNWGGKRW

SEQ ID NO: 10032 - protein, 66 aa, Glycine max
  peptide (1)..(66): Ceres Seq. ID no. 15177776
MKKQLMLVKAHGGFEFKMDSMCPLTTYSMFHFCFVIFYSFAGKRKFRFLYSVFHRRNFDVVVYTFT

SEQ ID NO: 10033 - protein, 61 aa, Glycine max
  peptide (1)..(61): Ceres Seq. ID no. 15177777
MLVKAHGGFEFKMDSMCPLTTYSMFHFCFVIFYSFAGKRKFRFLYSVFHRRNFDVVVYTFT

SEQ ID NO: 10034 - protein, 56 aa, Glycine max
  peptide (1)..(56): Ceres Seq. ID no. 15177778
MVVVVGTTGLVEEVEEAGMVGSPMVVGVAATGVERDGEAEKGLWELSVFTLLGVGS

SEQ ID NO: 10035 - DNA, 1238 bp, Glycine max
  misc_feature (1)..(1238): Ceres Seq. ID no. 14308084
ggtgcccttcattcctatcaattatcaaacagcttcggtgatcatcgtaactacctctacatttgtttgtttatcatttctttgctcgtatcaatgtctaacaccagcaacaatgtcgctggggtcgacaacacgttcagaagaaaatttgatcgagaagagtatctagaacgagcacgggagcgcgagagacaggaggaggagggtcgagcgaaacctaaagccaaaggtcctcccgtgcagaggaagcccttgaaacatagagattatgaagtggaccttgaatcccgcttgggcaagactcaggttgttacgccggttgcaccactaagtcagcaggctggatactactgctcagtttgtgagtgtgtggtgaaggactctgcaaactacttggatcatattaatggaaagaaacatcaaagagccttgggcatgtccatgcgagtagaacgtgcttctctccaacaggttcaggaacgatttgaagttcttaagaagcgtaaagatgttggcagcttcacagagcaagatcttgacgagcggattttaaaacagcagcaagaggaggaagaaagaaagcgactgcgtcgagaaaagaaaaaagaaaaggtagtgtctgtatagtcgtttaattttagttagaaataggcaataggtttgaataaaccttttttctatcctccctttaccttatcccactaccatcaagtacaattagtttttttaatgttatttacttattataactgctaataattgcatccatctttctaaaaatgatttttaatgttattttaataaacaaagattgcttttgtttttcacaacttagctaatagcatgtgttaaattttggattcagaaggagaaggcagttgaagaacctgaaattgatcctgatgttgctgccatgatggggtttggaggtttccggtcatccaacaagaaatgatagcattctgcatgcggaatgaactgcgtatgaaattttggaacaattattctgcaatgataagctgaaagattattctgtggagaatcgttaaatagttgggctgcggtatcttccagcctgattttgggtgtggcttaaagatttttctgtggagaatagttaaatagttgggctgctcaaacagtagtatgggtgctggtgcattgcgttatattcaatcatttgattcggttgattcatgtacatttcttctgatagctaacctgatgtattattatat

SEQ ID NO: 10036 - protein, 208 aa, Glycine max
  peptide (1)..(208): Ceres Seq. ID no. 14308085
  misc_feature (116)..(140): Pfam Name: Pfam Description:  Zinc finger, C2H2 type
  misc_feature (36)..(204): NCBI GI NO: 34897240 NR Description: unknown protein
  misc_feature (35)..(204): NCBI GI NO: 18397358 NR Description: expressed protein [Arabidopsis thaliana]
  misc_feature (35)..(208): NCBI GI NO: 6714389 NR Description: hypothetical protein [Arabidopsis thaliana]
  misc_feature (40)..(204): NCBI GI NO: 37595334 NR Description: z2610510D14Rik [Danio rerio]
  misc_feature (40)..(204): NCBI GI NO: 13385046 NR Description: RIKEN cDNA 2610510D14 [Mus musculus]
  misc_feature (46)..(204): NCBI GI NO: 34878791 NR Description: similar to histidyl-tRNA synthetase-like
  misc_feature (47)..(204): NCBI GI NO: 21355873 NR Description: CG11586-PA [Drosophila melanogaster]
  misc_feature (47)..(204): NCBI GI NO: 31216822 NR Description: ENSANGP00000020597 [Anopheles gambiae]
  misc_feature (7)..(203): NCBI GI NO: 17557051 NR Description: putative nuclear protein
  misc_feature (17)..(205): NCBI GI NO: 39581678 NR Description: Hypothetical protein CBG00030
GALHSYQLSNSFGDHRNYLYICLFIISLLVSMSNTSNNVAGVDNTFRRKFDREEYLERARERERQEEEGRAKPKAKGPPVQRKPLKHRDYEVDLESRLGKTQVVTPVAPLSQQAGYYCSVCECVVKDSANYLDHINGKKHQRALGMSMRVERASLQQVQERFEVLKKRKDVGSFTEQDLDERILKQQQEEEERKRLRREKKKEKVVSV

SEQ ID NO: 10037 - protein, 177 aa, Glycine max
  peptide (1)..(177): Ceres Seq. ID no. 14308086
  misc_feature (85)..(109): Pfam Name: Pfam Description:  Zinc finger, C2H2 type
  misc_feature (5)..(173): NCBI GI NO: 34897240 NR Description: unknown protein
  misc_feature (4)..(173): NCBI GI NO: 18397358 NR Description: expressed protein [Arabidopsis thaliana]
  misc_feature (4)..(177): NCBI GI NO: 6714389 NR Description: hypothetical protein [Arabidopsis thaliana]
  misc_feature (9)..(173): NCBI GI NO: 37595334 NR Description: z2610510D14Rik [Danio rerio]
  misc_feature (9)..(173): NCBI GI NO: 13385046 NR Description: RIKEN cDNA 2610510D14 [Mus musculus]
  misc_feature (15)..(173): NCBI GI NO: 34878791 NR Description: similar to histidyl-tRNA synthetase-like
  misc_feature (16)..(173): NCBI GI NO: 21355873 NR Description: CG11586-PA [Drosophila melanogaster]
  misc_feature (16)..(173): NCBI GI NO: 31216822 NR Description: ENSANGP00000020597 [Anopheles gambiae]
  misc_feature (1)..(172): NCBI GI NO: 17557051 NR Description: putative nuclear protein
  misc_feature (1)..(174): NCBI GI NO: 39581678 NR Description: Hypothetical protein CBG00030
MSNTSNNVAGVDNTFRRKFDREEYLERARERERQEEEGRAKPKAKGPPVQRKPLKHRDYEVDLESRLGKTQVVTPVAPLSQQAGYYCSVCECVVKDSANYLDHINGKKHQRALGMSMRVERASLQQVQERFEVLKKRKDVGSFTEQDLDERILKQQQEEEERKRLRREKKKEKVVSV

SEQ ID NO: 10038 - DNA, 421 bp, Glycine max
  misc_feature (1)..(421): Ceres Seq. ID no. 15226489
accgggccccccctcgagtcagctacgtaggccccccccccttttgagaagtttgtggaccttgcaatggagtgtgttgaagattcaggagctgacaggcccgcaatgagtgatgtggttaaagaaattgaagacatgttgcagtctgttggtatgcacctaacatctgaatcagtaacatccacaacatctagtcatagatatcaggaggtaagtatagtgagtttccatctggaccaaccttacagcaatgagtcctttggttcaagtgcagaacatattcaaaaattgaacctagttagttaagttagtcttttttctcaagattgaagtcaagagagacttgtttattagtatttcttggccaaaacacagaaaagtagaaattgtggaatttagagtttgtggctgtgagcttcag

SEQ ID NO: 10039 - protein, 79 aa, Glycine max
  peptide (1)..(79): Ceres Seq. ID no. 15226490
  misc_feature (1)..(65): NCBI GI NO: 30695748 NR Description: receptor protein kinase-related
  misc_feature (1)..(69): NCBI GI NO: 15240549 NR Description: leucine-rich repeat transmembrane protein kinase
  misc_feature (1)..(40): NCBI GI NO: 8978273 NR Description: receptor protein kinase-like
MECVEDSGADRPAMSDVVKEIEDMLQSVGMHLTSESVTSTTSSHRYQEVSIVSFHLDQPYSNESFGSSAEHIQKLNLVS

SEQ ID NO: 10040 - protein, 66 aa, Glycine max
  peptide (1)..(66): Ceres Seq. ID no. 15226491
  misc_feature (1)..(52): NCBI GI NO: 30695748 NR Description: receptor protein kinase-related
  misc_feature (1)..(56): NCBI GI NO: 15240549 NR Description: leucine-rich repeat transmembrane protein kinase
  misc_feature (1)..(27): NCBI GI NO: 8978273 NR Description: receptor protein kinase-like
MSDVVKEIEDMLQSVGMHLTSESVTSTTSSHRYQEVSIVSFHLDQPYSNESFGSSAEHIQKLNLVS

SEQ ID NO: 10041 - protein, 56 aa, Glycine max
  peptide (1)..(56): Ceres Seq. ID no. 15226492
  misc_feature (1)..(42): NCBI GI NO: 30695748 NR Description: receptor protein kinase-related
  misc_feature (1)..(46): NCBI GI NO: 15240549 NR Description: leucine-rich repeat transmembrane protein kinase
  misc_feature (1)..(17): NCBI GI NO: 8978273 NR Description: receptor protein kinase-like
MLQSVGMHLTSESVTSTTSSHRYQEVSIVSFHLDQPYSNESFGSSAEHIQKLNLVS

SEQ ID NO: 10042 - DNA, 1244 bp, Glycine max
  misc_feature (1)..(1244): Ceres Seq. ID no. 15172875
agaggtgtagcagctcgagtttttgaaattgttggtttctgacaaggggcgtgagctgctatgcattttccacagttaaagccccaagagctactgcatgagcatttaacgtgtcttcacctaacaggattttggaattgttggtttgatcataagagctatcgcattatacatgagctttgttgatttctatatatctgaaatggttttcttcaccttattgttttcacatgttaatttaattgtgaaactgaattgtggtttgatacagagtaatcatattgttgctttgaaagtactcttcaagagtcaattgcaacaatcccaagttgtgcatcaacttcgacgtgaagttgaaatacagagtcatctccgacatccccacattttgcgcctctatggatacttttatgatcagaaacgagtttatttgattttagagtatgcacccaaaggtgaactttacaaggaattgcaaaaatgcaaatatttcagtgaaaggcgtgcagctacttatgttgcatcattggcccgagcccttatatattgccatggaaagcatgtaatacatagggatattaaaccagagaaccttcttattggttcacagggtgagttgaaaatagcagactttgggtggtcagtgcacacattcaatcgcaggcggaccatgtgtggcacactggattaccttcctcctgagatggtggagagtgtagaacatgatgcgagtgtggatatatggagccttggtgtcttgtgctatgagtttctttatggagtccctccttttgaggctaaagaacattctgatacttacaggaggataatacaagtggatctgaagttccctcctaaaccaattgtgtcttcagctgcaaaggatctcattagtcagatgctggtcaaggattcctctcaacgtctaccattgcacaaactcctcgaacacccttggattgttcagaatgccgagccctctggtgtatataggagctagtgcaccttatcattcttatattgtattttcttaatcgtggaaatcatcaaaatagcagctgcttctaagtatttgacaacattttggttttgagatgatgcaactatttgaagtaggttgctaggttaagagaaatcacttgttatatgattgtaaaccctactccttcaagggctatataaagaataactgatgtcacttgttatttgattgtaaaccctactccttcaagggctatataaag

SEQ ID NO: 10043 - protein, 275 aa, Glycine max
  peptide (1)..(275): Ceres Seq. ID no. 15172876
  misc_feature (33)..(263): Pfam Name: Pfam Description:  Protein kinase domain
  misc_feature (33)..(274): NCBI GI NO: 15233958 NR Description: protein kinase, putative [Arabidopsis thaliana]
  misc_feature (33)..(274): NCBI GI NO: 21592557 NR Description: putative serine/threonine protein kinase
  misc_feature (33)..(274): NCBI GI NO: 15225210 NR Description: serine/threonine protein kinase, putative
  misc_feature (33)..(274): NCBI GI NO: 34906424 NR Description: putative protein kinase
  misc_feature (33)..(268): NCBI GI NO: 1079309 NR Description: protein kinase (EC 2
  misc_feature (33)..(268): NCBI GI NO: 27923859 NR Description: Serine/threonine protein kinase Eg2-like
  misc_feature (33)..(268): NCBI GI NO: 27923860 NR Description: Serine/threonine protein kinase Eg2
  misc_feature (33)..(275): NCBI GI NO: 15225495 NR Description: protein kinase, putative [Arabidopsis thaliana]
  misc_feature (33)..(271): NCBI GI NO: 20862949 NR Description: serine/threonine kinase 6 [Mus musculus]
  misc_feature (33)..(271): NCBI GI NO: 33355454 NR Description: serine/threonine protein kinase 6 [Mus musculus]
MSFVDFYISEMVFFTLLFSHVNLIVKLNCGLIQSNHIVALKVLFKSQLQQSQVVHQLRREVEIQSHLRHPHILRLYGYFYDQKRVYLILEYAPKGELYKELQKCKYFSERRAATYVASLARALIYCHGKHVIHRDIKPENLLIGSQGELKIADFGWSVHTFNRRRTMCGTLDYLPPEMVESVEHDASVDIWSLGVLCYEFLYGVPPFEAKEHSDTYRRIIQVDLKFPPKPIVSSAAKDLISQMLVKDSSQRLPLHKLLEHPWIVQNAEPSGVYRS

SEQ ID NO: 10044 - protein, 265 aa, Glycine max
  peptide (1)..(265): Ceres Seq. ID no. 15172877
  misc_feature (23)..(253): Pfam Name: Pfam Description:  Protein kinase domain
  misc_feature (23)..(264): NCBI GI NO: 15233958 NR Description: protein kinase, putative [Arabidopsis thaliana]
  misc_feature (23)..(264): NCBI GI NO: 21592557 NR Description: putative serine/threonine protein kinase
  misc_feature (23)..(264): NCBI GI NO: 15225210 NR Description: serine/threonine protein kinase, putative
  misc_feature (23)..(264): NCBI GI NO: 34906424 NR Description: putative protein kinase
  misc_feature (23)..(258): NCBI GI NO: 1079309 NR Description: protein kinase (EC 2
  misc_feature (23)..(258): NCBI GI NO: 27923859 NR Description: Serine/threonine protein kinase Eg2-like
  misc_feature (23)..(258): NCBI GI NO: 27923860 NR Description: Serine/threonine protein kinase Eg2
  misc_feature (23)..(265): NCBI GI NO: 15225495 NR Description: protein kinase, putative [Arabidopsis thaliana]
  misc_feature (23)..(261): NCBI GI NO: 20862949 NR Description: serine/threonine kinase 6 [Mus musculus]
  misc_feature (23)..(261): NCBI GI NO: 27923856 NR Description: Serine/threonine kinase 6
MVFFTLLFSHVNLIVKLNCGLIQSNHIVALKVLFKSQLQQSQVVHQLRREVEIQSHLRHPHILRLYGYFYDQKRVYLILEYAPKGELYKELQKCKYFSERRAATYVASLARALIYCHGKHVIHRDIKPENLLIGSQGELKIADFGWSVHTFNRRRTMCGTLDYLPPEMVESVEHDASVDIWSLGVLCYEFLYGVPPFEAKEHSDTYRRIIQVDLKFPPKPIVSSAAKDLISQMLVKDSSQRLPLHKLLEHPWIVQNAEPSGVYRS

SEQ ID NO: 10045 - DNA, 1039 bp, Glycine max
  misc_feature (1)..(1039): Ceres Seq. ID no. 14313391
aacaattcaagaaaactaatcatgaacttgaggtttgtgatagggatatagccaatgtgcttgtgtgaatgcttattctggaaattaaggtttaatttttaactgaccaattatttcaaatcactttgtaagtgctttacctttctgcaatcatgtttatctttcccccttacaactgggagctgtaaaggggattgtaggtctcaaagatacttaatggaaatataaaaaactgagtttaatttattacttgtatgggagaatatgtgcatgctgttgctttggttcttgggagtttttcctttatagaattcccattctcattggttttctttctcaatcatttttcctcaacagtcaacatctgctctataacgggcatatggctccatccttctattgatggttccattgattctttatggcaggaaacgtttatttagcttgatcaatgatcttcctactgtttttgaagttgtgactgagaggaagccagtaaaggacaagcccactgcagacagtggaagcaagtctagaggcagcaccaagagatcaagtgatgggcaagttaagagcaacccaaagtttgcagatgatggttatgaagacgaggatgatgagcacagtgaaaccctttgtgggagctgtggcggaaattacaatgcagatgaattttggattggctgcgatatatgtgagaggtggttccatgggaaatgtgtgaagatcactcctgcaaaagctgagagcataaagcaatacaaatgtccatcatgcagcttgaggcgaggcaggccctaagccgaaggcaaaatgtgaagtgaataatgctgtttcatggccgacaaagatactgtaatattgttgtatcttttatagaagttcttgtaaacggtatagtatctatgtctgatcataatctttcagattaagttaatttcttctaccaagattaatcatcagtgtatgttatataattttatagaatagaattctatacattttatttttgtctattaatctatattttgcttgaatt

SEQ ID NO: 10046 - protein, 132 aa, Glycine max
  peptide (1)..(132): Ceres Seq. ID no. 14313392
  misc_feature (78)..(125): Pfam Name: Pfam Description:  PHD-finger
  misc_feature (9)..(131): NCBI GI NO: 15239180 NR Description: nucleic acid binding protein-related
  misc_feature (9)..(131): NCBI GI NO: 15229696 NR Description: nucleic acid binding protein -related
  misc_feature (9)..(126): NCBI GI NO: 28876028 NR Description: putative PHD-finger domain containing protein
  misc_feature (9)..(126): NCBI GI NO: 29124114 NR Description: putative PHD-type zinc finger protein
  misc_feature (9)..(126): NCBI GI NO: 34900462 NR Description: putative nucleic acid binding protein
  misc_feature (9)..(131): NCBI GI NO: 15229157 NR Description: nucleic acid binding protein-related
  misc_feature (9)..(131): NCBI GI NO: 15239624 NR Description: nucleic acid binding protein - like
  misc_feature (9)..(132): NCBI GI NO: 30687843 NR Description: zinc finger protein - like [Arabidopsis thaliana]
  misc_feature (9)..(131): NCBI GI NO: 7488751 NR Description: probable zinc finger protein - alfalfa (fragment)
  misc_feature (9)..(126): NCBI GI NO: 15223786 NR Description: nucleic acid binding protein (alfin-1) -related
MVPLILYGRKRLFSLINDLPTVFEVVTERKPVKDKPTADSGSKSRGSTKRSSDGQVKSNPKFADDGYEDEDDEHSETLCGSCGGNYNADEFWIGCDICERWFHGKCVKITPAKAESIKQYKCPSCSLRRGRP

SEQ ID NO: 10047 - DNA, 1260 bp, Glycine max
  misc_feature (1)..(1260): Ceres Seq. ID no. 13594193
gatcatccactacttgtagctattagcttataacagagagagagagagagagagagagagagagggagagatcacatttcctgaactataagctatatagcacttccataatcttacaacaatggaggggaccagcagccaaagcacgtttgccttcatccctagcacaattgagacaccaagtccaagcatccctgagatatcatcatcatcttcccctggctctcttgcaagaattgcacaaagttaccctcccggctttcccagaaaggtgttagcggagattatagggacatttttgttggtgtttgtgggaagtggttctgctgggctaagcaagattgatgagaggatggtgtcaaagcttggagcatcacttgcaggaggactcatagtgacggtcatgatatactcaattggacacatatcaggggcacacatgaatcccgcggtttctcttgctttcaccgccgtcaggcatcttccttggccacagctcccattttatatagcagctcaactcactggtgccatttctgcttcatacacattgcgagagctgttacgaccatcaaatgagattggaggaacatcacctgctggatcacacattcaagccctaatcatggaaatggtgaccacatataccatggtgttcatttccatggccgtggccactgactcaaacgcgacaggacagctatcaggagtagcagtaggttcttctgtttgcatagcaagcattgtagccggaccaatatcagggggatcaatgaatccagcaaggacattaggtcctgcaattgcgacatcatactacaagggactttgggtatattttgttggacctattactggggcggttttagcagcttggtcttacaatgtgattagggacactgaacaccctggttttcccatttcactatcctccatttcatccaaggtgcgccaaagcattggtggaactgaacaaaaaagcgaccaaagatgcttggtgtgaatgaaataataaacaacaatgttttttctgacaccacaccaccgcccaaatcaacatcaccttcaatttcttgtcttggaggatctcaagtttccacatgtattatcatgtatatgatcaaaaataccatgcctagatcatatggtattattagcttggccatgtatcgagttaatttcagggctatgagctagccatgtgtaatgcaaaagtgtgtagtgtgattttcctacattaatgaaatgtcagcttcatcc

SEQ ID NO: 10048 - protein, 293 aa, Glycine max
  peptide (1)..(293): Ceres Seq. ID no. 13594194
  misc_feature (43)..(254): Pfam Name: Pfam Description:  Major intrinsic protein
  misc_feature (28)..(278): NCBI GI NO: 33468424 NR Description: Nod26-like protein [Cucurbita pepo]
  misc_feature (28)..(278): NCBI GI NO: 13447787 NR Description: NOD26-like membrane integral protein ZmNIP2-1
  misc_feature (39)..(278): NCBI GI NO: 13447789 NR Description: NOD26-like membrane integral protein ZmNIP2-2
  misc_feature (39)..(263): NCBI GI NO: 13448045 NR Description: NOD26-like membrane integral protein ZmNIP2-3
  misc_feature (14)..(282): NCBI GI NO: 9971217 NR Description: MIP [Adiantum capillus-veneris]
  misc_feature (34)..(261): NCBI GI NO: 15777893 NR Description: early embryogenesis aquaglyceroporin [Pinus taeda]
  misc_feature (31)..(263): NCBI GI NO: 1076748 NR Description: major intrinsic protein - rice
  misc_feature (37)..(263): NCBI GI NO: 13447785 NR Description: NOD26-like membrane integral protein ZmNIP1-1
  misc_feature (49)..(263): NCBI GI NO: 5139541 NR Description: nodulin26-like major intrinsic protein
  misc_feature (28)..(263): NCBI GI NO: 17025880 NR Description: multifunctional aquaporin [Medicago truncatula]
MEGTSSQSTFAFIPSTIETPSPSIPEISSSSSPGSLARIAQSYPPGFPRKVLAEIIGTFLLVFVGSGSAGLSKIDERMVSKLGASLAGGLIVTVMIYSIGHISGAHMNPAVSLAFTAVRHLPWPQLPFYIAAQLTGAISASYTLRELLRPSNEIGGTSPAGSHIQALIMEMVTTYTMVFISMAVATDSNATGQLSGVAVGSSVCIASIVAGPISGGSMNPARTLGPAIATSYYKGLWVYFVGPITGAVLAAWSYNVIRDTEHPGFPISLSSISSKVRQSIGGTEQKSDQRCLV

SEQ ID NO: 10049 - protein, 216 aa, Glycine max
  peptide (1)..(216): Ceres Seq. ID no. 13594195
  misc_feature (1)..(177): Pfam Name: Pfam Description:  Major intrinsic protein
  misc_feature (1)..(201): NCBI GI NO: 33468424 NR Description: Nod26-like protein [Cucurbita pepo]
  misc_feature (1)..(201): NCBI GI NO: 13447787 NR Description: NOD26-like membrane integral protein ZmNIP2-1
  misc_feature (1)..(201): NCBI GI NO: 13447789 NR Description: NOD26-like membrane integral protein ZmNIP2-2
  misc_feature (1)..(186): NCBI GI NO: 13448045 NR Description: NOD26-like membrane integral protein ZmNIP2-3
  misc_feature (1)..(205): NCBI GI NO: 9971217 NR Description: MIP [Adiantum capillus-veneris]
  misc_feature (1)..(184): NCBI GI NO: 15777893 NR Description: early embryogenesis aquaglyceroporin [Pinus taeda]
  misc_feature (1)..(186): NCBI GI NO: 1076748 NR Description: major intrinsic protein - rice
  misc_feature (1)..(186): NCBI GI NO: 13447785 NR Description: NOD26-like membrane integral protein ZmNIP1-1
  misc_feature (1)..(186): NCBI GI NO: 5139541 NR Description: nodulin26-like major intrinsic protein
  misc_feature (1)..(186): NCBI GI NO: 17025880 NR Description: multifunctional aquaporin [Medicago truncatula]
MVSKLGASLAGGLIVTVMIYSIGHISGAHMNPAVSLAFTAVRHLPWPQLPFYIAAQLTGAISASYTLRELLRPSNEIGGTSPAGSHIQALIMEMVTTYTMVFISMAVATDSNATGQLSGVAVGSSVCIASIVAGPISGGSMNPARTLGPAIATSYYKGLWVYFVGPITGAVLAAWSYNVIRDTEHPGFPISLSSISSKVRQSIGGTEQKSDQRCLV

SEQ ID NO: 10050 - protein, 199 aa, Glycine max
  peptide (1)..(199): Ceres Seq. ID no. 13594196
  misc_feature (1)..(160): Pfam Name: Pfam Description:  Major intrinsic protein
  misc_feature (1)..(184): NCBI GI NO: 33468424 NR Description: Nod26-like protein [Cucurbita pepo]
  misc_feature (1)..(184): NCBI GI NO: 13447787 NR Description: NOD26-like membrane integral protein ZmNIP2-1
  misc_feature (1)..(184): NCBI GI NO: 13447789 NR Description: NOD26-like membrane integral protein ZmNIP2-2
  misc_feature (1)..(169): NCBI GI NO: 13448045 NR Description: NOD26-like membrane integral protein ZmNIP2-3
  misc_feature (1)..(188): NCBI GI NO: 9971217 NR Description: MIP [Adiantum capillus-veneris]
  misc_feature (1)..(167): NCBI GI NO: 15777893 NR Description: early embryogenesis aquaglyceroporin [Pinus taeda]
  misc_feature (1)..(169): NCBI GI NO: 1076748 NR Description: major intrinsic protein - rice
  misc_feature (1)..(169): NCBI GI NO: 13447785 NR Description: NOD26-like membrane integral protein ZmNIP1-1
  misc_feature (1)..(169): NCBI GI NO: 5139541 NR Description: nodulin26-like major intrinsic protein
  misc_feature (1)..(169): NCBI GI NO: 17025880 NR Description: multifunctional aquaporin [Medicago truncatula]
MIYSIGHISGAHMNPAVSLAFTAVRHLPWPQLPFYIAAQLTGAISASYTLRELLRPSNEIGGTSPAGSHIQALIMEMVTTYTMVFISMAVATDSNATGQLSGVAVGSSVCIASIVAGPISGGSMNPARTLGPAIATSYYKGLWVYFVGPITGAVLAAWSYNVIRDTEHPGFPISLSSISSKVRQSIGGTEQKSDQRCLV

SEQ ID NO: 10051 - DNA, 1041 bp, Glycine max
  misc_feature (1)..(1041): Ceres Seq. ID no. 13594163
ataaaatggagccacaacatgtgactgatcagaatatagaaactaaaaaatcatcaacaaaaaggctagctgataaggtggcagttataactggtggtgcaagaggaattggtgcagctgcagctaaactgtttgctgaaaatggagcacatgtggtcattgctgatgtgcttgatgaactaggcaccaccgtggccaagtccattggcggccactacatacactgtgatgtgtcgaaggaagatgatgttgaatcagccataaaccttgcactatcatggaagggccatctagacatcatgctcagcaatgctggaattggaggcccagagggaagaagcatcacaacccttgaaatggaccgagtgaggcacttgttctccatcaatctttatggaacaatacatggaatcaagcatgctgcaagggcaatgatcaaaggtaacaacaaaggaggatccatcatatgtacttcaagtgctgcatccatcatgggtggattggccttgcatggatataccatgacaaaagcagcaattgatgggttggtgagaagtgctgcttgtgagttgggagagcatttgattcgtgttaactgcatttccccacatggagtcccctctgagatgcttctcagtgcttgtagaagatttggacatgatgatattacccctcaaggggtgaaggaaatgattgggagcagggcaagtttgcttaaggggaaaggtgcaaccattgaagatgtggcacatgctgctttgttcttggctagtgatgagtctggcttcattacagcacacaatcttcttattgatgggggacacacatctgctgatagcagaatgagttacatgtaccaagacccaaaatgatgagaattatgtaactatcgtttgtagaggaaacacaagaacttgatgatagaatataaaagatttacaataattacatatattctatcacttgatactcttaactttatctactatagttctttaatttccattcgaggaataatatatcgtttcttctttgggcctt

SEQ ID NO: 10052 - protein, 289 aa, Glycine max
  peptide (1)..(289): Ceres Seq. ID no. 13594164
  misc_feature (15)..(287): NCBI GI NO: 1293690 NR Description: STA1-12
  misc_feature (15)..(287): NCBI GI NO: 1293688 NR Description: STA1-2
  misc_feature (17)..(285): NCBI GI NO: 15229190 NR Description: tapetal-specific alcohol dehydrogenase (ATA1)
  misc_feature (17)..(285): NCBI GI NO: 21554236 NR Description: alcohol dehydrogenase (ATA1)
  misc_feature (17)..(285): NCBI GI NO: 2501781 NR Description: alcohol dehydrogenase [Arabidopsis thaliana]
  misc_feature (20)..(277): NCBI GI NO: 15230558 NR Description: short-chain dehydrogenase/reductase family protein
  misc_feature (2)..(230): NCBI GI NO: 1717794 NR Description: SEX DETERMINATION PROTEIN TASSELSEED 2
  misc_feature (227)..(277): NCBI GI NO: 1717794 NR Description: SEX DETERMINATION PROTEIN TASSELSEED 2
  misc_feature (14)..(275): NCBI GI NO: 34899230 NR Description: alcohol dehydrogenase-like protein
  misc_feature (17)..(277): NCBI GI NO: 34898190 NR Description: putative short-chain alcohol dehydrogenase
KMEPQHVTDQNIETKKSSTKRLADKVAVITGGARGIGAAAAKLFAENGAHVVIADVLDELGTTVAKSIGGHYIHCDVSKEDDVESAINLALSWKGHLDIMLSNAGIGGPEGRSITTLEMDRVRHLFSINLYGTIHGIKHAARAMIKGNNKGGSIICTSSAASIMGGLALHGYTMTKAAIDGLVRSAACELGEHLIRVNCISPHGVPSEMLLSACRRFGHDDITPQGVKEMIGSRASLLKGKGATIEDVAHAALFLASDESGFITAHNLLIDGGHTSADSRMSYMYQDPK

SEQ ID NO: 10053 - protein, 288 aa, Glycine max
  peptide (1)..(288): Ceres Seq. ID no. 13594165
  misc_feature (14)..(286): NCBI GI NO: 1293690 NR Description: STA1-12
  misc_feature (14)..(286): NCBI GI NO: 1293688 NR Description: STA1-2
  misc_feature (16)..(284): NCBI GI NO: 15229190 NR Description: tapetal-specific alcohol dehydrogenase (ATA1)
  misc_feature (16)..(284): NCBI GI NO: 21554236 NR Description: alcohol dehydrogenase (ATA1)
  misc_feature (16)..(284): NCBI GI NO: 2501781 NR Description: alcohol dehydrogenase [Arabidopsis thaliana]
  misc_feature (19)..(276): NCBI GI NO: 15230558 NR Description: short-chain dehydrogenase/reductase family protein
  misc_feature (1)..(229): NCBI GI NO: 1717794 NR Description: SEX DETERMINATION PROTEIN TASSELSEED 2
  misc_feature (226)..(276): NCBI GI NO: 1717794 NR Description: SEX DETERMINATION PROTEIN TASSELSEED 2
  misc_feature (13)..(274): NCBI GI NO: 34899230 NR Description: alcohol dehydrogenase-like protein
  misc_feature (16)..(276): NCBI GI NO: 34898190 NR Description: putative short-chain alcohol dehydrogenase
MEPQHVTDQNIETKKSSTKRLADKVAVITGGARGIGAAAAKLFAENGAHVVIADVLDELGTTVAKSIGGHYIHCDVSKEDDVESAINLALSWKGHLDIMLSNAGIGGPEGRSITTLEMDRVRHLFSINLYGTIHGIKHAARAMIKGNNKGGSIICTSSAASIMGGLALHGYTMTKAAIDGLVRSAACELGEHLIRVNCISPHGVPSEMLLSACRRFGHDDITPQGVKEMIGSRASLLKGKGATIEDVAHAALFLASDESGFITAHNLLIDGGHTSADSRMSYMYQDPK

SEQ ID NO: 10054 - protein, 190 aa, Glycine max
  peptide (1)..(190): Ceres Seq. ID no. 13594166
  misc_feature (1)..(188): NCBI GI NO: 1293690 NR Description: STA1-12
  misc_feature (1)..(188): NCBI GI NO: 1293688 NR Description: STA1-2
  misc_feature (1)..(186): NCBI GI NO: 15229190 NR Description: tapetal-specific alcohol dehydrogenase (ATA1)
  misc_feature (1)..(186): NCBI GI NO: 21554236 NR Description: alcohol dehydrogenase (ATA1)
  misc_feature (1)..(186): NCBI GI NO: 2501781 NR Description: alcohol dehydrogenase [Arabidopsis thaliana]
  misc_feature (1)..(178): NCBI GI NO: 15230558 NR Description: short-chain dehydrogenase/reductase family protein
  misc_feature (1)..(131): NCBI GI NO: 1717794 NR Description: SEX DETERMINATION PROTEIN TASSELSEED 2
  misc_feature (128)..(178): NCBI GI NO: 1717794 NR Description: SEX DETERMINATION PROTEIN TASSELSEED 2
  misc_feature (1)..(176): NCBI GI NO: 34899230 NR Description: alcohol dehydrogenase-like protein
  misc_feature (1)..(178): NCBI GI NO: 34898190 NR Description: putative short-chain alcohol dehydrogenase
MLSNAGIGGPEGRSITTLEMDRVRHLFSINLYGTIHGIKHAARAMIKGNNKGGSIICTSSAASIMGGLALHGYTMTKAAIDGLVRSAACELGEHLIRVNCISPHGVPSEMLLSACRRFGHDDITPQGVKEMIGSRASLLKGKGATIEDVAHAALFLASDESGFITAHNLLIDGGHTSADSRMSYMYQDPK

SEQ ID NO: 10055 - DNA, 1540 bp, Glycine max
  misc_feature (1)..(1540): Ceres Seq. ID no. 15170209
aaaaaacttaaattgaaaacagagtccttccttgtctgttatcactgtgtaagcagtgatcgattctgcgaactgcgattcgcatcgccaattcaaaagcgttcgttcgtcggagatggagacgctaccgacgacgacgacaaagcgaggaggagcgagatcgaagcccgttcagacctcgaaatcgtctctcgttatggccttcttctcctgcgtcgcgtggctctacgtcgccggaaggttatggcaagacgcagagaatcgcaatttactcgctagtcttctgaaaaagaattcagctcagaggcctaaggttcttacagtggaagataagttaatggtgcttgggtgcagggatctggagaggaggattgtggaagctgagatggaattgacattggctaagagccaagggtacctaaaggggcaaggccagagaagcggctcttctgatcgtaggcttcttgctgttatcggagtgtatactggatttgggagtaaattgaagagaaatgttttcagggggtcttggatgcccagaggtgatgccttgaaaaaacttgaagaaagaggagtggtcatacgttttgttattggtcggagtgctaatcgaggtgatagcttagatcgcaatattgacgaggaaaatcgcacaacaaaggatttcctgattcttgaaggtcatgaggaagctcaagaagagttgcctaaaaaagttaaaaccttcttcagtactgcagttcagaactgggatgctgacttttatgtaaaagttgatgatggcattgatattgatctcgagggtttaattgaacttcttgaccgtcgtcgtggtcaggatagggcatatgttggatgcatgaagtcaggagaagtgatatcagaagagggaaagccatggtatgaacctgattggtggaaatttggggatgaaaaatcgtatttccgacatgcggctggttcacttgttataatttcaaagaatttggcacaatacattaatataaacagtgtatctttgaagacatatgcctatgatgatacatcattgggatcatggatgatgggcgtccaagcaacttacatagatgacagtcggctttgctgcagtagtatcagacaagacaaggtatgctccttggcttgattggaggatcacaagcacattcttccctactcttatgggaactcacacaatttgtctgaaaatcagtatcagttgaacattatgttcactcttttcagttgcatactgccttgagagctttgtagacaatatcaatataattcctttctagatccagttatctgttcattcttttagatgctagcagcgaaattgagggataactactgattacggagttcagcccttggtgctcaattgctatttccgggggtgatatgattgtacttttactctgctattggatatacacaacttctgttgatgaccaaatattgaagagaaaaaaaaactatatacaaaatattgatgtattgaaccgctgacgaactaattgtagactttgttgcactg

SEQ ID NO: 10056 - protein, 343 aa, Glycine max
  peptide (1)..(343): Ceres Seq. ID no. 15170210
  misc_feature (130)..(327): Pfam Name: Pfam Description:  Galactosyltransferase
  misc_feature (1)..(343): NCBI GI NO: 15236681 NR Description: galactosyltransferase family
  misc_feature (1)..(336): NCBI GI NO: 15224704 NR Description: galactosyltransferase family
  misc_feature (1)..(343): NCBI GI NO: 34898462 NR Description: ESTs D47620
  misc_feature (60)..(343): NCBI GI NO: 26451702 NR Description: unknown protein [Arabidopsis thaliana]
  misc_feature (11)..(341): NCBI GI NO: 40253477 NR Description: putative Avr9 elicitor response protein
  misc_feature (24)..(342): NCBI GI NO: 22553068 NR Description: beta 1,3-glycosyltransferase-like protein I
  misc_feature (24)..(343): NCBI GI NO: 20372915 NR Description: beta 1,3-glycosyltransferase-like protein I
  misc_feature (11)..(341): NCBI GI NO: 18423501 NR Description: galactosyltransferase family
  misc_feature (11)..(333): NCBI GI NO: 9759181 NR Description: Avr9 elicitor response protein-like
  misc_feature (164)..(342): NCBI GI NO: 7485372 NR Description: hypothetical protein F10N7
METLPTTTTKRGGARSKPVQTSKSSLVMAFFSCVAWLYVAGRLWQDAENRNLLASLLKKNSAQRPKVLTVEDKLMVLGCRDLERRIVEAEMELTLAKSQGYLKGQGQRSGSSDRRLLAVIGVYTGFGSKLKRNVFRGSWMPRGDALKKLEERGVVIRFVIGRSANRGDSLDRNIDEENRTTKDFLILEGHEEAQEELPKKVKTFFSTAVQNWDADFYVKVDDGIDIDLEGLIELLDRRRGQDRAYVGCMKSGEVISEEGKPWYEPDWWKFGDEKSYFRHAAGSLVIISKNLAQYININSVSLKTYAYDDTSLGSWMMGVQATYIDDSRLCCSSIRQDKVCSLA

SEQ ID NO: 10057 - protein, 316 aa, Glycine max
  peptide (1)..(316): Ceres Seq. ID no. 15170211
  misc_feature (103)..(300): Pfam Name: Pfam Description:  Galactosyltransferase
  misc_feature (1)..(316): NCBI GI NO: 15236681 NR Description: galactosyltransferase family
  misc_feature (1)..(309): NCBI GI NO: 15224704 NR Description: galactosyltransferase family
  misc_feature (1)..(316): NCBI GI NO: 34898462 NR Description: ESTs D47620
  misc_feature (33)..(316): NCBI GI NO: 26451702 NR Description: unknown protein [Arabidopsis thaliana]
  misc_feature (1)..(314): NCBI GI NO: 40253477 NR Description: putative Avr9 elicitor response protein
  misc_feature (1)..(315): NCBI GI NO: 22553068 NR Description: beta 1,3-glycosyltransferase-like protein I
  misc_feature (1)..(316): NCBI GI NO: 20372915 NR Description: beta 1,3-glycosyltransferase-like protein I
  misc_feature (1)..(314): NCBI GI NO: 18423501 NR Description: galactosyltransferase family
  misc_feature (1)..(306): NCBI GI NO: 9759181 NR Description: Avr9 elicitor response protein-like
  misc_feature (137)..(315): NCBI GI NO: 7485372 NR Description: hypothetical protein F10N7
MAFFSCVAWLYVAGRLWQDAENRNLLASLLKKNSAQRPKVLTVEDKLMVLGCRDLERRIVEAEMELTLAKSQGYLKGQGQRSGSSDRRLLAVIGVYTGFGSKLKRNVFRGSWMPRGDALKKLEERGVVIRFVIGRSANRGDSLDRNIDEENRTTKDFLILEGHEEAQEELPKKVKTFFSTAVQNWDADFYVKVDDGIDIDLEGLIELLDRRRGQDRAYVGCMKSGEVISEEGKPWYEPDWWKFGDEKSYFRHAAGSLVIISKNLAQYININSVSLKTYAYDDTSLGSWMMGVQATYIDDSRLCCSSIRQDKVCSLA

SEQ ID NO: 10058 - protein, 269 aa, Glycine max
  peptide (1)..(269): Ceres Seq. ID no. 15170212
  misc_feature (56)..(253): Pfam Name: Pfam Description:  Galactosyltransferase
  misc_feature (1)..(269): NCBI GI NO: 15236681 NR Description: galactosyltransferase family
  misc_feature (1)..(262): NCBI GI NO: 15224704 NR Description: galactosyltransferase family
  misc_feature (1)..(269): NCBI GI NO: 34898462 NR Description: ESTs D47620
  misc_feature (1)..(269): NCBI GI NO: 26451702 NR Description: unknown protein [Arabidopsis thaliana]
  misc_feature (1)..(267): NCBI GI NO: 40253477 NR Description: putative Avr9 elicitor response protein
  misc_feature (1)..(268): NCBI GI NO: 22553068 NR Description: beta 1,3-glycosyltransferase-like protein I
  misc_feature (1)..(269): NCBI GI NO: 20372915 NR Description: beta 1,3-glycosyltransferase-like protein I
  misc_feature (1)..(267): NCBI GI NO: 18423501 NR Description: galactosyltransferase family
  misc_feature (1)..(259): NCBI GI NO: 9759181 NR Description: Avr9 elicitor response protein-like
  misc_feature (90)..(268): NCBI GI NO: 7485372 NR Description: hypothetical protein F10N7
MVLGCRDLERRIVEAEMELTLAKSQGYLKGQGQRSGSSDRRLLAVIGVYTGFGSKLKRNVFRGSWMPRGDALKKLEERGVVIRFVIGRSANRGDSLDRNIDEENRTTKDFLILEGHEEAQEELPKKVKTFFSTAVQNWDADFYVKVDDGIDIDLEGLIELLDRRRGQDRAYVGCMKSGEVISEEGKPWYEPDWWKFGDEKSYFRHAAGSLVIISKNLAQYININSVSLKTYAYDDTSLGSWMMGVQATYIDDSRLCCSSIRQDKVCSLA

SEQ ID NO: 10059 - DNA, 1215 bp, Glycine max
  misc_feature (1)..(1215): Ceres Seq. ID no. 14308077
ggaatagagccacacatagggcgaagaggtgtcagcgggaagaggtgccacgtgtaggattttgccctcgctcattgcacttcccagtgagtgacttgactctctttctcacacctccttttttccccgatgctaactctacaagcttcgtctcgtaaagaaaattcgaaagctcaatagagagaactcaattgaatcatcaaatgaggacagtgatttcgcgcttgatccattccacgccttccatttccaggctcaatgccacggtagtgtcaatcagcgggagaaatctctgcacagattctaacaaagttgatgggccattcaaagttgaagaagcagagactgtaaatgtgcctccactcccaacagaaaagttgcttgtgttgggagggaatgggtttgttggatcacacatttgtagagaagccttagaccgtgatttgtctgttgcgagtcttagcaggtctggtaggtcatccctgcatgattcctgggctaccaatgttgcttggtataaagggaatctcctttcaactgattcattgaaagaagctctgaatggggtcactgctgttatctcatgtgttggtggttttggctccaactcttacatgtacaaaattaatgggactgctaacatcaatgcaattagagcagcttcagatcaaggtgttaaaagatttgtctatatctctgcagctgactttggtgtagtaaattacttactgcgggggtattatgaaggaaagagagcttctgaaacagagctcctgaccagattcccatatggaggagtaattctgaggccaggatttatttatggtactcgaagtgttgggagtatgaagataccccttggtgtaattggatctccattggaaatggttctccaagttgctaaaccattgaaccagatcccacttgttgggcctctattgacacctcctgtcaatgttactgcggtggcaaaagttgctgttagagctgctactgatcctgtttttcccccggggatcattgatgcttatggaatacaacgttacagtcagcataaatcaaactagaaaattatctatattttgttttctgggtaaatctaatatggggcgatttgcctctgaatatctgtgttttagtattgttaaactgagaatatttcttcattccatatccttgagagaataaaatctgaaagtgcgagcatgtagccat

SEQ ID NO: 10060 - protein, 287 aa, Glycine max
  peptide (1)..(287): Ceres Seq. ID no. 14308078
  misc_feature (59)..(226): Pfam Name: Pfam Description:  Isoflavone reductase
  misc_feature (1)..(286): NCBI GI NO: 18416362 NR Description: expressed protein [Arabidopsis thaliana]
  misc_feature (1)..(286): NCBI GI NO: 10129651 NR Description: putative protein [Arabidopsis thaliana]
  misc_feature (58)..(281): NCBI GI NO: 18417824 NR Description: dehydrogenase-related [Arabidopsis thaliana]
  misc_feature (58)..(281): NCBI GI NO: 21592373 NR Description: unknown [Arabidopsis thaliana]
  misc_feature (51)..(268): NCBI GI NO: 38346147 NR Description: OSJNBb0118P14.7
  misc_feature (51)..(268): NCBI GI NO: 18398333 NR Description: expressed protein [Arabidopsis thaliana]
  misc_feature (138)..(281): NCBI GI NO: 11346175 NR Description: hypothetical protein F1N13_50 - Arabidopsisthaliana
  misc_feature (59)..(285): NCBI GI NO: 37523204 NR Description: probable oxidoreductase [Gloeobacter violaceus]
  misc_feature (123)..(276): NCBI GI NO: 8744993 NR Description: hypothetical protein P1295.07 [Leishmania major]
  misc_feature (58)..(130): NCBI GI NO: 6323321 NR Description: Hypothetical ORF; Ylr290cp
MRTVISRLIHSTPSISRLNATVVSISGRNLCTDSNKVDGPFKVEEAETVNVPPLPTEKLLVLGGNGFVGSHICREALDRDLSVASLSRSGRSSLHDSWATNVAWYKGNLLSTDSLKEALNGVTAVISCVGGFGSNSYMYKINGTANINAIRAASDQGVKRFVYISAADFGVVNYLLRGYYEGKRASETELLTRFPYGGVILRPGFIYGTRSVGSMKIPLGVIGSPLEMVLQVAKPLNQIPLVGPLLTPPVNVTAVAKVAVRAATDPVFPPGIIDAYGIQRYSQHKSN

SEQ ID NO: 10061 - protein, 150 aa, Glycine max
  peptide (1)..(150): Ceres Seq. ID no. 14308079
  misc_feature (1)..(89): Pfam Name: Pfam Description:  Isoflavone reductase
  misc_feature (1)..(149): NCBI GI NO: 18416362 NR Description: expressed protein [Arabidopsis thaliana]
  misc_feature (1)..(149): NCBI GI NO: 10129651 NR Description: putative protein [Arabidopsis thaliana]
  misc_feature (1)..(144): NCBI GI NO: 18417824 NR Description: dehydrogenase-related [Arabidopsis thaliana]
  misc_feature (1)..(144): NCBI GI NO: 21592373 NR Description: unknown [Arabidopsis thaliana]
  misc_feature (1)..(131): NCBI GI NO: 38346147 NR Description: OSJNBb0118P14.7
  misc_feature (1)..(131): NCBI GI NO: 18398333 NR Description: expressed protein [Arabidopsis thaliana]
  misc_feature (1)..(144): NCBI GI NO: 11346175 NR Description: hypothetical protein F1N13_50 - Arabidopsisthaliana
  misc_feature (1)..(148): NCBI GI NO: 37523204 NR Description: probable oxidoreductase [Gloeobacter violaceus]
  misc_feature (1)..(139): NCBI GI NO: 8744993 NR Description: hypothetical protein P1295.07 [Leishmania major]
MYKINGTANINAIRAASDQGVKRFVYISAADFGVVNYLLRGYYEGKRASETELLTRFPYGGVILRPGFIYGTRSVGSMKIPLGVIGSPLEMVLQVAKPLNQIPLVGPLLTPPVNVTAVAKVAVRAATDPVFPPGIIDAYGIQRYSQHKSN

SEQ ID NO: 10062 - DNA, 2002 bp, Glycine max
  misc_feature (1)..(2002): Ceres Seq. ID no. 15169092
agatctgaagaagccacataaccctaagcttcaaacgggtaagtgtcgctgggacttcaatggcagtgaccgaagctcaaaatcctcttcttggagaaaacacatgtggttccttgttaaaaaagcttcaggaaatatgggatgaggttggtgagagcgatgagcaacgagacaagatgcttcttcagttagaacaggagtgcttggatgtgtacaagagaaaggttgagcaggctgcaaagtcaagggcgcagctacttcaagctctgtctgatgctaagcttgagctttccactcttctatcagcacttggagaaaagagctttgctggaattcctgagaatacttctggaactatcaaagaacagcttgcagctatagcaccagtacttgaacagttatggcaacaaaaagaagaaagaattaaggagttctcagatgtacagtcacagatccaacaaatatgtggagagatagccgggaacttgaaccttaatgatgtttcacctgcagttgatgagtctgatttgtccctgaagaagttggatgaatatcaatccgagctccaagaacttcaaaaggaaaagagcgagaggttgcacaaggttcttgaatttgtgagtacggtgcatgatctatgtgctgtccttggtatagacttcttcactactgtaactgaggttcatccaagtctaaatgactctactggtgttcaatccaagagcattagtaatgacacccttgcaaggctggctaagacagtcttgacgctgaaagaagataaaaaacagaggctgcacaagctccaagaattagcttctcagttaattgatctttggaatctaatggatactcatcccgaggaaaggagactatttgaccatgttacctgtaatatgtcagcttctgttgatgaagtcactgttcctggtgcccttgctctggatctgattgagcaggctgaagtggaagttgagagacttgatcagctgaaagccagcaggatgaaggaaattgctttcaagaagcaagcagagctcgaagagatatttgtctgtgctcatatagaagtagatccagatgctgcccgggagaagattatggccttgattgattcaggaaacattgaaccaactgaattactggctgacatggacaatcagatagcaacagcaaaagaagaagctttaagccgaaaagatatattggacaaggttgagaaatggatgtcagcatgtgaagaagaaagttggcttgaagattataatcgggatgataacaggtataatgcaagcagaggtgcacacttaaacctcaaacgtgcagagaaagctcggatattggtcaacaaaattccagctttggtcgatacattggttgctaaaactcgtgcatgggaagaagatcatggcatgtcatttacatatgatggtgttcctcttcttgccatgttagatgaatatgccatgctcagacatgaacgggaagaggaaaaacggaggatgagggatcagaaaaagcatcacgagcagcgaaacacggaacaagaaaccatctttggttcaagacccagccctgctaggccagttagttccagtaagtcaggaggtcctcgtgctaacggaggagccaatggtactcctaaccgacggctatcgcttaatgctcataaaaatggaaacaggtccacatcaaaagatggaaaaagggataacagactatctgctccggtgaattatgtggccatatcaaaagaagatgctgcttcccatgtttctggtactgaacccatcccggcatcaccctaatgacgagatcttcattttcaaccctataatttcatctttgtagcattgtcaaattactagttactgctttaggaattataatatgggagtgacaagtaattagagaggaactgttctgagctgtgtatgttcaatttgccattttggaggttttctcaatacatatgccctttaatatgaaaatatacacagtt

SEQ ID NO: 10063 - protein, 582 aa, Glycine max
  peptide (1)..(582): Ceres Seq. ID no. 15169093
  misc_feature (36)..(580): Pfam Name: MAP65/ASE1 family Pfam Description: Microtubule associated protein
  misc_feature (1)..(582): NCBI GI NO: 11558252 NR Description: microtubule-associated protein MAP65-1a
  misc_feature (1)..(582): NCBI GI NO: 15240485 NR Description: microtubule associated protein (MAP65/ASE1) family
  misc_feature (1)..(582): NCBI GI NO: 28200790 NR Description: 65kD microtubule associated protein
  misc_feature (1)..(582): NCBI GI NO: 11558254 NR Description: microtubule-associated protein MAP65-1b
  misc_feature (1)..(582): NCBI GI NO: 11558256 NR Description: microtubule-associated protein MAP65-1c
  misc_feature (1)..(582): NCBI GI NO: 18416818 NR Description: microtubule associated protein (MAP65/ASE1) family
  misc_feature (1)..(432): NCBI GI NO: 7485328 NR Description: hypothetical protein F10M23
  misc_feature (15)..(577): NCBI GI NO: 21539547 NR Description: unknown protein [Arabidopsis thaliana]
  misc_feature (15)..(582): NCBI GI NO: 25410943 NR Description: hypothetical protein At2g01910
  misc_feature (248)..(577): NCBI GI NO: 8778239 NR Description: F10B6.9 [Arabidopsis thaliana]
MAVTEAQNPLLGENTCGSLLKKLQEIWDEVGESDEQRDKMLLQLEQECLDVYKRKVEQAAKSRAQLLQALSDAKLELSTLLSALGEKSFAGIPENTSGTIKEQLAAIAPVLEQLWQQKEERIKEFSDVQSQIQQICGEIAGNLNLNDVSPAVDESDLSLKKLDEYQSELQELQKEKSERLHKVLEFVSTVHDLCAVLGIDFFTTVTEVHPSLNDSTGVQSKSISNDTLARLAKTVLTLKEDKKQRLHKLQELASQLIDLWNLMDTHPEERRLFDHVTCNMSASVDEVTVPGALALDLIEQAEVEVERLDQLKASRMKEIAFKKQAELEEIFVCAHIEVDPDAAREKIMALIDSGNIEPTELLADMDNQIATAKEEALSRKDILDKVEKWMSACEEESWLEDYNRDDNRYNASRGAHLNLKRAEKARILVNKIPALVDTLVAKTRAWEEDHGMSFTYDGVPLLAMLDEYAMLRHEREEEKRRMRDQKKHHEQRNTEQETIFGSRPSPARPVSSSKSGGPRANGGANGTPNRRLSLNAHKNGNRSTSKDGKRDNRLSAPVNYVAISKEDAASHVSGTEPIPASP

SEQ ID NO: 10064 - protein, 543 aa, Glycine max
  peptide (1)..(543): Ceres Seq. ID no. 15169094
  misc_feature (1)..(541): Pfam Name: MAP65/ASE1 family Pfam Description: Microtubule associated protein
  misc_feature (1)..(543): NCBI GI NO: 11558252 NR Description: microtubule-associated protein MAP65-1a
  misc_feature (1)..(543): NCBI GI NO: 15240485 NR Description: microtubule associated protein (MAP65/ASE1) family
  misc_feature (1)..(543): NCBI GI NO: 28200790 NR Description: 65kD microtubule associated protein
  misc_feature (1)..(543): NCBI GI NO: 11558254 NR Description: microtubule-associated protein MAP65-1b
  misc_feature (1)..(543): NCBI GI NO: 11558256 NR Description: microtubule-associated protein MAP65-1c
  misc_feature (1)..(543): NCBI GI NO: 18416818 NR Description: microtubule associated protein (MAP65/ASE1) family
  misc_feature (1)..(393): NCBI GI NO: 7485328 NR Description: hypothetical protein F10M23
  misc_feature (1)..(538): NCBI GI NO: 21539547 NR Description: unknown protein [Arabidopsis thaliana]
  misc_feature (1)..(543): NCBI GI NO: 25410943 NR Description: hypothetical protein At2g01910
  misc_feature (209)..(538): NCBI GI NO: 8778239 NR Description: F10B6.9 [Arabidopsis thaliana]
MLLQLEQECLDVYKRKVEQAAKSRAQLLQALSDAKLELSTLLSALGEKSFAGIPENTSGTIKEQLAAIAPVLEQLWQQKEERIKEFSDVQSQIQQICGEIAGNLNLNDVSPAVDESDLSLKKLDEYQSELQELQKEKSERLHKVLEFVSTVHDLCAVLGIDFFTTVTEVHPSLNDSTGVQSKSISNDTLARLAKTVLTLKEDKKQRLHKLQELASQLIDLWNLMDTHPEERRLFDHVTCNMSASVDEVTVPGALALDLIEQAEVEVERLDQLKASRMKEIAFKKQAELEEIFVCAHIEVDPDAAREKIMALIDSGNIEPTELLADMDNQIATAKEEALSRKDILDKVEKWMSACEEESWLEDYNRDDNRYNASRGAHLNLKRAEKARILVNKIPALVDTLVAKTRAWEEDHGMSFTYDGVPLLAMLDEYAMLRHEREEEKRRMRDQKKHHEQRNTEQETIFGSRPSPARPVSSSKSGGPRANGGANGTPNRRLSLNAHKNGNRSTSKDGKRDNRLSAPVNYVAISKEDAASHVSGTEPIPASP

SEQ ID NO: 10065 - protein, 320 aa, Glycine max
  peptide (1)..(320): Ceres Seq. ID no. 15169095
  misc_feature (1)..(318): Pfam Name: MAP65/ASE1 family Pfam Description: Microtubule associated protein
  misc_feature (1)..(320): NCBI GI NO: 11558252 NR Description: microtubule-associated protein MAP65-1a
  misc_feature (1)..(320): NCBI GI NO: 15240485 NR Description: microtubule associated protein (MAP65/ASE1) family
  misc_feature (1)..(320): NCBI GI NO: 28200790 NR Description: 65kD microtubule associated protein
  misc_feature (1)..(320): NCBI GI NO: 11558254 NR Description: microtubule-associated protein MAP65-1b
  misc_feature (1)..(320): NCBI GI NO: 11558256 NR Description: microtubule-associated protein MAP65-1c
  misc_feature (1)..(320): NCBI GI NO: 18416818 NR Description: microtubule associated protein (MAP65/ASE1) family
  misc_feature (1)..(170): NCBI GI NO: 7485328 NR Description: hypothetical protein F10M23
  misc_feature (1)..(315): NCBI GI NO: 21539547 NR Description: unknown protein [Arabidopsis thaliana]
  misc_feature (1)..(320): NCBI GI NO: 25410943 NR Description: hypothetical protein At2g01910
  misc_feature (1)..(315): NCBI GI NO: 8778239 NR Description: F10B6.9 [Arabidopsis thaliana]
MDTHPEERRLFDHVTCNMSASVDEVTVPGALALDLIEQAEVEVERLDQLKASRMKEIAFKKQAELEEIFVCAHIEVDPDAAREKIMALIDSGNIEPTELLADMDNQIATAKEEALSRKDILDKVEKWMSACEEESWLEDYNRDDNRYNASRGAHLNLKRAEKARILVNKIPALVDTLVAKTRAWEEDHGMSFTYDGVPLLAMLDEYAMLRHEREEEKRRMRDQKKHHEQRNTEQETIFGSRPSPARPVSSSKSGGPRANGGANGTPNRRLSLNAHKNGNRSTSKDGKRDNRLSAPVNYVAISKEDAASHVSGTEPIPASP

SEQ ID NO: 10066 - DNA, 1433 bp, Glycine max
  misc_feature (1)..(1433): Ceres Seq. ID no. 14308217
gaggcacgggttttgtttgaggttttctgttcgtttcatttcatttggtcgcacagtgctgtcggccactgtctctctttctctttcgcgcttcaactttcgtttatgcaccgattgggatggatcagtgggatgctcatcatcgactcatgttcattggtcggcatgaggaagatggaactgctgatacttctaagggagaggaatcaaatgatgaagaaaaaataagtaaaactgaacccgtctttgtgcctgaaactaagaaaaggaaacgccttagccttagtcagcttaaagaggtgaaagaggagtctcatgggaagcaaagcagtagcaagtctaagagaaagaagcatgatagtagggatagatggtcagctgagaggtatcaattggccgagcaaaacatgtgggaggtactaaaggctgaaggggcgacatttgaaaacccaataacccgacctgcactaagattagctgcccgcaaacacattggagatactggacttttagaccacttactgaagcacattgatggtaaagtggcacctggagggactgagcgtttccgaagatggttcaacaccaatggaatcatggagtattggttggagagtgctgacttggacaaggtgcgccaggaggcaggggtgcaggacccttactggataccgccatctacatatagggaagctggtgccccctcccagaatattgattcttctggtgaattgaaacagcttaaaatagaattgatgcaaatgaagaaagatatgcatgagctcattgccaagaaggaagagaaaagtgatattaacatggtggaggtgaatgttgaataatttgttaattcaatggtttgctgtcttctcttgcagcactttatgatgttttgttttgagttgctatggcaggagacacacaaggaatctgtaaagtggaaatttatgactgaccatcgccttactgaaatcatgacttctttgaaggatattcaggggaagtatggtgaattgatgatttggaaaactacagttgagcaacaacttatggaaataactgataaattgaatgatcttcaagcatctagggagtgcaccactaatagtcctccttcagaaaggtggcaagattggatagaaagtaccaacctagacaatattcaggaagatgcatttgcaacttggattgggaatccggagctacttaatgttccacaagaggttatacttgaagatcccaacacaaccataccaacacagccacccagtgaagaactgactaacaagaggagcgatgtgctggagttagtacctggtaaactagaagatcaacctaatgtaacccctgattcttctacaactgttaattcgaagtcagaccatgacaacaactcattgatcatgtttcaggagatgtttatggatttatac

SEQ ID NO: 10067 - protein, 240 aa, Glycine max
  peptide (1)..(240): Ceres Seq. ID no. 14308218
  misc_feature (23)..(238): NCBI GI NO: 9759279 NR Description: gb|AAD12714
  misc_feature (23)..(238): NCBI GI NO: 16033414 NR Description: SWITCH1 splice variant S [Arabidopsis thaliana]
  misc_feature (23)..(238): NCBI GI NO: 30696040 NR Description: DYAD [Arabidopsis thaliana]
  misc_feature (13)..(240): NCBI GI NO: 15237794 NR Description: expressed protein [Arabidopsis thaliana]
MDQWDAHHRLMFIGRHEEDGTADTSKGEESNDEEKISKTEPVFVPETKKRKRLSLSQLKEVKEESHGKQSSSKSKRKKHDSRDRWSAERYQLAEQNMWEVLKAEGATFENPITRPALRLAARKHIGDTGLLDHLLKHIDGKVAPGGTERFRRWFNTNGIMEYWLESADLDKVRQEAGVQDPYWIPPSTYREAGAPSQNIDSSGELKQLKIELMQMKKDMHELIAKKEEKSDINMVEVNVE

SEQ ID NO: 10068 - protein, 230 aa, Glycine max
  peptide (1)..(230): Ceres Seq. ID no. 14308219
  misc_feature (13)..(228): NCBI GI NO: 9759279 NR Description: gb|AAD12714
  misc_feature (13)..(228): NCBI GI NO: 30696040 NR Description: DYAD [Arabidopsis thaliana]
  misc_feature (13)..(228): NCBI GI NO: 16033414 NR Description: SWITCH1 splice variant S [Arabidopsis thaliana]
  misc_feature (3)..(230): NCBI GI NO: 15237794 NR Description: expressed protein [Arabidopsis thaliana]
MFIGRHEEDGTADTSKGEESNDEEKISKTEPVFVPETKKRKRLSLSQLKEVKEESHGKQSSSKSKRKKHDSRDRWSAERYQLAEQNMWEVLKAEGATFENPITRPALRLAARKHIGDTGLLDHLLKHIDGKVAPGGTERFRRWFNTNGIMEYWLESADLDKVRQEAGVQDPYWIPPSTYREAGAPSQNIDSSGELKQLKIELMQMKKDMHELIAKKEEKSDINMVEVNVE

SEQ ID NO: 10069 - protein, 193 aa, Glycine max
  peptide (1)..(193): Ceres Seq. ID no. 14308220
  misc_feature (1)..(192): NCBI GI NO: 15237794 NR Description: expressed protein [Arabidopsis thaliana]
MVCCLLLQHFMMFCFELLWQETHKESVKWKFMTDHRLTEIMTSLKDIQGKYGELMIWKTTVEQQLMEITDKLNDLQASRECTTNSPPSERWQDWIESTNLDNIQEDAFATWIGNPELLNVPQEVILEDPNTTIPTQPPSEELTNKRSDVLELVPGKLEDQPNVTPDSSTTVNSKSDHDNNSLIMFQEMFMDLY

SEQ ID NO: 10070 - DNA, 1319 bp, Glycine max
  misc_feature (1)..(1319): Ceres Seq. ID no. 14308310
ggttctctctctctctctcttatttgcttcttcgagtttcacagccaagtcgtaaaagggtttcaagggatggaaaacatgcagagcttctggcaattgggtgatgaactccgtgggcactcaaaagcatcggaggatcacaagtggttaatggttgcctcgaaactggccgaacagacaagattgaagggggagcgtgtgaacaaccttgatctttcaaagggacccattgaaacaaggtcaagggataaatttgggttccaggaagagaacaaatttgattctcttaacttgagcatgttgaacctggactctaaatttactgagaatgtgagcaaaagctcacttcgaaatggtgtttatggtatgaatgcagtgtatcagaaaaacaatgcaaacttggtgagtaatgtgatcagtaacaagtacaatggcagtattcagcataacaaagagatcaacaacaacactggcaacaacatcaacaccaatgaaagcaacaacacaaatgcaactgacaaaaggtttaagaccttgcctgctgcggagacactcccccgcaatgaggtgcttggaggatacatctttgtctgtaacaatgacacaatgcaggaagacttgaaacgtcagctatttggtttgcctccaaggtatcgagattctgttagggcaataacaccagggctacctttatttctttataactatactactcatcagctgcatggtatttttgaggcagcaagttttggtggctctaacatagatccaactgcctgggaggataaaaaatgcaaaggggaatcaaggtttccagctcaggtaagaatccgtgtcaggaagctctgcaaggcattggaagaagattctttcaggccagtattgcatcattatgacgggccaaagtttcgtcttgaactgtcagttccagagactctggatctgttggacctatgtgaacaagctggttcagcagcataagcaagaatcaaacaaagaatgaatgtgcaaaataggtaggttttggtgtgccagctgtgtggttttggcagattttccgtgaagcgtaagcttggaaagtgaatcatcatcatgttttgggggaagtaaagggagcgtgttgttgagagtgagagaccctttgttggtgaataaatggttgttgtggtatctatcccctggaagatgctttgtagctgttacatgacatttaatacctttgtatgattaagtaaagtacagactactgtttgtactgctaaagtatgtatctgttgaaccaagaaaaaaattaaagttaaaaagcttcatgtattacc

SEQ ID NO: 10071 - protein, 326 aa, Glycine max
  peptide (1)..(326): Ceres Seq. ID no. 14308311
  misc_feature (24)..(326): NCBI GI NO: 2369766 NR Description: hypothetical protein [Citrus x paradisi]
  misc_feature (27)..(325): NCBI GI NO: 21592623 NR Description: gda-1, putative [Arabidopsis thaliana]
  misc_feature (27)..(325): NCBI GI NO: 15232081 NR Description: gda-1 -related [Arabidopsis thaliana]
  misc_feature (111)..(326): NCBI GI NO: 21665866 NR Description: GDA2 protein [Pisum sativum]
  misc_feature (131)..(321): NCBI GI NO: 584825 NR Description: B2 PROTEIN
  misc_feature (68)..(318): NCBI GI NO: 18422167 NR Description: expressed protein [Arabidopsis thaliana]
  misc_feature (121)..(318): NCBI GI NO: 9757950 NR Description: gene_id:MJC20
  misc_feature (46)..(312): NCBI GI NO: 34913876 NR Description: B1156H12.22
  misc_feature (203)..(314): NCBI GI NO: 7488804 NR Description: gda-1 protein - garden pea
  misc_feature (174)..(318): NCBI GI NO: 34896110 NR Description: P0701D05.9
GSLSLSLICFFEFHSQVVKGFQGMENMQSFWQLGDELRGHSKASEDHKWLMVASKLAEQTRLKGERVNNLDLSKGPIETRSRDKFGFQEENKFDSLNLSMLNLDSKFTENVSKSSLRNGVYGMNAVYQKNNANLVSNVISNKYNGSIQHNKEINNNTGNNINTNESNNTNATDKRFKTLPAAETLPRNEVLGGYIFVCNNDTMQEDLKRQLFGLPPRYRDSVRAITPGLPLFLYNYTTHQLHGIFEAASFGGSNIDPTAWEDKKCKGESRFPAQVRIRVRKLCKALEEDSFRPVLHHYDGPKFRLELSVPETLDLLDLCEQAGSAA

SEQ ID NO: 10072 - protein, 303 aa, Glycine max
  peptide (1)..(303): Ceres Seq. ID no. 14308312
  misc_feature (1)..(303): NCBI GI NO: 2369766 NR Description: hypothetical protein [Citrus x paradisi]
  misc_feature (4)..(302): NCBI GI NO: 21592623 NR Description: gda-1, putative [Arabidopsis thaliana]
  misc_feature (4)..(302): NCBI GI NO: 15232081 NR Description: gda-1 -related [Arabidopsis thaliana]
  misc_feature (88)..(303): NCBI GI NO: 21665866 NR Description: GDA2 protein [Pisum sativum]
  misc_feature (108)..(298): NCBI GI NO: 584825 NR Description: B2 PROTEIN
  misc_feature (45)..(295): NCBI GI NO: 18422167 NR Description: expressed protein [Arabidopsis thaliana]
  misc_feature (98)..(295): NCBI GI NO: 9757950 NR Description: gene_id:MJC20
  misc_feature (23)..(289): NCBI GI NO: 34913876 NR Description: B1156H12.22
  misc_feature (180)..(291): NCBI GI NO: 7488804 NR Description: gda-1 protein - garden pea
  misc_feature (151)..(295): NCBI GI NO: 34896110 NR Description: P0701D05.9
MENMQSFWQLGDELRGHSKASEDHKWLMVASKLAEQTRLKGERVNNLDLSKGPIETRSRDKFGFQEENKFDSLNLSMLNLDSKFTENVSKSSLRNGVYGMNAVYQKNNANLVSNVISNKYNGSIQHNKEINNNTGNNINTNESNNTNATDKRFKTLPAAETLPRNEVLGGYIFVCNNDTMQEDLKRQLFGLPPRYRDSVRAITPGLPLFLYNYTTHQLHGIFEAASFGGSNIDPTAWEDKKCKGESRFPAQVRIRVRKLCKALEEDSFRPVLHHYDGPKFRLELSVPETLDLLDLCEQAGSAA

SEQ ID NO: 10073 - protein, 300 aa, Glycine max
  peptide (1)..(300): Ceres Seq. ID no. 14308313
  misc_feature (1)..(300): NCBI GI NO: 2369766 NR Description: hypothetical protein [Citrus x paradisi]
  misc_feature (1)..(299): NCBI GI NO: 21592623 NR Description: gda-1, putative [Arabidopsis thaliana]
  misc_feature (1)..(299): NCBI GI NO: 15232081 NR Description: gda-1 -related [Arabidopsis thaliana]
  misc_feature (85)..(300): NCBI GI NO: 21665866 NR Description: GDA2 protein [Pisum sativum]
  misc_feature (105)..(295): NCBI GI NO: 584825 NR Description: B2 PROTEIN
  misc_feature (42)..(292): NCBI GI NO: 18422167 NR Description: expressed protein [Arabidopsis thaliana]
  misc_feature (95)..(292): NCBI GI NO: 9757950 NR Description: gene_id:MJC20
  misc_feature (20)..(286): NCBI GI NO: 34913876 NR Description: B1156H12.22
  misc_feature (177)..(288): NCBI GI NO: 7488804 NR Description: gda-1 protein - garden pea
  misc_feature (148)..(292): NCBI GI NO: 34896110 NR Description: P0701D05.9
MQSFWQLGDELRGHSKASEDHKWLMVASKLAEQTRLKGERVNNLDLSKGPIETRSRDKFGFQEENKFDSLNLSMLNLDSKFTENVSKSSLRNGVYGMNAVYQKNNANLVSNVISNKYNGSIQHNKEINNNTGNNINTNESNNTNATDKRFKTLPAAETLPRNEVLGGYIFVCNNDTMQEDLKRQLFGLPPRYRDSVRAITPGLPLFLYNYTTHQLHGIFEAASFGGSNIDPTAWEDKKCKGESRFPAQVRIRVRKLCKALEEDSFRPVLHHYDGPKFRLELSVPETLDLLDLCEQAGSAA

SEQ ID NO: 10074 - DNA, 1500 bp, Glycine max
  misc_feature (1)..(1500): Ceres Seq. ID no. 14308636
tttgcaatggaatatggcgagttctggctgctagctcagcatcaaccaacagaccctattgccaaatctgtggctgttctgaacggagttccagtgctcacaagacctgcagcagtgcaaaagcatcgccaagccatcactgagctcaacaatctggtcaaaacaacgttgctagtcattgagttaatctttgagttggagaagcttacaacttttgacacaaaggatgtgcctgctttgttgcccgcaatagaacaaattcctgttgatgtctactgggctatcatcaccattgtggctattgttactcagattgattacctcactactgagtcagggaacaagcaagacctgtcccactatggtcaaaagatcaacatcatacttagcaaactgaggaagcaaatcatgctgtgcagacaacagattgaggaggcagagtatcaccacaggctcaggaaattttttcaaacgcctactgaaattatggaagtgtttaagtttctagtttattcgaaggatgctccacagctactgtttgatggtgccgctaagaccacggtcgaaatcactgagctcaagaagaagcatgtttacttgctgatttccactctagacatcacggaggaagagatttcagtactccgaccagtttatgattctattaaagctaatgatcagtataagattgtgtggattcccattgtagaagaatggaccgaaaagctgcacaagaaatttgagtttttgaaaagcaagatgccttggtatgtggtgcagcattctggacccatagcagggtacaaatacatcaaggaggaatggcacttcaaaaagaagcctatggttgtggtgttgaatcctcaaggaaaagtgcagcatgcaaacgcattccatctcattcatgtttatggaatgaaggccttcccctttactattgcggatcaagagagaattgatagagaaattcactggattggttctgtagtcggggattctcacccccacataagcacatgggtaagtacatttcacaaaccaattaggatacacatattataaacctatataaattaagtactcatttgaaaatattttagttgttaagttttgagcaatcatattttgaatatttcgttagcctttatgttgtgcaaagtatcatacaattaatacacaggaatcttaaaatttctttttcaagatgaatttcagattatagagagtttttctagaaagagaatagaaaaagaatcgatacctaatctaaagaatagctgaattatttataccaatttttaacaaatggacatcacactatttttaatagtttgttataactgttttaactaccagcttaaaataaaaagacgtaggaatgagaagttttagttatgtgaatcgactgatcaacactttacaaggttttgtttggtattgtttaagttagcattgacaaggacatgagcttaatggagatataaggttgattgagtaatt

SEQ ID NO: 10075 - protein, 353 aa, Glycine max
  peptide (1)..(353): Ceres Seq. ID no. 14308637
  misc_feature (2)..(336): NCBI GI NO: 18395902 NR Description: expressed protein [Arabidopsis thaliana]
  misc_feature (2)..(336): NCBI GI NO: 6016724 NR Description: unknown protein [Arabidopsis thaliana]
  misc_feature (103)..(341): NCBI GI NO: 15232160 NR Description: expressed protein [Arabidopsis thaliana]
  misc_feature (1)..(225): NCBI GI NO: 15232160 NR Description: expressed protein [Arabidopsis thaliana]
  misc_feature (188)..(335): NCBI GI NO: 15220542 NR Description: F12A21.8 [Arabidopsis thaliana]
FAMEYGEFWLLAQHQPTDPIAKSVAVLNGVPVLTRPAAVQKHRQAITELNNLVKTTLLVIELIFELEKLTTFDTKDVPALLPAIEQIPVDVYWAIITIVAIVTQIDYLTTESGNKQDLSHYGQKINIILSKLRKQIMLCRQQIEEAEYHHRLRKFFQTPTEIMEVFKFLVYSKDAPQLLFDGAAKTTVEITELKKKHVYLLISTLDITEEEISVLRPVYDSIKANDQYKIVWIPIVEEWTEKLHKKFEFLKSKMPWYVVQHSGPIAGYKYIKEEWHFKKKPMVVVLNPQGKVQHANAFHLIHVYGMKAFPFTIADQERIDREIHWIGSVVGDSHPHISTWVSTFHKPIRIHIL

SEQ ID NO: 10076 - protein, 351 aa, Glycine max
  peptide (1)..(351): Ceres Seq. ID no. 14308638
  misc_feature (1)..(334): NCBI GI NO: 18395902 NR Description: expressed protein [Arabidopsis thaliana]
  misc_feature (1)..(334): NCBI GI NO: 6016724 NR Description: unknown protein [Arabidopsis thaliana]
  misc_feature (101)..(339): NCBI GI NO: 15232160 NR Description: expressed protein [Arabidopsis thaliana]
  misc_feature (1)..(223): NCBI GI NO: 15232160 NR Description: expressed protein [Arabidopsis thaliana]
  misc_feature (186)..(333): NCBI GI NO: 15220542 NR Description: F12A21.8 [Arabidopsis thaliana]
MEYGEFWLLAQHQPTDPIAKSVAVLNGVPVLTRPAAVQKHRQAITELNNLVKTTLLVIELIFELEKLTTFDTKDVPALLPAIEQIPVDVYWAIITIVAIVTQIDYLTTESGNKQDLSHYGQKINIILSKLRKQIMLCRQQIEEAEYHHRLRKFFQTPTEIMEVFKFLVYSKDAPQLLFDGAAKTTVEITELKKKHVYLLISTLDITEEEISVLRPVYDSIKANDQYKIVWIPIVEEWTEKLHKKFEFLKSKMPWYVVQHSGPIAGYKYIKEEWHFKKKPMVVVLNPQGKVQHANAFHLIHVYGMKAFPFTIADQERIDREIHWIGSVVGDSHPHISTWVSTFHKPIRIHIL

SEQ ID NO: 10077 - protein, 217 aa, Glycine max
  peptide (1)..(217): Ceres Seq. ID no. 14308639
  misc_feature (1)..(200): NCBI GI NO: 18395902 NR Description: expressed protein [Arabidopsis thaliana]
  misc_feature (1)..(200): NCBI GI NO: 6016724 NR Description: unknown protein [Arabidopsis thaliana]
  misc_feature (1)..(205): NCBI GI NO: 15232160 NR Description: expressed protein [Arabidopsis thaliana]
  misc_feature (1)..(89): NCBI GI NO: 15232160 NR Description: expressed protein [Arabidopsis thaliana]
  misc_feature (52)..(199): NCBI GI NO: 15220542 NR Description: F12A21.8 [Arabidopsis thaliana]
MLCRQQIEEAEYHHRLRKFFQTPTEIMEVFKFLVYSKDAPQLLFDGAAKTTVEITELKKKHVYLLISTLDITEEEISVLRPVYDSIKANDQYKIVWIPIVEEWTEKLHKKFEFLKSKMPWYVVQHSGPIAGYKYIKEEWHFKKKPMVVVLNPQGKVQHANAFHLIHVYGMKAFPFTIADQERIDREIHWIGSVVGDSHPHISTWVSTFHKPIRIHIL

SEQ ID NO: 10078 - DNA, 1071 bp, Glycine max
  misc_feature (1)..(1071): Ceres Seq. ID no. 15174347
gatacatataacaatcattcttcttcttctgcaaatacttatccctcattgattcatcatggttcggttcagcaacaatgttatcggactccttaacttcctcaccttcctcttgtccatcccgatcctggtggccggagtgtggctgagcaagcaaggcgccaccgagtgcgagcggtggctggagaagcccgtcatcgcgctcggcgtcttcctcatgctcgtctcactcgccggcctcgtcggcgcgtgctgccgcgtgtcgtggctcctctggctctacctcctcgtcatgtttgtcctcatcgttcttctcttcgccttcaccattttcgctttcgtcgttaccaacaagggcgctggtgaagttgtttctaatagagggtataaagagtataggcttggggattactcgaattggctgcagaagaaggttaataacactaagacgtggaacaggatcagtagttgcttgcattctgggaaagtctgcactgagtttcaatccaagtttctaaacgacaccgttactcagttttacaccgagcacctgtccgcgcttcagtctggatgctgtaaacctgcagaagaatgcctatttacctatgagaattcaacgagctggacgaagcctggaaatgtgaccagttacaacaaccctgactgtgatgcttggaataacaatcaaacagttctgtgcttcaattgccaatcatgcaaggctggctttytgcaaaacttcaagactgaatggaagagggtggctgttgttaacatcgtattccttgttcttctcattattgtatactccatagggtgctgkgcattcaggaacaataggagggaaaattggaagggatattctcgttagctagattactcagtattactagtgagtagatcagtttgctagacaatctggtttatatgttggatttatttttttgggctttatgtgtatgctggattatactgttttcagtacagtctgttatggaaattgctcaattttatatagtagtttcctagtatcatctatacgtagatattacttctggacacactgcattc

SEQ ID NO: 10079 - protein, 270 aa, Glycine max
  peptide (1)..(270): Ceres Seq. ID no. 15174348
  misc_feature (5)..(246): Pfam Name: Pfam Description:  Tetraspanin family
  misc_feature (1)..(270): NCBI GI NO: 20197174 NR Description: hypothetical protein [Arabidopsis thaliana]
  misc_feature (1)..(265): NCBI GI NO: 15234374 NR Description: senescence-associated protein, putative
  misc_feature (1)..(267): NCBI GI NO: 3551954 NR Description: senescence-associated protein 5
  misc_feature (3)..(268): NCBI GI NO: 29367553 NR Description: senescence-associated protein-like protein
  misc_feature (1)..(265): NCBI GI NO: 15234743 NR Description: senescence-associated protein family
  misc_feature (1)..(265): NCBI GI NO: 21537169 NR Description: senescence-associated protein-like protein
  misc_feature (2)..(262): NCBI GI NO: 15231187 NR Description: senescence-associated protein family
  misc_feature (2)..(262): NCBI GI NO: 15238641 NR Description: senescence-associated protein family
  misc_feature (79)..(270): NCBI GI NO: 30682205 NR Description: senescence-associated protein family
  misc_feature (5)..(264): NCBI GI NO: 17979386 NR Description: putative senescence-associated protein 5
  misc_feature (225)..(225): Xaa is any aa, unknown or other
  misc_feature (255)..(255): Xaa is any aa, unknown or other
MVRFSNNVIGLLNFLTFLLSIPILVAGVWLSKQGATECERWLEKPVIALGVFLMLVSLAGLVGACCRVSWLLWLYLLVMFVLIVLLFAFTIFAFVVTNKGAGEVVSNRGYKEYRLGDYSNWLQKKVNNTKTWNRISSCLHSGKVCTEFQSKFLNDTVTQFYTEHLSALQSGCCKPAEECLFTYENSTSWTKPGNVTSYNNPDCDAWNNNQTVLCFNCQSCKAGFXQNFKTEWKRVAVVNIVFLVLLIIVYSIGCXAFRNNRRENWKGYSR

SEQ ID NO: 10080 - protein, 217 aa, Glycine max
  peptide (1)..(217): Ceres Seq. ID no. 15174349
  misc_feature (1)..(193): Pfam Name: Pfam Description:  Tetraspanin family
  misc_feature (1)..(217): NCBI GI NO: 20197174 NR Description: hypothetical protein [Arabidopsis thaliana]
  misc_feature (1)..(212): NCBI GI NO: 15234374 NR Description: senescence-associated protein, putative
  misc_feature (1)..(214): NCBI GI NO: 3551954 NR Description: senescence-associated protein 5
  misc_feature (1)..(215): NCBI GI NO: 29367553 NR Description: senescence-associated protein-like protein
  misc_feature (1)..(212): NCBI GI NO: 15234743 NR Description: senescence-associated protein family
  misc_feature (1)..(212): NCBI GI NO: 21537169 NR Description: senescence-associated protein-like protein
  misc_feature (1)..(209): NCBI GI NO: 15231187 NR Description: senescence-associated protein family
  misc_feature (1)..(209): NCBI GI NO: 15238641 NR Description: senescence-associated protein family
  misc_feature (26)..(217): NCBI GI NO: 30682205 NR Description: senescence-associated protein family
  misc_feature (1)..(211): NCBI GI NO: 17979386 NR Description: putative senescence-associated protein 5
  misc_feature (172)..(172): Xaa is any aa, unknown or other
  misc_feature (202)..(202): Xaa is any aa, unknown or other
MLVSLAGLVGACCRVSWLLWLYLLVMFVLIVLLFAFTIFAFVVTNKGAGEVVSNRGYKEYRLGDYSNWLQKKVNNTKTWNRISSCLHSGKVCTEFQSKFLNDTVTQFYTEHLSALQSGCCKPAEECLFTYENSTSWTKPGNVTSYNNPDCDAWNNNQTVLCFNCQSCKAGFXQNFKTEWKRVAVVNIVFLVLLIIVYSIGCXAFRNNRRENWKGYSR

SEQ ID NO: 10081 - protein, 192 aa, Glycine max
  peptide (1)..(192): Ceres Seq. ID no. 15174350
  misc_feature (1)..(168): Pfam Name: Pfam Description:  Tetraspanin family
  misc_feature (1)..(192): NCBI GI NO: 20197174 NR Description: hypothetical protein [Arabidopsis thaliana]
  misc_feature (1)..(187): NCBI GI NO: 15234374 NR Description: senescence-associated protein, putative
  misc_feature (1)..(189): NCBI GI NO: 3551954 NR Description: senescence-associated protein 5
  misc_feature (1)..(190): NCBI GI NO: 29367553 NR Description: senescence-associated protein-like protein
  misc_feature (1)..(187): NCBI GI NO: 15234743 NR Description: senescence-associated protein family
  misc_feature (1)..(187): NCBI GI NO: 21537169 NR Description: senescence-associated protein-like protein
  misc_feature (1)..(184): NCBI GI NO: 15231187 NR Description: senescence-associated protein family
  misc_feature (1)..(184): NCBI GI NO: 15238641 NR Description: senescence-associated protein family
  misc_feature (1)..(192): NCBI GI NO: 30682205 NR Description: senescence-associated protein family
  misc_feature (1)..(186): NCBI GI NO: 17979386 NR Description: putative senescence-associated protein 5
  misc_feature (147)..(147): Xaa is any aa, unknown or other
  misc_feature (177)..(177): Xaa is any aa, unknown or other
MFVLIVLLFAFTIFAFVVTNKGAGEVVSNRGYKEYRLGDYSNWLQKKVNNTKTWNRISSCLHSGKVCTEFQSKFLNDTVTQFYTEHLSALQSGCCKPAEECLFTYENSTSWTKPGNVTSYNNPDCDAWNNNQTVLCFNCQSCKAGFXQNFKTEWKRVAVVNIVFLVLLIIVYSIGCXAFRNNRRENWKGYSR

SEQ ID NO: 10082 - DNA, 1206 bp, Glycine max
  misc_feature (1)..(1206): Ceres Seq. ID no. 14312330
acgacacgccagccagatccacaaatcggaagaatcagagcgccgtcggaaaccgccgtccacggcggtgaaactcgccttcgcatcctctcgtcttcgaacccgaagcctctctcggttcctcactcttctcacatcgccaaaaactcaaattcacgatggaagagttggagcagtggaaggaacaactttcgcacttcgctaacctagctttggatcgtcttcgcgaggttcccccgaatcagctctacgctgctgctgcaatcgcgattttcacaactctgcttcttctctcaatacggttgttcaagcgcgcgaagtccaacaccattgttttgaccgggctcagtgggagtggaaaaactgttctcttctatcagcttagggatggctcaactcatcagggtacagttacatcgatggagcctaatgaaggcacttttattcttcacaatgagaaaaccaggaagggcaagataaagcctgttcatgttgttgatgttcctgggcattctcggcttcgacccaaactggatgagtacttgcctcaagcagctggggtagtttttgtagtagatgctttggactttttaccaaactgccgtgctgcttcagagtacctttatgatctattgactaaaggaagtgttgtgaggaagaagattccaatgcttattctctgcaacaaaacagacaaagtcactgctcatactaaagagtttatccgaaaacagatggagaaggaaatagacaaattacgggcatcaagaagtgcaatatcagcagctgacatcgcaaatgagttcaccctgggggtacccggtgagccgttttcttttacccagtgctctaacaaagtgacaactgcagacgcttctggtttaactggggaaatatctcagctggaagagtttatcagagaacatgtaaagcgatagctggatattgtgtttaaacttgcggatttttgttgaactgaatgaatatgtagcgttgctcttcttggttgttatttctttgatttcaaagaactgtctggataagaagaggcaaaaaagagaaaatggggttttgggggtggggttggggtgttcggagtaggaatcactatgttgggatcaatgaggatttacttcattttaagtcctggtatattgattggactataatgatttatcaaattgtatccatacttcatttactttt

SEQ ID NO: 10083 - protein, 259 aa, Glycine max
  peptide (1)..(259): Ceres Seq. ID no. 14312331
  misc_feature (42)..(198): Pfam Name: Pfam Description:  ADP-ribosylation factor family
  misc_feature (1)..(258): NCBI GI NO: 15239201 NR Description: signal recognition particle receptor beta subunit-related protein
  misc_feature (1)..(258): NCBI GI NO: 15224229 NR Description: signal recognition particle receptor beta subunit -related
  misc_feature (2)..(253): NCBI GI NO: 31218892 NR Description: ENSANGP00000020947 [Anopheles gambiae]
  misc_feature (23)..(240): NCBI GI NO: 32450191 NR Description: Unknown (protein for MGC:64420) [Xenopus laevis]
  misc_feature (21)..(253): NCBI GI NO: 28574941 NR Description: Signal recognition particle receptor beta CG33162-PA
  misc_feature (38)..(256): NCBI GI NO: 23509141 NR Description: hypothetical protein [Plasmodium falciparum 3D7]
  misc_feature (22)..(240): NCBI GI NO: 38174090 NR Description: Unknown (protein for MGC:75930)
  misc_feature (22)..(253): NCBI GI NO: 6678137 NR Description: signal recognition particle receptor, B subunit
  misc_feature (22)..(253): NCBI GI NO: 12842535 NR Description: unnamed protein product [Mus musculus]
  misc_feature (22)..(244): NCBI GI NO: 27721301 NR Description: similar to signal recognition particle receptor
MEELEQWKEQLSHFANLALDRLREVPPNQLYAAAAIAIFTTLLLLSIRLFKRAKSNTIVLTGLSGSGKTVLFYQLRDGSTHQGTVTSMEPNEGTFILHNEKTRKGKIKPVHVVDVPGHSRLRPKLDEYLPQAAGVVFVVDALDFLPNCRAASEYLYDLLTKGSVVRKKIPMLILCNKTDKVTAHTKEFIRKQMEKEIDKLRASRSAISAADIANEFTLGVPGEPFSFTQCSNKVTTADASGLTGEISQLEEFIREHVKR

SEQ ID NO: 10084 - protein, 172 aa, Glycine max
  peptide (1)..(172): Ceres Seq. ID no. 14312332
  misc_feature (1)..(111): Pfam Name: Pfam Description:  ADP-ribosylation factor family
  misc_feature (1)..(171): NCBI GI NO: 15239201 NR Description: signal recognition particle receptor beta subunit-related protein
  misc_feature (1)..(171): NCBI GI NO: 15224229 NR Description: signal recognition particle receptor beta subunit -related
  misc_feature (1)..(166): NCBI GI NO: 31218892 NR Description: ENSANGP00000020947 [Anopheles gambiae]
  misc_feature (1)..(153): NCBI GI NO: 32450191 NR Description: Unknown (protein for MGC:64420) [Xenopus laevis]
  misc_feature (1)..(166): NCBI GI NO: 28574941 NR Description: Signal recognition particle receptor beta CG33162-PA
  misc_feature (1)..(169): NCBI GI NO: 23509141 NR Description: hypothetical protein [Plasmodium falciparum 3D7]
  misc_feature (1)..(153): NCBI GI NO: 38174090 NR Description: Unknown (protein for MGC:75930)
  misc_feature (1)..(166): NCBI GI NO: 6678137 NR Description: signal recognition particle receptor, B subunit
  misc_feature (1)..(166): NCBI GI NO: 12842535 NR Description: unnamed protein product [Mus musculus]
  misc_feature (1)..(157): NCBI GI NO: 27721301 NR Description: similar to signal recognition particle receptor
MEPNEGTFILHNEKTRKGKIKPVHVVDVPGHSRLRPKLDEYLPQAAGVVFVVDALDFLPNCRAASEYLYDLLTKGSVVRKKIPMLILCNKTDKVTAHTKEFIRKQMEKEIDKLRASRSAISAADIANEFTLGVPGEPFSFTQCSNKVTTADASGLTGEISQLEEFIREHVKR

SEQ ID NO: 10085 - DNA, 1137 bp, Glycine max
  misc_feature (1)..(1137): Ceres Seq. ID no. 15169976
gttgtatccaaatccaaaaaaacctttttctgaatcagtcgtgaaccaaaagaggaagatggagctgtggaacagagcccgaagctttgcggaagaagcagcgaaacgatcccaggaactgtcgttgggagctagagctacccaattcaccaacatcatagcagaaaccaccaaagaaatcgcagcgcaagcttccaagcacttgccccgaccttatgccataaacgacgtcgatctccaccgttttggcatcaccgaagagttgagggactttgtcaaaggaatcaccatcactacctttgaggattttccccttcaagatgatacggaattgtctgatgttcctgcagtttcaaatgttaggcaggacctaaccgagtggcaggaaaaacatgccagtcttgttctttctacagtcaaggagatttcaggattgaggtatgaactgtgtccacgagtcatgaaagagaggaagttttggagaatatattttatacttgtgaataatcacactgcaccctatgagaataagtacatggaagacaataaactaaaatcatgtgaacaagtaaaagatcacaaagtgatgatggaatccttaaacactgaattgatctccaatcaagaggtgcaagaagtgaaaaaggaggccaaaccttcgaattcatcaacagagcaagacttggatgtatttcttctgggagaaggaaacagtgatgatgagcctgatgatggcgatgggggatatgatgatgatttggaaaaactgatggataattcggatgatgagaaagggaaatcatagatggtgcttgaaattattggctgacattaaataaggggttgcaacatgcctgagaatatacatgatgaaatgaggcttaatttattgatgcgacacatacggtggctgatctgttccgtgatgcctacatttattctttcaaccctttcctgcccctttatttatgtagttgcttccccatgttgagggatgaaattcctgcccctttatttatgtagttgcttccccatgttgagggatgaaaaagttgggtttgtgattataaaaaagttaattatttggtgtctagttttgttagttttttatgtaaaaaatacacattaaatgtactg

SEQ ID NO: 10086 - protein, 267 aa, Glycine max
  peptide (1)..(267): Ceres Seq. ID no. 15169977
  misc_feature (121)..(167): Pfam Name: Pfam Description:  BSD domain
  misc_feature (21)..(267): NCBI GI NO: 15450417 NR Description: At1g26300/F28B23_4 [Arabidopsis thaliana]
  misc_feature (21)..(266): NCBI GI NO: 30697787 NR Description: expressed protein [Arabidopsis thaliana]
  misc_feature (21)..(267): NCBI GI NO: 25404796 NR Description: hypothetical protein T6L1.21
  misc_feature (83)..(224): NCBI GI NO: 18404344 NR Description: expressed protein [Arabidopsis thaliana]
  misc_feature (209)..(267): NCBI GI NO: 15222681 NR Description: expressed protein [Arabidopsis thaliana]
  misc_feature (83)..(231): NCBI GI NO: 28273391 NR Description: putative BSD domain containing protein
  misc_feature (74)..(224): NCBI GI NO: 18425006 NR Description: expressed protein [Arabidopsis thaliana]
  misc_feature (33)..(225): NCBI GI NO: 34909848 NR Description: OSJNBb0053G03.5
LYPNPKKPFSESVVNQKRKMELWNRARSFAEEAAKRSQELSLGARATQFTNIIAETTKEIAAQASKHLPRPYAINDVDLHRFGITEELRDFVKGITITTFEDFPLQDDTELSDVPAVSNVRQDLTEWQEKHASLVLSTVKEISGLRYELCPRVMKERKFWRIYFILVNNHTAPYENKYMEDNKLKSCEQVKDHKVMMESLNTELISNQEVQEVKKEAKPSNSSTEQDLDVFLLGEGNSDDEPDDGDGGYDDDLEKLMDNSDDEKGKS

SEQ ID NO: 10087 - protein, 248 aa, Glycine max
  peptide (1)..(248): Ceres Seq. ID no. 15169978
  misc_feature (102)..(148): Pfam Name: Pfam Description:  BSD domain
  misc_feature (2)..(248): NCBI GI NO: 15450417 NR Description: At1g26300/F28B23_4 [Arabidopsis thaliana]
  misc_feature (2)..(247): NCBI GI NO: 30697787 NR Description: expressed protein [Arabidopsis thaliana]
  misc_feature (2)..(248): NCBI GI NO: 25404796 NR Description: hypothetical protein T6L1.21
  misc_feature (64)..(205): NCBI GI NO: 18404344 NR Description: expressed protein [Arabidopsis thaliana]
  misc_feature (190)..(248): NCBI GI NO: 15222681 NR Description: expressed protein [Arabidopsis thaliana]
  misc_feature (64)..(212): NCBI GI NO: 28273391 NR Description: putative BSD domain containing protein
  misc_feature (55)..(205): NCBI GI NO: 18425006 NR Description: expressed protein [Arabidopsis thaliana]
  misc_feature (14)..(206): NCBI GI NO: 34909848 NR Description: OSJNBb0053G03.5
MELWNRARSFAEEAAKRSQELSLGARATQFTNIIAETTKEIAAQASKHLPRPYAINDVDLHRFGITEELRDFVKGITITTFEDFPLQDDTELSDVPAVSNVRQDLTEWQEKHASLVLSTVKEISGLRYELCPRVMKERKFWRIYFILVNNHTAPYENKYMEDNKLKSCEQVKDHKVMMESLNTELISNQEVQEVKKEAKPSNSSTEQDLDVFLLGEGNSDDEPDDGDGGYDDDLEKLMDNSDDEKGKS

SEQ ID NO: 10088 - DNA, 1408 bp, Glycine max
  misc_feature (1)..(1408): Ceres Seq. ID no. 15175700
aaagagaaatggaattgcctctttcaagaagcatctgagtgtttattattcgtaatatatagtcactcaagcttctaggatttctgccagctacatgaaaatgggaagcaacttgaggtttttgagtctttgcctcttggcattgattgcatcaactcatgcccaacttcagcttggtttttatgcccagagctgcccaaaagctgagaaaatcattttgaaatttgttcatgagcatatccacaatgctccatcactagcagctgcattgataagaatgcatttccatgattgttttgtaaggggatgtgatggatcagtccttctgaactcaacaaccaatcaggctgagaagaatgctcctccaaatctcacagtaagaggctttgacttcattgacagaataaagagccttgttgaagctgaatgccctggtgtggtctcttgtgctgatatcctcactttggctgccagagacactattgtagccacaggtggaccctattggaaagttccaacaggtcgaagggatggggtcatctctaacttggtggaagccagaaataacattcctgctccatttgacaacatcactacgctacagacactctttgccaaccaaggacttgatttgaaggacttggtcctgctctctggtgctcacacaattggtatcgctcattgttcatcattatcaaaccgcttgttcaatttcactggcaagggtgatcaagacccttcactagacagtgaatatgctgcaaatctgaaagccttcaagtgcaaggacctcagtaaattgaacaccacaaaaattgagatagaccctggaagtcgcaagacatttgatcttagctactatagtcacgttattaagagaaggggtctatttgaatcagatgctgcattgttgactaactcagttacaaagtctcaaatcatccaattgcttgaagggacagttgaaaatttctctgctgagtttgcaacctccatagagaaaatgggaagaattaatgtgaagacagggacagagggagagatcaggaagcattgtgcattcgtaaatagctaagaatcttgtcttgttcatggatgaatcttgtatcttttattttttgggtttgattatttatgctatgccaatgttttttgattagttatgctatgccatgtggtgtctgtctacttataaaagaccccttatggcatggttgttgtatgtgtgttggaataagtaggttccattgttattcttatttccaactttgctggtagatcatgctcttgcaataagcagcagaatttcttgtgctaccaacagcagagttaatgtatgtttagtcttttttttttgtattgatgtactttttcattgttattctcaatttaatgcatttttcctctc

SEQ ID NO: 10089 - protein, 326 aa, Glycine max
  peptide (1)..(326): Ceres Seq. ID no. 15175701
  misc_feature (41)..(288): Pfam Name: Pfam Description:  Peroxidase
  misc_feature (1)..(326): NCBI GI NO: 4204761 NR Description: peroxidase precursor [Glycine max]
  misc_feature (1)..(326): NCBI GI NO: 4204759 NR Description: peroxidase precursor [Glycine max]
  misc_feature (12)..(325): NCBI GI NO: 15237128 NR Description: peroxidase, putative [Arabidopsis thaliana]
  misc_feature (10)..(326): NCBI GI NO: 15220463 NR Description: peroxidase, putative [Arabidopsis thaliana]
  misc_feature (10)..(326): NCBI GI NO: 21536908 NR Description: putative peroxidase [Arabidopsis thaliana]
  misc_feature (12)..(325): NCBI GI NO: 1546692 NR Description: peroxidase; peroxidase ATP19a
  misc_feature (12)..(326): NCBI GI NO: 678547 NR Description: peroxidase
  misc_feature (2)..(326): NCBI GI NO: 7433064 NR Description: peroxidase (EC 1.11.1.7) TPX2 precursor - tomato
  misc_feature (12)..(326): NCBI GI NO: 1084405 NR Description: peroxidase (EC 1.11.1.7) TPX1 precursor - tomato
  misc_feature (14)..(326): NCBI GI NO: 21537041 NR Description: putative peroxidase [Arabidopsis thaliana]
MKMGSNLRFLSLCLLALIASTHAQLQLGFYAQSCPKAEKIILKFVHEHIHNAPSLAAALIRMHFHDCFVRGCDGSVLLNSTTNQAEKNAPPNLTVRGFDFIDRIKSLVEAECPGVVSCADILTLAARDTIVATGGPYWKVPTGRRDGVISNLVEARNNIPAPFDNITTLQTLFANQGLDLKDLVLLSGAHTIGIAHCSSLSNRLFNFTGKGDQDPSLDSEYAANLKAFKCKDLSKLNTTKIEIDPGSRKTFDLSYYSHVIKRRGLFESDAALLTNSVTKSQIIQLLEGTVENFSAEFATSIEKMGRINVKTGTEGEIRKHCAFVNS

SEQ ID NO: 10090 - protein, 324 aa, Glycine max
  peptide (1)..(324): Ceres Seq. ID no. 15175702
  misc_feature (39)..(286): Pfam Name: Pfam Description:  Peroxidase
  misc_feature (1)..(324): NCBI GI NO: 4204761 NR Description: peroxidase precursor [Glycine max]
  misc_feature (1)..(324): NCBI GI NO: 4204759 NR Description: peroxidase precursor [Glycine max]
  misc_feature (10)..(323): NCBI GI NO: 15237128 NR Description: peroxidase, putative [Arabidopsis thaliana]
  misc_feature (8)..(324): NCBI GI NO: 15220463 NR Description: peroxidase, putative [Arabidopsis thaliana]
  misc_feature (8)..(324): NCBI GI NO: 21536908 NR Description: putative peroxidase [Arabidopsis thaliana]
  misc_feature (10)..(323): NCBI GI NO: 1546692 NR Description: peroxidase; peroxidase ATP19a
  misc_feature (10)..(324): NCBI GI NO: 678547 NR Description: peroxidase
  misc_feature (1)..(324): NCBI GI NO: 7433064 NR Description: peroxidase (EC 1.11.1.7) TPX2 precursor - tomato
  misc_feature (10)..(324): NCBI GI NO: 1084405 NR Description: peroxidase (EC 1.11.1.7) TPX1 precursor - tomato
  misc_feature (12)..(324): NCBI GI NO: 21537041 NR Description: putative peroxidase [Arabidopsis thaliana]
MGSNLRFLSLCLLALIASTHAQLQLGFYAQSCPKAEKIILKFVHEHIHNAPSLAAALIRMHFHDCFVRGCDGSVLLNSTTNQAEKNAPPNLTVRGFDFIDRIKSLVEAECPGVVSCADILTLAARDTIVATGGPYWKVPTGRRDGVISNLVEARNNIPAPFDNITTLQTLFANQGLDLKDLVLLSGAHTIGIAHCSSLSNRLFNFTGKGDQDPSLDSEYAANLKAFKCKDLSKLNTTKIEIDPGSRKTFDLSYYSHVIKRRGLFESDAALLTNSVTKSQIIQLLEGTVENFSAEFATSIEKMGRINVKTGTEGEIRKHCAFVNS

SEQ ID NO: 10091 - protein, 265 aa, Glycine max
  peptide (1)..(265): Ceres Seq. ID no. 15175703
  misc_feature (1)..(227): Pfam Name: Pfam Description:  Peroxidase
  misc_feature (1)..(265): NCBI GI NO: 4204761 NR Description: peroxidase precursor [Glycine max]
  misc_feature (1)..(265): NCBI GI NO: 4204759 NR Description: peroxidase precursor [Glycine max]
  misc_feature (1)..(264): NCBI GI NO: 15237128 NR Description: peroxidase, putative [Arabidopsis thaliana]
  misc_feature (1)..(265): NCBI GI NO: 15220463 NR Description: peroxidase, putative [Arabidopsis thaliana]
  misc_feature (1)..(265): NCBI GI NO: 21536908 NR Description: putative peroxidase [Arabidopsis thaliana]
  misc_feature (1)..(264): NCBI GI NO: 1546692 NR Description: peroxidase; peroxidase ATP19a
  misc_feature (1)..(265): NCBI GI NO: 678547 NR Description: peroxidase
  misc_feature (1)..(265): NCBI GI NO: 7433064 NR Description: peroxidase (EC 1.11.1.7) TPX2 precursor - tomato
  misc_feature (1)..(265): NCBI GI NO: 1084405 NR Description: peroxidase (EC 1.11.1.7) TPX1 precursor - tomato
  misc_feature (1)..(265): NCBI GI NO: 21537041 NR Description: putative peroxidase [Arabidopsis thaliana]
MHFHDCFVRGCDGSVLLNSTTNQAEKNAPPNLTVRGFDFIDRIKSLVEAECPGVVSCADILTLAARDTIVATGGPYWKVPTGRRDGVISNLVEARNNIPAPFDNITTLQTLFANQGLDLKDLVLLSGAHTIGIAHCSSLSNRLFNFTGKGDQDPSLDSEYAANLKAFKCKDLSKLNTTKIEIDPGSRKTFDLSYYSHVIKRRGLFESDAALLTNSVTKSQIIQLLEGTVENFSAEFATSIEKMGRINVKTGTEGEIRKHCAFVNS

SEQ ID NO: 10092 - DNA, 845 bp, Glycine max
  misc_feature (1)..(845): Ceres Seq. ID no. 13638156
atttatggatgaaatcaagaagcgtgcaaatcagaggaagcaacttgctaaaaaggaaaagaaggaaaaaataatggctgaagctactgctgcttattctcttcccatatcattaagtcatcagtttacttctcgcaatgatcctccgacattcttcatggatgactttgaagctcttggaaattcaaccatatcatcaagtcctcccttagctggggagagaaaatcgttctcaaatgttactaggcttgggtttgctgctgctcatgattctccatccttacaaattcaagaaactagtggtctgcataataacaacacaactgctgattcttctgtcacaacaggtttgagaaatggggagacacaatcatactccaatgttacatcaagaacagaatctaatataagctcgaatgcaccaaagacaaatgagttggggaagaagggaaagaaaccaaatcgagttcttctgtcaacagctggtggtaggcgctattgattttggttgccgacccttaccctagattatgcgagtgtcaatgattctcagcctcctccctgctatagtcccaagccaaactctctggcagatgatttcagtgtagagttagtaacgttctacggatcatatttatgcacctcttaactacttgtaggtaggtaggcatgtgtggagagaataaatgtttttagcaataaacaagccacaactgttagaaggtcagtatattgtttctgtggatctgtagaactgtgctggcgttgggtatgttaattaaatccagactatgagcattgactatacacaagacatttaaattgggaagggggtttttttctct

SEQ ID NO: 10093 - protein, 166 aa, Glycine max
  peptide (1)..(166): Ceres Seq. ID no. 13638157
  misc_feature (1)..(166): NCBI GI NO: 22331355 NR Description: zinc finger
  misc_feature (1)..(147): NCBI GI NO: 1402891 NR Description: unknown [Arabidopsis thaliana]
FMDEIKKRANQRKQLAKKEKKEKIMAEATAAYSLPISLSHQFTSRNDPPTFFMDDFEALGNSTISSSPPLAGERKSFSNVTRLGFAAAHDSPSLQIQETSGLHNNNTTADSSVTTGLRNGETQSYSNVTSRTESNISSNAPKTNELGKKGKKPNRVLLSTAGGRRY

SEQ ID NO: 10094 - protein, 165 aa, Glycine max
  peptide (1)..(165): Ceres Seq. ID no. 13638158
  misc_feature (1)..(165): NCBI GI NO: 22331355 NR Description: zinc finger
  misc_feature (1)..(146): NCBI GI NO: 1402891 NR Description: unknown [Arabidopsis thaliana]
MDEIKKRANQRKQLAKKEKKEKIMAEATAAYSLPISLSHQFTSRNDPPTFFMDDFEALGNSTISSSPPLAGERKSFSNVTRLGFAAAHDSPSLQIQETSGLHNNNTTADSSVTTGLRNGETQSYSNVTSRTESNISSNAPKTNELGKKGKKPNRVLLSTAGGRRY

SEQ ID NO: 10095 - protein, 142 aa, Glycine max
  peptide (1)..(142): Ceres Seq. ID no. 13638159
  misc_feature (1)..(142): NCBI GI NO: 22331355 NR Description: zinc finger
  misc_feature (1)..(123): NCBI GI NO: 1402891 NR Description: unknown [Arabidopsis thaliana]
MAEATAAYSLPISLSHQFTSRNDPPTFFMDDFEALGNSTISSSPPLAGERKSFSNVTRLGFAAAHDSPSLQIQETSGLHNNNTTADSSVTTGLRNGETQSYSNVTSRTESNISSNAPKTNELGKKGKKPNRVLLSTAGGRRY

SEQ ID NO: 10096 - DNA, 1281 bp, Glycine max
  misc_feature (1)..(1281): Ceres Seq. ID no. 14311647
atgccgttcttctctgttatttgagtcaaaggattatccccatgtcagttgcaccagttgacggtattccctcattaaacagtgatctcttctatgatatatttcgtcgacttgatggtgcaacattggctagtgcagcatgtacttgtgcagcgctgtgttccatctcaaaagaagagagtttatgggagaacgtatgttcctctatgtggccttcaaccaatagagaggatgtcaaaagtttaatatcttctgttggtggattcagaaaattctatgcagattgtttcccacttattgtaaacaaggaggttgtagggtatcaaccaaacaactatctcgagtacccggacaattggactgaagctgaatattatggggacatgaatgaatctgaaagcatctctccatcagattttgtttctatagtagatattaggttcaaggggaaaccaatctgttccaaagttctgtggggaattccaaatgcaaatggctatgatggttggttctataactgccctttccggattgatattctcacttatgcagatagagatgataacaatgatggagcggttcacctttctgtatctgatggtctgccaccaattacatccttggagagggaaaggaaagatgggaagctgtggcgggaactccgtgaagggctccagcttagttggattatagtaaacaggaaaataaagcaagctgcaaatcttgctagctggagccctcttggtggtcaaagacactggccaaccgataaggattttgttatccgctttggatcagttctacccgccagggacattcttccttgtcaggtagcagagtgtatccttattatgaagtttagagtgattcacactgaagaagatgggtttcaaacaactcttaaattaacagagctgagcatgcagttggaagacatggaaggtgctcatgttaatggaagaaacagtttgcttatacttaaggaagcacttagcagccgaaggagcaaaaattatggtgaagtactcgagtcttgtcatatgtattcaaaagtacagaatgagttgaaagaggagaagatgagaaacgaaagtcggttggacagactttgtattttaagtggcattgcagcatttatgacgttctggtactgtgttttatgaaatggtagcgcatagtcatttagtggaatatgctaatgtagctctaacaaatgctggaccttggcactcctgtgtaagatgtggttttgcttaccataataaacaaatcaataaacag

SEQ ID NO: 10097 - protein, 386 aa, Glycine max
  peptide (1)..(386): Ceres Seq. ID no. 14311648
  misc_feature (24)..(66): Pfam Name: Pfam Description:  F-box domain
  misc_feature (165)..(386): NCBI GI NO: 15225867 NR Description: F-box protein family [Arabidopsis thaliana]
  misc_feature (20)..(97): NCBI GI NO: 15225867 NR Description: F-box protein family [Arabidopsis thaliana]
  misc_feature (205)..(379): NCBI GI NO: 15227574 NR Description: F-box protein family [Arabidopsis thaliana]
  misc_feature (15)..(99): NCBI GI NO: 15227574 NR Description: F-box protein family [Arabidopsis thaliana]
  misc_feature (19)..(99): NCBI GI NO: 15238908 NR Description: F-box protein family [Arabidopsis thaliana]
AVLLCYLSQRIIPMSVAPVDGIPSLNSDLFYDIFRRLDGATLASAACTCAALCSISKEESLWENVCSSMWPSTNREDVKSLISSVGGFRKFYADCFPLIVNKEVVGYQPNNYLEYPDNWTEAEYYGDMNESESISPSDFVSIVDIRFKGKPICSKVLWGIPNANGYDGWFYNCPFRIDILTYADRDDNNDGAVHLSVSDGLPPITSLERERKDGKLWRELREGLQLSWIIVNRKIKQAANLASWSPLGGQRHWPTDKDFVIRFGSVLPARDILPCQVAECILIMKFRVIHTEEDGFQTTLKLTELSMQLEDMEGAHVNGRNSLLILKEALSSRRSKNYGEVLESCHMYSKVQNELKEEKMRNESRLDRLCILSGIAAFMTFWYCVL

SEQ ID NO: 10098 - protein, 373 aa, Glycine max
  peptide (1)..(373): Ceres Seq. ID no. 14311649
  misc_feature (11)..(53): Pfam Name: Pfam Description:  F-box domain
  misc_feature (152)..(373): NCBI GI NO: 15225867 NR Description: F-box protein family [Arabidopsis thaliana]
  misc_feature (7)..(84): NCBI GI NO: 15225867 NR Description: F-box protein family [Arabidopsis thaliana]
  misc_feature (192)..(366): NCBI GI NO: 15227574 NR Description: F-box protein family [Arabidopsis thaliana]
  misc_feature (2)..(86): NCBI GI NO: 15227574 NR Description: F-box protein family [Arabidopsis thaliana]
  misc_feature (6)..(86): NCBI GI NO: 15238908 NR Description: F-box protein family [Arabidopsis thaliana]
MSVAPVDGIPSLNSDLFYDIFRRLDGATLASAACTCAALCSISKEESLWENVCSSMWPSTNREDVKSLISSVGGFRKFYADCFPLIVNKEVVGYQPNNYLEYPDNWTEAEYYGDMNESESISPSDFVSIVDIRFKGKPICSKVLWGIPNANGYDGWFYNCPFRIDILTYADRDDNNDGAVHLSVSDGLPPITSLERERKDGKLWRELREGLQLSWIIVNRKIKQAANLASWSPLGGQRHWPTDKDFVIRFGSVLPARDILPCQVAECILIMKFRVIHTEEDGFQTTLKLTELSMQLEDMEGAHVNGRNSLLILKEALSSRRSKNYGEVLESCHMYSKVQNELKEEKMRNESRLDRLCILSGIAAFMTFWYCVL

SEQ ID NO: 10099 - protein, 318 aa, Glycine max
  peptide (1)..(318): Ceres Seq. ID no. 14311650
  misc_feature (97)..(318): NCBI GI NO: 15225867 NR Description: F-box protein family [Arabidopsis thaliana]
  misc_feature (1)..(29): NCBI GI NO: 15225867 NR Description: F-box protein family [Arabidopsis thaliana]
  misc_feature (137)..(311): NCBI GI NO: 15227574 NR Description: F-box protein family [Arabidopsis thaliana]
  misc_feature (1)..(31): NCBI GI NO: 15227574 NR Description: F-box protein family [Arabidopsis thaliana]
  misc_feature (1)..(31): NCBI GI NO: 15238908 NR Description: F-box protein family [Arabidopsis thaliana]
MWPSTNREDVKSLISSVGGFRKFYADCFPLIVNKEVVGYQPNNYLEYPDNWTEAEYYGDMNESESISPSDFVSIVDIRFKGKPICSKVLWGIPNANGYDGWFYNCPFRIDILTYADRDDNNDGAVHLSVSDGLPPITSLERERKDGKLWRELREGLQLSWIIVNRKIKQAANLASWSPLGGQRHWPTDKDFVIRFGSVLPARDILPCQVAECILIMKFRVIHTEEDGFQTTLKLTELSMQLEDMEGAHVNGRNSLLILKEALSSRRSKNYGEVLESCHMYSKVQNELKEEKMRNESRLDRLCILSGIAAFMTFWYCVL

SEQ ID NO: 10100 - DNA, 2335 bp, Glycine max
  misc_feature (1)..(2335): Ceres Seq. ID no. 15176302
gaagaaaaggttctctccctctctctcttcttctctttctctgcgtgtgtgttcgtgagtggagtggcgtatgtgtagctgcgctctctatcgccggcgctctcgtcggaatttccgttattgatttttccgatcaccggattcgatccaatccctaatccctaatcccgcgattccatcaattgaaaaaattgaatagccattgaaccgtttcgtttcgggggtagcggagatggacgtttacgcgagcagcgacgaagattaccattacgactccgaccacgaggactccgtcgaggcctacgaaaacgacgagaattacgccttgctctcttccaagggcaccactactaaggtgattacaaaggaatcactgctagctgcacagaaggaggatttgcgcagagtgatggacatgctatcggtgagagagcaacatgctcggacgctgcttatttttcatcgttgggatgtggagaatctgtttgaagtgttagtagacaaggggaaatcatttctctttgctgaagctggtgttagtgtggatgaacatcgcaactctgactcacctgttcctcctgcattcatgtgctacatctgtatggaggaagttcctagtagcaaaacaacgagaatggactgcggtcactgcttttgcaacggctgttggatagagcactttattgtcaagataaatgagggtcaaagtaagcgcattagatgcatggaacacaagtgcaattccatatgtgatgatgccgttgtaagaactctactcagtagagagcaccctcatacggcagagaaatatgaacgctttctgcttgaatcttacattgaagacaataagagagttaaatggtgccccagcacacctcattgtgggaatgcaatacgggtcgaggatgatgaactgtgtgaggtagaatgttcatgtggtgtacaattttgttttagttgtttgtcagaagcacactccccttgttcatgtctgatgtgggagctttgggctaagaagtgccgagatgaatcagaaacagttaattggataactgttcatacaaaaccatgtccaaagtgtcacaaaccagtggagaagaatggtggttgtaacttggttagctgtatctgtggccaagcattttgttggttgtgtggtggagctactggccgagagcatacttggtcaagtatagctggtcatagctgtggtcgatacaaagagcaagaaaagacagctgaacgtgcaaagagggatctatatcgttatatgcattatcataaccgatataaagctcacacagactcctttaagattgaaagtaaactgaaagagactatacaagggaagattgccatttcagaagaaaaagattctacactcagagattatagctgggtaaataatggactctccagacttttcagatctaggcgagtcctatcatattcatatgcatttgcattttatatgtttggagatgagctttttaaggatgaaatgacagatgctcaacgggaaataaaacagaacttatttgaggatcaacagcaacagcttgaggcaaatgttgaaaagctctctaaaattttggaggagccttttgaaaccttttcagatgataaggttgttgagataaggatgcagatactcaacctttcaacaattattgacaaactttgtcaaaaaatgtatgaatgcattgagaatgatctattgggttctctcaatcttggcattcatagtattgctccatacaagtcaaagggcatcgagagggcatcagaactttcagttggctggaacaacaaagtcaataatactggtgtaacagaagaacttgatcgaccatctggatcagggagttcagacgataatggatgttcttctcgtaaacgtgctagaaaagagggtcttggaggtggtggtttttttgatctaaacttgccagcagagtttgtagacagaaattgactttgaaggacaccttattatacgtacaggcgtacaggtctaacaacataaaattgctttgctttgctgcctttggaaggaaggaattaatctttttggatttcataccccatttgctttctcatatctttcttttagccagccatgtctctgctgagataaaagatatgtttccaaggtttcttattcctatgccatctacctttctgtttgaaatcctagcgctgtatatagatagccttggggcatttatttgctagtagttttatgtaaatggctaccttgaggacaactaggatgcttttattcctattttatggagttataggtggaggtaacttcactgatttttcttcaaag

SEQ ID NO: 10101 - protein, 580 aa, Glycine max
  peptide (1)..(580): Ceres Seq. ID no. 15176303
  misc_feature (223)..(326): Pfam Name: Pfam Description:  IBR domain
  misc_feature (2)..(579): NCBI GI NO: 18086414 NR Description: At2g16090/F7H1.11 [Arabidopsis thaliana]
  misc_feature (2)..(579): NCBI GI NO: 22325707 NR Description: expressed protein [Arabidopsis thaliana]
  misc_feature (1)..(580): NCBI GI NO: 7485315 NR Description: hypothetical protein F10M10
  misc_feature (1)..(580): NCBI GI NO: 18418437 NR Description: expressed protein [Arabidopsis thaliana]
  misc_feature (41)..(579): NCBI GI NO: 20330766 NR Description: Putative RING zinc finger protein
  misc_feature (223)..(527): NCBI GI NO: 25411698 NR Description: hypothetical protein At2g16090
  misc_feature (2)..(235): NCBI GI NO: 25411698 NR Description: hypothetical protein At2g16090
  misc_feature (8)..(519): NCBI GI NO: 15232251 NR Description: expressed protein [Arabidopsis thaliana]
  misc_feature (203)..(521): NCBI GI NO: 9294477 NR Description: RING finger protein-like [Arabidopsis thaliana]
  misc_feature (120)..(156): NCBI GI NO: 9294477 NR Description: RING finger protein-like [Arabidopsis thaliana]
MDVYASSDEDYHYDSDHEDSVEAYENDENYALLSSKGTTTKVITKESLLAAQKEDLRRVMDMLSVREQHARTLLIFHRWDVENLFEVLVDKGKSFLFAEAGVSVDEHRNSDSPVPPAFMCYICMEEVPSSKTTRMDCGHCFCNGCWIEHFIVKINEGQSKRIRCMEHKCNSICDDAVVRTLLSREHPHTAEKYERFLLESYIEDNKRVKWCPSTPHCGNAIRVEDDELCEVECSCGVQFCFSCLSEAHSPCSCLMWELWAKKCRDESETVNWITVHTKPCPKCHKPVEKNGGCNLVSCICGQAFCWLCGGATGREHTWSSIAGHSCGRYKEQEKTAERAKRDLYRYMHYHNRYKAHTDSFKIESKLKETIQGKIAISEEKDSTLRDYSWVNNGLSRLFRSRRVLSYSYAFAFYMFGDELFKDEMTDAQREIKQNLFEDQQQQLEANVEKLSKILEEPFETFSDDKVVEIRMQILNLSTIIDKLCQKMYECIENDLLGSLNLGIHSIAPYKSKGIERASELSVGWNNKVNNTGVTEELDRPSGSGSSDDNGCSSRKRARKEGLGGGGFFDLNLPAEFVDRN

SEQ ID NO: 10102 - protein, 521 aa, Glycine max
  peptide (1)..(521): Ceres Seq. ID no. 15176304
  misc_feature (164)..(267): Pfam Name: Pfam Description:  IBR domain
  misc_feature (1)..(520): NCBI GI NO: 18086414 NR Description: At2g16090/F7H1.11 [Arabidopsis thaliana]
  misc_feature (1)..(520): NCBI GI NO: 22325707 NR Description: expressed protein [Arabidopsis thaliana]
  misc_feature (1)..(521): NCBI GI NO: 7485315 NR Description: hypothetical protein F10M10
  misc_feature (1)..(521): NCBI GI NO: 18418437 NR Description: expressed protein [Arabidopsis thaliana]
  misc_feature (1)..(520): NCBI GI NO: 20330766 NR Description: Putative RING zinc finger protein
  misc_feature (164)..(468): NCBI GI NO: 25411698 NR Description: hypothetical protein At2g16090
  misc_feature (1)..(176): NCBI GI NO: 25411698 NR Description: hypothetical protein At2g16090
  misc_feature (1)..(460): NCBI GI NO: 15232251 NR Description: expressed protein [Arabidopsis thaliana]
  misc_feature (144)..(462): NCBI GI NO: 9294477 NR Description: RING finger protein-like [Arabidopsis thaliana]
  misc_feature (61)..(97): NCBI GI NO: 9294477 NR Description: RING finger protein-like [Arabidopsis thaliana]
MDMLSVREQHARTLLIFHRWDVENLFEVLVDKGKSFLFAEAGVSVDEHRNSDSPVPPAFMCYICMEEVPSSKTTRMDCGHCFCNGCWIEHFIVKINEGQSKRIRCMEHKCNSICDDAVVRTLLSREHPHTAEKYERFLLESYIEDNKRVKWCPSTPHCGNAIRVEDDELCEVECSCGVQFCFSCLSEAHSPCSCLMWELWAKKCRDESETVNWITVHTKPCPKCHKPVEKNGGCNLVSCICGQAFCWLCGGATGREHTWSSIAGHSCGRYKEQEKTAERAKRDLYRYMHYHNRYKAHTDSFKIESKLKETIQGKIAISEEKDSTLRDYSWVNNGLSRLFRSRRVLSYSYAFAFYMFGDELFKDEMTDAQREIKQNLFEDQQQQLEANVEKLSKILEEPFETFSDDKVVEIRMQILNLSTIIDKLCQKMYECIENDLLGSLNLGIHSIAPYKSKGIERASELSVGWNNKVNNTGVTEELDRPSGSGSSDDNGCSSRKRARKEGLGGGGFFDLNLPAEFVDRN

SEQ ID NO: 10103 - protein, 519 aa, Glycine max
  peptide (1)..(519): Ceres Seq. ID no. 15176305
  misc_feature (162)..(265): Pfam Name: Pfam Description:  IBR domain
  misc_feature (1)..(518): NCBI GI NO: 18086414 NR Description: At2g16090/F7H1.11 [Arabidopsis thaliana]
  misc_feature (1)..(518): NCBI GI NO: 22325707 NR Description: expressed protein [Arabidopsis thaliana]
  misc_feature (1)..(519): NCBI GI NO: 7485315 NR Description: hypothetical protein F10M10
  misc_feature (1)..(519): NCBI GI NO: 18418437 NR Description: expressed protein [Arabidopsis thaliana]
  misc_feature (1)..(518): NCBI GI NO: 20330766 NR Description: Putative RING zinc finger protein
  misc_feature (162)..(466): NCBI GI NO: 25411698 NR Description: hypothetical protein At2g16090
  misc_feature (1)..(174): NCBI GI NO: 25411698 NR Description: hypothetical protein At2g16090
  misc_feature (1)..(458): NCBI GI NO: 15232251 NR Description: expressed protein [Arabidopsis thaliana]
  misc_feature (142)..(460): NCBI GI NO: 9294477 NR Description: RING finger protein-like [Arabidopsis thaliana]
  misc_feature (59)..(95): NCBI GI NO: 9294477 NR Description: RING finger protein-like [Arabidopsis thaliana]
MLSVREQHARTLLIFHRWDVENLFEVLVDKGKSFLFAEAGVSVDEHRNSDSPVPPAFMCYICMEEVPSSKTTRMDCGHCFCNGCWIEHFIVKINEGQSKRIRCMEHKCNSICDDAVVRTLLSREHPHTAEKYERFLLESYIEDNKRVKWCPSTPHCGNAIRVEDDELCEVECSCGVQFCFSCLSEAHSPCSCLMWELWAKKCRDESETVNWITVHTKPCPKCHKPVEKNGGCNLVSCICGQAFCWLCGGATGREHTWSSIAGHSCGRYKEQEKTAERAKRDLYRYMHYHNRYKAHTDSFKIESKLKETIQGKIAISEEKDSTLRDYSWVNNGLSRLFRSRRVLSYSYAFAFYMFGDELFKDEMTDAQREIKQNLFEDQQQQLEANVEKLSKILEEPFETFSDDKVVEIRMQILNLSTIIDKLCQKMYECIENDLLGSLNLGIHSIAPYKSKGIERASELSVGWNNKVNNTGVTEELDRPSGSGSSDDNGCSSRKRARKEGLGGGGFFDLNLPAEFVDRN

SEQ ID NO: 10104 - DNA, 1358 bp, Glycine max
  misc_feature (1)..(1358): Ceres Seq. ID no. 15169114
agagttcagtagcaatggccgtggttgagtttgaacctcaacaactacgcctcttcatccccaacttcctctccctcgatgaatgcaaagaattggaattcatccataagagtagcagcacggtgggttacagacccaatgtcttctccaccactctctcccatctcattgctaccaactcttcccacttcatcattccttttatacccatcagagaaaggttgaaagacaagttagaggagtttttcaagtgtgagtatgagctcttcattgaattcactggtttaatcagttggagtagaggagcaagcattggatggcatagtgatgataacaggccctacctcaaacaacgccacttctcagcagtatgctatttgaatacttatggcaaggatttcagtggtggactctttcacttccaggatggtgagcccaagtcaattgtgccaaaagccggagatgttgtgatgtacacagctgatgaccgtaacattcattctgttgatgagataactgagggagaaaggctcacacttgctttatggttcagtcgtgatggctcccatgatgaggatatgaagctcatttctcttctttcacaacacctgctacatgagaacgtggctgattcatacctacctttgccagcatccagtaatatgtactggttttctaaggaccaagcttccaattatcaattcggttttaatatatcctgggctagactgcatgttcttggatacgacatatatatttctcaagacagtagctgtgagtctgatgtctttgaattactggtaaagccagtgcgtttagtgagggataatgagttgttagaccaggaattcgtcaatattatgcatgcacttcaggttgtccatttctattgttggaaaggatcagctttactgaacaacatgtcaaatatagactccagggtactaaaagtgacagaggtacagagagagaaaatcagtggtctgaattctgtacttttgaatgataatgattttgcatccaaagttttctgtaatatgccttcggaagaaaagggatgcatttgctttgactggtcagaagttctagctgcagttgctgcttgggaagattatgcgtcaaacttaagcaaacaaattcatttacagttgccttactggagaatgcatgagtctatatataatgtgcaattagagtagtatttgtgatcaacaattccaagaaaaagtaaccacctacaattgtgcttgggttaaaaatttggagaaaagcactgttgaaacaactaaaaagtagtttgtgaaggtttgctttgatagcattattcaatttaatgtgctttgggaaagttttaaggt

SEQ ID NO: 10105 - protein, 398 aa, Glycine max
  peptide (1)..(398): Ceres Seq. ID no. 15169115
  misc_feature (118)..(184): Pfam Name: II Pfam Description: 2OG-Fe
  misc_feature (68)..(396): NCBI GI NO: 15220642 NR Description: hypothetical protein [Arabidopsis thaliana]
SSVAMAVVEFEPQQLRLFIPNFLSLDECKELEFIHKSSSTVGYRPNVFSTTLSHLIATNSSHFIIPFIPIRERLKDKLEEFFKCEYELFIEFTGLISWSRGASIGWHSDDNRPYLKQRHFSAVCYLNTYGKDFSGGLFHFQDGEPKSIVPKAGDVVMYTADDRNIHSVDEITEGERLTLALWFSRDGSHDEDMKLISLLSQHLLHENVADSYLPLPASSNMYWFSKDQASNYQFGFNISWARLHVLGYDIYISQDSSCESDVFELLVKPVRLVRDNELLDQEFVNIMHALQVVHFYCWKGSALLNNMSNIDSRVLKVTEVQREKISGLNSVLLNDNDFASKVFCNMPSEEKGCICFDWSEVLAAVAAWEDYASNLSKQIHLQLPYWRMHESIYNVQLE

SEQ ID NO: 10106 - protein, 394 aa, Glycine max
  peptide (1)..(394): Ceres Seq. ID no. 15169116
  misc_feature (114)..(180): Pfam Name: II Pfam Description: 2OG-Fe
  misc_feature (64)..(392): NCBI GI NO: 15220642 NR Description: hypothetical protein [Arabidopsis thaliana]
MAVVEFEPQQLRLFIPNFLSLDECKELEFIHKSSSTVGYRPNVFSTTLSHLIATNSSHFIIPFIPIRERLKDKLEEFFKCEYELFIEFTGLISWSRGASIGWHSDDNRPYLKQRHFSAVCYLNTYGKDFSGGLFHFQDGEPKSIVPKAGDVVMYTADDRNIHSVDEITEGERLTLALWFSRDGSHDEDMKLISLLSQHLLHENVADSYLPLPASSNMYWFSKDQASNYQFGFNISWARLHVLGYDIYISQDSSCESDVFELLVKPVRLVRDNELLDQEFVNIMHALQVVHFYCWKGSALLNNMSNIDSRVLKVTEVQREKISGLNSVLLNDNDFASKVFCNMPSEEKGCICFDWSEVLAAVAAWEDYASNLSKQIHLQLPYWRMHESIYNVQLE

SEQ ID NO: 10107 - protein, 242 aa, Glycine max
  peptide (1)..(242): Ceres Seq. ID no. 15169117
  misc_feature (1)..(240): NCBI GI NO: 15220642 NR Description: hypothetical protein [Arabidopsis thaliana]
MYTADDRNIHSVDEITEGERLTLALWFSRDGSHDEDMKLISLLSQHLLHENVADSYLPLPASSNMYWFSKDQASNYQFGFNISWARLHVLGYDIYISQDSSCESDVFELLVKPVRLVRDNELLDQEFVNIMHALQVVHFYCWKGSALLNNMSNIDSRVLKVTEVQREKISGLNSVLLNDNDFASKVFCNMPSEEKGCICFDWSEVLAAVAAWEDYASNLSKQIHLQLPYWRMHESIYNVQLE

SEQ ID NO: 10108 - DNA, 1313 bp, Glycine max
  misc_feature (1)..(1313): Ceres Seq. ID no. 14315557
aattttttttgctcatcattttgtgctcatggtggtgaggtttaacccttcatgtctcaccctctctcataatcctcaccacactacatatttctctaagcaagtgacagttaggagcagttatgggaaacacatgaaaagtggtggccttggaagaaggcctcagatagtgtcttcagttttggggaacagtaacactgaaggggtgagtgtgtttgtggtgtctgacttgcacactgactatgctgagaatttgaagtgggtggagtgcttgtctaatgtgaagcacaagaatgatgtgcttcttgtggcaggtgatgtggctgagacatgttccatgtttgttgtgacaatgtctcttttgaaagagaggtttgagcatgtcttctatgttcctggaaaccatgacctttggtgccgtcgcgaggggcaaaattatgttgattctcttgaaaagctgaataaattgcttgatgcgtgtgagagaattggagtggagacaaatccaacggttatagatgaaataggaatcattcctttgttctcttggtaccatgagagctttgacaaagagaaggacataacaggctttcgcatcccgtctttggagatggcatgtaaagatttctatgcgtgtaagtggcccgagggactttcaaatggagatatgtcactggctttatattttgatgccatgaatgataaacaaatagatgtgataaaggagattcagatggcatgcgatcacatcattaccttttcacactttgttcccaggcaggaactttgtccagagaagaggatgttgttctatcccaagcttccaaaaataattggttcagactctcttgaagatcgaataaggtctattcatggtgctgagggaaggaaggatgcgtcgtcttgtcatgtgtttggtcatactcacttctgttgggatgctgttgttgatggtatcaggtatgtacaggcacccttagcttacccaagggaaaggaagagaagaatgaatggaggtgaaaattggctaccgttttgcctttatgctgacaacaaatttgctgatagactcaacccttgctattggtctgattattactctgccaaccccaggacaccccataatactaaacttgctccttgggtagccagattttataagcaaacagaaactgtggatgtatagtattcactattgactttattgagctggttttatttgttgataagacattcctatattgtgttgtcttttttacattaaatcaataaataacatgagtcattttgcaaggtgaaagttgcacaaacac

SEQ ID NO: 10109 - protein, 394 aa, Glycine max
  peptide (1)..(394): Ceres Seq. ID no. 14315558
  misc_feature (71)..(311): Pfam Name: Pfam Description:  Calcineurin-like phosphoesterase
  misc_feature (71)..(388): NCBI GI NO: 37535636 NR Description: unknown protein
  misc_feature (70)..(188): NCBI GI NO: 15609932 NR Description: hypothetical protein Rv2795c
  misc_feature (251)..(365): NCBI GI NO: 15609932 NR Description: hypothetical protein Rv2795c
  misc_feature (70)..(208): NCBI GI NO: 25028430 NR Description: Conserved hypothetical protein
  misc_feature (70)..(188): NCBI GI NO: 25029314 NR Description: conserved hypothetical protein
  misc_feature (69)..(347): NCBI GI NO: 18140054 NR Description: putative phosphoesterase [Myxococcus xanthus]
  misc_feature (71)..(188): NCBI GI NO: 29828291 NR Description: putative SimX4 homolog
  misc_feature (70)..(208): NCBI GI NO: 19553185 NR Description: hypothetical protein
  misc_feature (62)..(188): NCBI GI NO: 16224015 NR Description: Sim18 [Streptomyces antibioticus]
  misc_feature (70)..(188): NCBI GI NO: 19554103 NR Description: hypothetical protein
IFFAHHFVLMVVRFNPSCLTLSHNPHHTTYFSKQVTVRSSYGKHMKSGGLGRRPQIVSSVLGNSNTEGVSVFVVSDLHTDYAENLKWVECLSNVKHKNDVLLVAGDVAETCSMFVVTMSLLKERFEHVFYVPGNHDLWCRREGQNYVDSLEKLNKLLDACERIGVETNPTVIDEIGIIPLFSWYHESFDKEKDITGFRIPSLEMACKDFYACKWPEGLSNGDMSLALYFDAMNDKQIDVIKEIQMACDHIITFSHFVPRQELCPEKRMLFYPKLPKIIGSDSLEDRIRSIHGAEGRKDASSCHVFGHTHFCWDAVVDGIRYVQAPLAYPRERKRRMNGGENWLPFCLYADNKFADRLNPCYWSDYYSANPRTPHNTKLAPWVARFYKQTETVDV

SEQ ID NO: 10110 - protein, 385 aa, Glycine max
  peptide (1)..(385): Ceres Seq. ID no. 14315559
  misc_feature (62)..(302): Pfam Name: Pfam Description:  Calcineurin-like phosphoesterase
  misc_feature (62)..(379): NCBI GI NO: 37535636 NR Description: unknown protein
  misc_feature (61)..(179): NCBI GI NO: 15609932 NR Description: hypothetical protein Rv2795c
  misc_feature (242)..(356): NCBI GI NO: 15609932 NR Description: hypothetical protein Rv2795c
  misc_feature (61)..(199): NCBI GI NO: 25028430 NR Description: Conserved hypothetical protein
  misc_feature (61)..(179): NCBI GI NO: 25029314 NR Description: conserved hypothetical protein
  misc_feature (60)..(338): NCBI GI NO: 18140054 NR Description: putative phosphoesterase [Myxococcus xanthus]
  misc_feature (62)..(179): NCBI GI NO: 29828291 NR Description: putative SimX4 homolog
  misc_feature (61)..(199): NCBI GI NO: 19553185 NR Description: hypothetical protein
  misc_feature (53)..(179): NCBI GI NO: 16224015 NR Description: Sim18 [Streptomyces antibioticus]
  misc_feature (61)..(179): NCBI GI NO: 19554103 NR Description: hypothetical protein
MVVRFNPSCLTLSHNPHHTTYFSKQVTVRSSYGKHMKSGGLGRRPQIVSSVLGNSNTEGVSVFVVSDLHTDYAENLKWVECLSNVKHKNDVLLVAGDVAETCSMFVVTMSLLKERFEHVFYVPGNHDLWCRREGQNYVDSLEKLNKLLDACERIGVETNPTVIDEIGIIPLFSWYHESFDKEKDITGFRIPSLEMACKDFYACKWPEGLSNGDMSLALYFDAMNDKQIDVIKEIQMACDHIITFSHFVPRQELCPEKRMLFYPKLPKIIGSDSLEDRIRSIHGAEGRKDASSCHVFGHTHFCWDAVVDGIRYVQAPLAYPRERKRRMNGGENWLPFCLYADNKFADRLNPCYWSDYYSANPRTPHNTKLAPWVARFYKQTETVDV

SEQ ID NO: 10111 - protein, 350 aa, Glycine max
  peptide (1)..(350): Ceres Seq. ID no. 14315560
  misc_feature (27)..(267): Pfam Name: Pfam Description:  Calcineurin-like phosphoesterase
  misc_feature (27)..(344): NCBI GI NO: 37535636 NR Description: unknown protein
  misc_feature (26)..(144): NCBI GI NO: 15609932 NR Description: hypothetical protein Rv2795c
  misc_feature (207)..(321): NCBI GI NO: 15609932 NR Description: hypothetical protein Rv2795c
  misc_feature (26)..(164): NCBI GI NO: 25028430 NR Description: Conserved hypothetical protein
  misc_feature (26)..(144): NCBI GI NO: 25029314 NR Description: conserved hypothetical protein
  misc_feature (25)..(303): NCBI GI NO: 18140054 NR Description: putative phosphoesterase [Myxococcus xanthus]
  misc_feature (27)..(144): NCBI GI NO: 29828291 NR Description: putative SimX4 homolog
  misc_feature (26)..(164): NCBI GI NO: 19553185 NR Description: hypothetical protein
  misc_feature (18)..(144): NCBI GI NO: 16224015 NR Description: Sim18 [Streptomyces antibioticus]
  misc_feature (26)..(144): NCBI GI NO: 19554103 NR Description: hypothetical protein
MKSGGLGRRPQIVSSVLGNSNTEGVSVFVVSDLHTDYAENLKWVECLSNVKHKNDVLLVAGDVAETCSMFVVTMSLLKERFEHVFYVPGNHDLWCRREGQNYVDSLEKLNKLLDACERIGVETNPTVIDEIGIIPLFSWYHESFDKEKDITGFRIPSLEMACKDFYACKWPEGLSNGDMSLALYFDAMNDKQIDVIKEIQMACDHIITFSHFVPRQELCPEKRMLFYPKLPKIIGSDSLEDRIRSIHGAEGRKDASSCHVFGHTHFCWDAVVDGIRYVQAPLAYPRERKRRMNGGENWLPFCLYADNKFADRLNPCYWSDYYSANPRTPHNTKLAPWVARFYKQTETVDV

SEQ ID NO: 10112 - DNA, 614 bp, Glycine max
  misc_feature (1)..(614): Ceres Seq. ID no. 13594048
tgtctcaactctatcaaacttcaaagttcacacacacaaaagaatcagcatggctttcaatcaagagttagaagctgtaacccaagctttctcagggcatggagtggatgagaaatcattggtaacattactgggaaaatgggatcctctggagagagaatctttcaggaagaagacaccacatttgttcagtgaagatcatgaacgccattttcagaggtgggatgatcaatatgtccgtcttctcaagcatgaattcgtgcgttttaagaatgctgtggtgctttggtccatgcacccttgggaaagagatgcccgtttagtaaaagaggccctaaagaagggtccaaatgcatatggagtgctgattgaggtttcatgcactagatcctcagaagagctattgggagctaggaaggcataccattccctctttgaccactccattgaagaagatgttgcctctcacatccatggcattgaaagaaagctattggttgccctactaagtgcctatagatacgaaggaacaaaggttaaagatgacactgcaaaatcagaagccaaaatcctttccaatggcattaagaatgctcataagaagcctattaatg

SEQ ID NO: 10113 - protein, 204 aa, Glycine max
  peptide (1)..(204): Ceres Seq. ID no. 13594049
  misc_feature (101)..(168): Pfam Name: Pfam Description:  Annexin
  misc_feature (17)..(203): NCBI GI NO: 15224946 NR Description: annexin -related [Arabidopsis thaliana]
  misc_feature (28)..(199): NCBI GI NO: 7441511 NR Description: annexin 2 - upland cotton (fragment)
  misc_feature (21)..(197): NCBI GI NO: 21264397 NR Description: Annexin-like protein RJ4
  misc_feature (20)..(197): NCBI GI NO: 7484723 NR Description: fiber annexin - upland cotton
  misc_feature (20)..(197): NCBI GI NO: 2459926 NR Description: annexin [Lavatera thuringiaca]
  misc_feature (20)..(197): NCBI GI NO: 15214410 NR Description: annexin [Gossypium hirsutum]
  misc_feature (20)..(197): NCBI GI NO: 33357398 NR Description: Chain A, Annexin Gh1 From Cotton
  misc_feature (20)..(199): NCBI GI NO: 1429207 NR Description: annexin [Arabidopsis thaliana]
  misc_feature (20)..(199): NCBI GI NO: 15220216 NR Description: Ca2+-dependent membrane-binding protein annexin
  misc_feature (21)..(197): NCBI GI NO: 2467255 NR Description: annexin [Nicotiana tabacum]
VSTLSNFKVHTHKRISMAFNQELEAVTQAFSGHGVDEKSLVTLLGKWDPLERESFRKKTPHLFSEDHERHFQRWDDQYVRLLKHEFVRFKNAVVLWSMHPWERDARLVKEALKKGPNAYGVLIEVSCTRSSEELLGARKAYHSLFDHSIEEDVASHIHGIERKLLVALLSAYRYEGTKVKDDTAKSEAKILSNGIKNAHKKPIN

SEQ ID NO: 10114 - protein, 188 aa, Glycine max
  peptide (1)..(188): Ceres Seq. ID no. 13594050
  misc_feature (85)..(152): Pfam Name: Pfam Description:  Annexin
  misc_feature (1)..(187): NCBI GI NO: 15224946 NR Description: annexin -related [Arabidopsis thaliana]
  misc_feature (12)..(183): NCBI GI NO: 7441511 NR Description: annexin 2 - upland cotton (fragment)
  misc_feature (5)..(181): NCBI GI NO: 21264397 NR Description: Annexin-like protein RJ4
  misc_feature (4)..(181): NCBI GI NO: 7484723 NR Description: fiber annexin - upland cotton
  misc_feature (4)..(181): NCBI GI NO: 2459926 NR Description: annexin [Lavatera thuringiaca]
  misc_feature (4)..(181): NCBI GI NO: 15214410 NR Description: annexin [Gossypium hirsutum]
  misc_feature (4)..(181): NCBI GI NO: 33357398 NR Description: Chain A, Annexin Gh1 From Cotton
  misc_feature (4)..(183): NCBI GI NO: 1429207 NR Description: annexin [Arabidopsis thaliana]
  misc_feature (4)..(183): NCBI GI NO: 15220216 NR Description: Ca2+-dependent membrane-binding protein annexin
  misc_feature (5)..(181): NCBI GI NO: 2467255 NR Description: annexin [Nicotiana tabacum]
MAFNQELEAVTQAFSGHGVDEKSLVTLLGKWDPLERESFRKKTPHLFSEDHERHFQRWDDQYVRLLKHEFVRFKNAVVLWSMHPWERDARLVKEALKKGPNAYGVLIEVSCTRSSEELLGARKAYHSLFDHSIEEDVASHIHGIERKLLVALLSAYRYEGTKVKDDTAKSEAKILSNGIKNAHKKPIN

SEQ ID NO: 10115 - protein, 107 aa, Glycine max
  peptide (1)..(107): Ceres Seq. ID no. 13594051
  misc_feature (4)..(71): Pfam Name: Pfam Description:  Annexin
  misc_feature (1)..(106): NCBI GI NO: 15224946 NR Description: annexin -related [Arabidopsis thaliana]
  misc_feature (1)..(102): NCBI GI NO: 7441511 NR Description: annexin 2 - upland cotton (fragment)
  misc_feature (1)..(100): NCBI GI NO: 21264397 NR Description: Annexin-like protein RJ4
  misc_feature (1)..(100): NCBI GI NO: 7484723 NR Description: fiber annexin - upland cotton
  misc_feature (1)..(100): NCBI GI NO: 2459926 NR Description: annexin [Lavatera thuringiaca]
  misc_feature (1)..(100): NCBI GI NO: 15214410 NR Description: annexin [Gossypium hirsutum]
  misc_feature (1)..(100): NCBI GI NO: 33357398 NR Description: Chain A, Annexin Gh1 From Cotton
  misc_feature (1)..(102): NCBI GI NO: 1429207 NR Description: annexin [Arabidopsis thaliana]
  misc_feature (1)..(102): NCBI GI NO: 15220216 NR Description: Ca2+-dependent membrane-binding protein annexin
  misc_feature (1)..(100): NCBI GI NO: 2467255 NR Description: annexin [Nicotiana tabacum]
MHPWERDARLVKEALKKGPNAYGVLIEVSCTRSSEELLGARKAYHSLFDHSIEEDVASHIHGIERKLLVALLSAYRYEGTKVKDDTAKSEAKILSNGIKNAHKKPIN

SEQ ID NO: 10116 - DNA, 1120 bp, Glycine max
  misc_feature (1)..(1120): Ceres Seq. ID no. 14315553
gacgctttaagaccaaaagcaccgtctccgtctccgtctccacctcctgtccttcgttgcacttcgctttttccaaaaccaatcacatcagcatcactctcgtcgccgccgtcgtcgaccaccgcaagagccatcgcactccgccgtcatccgttagggcaaaaatgagtcgaggaagtggaggtggatacgatcgtcacatcactattttctcccctgaaggacgtctcttccaagtcgagtatgctttcaaggctgttaaggccgcaggaatcacctcaattggtgtccgaggaaaggattcgatttgtgttgttactcagaagaaggttccggataagcttttggacaacacaagtgttacacacctctttcccatcaccaagtaccttggtttattggctactggcatgacagctgatgctaggacactggtccaacaagcaagaaatgaagcagctgagtttcgctttacatatggatatgaaatgcctgtagatgtattagctaaatggattgcagacaaatcacaagtctatactcaacatgcttatatgagaccacttggagtagttgccatggttttgggtattgatgatgaatatggacctcagctttacaaatgtgatccagctggtcattactttggtcacaaggcaacaagtgctggattgaaggaccaagaggcaattaatttcttggaaaagaagatgaagaatgacccttcatttacatatgaggagacagttcagactgccatttctgccctgcaatcagttcttcaggaggattttaaggccactgagattgaggttggagtggtgcggaaagaaaatccagaattcagagttttaaccaccgaggaaattgatgagcacttgactgcaataagtgagcgtgactgagttcttgataaggatgtaatggttcaaactttctaatgctagagattaaattatgtacttgtttctggaatcattgaattgatttccttgtgatatttgagtagtaagtttatttaagaatgatgttgaagacggtatttgatttcctattacaagtttacttgggagcaattttatgtttctaccaatgaaatgaaatgaaaattttaaaaaat

SEQ ID NO: 10117 - protein, 300 aa, Glycine max
  peptide (1)..(300): Ceres Seq. ID no. 14315554
  misc_feature (86)..(274): Pfam Name: Pfam Description:  Proteasome A-type and B-type
  misc_feature (55)..(300): NCBI GI NO: 12229897 NR Description: Proteasome subunit alpha type 6
  misc_feature (55)..(300): NCBI GI NO: 12229948 NR Description: Proteasome subunit alpha type 6
  misc_feature (55)..(300): NCBI GI NO: 15238554 NR Description: 20S proteasome alpha subunit A1 (PAA1)
  misc_feature (55)..(300): NCBI GI NO: 20260140 NR Description: multicatalytic endopeptidase complex alpha subunit-like
  misc_feature (56)..(300): NCBI GI NO: 2511588 NR Description: multicatalytic endopeptidase complex
  misc_feature (55)..(300): NCBI GI NO: 3421070 NR Description: 20S proteasome subunit PAA1 [Arabidopsis thaliana]
  misc_feature (55)..(300): NCBI GI NO: 15224993 NR Description: 20S proteasome alpha subunit A2 (PAA2)
  misc_feature (55)..(300): NCBI GI NO: 12229922 NR Description: Proteasome subunit alpha type 6
  misc_feature (55)..(300): NCBI GI NO: 11967891 NR Description: maize 20S proteasome alpha subunit [Zea mays]
  misc_feature (55)..(300): NCBI GI NO: 6755198 NR Description: proteasome
RFKTKSTVSVSVSTSCPSLHFAFSKTNHISITLVAAVVDHRKSHRTPPSSVRAKMSRGSGGGYDRHITIFSPEGRLFQVEYAFKAVKAAGITSIGVRGKDSICVVTQKKVPDKLLDNTSVTHLFPITKYLGLLATGMTADARTLVQQARNEAAEFRFTYGYEMPVDVLAKWIADKSQVYTQHAYMRPLGVVAMVLGIDDEYGPQLYKCDPAGHYFGHKATSAGLKDQEAINFLEKKMKNDPSFTYEETVQTAISALQSVLQEDFKATEIEVGVVRKENPEFRVLTTEEIDEHLTAISERD

SEQ ID NO: 10118 - protein, 246 aa, Glycine max
  peptide (1)..(246): Ceres Seq. ID no. 14315555
  misc_feature (32)..(220): Pfam Name: Pfam Description:  Proteasome A-type and B-type
  misc_feature (1)..(246): NCBI GI NO: 12229897 NR Description: Proteasome subunit alpha type 6
  misc_feature (1)..(246): NCBI GI NO: 12229948 NR Description: Proteasome subunit alpha type 6
  misc_feature (1)..(246): NCBI GI NO: 15238554 NR Description: 20S proteasome alpha subunit A1 (PAA1)
  misc_feature (1)..(246): NCBI GI NO: 20260140 NR Description: multicatalytic endopeptidase complex alpha subunit-like
  misc_feature (2)..(246): NCBI GI NO: 2511588 NR Description: multicatalytic endopeptidase complex
  misc_feature (1)..(246): NCBI GI NO: 3421070 NR Description: 20S proteasome subunit PAA1 [Arabidopsis thaliana]
  misc_feature (1)..(246): NCBI GI NO: 15224993 NR Description: 20S proteasome alpha subunit A2 (PAA2)
  misc_feature (1)..(246): NCBI GI NO: 12229922 NR Description: Proteasome subunit alpha type 6
  misc_feature (1)..(246): NCBI GI NO: 11967891 NR Description: maize 20S proteasome alpha subunit [Zea mays]
  misc_feature (1)..(246): NCBI GI NO: 6755198 NR Description: proteasome
MSRGSGGGYDRHITIFSPEGRLFQVEYAFKAVKAAGITSIGVRGKDSICVVTQKKVPDKLLDNTSVTHLFPITKYLGLLATGMTADARTLVQQARNEAAEFRFTYGYEMPVDVLAKWIADKSQVYTQHAYMRPLGVVAMVLGIDDEYGPQLYKCDPAGHYFGHKATSAGLKDQEAINFLEKKMKNDPSFTYEETVQTAISALQSVLQEDFKATEIEVGVVRKENPEFRVLTTEEIDEHLTAISERD

SEQ ID NO: 10119 - protein, 164 aa, Glycine max
  peptide (1)..(164): Ceres Seq. ID no. 14315556
  misc_feature (1)..(138): Pfam Name: Pfam Description:  Proteasome A-type and B-type
  misc_feature (1)..(164): NCBI GI NO: 12229897 NR Description: Proteasome subunit alpha type 6
  misc_feature (1)..(164): NCBI GI NO: 12229948 NR Description: Proteasome subunit alpha type 6
  misc_feature (1)..(164): NCBI GI NO: 15238554 NR Description: 20S proteasome alpha subunit A1 (PAA1)
  misc_feature (1)..(164): NCBI GI NO: 20260140 NR Description: multicatalytic endopeptidase complex alpha subunit-like
  misc_feature (1)..(164): NCBI GI NO: 2511588 NR Description: multicatalytic endopeptidase complex
  misc_feature (1)..(164): NCBI GI NO: 3421070 NR Description: 20S proteasome subunit PAA1 [Arabidopsis thaliana]
  misc_feature (1)..(164): NCBI GI NO: 15224993 NR Description: 20S proteasome alpha subunit A2 (PAA2)
  misc_feature (1)..(164): NCBI GI NO: 12229922 NR Description: Proteasome subunit alpha type 6
  misc_feature (1)..(164): NCBI GI NO: 11967891 NR Description: maize 20S proteasome alpha subunit [Zea mays]
  misc_feature (1)..(164): NCBI GI NO: 6755198 NR Description: proteasome
MTADARTLVQQARNEAAEFRFTYGYEMPVDVLAKWIADKSQVYTQHAYMRPLGVVAMVLGIDDEYGPQLYKCDPAGHYFGHKATSAGLKDQEAINFLEKKMKNDPSFTYEETVQTAISALQSVLQEDFKATEIEVGVVRKENPEFRVLTTEEIDEHLTAISERD

SEQ ID NO: 10120 - DNA, 1401 bp, Glycine max
  misc_feature (1)..(1401): Ceres Seq. ID no. 13594128
aaaatcattaaaatcttttttttgcccttatgaacaccttcgtaaagaagactagaggcatcatctcccttgccaccagaggtttcgccagctcttccggagccatcaaagttaaacttctcccctccgatacttacaacctcgaaggcagaaagatccccactgaaactgaaaccaacgctgaggaacttatgcactacttcaaggaaatgtccatgatgagaagaatggaaatcgctctcgacaacctctacaaggctcgtgaaatcagaggtttctgccatttgtacgatggtcaggaatctattgccatgggtatcgaagctgccgttacttttgaagattgtttgatcactgcttacagagaccattgccaagcttactgcagaggtgattccgtccatcaaattatcgctgaattgatgggtaagagaaccggttcaaccaacggtaagggtggttctatgcatttctacagaaagaagaccaacttctatggtggtcacggtattgtcggtgctcaatgtgccctcggtactggtttgggcttcgctttgaagtaccaaaagaagcccaatgttgccattactatgtacggtgatggtgctgccaaccaaggacaattgttcgaagctgccaatatggctgctttgtggaagctccccgtcctctacgtctgtgaaaacaaccattacgccatgggtacctccaccgccagaggtgctgccagtactgaatactataaaagacttatgcccgtccccggtattagatttgctgccaacaacgtctttgccgttagagaagtcaccaaattcgccaaggaatactccatcaaagaaggtcccatctgcctcgaaatgcaaacatacagataccacggtcactctatgtctgatcccggtgttacttacagaaagaagcaagaaatcgatgaatacagaaagactaaggattgtatcacccttgtcaagcaactcatcattgacaataaggtcgccactgaggaggatcttaaggaagttgaaagagccatcaagaaggaagtcgatgaaaccgtcgaaaaggtccgtgaagatgcttatcccgatgccaaggatctcctcaaggatgtgtatattgaagaccccaaggaaccccaacacatcagaggtgttgaatacgacaagtctttcgcccccagaggattgccttaagagatttccgcatactagaaatagtagaaattttataagtctataaatgaatttaatgccttgattaaaaatttcttgttaaagaaatctggaaaaagggatttcaaaatgatttattaaatgcgtatttattttatatgacttatattcgctatatagcttggacagcatacatcatcctcatataaaaaattcctcttaactc

SEQ ID NO: 10121 - protein, 388 aa, Glycine max
  peptide (1)..(388): Ceres Seq. ID no. 13594129
  misc_feature (59)..(354): Pfam Name: Pfam Description:  Dehydrogenase E1 component
  misc_feature (15)..(365): NCBI GI NO: 1709453 NR Description: Pyruvate dehydrogenase E1 component alpha subunit
  misc_feature (15)..(365): NCBI GI NO: 12003246 NR Description: pyruvate dehydrogenase [Lycopersicon esculentum]
  misc_feature (2)..(366): NCBI GI NO: 15221692 NR Description: pyruvate dehydrogenase E1 alpha subunit
  misc_feature (48)..(365): NCBI GI NO: 28465343 NR Description: pyruvate dehydrogenase E1alpha subunit
  misc_feature (48)..(365): NCBI GI NO: 13430788 NR Description: putative pyruvate dehydrogenase e1 alpha subunit
  misc_feature (2)..(366): NCBI GI NO: 23306664 NR Description: pyruvate dehydrogenase E1a-like subunit IAR4
  misc_feature (48)..(365): NCBI GI NO: 15218940 NR Description: pyruvate dehydrogenase e1 alpha subunit -related
  misc_feature (48)..(365): NCBI GI NO: 2117533 NR Description: pyruvate dehydrogenase (lipoamide) (EC 1
  misc_feature (31)..(365): NCBI GI NO: 1709449 NR Description: Pyruvate dehydrogenase E1 component alpha subunit
  misc_feature (48)..(365): NCBI GI NO: 28465345 NR Description: pyruvate dehydrogenase E1 alpha subunit
MNTFVKKTRGIISLATRGFASSSGAIKVKLLPSDTYNLEGRKIPTETETNAEELMHYFKEMSMMRRMEIALDNLYKAREIRGFCHLYDGQESIAMGIEAAVTFEDCLITAYRDHCQAYCRGDSVHQIIAELMGKRTGSTNGKGGSMHFYRKKTNFYGGHGIVGAQCALGTGLGFALKYQKKPNVAITMYGDGAANQGQLFEAANMAALWKLPVLYVCENNHYAMGTSTARGAASTEYYKRLMPVPGIRFAANNVFAVREVTKFAKEYSIKEGPICLEMQTYRYHGHSMSDPGVTYRKKQEIDEYRKTKDCITLVKQLIIDNKVATEEDLKEVERAIKKEVDETVEKVREDAYPDAKDLLKDVYIEDPKEPQHIRGVEYDKSFAPRGLP

SEQ ID NO: 10122 - protein, 334 aa, Glycine max
  peptide (1)..(334): Ceres Seq. ID no. 13594130
  misc_feature (5)..(300): Pfam Name: Pfam Description:  Dehydrogenase E1 component
  misc_feature (1)..(311): NCBI GI NO: 1709453 NR Description: Pyruvate dehydrogenase E1 component alpha subunit
  misc_feature (1)..(311): NCBI GI NO: 12003246 NR Description: pyruvate dehydrogenase [Lycopersicon esculentum]
  misc_feature (1)..(312): NCBI GI NO: 15221692 NR Description: pyruvate dehydrogenase E1 alpha subunit
  misc_feature (1)..(311): NCBI GI NO: 28465343 NR Description: pyruvate dehydrogenase E1alpha subunit
  misc_feature (1)..(311): NCBI GI NO: 13430788 NR Description: putative pyruvate dehydrogenase e1 alpha subunit
  misc_feature (1)..(312): NCBI GI NO: 23306664 NR Description: pyruvate dehydrogenase E1a-like subunit IAR4
  misc_feature (1)..(311): NCBI GI NO: 15218940 NR Description: pyruvate dehydrogenase e1 alpha subunit -related
  misc_feature (1)..(311): NCBI GI NO: 2117533 NR Description: pyruvate dehydrogenase (lipoamide) (EC 1
  misc_feature (1)..(311): NCBI GI NO: 1709449 NR Description: Pyruvate dehydrogenase E1 component alpha subunit
  misc_feature (1)..(311): NCBI GI NO: 28465345 NR Description: pyruvate dehydrogenase E1 alpha subunit
MHYFKEMSMMRRMEIALDNLYKAREIRGFCHLYDGQESIAMGIEAAVTFEDCLITAYRDHCQAYCRGDSVHQIIAELMGKRTGSTNGKGGSMHFYRKKTNFYGGHGIVGAQCALGTGLGFALKYQKKPNVAITMYGDGAANQGQLFEAANMAALWKLPVLYVCENNHYAMGTSTARGAASTEYYKRLMPVPGIRFAANNVFAVREVTKFAKEYSIKEGPICLEMQTYRYHGHSMSDPGVTYRKKQEIDEYRKTKDCITLVKQLIIDNKVATEEDLKEVERAIKKEVDETVEKVREDAYPDAKDLLKDVYIEDPKEPQHIRGVEYDKSFAPRGLP

SEQ ID NO: 10123 - protein, 328 aa, Glycine max
  peptide (1)..(328): Ceres Seq. ID no. 13594131
  misc_feature (1)..(294): Pfam Name: Pfam Description:  Dehydrogenase E1 component
  misc_feature (1)..(305): NCBI GI NO: 1709453 NR Description: Pyruvate dehydrogenase E1 component alpha subunit
  misc_feature (1)..(305): NCBI GI NO: 12003246 NR Description: pyruvate dehydrogenase [Lycopersicon esculentum]
  misc_feature (1)..(306): NCBI GI NO: 15221692 NR Description: pyruvate dehydrogenase E1 alpha subunit
  misc_feature (1)..(305): NCBI GI NO: 28465343 NR Description: pyruvate dehydrogenase E1alpha subunit
  misc_feature (1)..(305): NCBI GI NO: 13430788 NR Description: putative pyruvate dehydrogenase e1 alpha subunit
  misc_feature (1)..(306): NCBI GI NO: 23306664 NR Description: pyruvate dehydrogenase E1a-like subunit IAR4
  misc_feature (1)..(305): NCBI GI NO: 15218940 NR Description: pyruvate dehydrogenase e1 alpha subunit -related
  misc_feature (1)..(305): NCBI GI NO: 2117533 NR Description: pyruvate dehydrogenase (lipoamide) (EC 1
  misc_feature (1)..(305): NCBI GI NO: 1709449 NR Description: Pyruvate dehydrogenase E1 component alpha subunit
  misc_feature (1)..(305): NCBI GI NO: 28465345 NR Description: pyruvate dehydrogenase E1 alpha subunit
MSMMRRMEIALDNLYKAREIRGFCHLYDGQESIAMGIEAAVTFEDCLITAYRDHCQAYCRGDSVHQIIAELMGKRTGSTNGKGGSMHFYRKKTNFYGGHGIVGAQCALGTGLGFALKYQKKPNVAITMYGDGAANQGQLFEAANMAALWKLPVLYVCENNHYAMGTSTARGAASTEYYKRLMPVPGIRFAANNVFAVREVTKFAKEYSIKEGPICLEMQTYRYHGHSMSDPGVTYRKKQEIDEYRKTKDCITLVKQLIIDNKVATEEDLKEVERAIKKEVDETVEKVREDAYPDAKDLLKDVYIEDPKEPQHIRGVEYDKSFAPRGLP

SEQ ID NO: 10124 - DNA, 1163 bp, Glycine max
  misc_feature (1)..(1163): Ceres Seq. ID no. 15169431
aaagtttaaaccctacagaaaaacgctacataaaccccgcaacaaacaaccaacccccaaacccctcactcttctcggcgtccatcggaaatttccaaggtaaaaagatgaatctgaagaacatgaagattccgaacgttccaggcggcggtgcgtcctctgcgctgctgaagcttgggcttcttggtggaattggtttatatgcagctgctaacagtctctacaacgttgaaggaggtcaccgagccattgttttcaaccgtctagttggtgtcaaagacaaggtctatcctgaaggaacacactttatgattccgtggtttgagaggcctgttatctatgatgtccgtgcacgaccccatctagttgagagtacatctggtagtcgtgatctacagatggtgaaaattggacttcgagttcttactcgccctttgcccaaccaattacctacggtttatcggacccttggagagaattataatgaaagggttttaccttcaatcatacatgaaactttgaaagccgtggttgcccagtacaatgccagccagcttattactcagcgagaggctgttagtcgggaaatccggaagattctaactgaaagggctgctaacttcaatattgcccttgatgatgtgtcaattactagtctgacttttggcaaggagtttactgctgcaattgaagctaagcaggtagctgcacaagaagctgagagggctaaatttgttgtggaaaaagctgagcaagacaagagaagtgctgtaattagagcacagggagaagcaaaaagtgcccaactgattgggcaagctattgccaacaatccagcttttatcacactgaggaagatagaagccgcaagggagattgcacatactatatcaaatgcggcaaacaaggtttacctgaattcagatgatctattgttgaatcttcaagagatgaaattggagccaggcagaaagtgagtgtgttagcctgtttgtttctttttggttttagcttgtaaactatcaatttcaggatcgattttcttgatatgtttttgcaaattcggatatagctggcttgattagacaactgagcggcaaccctttaaatctttgggaaaggattaattgagatccaaacgaatgcttcacattacttgaaac

SEQ ID NO: 10125 - protein, 324 aa, Glycine max
  peptide (1)..(324): Ceres Seq. ID no. 15169432
  misc_feature (73)..(264): Pfam Name: Pfam Description:  SPFH domain / Band 7 family
  misc_feature (36)..(324): NCBI GI NO: 12751303 NR Description: prohibitin 1-like protein [Brassica napus]
  misc_feature (38)..(324): NCBI GI NO: 15235317 NR Description: prohibitin-related protein [Arabidopsis thaliana]
  misc_feature (38)..(324): NCBI GI NO: 21593626 NR Description: prohibitin-like protein [Arabidopsis thaliana]
  misc_feature (42)..(321): NCBI GI NO: 15219569 NR Description: prohibitin 2 -related [Arabidopsis thaliana]
  misc_feature (36)..(317): NCBI GI NO: 34394832 NR Description: putative prohibitin
  misc_feature (36)..(320): NCBI GI NO: 15225374 NR Description: prohibitin -related [Arabidopsis thaliana]
  misc_feature (36)..(324): NCBI GI NO: 7716456 NR Description: prohibitin [Zea mays]
  misc_feature (37)..(319): NCBI GI NO: 7716462 NR Description: prohibitin [Zea mays]
  misc_feature (32)..(316): NCBI GI NO: 39597046 NR Description: Hypothetical protein CBG02605
  misc_feature (51)..(315): NCBI GI NO: 39589300 NR Description: Hypothetical protein CBG22042
SLNPTEKRYINPATNNQPPNPSLFSASIGNFQGKKMNLKNMKIPNVPGGGASSALLKLGLLGGIGLYAAANSLYNVEGGHRAIVFNRLVGVKDKVYPEGTHFMIPWFERPVIYDVRARPHLVESTSGSRDLQMVKIGLRVLTRPLPNQLPTVYRTLGENYNERVLPSIIHETLKAVVAQYNASQLITQREAVSREIRKILTERAANFNIALDDVSITSLTFGKEFTAAIEAKQVAAQEAERAKFVVEKAEQDKRSAVIRAQGEAKSAQLIGQAIANNPAFITLRKIEAAREIAHTISNAANKVYLNSDDLLLNLQEMKLEPGRK

SEQ ID NO: 10126 - protein, 289 aa, Glycine max
  peptide (1)..(289): Ceres Seq. ID no. 15169433
  misc_feature (38)..(229): Pfam Name: Pfam Description:  SPFH domain / Band 7 family
  misc_feature (1)..(289): NCBI GI NO: 12751303 NR Description: prohibitin 1-like protein [Brassica napus]
  misc_feature (3)..(289): NCBI GI NO: 15235317 NR Description: prohibitin-related protein [Arabidopsis thaliana]
  misc_feature (3)..(289): NCBI GI NO: 21593626 NR Description: prohibitin-like protein [Arabidopsis thaliana]
  misc_feature (7)..(286): NCBI GI NO: 15219569 NR Description: prohibitin 2 -related [Arabidopsis thaliana]
  misc_feature (1)..(282): NCBI GI NO: 34394832 NR Description: putative prohibitin
  misc_feature (1)..(285): NCBI GI NO: 15225374 NR Description: prohibitin -related [Arabidopsis thaliana]
  misc_feature (1)..(289): NCBI GI NO: 7716456 NR Description: prohibitin [Zea mays]
  misc_feature (2)..(284): NCBI GI NO: 7716462 NR Description: prohibitin [Zea mays]
  misc_feature (1)..(281): NCBI GI NO: 39597046 NR Description: Hypothetical protein CBG02605
  misc_feature (16)..(280): NCBI GI NO: 39589300 NR Description: Hypothetical protein CBG22042
MNLKNMKIPNVPGGGASSALLKLGLLGGIGLYAAANSLYNVEGGHRAIVFNRLVGVKDKVYPEGTHFMIPWFERPVIYDVRARPHLVESTSGSRDLQMVKIGLRVLTRPLPNQLPTVYRTLGENYNERVLPSIIHETLKAVVAQYNASQLITQREAVSREIRKILTERAANFNIALDDVSITSLTFGKEFTAAIEAKQVAAQEAERAKFVVEKAEQDKRSAVIRAQGEAKSAQLIGQAIANNPAFITLRKIEAAREIAHTISNAANKVYLNSDDLLLNLQEMKLEPGRK

SEQ ID NO: 10127 - protein, 284 aa, Glycine max
  peptide (1)..(284): Ceres Seq. ID no. 15169434
  misc_feature (33)..(224): Pfam Name: Pfam Description:  SPFH domain / Band 7 family
  misc_feature (1)..(284): NCBI GI NO: 12751303 NR Description: prohibitin 1-like protein [Brassica napus]
  misc_feature (1)..(284): NCBI GI NO: 15235317 NR Description: prohibitin-related protein [Arabidopsis thaliana]
  misc_feature (1)..(284): NCBI GI NO: 21593626 NR Description: prohibitin-like protein [Arabidopsis thaliana]
  misc_feature (2)..(281): NCBI GI NO: 15219569 NR Description: prohibitin 2 -related [Arabidopsis thaliana]
  misc_feature (1)..(277): NCBI GI NO: 34394832 NR Description: putative prohibitin
  misc_feature (1)..(280): NCBI GI NO: 15225374 NR Description: prohibitin -related [Arabidopsis thaliana]
  misc_feature (1)..(284): NCBI GI NO: 7716456 NR Description: prohibitin [Zea mays]
  misc_feature (1)..(279): NCBI GI NO: 7716462 NR Description: prohibitin [Zea mays]
  misc_feature (1)..(276): NCBI GI NO: 39597046 NR Description: Hypothetical protein CBG02605
  misc_feature (11)..(275): NCBI GI NO: 39589300 NR Description: Hypothetical protein CBG22042
MKIPNVPGGGASSALLKLGLLGGIGLYAAANSLYNVEGGHRAIVFNRLVGVKDKVYPEGTHFMIPWFERPVIYDVRARPHLVESTSGSRDLQMVKIGLRVLTRPLPNQLPTVYRTLGENYNERVLPSIIHETLKAVVAQYNASQLITQREAVSREIRKILTERAANFNIALDDVSITSLTFGKEFTAAIEAKQVAAQEAERAKFVVEKAEQDKRSAVIRAQGEAKSAQLIGQAIANNPAFITLRKIEAAREIAHTISNAANKVYLNSDDLLLNLQEMKLEPGRK

SEQ ID NO: 10128 - DNA, 1364 bp, Glycine max
  misc_feature (1)..(1364): Ceres Seq. ID no. 15224558
gtcagctacgtaggccccccccccatttttaattagaaaaggcgcagaaacagaaacagaaagaatggctggtcccggcaaatgcttcctcgtgacgggtcctccgggtgtgggaaaaaccactcttattatgaaagtattcgagtccctcaaagtcaatccatccctcaagcttcagggcttctacactcgggaaattaggcgcgccggccagagggttggttttgaagtggtcacactcgacggtcgcactgccccacttgcttccatcgacatttcaacgttcattttttcattccctcactctttagctccacaccataaacatctcaatttttagtttaccataattagtacttaggacccattatctggtgtttctctgtttggtaacttgtatttattgctcatgccacttgagggtctttattcatttttcaacaaaggtactcatgtgatagtaaatcctaaaggggcaggcaaaaaatagatgaaacgaactgaactgtaaaaggggtttaggcaaactgaactgaactgcaactgaattgaaccggactgttctaaataaacatcttatacaactctgcctatttgattaaatggtgtcatttgattgcattgactttggcagccccgagtctctcagatggcctaatgttggcaagtataaagttgatgttgcttccttcgagtcactagcacttcccgagttacaggttaaagaagacactgatctcttcatcattgacgaagttggtaagatggagttgttcagttcctcattcttccctgcagttctaagagttttggagtcaaatatcccagttttggcttccattccagttccaaaattcggcagagacatacctgaagttgcaaggttgcggaatcatgcaggggcaacttgttttacattgagcgttagtaacagagatgctgttagagaacagatacgctcacaattggaagatatgctgacaaaacactagtcattgcaagtttgtggtctgaattcataccgtgtaatgtagaataaattatgaatttatgatgggctaatactatttagtgagagaaaaaaaaagtgcaaatcttaatcgagccttaaataagttgataagctagttgagctttgaataccattagtagtatacatgacttatctgcatgatagtccttttgtaatgacttatctgtatgtctgtattatggacaatatcttctgcaggaaaaaaaaaaaaaaaaaaaaaaaaaaaaaaaaaaaaaaaaaaaaaaaaaaaaaaagaaaaaaaaaaaaaaaaaagatttcctgcaccccggggaatccactagttctaaagcgcccgcccccgcgggggagc

SEQ ID NO: 10129 - protein, 129 aa, Glycine max
  peptide (1)..(129): Ceres Seq. ID no. 15224559
  misc_feature (11)..(128): Pfam Name: Pfam Description:  Protein of unknown function, DUF265
  misc_feature (11)..(129): NCBI GI NO: 6063556 NR Description: similar to Aquifex aeolicus section 65 of 109 ofthe complete genome
  misc_feature (11)..(128): NCBI GI NO: 20503005 NR Description: Unknown protein
  misc_feature (12)..(112): NCBI GI NO: 14150100 NR Description: hypothetical protein MGC13186 [Homo sapiens]
  misc_feature (10)..(127): NCBI GI NO: 13385098 NR Description: RIKEN cDNA 2310079N02 [Mus musculus]
  misc_feature (21)..(127): NCBI GI NO: 12859618 NR Description: unnamed protein product [Mus musculus]
  misc_feature (20)..(118): NCBI GI NO: 34851911 NR Description: similar to RIKEN cDNA 2310079N02
  misc_feature (20)..(123): NCBI GI NO: 15642811 NR Description: conserved hypothetical protein
  misc_feature (20)..(119): NCBI GI NO: 31215040 NR Description: ENSANGP00000014191 [Anopheles gambiae]
  misc_feature (18)..(125): NCBI GI NO: 23049827 NR Description: COG1618: Predicted nucleotide kinase
  misc_feature (18)..(121): NCBI GI NO: 20092214 NR Description: conserved hypothetical protein
MVSFDCIDFGSPESLRWPNVGKYKVDVASFESLALPELQVKEDTDLFIIDEVGKMELFSSSFFPAVLRVLESNIPVLASIPVPKFGRDIPEVARLRNHAGATCFTLSVSNRDAVREQIRSQLEDMLTKH

SEQ ID NO: 10130 - protein, 91 aa, Glycine max
  peptide (1)..(91): Ceres Seq. ID no. 15224560
  misc_feature (13)..(73): NCBI GI NO: 6063556 NR Description: similar to Aquifex aeolicus section 65 of 109 ofthe complete genome
  misc_feature (45)..(73): NCBI GI NO: 20503005 NR Description: Unknown protein
  misc_feature (10)..(71): NCBI GI NO: 14150100 NR Description: hypothetical protein MGC13186 [Homo sapiens]
  misc_feature (10)..(69): NCBI GI NO: 13385098 NR Description: RIKEN cDNA 2310079N02 [Mus musculus]
  misc_feature (10)..(69): NCBI GI NO: 12859618 NR Description: unnamed protein product [Mus musculus]
  misc_feature (10)..(69): NCBI GI NO: 34851911 NR Description: similar to RIKEN cDNA 2310079N02
  misc_feature (9)..(71): NCBI GI NO: 15642811 NR Description: conserved hypothetical protein
  misc_feature (9)..(69): NCBI GI NO: 31215040 NR Description: ENSANGP00000014191 [Anopheles gambiae]
  misc_feature (10)..(69): NCBI GI NO: 23049827 NR Description: COG1618: Predicted nucleotide kinase
  misc_feature (1)..(69): NCBI GI NO: 20092214 NR Description: conserved hypothetical protein
MAGPGKCFLVTGPPGVGKTTLIMKVFESLKVNPSLKLQGFYTREIRRAGQRVGFEVVTLDGRTAPLASIDISTFIFSFPHSLAPHHKHLNF

SEQ ID NO: 10131 - protein, 75 aa, Glycine max
  peptide (1)..(75): Ceres Seq. ID no. 15224561
  misc_feature (1)..(74): Pfam Name: Pfam Description:  Protein of unknown function, DUF265
  misc_feature (1)..(75): NCBI GI NO: 6063556 NR Description: similar to Aquifex aeolicus section 65 of 109 ofthe complete genome
  misc_feature (1)..(74): NCBI GI NO: 20503005 NR Description: Unknown protein
  misc_feature (1)..(58): NCBI GI NO: 14150100 NR Description: hypothetical protein MGC13186 [Homo sapiens]
  misc_feature (1)..(73): NCBI GI NO: 13385098 NR Description: RIKEN cDNA 2310079N02 [Mus musculus]
  misc_feature (1)..(73): NCBI GI NO: 12859618 NR Description: unnamed protein product [Mus musculus]
  misc_feature (1)..(64): NCBI GI NO: 34851911 NR Description: similar to RIKEN cDNA 2310079N02
  misc_feature (1)..(69): NCBI GI NO: 15642811 NR Description: conserved hypothetical protein
  misc_feature (1)..(65): NCBI GI NO: 31215040 NR Description: ENSANGP00000014191 [Anopheles gambiae]
  misc_feature (1)..(71): NCBI GI NO: 23049827 NR Description: COG1618: Predicted nucleotide kinase
  misc_feature (1)..(67): NCBI GI NO: 20092214 NR Description: conserved hypothetical protein
MELFSSSFFPAVLRVLESNIPVLASIPVPKFGRDIPEVARLRNHAGATCFTLSVSNRDAVREQIRSQLEDMLTKH

SEQ ID NO: 10132 - DNA, 1407 bp, Glycine max
  misc_feature (1)..(1407): Ceres Seq. ID no. 14308679
gagaagaaacgagagcgagagagagaaagaaatggcgaccaacattgggatcatggatgcggcttacttcgtcggcagatctgagattctttcttggatcaactcaactctgcaactcaatctctccaaagtcgaagaggcttgttccggcgccgttcattgtcagcttctcgatgccgctcatccagggatcgtgcctatgcacaaggtcaatttcgacgccaagagcgagtacgagatgattcagaactacaaggtccttcaagatgtcttcaacaaactcaaaatcaccaagcacatcgaggtcagcaagctggtgaaaggaaggccactggataacctcgagttcatgcaatggatgaaacgatactgcgattctgtcgattccggccttcagtacaattataatcctctggagaggagagaggtttgcaaaggaggaagagaaacgagcaagaaatctgcaaactcccaagcctcaaccaagggttctactgcacagagacctcattcttctcataatgctcgaagaaatgaggtttctaatgcaaaccctacaaatcaggctgcaaaggttgcgagagcagcaccttctgctggaaaccctgctcctgtgtatgaagaaaagataacagagttgaagttgtccattgatagccttgagaaggaacgagatttctacttcgcaaagctgagagatattgagatactgtgccagactcctgagatagaacactcaccgattgttgcggcaatacagaagatattatatgctacagatgacaatggaatggctgtggtcgaagctcaagctatgatttctgttggtcgtaaggaaatagagggattaagccccattgctgaggtttcggaggagaagagcagttcagaaactcataagagaaagaatattgccaatattgattttgatgttgctggcctcgcaacgttgtctcccagacagaggctttctgatgtttcagatgttcattgtagcgagtcacctcttatgacttgttagggaggaggaaggatcaccttctgttgttaattcagttagcaacatgttaaaaccgttttggtcacagtaattcctgttacaagtgtgaattgacagggttattcataatggttaggggttttagggagactattctgttatcaagtatcaagtatcgggtatcgggtatcagcccagaaaaatgtagccagatatattttgcctttagaatttgcttgttgtctcaacaatgtttctgaatccagtcatgtaatttctggctagtgctttgagcaacactatttcattttcagcatttttttcatttattatgtgatgatcaaattgtttacaattcagggaaaattacatatcggaatttgtaattaatttctgaattcggtctt

SEQ ID NO: 10133 - protein, 339 aa, Glycine max
  peptide (1)..(339): Ceres Seq. ID no. 14308680
  misc_feature (25)..(125): Pfam Name: CH Pfam Description: Calponin homology
  misc_feature (11)..(339): NCBI GI NO: 15240262 NR Description: expressed protein [Arabidopsis thaliana]
  misc_feature (12)..(336): NCBI GI NO: 37535740 NR Description: putative microtubule-associated protein
  misc_feature (11)..(296): NCBI GI NO: 32815913 NR Description: At3g47690 [Arabidopsis thaliana]
  misc_feature (11)..(297): NCBI GI NO: 15241860 NR Description: microtubule-associated protein EB1-related protein
  misc_feature (12)..(274): NCBI GI NO: 38344911 NR Description: OSJNBb0079B02.14
  misc_feature (13)..(281): NCBI GI NO: 29124955 NR Description: microtubule-associated protein EB1
  misc_feature (11)..(170): NCBI GI NO: 26450360 NR Description: putative microtubule-associated protein EB1
  misc_feature (8)..(261): NCBI GI NO: 30851559 NR Description: Unknown (protein for IMAGE:5715929) [Mus musculus]
  misc_feature (24)..(271): NCBI GI NO: 38512258 NR Description: Microtubule-associated protein RP/EB family member1
  misc_feature (24)..(261): NCBI GI NO: 6912494 NR Description: microtubule-associated protein
RRNESEREKEMATNIGIMDAAYFVGRSEILSWINSTLQLNLSKVEEACSGAVHCQLLDAAHPGIVPMHKVNFDAKSEYEMIQNYKVLQDVFNKLKITKHIEVSKLVKGRPLDNLEFMQWMKRYCDSVDSGLQYNYNPLERREVCKGGRETSKKSANSQASTKGSTAQRPHSSHNARRNEVSNANPTNQAAKVARAAPSAGNPAPVYEEKITELKLSIDSLEKERDFYFAKLRDIEILCQTPEIEHSPIVAAIQKILYATDDNGMAVVEAQAMISVGRKEIEGLSPIAEVSEEKSSSETHKRKNIANIDFDVAGLATLSPRQRLSDVSDVHCSESPLMTC

SEQ ID NO: 10134 - protein, 329 aa, Glycine max
  peptide (1)..(329): Ceres Seq. ID no. 14308681
  misc_feature (15)..(115): Pfam Name: CH Pfam Description: Calponin homology
  misc_feature (1)..(329): NCBI GI NO: 15240262 NR Description: expressed protein [Arabidopsis thaliana]
  misc_feature (2)..(326): NCBI GI NO: 37535740 NR Description: putative microtubule-associated protein
  misc_feature (1)..(286): NCBI GI NO: 32815913 NR Description: At3g47690 [Arabidopsis thaliana]
  misc_feature (1)..(287): NCBI GI NO: 15241860 NR Description: microtubule-associated protein EB1-related protein
  misc_feature (2)..(264): NCBI GI NO: 38344911 NR Description: OSJNBb0079B02.14
  misc_feature (3)..(271): NCBI GI NO: 29124955 NR Description: microtubule-associated protein EB1
  misc_feature (1)..(160): NCBI GI NO: 26450360 NR Description: putative microtubule-associated protein EB1
  misc_feature (1)..(251): NCBI GI NO: 30851559 NR Description: Unknown (protein for IMAGE:5715929) [Mus musculus]
  misc_feature (14)..(261): NCBI GI NO: 38512258 NR Description: Microtubule-associated protein RP/EB family member1
  misc_feature (14)..(251): NCBI GI NO: 6912494 NR Description: microtubule-associated protein
MATNIGIMDAAYFVGRSEILSWINSTLQLNLSKVEEACSGAVHCQLLDAAHPGIVPMHKVNFDAKSEYEMIQNYKVLQDVFNKLKITKHIEVSKLVKGRPLDNLEFMQWMKRYCDSVDSGLQYNYNPLERREVCKGGRETSKKSANSQASTKGSTAQRPHSSHNARRNEVSNANPTNQAAKVARAAPSAGNPAPVYEEKITELKLSIDSLEKERDFYFAKLRDIEILCQTPEIEHSPIVAAIQKILYATDDNGMAVVEAQAMISVGRKEIEGLSPIAEVSEEKSSSETHKRKNIANIDFDVAGLATLSPRQRLSDVSDVHCSESPLMTC

SEQ ID NO: 10135 - protein, 322 aa, Glycine max
  peptide (1)..(322): Ceres Seq. ID no. 14308682
  misc_feature (8)..(108): Pfam Name: CH Pfam Description: Calponin homology
  misc_feature (1)..(322): NCBI GI NO: 15240262 NR Description: expressed protein [Arabidopsis thaliana]
  misc_feature (1)..(319): NCBI GI NO: 37535740 NR Description: putative microtubule-associated protein
  misc_feature (1)..(279): NCBI GI NO: 32815913 NR Description: At3g47690 [Arabidopsis thaliana]
  misc_feature (1)..(280): NCBI GI NO: 15241860 NR Description: microtubule-associated protein EB1-related protein
  misc_feature (1)..(257): NCBI GI NO: 38344911 NR Description: OSJNBb0079B02.14
  misc_feature (1)..(264): NCBI GI NO: 29124955 NR Description: microtubule-associated protein EB1
  misc_feature (1)..(153): NCBI GI NO: 26450360 NR Description: putative microtubule-associated protein EB1
  misc_feature (1)..(244): NCBI GI NO: 30851559 NR Description: Unknown (protein for IMAGE:5715929) [Mus musculus]
  misc_feature (7)..(254): NCBI GI NO: 38512258 NR Description: Microtubule-associated protein RP/EB family member1
  misc_feature (7)..(244): NCBI GI NO: 6912494 NR Description: microtubule-associated protein
MDAAYFVGRSEILSWINSTLQLNLSKVEEACSGAVHCQLLDAAHPGIVPMHKVNFDAKSEYEMIQNYKVLQDVFNKLKITKHIEVSKLVKGRPLDNLEFMQWMKRYCDSVDSGLQYNYNPLERREVCKGGRETSKKSANSQASTKGSTAQRPHSSHNARRNEVSNANPTNQAAKVARAAPSAGNPAPVYEEKITELKLSIDSLEKERDFYFAKLRDIEILCQTPEIEHSPIVAAIQKILYATDDNGMAVVEAQAMISVGRKEIEGLSPIAEVSEEKSSSETHKRKNIANIDFDVAGLATLSPRQRLSDVSDVHCSESPLMTC

SEQ ID NO: 10136 - DNA, 1390 bp, Glycine max
  misc_feature (1)..(1390): Ceres Seq. ID no. 14312324
aactccaacacgccctccaagcataaaatttgcaggattagacatttccagcaacacttgaagttgtcaatcaatggccatgaagccctcaacttccacaagtgggtctggcaagaagattagaaagccttatactattaccaaatctagggagagctggtctgaggaagagcacgacaagtttctcgaagctcttcaactatttgacagagattggaagaaaattgaagattttgttggttcaaaatcagttattcagattagaagtcatgcccagaagtacttcttgaaagttcaaaagagcgggacagtagcacatgtgcctcctcctcggcctaagcgcaaagcttctcatccttatccacaaaaggcatccaaaaatgttttgttgccaatgccagcttccatggtttatgtttcttccactagtacccttccaccagggtatgtcacatgggatgaaaattccttgctcatgaattctggatccaacaaatcagtgccttgtaaggatgagctcgccaatcttcttggaaatgaagctgatattggatcaaaggggataacacgaattgaccacagcagtcttagtggtgttgggaactctactagaaatctgcctgctactgagatgccaaaacaagggaaacaggctcaggttattcatggtttgccagattttgctgatgtttacagcttcattggaagtgtttttgatccagacacagaaggccatgtccagaagctgaaggaaatggatcctataaattttgaaactgttttgttgttaatgaaaaacctcactgtcaatttgtctagtcctgactttgagcccgttagggaggtcatgtcatcatacgatgtccatacaaaaacagtaggagttaccgcaggaattgacgtcaagaagcagacaaatgatctatcatgtcaaacagcttgacaaccattaattgaacttattatcaaatttggatggaagaccgaggttttgcccaaccagcagcattagcaatgcattcacattaactcgttgtgaaacttgaaaatgcaaccaaaccatcagcctatgtaaccacaaccaggagagtttgttttaatggaagtgctagcaaagccaaaaatatattcatcgggtaattctaaggtgcacaaggttttgtagtattgcagtgattctagtacttatttatggaatgtggttttcaagtagacacatgggtctaactgtaagataagtttgatggctcaggtgtattaattggagaggtggggggctagtcatagtagcttatatcaatgtggcctaactttcaatgtaaatcataaagagcatcataacaggaagtggtcccaatttctaattctacttacttttttttttagcatc

SEQ ID NO: 10137 - protein, 289 aa, Glycine max
  peptide (1)..(289): Ceres Seq. ID no. 14312325
  misc_feature (26)..(71): Pfam Name: Pfam Description:  Myb-like DNA-binding domain
  misc_feature (5)..(285): NCBI GI NO: 30680926 NR Description: myb family transcription factor
  misc_feature (6)..(261): NCBI GI NO: 14596213 NR Description: putative protein [Arabidopsis thaliana]
  misc_feature (6)..(261): NCBI GI NO: 18414039 NR Description: myb family transcription factor
  misc_feature (6)..(261): NCBI GI NO: 11357907 NR Description: hypothetical protein F9G14
  misc_feature (1)..(276): NCBI GI NO: 30696225 NR Description: myb family transcription factor
  misc_feature (1)..(276): NCBI GI NO: 30696221 NR Description: myb family transcription factor
  misc_feature (1)..(253): NCBI GI NO: 8953721 NR Description: contains similarity to MYB-related DNA-bindingprotein~gene_id:F6N7
  misc_feature (1)..(262): NCBI GI NO: 15234118 NR Description: myb family transcription factor
  misc_feature (14)..(263): NCBI GI NO: 15223419 NR Description: myb family transcription factor
  misc_feature (14)..(263): NCBI GI NO: 25517982 NR Description: F22L4.6 protein - Arabidopsis thaliana
MAMKPSTSTSGSGKKIRKPYTITKSRESWSEEEHDKFLEALQLFDRDWKKIEDFVGSKSVIQIRSHAQKYFLKVQKSGTVAHVPPPRPKRKASHPYPQKASKNVLLPMPASMVYVSSTSTLPPGYVTWDENSLLMNSGSNKSVPCKDELANLLGNEADIGSKGITRIDHSSLSGVGNSTRNLPATEMPKQGKQAQVIHGLPDFADVYSFIGSVFDPDTEGHVQKLKEMDPINFETVLLLMKNLTVNLSSPDFEPVREVMSSYDVHTKTVGVTAGIDVKKQTNDLSCQTA

SEQ ID NO: 10138 - protein, 287 aa, Glycine max
  peptide (1)..(287): Ceres Seq. ID no. 14312326
  misc_feature (24)..(69): Pfam Name: Pfam Description:  Myb-like DNA-binding domain
  misc_feature (3)..(283): NCBI GI NO: 30680926 NR Description: myb family transcription factor
  misc_feature (4)..(259): NCBI GI NO: 14596213 NR Description: putative protein [Arabidopsis thaliana]
  misc_feature (4)..(259): NCBI GI NO: 18414039 NR Description: myb family transcription factor
  misc_feature (4)..(259): NCBI GI NO: 11357907 NR Description: hypothetical protein F9G14
  misc_feature (1)..(274): NCBI GI NO: 30696225 NR Description: myb family transcription factor
  misc_feature (1)..(274): NCBI GI NO: 30696221 NR Description: myb family transcription factor
  misc_feature (1)..(251): NCBI GI NO: 8953721 NR Description: contains similarity to MYB-related DNA-bindingprotein~gene_id:F6N7
  misc_feature (1)..(260): NCBI GI NO: 15234118 NR Description: myb family transcription factor
  misc_feature (12)..(261): NCBI GI NO: 15223419 NR Description: myb family transcription factor
  misc_feature (12)..(261): NCBI GI NO: 25517982 NR Description: F22L4.6 protein - Arabidopsis thaliana
MKPSTSTSGSGKKIRKPYTITKSRESWSEEEHDKFLEALQLFDRDWKKIEDFVGSKSVIQIRSHAQKYFLKVQKSGTVAHVPPPRPKRKASHPYPQKASKNVLLPMPASMVYVSSTSTLPPGYVTWDENSLLMNSGSNKSVPCKDELANLLGNEADIGSKGITRIDHSSLSGVGNSTRNLPATEMPKQGKQAQVIHGLPDFADVYSFIGSVFDPDTEGHVQKLKEMDPINFETVLLLMKNLTVNLSSPDFEPVREVMSSYDVHTKTVGVTAGIDVKKQTNDLSCQTA

SEQ ID NO: 10139 - protein, 182 aa, Glycine max
  peptide (1)..(182): Ceres Seq. ID no. 14312327
  misc_feature (1)..(178): NCBI GI NO: 30680926 NR Description: myb family transcription factor
  misc_feature (1)..(154): NCBI GI NO: 14596213 NR Description: putative protein [Arabidopsis thaliana]
  misc_feature (1)..(154): NCBI GI NO: 18414039 NR Description: myb family transcription factor
  misc_feature (1)..(154): NCBI GI NO: 11357907 NR Description: hypothetical protein F9G14
  misc_feature (1)..(169): NCBI GI NO: 30696225 NR Description: myb family transcription factor
  misc_feature (1)..(169): NCBI GI NO: 30696221 NR Description: myb family transcription factor
  misc_feature (1)..(146): NCBI GI NO: 8953721 NR Description: contains similarity to MYB-related DNA-bindingprotein~gene_id:F6N7
  misc_feature (1)..(155): NCBI GI NO: 15234118 NR Description: myb family transcription factor
  misc_feature (1)..(156): NCBI GI NO: 15223419 NR Description: myb family transcription factor
  misc_feature (1)..(156): NCBI GI NO: 25517982 NR Description: F22L4.6 protein - Arabidopsis thaliana
MPASMVYVSSTSTLPPGYVTWDENSLLMNSGSNKSVPCKDELANLLGNEADIGSKGITRIDHSSLSGVGNSTRNLPATEMPKQGKQAQVIHGLPDFADVYSFIGSVFDPDTEGHVQKLKEMDPINFETVLLLMKNLTVNLSSPDFEPVREVMSSYDVHTKTVGVTAGIDVKKQTNDLSCQTA

SEQ ID NO: 10140 - DNA, 1358 bp, Glycine max
  misc_feature (1)..(1358): Ceres Seq. ID no. 14308331
gaatgaacactttactcatcgctttgtcagttatagggcaagcagctgccgaccggctgctggtggcttcatacggaaatgaaactcatgctggcgccatccagacgctcgaagtactgcctagcacaagcgcaaattctagccatgcgatgaaagttacccaagagaaccacgagtgtggaactttgcctacatggttggatgcgtcccttggcctggataggatagtctgtctagacgaatcagctgccaatgctagtctcacaatgttgagccttggtgatgacggcagcctccaaaaggtgtccaataccagtgtgctgggaggagcagtatcctcggcgtcctacaataacaaatccgcattagcccttgctcactacggacccgagccagccatatcactgtttactatcgatggggaaaacaaattttcgtctttgcaaaacatcaccttccaggcgcctgagcaaatccatcaagcggtcgtcgatcctacggggcaatacatgatattccccagtctcggtgcagatacagtccacgtctattgcatcgatcctgtcagccacttgctcacagagcatgcgccactcaaatccaagcaaggatacggtccgcgacatgcagttttctggacaggttccaattctacaaagacgtacctttttgtagtccatgagaagagcaacaaaatcactagttacgaagtttgttatctggagcagggtggcctagcttttaccgaagtcgacgaggtcagcacatacggcaatcaaaccgtcccaccagcgacgttcgcttcggagatgacgctctcgcctgataacaagttcttgatcgcagcaaaccgtaacggcacagttttcaaagcagagaattcggacccaaccaacagcactcaagttccaagtgattcacttgtgacgttcaaaccgtcagccgacgggaagctatcgtttgtccagcttgcaaaatcagggggatggtaccctcgccacttcagtatgaaccagaatggatcgttgattgcggtcgcaaatcaactcagcaaaaacgtcgacatctatgcccgtaacctagaaactggaatcatcgaagacagcaaagcggtggcaagagctaataatctcgggcccggcgatttgatgttcgtgcagtgggtggggcaacaatagatcatgattgaaattctattcaaagctcaagcagatgagcagtagacctgatatttagcgggttactccacccatgttctatatggagatttctcaaccctatttttgtgcatagcatggcggaattttgtattgtagcatagcatcaaggagtgttagctgaagatacccagttttcct

SEQ ID NO: 10141 - protein, 391 aa, Glycine max
  peptide (1)..(391): Ceres Seq. ID no. 14308332
  misc_feature (1)..(388): NCBI GI NO: 32413899 NR Description: hypothetical protein [Neurospora crassa]
  misc_feature (1)..(382): NCBI GI NO: 40745788 NR Description: hypothetical protein AN2112.2
  misc_feature (6)..(363): NCBI GI NO: 32415862 NR Description: predicted protein [Neurospora crassa]
  misc_feature (96)..(287): NCBI GI NO: 23102319 NR Description: hypothetical protein [Azotobacter vinelandii]
  misc_feature (267)..(363): NCBI GI NO: 23102319 NR Description: hypothetical protein [Azotobacter vinelandii]
  misc_feature (63)..(287): NCBI GI NO: 26988746 NR Description: conserved hypothetical protein
  misc_feature (264)..(386): NCBI GI NO: 26988746 NR Description: conserved hypothetical protein
  misc_feature (96)..(284): NCBI GI NO: 32039414 NR Description: hypothetical protein
  misc_feature (305)..(385): NCBI GI NO: 32039414 NR Description: hypothetical protein
  misc_feature (96)..(284): NCBI GI NO: 15599399 NR Description: conserved hypothetical protein
MNTLLIALSVIGQAAADRLLVASYGNETHAGAIQTLEVLPSTSANSSHAMKVTQENHECGTLPTWLDASLGLDRIVCLDESAANASLTMLSLGDDGSLQKVSNTSVLGGAVSSASYNNKSALALAHYGPEPAISLFTIDGENKFSSLQNITFQAPEQIHQAVVDPTGQYMIFPSLGADTVHVYCIDPVSHLLTEHAPLKSKQGYGPRHAVFWTGSNSTKTYLFVVHEKSNKITSYEVCYLEQGGLAFTEVDEVSTYGNQTVPPATFASEMTLSPDNKFLIAANRNGTVFKAENSDPTNSTQVPSDSLVTFKPSADGKLSFVQLAKSGGWYPRHFSMNQNGSLIAVANQLSKNVDIYARNLETGIIEDSKAVARANNLGPGDLMFVQWVGQQ

SEQ ID NO: 10142 - protein, 342 aa, Glycine max
  peptide (1)..(342): Ceres Seq. ID no. 14308333
  misc_feature (1)..(339): NCBI GI NO: 32413899 NR Description: hypothetical protein [Neurospora crassa]
  misc_feature (1)..(333): NCBI GI NO: 40745788 NR Description: hypothetical protein AN2112.2
  misc_feature (1)..(314): NCBI GI NO: 32415862 NR Description: predicted protein [Neurospora crassa]
  misc_feature (47)..(238): NCBI GI NO: 23102319 NR Description: hypothetical protein [Azotobacter vinelandii]
  misc_feature (218)..(314): NCBI GI NO: 23102319 NR Description: hypothetical protein [Azotobacter vinelandii]
  misc_feature (14)..(238): NCBI GI NO: 26988746 NR Description: conserved hypothetical protein
  misc_feature (215)..(337): NCBI GI NO: 26988746 NR Description: conserved hypothetical protein
  misc_feature (47)..(235): NCBI GI NO: 32039414 NR Description: hypothetical protein
  misc_feature (256)..(336): NCBI GI NO: 32039414 NR Description: hypothetical protein
  misc_feature (47)..(235): NCBI GI NO: 15599399 NR Description: conserved hypothetical protein
MKVTQENHECGTLPTWLDASLGLDRIVCLDESAANASLTMLSLGDDGSLQKVSNTSVLGGAVSSASYNNKSALALAHYGPEPAISLFTIDGENKFSSLQNITFQAPEQIHQAVVDPTGQYMIFPSLGADTVHVYCIDPVSHLLTEHAPLKSKQGYGPRHAVFWTGSNSTKTYLFVVHEKSNKITSYEVCYLEQGGLAFTEVDEVSTYGNQTVPPATFASEMTLSPDNKFLIAANRNGTVFKAENSDPTNSTQVPSDSLVTFKPSADGKLSFVQLAKSGGWYPRHFSMNQNGSLIAVANQLSKNVDIYARNLETGIIEDSKAVARANNLGPGDLMFVQWVGQQ

SEQ ID NO: 10143 - protein, 303 aa, Glycine max
  peptide (1)..(303): Ceres Seq. ID no. 14308334
  misc_feature (1)..(300): NCBI GI NO: 32413899 NR Description: hypothetical protein [Neurospora crassa]
  misc_feature (1)..(294): NCBI GI NO: 40745788 NR Description: hypothetical protein AN2112.2
  misc_feature (1)..(275): NCBI GI NO: 32415862 NR Description: predicted protein [Neurospora crassa]
  misc_feature (8)..(199): NCBI GI NO: 23102319 NR Description: hypothetical protein [Azotobacter vinelandii]
  misc_feature (179)..(275): NCBI GI NO: 23102319 NR Description: hypothetical protein [Azotobacter vinelandii]
  misc_feature (1)..(199): NCBI GI NO: 26988746 NR Description: conserved hypothetical protein
  misc_feature (176)..(298): NCBI GI NO: 26988746 NR Description: conserved hypothetical protein
  misc_feature (8)..(196): NCBI GI NO: 32039414 NR Description: hypothetical protein
  misc_feature (217)..(297): NCBI GI NO: 32039414 NR Description: hypothetical protein
  misc_feature (8)..(196): NCBI GI NO: 15599399 NR Description: conserved hypothetical protein
MLSLGDDGSLQKVSNTSVLGGAVSSASYNNKSALALAHYGPEPAISLFTIDGENKFSSLQNITFQAPEQIHQAVVDPTGQYMIFPSLGADTVHVYCIDPVSHLLTEHAPLKSKQGYGPRHAVFWTGSNSTKTYLFVVHEKSNKITSYEVCYLEQGGLAFTEVDEVSTYGNQTVPPATFASEMTLSPDNKFLIAANRNGTVFKAENSDPTNSTQVPSDSLVTFKPSADGKLSFVQLAKSGGWYPRHFSMNQNGSLIAVANQLSKNVDIYARNLETGIIEDSKAVARANNLGPGDLMFVQWVGQQ

SEQ ID NO: 10144 - DNA, 1710 bp, Glycine max
  misc_feature (1)..(1710): Ceres Seq. ID no. 13594068
aaatttggacagtgaggccattttggtcatggtgtgatcattttctctgctcttattcttaatgaggcttatatccaagtttggccggttgcatattgcacaaggcgtctataaaagtaacatcactgaaatcattgtcaaattgacactgcttttctctaaaaggacttcaaagttctgttagatatacagtgttattctgctttcgatcgctctattattcatttgctaagaccttagagaagacagaggatgggtaccctgcttccagatgaaaaatcagagaatccaaatgctttggaacaacttcaacaccaaaaagatgtggatgcaggcgctctctttgtcctcaaatccaaaggttcttggatgcattgtgggtaccacttgacaacttcgatcgtggcaccacctcttctaagtcttccttatgcattcaccttccttggatggacggctgggatcttaagcttagtgattggagctttggtcactttctattcatacaatttaatatctagggttcttgaacaccacgctcagatgggtatgcgtcagctacgctttagagacatggctcgcgatattttaggtccagggtggggtcgttattttgtcggcccaattcaattcgcagtctgttatggtgctgtagtagcttgtactctcttgggaggacaatgcatgaaggcaatttacttgctgtcaaatccaaacgggaccatgaagctttacgagtttgtaattatatttggatgcttcatgctgattttggctcaaatcccatctttccactctttgaggcacattaatctagtgtccttggttctgtgcttagcctatagtgccggtgctactattggttccatttacattggagactcatcaaaaggaccagaaaaggattattctttgaaaggtgattcagtgaatcgcttatttggaatcttcaatgcaattgctatcattgccacgacttatggaaatggaatcattccagaaattcaggcaacattagcaccacccgtaaaagggaagatgctcaagggactatgtgtttgttatcttgttcttatagttaccttctttagtgtatctgtatccggttattgggcatttggtaatgaatcagaaggcctcatcttaagcaacttcgtggacaatgggaagcctctggtgcccaagtggttcatttacatgaccaacattttcactataacacaattatctgcggttggtgtggtttatttgcaaccaacaaatgaagtgctagagcaaacatttggagacccaaaaagccccgagttctccaaacgcaatgtaatccctagagtgatatctcggtcattagctattgctatttcaaccactatagcagccatgcttccattttttggagacataaactctcttataggagcttttggctttatcccacttgacttcatcttgccaatggttttctacaatttgacatttaagccatctaagcgaagccctgttttctggttgaatgtgataattgttgtggctttctccgcattgggagctatagcagcagttgcagcagttaggcagatagttcttgatgctaaaaattattaattatttgctaatgtatgatcatgttggaccatccaatgaagttttgttgttctatgtatcatggttcatactctagtagtttaaaaccaatcattgagttatttc

SEQ ID NO: 10145 - protein, 450 aa, Glycine max
  peptide (1)..(450): Ceres Seq. ID no. 13594069
  misc_feature (7)..(450): NCBI GI NO: 34908432 NR Description: OJ1402_H07.15
  misc_feature (66)..(450): NCBI GI NO: 6579208 NR Description: T23G18.9 [Arabidopsis thaliana]
  misc_feature (128)..(450): NCBI GI NO: 30680565 NR Description: amino acid transporter family
  misc_feature (24)..(450): NCBI GI NO: 18422139 NR Description: amino acid transporter family
  misc_feature (24)..(450): NCBI GI NO: 21554158 NR Description: amino acid permease-like protein
  misc_feature (116)..(450): NCBI GI NO: 34912776 NR Description: P0407B12.25
  misc_feature (37)..(114): NCBI GI NO: 34912776 NR Description: P0407B12.25
  misc_feature (66)..(450): NCBI GI NO: 10177364 NR Description: amino acid permease-like protein
  misc_feature (68)..(450): NCBI GI NO: 37534336 NR Description: putative proline transporter 1
  misc_feature (35)..(450): NCBI GI NO: 21069018 NR Description: betaine/proline transporter [Avicennia marina]
MGTLLPDEKSENPNALEQLQHQKDVDAGALFVLKSKGSWMHCGYHLTTSIVAPPLLSLPYAFTFLGWTAGILSLVIGALVTFYSYNLISRVLEHHAQMGMRQLRFRDMARDILGPGWGRYFVGPIQFAVCYGAVVACTLLGGQCMKAIYLLSNPNGTMKLYEFVIIFGCFMLILAQIPSFHSLRHINLVSLVLCLAYSAGATIGSIYIGDSSKGPEKDYSLKGDSVNRLFGIFNAIAIIATTYGNGIIPEIQATLAPPVKGKMLKGLCVCYLVLIVTFFSVSVSGYWAFGNESEGLILSNFVDNGKPLVPKWFIYMTNIFTITQLSAVGVVYLQPTNEVLEQTFGDPKSPEFSKRNVIPRVISRSLAIAISTTIAAMLPFFGDINSLIGAFGFIPLDFILPMVFYNLTFKPSKRSPVFWLNVIIVVAFSALGAIAAVAAVRQIVLDAKNY

SEQ ID NO: 10146 - protein, 411 aa, Glycine max
  peptide (1)..(411): Ceres Seq. ID no. 13594070
  misc_feature (1)..(411): NCBI GI NO: 34908432 NR Description: OJ1402_H07.15
  misc_feature (27)..(411): NCBI GI NO: 6579208 NR Description: T23G18.9 [Arabidopsis thaliana]
  misc_feature (89)..(411): NCBI GI NO: 30680565 NR Description: amino acid transporter family
  misc_feature (1)..(411): NCBI GI NO: 18422139 NR Description: amino acid transporter family
  misc_feature (1)..(411): NCBI GI NO: 21554158 NR Description: amino acid permease-like protein
  misc_feature (77)..(411): NCBI GI NO: 34912776 NR Description: P0407B12.25
  misc_feature (1)..(75): NCBI GI NO: 34912776 NR Description: P0407B12.25
  misc_feature (27)..(411): NCBI GI NO: 10177364 NR Description: amino acid permease-like protein
  misc_feature (29)..(411): NCBI GI NO: 37534336 NR Description: putative proline transporter 1
  misc_feature (1)..(411): NCBI GI NO: 21069018 NR Description: betaine/proline transporter [Avicennia marina]
MHCGYHLTTSIVAPPLLSLPYAFTFLGWTAGILSLVIGALVTFYSYNLISRVLEHHAQMGMRQLRFRDMARDILGPGWGRYFVGPIQFAVCYGAVVACTLLGGQCMKAIYLLSNPNGTMKLYEFVIIFGCFMLILAQIPSFHSLRHINLVSLVLCLAYSAGATIGSIYIGDSSKGPEKDYSLKGDSVNRLFGIFNAIAIIATTYGNGIIPEIQATLAPPVKGKMLKGLCVCYLVLIVTFFSVSVSGYWAFGNESEGLILSNFVDNGKPLVPKWFIYMTNIFTITQLSAVGVVYLQPTNEVLEQTFGDPKSPEFSKRNVIPRVISRSLAIAISTTIAAMLPFFGDINSLIGAFGFIPLDFILPMVFYNLTFKPSKRSPVFWLNVIIVVAFSALGAIAAVAAVRQIVLDAKNY

SEQ ID NO: 10147 - protein, 353 aa, Glycine max
  peptide (1)..(353): Ceres Seq. ID no. 13594071
  misc_feature (1)..(353): NCBI GI NO: 34908432 NR Description: OJ1402_H07.15
  misc_feature (1)..(353): NCBI GI NO: 6579208 NR Description: T23G18.9 [Arabidopsis thaliana]
  misc_feature (31)..(353): NCBI GI NO: 30680565 NR Description: amino acid transporter family
  misc_feature (1)..(353): NCBI GI NO: 18422139 NR Description: amino acid transporter family
  misc_feature (1)..(353): NCBI GI NO: 21554158 NR Description: amino acid permease-like protein
  misc_feature (19)..(353): NCBI GI NO: 34912776 NR Description: P0407B12.25
  misc_feature (1)..(17): NCBI GI NO: 34912776 NR Description: P0407B12.25
  misc_feature (1)..(353): NCBI GI NO: 10177364 NR Description: amino acid permease-like protein
  misc_feature (1)..(353): NCBI GI NO: 37534336 NR Description: putative proline transporter 1
  misc_feature (1)..(353): NCBI GI NO: 21069018 NR Description: betaine/proline transporter [Avicennia marina]
MGMRQLRFRDMARDILGPGWGRYFVGPIQFAVCYGAVVACTLLGGQCMKAIYLLSNPNGTMKLYEFVIIFGCFMLILAQIPSFHSLRHINLVSLVLCLAYSAGATIGSIYIGDSSKGPEKDYSLKGDSVNRLFGIFNAIAIIATTYGNGIIPEIQATLAPPVKGKMLKGLCVCYLVLIVTFFSVSVSGYWAFGNESEGLILSNFVDNGKPLVPKWFIYMTNIFTITQLSAVGVVYLQPTNEVLEQTFGDPKSPEFSKRNVIPRVISRSLAIAISTTIAAMLPFFGDINSLIGAFGFIPLDFILPMVFYNLTFKPSKRSPVFWLNVIIVVAFSALGAIAAVAAVRQIVLDAKNY

SEQ ID NO: 10148 - DNA, 1463 bp, Glycine max
  misc_feature (1)..(1463): Ceres Seq. ID no. 15178751
tgctttttggggatttcagtttttgagttgagtgtgtgtagtttctgttcccttgttttatttatttggtttctcgttggcaactcaagggaggtacagcaaccaccatatatcaggtagtattatcagagtgtgtgtgactcctaaggaatttgcagagccccctactcatatttctctcttctctctcccttttgctccctctggtttctgtttgcgtggggagcaaaaagctcctgcttttctctctgatatatactatatgtaagacacgagctagaggtgaaaaaaggaactattctagttgttgaggggaggacgtatgtatgttcccatttggtgttgaggaacaaacacaagtgaaggtcttcttgactatacatacaccaagtgtacgtttggatatatagagaaaaaatgggtagttgtggaagagaaggagcagtgaggcaatatgtaagatcgaaggttcctcgtttaaggtggactcctgagctgcaccgttgctttgttcatgctattgatagccttggaggtcatcataaggctactccgaagcttgttcttcagttgatggatgttaaagggctcacaatttcacacgtcaagagccatcttcagatgtacagaagcatgaggggtgacttgggcagacaaggtaggacaccctcccaacataggaaccaatcttttgaggagcatgatgatggatgtgttgatgaagtgaatgatgttggtgttgagtactcatgttcgaaacccctgggaagagaatctgattccttcttcgggcacagtaatctccctccaaaaagagcaagaatcgagatgagaagttccatctcagagaggctgcagcaatgcagccaaagattatgtgatgttgtagttccaaatccgtactgtttttatgattatctgaaacagaagaagcccatgcccatggctgatcagcattcccctccttttccagattttcccaacctcacttcattcaaatctcctgatcaacaatctgatttccttcaggttactaaattaaatgaaggaaaaagcacttcacagactattaatgtacttgtgaacactactactgagacagctaatgtagaaattgaagatgaattgtcattgtcgctcacattgccaaatccttcacctcagagaagttcaggcagtgagataagtgaggcaatctcatcctgccatgggtttagcaacaactacaaggactgctctagttcatccactcacactgtcaaagaaagaattaatttggacctatctttagccctatgtggcaattgatttgatgctcttttgtaaaatcaatctactataggtataattccacggtagctctttttcattctctaacagttttggttattttcttgtttctactaccgggtacctttccaatcaccatgtcaattaattctaagctaagctattttgagtag

SEQ ID NO: 10149 - protein, 296 aa, Glycine max
  peptide (1)..(296): Ceres Seq. ID no. 15178752
  misc_feature (20)..(71): Pfam Name: Pfam Description:  Myb-like DNA-binding domain
  misc_feature (2)..(118): NCBI GI NO: 21741799 NR Description: OSJNBa0005N02.4
  misc_feature (203)..(296): NCBI GI NO: 21741799 NR Description: OSJNBa0005N02.4
  misc_feature (1)..(123): NCBI GI NO: 7527727 NR Description: T5E21.10 [Arabidopsis thaliana]
  misc_feature (2)..(81): NCBI GI NO: 23306130 NR Description: Unknown protein
  misc_feature (1)..(103): NCBI GI NO: 22329556 NR Description: myb family transcription factor
  misc_feature (10)..(125): NCBI GI NO: 30793861 NR Description: unknown protein [Arabidopsis thaliana]
  misc_feature (10)..(125): NCBI GI NO: 18395292 NR Description: hypothetical protein [Arabidopsis thaliana]
  misc_feature (10)..(97): NCBI GI NO: 26450454 NR Description: unknown protein [Arabidopsis thaliana]
  misc_feature (8)..(81): NCBI GI NO: 4588000 NR Description: hypothetical cytoskeletal protein
  misc_feature (8)..(81): NCBI GI NO: 15225671 NR Description: myb family transcription factor
MGSCGREGAVRQYVRSKVPRLRWTPELHRCFVHAIDSLGGHHKATPKLVLQLMDVKGLTISHVKSHLQMYRSMRGDLGRQGRTPSQHRNQSFEEHDDGCVDEVNDVGVEYSCSKPLGRESDSFFGHSNLPPKRARIEMRSSISERLQQCSQRLCDVVVPNPYCFYDYLKQKKPMPMADQHSPPFPDFPNLTSFKSPDQQSDFLQVTKLNEGKSTSQTINVLVNTTTETANVEIEDELSLSLTLPNPSPQRSSGSEISEAISSCHGFSNNYKDCSSSSTHTVKERINLDLSLALCGN

SEQ ID NO: 10150 - protein, 244 aa, Glycine max
  peptide (1)..(244): Ceres Seq. ID no. 15178753
  misc_feature (1)..(66): NCBI GI NO: 21741799 NR Description: OSJNBa0005N02.4
  misc_feature (151)..(244): NCBI GI NO: 21741799 NR Description: OSJNBa0005N02.4
  misc_feature (1)..(71): NCBI GI NO: 7527727 NR Description: T5E21.10 [Arabidopsis thaliana]
  misc_feature (1)..(29): NCBI GI NO: 23306130 NR Description: Unknown protein
  misc_feature (1)..(51): NCBI GI NO: 22329556 NR Description: myb family transcription factor
  misc_feature (1)..(73): NCBI GI NO: 30793861 NR Description: unknown protein [Arabidopsis thaliana]
  misc_feature (1)..(73): NCBI GI NO: 18395292 NR Description: hypothetical protein [Arabidopsis thaliana]
  misc_feature (1)..(45): NCBI GI NO: 26450454 NR Description: unknown protein [Arabidopsis thaliana]
  misc_feature (1)..(29): NCBI GI NO: 4588000 NR Description: hypothetical cytoskeletal protein
  misc_feature (1)..(29): NCBI GI NO: 15225671 NR Description: myb family transcription factor
MDVKGLTISHVKSHLQMYRSMRGDLGRQGRTPSQHRNQSFEEHDDGCVDEVNDVGVEYSCSKPLGRESDSFFGHSNLPPKRARIEMRSSISERLQQCSQRLCDVVVPNPYCFYDYLKQKKPMPMADQHSPPFPDFPNLTSFKSPDQQSDFLQVTKLNEGKSTSQTINVLVNTTTETANVEIEDELSLSLTLPNPSPQRSSGSEISEAISSCHGFSNNYKDCSSSSTHTVKERINLDLSLALCGN

SEQ ID NO: 10151 - protein, 228 aa, Glycine max
  peptide (1)..(228): Ceres Seq. ID no. 15178754
  misc_feature (1)..(50): NCBI GI NO: 21741799 NR Description: OSJNBa0005N02.4
  misc_feature (135)..(228): NCBI GI NO: 21741799 NR Description: OSJNBa0005N02.4
  misc_feature (1)..(55): NCBI GI NO: 7527727 NR Description: T5E21.10 [Arabidopsis thaliana]
  misc_feature (1)..(13): NCBI GI NO: 23306130 NR Description: Unknown protein
  misc_feature (1)..(35): NCBI GI NO: 22329556 NR Description: myb family transcription factor
  misc_feature (1)..(57): NCBI GI NO: 30793861 NR Description: unknown protein [Arabidopsis thaliana]
  misc_feature (1)..(57): NCBI GI NO: 18395292 NR Description: hypothetical protein [Arabidopsis thaliana]
  misc_feature (1)..(29): NCBI GI NO: 26450454 NR Description: unknown protein [Arabidopsis thaliana]
  misc_feature (1)..(13): NCBI GI NO: 4588000 NR Description: hypothetical cytoskeletal protein
  misc_feature (1)..(13): NCBI GI NO: 15225671 NR Description: myb family transcription factor
MYRSMRGDLGRQGRTPSQHRNQSFEEHDDGCVDEVNDVGVEYSCSKPLGRESDSFFGHSNLPPKRARIEMRSSISERLQQCSQRLCDVVVPNPYCFYDYLKQKKPMPMADQHSPPFPDFPNLTSFKSPDQQSDFLQVTKLNEGKSTSQTINVLVNTTTETANVEIEDELSLSLTLPNPSPQRSSGSEISEAISSCHGFSNNYKDCSSSSTHTVKERINLDLSLALCGN

SEQ ID NO: 10152 - DNA, 1191 bp, Glycine max
  misc_feature (1)..(1191): Ceres Seq. ID no. 15225313
  misc_feature (13)..(13): n is a, c, t, g, unknown, or other
  misc_feature (12)..(12): n is a, c, t, g, unknown, or other
  misc_feature (14)..(14): n is a, c, t, g, unknown, or other
accggggccccnnncgagtcagctacgtaggccccccccccccactttttctttggcagcttagccttcctattttggaaaccctcttcactgctctcccaccttttttgtgtgtatgtgtatgagcttctcttctactctattcactgcactcttattaataaatatcagtgcttggaaagcagaagagaagatccatagctaagatagatctcgagatgggtcgtggcaagattgagataaagttgattgagaaccccaccaacaggcaagtcacctactccaagcgaaggaatggtatcttcaagaaagctcatgaactcagtgttctctgtgatgccaaggtttcactcatcatgttctctaaaaacaacaagatgcatgaatacattagccctggcctcacgacaaaaaagatcattgatcagtatcagaagactttgggggatattgatctgtggcattctcactatgagaaaatgcttgaaaacttgaagaagctgaaagatattaacaataagctcaggagacagatcaggcataggataggtgagggcttggacatggacgacatgagcttccagcaactgcgcactcttgaagaagatatggtttcatccatagggaaaatacgcgaacgaaagtttcacgtgatcaaaactcggactgatacctgtaggaaaaaggttaaaagcctgaagcagatgaatggaaatctgctgcttgaacttgaaaagtgtgtgatccatccacaatttcttttgcacgatgaaggagacgaggaatcagcagcagcagcagcagcagcagcagttgcactggccaacggtgcctccaccctgtatgcattctgtcatcagcaccattctcatctgaaccttttctcccaccattctaatggagaagagcaaccctttaaaactgatcatgaccttcgccttgcttgatccagtgcaacaattaactagcaataatgtaaattaactagctagccagcactaagcacttgttatttatgctttaatttgtattaattggacctgttaaacccaactttgcttgcaacctctctagtttctatccaggtagagaattagctaagcttatatagtgtttggcaagagcgtgctatgaaaaacagaaagactgtactttatttgttattataagtttacattgagtgattatgtt

SEQ ID NO: 10153 - protein, 242 aa, Glycine max
  peptide (1)..(242): Ceres Seq. ID no. 15225314
  misc_feature (71)..(172): Pfam Name: Pfam Description:  K-box region
  misc_feature (1)..(242): NCBI GI NO: 22775408 NR Description: MADS-box protein [Malus x domestica]
  misc_feature (1)..(227): NCBI GI NO: 4218169 NR Description: MADs-box protein, GDEF1
  misc_feature (1)..(242): NCBI GI NO: 16973294 NR Description: B-type MADS box protein [Malus x domestica]
  misc_feature (1)..(241): NCBI GI NO: 10835358 NR Description: PTD protein
  misc_feature (1)..(241): NCBI GI NO: 34921973 NR Description: APETALA3 [Populus tomentosa]
  misc_feature (1)..(241): NCBI GI NO: 28883608 NR Description: APETALA3 [Populus tomentosa]
  misc_feature (1)..(228): NCBI GI NO: 15216293 NR Description: MADS-box protein [Rosa rugosa]
  misc_feature (4)..(221): NCBI GI NO: 542029 NR Description: MADS box protein TDR6 - tomato (fragment)
  misc_feature (4)..(221): NCBI GI NO: 19386 NR Description: TDR6 [Lycopersicon esculentum]
  misc_feature (4)..(221): NCBI GI NO: 24967132 NR Description: TDR6 transcription factor
MGRGKIEIKLIENPTNRQVTYSKRRNGIFKKAHELSVLCDAKVSLIMFSKNNKMHEYISPGLTTKKIIDQYQKTLGDIDLWHSHYEKMLENLKKLKDINNKLRRQIRHRIGEGLDMDDMSFQQLRTLEEDMVSSIGKIRERKFHVIKTRTDTCRKKVKSLKQMNGNLLLELEKCVIHPQFLLHDEGDEESAAAAAAAAVALANGASTLYAFCHQHHSHLNLFSHHSNGEEQPFKTDHDLRLA

SEQ ID NO: 10154 - protein, 196 aa, Glycine max
  peptide (1)..(196): Ceres Seq. ID no. 15225315
  misc_feature (25)..(126): Pfam Name: Pfam Description:  K-box region
  misc_feature (1)..(196): NCBI GI NO: 22775408 NR Description: MADS-box protein [Malus x domestica]
  misc_feature (1)..(181): NCBI GI NO: 4218169 NR Description: MADs-box protein, GDEF1
  misc_feature (1)..(196): NCBI GI NO: 16973294 NR Description: B-type MADS box protein [Malus x domestica]
  misc_feature (1)..(195): NCBI GI NO: 10835358 NR Description: PTD protein
  misc_feature (1)..(195): NCBI GI NO: 34921973 NR Description: APETALA3 [Populus tomentosa]
  misc_feature (1)..(195): NCBI GI NO: 28883608 NR Description: APETALA3 [Populus tomentosa]
  misc_feature (1)..(182): NCBI GI NO: 15216293 NR Description: MADS-box protein [Rosa rugosa]
  misc_feature (1)..(175): NCBI GI NO: 542029 NR Description: MADS box protein TDR6 - tomato (fragment)
  misc_feature (1)..(175): NCBI GI NO: 19386 NR Description: TDR6 [Lycopersicon esculentum]
  misc_feature (1)..(175): NCBI GI NO: 24967132 NR Description: TDR6 transcription factor
MFSKNNKMHEYISPGLTTKKIIDQYQKTLGDIDLWHSHYEKMLENLKKLKDINNKLRRQIRHRIGEGLDMDDMSFQQLRTLEEDMVSSIGKIRERKFHVIKTRTDTCRKKVKSLKQMNGNLLLELEKCVIHPQFLLHDEGDEESAAAAAAAAVALANGASTLYAFCHQHHSHLNLFSHHSNGEEQPFKTDHDLRLA

SEQ ID NO: 10155 - protein, 189 aa, Glycine max
  peptide (1)..(189): Ceres Seq. ID no. 15225316
  misc_feature (18)..(119): Pfam Name: Pfam Description:  K-box region
  misc_feature (1)..(189): NCBI GI NO: 22775408 NR Description: MADS-box protein [Malus x domestica]
  misc_feature (1)..(174): NCBI GI NO: 4218169 NR Description: MADs-box protein, GDEF1
  misc_feature (1)..(189): NCBI GI NO: 16973294 NR Description: B-type MADS box protein [Malus x domestica]
  misc_feature (1)..(188): NCBI GI NO: 10835358 NR Description: PTD protein
  misc_feature (1)..(188): NCBI GI NO: 34921973 NR Description: APETALA3 [Populus tomentosa]
  misc_feature (1)..(188): NCBI GI NO: 28883608 NR Description: APETALA3 [Populus tomentosa]
  misc_feature (1)..(175): NCBI GI NO: 15216293 NR Description: MADS-box protein [Rosa rugosa]
  misc_feature (1)..(168): NCBI GI NO: 542029 NR Description: MADS box protein TDR6 - tomato (fragment)
  misc_feature (1)..(168): NCBI GI NO: 19386 NR Description: TDR6 [Lycopersicon esculentum]
  misc_feature (1)..(168): NCBI GI NO: 24967132 NR Description: TDR6 transcription factor
MHEYISPGLTTKKIIDQYQKTLGDIDLWHSHYEKMLENLKKLKDINNKLRRQIRHRIGEGLDMDDMSFQQLRTLEEDMVSSIGKIRERKFHVIKTRTDTCRKKVKSLKQMNGNLLLELEKCVIHPQFLLHDEGDEESAAAAAAAAVALANGASTLYAFCHQHHSHLNLFSHHSNGEEQPFKTDHDLRLA

SEQ ID NO: 10156 - DNA, 1761 bp, Glycine max
  misc_feature (1)..(1761): Ceres Seq. ID no. 14312300
gagcttgagagacaaatgtggcacataagagaacagattgggagagaaaaaagtacacgacccgagaaagcaaaagggcatgcacgtcatcgtggaaagaaagaaaactcttctcttcttcccagagaaagaaagaaacacatttcccttccaaggaaagaaaataaaaacgtaacatcattggaatcaaaatcaggatgatgggtagttgcccttgtttcgggttgtggagctggaagaccaaagggaagaccgtcaaggctcaggaggaacaaaacaagaatcgcaaatctctcgatgtctctgaaacttcttcaggacttggaccagaagaaaacccaacagagagtgacagttctcataaggctcagatatttaccttccgagagcttgcaacagcaacaaaaaattttagggatgaaacctttattgggcaaggtggatttggcactgtttataaaggaacaatcggaaaaataaatcaggttgtagctgttaaaagacttgatactactgttgtccaaggggagaaagaatttctggtggaagttctcatgctttcccttctacgccattccaaccttgttaatatgattggttactgtgctgaaggggatcaacgtcttcttgtgtatgagtacatggctttaggatctttagaatctcatcttcatgatgtttcacctgatgaagaaccactcgattggaataccagaatgatgatagcttttggggcagcaaaaggactaaattatctgcaccatgaagcaaagccctctgttatatacagggatctgaaatcatccaacatactattggatgaaggtttccatccaaaactttctgattttgggcttgcaaaatttggtccaaccggagaacaatcgtatgttgccactagggtcatgggaacacaaggttactgtgcccctgaatatgccactagtggaaaattaacgatgagatctgacatttacagttttggggttgtgttattggaactaattactggacgcagagcatatgatgataatggtggccctgaaaagcatcttgtagaatgggcacgcccaatgtttagagacaaaaagagttatccaagatttgcagatccgcggcttaaaggttgctacccaggaacagctctctcgaatgccattgaattggcagccatgtgtcttcgtgaagagccacgtcaacggcctaatgcaggtcatatagtggaagctctcaaattcttgtcatccaaaccatataccccgaaagtatccattacagtcaacacaacaggtatggagagtggagattctccaaaagaaacaccagcgattttgcctcaagaatcagaaagagagcgagctgttgcagaggccaagctgtggggtgagacatggaggcagagacgacaaagtgagcaaagtagtcctgaaggaagcaaatagggggtaccagaaagaaaaccttcaaagcagattagaagtggctagtatctaaaaaggtatagggaaagtaaagaaacttcaaaagataatgtgttcaagatttaaatgtagctaataaaattagttggccagctaaatttaaaaagtgtcgtttaggcacttgtgaatttgaggctcaactttacatgctttgacatgagtttttagattttatggttgctcttgctttgctgcattgaaaaatatgatacattactactacttctatgttctaactctaactgctggagcctggaagcaaacacaaattttttaacag

SEQ ID NO: 10157 - protein, 414 aa, Glycine max
  peptide (1)..(414): Ceres Seq. ID no. 14312301
  misc_feature (1)..(385): NCBI GI NO: 15238886 NR Description: protein kinase family [Arabidopsis thaliana]
  misc_feature (369)..(405): NCBI GI NO: 15238886 NR Description: protein kinase family [Arabidopsis thaliana]
  misc_feature (36)..(355): NCBI GI NO: 15240038 NR Description: protein kinase family [Arabidopsis thaliana]
  misc_feature (365)..(414): NCBI GI NO: 15240038 NR Description: protein kinase family [Arabidopsis thaliana]
  misc_feature (25)..(359): NCBI GI NO: 34907210 NR Description: putative serine/threonine kinase PBS1 protein
  misc_feature (361)..(403): NCBI GI NO: 34907210 NR Description: putative serine/threonine kinase PBS1 protein
  misc_feature (57)..(289): NCBI GI NO: 21740745 NR Description: OSJNBa0072K14.3
  misc_feature (290)..(365): NCBI GI NO: 21740745 NR Description: OSJNBa0072K14.3
  misc_feature (368)..(414): NCBI GI NO: 21740745 NR Description: OSJNBa0072K14.3
  misc_feature (2)..(355): NCBI GI NO: 11259782 NR Description: protein kinase-like - Arabidopsis thaliana
MMGSCPCFGLWSWKTKGKTVKAQEEQNKNRKSLDVSETSSGLGPEENPTESDSSHKAQIFTFRELATATKNFRDETFIGQGGFGTVYKGTIGKINQVVAVKRLDTTVVQGEKEFLVEVLMLSLLRHSNLVNMIGYCAEGDQRLLVYEYMALGSLESHLHDVSPDEEPLDWNTRMMIAFGAAKGLNYLHHEAKPSVIYRDLKSSNILLDEGFHPKLSDFGLAKFGPTGEQSYVATRVMGTQGYCAPEYATSGKLTMRSDIYSFGVVLLELITGRRAYDDNGGPEKHLVEWARPMFRDKKSYPRFADPRLKGCYPGTALSNAIELAAMCLREEPRQRPNAGHIVEALKFLSSKPYTPKVSITVNTTGMESGDSPKETPAILPQESERERAVAEAKLWGETWRQRRQSEQSSPEGSK

SEQ ID NO: 10158 - protein, 413 aa, Glycine max
  peptide (1)..(413): Ceres Seq. ID no. 14312302
  misc_feature (1)..(384): NCBI GI NO: 15238886 NR Description: protein kinase family [Arabidopsis thaliana]
  misc_feature (368)..(404): NCBI GI NO: 15238886 NR Description: protein kinase family [Arabidopsis thaliana]
  misc_feature (35)..(354): NCBI GI NO: 15240038 NR Description: protein kinase family [Arabidopsis thaliana]
  misc_feature (364)..(413): NCBI GI NO: 15240038 NR Description: protein kinase family [Arabidopsis thaliana]
  misc_feature (24)..(358): NCBI GI NO: 34907210 NR Description: putative serine/threonine kinase PBS1 protein
  misc_feature (360)..(402): NCBI GI NO: 34907210 NR Description: putative serine/threonine kinase PBS1 protein
  misc_feature (56)..(288): NCBI GI NO: 21740745 NR Description: OSJNBa0072K14.3
  misc_feature (289)..(364): NCBI GI NO: 21740745 NR Description: OSJNBa0072K14.3
  misc_feature (367)..(413): NCBI GI NO: 21740745 NR Description: OSJNBa0072K14.3
  misc_feature (1)..(354): NCBI GI NO: 11259782 NR Description: protein kinase-like - Arabidopsis thaliana
MGSCPCFGLWSWKTKGKTVKAQEEQNKNRKSLDVSETSSGLGPEENPTESDSSHKAQIFTFRELATATKNFRDETFIGQGGFGTVYKGTIGKINQVVAVKRLDTTVVQGEKEFLVEVLMLSLLRHSNLVNMIGYCAEGDQRLLVYEYMALGSLESHLHDVSPDEEPLDWNTRMMIAFGAAKGLNYLHHEAKPSVIYRDLKSSNILLDEGFHPKLSDFGLAKFGPTGEQSYVATRVMGTQGYCAPEYATSGKLTMRSDIYSFGVVLLELITGRRAYDDNGGPEKHLVEWARPMFRDKKSYPRFADPRLKGCYPGTALSNAIELAAMCLREEPRQRPNAGHIVEALKFLSSKPYTPKVSITVNTTGMESGDSPKETPAILPQESERERAVAEAKLWGETWRQRRQSEQSSPEGSK

SEQ ID NO: 10159 - protein, 295 aa, Glycine max
  peptide (1)..(295): Ceres Seq. ID no. 14312303
  misc_feature (1)..(266): NCBI GI NO: 15238886 NR Description: protein kinase family [Arabidopsis thaliana]
  misc_feature (250)..(286): NCBI GI NO: 15238886 NR Description: protein kinase family [Arabidopsis thaliana]
  misc_feature (1)..(236): NCBI GI NO: 15240038 NR Description: protein kinase family [Arabidopsis thaliana]
  misc_feature (246)..(295): NCBI GI NO: 15240038 NR Description: protein kinase family [Arabidopsis thaliana]
  misc_feature (1)..(240): NCBI GI NO: 34907210 NR Description: putative serine/threonine kinase PBS1 protein
  misc_feature (242)..(284): NCBI GI NO: 34907210 NR Description: putative serine/threonine kinase PBS1 protein
  misc_feature (1)..(170): NCBI GI NO: 21740745 NR Description: OSJNBa0072K14.3
  misc_feature (171)..(246): NCBI GI NO: 21740745 NR Description: OSJNBa0072K14.3
  misc_feature (249)..(295): NCBI GI NO: 21740745 NR Description: OSJNBa0072K14.3
  misc_feature (1)..(236): NCBI GI NO: 11259782 NR Description: protein kinase-like - Arabidopsis thaliana
MLSLLRHSNLVNMIGYCAEGDQRLLVYEYMALGSLESHLHDVSPDEEPLDWNTRMMIAFGAAKGLNYLHHEAKPSVIYRDLKSSNILLDEGFHPKLSDFGLAKFGPTGEQSYVATRVMGTQGYCAPEYATSGKLTMRSDIYSFGVVLLELITGRRAYDDNGGPEKHLVEWARPMFRDKKSYPRFADPRLKGCYPGTALSNAIELAAMCLREEPRQRPNAGHIVEALKFLSSKPYTPKVSITVNTTGMESGDSPKETPAILPQESERERAVAEAKLWGETWRQRRQSEQSSPEGSK

SEQ ID NO: 10160 - DNA, 1653 bp, Glycine max
  misc_feature (1)..(1653): Ceres Seq. ID no. 15176588
ggtgtacggccatatttcctctcatcagattgaagggtggttagaattagggttctctatctgcaaagcaaaccttatcttttcacctgaaacttgcttttgttcccaattttctcaaattgctttcggttttcgttctgattctgcaaaatcatggagatggagcgcatcgttgaattccctcacacatacatggatcgacccccgagaaagagagcgcgtttgggctgggacatcgctgaggtccccaaggctcaggtaggattgttttgtggacaagaggttgagaatatttcaagctttgctccttcagaacatccccctagttctctgtttaagggagttgctcgaaatggttctcccccatggcgagacgatgacaaagatggccattacatgtttgagcttggagataatttaacttctcgctataagattcatggcaaaatgggcgaaggaacttttgggcaggtcttggagtgctgggacagagaaaggaaggaaatggtcgccataaaaattgttcgtgggataaagaaatatcgagaggcagccatggtagaaattgaggtactgcaacagcttgggaaacacgataaaggtagcaatcgttgtgtgcaaatacggaactggtttgactatcgtaatcatatctgtattgtgtttgagaaacttggaccaagcttatacgattttcttcggaaaaacagttatcgttcatttcccattgatcttgtccgtgagattggctggcaactattggaatgtgtagcatttatgcatgacttacacatgatccatactgacctgaagccggaaaacatacttctagtttcaccagagtatcttaaaattccagattacaagagtacaaccagatcaccaagttcctttttcaagagagtgcccaagtcaagtgctataaaagttattgattttggcagcactacatatgaacgagaagatcagacatacattgtgtcaacacgtcattatagggcacctgaagttatcctcggacttgggtggagctatccatgtgatatatggagtgtgggttgtatactggttgaattatgcactggtgaagctttgtttcagactcatgaaaatttagagcatctggccatgatggagagggtgcttggtcctataccacagcagatgttaaagagagttgaccgacatgcagagaagtatgtccgaaggggtagattggactggccagagggtgcagcctcacgagagagtattaaagctgtaatgaagcttccccgactacagaacattataatgcagcatgttgatcattcagctggagatcttatacatcttttgcaggggctacttagatatgacccctttgaaagacttacagctagggatgctttgaggcattccttctttactagagatcaacttaggagatgattttcatgtatttgtaaacgattggtctgtttttaagtttaaagatcattcgagggcaaatatggctgtaaggaagcctatgtgccatgtaaataaatatttgaatatcttgggctaaactaaagcaagtgaggatggttattcagcagcagttacacctcaaagcctgtatctcaaacgttttcttaaaaaaaataaaataattgtagatgttcttttacc

SEQ ID NO: 10161 - protein, 425 aa, Glycine max
  peptide (1)..(425): Ceres Seq. ID no. 15176589
  misc_feature (93)..(418): Pfam Name: Pfam Description:  Protein kinase domain
  misc_feature (1)..(420): NCBI GI NO: 15233948 NR Description: protein kinase (AFC2) [Arabidopsis thaliana]
  misc_feature (1)..(425): NCBI GI NO: 7211773 NR Description: protein kinase MK5 [Mesembryanthemum crystallinum]
  misc_feature (1)..(425): NCBI GI NO: 7489189 NR Description: protein kinase PK12 (EC 2
  misc_feature (1)..(420): NCBI GI NO: 34908100 NR Description: putative protein kinase AFC1
  misc_feature (1)..(422): NCBI GI NO: 15231839 NR Description: protein kinase (AME2/AFC1) [Arabidopsis thaliana]
  misc_feature (1)..(422): NCBI GI NO: 30693861 NR Description: protein kinase (AME2/AFC1) [Arabidopsis thaliana]
  misc_feature (1)..(422): NCBI GI NO: 601787 NR Description: protein kinase
  misc_feature (51)..(418): NCBI GI NO: 601791 NR Description: protein kinase
  misc_feature (51)..(418): NCBI GI NO: 15233872 NR Description: protein kinase AFC3 [Arabidopsis thaliana]
  misc_feature (56)..(418): NCBI GI NO: 34912246 NR Description: putative protein kinase AFC3
MEMERIVEFPHTYMDRPPRKRARLGWDIAEVPKAQVGLFCGQEVENISSFAPSEHPPSSLFKGVARNGSPPWRDDDKDGHYMFELGDNLTSRYKIHGKMGEGTFGQVLECWDRERKEMVAIKIVRGIKKYREAAMVEIEVLQQLGKHDKGSNRCVQIRNWFDYRNHICIVFEKLGPSLYDFLRKNSYRSFPIDLVREIGWQLLECVAFMHDLHMIHTDLKPENILLVSPEYLKIPDYKSTTRSPSSFFKRVPKSSAIKVIDFGSTTYEREDQTYIVSTRHYRAPEVILGLGWSYPCDIWSVGCILVELCTGEALFQTHENLEHLAMMERVLGPIPQQMLKRVDRHAEKYVRRGRLDWPEGAASRESIKAVMKLPRLQNIIMQHVDHSAGDLIHLLQGLLRYDPFERLTARDALRHSFFTRDQLRR

SEQ ID NO: 10162 - protein, 423 aa, Glycine max
  peptide (1)..(423): Ceres Seq. ID no. 15176590
  misc_feature (91)..(416): Pfam Name: Pfam Description:  Protein kinase domain
  misc_feature (1)..(418): NCBI GI NO: 15233948 NR Description: protein kinase (AFC2) [Arabidopsis thaliana]
  misc_feature (1)..(423): NCBI GI NO: 7211773 NR Description: protein kinase MK5 [Mesembryanthemum crystallinum]
  misc_feature (1)..(423): NCBI GI NO: 7489189 NR Description: protein kinase PK12 (EC 2
  misc_feature (1)..(418): NCBI GI NO: 34908100 NR Description: putative protein kinase AFC1
  misc_feature (1)..(420): NCBI GI NO: 15231839 NR Description: protein kinase (AME2/AFC1) [Arabidopsis thaliana]
  misc_feature (1)..(420): NCBI GI NO: 30693861 NR Description: protein kinase (AME2/AFC1) [Arabidopsis thaliana]
  misc_feature (1)..(420): NCBI GI NO: 601787 NR Description: protein kinase
  misc_feature (49)..(416): NCBI GI NO: 601791 NR Description: protein kinase
  misc_feature (49)..(416): NCBI GI NO: 15233872 NR Description: protein kinase AFC3 [Arabidopsis thaliana]
  misc_feature (54)..(416): NCBI GI NO: 34912246 NR Description: putative protein kinase AFC3
MERIVEFPHTYMDRPPRKRARLGWDIAEVPKAQVGLFCGQEVENISSFAPSEHPPSSLFKGVARNGSPPWRDDDKDGHYMFELGDNLTSRYKIHGKMGEGTFGQVLECWDRERKEMVAIKIVRGIKKYREAAMVEIEVLQQLGKHDKGSNRCVQIRNWFDYRNHICIVFEKLGPSLYDFLRKNSYRSFPIDLVREIGWQLLECVAFMHDLHMIHTDLKPENILLVSPEYLKIPDYKSTTRSPSSFFKRVPKSSAIKVIDFGSTTYEREDQTYIVSTRHYRAPEVILGLGWSYPCDIWSVGCILVELCTGEALFQTHENLEHLAMMERVLGPIPQQMLKRVDRHAEKYVRRGRLDWPEGAASRESIKAVMKLPRLQNIIMQHVDHSAGDLIHLLQGLLRYDPFERLTARDALRHSFFTRDQLRR

SEQ ID NO: 10163 - protein, 412 aa, Glycine max
  peptide (1)..(412): Ceres Seq. ID no. 15176591
  misc_feature (80)..(405): Pfam Name: Pfam Description:  Protein kinase domain
  misc_feature (1)..(407): NCBI GI NO: 15233948 NR Description: protein kinase (AFC2) [Arabidopsis thaliana]
  misc_feature (1)..(412): NCBI GI NO: 7211773 NR Description: protein kinase MK5 [Mesembryanthemum crystallinum]
  misc_feature (1)..(412): NCBI GI NO: 7489189 NR Description: protein kinase PK12 (EC 2
  misc_feature (1)..(407): NCBI GI NO: 34908100 NR Description: putative protein kinase AFC1
  misc_feature (1)..(409): NCBI GI NO: 15231839 NR Description: protein kinase (AME2/AFC1) [Arabidopsis thaliana]
  misc_feature (1)..(409): NCBI GI NO: 30693861 NR Description: protein kinase (AME2/AFC1) [Arabidopsis thaliana]
  misc_feature (1)..(409): NCBI GI NO: 601787 NR Description: protein kinase
  misc_feature (38)..(405): NCBI GI NO: 601791 NR Description: protein kinase
  misc_feature (38)..(405): NCBI GI NO: 15233872 NR Description: protein kinase AFC3 [Arabidopsis thaliana]
  misc_feature (43)..(405): NCBI GI NO: 34912246 NR Description: putative protein kinase AFC3
MDRPPRKRARLGWDIAEVPKAQVGLFCGQEVENISSFAPSEHPPSSLFKGVARNGSPPWRDDDKDGHYMFELGDNLTSRYKIHGKMGEGTFGQVLECWDRERKEMVAIKIVRGIKKYREAAMVEIEVLQQLGKHDKGSNRCVQIRNWFDYRNHICIVFEKLGPSLYDFLRKNSYRSFPIDLVREIGWQLLECVAFMHDLHMIHTDLKPENILLVSPEYLKIPDYKSTTRSPSSFFKRVPKSSAIKVIDFGSTTYEREDQTYIVSTRHYRAPEVILGLGWSYPCDIWSVGCILVELCTGEALFQTHENLEHLAMMERVLGPIPQQMLKRVDRHAEKYVRRGRLDWPEGAASRESIKAVMKLPRLQNIIMQHVDHSAGDLIHLLQGLLRYDPFERLTARDALRHSFFTRDQLRR

SEQ ID NO: 10164 - DNA, 1688 bp, Glycine max
  misc_feature (1)..(1688): Ceres Seq. ID no. 14308091
gaaacaaagtagagagcaaaagaatggtgggaacagaggcagcagaaaaaatgagtgtcaatgaagaaaaagatttgattagcactcttcctgattcagttcttgtctctatcatttctctccttccctgcaacgaaggcgtgagaacctgtgttctttccaaccgatggaaaaccatgtggaaacatgttcctcaccttagcttggatcagagcaaaatgttgaagcttttgatccgagcttatcttcgcgggctataccttagcacgcgtcttgaaatggcttataatcgtcgtaggggagatcaagaaaaagattttgaagacttggatgaaattgctaaagcagaggtgttgattgattcagtgttggattcacacgttgtttctttggaaagttgtactattcggcacctgccagaaagttgtgctagtggcaaagctgttatgtggatcgagaaactccttaagcaaaataaggtgaagaagctttcaatggagcgagatgacactgattatttgggctctgaggaaagtttgccacgggttctgagatatcatggaaggactctagacttgccttttaagattttctcaggctttgaggcacttgagttgaagaactattttctcaagacttcgccctcgagtaatgattcttgccaggttcttacaactttagcctttaggaacatgagtgttaagaaggatgcttgggaagggattttgtcttgttgcctgtgtcttgaaaatttaacacttgaaaatttaacacatgataactgcaagttgatgagagaggttactatcaatagtccaagactcaaatttctcagaatttgtagaatgcagatgaatgggtttaaggtttctgctgtgaaccttgaggtctttgagattgatactgttgtttgtatgccgaaaagactacttacttttgaaatcccaaaggttcatctgcttcgatctcgctctgatttgaaaattagagggcaatatatttgttgggttgggagcaaactgttgcagtcgagaaatattctacacactagcagccagagtcatcaaggaacaacttcgagctttgctggaatatttgagaacctggctactctatgtattgattttgatttgaaaacagtaaaaaatgccataaccctcttttcagctcttaaggcatgcccaaagttgcaaaatcttgaaattaatagcgagattaatgacaacgcagtggattactatgatcaacatgatgaggatgatgcaatggaatactaccgtagaaaggagccatgtgagtgcatcgatcaacaactaaagacccttagcataatgggatttgcaggaaaaaaactgaggtggaattccttaaatatgtaataacaaatggtgaagtaatgaagaagattacaatttggtttgttgatgattgctcatggattcatgccgctgaaactggatgtttgctatcatttcagacagcctctccaaacttgtccatcattctcaatcctgggccattttacatggcaaatgtgggtgggaactttgaaacatggctctcaactctaagggagtaggaaatttaccggtgaccatggccaaactatgtgtttcaaattctattttagtcttgaactttgaatatttctagtattacgtttataacactaaagacagattagtggc

SEQ ID NO: 10165 - protein, 458 aa, Glycine max
  peptide (1)..(458): Ceres Seq. ID no. 14308092
  misc_feature (26)..(66): Pfam Name: Pfam Description:  F-box domain
  misc_feature (109)..(450): NCBI GI NO: 25406710 NR Description: hypothetical protein F23A5.32
  misc_feature (24)..(103): NCBI GI NO: 25406710 NR Description: hypothetical protein F23A5.32
  misc_feature (109)..(346): NCBI GI NO: 30699552 NR Description: expressed protein [Arabidopsis thaliana]
  misc_feature (24)..(103): NCBI GI NO: 30699552 NR Description: expressed protein [Arabidopsis thaliana]
  misc_feature (14)..(110): NCBI GI NO: 6979337 NR Description: hypothetical protein [Oryza sativa]
NKVESKRMVGTEAAEKMSVNEEKDLISTLPDSVLVSIISLLPCNEGVRTCVLSNRWKTMWKHVPHLSLDQSKMLKLLIRAYLRGLYLSTRLEMAYNRRRGDQEKDFEDLDEIAKAEVLIDSVLDSHVVSLESCTIRHLPESCASGKAVMWIEKLLKQNKVKKLSMERDDTDYLGSEESLPRVLRYHGRTLDLPFKIFSGFEALELKNYFLKTSPSSNDSCQVLTTLAFRNMSVKKDAWEGILSCCLCLENLTLENLTHDNCKLMREVTINSPRLKFLRICRMQMNGFKVSAVNLEVFEIDTVVCMPKRLLTFEIPKVHLLRSRSDLKIRGQYICWVGSKLLQSRNILHTSSQSHQGTTSSFAGIFENLATLCIDFDLKTVKNAITLFSALKACPKLQNLEINSEINDNAVDYYDQHDEDDAMEYYRRKEPCECIDQQLKTLSIMGFAGKKLRWNSLNM

SEQ ID NO: 10166 - protein, 451 aa, Glycine max
  peptide (1)..(451): Ceres Seq. ID no. 14308093
  misc_feature (19)..(59): Pfam Name: Pfam Description:  F-box domain
  misc_feature (102)..(443): NCBI GI NO: 25406710 NR Description: hypothetical protein F23A5.32
  misc_feature (17)..(96): NCBI GI NO: 25406710 NR Description: hypothetical protein F23A5.32
  misc_feature (102)..(339): NCBI GI NO: 30699552 NR Description: expressed protein [Arabidopsis thaliana]
  misc_feature (17)..(96): NCBI GI NO: 30699552 NR Description: expressed protein [Arabidopsis thaliana]
  misc_feature (7)..(103): NCBI GI NO: 6979337 NR Description: hypothetical protein [Oryza sativa]
MVGTEAAEKMSVNEEKDLISTLPDSVLVSIISLLPCNEGVRTCVLSNRWKTMWKHVPHLSLDQSKMLKLLIRAYLRGLYLSTRLEMAYNRRRGDQEKDFEDLDEIAKAEVLIDSVLDSHVVSLESCTIRHLPESCASGKAVMWIEKLLKQNKVKKLSMERDDTDYLGSEESLPRVLRYHGRTLDLPFKIFSGFEALELKNYFLKTSPSSNDSCQVLTTLAFRNMSVKKDAWEGILSCCLCLENLTLENLTHDNCKLMREVTINSPRLKFLRICRMQMNGFKVSAVNLEVFEIDTVVCMPKRLLTFEIPKVHLLRSRSDLKIRGQYICWVGSKLLQSRNILHTSSQSHQGTTSSFAGIFENLATLCIDFDLKTVKNAITLFSALKACPKLQNLEINSEINDNAVDYYDQHDEDDAMEYYRRKEPCECIDQQLKTLSIMGFAGKKLRWNSLNM

SEQ ID NO: 10167 - protein, 442 aa, Glycine max
  peptide (1)..(442): Ceres Seq. ID no. 14308094
  misc_feature (10)..(50): Pfam Name: Pfam Description:  F-box domain
  misc_feature (93)..(434): NCBI GI NO: 25406710 NR Description: hypothetical protein F23A5.32
  misc_feature (8)..(87): NCBI GI NO: 25406710 NR Description: hypothetical protein F23A5.32
  misc_feature (93)..(330): NCBI GI NO: 30699552 NR Description: expressed protein [Arabidopsis thaliana]
  misc_feature (8)..(87): NCBI GI NO: 30699552 NR Description: expressed protein [Arabidopsis thaliana]
  misc_feature (1)..(94): NCBI GI NO: 6979337 NR Description: hypothetical protein [Oryza sativa]
MSVNEEKDLISTLPDSVLVSIISLLPCNEGVRTCVLSNRWKTMWKHVPHLSLDQSKMLKLLIRAYLRGLYLSTRLEMAYNRRRGDQEKDFEDLDEIAKAEVLIDSVLDSHVVSLESCTIRHLPESCASGKAVMWIEKLLKQNKVKKLSMERDDTDYLGSEESLPRVLRYHGRTLDLPFKIFSGFEALELKNYFLKTSPSSNDSCQVLTTLAFRNMSVKKDAWEGILSCCLCLENLTLENLTHDNCKLMREVTINSPRLKFLRICRMQMNGFKVSAVNLEVFEIDTVVCMPKRLLTFEIPKVHLLRSRSDLKIRGQYICWVGSKLLQSRNILHTSSQSHQGTTSSFAGIFENLATLCIDFDLKTVKNAITLFSALKACPKLQNLEINSEINDNAVDYYDQHDEDDAMEYYRRKEPCECIDQQLKTLSIMGFAGKKLRWNSLNM

SEQ ID NO: 10168 - DNA, 1387 bp, Glycine max
  misc_feature (1)..(1387): Ceres Seq. ID no. 15176219
gaataatttatctccattaacatcccaagcagtcccaagaaagaacagggcaaaaacagaatagaaacagagatgggttgcaatagctccaaggctgaaccaccgttggaaaactccaatcatcatcatcatcatcatcatcatgcagagttccaaaaacccaaaactctcaaacaagaagtagtgctgcagattccaggatgcaaagttcatctgatggacgaaggcgaagccatagaactggcacaaggtcacttcacaatcatgaagatcatggacaagaacgtgccactagcaaccaccataaaagttggaaacagtgttcagtggcctctaacgaaagatgagccagtggtgaaggtggatgctcttcactacctgttctctctgcctgtaaaagatggtggtgagcctctaagctatggtgtcacctttccagaacagtgctatgggaacatggggatgttagattcttttctgaaggatcaatcttgcttttctggtttggaaaggaataagaagagtgatcttaattgggagaagtttgctccaagggttgaagattacaatcattttctggctagggcaattgcaggagggactggccagattgttaagggtatcttcatgtgcagcaatgcttacaccaaccaggtccaaaaaggaggggaaacgatcctaaatactgctgcagaaaagaacaatggtagcgtggtcacagaaagtatgaaccacaggagtgatgccacaaagaataatgcaacgaacgaaaacctcaaacgagtgagaaagctgacaaatatgacagaaaagttaaccaaatctttgcttgatggtgttggaataatgagtggatcaatgatggctcctgtgctgaaatcccaaccaggacaggcattcctaaagatgctccctggagaggtgctgttggcttcccttgatgcagtcaatagagtttttgaagcagctgaagctgctgaaaaacaaaccttttcagccacctcccaagctgcaaccagaatggtttctaacaggtttggggaagaagcaggggaggctactgagcatgtgtttgcaactgcaggacattctgttaacactgcttggaatgtctctaagatacggaaggccatcaatccagcctcttcagcaaatgctgcaggagcactgagaaattctgccaagaatagaaatgttatatattaaattccaatcatgttgctttatgtttgacaatggtgaaggcataaaattttgcctatatatattgctaaacctttttggctgttatatgtaagtattaatgtaggtattgttcataccttagaagaaacaaactatataaagtgtacacatgaaaaagctaagatagcattattatgctttc

SEQ ID NO: 10169 - protein, 377 aa, Glycine max
  peptide (1)..(377): Ceres Seq. ID no. 15176220
  misc_feature (1)..(371): NCBI GI NO: 15233098 NR Description: expressed protein [Arabidopsis thaliana]
  misc_feature (5)..(371): NCBI GI NO: 26450712 NR Description: unknown protein [Arabidopsis thaliana]
  misc_feature (5)..(371): NCBI GI NO: 7488048 NR Description: probable allene oxide synthase - Arabidopsisthaliana
  misc_feature (5)..(371): NCBI GI NO: 25407536 NR Description: hypothetical protein AT4g15450
  misc_feature (5)..(313): NCBI GI NO: 30683270 NR Description: expressed protein [Arabidopsis thaliana]
  misc_feature (151)..(373): NCBI GI NO: 34910728 NR Description: P0690B02.29
  misc_feature (30)..(143): NCBI GI NO: 34910728 NR Description: P0690B02.29
  misc_feature (149)..(373): NCBI GI NO: 18419759 NR Description: hypothetical protein [Arabidopsis thaliana]
  misc_feature (30)..(153): NCBI GI NO: 18419759 NR Description: hypothetical protein [Arabidopsis thaliana]
  misc_feature (149)..(359): NCBI GI NO: 7486396 NR Description: hypothetical protein F4B14
MGCNSSKAEPPLENSNHHHHHHHHAEFQKPKTLKQEVVLQIPGCKVHLMDEGEAIELAQGHFTIMKIMDKNVPLATTIKVGNSVQWPLTKDEPVVKVDALHYLFSLPVKDGGEPLSYGVTFPEQCYGNMGMLDSFLKDQSCFSGLERNKKSDLNWEKFAPRVEDYNHFLARAIAGGTGQIVKGIFMCSNAYTNQVQKGGETILNTAAEKNNGSVVTESMNHRSDATKNNATNENLKRVRKLTNMTEKLTKSLLDGVGIMSGSMMAPVLKSQPGQAFLKMLPGEVLLASLDAVNRVFEAAEAAEKQTFSATSQAATRMVSNRFGEEAGEATEHVFATAGHSVNTAWNVSKIRKAINPASSANAAGALRNSAKNRNVIY

SEQ ID NO: 10170 - protein, 329 aa, Glycine max
  peptide (1)..(329): Ceres Seq. ID no. 15176221
  misc_feature (1)..(323): NCBI GI NO: 15233098 NR Description: expressed protein [Arabidopsis thaliana]
  misc_feature (1)..(323): NCBI GI NO: 26450712 NR Description: unknown protein [Arabidopsis thaliana]
  misc_feature (1)..(323): NCBI GI NO: 7488048 NR Description: probable allene oxide synthase - Arabidopsisthaliana
  misc_feature (1)..(323): NCBI GI NO: 25407536 NR Description: hypothetical protein AT4g15450
  misc_feature (1)..(265): NCBI GI NO: 30683270 NR Description: expressed protein [Arabidopsis thaliana]
  misc_feature (103)..(325): NCBI GI NO: 34910728 NR Description: P0690B02.29
  misc_feature (1)..(95): NCBI GI NO: 34910728 NR Description: P0690B02.29
  misc_feature (101)..(325): NCBI GI NO: 18419759 NR Description: hypothetical protein [Arabidopsis thaliana]
  misc_feature (1)..(105): NCBI GI NO: 18419759 NR Description: hypothetical protein [Arabidopsis thaliana]
  misc_feature (101)..(311): NCBI GI NO: 7486396 NR Description: hypothetical protein F4B14
MDEGEAIELAQGHFTIMKIMDKNVPLATTIKVGNSVQWPLTKDEPVVKVDALHYLFSLPVKDGGEPLSYGVTFPEQCYGNMGMLDSFLKDQSCFSGLERNKKSDLNWEKFAPRVEDYNHFLARAIAGGTGQIVKGIFMCSNAYTNQVQKGGETILNTAAEKNNGSVVTESMNHRSDATKNNATNENLKRVRKLTNMTEKLTKSLLDGVGIMSGSMMAPVLKSQPGQAFLKMLPGEVLLASLDAVNRVFEAAEAAEKQTFSATSQAATRMVSNRFGEEAGEATEHVFATAGHSVNTAWNVSKIRKAINPASSANAAGALRNSAKNRNVIY

SEQ ID NO: 10171 - protein, 313 aa, Glycine max
  peptide (1)..(313): Ceres Seq. ID no. 15176222
  misc_feature (1)..(307): NCBI GI NO: 15233098 NR Description: expressed protein [Arabidopsis thaliana]
  misc_feature (1)..(307): NCBI GI NO: 26450712 NR Description: unknown protein [Arabidopsis thaliana]
  misc_feature (1)..(307): NCBI GI NO: 7488048 NR Description: probable allene oxide synthase - Arabidopsisthaliana
  misc_feature (1)..(307): NCBI GI NO: 25407536 NR Description: hypothetical protein AT4g15450
  misc_feature (1)..(249): NCBI GI NO: 30683270 NR Description: expressed protein [Arabidopsis thaliana]
  misc_feature (87)..(309): NCBI GI NO: 34910728 NR Description: P0690B02.29
  misc_feature (1)..(79): NCBI GI NO: 34910728 NR Description: P0690B02.29
  misc_feature (85)..(309): NCBI GI NO: 18419759 NR Description: hypothetical protein [Arabidopsis thaliana]
  misc_feature (1)..(89): NCBI GI NO: 18419759 NR Description: hypothetical protein [Arabidopsis thaliana]
  misc_feature (85)..(295): NCBI GI NO: 7486396 NR Description: hypothetical protein F4B14
MKIMDKNVPLATTIKVGNSVQWPLTKDEPVVKVDALHYLFSLPVKDGGEPLSYGVTFPEQCYGNMGMLDSFLKDQSCFSGLERNKKSDLNWEKFAPRVEDYNHFLARAIAGGTGQIVKGIFMCSNAYTNQVQKGGETILNTAAEKNNGSVVTESMNHRSDATKNNATNENLKRVRKLTNMTEKLTKSLLDGVGIMSGSMMAPVLKSQPGQAFLKMLPGEVLLASLDAVNRVFEAAEAAEKQTFSATSQAATRMVSNRFGEEAGEATEHVFATAGHSVNTAWNVSKIRKAINPASSANAAGALRNSAKNRNVIY

SEQ ID NO: 10172 - DNA, 1231 bp, Glycine max
  misc_feature (1)..(1231): Ceres Seq. ID no. 15175688
aaacactaatcacattcattcaagatagatgtcaaagttaagcattctcttcctcctagtcttatccttcagttctgtactctcagaactatgcaacccacaagacaaacaagccctactccaaatcaagaaagatcttggaaacccaaccactctctcctcatggcttctaaccactgattgctgcaacagaacatggctaggtgtttcatgcgacaccgacacccaaacataccgcgtcaacgacctcgacctctccgatcttaacctccccaaaccctactctattcctccctccatagccaaccttccctacttgaattttctttccattagcaggaccccaaccctaatcggtcaaatcccctcagccatcgctaaactcacccaactccgttatctttatatcacccacaccaatgtctccggccctataccagatttcttgtctcaaatcaaaaccttagtcaccctcgatttctcctacaacaccctctccggcaaactccccgcctcgctctcttcgctgcccaatctcgtcggaatcaccttcgacggcaaccaaatctccggcgccatcccggactcgtacggctcattctcgaagcttttcacgtcgatgacgatctcccgcaaccgcctcacagggaagattccggcgacgttcgcgaatctgaacctggcgttcgtggacttgtctcggaacatgctggagggtgatgcgtcggtgttgtttgggacggagaaaaacacgcagaagatacttctggcgaagaacatgcttgcttttgatctggggaaagtaggcttgtctaagaacttgaacggcttggatcttaggaacaaccgtatttatgggacgctacctcagggacttacggcgcttaagtttctgcacagttttaatgtgagcttcaatgatctttgtggtgagattccgcagggtgggaacatgcaacgttttgacgtatcttcttatgccaataacaagtgtttgtgtggctctcctcttccaccatgcacttaataacaagtgttttattttcaaccctagcttggattaataagaacggatgggattaaacgttataatagagtcatattcaaaaggtaaatacccaaagtattactgtggcgtgcttggactactttgctaatactattttagattattcattaatatatgcttaacttttataattataattataataaataaatacttttaaat

SEQ ID NO: 10173 - protein, 332 aa, Glycine max
  peptide (1)..(332): Ceres Seq. ID no. 15175689
  misc_feature (121)..(144): Pfam Name: Pfam Description:  Leucine Rich Repeat
  misc_feature (20)..(332): NCBI GI NO: 5579315 NR Description: polygalacturonase inhibitor protein [Glycine max]
  misc_feature (2)..(332): NCBI GI NO: 21263821 NR Description: Polygalacturonase inhibitor 2 precursor
  misc_feature (2)..(332): NCBI GI NO: 21264491 NR Description: Polygalacturonase inhibitor 3 precursor
  misc_feature (2)..(332): NCBI GI NO: 548485 NR Description: Polygalacturonase inhibitor 1 precursor
  misc_feature (2)..(332): NCBI GI NO: 40806092 NR Description: polygalacturonase-inhibiting protein
  misc_feature (20)..(332): NCBI GI NO: 34811072 NR Description: Chain A, The Crystal Structure Of Pgip
  misc_feature (6)..(332): NCBI GI NO: 26986723 NR Description: polygalacturonase inhibitor protein [Glycine max]
  misc_feature (20)..(332): NCBI GI NO: 2129841 NR Description: polygalacturonase-inhibiting protein - soybean
  misc_feature (20)..(332): NCBI GI NO: 4033532 NR Description: polygalacturonase-inhibiting protein [Glycine max]
  misc_feature (1)..(331): NCBI GI NO: 22256016 NR Description: polygalacturonase inhibitor protein
MSKLSILFLLVLSFSSVLSELCNPQDKQALLQIKKDLGNPTTLSSWLLTTDCCNRTWLGVSCDTDTQTYRVNDLDLSDLNLPKPYSIPPSIANLPYLNFLSISRTPTLIGQIPSAIAKLTQLRYLYITHTNVSGPIPDFLSQIKTLVTLDFSYNTLSGKLPASLSSLPNLVGITFDGNQISGAIPDSYGSFSKLFTSMTISRNRLTGKIPATFANLNLAFVDLSRNMLEGDASVLFGTEKNTQKILLAKNMLAFDLGKVGLSKNLNGLDLRNNRIYGTLPQGLTALKFLHSFNVSFNDLCGEIPQGGNMQRFDVSSYANNKCLCGSPLPPCT

SEQ ID NO: 10174 - DNA, 1402 bp, Glycine max
  misc_feature (1)..(1402): Ceres Seq. ID no. 13638136
gatagattatttctcttctcttccctttcttaggttaaaagttggaactgagtgattacccaactaatgttatgatcagttggaagcgttggcaagaaagaatatgtaatagtggtgttgtttgttcattttggtcaaagaaatagtatctgggtacccaggatattgtagttgtaagatgggttatctcaattcagttttgtcatcttcaagccaggttcatgttgcagatgatgcaattgtgagcggcgggggtctaagtcacaatggaaaattcagctacgggtatgctagctctcctggcaagagatcttcaatggaagatttttatgagacaagaattgatggtgttgaaggtgaaattgttggccttttcggagtttttgatggtcatggtggtgctcgtgctgctgagtatgtcaagaaaaacctgtttagtaatttgatcagtcacccaaaattcatttctgacaccaaatcagcaataactgatgcatacaatcatactgacactgagttgctgaaatcagaaaatagccataacagagatgcaggatcaactgcttccactgctattttagttggtgaccgcttgcttgttgcaaatgttggggattccagagctgttatatgcaggggtggtaatgccattgctgtttctcgagatcacaaaccagaccaaactgatgagaggcaaaggattgaagaagcaggaggctttgttatgtgggcaggaacttggagagttggaggtgttcttgctgtttctcgtgcatttggtgatagactcctgaagcagtatgttgttgctgatccagaaattcaggaagaaaaagttgacagctcccttgagtttcttattctggccagtgacgggctatgggatgttgtctctaatgaggaagctgttgctatgataaagccaattgaggatgcagaggaggcagcaaagaggctgatgcaagaagcatatcagagaggtagtgctgacaatatcacatgtgttgttgttcgtttcttgatgaaccaaggtggatccaaagagttagtagcttatcctcataatagtagctctgcgggtaagaatccttcagtagaaggtttgtgtgatatataggtataggtgagttgtggatccaaaagatgctgagacttggtaaaaatcggtttatagttgggttcctgataagcaatctagtagttgtgttgtactacgtcatgcaagaatttatggtcctcttgcataaaactattcattatttgttagctaggaaatgtatgtaaggagtgtgaccagagttctcattgcacctgctctgcatgtaaacatggttcttttattagtccatttaatttccttagggttattagtttattcagtactatttgtctattgtgaatt

SEQ ID NO: 10175 - protein, 312 aa, Glycine max
  peptide (1)..(312): Ceres Seq. ID no. 13638137
  misc_feature (33)..(273): Pfam Name: Pfam Description:  Protein phosphatase 2C
  misc_feature (1)..(286): NCBI GI NO: 30689144 NR Description: protein phosphatase 2C (PP2C), putative
  misc_feature (1)..(300): NCBI GI NO: 20146110 NR Description: protein phosphatase 2C
  misc_feature (1)..(302): NCBI GI NO: 18416366 NR Description: protein phosphatase 2C (PP2C) -related
  misc_feature (1)..(287): NCBI GI NO: 15238651 NR Description: protein phosphatase 2C (PP2C), putative
  misc_feature (28)..(216): NCBI GI NO: 7486331 NR Description: hypothetical protein F28M20
  misc_feature (205)..(286): NCBI GI NO: 7486331 NR Description: hypothetical protein F28M20
  misc_feature (1)..(302): NCBI GI NO: 11358728 NR Description: protein phosphatase 2C-like protein
  misc_feature (1)..(287): NCBI GI NO: 38345197 NR Description: OSJNBa0015K02.7
  misc_feature (47)..(287): NCBI GI NO: 19387276 NR Description: putative protein phosphatase 2C
  misc_feature (10)..(280): NCBI GI NO: 30693757 NR Description: protein phosphatase 2C (PP2C), putative
MGYLNSVLSSSSQVHVADDAIVSGGGLSHNGKFSYGYASSPGKRSSMEDFYETRIDGVEGEIVGLFGVFDGHGGARAAEYVKKNLFSNLISHPKFISDTKSAITDAYNHTDTELLKSENSHNRDAGSTASTAILVGDRLLVANVGDSRAVICRGGNAIAVSRDHKPDQTDERQRIEEAGGFVMWAGTWRVGGVLAVSRAFGDRLLKQYVVADPEIQEEKVDSSLEFLILASDGLWDVVSNEEAVAMIKPIEDAEEAAKRLMQEAYQRGSADNITCVVVRFLMNQGGSKELVAYPHNSSSAGKNPSVEGLCDI

SEQ ID NO: 10176 - protein, 266 aa, Glycine max
  peptide (1)..(266): Ceres Seq. ID no. 13638138
  misc_feature (1)..(227): Pfam Name: Pfam Description:  Protein phosphatase 2C
  misc_feature (1)..(240): NCBI GI NO: 30689144 NR Description: protein phosphatase 2C (PP2C), putative
  misc_feature (1)..(254): NCBI GI NO: 20146110 NR Description: protein phosphatase 2C
  misc_feature (1)..(256): NCBI GI NO: 18416366 NR Description: protein phosphatase 2C (PP2C) -related
  misc_feature (1)..(241): NCBI GI NO: 15238651 NR Description: protein phosphatase 2C (PP2C), putative
  misc_feature (1)..(170): NCBI GI NO: 7486331 NR Description: hypothetical protein F28M20
  misc_feature (159)..(240): NCBI GI NO: 7486331 NR Description: hypothetical protein F28M20
  misc_feature (1)..(256): NCBI GI NO: 11358728 NR Description: protein phosphatase 2C-like protein
  misc_feature (1)..(241): NCBI GI NO: 38345197 NR Description: OSJNBa0015K02.7
  misc_feature (1)..(241): NCBI GI NO: 19387276 NR Description: putative protein phosphatase 2C
  misc_feature (1)..(234): NCBI GI NO: 30693757 NR Description: protein phosphatase 2C (PP2C), putative
MEDFYETRIDGVEGEIVGLFGVFDGHGGARAAEYVKKNLFSNLISHPKFISDTKSAITDAYNHTDTELLKSENSHNRDAGSTASTAILVGDRLLVANVGDSRAVICRGGNAIAVSRDHKPDQTDERQRIEEAGGFVMWAGTWRVGGVLAVSRAFGDRLLKQYVVADPEIQEEKVDSSLEFLILASDGLWDVVSNEEAVAMIKPIEDAEEAAKRLMQEAYQRGSADNITCVVVRFLMNQGGSKELVAYPHNSSSAGKNPSVEGLCDI

SEQ ID NO: 10177 - DNA, 529 bp, Glycine max
  misc_feature (1)..(529): Ceres Seq. ID no. 13644527
tccttcgttcgcattttaggcattgaaaactaattgaaggagttgcagtccagcgttgatcagaatcagagcatggacgggcatgattcagaagacccaaagcaaagcactgctgatatgacagcttttgtgcaaaatcttcttcagcagatgcaacttaggttccagacaatgtctgactccatcatttctaagattgatgagatgggagaccgtataaatgagttggagcaaagcatcaatgatttaagatcagagatgggagtggagagcactccatcacctgtggcccctgctaagccaaaggaagaagagtcaaacaaagaagagggttctgcttgagtaatgttacgtgttcaactgccttgtcttttatttttgggtctcgtgtgattcattcaggattttgttactgtatatctagtgaactctctttgctagctaaaacatactgttcaaactatgtaaaaatcacagcactgttggtttattgtgtttttccaattgaagatgggctagattgggtgcc

SEQ ID NO: 10178 - protein, 89 aa, Glycine max
  peptide (1)..(89): Ceres Seq. ID no. 13644528
  misc_feature (1)..(83): NCBI GI NO: 26453171 NR Description: unknown protein [Arabidopsis thaliana]
  misc_feature (5)..(89): NCBI GI NO: 11862947 NR Description: hypothetical protein
  misc_feature (5)..(89): NCBI GI NO: 32352188 NR Description: hypothetical protein
  misc_feature (5)..(89): NCBI GI NO: 38349095 NR Description: heat shock factor binding protein 2 [Zea mays]
  misc_feature (5)..(82): NCBI GI NO: 20257532 NR Description: heat shock factor-binding protein 1 [Zea mays]
  misc_feature (1)..(46): NCBI GI NO: 30683411 NR Description: expressed protein [Arabidopsis thaliana]
  misc_feature (1)..(66): NCBI GI NO: 24583901 NR Description: CG5446-PA [Drosophila melanogaster]
  misc_feature (1)..(66): NCBI GI NO: 30523296 NR Description: HSBP1-like protein [Drosophila yakuba]
  misc_feature (1)..(66): NCBI GI NO: 31234096 NR Description: ENSANGP00000014808 [Anopheles gambiae]
  misc_feature (1)..(66): NCBI GI NO: 30523300 NR Description: HSBP1-like protein [Drosophila simulans]
MDGHDSEDPKQSTADMTAFVQNLLQQMQLRFQTMSDSIISKIDEMGDRINELEQSINDLRSEMGVESTPSPVAPAKPKEEESNKEEGSA

SEQ ID NO: 10179 - protein, 74 aa, Glycine max
  peptide (1)..(74): Ceres Seq. ID no. 13644529
  misc_feature (1)..(68): NCBI GI NO: 26453171 NR Description: unknown protein [Arabidopsis thaliana]
  misc_feature (1)..(74): NCBI GI NO: 11862947 NR Description: hypothetical protein
  misc_feature (1)..(74): NCBI GI NO: 32352188 NR Description: hypothetical protein
  misc_feature (1)..(74): NCBI GI NO: 38349095 NR Description: heat shock factor binding protein 2 [Zea mays]
  misc_feature (1)..(67): NCBI GI NO: 20257532 NR Description: heat shock factor-binding protein 1 [Zea mays]
  misc_feature (1)..(31): NCBI GI NO: 30683411 NR Description: expressed protein [Arabidopsis thaliana]
  misc_feature (1)..(51): NCBI GI NO: 24583901 NR Description: CG5446-PA [Drosophila melanogaster]
  misc_feature (1)..(51): NCBI GI NO: 30523296 NR Description: HSBP1-like protein [Drosophila yakuba]
  misc_feature (1)..(51): NCBI GI NO: 31234096 NR Description: ENSANGP00000014808 [Anopheles gambiae]
  misc_feature (1)..(51): NCBI GI NO: 30523300 NR Description: HSBP1-like protein [Drosophila simulans]
MTAFVQNLLQQMQLRFQTMSDSIISKIDEMGDRINELEQSINDLRSEMGVESTPSPVAPAKPKEEESNKEEGSA

SEQ ID NO: 10180 - protein, 63 aa, Glycine max
  peptide (1)..(63): Ceres Seq. ID no. 13644530
  misc_feature (1)..(57): NCBI GI NO: 26453171 NR Description: unknown protein [Arabidopsis thaliana]
  misc_feature (1)..(63): NCBI GI NO: 11862947 NR Description: hypothetical protein
  misc_feature (1)..(63): NCBI GI NO: 32352188 NR Description: hypothetical protein
  misc_feature (1)..(63): NCBI GI NO: 38349095 NR Description: heat shock factor binding protein 2 [Zea mays]
  misc_feature (1)..(56): NCBI GI NO: 20257532 NR Description: heat shock factor-binding protein 1 [Zea mays]
  misc_feature (1)..(20): NCBI GI NO: 30683411 NR Description: expressed protein [Arabidopsis thaliana]
  misc_feature (1)..(40): NCBI GI NO: 24583901 NR Description: CG5446-PA [Drosophila melanogaster]
  misc_feature (1)..(40): NCBI GI NO: 30523296 NR Description: HSBP1-like protein [Drosophila yakuba]
  misc_feature (1)..(40): NCBI GI NO: 31234096 NR Description: ENSANGP00000014808 [Anopheles gambiae]
  misc_feature (1)..(40): NCBI GI NO: 30523300 NR Description: HSBP1-like protein [Drosophila simulans]
MQLRFQTMSDSIISKIDEMGDRINELEQSINDLRSEMGVESTPSPVAPAKPKEEESNKEEGSA

SEQ ID NO: 10181 - DNA, 1462 bp, Glycine max
  misc_feature (1)..(1462): Ceres Seq. ID no. 14315518
aagttaatcaatcatcgctgtcgttgatcattcagcgcaagtctgcaaatcccatcatcatggcggccataacccgcctcgcgaagcgcgcgttcgtcgtctcttccctggcgaggaggtgcctgagctcctccgtagtcaactgccacgcgccgccgcacgacgccacgtcgttccgcccgtttccgctgcgtgaagattcgagcaagcggtgcgtgcagtgggtgttcctcggctgccccggcgtcggaaaaggaacgtacgctagtcgcctctcgaacctcctcggcgtttctcacatcgccaccggcgatctcgttcgcgacgaactcacctcctctggccccctttcttcccagctatcagaaattgtaaaacaaggtcaattggtgtcagatgaaattattattagtttattgtcaaagagacttgttgccggggaagctaaaggcgatttgggatttattcttgatggttttcctcgaacaattaagcaagcagaaatattggaaggggtaactgacattgacttggtaatcaatctgaagcttcgagaagatgttctgcttgagaaatgccttggtaggagaatttgcaatcagtgtgggggaaattttaatgttgcttccatcaacatcaaggctgagaatgggagccctggaattattatggctccacttcttcctcctgagaattgtatatcaaagctcattactcgatcagatgatactgaagcagtggtcaaagaaaggcttcgaatatacaatgaaatgactcagcctgtggaggaattttaccgttcaagaggaaaattattggagtttaacctgcctggaggaatcccggagtcttggcctaagttgctacatgctcttaatcttgatgattatgaggacaaacgatctgctgcagcataacgatataataatgtatcataacagtaagtatttcattctttgcgtgcatatattgcatgcttggcaattttgcaggacagagagccaaagaaagggaacttccctgctagtattattttggaccaataatgatatttgtaagtgttgtaatctgataagaggataagactggtagtgttgcgttttcttttcatataatttggttatatgggaagggtttcccagcatataatgttattgtgaagagtgaataatatatcacagcattgctagatggatagttggtcaggaatcagcttcgataggactggtgcatcatcactgtactgttgtaaattaaatgtgaatgaacttattctatttaatcatcagattctcgtgatttagggaaggcttttactgaagtaacttccaggaaaaattatttaatatgatgtttcatgttatttgaataagtcttatgatttcacagtactcatgaataactccttttctatgaatgttcttgttgctttaacattcaatgaatagaacaagaattctct

SEQ ID NO: 10182 - protein, 304 aa, Glycine max
  peptide (1)..(304): Ceres Seq. ID no. 14315519
  misc_feature (76)..(194): Pfam Name: Pfam Description:  Adenylate kinase
  misc_feature (117)..(304): NCBI GI NO: 6063552 NR Description: ESTs AU065232
  misc_feature (20)..(120): NCBI GI NO: 6063552 NR Description: ESTs AU065232
  misc_feature (20)..(304): NCBI GI NO: 15228109 NR Description: adenylate kinase -related [Arabidopsis thaliana]
  misc_feature (20)..(304): NCBI GI NO: 32488408 NR Description: OSJNBa0043A12.38
  misc_feature (20)..(304): NCBI GI NO: 29427816 NR Description: Adenylate kinase, chloroplast precursor
  misc_feature (19)..(304): NCBI GI NO: 30687836 NR Description: adenylate kinase -related [Arabidopsis thaliana]
  misc_feature (75)..(280): NCBI GI NO: 23510140 NR Description: adenylate kinase 1 [Plasmodium falciparum 3D7]
  misc_feature (75)..(272): NCBI GI NO: 28212159 NR Description: adenylate kinase [Clostridium tetani E88]
  misc_feature (72)..(294): NCBI GI NO: 18311366 NR Description: adenylate kinase [Clostridium perfringens]
  misc_feature (75)..(295): NCBI GI NO: 15644227 NR Description: adenylate kinase [Thermotoga maritima]
VNQSSLSLIIQRKSANPIIMAAITRLAKRAFVVSSLARRCLSSSVVNCHAPPHDATSFRPFPLREDSSKRCVQWVFLGCPGVGKGTYASRLSNLLGVSHIATGDLVRDELTSSGPLSSQLSEIVKQGQLVSDEIIISLLSKRLVAGEAKGDLGFILDGFPRTIKQAEILEGVTDIDLVINLKLREDVLLEKCLGRRICNQCGGNFNVASINIKAENGSPGIIMAPLLPPENCISKLITRSDDTEAVVKERLRIYNEMTQPVEEFYRSRGKLLEFNLPGGIPESWPKLLHALNLDDYEDKRSAAA

SEQ ID NO: 10183 - protein, 285 aa, Glycine max
  peptide (1)..(285): Ceres Seq. ID no. 14315520
  misc_feature (57)..(175): Pfam Name: Pfam Description:  Adenylate kinase
  misc_feature (98)..(285): NCBI GI NO: 6063552 NR Description: ESTs AU065232
  misc_feature (1)..(101): NCBI GI NO: 6063552 NR Description: ESTs AU065232
  misc_feature (1)..(285): NCBI GI NO: 15228109 NR Description: adenylate kinase -related [Arabidopsis thaliana]
  misc_feature (1)..(285): NCBI GI NO: 32488408 NR Description: OSJNBa0043A12.38
  misc_feature (1)..(285): NCBI GI NO: 29427816 NR Description: Adenylate kinase, chloroplast precursor
  misc_feature (1)..(285): NCBI GI NO: 30687836 NR Description: adenylate kinase -related [Arabidopsis thaliana]
  misc_feature (56)..(261): NCBI GI NO: 23510140 NR Description: adenylate kinase 1 [Plasmodium falciparum 3D7]
  misc_feature (56)..(253): NCBI GI NO: 28212159 NR Description: adenylate kinase [Clostridium tetani E88]
  misc_feature (53)..(275): NCBI GI NO: 18311366 NR Description: adenylate kinase [Clostridium perfringens]
  misc_feature (56)..(276): NCBI GI NO: 15644227 NR Description: adenylate kinase [Thermotoga maritima]
MAAITRLAKRAFVVSSLARRCLSSSVVNCHAPPHDATSFRPFPLREDSSKRCVQWVFLGCPGVGKGTYASRLSNLLGVSHIATGDLVRDELTSSGPLSSQLSEIVKQGQLVSDEIIISLLSKRLVAGEAKGDLGFILDGFPRTIKQAEILEGVTDIDLVINLKLREDVLLEKCLGRRICNQCGGNFNVASINIKAENGSPGIIMAPLLPPENCISKLITRSDDTEAVVKERLRIYNEMTQPVEEFYRSRGKLLEFNLPGGIPESWPKLLHALNLDDYEDKRSAAA

SEQ ID NO: 10184 - DNA, 1585 bp, Glycine max
  misc_feature (1)..(1585): Ceres Seq. ID no. 14308099
ccccccgagaacagagtgtgataatagtaagacagagcacctactcactcgtaaatggcgaggaagaagatcagagagtaccactccaagaggcttctcaaggagcatctcaaacgtctcgcctctatcgacctccaaatcctctcagctcaggtgacagaatctacggatttcactgagctgacagaccagcatccatggctttcgtcaaccagattggtcgtcaagccagacatgctgttcgggaagcgcggcaagagtggcttagttgctctcaatttagacatagctcaagtcgccgagttcgtcaaagcacgcctcggcgttgaggttgagatgggaggttgcaaggcgcctataaccacttttattgtcgaaccgtttgttcctcacgaccaagagttttatctgtctattgtttctgaaaggcttggctccactatcagcttctccgaatgtggcggcattgaaattgaagagaattgggataaggtcaaaactatattccttccgacggaaaaaccattgactccggaggcatgtgcgccattgattgctatacttcctttggagattagggggacaattggcgatttcataatgggtgtgtttgctgtcttcaaagatctggacttcagttttttagagatgaatccatttacactggtgaatgaaaagccatatccactggatatgagaggggaattggatgacactgccgcattcaagaacttcaacaagtggggtaatatagaatttccattgccttttggaagaattctgagccctacagaaagcttcattcattccttggatgataagacaagtgcatcattgaaatttactatattgaatccgaaaggacgcatatggacaatggtagcaggaggtggtgcaagtgtaatttatgctgatacggttggagatttaggctatgcatcagagcttggaaactatgctgagtatagtggagctccgaatgaggaggaggtgttgcagtatgcaagagttgtaattgattgtgctactgaagaccccgatggccgtaagagagcccttcttattggaggtggcatagcaaacttcactgatgttgctgccacattcaacgggattattcgagccctgaaagagaaggaatcaaagcttaaagcagcgcaaatgcacatatatgtcagaagaggtggtccaaactaccagactggtttggcaaagatgcgtgcattgggggaggagttgggagtaccaattcaggtttatggaccggaggccacgatgacgggtatctgcaaacaagctattgattgcatcatgtccgaagcataaagaagattaatttttgtctcatcatgtttcatttgtgaaactaatttggtggtgttttgatggatatattgatataagtccataatctgaaccaaagcaaagagtaataaggtgaagatgatagatgttacaagcctgaaactgttaaattcttatcttttcttcctattgtgattttattgttatattttgactaaacattataaaaatccccaatagtatccgtgaaaaatgtaatcttagttggcgatttttcctc

SEQ ID NO: 10185 - protein, 423 aa, Glycine max
  peptide (1)..(423): Ceres Seq. ID no. 14308100
  misc_feature (1)..(420): NCBI GI NO: 15217510 NR Description: expressed protein [Arabidopsis thaliana]
  misc_feature (1)..(423): NCBI GI NO: 15919089 NR Description: ATP citrate lyase b-subunit [Lupinus albus]
  misc_feature (1)..(423): NCBI GI NO: 15220186 NR Description: ATP citrate-lyase -related [Arabidopsis thaliana]
  misc_feature (1)..(423): NCBI GI NO: 21593129 NR Description: ATP citrate-lyase, putative [Arabidopsis thaliana]
  misc_feature (1)..(423): NCBI GI NO: 15219818 NR Description: ATP citrate-lyase -related [Arabidopsis thaliana]
  misc_feature (1)..(423): NCBI GI NO: 19698853 NR Description: similar to ATP-citrate-lyase
  misc_feature (1)..(416): NCBI GI NO: 38569421 NR Description: ATP citrate lyase isoform 1 [Homo sapiens]
  misc_feature (1)..(416): NCBI GI NO: 38569423 NR Description: ATP citrate lyase isoform 2 [Homo sapiens]
  misc_feature (1)..(416): NCBI GI NO: 20141248 NR Description: ATP-citrate synthase
  misc_feature (1)..(415): NCBI GI NO: 8392839 NR Description: ATP citrate lyase [Rattus norvegicus]
MARKKIREYHSKRLLKEHLKRLASIDLQILSAQVTESTDFTELTDQHPWLSSTRLVVKPDMLFGKRGKSGLVALNLDIAQVAEFVKARLGVEVEMGGCKAPITTFIVEPFVPHDQEFYLSIVSERLGSTISFSECGGIEIEENWDKVKTIFLPTEKPLTPEACAPLIAILPLEIRGTIGDFIMGVFAVFKDLDFSFLEMNPFTLVNEKPYPLDMRGELDDTAAFKNFNKWGNIEFPLPFGRILSPTESFIHSLDDKTSASLKFTILNPKGRIWTMVAGGGASVIYADTVGDLGYASELGNYAEYSGAPNEEEVLQYARVVIDCATEDPDGRKRALLIGGGIANFTDVAATFNGIIRALKEKESKLKAAQMHIYVRRGGPNYQTGLAKMRALGEELGVPIQVYGPEATMTGICKQAIDCIMSEA

SEQ ID NO: 10186 - protein, 363 aa, Glycine max
  peptide (1)..(363): Ceres Seq. ID no. 14308101
  misc_feature (1)..(360): NCBI GI NO: 15217510 NR Description: expressed protein [Arabidopsis thaliana]
  misc_feature (1)..(363): NCBI GI NO: 15919089 NR Description: ATP citrate lyase b-subunit [Lupinus albus]
  misc_feature (1)..(363): NCBI GI NO: 15220186 NR Description: ATP citrate-lyase -related [Arabidopsis thaliana]
  misc_feature (1)..(363): NCBI GI NO: 21593129 NR Description: ATP citrate-lyase, putative [Arabidopsis thaliana]
  misc_feature (1)..(363): NCBI GI NO: 15219818 NR Description: ATP citrate-lyase -related [Arabidopsis thaliana]
  misc_feature (1)..(363): NCBI GI NO: 19698853 NR Description: similar to ATP-citrate-lyase
  misc_feature (1)..(356): NCBI GI NO: 38569421 NR Description: ATP citrate lyase isoform 1 [Homo sapiens]
  misc_feature (1)..(356): NCBI GI NO: 38569423 NR Description: ATP citrate lyase isoform 2 [Homo sapiens]
  misc_feature (1)..(356): NCBI GI NO: 20141248 NR Description: ATP-citrate synthase
  misc_feature (1)..(355): NCBI GI NO: 8392839 NR Description: ATP citrate lyase [Rattus norvegicus]
MLFGKRGKSGLVALNLDIAQVAEFVKARLGVEVEMGGCKAPITTFIVEPFVPHDQEFYLSIVSERLGSTISFSECGGIEIEENWDKVKTIFLPTEKPLTPEACAPLIAILPLEIRGTIGDFIMGVFAVFKDLDFSFLEMNPFTLVNEKPYPLDMRGELDDTAAFKNFNKWGNIEFPLPFGRILSPTESFIHSLDDKTSASLKFTILNPKGRIWTMVAGGGASVIYADTVGDLGYASELGNYAEYSGAPNEEEVLQYARVVIDCATEDPDGRKRALLIGGGIANFTDVAATFNGIIRALKEKESKLKAAQMHIYVRRGGPNYQTGLAKMRALGEELGVPIQVYGPEATMTGICKQAIDCIMSEA

SEQ ID NO: 10187 - protein, 329 aa, Glycine max
  peptide (1)..(329): Ceres Seq. ID no. 14308102
  misc_feature (1)..(326): NCBI GI NO: 15217510 NR Description: expressed protein [Arabidopsis thaliana]
  misc_feature (1)..(329): NCBI GI NO: 15919089 NR Description: ATP citrate lyase b-subunit [Lupinus albus]
  misc_feature (1)..(329): NCBI GI NO: 15220186 NR Description: ATP citrate-lyase -related [Arabidopsis thaliana]
  misc_feature (1)..(329): NCBI GI NO: 21593129 NR Description: ATP citrate-lyase, putative [Arabidopsis thaliana]
  misc_feature (1)..(329): NCBI GI NO: 15219818 NR Description: ATP citrate-lyase -related [Arabidopsis thaliana]
  misc_feature (1)..(329): NCBI GI NO: 19698853 NR Description: similar to ATP-citrate-lyase
  misc_feature (1)..(322): NCBI GI NO: 38569421 NR Description: ATP citrate lyase isoform 1 [Homo sapiens]
  misc_feature (1)..(322): NCBI GI NO: 38569423 NR Description: ATP citrate lyase isoform 2 [Homo sapiens]
  misc_feature (1)..(322): NCBI GI NO: 20141248 NR Description: ATP-citrate synthase
  misc_feature (1)..(321): NCBI GI NO: 8392839 NR Description: ATP citrate lyase [Rattus norvegicus]
MGGCKAPITTFIVEPFVPHDQEFYLSIVSERLGSTISFSECGGIEIEENWDKVKTIFLPTEKPLTPEACAPLIAILPLEIRGTIGDFIMGVFAVFKDLDFSFLEMNPFTLVNEKPYPLDMRGELDDTAAFKNFNKWGNIEFPLPFGRILSPTESFIHSLDDKTSASLKFTILNPKGRIWTMVAGGGASVIYADTVGDLGYASELGNYAEYSGAPNEEEVLQYARVVIDCATEDPDGRKRALLIGGGIANFTDVAATFNGIIRALKEKESKLKAAQMHIYVRRGGPNYQTGLAKMRALGEELGVPIQVYGPEATMTGICKQAIDCIMSEA

SEQ ID NO: 10188 - DNA, 1622 bp, Glycine max
  misc_feature (1)..(1622): Ceres Seq. ID no. 15226087
accgggccccccctygagtcagctacgtaggccccccccccccccaaaacccacaaacacttgagtcagacaaaaagatggaaacctctaataacaaccatgatgctcctcctccacctctacttaaagacctgaaggtgaccatccacaatgcctccatgatttttccatccaaagagattgagagaaagtcccttttcttgtcaaacattgacaaggtcctcaactttgatgtggaaacggttcacttctttggtgcccacaaagattttcctcctcatgttgtgaatgagaggctcaagaatgccctagaggatgcccttgtggtttatgacttcttgggtggaagattgaagctcaactatgacaccaaaagattggagatggattgtaatccagagggagctggattcgtggtggcttccagcgagtacaatttggatcagataggggacttggattatccaaatccagcttttgcacaattggtacatcagaataaggattttcttaaagatggtgatgttccactctgtgttgcccaggtgacatccttcaagtgtggtggttttgcaattggcatatctactagccacaccacctttgatggcctcagcttcaaaaccttcctagacaacattgcttcaatagccgctaagaagcccttggttgtcacgccctgtcatgacaggcacctcctagccgcccgatccccaccacgtgtcaccttcccacaccctgagatgctcaagctaagtgaccagctcccaacatgccccgagtccaacatctttgaggcctccaccgaacaacttgatttcaaggtcttcaaactaacattaaacgacatcacaaaattgaaggaagaggctaggaattcttcaattagtggtggcctaagtactaaatgtgtcactggctttaacgttatcactgcctacatatggagatgcaaggcactttcgtgctacaatgatgagaaccgtaataggtcatcaactatactatatgctgtagatatacgttcaagattgaaccctccattgcctaaatcatacgcgggtaacgcagtgttaactgcttatgccacggcaaagtgtaaggagctagaagaatggccttttatgaagctagttgaaatggtgcgtgagggagcaactaggatgacaaatgagtatgcaagatctatcatagattggggagagataaacaatgggtttcccaatggggaggttttggtgtcttcatggtggagattagggtttgaggaagtggagtatccgtgggggaagccaaagtattgttgcccagtggtgtatcataagaaggatattattttgttgtttcctccggttggtggaggtgaaggggtgagtattattgtggctcttcctcctaaggaaatggaaaaattccatgggctcttcaacaagttcttgacttcacattgagggaaatgatgggtctttcttcctcctcctatggaaatggaaagattccatgcatgcttaagttcatgacttgagaattatgtctctccctctattgatatccttattaatatgacatctttagcttttcgctagttgttatgtaataaagtatgattctttytgggtttt

SEQ ID NO: 10189 - protein, 482 aa, Glycine max
  peptide (1)..(482): Ceres Seq. ID no. 15226088
  misc_feature (44)..(475): Pfam Name: Pfam Description:  Transferase family
  misc_feature (31)..(479): NCBI GI NO: 7487802 NR Description: hypothetical protein T8F5
  misc_feature (192)..(479): NCBI GI NO: 18408287 NR Description: anthranilate N-hydroxycinnamoyl/benzoyltransferase
  misc_feature (30)..(475): NCBI GI NO: 30693723 NR Description: transferase family [Arabidopsis thaliana]
  misc_feature (30)..(475): NCBI GI NO: 30693725 NR Description: transferase family [Arabidopsis thaliana]
  misc_feature (52)..(479): NCBI GI NO: 20161743 NR Description: N-hydroxycinnamoyl/benzoyltransferase-like protein
  misc_feature (46)..(474): NCBI GI NO: 15229017 NR Description: transferase family [Arabidopsis thaliana]
  misc_feature (46)..(474): NCBI GI NO: 34222064 NR Description: At3g48720 [Arabidopsis thaliana]
  misc_feature (44)..(479): NCBI GI NO: 27475616 NR Description: hydroxycinnamoyl transferase [Nicotiana tabacum]
  misc_feature (44)..(479): NCBI GI NO: 15239747 NR Description: anthranilate N-hydroxycinnamoyl/ benzoyltransferasefamily
  misc_feature (44)..(479): NCBI GI NO: 21536883 NR Description: anthranilate N-benzoyltransferase
  misc_feature (5)..(5): Xaa is any aa, unknown or other
RAPPXVSYVGPPPPQNPQTLESDKKMETSNNNHDAPPPPLLKDLKVTIHNASMIFPSKEIERKSLFLSNIDKVLNFDVETVHFFGAHKDFPPHVVNERLKNALEDALVVYDFLGGRLKLNYDTKRLEMDCNPEGAGFVVASSEYNLDQIGDLDYPNPAFAQLVHQNKDFLKDGDVPLCVAQVTSFKCGGFAIGISTSHTTFDGLSFKTFLDNIASIAAKKPLVVTPCHDRHLLAARSPPRVTFPHPEMLKLSDQLPTCPESNIFEASTEQLDFKVFKLTLNDITKLKEEARNSSISGGLSTKCVTGFNVITAYIWRCKALSCYNDENRNRSSTILYAVDIRSRLNPPLPKSYAGNAVLTAYATAKCKELEEWPFMKLVEMVREGATRMTNEYARSIIDWGEINNGFPNGEVLVSSWWRLGFEEVEYPWGKPKYCCPVVYHKKDIILLFPPVGGGEGVSIIVALPPKEMEKFHGLFNKFLTSH

SEQ ID NO: 10190 - protein, 457 aa, Glycine max
  peptide (1)..(457): Ceres Seq. ID no. 15226089
  misc_feature (19)..(450): Pfam Name: Pfam Description:  Transferase family
  misc_feature (6)..(454): NCBI GI NO: 7487802 NR Description: hypothetical protein T8F5
  misc_feature (167)..(454): NCBI GI NO: 18408287 NR Description: anthranilate N-hydroxycinnamoyl/benzoyltransferase
  misc_feature (5)..(450): NCBI GI NO: 30693723 NR Description: transferase family [Arabidopsis thaliana]
  misc_feature (5)..(450): NCBI GI NO: 30693725 NR Description: transferase family [Arabidopsis thaliana]
  misc_feature (27)..(454): NCBI GI NO: 20161743 NR Description: N-hydroxycinnamoyl/benzoyltransferase-like protein
  misc_feature (21)..(449): NCBI GI NO: 15229017 NR Description: transferase family [Arabidopsis thaliana]
  misc_feature (21)..(449): NCBI GI NO: 34222064 NR Description: At3g48720 [Arabidopsis thaliana]
  misc_feature (19)..(454): NCBI GI NO: 27475616 NR Description: hydroxycinnamoyl transferase [Nicotiana tabacum]
  misc_feature (19)..(454): NCBI GI NO: 15239747 NR Description: anthranilate N-hydroxycinnamoyl/ benzoyltransferasefamily
  misc_feature (19)..(454): NCBI GI NO: 21536883 NR Description: anthranilate N-benzoyltransferase
METSNNNHDAPPPPLLKDLKVTIHNASMIFPSKEIERKSLFLSNIDKVLNFDVETVHFFGAHKDFPPHVVNERLKNALEDALVVYDFLGGRLKLNYDTKRLEMDCNPEGAGFVVASSEYNLDQIGDLDYPNPAFAQLVHQNKDFLKDGDVPLCVAQVTSFKCGGFAIGISTSHTTFDGLSFKTFLDNIASIAAKKPLVVTPCHDRHLLAARSPPRVTFPHPEMLKLSDQLPTCPESNIFEASTEQLDFKVFKLTLNDITKLKEEARNSSISGGLSTKCVTGFNVITAYIWRCKALSCYNDENRNRSSTILYAVDIRSRLNPPLPKSYAGNAVLTAYATAKCKELEEWPFMKLVEMVREGATRMTNEYARSIIDWGEINNGFPNGEVLVSSWWRLGFEEVEYPWGKPKYCCPVVYHKKDIILLFPPVGGGEGVSIIVALPPKEMEKFHGLFNKFLTSH

SEQ ID NO: 10191 - protein, 430 aa, Glycine max
  peptide (1)..(430): Ceres Seq. ID no. 15226090
  misc_feature (1)..(423): Pfam Name: Pfam Description:  Transferase family
  misc_feature (1)..(427): NCBI GI NO: 7487802 NR Description: hypothetical protein T8F5
  misc_feature (140)..(427): NCBI GI NO: 18408287 NR Description: anthranilate N-hydroxycinnamoyl/benzoyltransferase
  misc_feature (1)..(423): NCBI GI NO: 30693723 NR Description: transferase family [Arabidopsis thaliana]
  misc_feature (1)..(423): NCBI GI NO: 30693725 NR Description: transferase family [Arabidopsis thaliana]
  misc_feature (1)..(427): NCBI GI NO: 20161743 NR Description: N-hydroxycinnamoyl/benzoyltransferase-like protein
  misc_feature (1)..(422): NCBI GI NO: 15229017 NR Description: transferase family [Arabidopsis thaliana]
  misc_feature (1)..(422): NCBI GI NO: 34222064 NR Description: At3g48720 [Arabidopsis thaliana]
  misc_feature (1)..(427): NCBI GI NO: 27475616 NR Description: hydroxycinnamoyl transferase [Nicotiana tabacum]
  misc_feature (1)..(427): NCBI GI NO: 15239747 NR Description: anthranilate N-hydroxycinnamoyl/ benzoyltransferasefamily
  misc_feature (1)..(427): NCBI GI NO: 21536883 NR Description: anthranilate N-benzoyltransferase
MIFPSKEIERKSLFLSNIDKVLNFDVETVHFFGAHKDFPPHVVNERLKNALEDALVVYDFLGGRLKLNYDTKRLEMDCNPEGAGFVVASSEYNLDQIGDLDYPNPAFAQLVHQNKDFLKDGDVPLCVAQVTSFKCGGFAIGISTSHTTFDGLSFKTFLDNIASIAAKKPLVVTPCHDRHLLAARSPPRVTFPHPEMLKLSDQLPTCPESNIFEASTEQLDFKVFKLTLNDITKLKEEARNSSISGGLSTKCVTGFNVITAYIWRCKALSCYNDENRNRSSTILYAVDIRSRLNPPLPKSYAGNAVLTAYATAKCKELEEWPFMKLVEMVREGATRMTNEYARSIIDWGEINNGFPNGEVLVSSWWRLGFEEVEYPWGKPKYCCPVVYHKKDIILLFPPVGGGEGVSIIVALPPKEMEKFHGLFNKFLTSH

SEQ ID NO: 10192 - DNA, 999 bp, Glycine max
  misc_feature (1)..(999): Ceres Seq. ID no. 15173624
acaaattccatacaacactctatccctcgttctttctctctctctctctctctctctctctagccagctttggttagacaacatagttctgaccaacatggtgcaatcaaggaaattcagaggtgtgaggcaacgccattggggctcttgggtttctgagattcgtcacccattattgaaaaggagggtgtggcttgggacattcgagacagctgaggaagcagcaagagcatatgatgaggcagccattttgatgagtggaagaaatgcaaaaacaaacttcccagttggtgaaaaccaaatagtgggaaatcacagttcaaacacttcctcttcctccactacaacattgtctgcagttctgagtgcgaagctgagaaagtgttgcaagtccccttcaccttccctcacttgcctgaggcttgacactgagaattcccacattggtgtgtggcagaagcgagcggggcctcgttccgactcaaactggatcatgatggttgagttggaaaataagaacaacgacaacgagggtgatcatcatcagggtccttcttcttctgatgattcagaatttcctgttgttgttgttgatgttgatgcccaagagaaggtaaagcctgaagaagaaagcactggcttagatgaggaacagaaaatggccctacagatgatagaggaacttctcaataggaattgaattggattagccctatcatcccaacatgcttttactttcacgtggtgcatgcaaggagtttcaagttcaagttctccctctctagcacttcgttttatttctttgtttgtccaaaataggataggagagtgggagtgagagtgctactatattattattcatttcgtgaggaatgaggatgtttagtgtctgtggctgtgaatgtttccccctctgtgtgtaactacctacctacattcactatatatgtggttaaacttcatttcttctgtaaaaaaactattccttgatgcttttcg

SEQ ID NO: 10193 - protein, 232 aa, Glycine max
  peptide (1)..(232): Ceres Seq. ID no. 15173625
  misc_feature (36)..(99): Pfam Name: Pfam Description:  AP2 domain
  misc_feature (33)..(232): NCBI GI NO: 15218134 NR Description: ethylene responsive element binding factor 2
  misc_feature (33)..(232): NCBI GI NO: 21553845 NR Description: putative ethylene responsive element
  misc_feature (33)..(230): NCBI GI NO: 15238976 NR Description: putative protein; protein id: At5g11190.1
  misc_feature (33)..(178): NCBI GI NO: 15239413 NR Description: AP2 domain transcription factor, putative
  misc_feature (33)..(178): NCBI GI NO: 30689846 NR Description: AP2 domain transcription factor, putative
  misc_feature (37)..(128): NCBI GI NO: 15238727 NR Description: ethylene responsive element binding protein
  misc_feature (37)..(128): NCBI GI NO: 18650662 NR Description: ethylene response factor 1
  misc_feature (38)..(133): NCBI GI NO: 38343976 NR Description: OSJNBb0022F16.15
  misc_feature (37)..(128): NCBI GI NO: 131754 NR Description: PPLZ02 PROTEIN
  misc_feature (29)..(125): NCBI GI NO: 8809573 NR Description: ethylene-responsive element binding factor
QIPYNTLSLVLSLSLSLSLSSQLWLDNIVLTNMVQSRKFRGVRQRHWGSWVSEIRHPLLKRRVWLGTFETAEEAARAYDEAAILMSGRNAKTNFPVGENQIVGNHSSNTSSSSTTTLSAVLSAKLRKCCKSPSPSLTCLRLDTENSHIGVWQKRAGPRSDSNWIMMVELENKNNDNEGDHHQGPSSSDDSEFPVVVVDVDAQEKVKPEEESTGLDEEQKMALQMIEELLNRN

SEQ ID NO: 10194 - protein, 200 aa, Glycine max
  peptide (1)..(200): Ceres Seq. ID no. 15173626
  misc_feature (4)..(67): Pfam Name: Pfam Description:  AP2 domain
  misc_feature (1)..(200): NCBI GI NO: 15218134 NR Description: ethylene responsive element binding factor 2
  misc_feature (1)..(200): NCBI GI NO: 21553845 NR Description: putative ethylene responsive element
  misc_feature (1)..(198): NCBI GI NO: 15238976 NR Description: putative protein; protein id: At5g11190.1
  misc_feature (1)..(146): NCBI GI NO: 15239413 NR Description: AP2 domain transcription factor, putative
  misc_feature (1)..(146): NCBI GI NO: 30689846 NR Description: AP2 domain transcription factor, putative
  misc_feature (5)..(96): NCBI GI NO: 15238727 NR Description: ethylene responsive element binding protein
  misc_feature (5)..(96): NCBI GI NO: 18650662 NR Description: ethylene response factor 1
  misc_feature (6)..(101): NCBI GI NO: 38343976 NR Description: OSJNBb0022F16.15
  misc_feature (5)..(96): NCBI GI NO: 131754 NR Description: PPLZ02 PROTEIN
  misc_feature (1)..(93): NCBI GI NO: 8809573 NR Description: ethylene-responsive element binding factor
MVQSRKFRGVRQRHWGSWVSEIRHPLLKRRVWLGTFETAEEAARAYDEAAILMSGRNAKTNFPVGENQIVGNHSSNTSSSSTTTLSAVLSAKLRKCCKSPSPSLTCLRLDTENSHIGVWQKRAGPRSDSNWIMMVELENKNNDNEGDHHQGPSSSDDSEFPVVVVDVDAQEKVKPEEESTGLDEEQKMALQMIEELLNRN

SEQ ID NO: 10195 - protein, 148 aa, Glycine max
  peptide (1)..(148): Ceres Seq. ID no. 15173627
  misc_feature (1)..(148): NCBI GI NO: 15218134 NR Description: ethylene responsive element binding factor 2
  misc_feature (1)..(148): NCBI GI NO: 21553845 NR Description: putative ethylene responsive element
  misc_feature (1)..(146): NCBI GI NO: 15238976 NR Description: putative protein; protein id: At5g11190.1
  misc_feature (1)..(94): NCBI GI NO: 15239413 NR Description: AP2 domain transcription factor, putative
  misc_feature (1)..(94): NCBI GI NO: 30689846 NR Description: AP2 domain transcription factor, putative
  misc_feature (1)..(44): NCBI GI NO: 15238727 NR Description: ethylene responsive element binding protein
  misc_feature (1)..(44): NCBI GI NO: 18650662 NR Description: ethylene response factor 1
  misc_feature (1)..(49): NCBI GI NO: 38343976 NR Description: OSJNBb0022F16.15
  misc_feature (1)..(44): NCBI GI NO: 131754 NR Description: PPLZ02 PROTEIN
  misc_feature (1)..(41): NCBI GI NO: 8809573 NR Description: ethylene-responsive element binding factor
MSGRNAKTNFPVGENQIVGNHSSNTSSSSTTTLSAVLSAKLRKCCKSPSPSLTCLRLDTENSHIGVWQKRAGPRSDSNWIMMVELENKNNDNEGDHHQGPSSSDDSEFPVVVVDVDAQEKVKPEEESTGLDEEQKMALQMIEELLNRN

SEQ ID NO: 10196 - DNA, 1798 bp, Glycine max
  misc_feature (1)..(1798): Ceres Seq. ID no. 14308232
aaagtctgctcttgcattacaaagactagttcaagctgctgtatggtttcttggggaaaatgcaaattatgctgcttctgaatatgcttgggaatctgctaccccgcctggtactgcattgatgatgttagatgctgataaaatggttgctgctgctagttctcgtaatcctactctagctggtgccttgacaaggctccagaggtgcgcattcaatggcagctgggagattcgaattattgctgctcaagctcttacaacaatggcaattagatctggggaacctttcaggttacagatttatgagtttctgcacactttggcgcaaggtggtattcagtcacagttctctgatatgcatcttagtaatggagaagatcaaggagcaagtggtacaggccttggagttttattaagtcctatgataaaggttctggatgagatgtatagagcacaagatgatttgatcaaggaaatacgcaatcatgacaatgctaagaaagaatggactgatgatgaactgaagaaactatatgaaacccatgaaaggctgctagatcttgtttcattgttttgttatgttccaagaacaaagtatctacctttgggcccaataagtgccaaactcattgacatctatcgtacacgccacaatattagttcatctactggtttgagtgatccagctgttgccactggtatatctgatcttgtctatgaatcccaaccaccacctgctgagcctgatacacttgatgatgacctagtaaatgcttgggcagcaaaccttggtgatgatggcttatggggaaacaatgcaccagcaatgaatagggtaaatgaatttctggcaggtgctggaacagacgccccagaagttgatgaagagaatatgatctctaggccttcagttagctatgatgatatgtgggcaaaaacacttctagaatcttctgagctagaggaagatgatgcaaagtcattgggatcatcatctccagattcaacaggatcagttgaaacttcgatatcatcccactttggaggaatgagctacccttcgctgtttagttcccgaccacaaactacggataaggcaccagcaagccgaggctctatgtatgagggttatggttctccgataagagaagagcctccgtcatactcatcctctgtcatgcaaagacacgagtcatttgagaacccccttgcagggaatggattgcacagttttgggtctcaagatgatgagcgagcttcatctggaaatcctcaacatggaagtgcactttatgacttcacagcaggaggagacgatgaattgagtttaaccgcaggagaagaagtcgacattgagtacgaagtagatggctggttttatgttaagaagaaacgccctggtagggatggcaagatggctggactggttcctgttttatatgttagtcaatcttgaatcatgtacgtaagctattgtaacttccgattcttgcaaaaaggctttttttgctttattttatccagtgttgctttcattcaaagtttccatgttcccatgtagcatgccattctggctgttctccttcaaagtatcttgtatcctggtccctacctaattcgtctagttgtatgctatcaaagtatcatttaccatgctaattggttgcgagtgtctagtcattcatcatagtaggcctttcattctattatatttatattttacatacagctattggtgtacgagtgtttgtttttatacaaggaatttaatatatcaagtgaaagtttcacgtttttc

SEQ ID NO: 10197 - protein, 484 aa, Glycine max
  peptide (1)..(484): Ceres Seq. ID no. 14308233
  misc_feature (427)..(484): Pfam Name: Pfam Description:  SH3 domain
  misc_feature (1)..(484): NCBI GI NO: 29824397 NR Description: unknown protein [Arabidopsis thaliana]
  misc_feature (14)..(375): NCBI GI NO: 15225702 NR Description: SH3 domain-containing protein
  misc_feature (1)..(420): NCBI GI NO: 34902004 NR Description: unknown protein
  misc_feature (241)..(484): NCBI GI NO: 15225702 NR Description: SH3 domain-containing protein
  misc_feature (289)..(482): NCBI GI NO: 34902004 NR Description: unknown protein
KSALALQRLVQAAVWFLGENANYAASEYAWESATPPGTALMMLDADKMVAAASSRNPTLAGALTRLQRCAFNGSWEIRIIAAQALTTMAIRSGEPFRLQIYEFLHTLAQGGIQSQFSDMHLSNGEDQGASGTGLGVLLSPMIKVLDEMYRAQDDLIKEIRNHDNAKKEWTDDELKKLYETHERLLDLVSLFCYVPRTKYLPLGPISAKLIDIYRTRHNISSSTGLSDPAVATGISDLVYESQPPPAEPDTLDDDLVNAWAANLGDDGLWGNNAPAMNRVNEFLAGAGTDAPEVDEENMISRPSVSYDDMWAKTLLESSELEEDDAKSLGSSSPDSTGSVETSISSHFGGMSYPSLFSSRPQTTDKAPASRGSMYEGYGSPIREEPPSYSSSVMQRHESFENPLAGNGLHSFGSQDDERASSGNPQHGSALYDFTAGGDDELSLTAGEEVDIEYEVDGWFYVKKKRPGRDGKMAGLVPVLYVSQS

SEQ ID NO: 10198 - protein, 444 aa, Glycine max
  peptide (1)..(444): Ceres Seq. ID no. 14308234
  misc_feature (387)..(444): Pfam Name: Pfam Description:  SH3 domain
  misc_feature (1)..(444): NCBI GI NO: 29824397 NR Description: unknown protein [Arabidopsis thaliana]
  misc_feature (1)..(335): NCBI GI NO: 15225702 NR Description: SH3 domain-containing protein
  misc_feature (1)..(380): NCBI GI NO: 34902004 NR Description: unknown protein
  misc_feature (201)..(444): NCBI GI NO: 15225702 NR Description: SH3 domain-containing protein
  misc_feature (249)..(442): NCBI GI NO: 34902004 NR Description: unknown protein
MMLDADKMVAAASSRNPTLAGALTRLQRCAFNGSWEIRIIAAQALTTMAIRSGEPFRLQIYEFLHTLAQGGIQSQFSDMHLSNGEDQGASGTGLGVLLSPMIKVLDEMYRAQDDLIKEIRNHDNAKKEWTDDELKKLYETHERLLDLVSLFCYVPRTKYLPLGPISAKLIDIYRTRHNISSSTGLSDPAVATGISDLVYESQPPPAEPDTLDDDLVNAWAANLGDDGLWGNNAPAMNRVNEFLAGAGTDAPEVDEENMISRPSVSYDDMWAKTLLESSELEEDDAKSLGSSSPDSTGSVETSISSHFGGMSYPSLFSSRPQTTDKAPASRGSMYEGYGSPIREEPPSYSSSVMQRHESFENPLAGNGLHSFGSQDDERASSGNPQHGSALYDFTAGGDDELSLTAGEEVDIEYEVDGWFYVKKKRPGRDGKMAGLVPVLYVSQS

SEQ ID NO: 10199 - protein, 443 aa, Glycine max
  peptide (1)..(443): Ceres Seq. ID no. 14308235
  misc_feature (386)..(443): Pfam Name: Pfam Description:  SH3 domain
  misc_feature (1)..(443): NCBI GI NO: 29824397 NR Description: unknown protein [Arabidopsis thaliana]
  misc_feature (1)..(334): NCBI GI NO: 15225702 NR Description: SH3 domain-containing protein
  misc_feature (1)..(379): NCBI GI NO: 34902004 NR Description: unknown protein
  misc_feature (200)..(443): NCBI GI NO: 15225702 NR Description: SH3 domain-containing protein
  misc_feature (248)..(441): NCBI GI NO: 34902004 NR Description: unknown protein
MLDADKMVAAASSRNPTLAGALTRLQRCAFNGSWEIRIIAAQALTTMAIRSGEPFRLQIYEFLHTLAQGGIQSQFSDMHLSNGEDQGASGTGLGVLLSPMIKVLDEMYRAQDDLIKEIRNHDNAKKEWTDDELKKLYETHERLLDLVSLFCYVPRTKYLPLGPISAKLIDIYRTRHNISSSTGLSDPAVATGISDLVYESQPPPAEPDTLDDDLVNAWAANLGDDGLWGNNAPAMNRVNEFLAGAGTDAPEVDEENMISRPSVSYDDMWAKTLLESSELEEDDAKSLGSSSPDSTGSVETSISSHFGGMSYPSLFSSRPQTTDKAPASRGSMYEGYGSPIREEPPSYSSSVMQRHESFENPLAGNGLHSFGSQDDERASSGNPQHGSALYDFTAGGDDELSLTAGEEVDIEYEVDGWFYVKKKRPGRDGKMAGLVPVLYVSQS

SEQ ID NO: 10200 - DNA, 1321 bp, Glycine max
  misc_feature (1)..(1321): Ceres Seq. ID no. 14308698
aacgcgcattttagggacaaaattactggtaacatgtcaaaaaatgagattagagagtgctcattgatgacagttggatcaagttactgtggtagcaatcacatcccccaagatccagatgcaagcagggcatcaagcaatggtgtctggactactactttatccgccgagcctgaagctgttagagaccatgtgccgagaacaagtcctcagaatgaaaaagggaaatcggagatgcttgaaccaactacaacttcatcatccggtggctcaggtagtagtcttggaaaaaattgttcgctatctacgagaaaccagggccaaaaaagaaaaggaatagatgtggaagaatctgaggagcaaagtgaggacacagaacttaaatcagcacttggaaacaagtcatctcaacgtgcagggttggctcgaaggaaccgcgctgctgaagtgcataatctatctgaaaggagaaggagagaccggatcaatgagaagatgaaggcattgcaacaactcatacctcacagtagcaagacagacaaagcatcaatgttggaagaggcaatcgaatacttgaaatcacttcagttacaacttcagctaatgtggatgggatctggcatggcaccaattatgtttccaggaattcagcactatatgtcacaaatgggtatgggaatggctacaccgcctttccctcctattcacaatccgatgcaattaccgagactgccgcttgatcagtctgtatctgcgtctcagacaccaaaccagacattaatgagccaaaatcctattttgggtgcctttaattaccacaatcagatgcaaaatccagctctttcagagcaatatgcgcgttacatgggctatcatcttatgcaaaatgcctctcagccaatgaatgtattcagatatggtccccagggggtacggcatagtcaaacaatgattacacccagcaacagcagtggaaacatgagtggagcagcaaatattgatgaggctgtgagtggcaaaatgggttaattagtttcaaagcatgcttttgagtacctatggcgtaactaacaagataattgcaagatgatagaagcccttgtaaggcttgtatgctttcacaatatgtctgcctgttcatacagtggctgatctacagttatgtgagggtctagggtcagcacttgtacttccttatttttttaaaaattaattaaatttgtaaataaaattttatacttttatattttatttcatctatatttatataattgaacccactgattttattttttataatttacatccatcgatttaaggt

SEQ ID NO: 10201 - protein, 342 aa, Glycine max
  peptide (1)..(342): Ceres Seq. ID no. 14308699
  misc_feature (147)..(196): Pfam Name: Pfam Description:  Helix-loop-helix DNA-binding domain
  misc_feature (69)..(324): NCBI GI NO: 30689224 NR Description: transcription factor (BHLH9) -related
  misc_feature (69)..(324): NCBI GI NO: 30689218 NR Description: transcription factor (BHLH9) -related
  misc_feature (21)..(342): NCBI GI NO: 30694924 NR Description: bHLH protein family [Arabidopsis thaliana]
  misc_feature (69)..(324): NCBI GI NO: 25408828 NR Description: hypothetical protein At2g43010
  misc_feature (21)..(342): NCBI GI NO: 30694919 NR Description: bHLH protein family [Arabidopsis thaliana]
  misc_feature (21)..(342): NCBI GI NO: 20127070 NR Description: putative bHLH transcription factor
  misc_feature (38)..(327): NCBI GI NO: 34899612 NR Description: putative phytochrome interacting factor 4
  misc_feature (36)..(333): NCBI GI NO: 25411969 NR Description: hypothetical protein At2g20180
  misc_feature (36)..(295): NCBI GI NO: 30680903 NR Description: (bHLH015) putative bHLH transcription factor
  misc_feature (36)..(295): NCBI GI NO: 30680909 NR Description: (bHLH015) putative bHLH transcription factor
NAHFRDKITGNMSKNEIRECSLMTVGSSYCGSNHIPQDPDASRASSNGVWTTTLSAEPEAVRDHVPRTSPQNEKGKSEMLEPTTTSSSGGSGSSLGKNCSLSTRNQGQKRKGIDVEESEEQSEDTELKSALGNKSSQRAGLARRNRAAEVHNLSERRRRDRINEKMKALQQLIPHSSKTDKASMLEEAIEYLKSLQLQLQLMWMGSGMAPIMFPGIQHYMSQMGMGMATPPFPPIHNPMQLPRLPLDQSVSASQTPNQTLMSQNPILGAFNYHNQMQNPALSEQYARYMGYHLMQNASQPMNVFRYGPQGVRHSQTMITPSNSSGNMSGAANIDEAVSGKMG

SEQ ID NO: 10202 - protein, 331 aa, Glycine max
  peptide (1)..(331): Ceres Seq. ID no. 14308700
  misc_feature (136)..(185): Pfam Name: Pfam Description:  Helix-loop-helix DNA-binding domain
  misc_feature (58)..(313): NCBI GI NO: 30689224 NR Description: transcription factor (BHLH9) -related
  misc_feature (58)..(313): NCBI GI NO: 30689218 NR Description: transcription factor (BHLH9) -related
  misc_feature (10)..(331): NCBI GI NO: 30694924 NR Description: bHLH protein family [Arabidopsis thaliana]
  misc_feature (58)..(313): NCBI GI NO: 25408828 NR Description: hypothetical protein At2g43010
  misc_feature (10)..(331): NCBI GI NO: 30694919 NR Description: bHLH protein family [Arabidopsis thaliana]
  misc_feature (10)..(331): NCBI GI NO: 20127070 NR Description: putative bHLH transcription factor
  misc_feature (27)..(316): NCBI GI NO: 34899612 NR Description: putative phytochrome interacting factor 4
  misc_feature (25)..(322): NCBI GI NO: 25411969 NR Description: hypothetical protein At2g20180
  misc_feature (25)..(284): NCBI GI NO: 30680903 NR Description: (bHLH015) putative bHLH transcription factor
  misc_feature (25)..(284): NCBI GI NO: 30680909 NR Description: (bHLH015) putative bHLH transcription factor
MSKNEIRECSLMTVGSSYCGSNHIPQDPDASRASSNGVWTTTLSAEPEAVRDHVPRTSPQNEKGKSEMLEPTTTSSSGGSGSSLGKNCSLSTRNQGQKRKGIDVEESEEQSEDTELKSALGNKSSQRAGLARRNRAAEVHNLSERRRRDRINEKMKALQQLIPHSSKTDKASMLEEAIEYLKSLQLQLQLMWMGSGMAPIMFPGIQHYMSQMGMGMATPPFPPIHNPMQLPRLPLDQSVSASQTPNQTLMSQNPILGAFNYHNQMQNPALSEQYARYMGYHLMQNASQPMNVFRYGPQGVRHSQTMITPSNSSGNMSGAANIDEAVSGKMG

SEQ ID NO: 10203 - protein, 320 aa, Glycine max
  peptide (1)..(320): Ceres Seq. ID no. 14308701
  misc_feature (125)..(174): Pfam Name: Pfam Description:  Helix-loop-helix DNA-binding domain
  misc_feature (47)..(302): NCBI GI NO: 30689224 NR Description: transcription factor (BHLH9) -related
  misc_feature (47)..(302): NCBI GI NO: 30689218 NR Description: transcription factor (BHLH9) -related
  misc_feature (1)..(320): NCBI GI NO: 30694924 NR Description: bHLH protein family [Arabidopsis thaliana]
  misc_feature (47)..(302): NCBI GI NO: 25408828 NR Description: hypothetical protein At2g43010
  misc_feature (1)..(320): NCBI GI NO: 30694919 NR Description: bHLH protein family [Arabidopsis thaliana]
  misc_feature (1)..(320): NCBI GI NO: 20127070 NR Description: putative bHLH transcription factor
  misc_feature (16)..(305): NCBI GI NO: 34899612 NR Description: putative phytochrome interacting factor 4
  misc_feature (14)..(311): NCBI GI NO: 25411969 NR Description: hypothetical protein At2g20180
  misc_feature (14)..(273): NCBI GI NO: 30680903 NR Description: (bHLH015) putative bHLH transcription factor
  misc_feature (14)..(273): NCBI GI NO: 30680909 NR Description: (bHLH015) putative bHLH transcription factor
MTVGSSYCGSNHIPQDPDASRASSNGVWTTTLSAEPEAVRDHVPRTSPQNEKGKSEMLEPTTTSSSGGSGSSLGKNCSLSTRNQGQKRKGIDVEESEEQSEDTELKSALGNKSSQRAGLARRNRAAEVHNLSERRRRDRINEKMKALQQLIPHSSKTDKASMLEEAIEYLKSLQLQLQLMWMGSGMAPIMFPGIQHYMSQMGMGMATPPFPPIHNPMQLPRLPLDQSVSASQTPNQTLMSQNPILGAFNYHNQMQNPALSEQYARYMGYHLMQNASQPMNVFRYGPQGVRHSQTMITPSNSSGNMSGAANIDEAVSGKMG

SEQ ID NO: 10204 - DNA, 1161 bp, Glycine max
  misc_feature (1)..(1161): Ceres Seq. ID no. 15169772
aacattaatatatttcttttcgaaaaaatgagacaaacatttgctctattactcatcctttcacttgccgtcatcttgtgccatgcagctgtccatgaagaaatccacaaaggccaggaagccgcttatcatggagcccacgtcactgaggaaaaatatcatgagactaaacatgatgtccaagaaggtgccaaagaaggaaccaacacagtcaaggaaactgcagaatacgtcaaagacagagttgaagaggtggttgaccaaactggtgacagtattaagcatacagctgacgatgttaggaacaaagtcaaaggaactacctatgacaaggtctctgatgccattaagcacaagcttgatgatgctggtaatgtaatccaagaagggttggacagagcgaaagaagccatccacagagcaacccatactactcaagaaggtgtccaagagacaggtaacactgtagatgagactgttgagaaggtcgaacatagaactgatgagaccgttatgaaggttggacacagaattgcagatgctcccggagccattagagaaggagtacatgatgcagctgaagctgtcaaagaagccatacatcctcatgaaccaacacttggagagagaatcatggaaaagatcaatgatgtgactcatagcattaagaaggcagtaggtcttgaagctgcagaatcgattggtgaaaaagttctcgagaaaggtgaacaaaaagctgcatcaaaagccgcgaaagaaggtctagagaaagtagttgaaaaggctagtggaatgactcttgagaccgttgccggcccaattggagcaaagatagctgaaaaggttgctggcaaagcagcttcaaaaggtatcaaagaagctcaagaaaagggtcttaatgatgctgttggagatcttgctgaagagataaaagaaaaagcccaacatttaggtgagaagattcagaaacacgcccatcataagcctagcgctgctgatgatgatctttaaggtagaaacagcaggttcataatatgacgcatgtttagctctatagaatgtatataatattatatataatagaatgatataagtttattaagcaaagtatttttagcacaatatgtgtttatgtcaatatattaatacaacgaatcgctc

SEQ ID NO: 10205 - protein, 336 aa, Glycine max
  peptide (1)..(336): Ceres Seq. ID no. 15169773
  misc_feature (125)..(269): Pfam Name: Pfam Description:  Synuclein
  misc_feature (48)..(328): NCBI GI NO: 23508154 NR Description: hypothetical protein [Plasmodium falciparum 3D7]
  misc_feature (48)..(324): NCBI GI NO: 23508154 NR Description: hypothetical protein [Plasmodium falciparum 3D7]
  misc_feature (6)..(314): NCBI GI NO: 23508154 NR Description: hypothetical protein [Plasmodium falciparum 3D7]
  misc_feature (48)..(323): NCBI GI NO: 7521941 NR Description: fimbriae-associated protein Fap1
  misc_feature (48)..(323): NCBI GI NO: 7521941 NR Description: fimbriae-associated protein Fap1
  misc_feature (30)..(328): NCBI GI NO: 15231736 NR Description: late embryogenesis abundant
  misc_feature (48)..(323): NCBI GI NO: 7521941 NR Description: fimbriae-associated protein Fap1
  misc_feature (48)..(323): NCBI GI NO: 7521941 NR Description: fimbriae-associated protein Fap1
  misc_feature (48)..(321): NCBI GI NO: 7521941 NR Description: fimbriae-associated protein Fap1
  misc_feature (48)..(323): NCBI GI NO: 7521941 NR Description: fimbriae-associated protein Fap1
NINIFLFEKMRQTFALLLILSLAVILCHAAVHEEIHKGQEAAYHGAHVTEEKYHETKHDVQEGAKEGTNTVKETAEYVKDRVEEVVDQTGDSIKHTADDVRNKVKGTTYDKVSDAIKHKLDDAGNVIQEGLDRAKEAIHRATHTTQEGVQETGNTVDETVEKVEHRTDETVMKVGHRIADAPGAIREGVHDAAEAVKEAIHPHEPTLGERIMEKINDVTHSIKKAVGLEAAESIGEKVLEKGEQKAASKAAKEGLEKVVEKASGMTLETVAGPIGAKIAEKVAGKAASKGIKEAQEKGLNDAVGDLAEEIKEKAQHLGEKIQKHAHHKPSAADDDL

SEQ ID NO: 10206 - protein, 327 aa, Glycine max
  peptide (1)..(327): Ceres Seq. ID no. 15169774
  misc_feature (116)..(260): Pfam Name: Pfam Description:  Synuclein
  misc_feature (39)..(319): NCBI GI NO: 23508154 NR Description: hypothetical protein [Plasmodium falciparum 3D7]
  misc_feature (39)..(315): NCBI GI NO: 23508154 NR Description: hypothetical protein [Plasmodium falciparum 3D7]
  misc_feature (1)..(305): NCBI GI NO: 23508154 NR Description: hypothetical protein [Plasmodium falciparum 3D7]
  misc_feature (39)..(314): NCBI GI NO: 7521941 NR Description: fimbriae-associated protein Fap1
  misc_feature (39)..(314): NCBI GI NO: 7521941 NR Description: fimbriae-associated protein Fap1
  misc_feature (21)..(319): NCBI GI NO: 15231736 NR Description: late embryogenesis abundant
  misc_feature (39)..(314): NCBI GI NO: 7521941 NR Description: fimbriae-associated protein Fap1
  misc_feature (39)..(314): NCBI GI NO: 7521941 NR Description: fimbriae-associated protein Fap1
  misc_feature (39)..(312): NCBI GI NO: 7521941 NR Description: fimbriae-associated protein Fap1
  misc_feature (39)..(314): NCBI GI NO: 7521941 NR Description: fimbriae-associated protein Fap1
MRQTFALLLILSLAVILCHAAVHEEIHKGQEAAYHGAHVTEEKYHETKHDVQEGAKEGTNTVKETAEYVKDRVEEVVDQTGDSIKHTADDVRNKVKGTTYDKVSDAIKHKLDDAGNVIQEGLDRAKEAIHRATHTTQEGVQETGNTVDETVEKVEHRTDETVMKVGHRIADAPGAIREGVHDAAEAVKEAIHPHEPTLGERIMEKINDVTHSIKKAVGLEAAESIGEKVLEKGEQKAASKAAKEGLEKVVEKASGMTLETVAGPIGAKIAEKVAGKAASKGIKEAQEKGLNDAVGDLAEEIKEKAQHLGEKIQKHAHHKPSAADDDL

SEQ ID NO: 10207 - DNA, 1699 bp, Glycine max
  misc_feature (1)..(1699): Ceres Seq. ID no. 15171012
gcacatttgggaacaagccttacagtgatgtgtccctctaaagacatttttaaggaagcaactaaacagatggactctgaggatggactaggagaggattggttatctgagtattcaggtgatgaggactatgaccctgaagaaaatgacttcacaagcagcagcctggatagtggtgaagaaagtatatctgatcagtccaattgttcaggaagtccgctttattctccaaacgatgatattccaggctttatatcagcagatttcactgatgcggaaggattctaccacaccaattcaaatttaggaattgattctgatgatgatgatgttgccgagatgcttacctaccaaaggccaaagagagaggaaatgtttggaaagctgactgagaatgaaaagcagagtgaagatgaagattggggtactaataataggagaaagaaaagaagagtggattcagctggtgttggagttaagtctgccgagggttccttagatgtaaaatcgaatgagaaagcccaaccgcagaggagaaaactcttcagaattccacctgaggcagttcaggtactgcgcaaatcttttgctgaaagtgagcttccatcccgggaggtgaaagagaatctctcaacagaattgggtatttcttttgaaaagattgacaagtggttcaaaaatacaaggtgtgctgctctcagagatcggaaggctgaaggaaatagtcgtgttgctggtcccagcaaaagatcgaaacagagtgcagggaaatctggaagtttaggcaagattgattcagtggacaattcatatcttcttcccatgcctgaaatcatcagtgtacctacacatccacaagggattcctgagaggaagcccgaatcaactagtagaactgtgaggaggcgggtacacgataaaggagctcccttgtgtccgcccgcgcccgccgaagtcaaggagagcacatcacctacaaccaagcctggcttgaatcctagccatgtagctgatcgcatcatcaacaccgagcatagagctgcttctcgggaggatccagtggccttctcggatgaccctttcttcgatgcgatcctatcatatcccaccatcaacaccaacgacagagctgtttctcgggaggatccggtggccttctcggacgatcctttcctggacgtgatgctagcaaaccgtgacatctataccgaggagagagccgcttctcacgaggacgtgaggcggccttccagcgaccagcctttcttggatgtgatccagaacgtgtgcgggctcgagcataggctgcagagactcaagggggacatgctatcatcagcagcagcaccaggcggcgctggaaccgcggagcgtgacttgcagaaccaactagtggttctcgtgccgactgccgagctgaaggacaaatcacagcctagcatctgaaattctgatactccatttgcgcgttgtcgataggagttattaaaacatatagaagaaatagtgtagagaaggagaagaaaagaaaagtagtggctccagtctagggttctagcggacaaggggcctcaacagtggtcgttactgtgtgtcacattaaagtgcgtcgtcggtgttactagtatacaagggcagttgttactggtcttaatgggtttgagttatataccgtttggggttcaaaatgttttggatc

SEQ ID NO: 10208 - protein, 481 aa, Glycine max
  peptide (1)..(481): Ceres Seq. ID no. 15171013
  misc_feature (178)..(234): Pfam Name: Pfam Description:  Homeobox domain
  misc_feature (124)..(259): NCBI GI NO: 15233766 NR Description: pathogenesis related homeodomain protein PRHA
AHLGTSLTVMCPSKDIFKEATKQMDSEDGLGEDWLSEYSGDEDYDPEENDFTSSSLDSGEESISDQSNCSGSPLYSPNDDIPGFISADFTDAEGFYHTNSNLGIDSDDDDVAEMLTYQRPKREEMFGKLTENEKQSEDEDWGTNNRRKKRRVDSAGVGVKSAEGSLDVKSNEKAQPQRRKLFRIPPEAVQVLRKSFAESELPSREVKENLSTELGISFEKIDKWFKNTRCAALRDRKAEGNSRVAGPSKRSKQSAGKSGSLGKIDSVDNSYLLPMPEIISVPTHPQGIPERKPESTSRTVRRRVHDKGAPLCPPAPAEVKESTSPTTKPGLNPSHVADRIINTEHRAASREDPVAFSDDPFFDAILSYPTINTNDRAVSREDPVAFSDDPFLDVMLANRDIYTEERAASHEDVRRPSSDQPFLDVIQNVCGLEHRLQRLKGDMLSSAAAPGGAGTAERDLQNQLVVLVPTAELKDKSQPSI

SEQ ID NO: 10209 - protein, 472 aa, Glycine max
  peptide (1)..(472): Ceres Seq. ID no. 15171014
  misc_feature (169)..(225): Pfam Name: Pfam Description:  Homeobox domain
  misc_feature (115)..(250): NCBI GI NO: 15233766 NR Description: pathogenesis related homeodomain protein PRHA
MCPSKDIFKEATKQMDSEDGLGEDWLSEYSGDEDYDPEENDFTSSSLDSGEESISDQSNCSGSPLYSPNDDIPGFISADFTDAEGFYHTNSNLGIDSDDDDVAEMLTYQRPKREEMFGKLTENEKQSEDEDWGTNNRRKKRRVDSAGVGVKSAEGSLDVKSNEKAQPQRRKLFRIPPEAVQVLRKSFAESELPSREVKENLSTELGISFEKIDKWFKNTRCAALRDRKAEGNSRVAGPSKRSKQSAGKSGSLGKIDSVDNSYLLPMPEIISVPTHPQGIPERKPESTSRTVRRRVHDKGAPLCPPAPAEVKESTSPTTKPGLNPSHVADRIINTEHRAASREDPVAFSDDPFFDAILSYPTINTNDRAVSREDPVAFSDDPFLDVMLANRDIYTEERAASHEDVRRPSSDQPFLDVIQNVCGLEHRLQRLKGDMLSSAAAPGGAGTAERDLQNQLVVLVPTAELKDKSQPSI

SEQ ID NO: 10210 - protein, 458 aa, Glycine max
  peptide (1)..(458): Ceres Seq. ID no. 15171015
  misc_feature (155)..(211): Pfam Name: Pfam Description:  Homeobox domain
  misc_feature (101)..(236): NCBI GI NO: 15233766 NR Description: pathogenesis related homeodomain protein PRHA
MDSEDGLGEDWLSEYSGDEDYDPEENDFTSSSLDSGEESISDQSNCSGSPLYSPNDDIPGFISADFTDAEGFYHTNSNLGIDSDDDDVAEMLTYQRPKREEMFGKLTENEKQSEDEDWGTNNRRKKRRVDSAGVGVKSAEGSLDVKSNEKAQPQRRKLFRIPPEAVQVLRKSFAESELPSREVKENLSTELGISFEKIDKWFKNTRCAALRDRKAEGNSRVAGPSKRSKQSAGKSGSLGKIDSVDNSYLLPMPEIISVPTHPQGIPERKPESTSRTVRRRVHDKGAPLCPPAPAEVKESTSPTTKPGLNPSHVADRIINTEHRAASREDPVAFSDDPFFDAILSYPTINTNDRAVSREDPVAFSDDPFLDVMLANRDIYTEERAASHEDVRRPSSDQPFLDVIQNVCGLEHRLQRLKGDMLSSAAAPGGAGTAERDLQNQLVVLVPTAELKDKSQPSI

SEQ ID NO: 10211 - DNA, 2330 bp, Glycine max
  misc_feature (1)..(2330): Ceres Seq. ID no. 14315434
tcacactctttcttcctttcttcttcttcttcttcttcctgtcttcacctaaccaaatgggcgcctccaccacctgatccacctctgtttcttcttcctttcatccgttcatacgggggttagatgatggagtcctgtgattgtatagatacgcagtatccgccggatgaacttcttgtgaagtatcagtatatctcggatgtgctaattgctcttgcgtatttttcgattccggtggagctcatctattttgttcagaagtctgctttctttccgtatagatgggtgcttatgcagtttggtgcctttattgttctctgtggagcaactcatttcataaacctgtggacattctctccgcactctaagtctgttgctgttgtcatgacgattgccaaagtttcgtgtgctattgtgtcatgtgcgacggcactgatgcttgtacacattattcccgatctgttgagtgtcaagaggcgcgaatcgatcctcaagaacaaggctgaagagcttgacagagagatgggacttattcttactcaggaagagacgggaagacatgttagaatgttgactcatgaaattaggagcacacttgacaggcatacaattttaaagactactcttgtggagctggggaggactttgggcttggaggagtgtgcattatggatgccttcgagaagtggtctgaatctgcaactttcccatactttaacctatcatgtgcaagttgggtctacggtgcaaacaaacaattctattgtcaatgaagttttcaacagccctcaagctatgcggataccacccacctgtccattggccaggatcagacctcttgtgggaagatatgtgccccctgaagttgttgctgttcgggtgccgcttttgaatctgtcaaattttcaaattaacgattggcctgatatttcagcaaagagctatgcaatcatggttctcatcctccctactgacagtgttagaaaatggcgagaccatgagttggaacttgttgatgttgttgcagatcaggtagcagttgccctttcacatgctgctattttggaggagtctatgcgtgcccgtgatcaactcatggagcagaatgttgctttagatttagcccggcgagaggcagagatggcaattcatgctcgcaatgattttcttgctgtcatgaatcatgaaatgaggacaccaatgcatgcaattatagcattgtcatcacttctcttggagactgaactgacgccagagcaaagggttatgatagagacagtgttgaagagtagtaatgttttggcaacactcattaatgatgttctagatctttctcgacttgaagatggtagcctcgaattagaaatgggaaaattcaacctccatggagttttgggagagattgttgaactgataaaaccaatagcatccgtgaaaaagttacctatcaccttaattctgtctcctgatctgcctactcatgccattggtgatgaaaagcggcttacacaaactcttttgaatgtcgtgggtaatgctgtcaaattcactaaggagggctatgtttctgtaagagtatcagttgcaaaaccagaatcttcacaggattggcgacctccagagttttatccagcatctagtgatggccatttctacattcgagtccaggttaaggactctggatgtgggattctcccacaagatattccgcatctctttaccaagtttgcccagtctcggagtggaccagctcgacctagcagtggtgcaggtcttgggcttgccatttgtaaaagatttgtaaacctcatgggaggccacatatggattgagagtgagggccttgacaaaggaagcacagctacatttatagtcaaacttgggatttgtggcaatccagatccatccgatcatcaagctgcaaacagaagccaagcatatagtggaagtggtggcctcgctagatttaaacccttcatcacagatgaaaacgacactggtttttctactagacgcaatcaaagaagtttctaatatccaagacaccaaaattgcatacctctcaatcacagtcgacaagatggagtaaacctcctactttcattttgcatgtgctaaattgtataatttgcagtttgcggctgtagaataggattactatgtcaggcatatttctaacaaacaggttttatgcgaactcctgttgtattaactagaatacaatacaacaaaacaaagttgagagacgatctgttacttaatttgacttgtagtatatattgtcagtggcttttgccgtttagcgttcataaaaatgacagtattggcac

SEQ ID NO: 10212 - protein, 636 aa, Glycine max
  peptide (1)..(636): Ceres Seq. ID no. 14315435
  misc_feature (159)..(308): Pfam Name: Pfam Description:  GAF domain
  misc_feature (1)..(636): NCBI GI NO: 2745902 NR Description: ERS-like ethylene receptor [Pisum sativum]
  misc_feature (1)..(636): NCBI GI NO: 7488803 NR Description: ethylene receptor - garden pea
  misc_feature (2)..(636): NCBI GI NO: 11935116 NR Description: ethylene receptor [Carica papaya]
  misc_feature (2)..(635): NCBI GI NO: 22036194 NR Description: ethylene-responsive sensor [Prunus persica]
  misc_feature (2)..(636): NCBI GI NO: 4164161 NR Description: ethylene response sensor [Passiflora edulis]
  misc_feature (2)..(636): NCBI GI NO: 18496061 NR Description: ethylene receptor 1 [Fagus sylvatica]
  misc_feature (1)..(635): NCBI GI NO: 15131531 NR Description: ethylene receptor [Fragaria x ananassa]
  misc_feature (2)..(635): NCBI GI NO: 18252345 NR Description: putative ethylene receptor [Pyrus communis]
  misc_feature (2)..(635): NCBI GI NO: 18252335 NR Description: putative ethylene receptor [Pyrus communis]
  misc_feature (2)..(631): NCBI GI NO: 18252341 NR Description: putative ethylene receptor [Pyrus communis]
MMESCDCIDTQYPPDELLVKYQYISDVLIALAYFSIPVELIYFVQKSAFFPYRWVLMQFGAFIVLCGATHFINLWTFSPHSKSVAVVMTIAKVSCAIVSCATALMLVHIIPDLLSVKRRESILKNKAEELDREMGLILTQEETGRHVRMLTHEIRSTLDRHTILKTTLVELGRTLGLEECALWMPSRSGLNLQLSHTLTYHVQVGSTVQTNNSIVNEVFNSPQAMRIPPTCPLARIRPLVGRYVPPEVVAVRVPLLNLSNFQINDWPDISAKSYAIMVLILPTDSVRKWRDHELELVDVVADQVAVALSHAAILEESMRARDQLMEQNVALDLARREAEMAIHARNDFLAVMNHEMRTPMHAIIALSSLLLETELTPEQRVMIETVLKSSNVLATLINDVLDLSRLEDGSLELEMGKFNLHGVLGEIVELIKPIASVKKLPITLILSPDLPTHAIGDEKRLTQTLLNVVGNAVKFTKEGYVSVRVSVAKPESSQDWRPPEFYPASSDGHFYIRVQVKDSGCGILPQDIPHLFTKFAQSRSGPARPSSGAGLGLAICKRFVNLMGGHIWIESEGLDKGSTATFIVKLGICGNPDPSDHQAANRSQAYSGSGGLARFKPFITDENDTGFSTRRNQRSF

SEQ ID NO: 10213 - protein, 635 aa, Glycine max
  peptide (1)..(635): Ceres Seq. ID no. 14315436
  misc_feature (158)..(307): Pfam Name: Pfam Description:  GAF domain
  misc_feature (1)..(635): NCBI GI NO: 2745902 NR Description: ERS-like ethylene receptor [Pisum sativum]
  misc_feature (1)..(635): NCBI GI NO: 7488803 NR Description: ethylene receptor - garden pea
  misc_feature (1)..(635): NCBI GI NO: 11935116 NR Description: ethylene receptor [Carica papaya]
  misc_feature (1)..(634): NCBI GI NO: 22036194 NR Description: ethylene-responsive sensor [Prunus persica]
  misc_feature (1)..(635): NCBI GI NO: 4164161 NR Description: ethylene response sensor [Passiflora edulis]
  misc_feature (1)..(635): NCBI GI NO: 18496061 NR Description: ethylene receptor 1 [Fagus sylvatica]
  misc_feature (1)..(634): NCBI GI NO: 15131531 NR Description: ethylene receptor [Fragaria x ananassa]
  misc_feature (1)..(634): NCBI GI NO: 18252345 NR Description: putative ethylene receptor [Pyrus communis]
  misc_feature (1)..(634): NCBI GI NO: 18252335 NR Description: putative ethylene receptor [Pyrus communis]
  misc_feature (1)..(630): NCBI GI NO: 18252341 NR Description: putative ethylene receptor [Pyrus communis]
MESCDCIDTQYPPDELLVKYQYISDVLIALAYFSIPVELIYFVQKSAFFPYRWVLMQFGAFIVLCGATHFINLWTFSPHSKSVAVVMTIAKVSCAIVSCATALMLVHIIPDLLSVKRRESILKNKAEELDREMGLILTQEETGRHVRMLTHEIRSTLDRHTILKTTLVELGRTLGLEECALWMPSRSGLNLQLSHTLTYHVQVGSTVQTNNSIVNEVFNSPQAMRIPPTCPLARIRPLVGRYVPPEVVAVRVPLLNLSNFQINDWPDISAKSYAIMVLILPTDSVRKWRDHELELVDVVADQVAVALSHAAILEESMRARDQLMEQNVALDLARREAEMAIHARNDFLAVMNHEMRTPMHAIIALSSLLLETELTPEQRVMIETVLKSSNVLATLINDVLDLSRLEDGSLELEMGKFNLHGVLGEIVELIKPIASVKKLPITLILSPDLPTHAIGDEKRLTQTLLNVVGNAVKFTKEGYVSVRVSVAKPESSQDWRPPEFYPASSDGHFYIRVQVKDSGCGILPQDIPHLFTKFAQSRSGPARPSSGAGLGLAICKRFVNLMGGHIWIESEGLDKGSTATFIVKLGICGNPDPSDHQAANRSQAYSGSGGLARFKPFITDENDTGFSTRRNQRSF

SEQ ID NO: 10214 - protein, 580 aa, Glycine max
  peptide (1)..(580): Ceres Seq. ID no. 14315437
  misc_feature (103)..(252): Pfam Name: Pfam Description:  GAF domain
  misc_feature (1)..(580): NCBI GI NO: 2745902 NR Description: ERS-like ethylene receptor [Pisum sativum]
  misc_feature (1)..(580): NCBI GI NO: 7488803 NR Description: ethylene receptor - garden pea
  misc_feature (1)..(580): NCBI GI NO: 11935116 NR Description: ethylene receptor [Carica papaya]
  misc_feature (1)..(579): NCBI GI NO: 22036194 NR Description: ethylene-responsive sensor [Prunus persica]
  misc_feature (1)..(580): NCBI GI NO: 4164161 NR Description: ethylene response sensor [Passiflora edulis]
  misc_feature (1)..(580): NCBI GI NO: 18496061 NR Description: ethylene receptor 1 [Fagus sylvatica]
  misc_feature (1)..(579): NCBI GI NO: 15131531 NR Description: ethylene receptor [Fragaria x ananassa]
  misc_feature (1)..(579): NCBI GI NO: 18252345 NR Description: putative ethylene receptor [Pyrus communis]
  misc_feature (1)..(579): NCBI GI NO: 18252335 NR Description: putative ethylene receptor [Pyrus communis]
  misc_feature (1)..(575): NCBI GI NO: 18252341 NR Description: putative ethylene receptor [Pyrus communis]
MQFGAFIVLCGATHFINLWTFSPHSKSVAVVMTIAKVSCAIVSCATALMLVHIIPDLLSVKRRESILKNKAEELDREMGLILTQEETGRHVRMLTHEIRSTLDRHTILKTTLVELGRTLGLEECALWMPSRSGLNLQLSHTLTYHVQVGSTVQTNNSIVNEVFNSPQAMRIPPTCPLARIRPLVGRYVPPEVVAVRVPLLNLSNFQINDWPDISAKSYAIMVLILPTDSVRKWRDHELELVDVVADQVAVALSHAAILEESMRARDQLMEQNVALDLARREAEMAIHARNDFLAVMNHEMRTPMHAIIALSSLLLETELTPEQRVMIETVLKSSNVLATLINDVLDLSRLEDGSLELEMGKFNLHGVLGEIVELIKPIASVKKLPITLILSPDLPTHAIGDEKRLTQTLLNVVGNAVKFTKEGYVSVRVSVAKPESSQDWRPPEFYPASSDGHFYIRVQVKDSGCGILPQDIPHLFTKFAQSRSGPARPSSGAGLGLAICKRFVNLMGGHIWIESEGLDKGSTATFIVKLGICGNPDPSDHQAANRSQAYSGSGGLARFKPFITDENDTGFSTRRNQRSF

SEQ ID NO: 10215 - DNA, 1655 bp, Glycine max
  misc_feature (1)..(1655): Ceres Seq. ID no. 15171520
gactagcatttgctgcattaccattcactactagttttcccacatgctttaactagcgcttttttttctttctattttcattatccaatggcttcttctattcctctttatcaaccaaccaacaccttattctccaacacccagttcaaaggttcgcgccgtggcttcttgtggcgacccagttactcgtttggctctcgtgctgaaaacagagcacgacccatcaaagcttcggttggtgcaccaccatttcccctgtttaagcctccccaagttgaagaaacatcttccgagttggagcctgcagatcctgatttctacaagattggttatgtccgaagcatgcgagcttatggagttcattttaaagaagggccagatggttttggtgtgtatgcttccaaagatgtagagcctcttcgccgagcaagggttgtaatggaaattcctcttgaattgatgttaaccataagcaagaagctcccatggatgtttttccctgatataattcccttggatcatccaatatttgatattatcaactcaacaaatccagagacagattgggacctaaggttagcatgccttctcttatacgcatttgattgcgaaggcaacttttggcaattgtatggcgacttcttaccgagtgcagatgagtgcactagcttacttctggcttcagaggaggaacttttggagctgcaggattccgatcttgcttccactattagaaaacagcaacaacgagccttagaattctgggagagtaactggcacagtgctgcaccccttaaaataaagcgtcttgcacatgatcctcaaaggttcgcttgggcagtaggtattgcacagtcacgatgtattaacatgcaaacgagaattggtgctctaaatcaagaagcaaatatgctgattccttatgctgatatgctgaaccattcatttgagccaaattgttttttccattggcgttttaaggacaggatgcttgaggttcttataaatgctggacagcgcattagaaagggagatgagatgacagttaattacatgagtacgcagaagaacgacatgttcatgcaaagatatggattttcatcacctgtgaatccttgggacgagatcaaattctcaggcaatgcacgtattcatttggattccttcgtgtcaatcttccatatatctggccttcctgaagagtattaccataataattgtctgtcaaatgctggggatagttttgttgatggagcagtcatagctgcagcacgaacactgccaagttggtcagatggggatgtgcctccaatccctagcgtggaaagaaaggctgccaaggagttgcaagatgaatgtcaaaagatgctcgcagcatttgctacaacctctaagcaagaccagaaattgctaggttccatgacagatgctacgaggacacttgaagctgcaataaagtatagattgcacaggaaattgttcatggagaaagttatccaagcattggagatgtatcaagagcaaatactgttctgatcccaatctactaacaggagaatagtcagtaagattttgtagcactgtagtgtcgtgtatacctgtaatcctgtgtcacttaaaacaatgctctttatccattaattgtaggttcttcg

SEQ ID NO: 10216 - protein, 482 aa, Glycine max
  peptide (1)..(482): Ceres Seq. ID no. 15171521
  misc_feature (282)..(329): Pfam Name: Pfam Description:  SET domain
  misc_feature (1)..(482): NCBI GI NO: 28393566 NR Description: unknown protein [Arabidopsis thaliana]
  misc_feature (1)..(285): NCBI GI NO: 30684996 NR Description: expressed protein [Arabidopsis thaliana]
  misc_feature (282)..(482): NCBI GI NO: 30685001 NR Description: expressed protein [Arabidopsis thaliana]
  misc_feature (1)..(230): NCBI GI NO: 7485732 NR Description: hypothetical protein F18F4
  misc_feature (282)..(443): NCBI GI NO: 7485733 NR Description: hypothetical protein F18F4
  misc_feature (148)..(285): NCBI GI NO: 7485732 NR Description: hypothetical protein F18F4
MASSIPLYQPTNTLFSNTQFKGSRRGFLWRPSYSFGSRAENRARPIKASVGAPPFPLFKPPQVEETSSELEPADPDFYKIGYVRSMRAYGVHFKEGPDGFGVYASKDVEPLRRARVVMEIPLELMLTISKKLPWMFFPDIIPLDHPIFDIINSTNPETDWDLRLACLLLYAFDCEGNFWQLYGDFLPSADECTSLLLASEEELLELQDSDLASTIRKQQQRALEFWESNWHSAAPLKIKRLAHDPQRFAWAVGIAQSRCINMQTRIGALNQEANMLIPYADMLNHSFEPNCFFHWRFKDRMLEVLINAGQRIRKGDEMTVNYMSTQKNDMFMQRYGFSSPVNPWDEIKFSGNARIHLDSFVSIFHISGLPEEYYHNNCLSNAGDSFVDGAVIAAARTLPSWSDGDVPPIPSVERKAAKELQDECQKMLAAFATTSKQDQKLLGSMTDATRTLEAAIKYRLHRKLFMEKVIQALEMYQEQILF

SEQ ID NO: 10217 - protein, 397 aa, Glycine max
  peptide (1)..(397): Ceres Seq. ID no. 15171522
  misc_feature (197)..(244): Pfam Name: Pfam Description:  SET domain
  misc_feature (1)..(397): NCBI GI NO: 28393566 NR Description: unknown protein [Arabidopsis thaliana]
  misc_feature (1)..(200): NCBI GI NO: 30684996 NR Description: expressed protein [Arabidopsis thaliana]
  misc_feature (197)..(397): NCBI GI NO: 30685001 NR Description: expressed protein [Arabidopsis thaliana]
  misc_feature (1)..(145): NCBI GI NO: 7485732 NR Description: hypothetical protein F18F4
  misc_feature (197)..(358): NCBI GI NO: 7485733 NR Description: hypothetical protein F18F4
  misc_feature (63)..(200): NCBI GI NO: 7485732 NR Description: hypothetical protein F18F4
MRAYGVHFKEGPDGFGVYASKDVEPLRRARVVMEIPLELMLTISKKLPWMFFPDIIPLDHPIFDIINSTNPETDWDLRLACLLLYAFDCEGNFWQLYGDFLPSADECTSLLLASEEELLELQDSDLASTIRKQQQRALEFWESNWHSAAPLKIKRLAHDPQRFAWAVGIAQSRCINMQTRIGALNQEANMLIPYADMLNHSFEPNCFFHWRFKDRMLEVLINAGQRIRKGDEMTVNYMSTQKNDMFMQRYGFSSPVNPWDEIKFSGNARIHLDSFVSIFHISGLPEEYYHNNCLSNAGDSFVDGAVIAAARTLPSWSDGDVPPIPSVERKAAKELQDECQKMLAAFATTSKQDQKLLGSMTDATRTLEAAIKYRLHRKLFMEKVIQALEMYQEQILF

SEQ ID NO: 10218 - protein, 365 aa, Glycine max
  peptide (1)..(365): Ceres Seq. ID no. 15171523
  misc_feature (165)..(212): Pfam Name: Pfam Description:  SET domain
  misc_feature (1)..(365): NCBI GI NO: 28393566 NR Description: unknown protein [Arabidopsis thaliana]
  misc_feature (1)..(168): NCBI GI NO: 30684996 NR Description: expressed protein [Arabidopsis thaliana]
  misc_feature (165)..(365): NCBI GI NO: 30685001 NR Description: expressed protein [Arabidopsis thaliana]
  misc_feature (1)..(113): NCBI GI NO: 7485732 NR Description: hypothetical protein F18F4
  misc_feature (165)..(326): NCBI GI NO: 7485733 NR Description: hypothetical protein F18F4
  misc_feature (31)..(168): NCBI GI NO: 7485732 NR Description: hypothetical protein F18F4
MEIPLELMLTISKKLPWMFFPDIIPLDHPIFDIINSTNPETDWDLRLACLLLYAFDCEGNFWQLYGDFLPSADECTSLLLASEEELLELQDSDLASTIRKQQQRALEFWESNWHSAAPLKIKRLAHDPQRFAWAVGIAQSRCINMQTRIGALNQEANMLIPYADMLNHSFEPNCFFHWRFKDRMLEVLINAGQRIRKGDEMTVNYMSTQKNDMFMQRYGFSSPVNPWDEIKFSGNARIHLDSFVSIFHISGLPEEYYHNNCLSNAGDSFVDGAVIAAARTLPSWSDGDVPPIPSVERKAAKELQDECQKMLAAFATTSKQDQKLLGSMTDATRTLEAAIKYRLHRKLFMEKVIQALEMYQEQILF

SEQ ID NO: 10219 - DNA, 1471 bp, Glycine max
  misc_feature (1)..(1471): Ceres Seq. ID no. 15169110
gaaatcatataaagaaacatctaaccaaacaagaagggtccagcaattattcttttctcattttaagaaataattgagtttggatatattgcaattttaaatcagtttcattcagtgcctttttggtgttaatagtttctaaatttgaacaattaaaaagattgtcatgctatcatgtaatcgaatacaattaggcttcatcttcatgctcatattcttgtaccttgaatatgagcaggaagatgaagcctaaatgttaatattcttatgtgaatttcaatattgattgcatatttgcttgaaccttgaatattgtttcaaagtaatgaactttatcaccctcttactaaaggttcagaagggttatcaaaagatttagaagtttctgagcatttggaagacaatcttgaccaagagtggtcacagatttcacagatgcacaagagtatagcttctttcagagacaagtcaatcaacaaatggcagcggatgacacaagtgactactggtgctgctgccattaagggaaaatttcatgcttttaatcaggtcaggttctttaactggtattgggaattttcttatgtgataggtgagtatttaatcctaattttgttgccccatcacacaggatattagcaatcaagttgctgcttatatgagagatcctaatagaatgatcaatcagatgcggctgagaagatcagctgttaatatatttggatctgtaattcattctcttaatctttagttgttttaaattgtgctgcatattccatataaggctgaatgttaggagtgtgttaaaagctgatttatttacctttgtcattgactgccacttgtcttcaggttccagaggttgacgataaacataaagaagctgaaacacgtactgatggtgatcctgaacttctggatgactctgaattttatcagcaattattgaaagaattttttgagacagttgatccttcatcgtctgagaaagcattttatgctttgaagagaatgcaaccaaagaaaagaaaaattgttgatcgtcgtgcctcaaaaagtcggaagataaggtataatgttcacgaaaagatagtaaattttatggcaccactacctgccaatattcctcctatggctccgaagttgtttgagaatctgtttggattgaagacagaaagattatcatcatctgctgcagcctcgtaatcatggttggccgacagcaatatttggcctcacagttttgcccttactttacatatgttgtacactaatttgtcttctacatgatgttgattattgaggaatttgatattttttcctcacaagacaattttgctgtaaatttattcagatgacctcatttctccttaggtgtttgttcaacgaggagtgatacaggttcatgtatgatggtaaccgatgccctagtgcaatggtgctagtataatagattatagttatggattag

SEQ ID NO: 10220 - protein, 67 aa, Glycine max
  peptide (1)..(67): Ceres Seq. ID no. 15169111
  misc_feature (1)..(38): NCBI GI NO: 34913376 NR Description: B1147B04.8
  misc_feature (1)..(38): NCBI GI NO: 9757854 NR Description: contains similarity to apoptosis antagonizingtranscription factor~gene_id:MFB13
  misc_feature (1)..(38): NCBI GI NO: 28416553 NR Description: At5g61330 [Arabidopsis thaliana]
  misc_feature (1)..(39): NCBI GI NO: 15240224 NR Description: expressed protein [Arabidopsis thaliana]
MHKSIASFRDKSINKWQRMTQVTTGAAAIKGKFHAFNQVRFFNWYWEFSYVIGEYLILILLPHHTGY

SEQ ID NO: 10221 - protein, 64 aa, Glycine max
  peptide (1)..(64): Ceres Seq. ID no. 15169112
  misc_feature (1)..(60): NCBI GI NO: 34913376 NR Description: B1147B04.8
  misc_feature (1)..(61): NCBI GI NO: 9757854 NR Description: contains similarity to apoptosis antagonizingtranscription factor~gene_id:MFB13
  misc_feature (1)..(61): NCBI GI NO: 28416553 NR Description: At5g61330 [Arabidopsis thaliana]
  misc_feature (1)..(61): NCBI GI NO: 15240224 NR Description: expressed protein [Arabidopsis thaliana]
  misc_feature (1)..(51): NCBI GI NO: 31198981 NR Description: ENSANGP00000017925 [Anopheles gambiae]
  misc_feature (1)..(51): NCBI GI NO: 6841204 NR Description: HSPC277 [Homo sapiens]
  misc_feature (1)..(61): NCBI GI NO: 19114368 NR Description: similarity to S
  misc_feature (1)..(50): NCBI GI NO: 19920846 NR Description: CG11188-PA [Drosophila melanogaster]
  misc_feature (1)..(51): NCBI GI NO: 9790013 NR Description: apoptosis antagonizing transcription factor
  misc_feature (1)..(59): NCBI GI NO: 16758536 NR Description: apoptosis antagonizing transcription factor
MQPKKRKIVDRRASKSRKIRYNVHEKIVNFMAPLPANIPPMAPKLFENLFGLKTERLSSSAAAS

SEQ ID NO: 10222 - protein, 49 aa, Glycine max
  peptide (1)..(49): Ceres Seq. ID no. 15169113
  misc_feature (1)..(20): NCBI GI NO: 34913376 NR Description: B1147B04.8
  misc_feature (1)..(20): NCBI GI NO: 9757854 NR Description: contains similarity to apoptosis antagonizingtranscription factor~gene_id:MFB13
  misc_feature (1)..(20): NCBI GI NO: 28416553 NR Description: At5g61330 [Arabidopsis thaliana]
  misc_feature (1)..(21): NCBI GI NO: 15240224 NR Description: expressed protein [Arabidopsis thaliana]
MTQVTTGAAAIKGKFHAFNQVRFFNWYWEFSYVIGEYLILILLPHHTGY

SEQ ID NO: 10223 - DNA, 975 bp, Glycine max
  misc_feature (1)..(975): Ceres Seq. ID no. 15172174
gagagaagatggtggcaagttctagttcagaaggaacaggagtacccctattgagagcatctgataataatggaagagatcaaaacacaagatccccccaagctgagggatggtggaacaaagtgttggacatggaagaggccaagcaccaactcttgttttcactgccaatgattcttaccaacttgttctatcacttgatcattttggtttctgtcatgcttgttggtcaccttggtgagcttcagcttgctggtgctactcttgcaaattcatggttcagtgtcactggcgtggcagttatggttggtttgagtggggcactggaaacactctgcggacaaggatttggtgcaaaggaataccaaatgctgggaatttacctacaagcctcttgcatcatatctcttattttttcaatcattatatccattatttggttctatacagaacccatcctagtgttgcttcatcaatctcccgacattgcaagaacagctgcactttatatgaagtttcttatcccgggagtgtttgcttatagcttcttgcaaaacatcttgaggtttctccagacacaatctgtagtaattccattggttgtactctctgctcttccaatgctggttcatattggtgttgcatatggcttggttcagtggtcaggtctgagttttacaggtgcaccagttgctgcttctatttcactatggatatcattgctattattggccttgtatgtaatgtatgctaagaagttcaagcagacatggaaaggattttcaacgcattcatttcgttacgtatttacaaacatgagactagctctgccctctgctgcaatggtatggtatgaattactaataacctttcacttagctagcccttttgattgttcatcttgattggaaaaacaagccaacacaataacaaactcaataatagagtaatagacagtggaaataaattctccca

SEQ ID NO: 10224 - protein, 300 aa, Glycine max
  peptide (1)..(300): Ceres Seq. ID no. 15172175
  misc_feature (56)..(215): Pfam Name: Pfam Description:  MatE
  misc_feature (12)..(288): NCBI GI NO: 18403810 NR Description: MATE efflux protein family [Arabidopsis thaliana]
  misc_feature (24)..(288): NCBI GI NO: 15229468 NR Description: MATE efflux protein family [Arabidopsis thaliana]
  misc_feature (103)..(285): NCBI GI NO: 34899388 NR Description: putative integral membrane protein
  misc_feature (15)..(105): NCBI GI NO: 34899388 NR Description: putative integral membrane protein
  misc_feature (15)..(288): NCBI GI NO: 34394668 NR Description: putative MATE efflux protein family protein
  misc_feature (15)..(285): NCBI GI NO: 16797803 NR Description: hypothetical membrane protein-1
  misc_feature (45)..(286): NCBI GI NO: 15219524 NR Description: MATE efflux protein family [Arabidopsis thaliana]
  misc_feature (45)..(288): NCBI GI NO: 15237158 NR Description: MATE efflux protein - related
  misc_feature (45)..(286): NCBI GI NO: 21537267 NR Description: putative integral membrane protein
  misc_feature (45)..(288): NCBI GI NO: 15226290 NR Description: MATE efflux protein family [Arabidopsis thaliana]
EKMVASSSSEGTGVPLLRASDNNGRDQNTRSPQAEGWWNKVLDMEEAKHQLLFSLPMILTNLFYHLIILVSVMLVGHLGELQLAGATLANSWFSVTGVAVMVGLSGALETLCGQGFGAKEYQMLGIYLQASCIISLIFSIIISIIWFYTEPILVLLHQSPDIARTAALYMKFLIPGVFAYSFLQNILRFLQTQSVVIPLVVLSALPMLVHIGVAYGLVQWSGLSFTGAPVAASISLWISLLLLALYVMYAKKFKQTWKGFSTHSFRYVFTNMRLALPSAAMVWYELLITFHLASPFDCSS

SEQ ID NO: 10225 - protein, 298 aa, Glycine max
  peptide (1)..(298): Ceres Seq. ID no. 15172176
  misc_feature (54)..(213): Pfam Name: Pfam Description:  MatE
  misc_feature (10)..(286): NCBI GI NO: 18403810 NR Description: MATE efflux protein family [Arabidopsis thaliana]
  misc_feature (22)..(286): NCBI GI NO: 15229468 NR Description: MATE efflux protein family [Arabidopsis thaliana]
  misc_feature (101)..(283): NCBI GI NO: 34899388 NR Description: putative integral membrane protein
  misc_feature (13)..(103): NCBI GI NO: 34899388 NR Description: putative integral membrane protein
  misc_feature (13)..(286): NCBI GI NO: 34394668 NR Description: putative MATE efflux protein family protein
  misc_feature (13)..(283): NCBI GI NO: 16797803 NR Description: hypothetical membrane protein-1
  misc_feature (43)..(284): NCBI GI NO: 15219524 NR Description: MATE efflux protein family [Arabidopsis thaliana]
  misc_feature (43)..(286): NCBI GI NO: 15237158 NR Description: MATE efflux protein - related
  misc_feature (43)..(284): NCBI GI NO: 21537267 NR Description: putative integral membrane protein
  misc_feature (43)..(286): NCBI GI NO: 15226290 NR Description: MATE efflux protein family [Arabidopsis thaliana]
MVASSSSEGTGVPLLRASDNNGRDQNTRSPQAEGWWNKVLDMEEAKHQLLFSLPMILTNLFYHLIILVSVMLVGHLGELQLAGATLANSWFSVTGVAVMVGLSGALETLCGQGFGAKEYQMLGIYLQASCIISLIFSIIISIIWFYTEPILVLLHQSPDIARTAALYMKFLIPGVFAYSFLQNILRFLQTQSVVIPLVVLSALPMLVHIGVAYGLVQWSGLSFTGAPVAASISLWISLLLLALYVMYAKKFKQTWKGFSTHSFRYVFTNMRLALPSAAMVWYELLITFHLASPFDCSS

SEQ ID NO: 10226 - protein, 257 aa, Glycine max
  peptide (1)..(257): Ceres Seq. ID no. 15172177
  misc_feature (13)..(172): Pfam Name: Pfam Description:  MatE
  misc_feature (1)..(245): NCBI GI NO: 18403810 NR Description: MATE efflux protein family [Arabidopsis thaliana]
  misc_feature (1)..(245): NCBI GI NO: 15229468 NR Description: MATE efflux protein family [Arabidopsis thaliana]
  misc_feature (60)..(242): NCBI GI NO: 34899388 NR Description: putative integral membrane protein
  misc_feature (1)..(62): NCBI GI NO: 34899388 NR Description: putative integral membrane protein
  misc_feature (1)..(245): NCBI GI NO: 34394668 NR Description: putative MATE efflux protein family protein
  misc_feature (1)..(242): NCBI GI NO: 16797803 NR Description: hypothetical membrane protein-1
  misc_feature (2)..(243): NCBI GI NO: 15219524 NR Description: MATE efflux protein family [Arabidopsis thaliana]
  misc_feature (2)..(245): NCBI GI NO: 15237158 NR Description: MATE efflux protein - related
  misc_feature (2)..(243): NCBI GI NO: 21537267 NR Description: putative integral membrane protein
  misc_feature (2)..(245): NCBI GI NO: 15226290 NR Description: MATE efflux protein family [Arabidopsis thaliana]
MEEAKHQLLFSLPMILTNLFYHLIILVSVMLVGHLGELQLAGATLANSWFSVTGVAVMVGLSGALETLCGQGFGAKEYQMLGIYLQASCIISLIFSIIISIIWFYTEPILVLLHQSPDIARTAALYMKFLIPGVFAYSFLQNILRFLQTQSVVIPLVVLSALPMLVHIGVAYGLVQWSGLSFTGAPVAASISLWISLLLLALYVMYAKKFKQTWKGFSTHSFRYVFTNMRLALPSAAMVWYELLITFHLASPFDCSS

SEQ ID NO: 10227 - DNA, 1891 bp, Glycine max
  misc_feature (1)..(1891): Ceres Seq. ID no. 13595747
  misc_feature (1160)..(1160): n is a, c, t, g, unknown, or other
gagagctagaaagtagagacacacaatccaaaagagtcttattgaagggtgagggtcaccttggaaatccatccatgccatggctcccactcttacatccaattcatcttttttaagcaccagtcctcattcaagggtgagcctccggaatccaaggctgagagtctttgccaagaagtctggatcattcccatcatttggactaggcaagcccaaagatgattcttcttctgctgaagaaaaagataactcatccaattccaacccctttcgtttggactttggaaagatacccgatgtaacgtctttgatcccagttccaagcaacacttctgcgccaggcttttcttttggaaacacaaggcgcaaggacccttcaacagtgtttgttgccggcgcaacggggcaggctggtattcgcattgcacaaacgttgttaagggaaggtttcagtgtacgggctggagtccccgaacttggttctgcccaagaacttgctcgtctcgctactcaatacaagattatatcaaatgaacaggcaaagcgtctgaacgctgtgcaatcaagctttgacaatgcagacacaatagccaaagcaataggcaatgsccggcaaggtggttgtcaccattggtccgacagagaacggtccaaccgcagaggtatctgcatcagatgccttgcaagtggttcaggcagcacagctggcaggagtaggccatgtggccattgtctacgacaagagcagcgctggggcctcaacctacaatgtactggatggcctctcatccttcttcaacaacctcttctccaggtctcaaccgttgaccatacaagagttcttgcagaaagtcattgaaacggatgtcaagtacaccttcatcaagacaagtttgactgatgatttctcaccggagagttcctacaatgtggttgtcttgggcgaaggaagcgccagtgcaaacgactataaagtagcaaagtccaagatcgcatcgttggtggctgaatgttcttctccaacacaagaggtagcaagaaaaacaaggttgtgaaaagtgcactcggatcccagtgcccccttgaaagcgtgtagatgaacttttcaagccctattcctgaggatggaagaaaggaaaagcctatgctgaaatgcaggnaaaaagcaaaaggcagaggaagaagcaagagtggcagctgaaaaggcccgtgaagcttctgaatcagcaaagaagttggaagaagaggtgaaaaggctttcacagcaagaaacacgggctgcaagtctggctcaagaggcccaagagaaggcagaggctggcggggcttcagttgaaaacctcttgaacaaggcaaaagactttggtgcagggttttcctgggaaaagttgagctcacagattactacttcaatccaaaagcctgatgaggatgagaaaccaaaggtgcagctagccactgtaaggggacaggccaaggctcggaatctcgcgcctaacaaagcagtggtcaaacaaacacctcagagaagtgcagctaaaccaaaggtggaaaaaccaaagcagacagagacaccaaaggaggtgaggaatgtatttggtggcctgttcaagcaagagactatctatgttgatgatgactagtggaagcggaacatattatcttgcacggcataaaactatgttgtttgagtctgtgttaacgtagataatttggttgcatgtgtatggtcttgtaaagttctatgtttgaagcagaatatttatgtagttgtactggttcagaaccctattttcgggggaaaacaataaaagggttttcccttatcttctatcctctcctctcttgstaataattaataatatctttggtcacggtyttgccttgcttc

SEQ ID NO: 10228 - protein, 259 aa, Glycine max
  peptide (1)..(259): Ceres Seq. ID no. 15221654
  misc_feature (6)..(176): NCBI GI NO: 7487756 NR Description: hypothetical protein T6H20
  misc_feature (6)..(176): NCBI GI NO: 18408279 NR Description: expressed protein [Arabidopsis thaliana]
  misc_feature (177)..(177): Xaa is any aa, unknown or other
MAPTLTSNSSFLSTSPHSRVSLRNPRLRVFAKKSGSFPSFGLGKPKDDSSSAEEKDNSSNSNPFRLDFGKIPDVTSLIPVPSNTSAPGFSFGNTRRKDPSTVFVAGATGQAGIRIAQTLLREGFSVRAGVPELGSAQELARLATQYKIISNEQAKRLNAVQSSFDNADTIAKAIGNXRQGGCHHWSDRERSNRRGICIRCLASGSGSTAGRSRPCGHCLRQEQRWGLNLQCTGWPLILLQQPLLQVSTVDHTRVLAESH

SEQ ID NO: 10229 - protein, 149 aa, Glycine max
  peptide (1)..(149): Ceres Seq. ID no. 15221655
  misc_feature (4)..(149): NCBI GI NO: 7487756 NR Description: hypothetical protein T6H20
  misc_feature (4)..(120): NCBI GI NO: 18408279 NR Description: expressed protein [Arabidopsis thaliana]
  misc_feature (2)..(2): Xaa is any aa, unknown or other
MXGKVVVTIGPTENGPTAEVSASDALQVVQAAQLAGVGHVAIVYDKSSAGASTYNVLDGLSSFFNNLFSRSQPLTIQEFLQKVIETDVKYTFIKTSLTDDFSPESSYNVVVLGEGSASANDYKVAKSKIASLVAECSSPTQEVARKTRL

SEQ ID NO: 10230 - DNA, 1189 bp, Glycine max
  misc_feature (1)..(1189): Ceres Seq. ID no. 14308600
gagcagccagtgtgaaccagtctcacctcattgattcattctccgtcagaaatacctttcctttgcgaaagagaagagatctgaaaccctaaccctaaccctaaccagaggtaatggattcagtgcctcgaagaagcagaggaggaggcgttttggaaaacctcgacaaggtcctaatgcgtcgcaactgagtctacgtcaccttcgtcatcgcaggcgccttcctcggagaacgggctgtggattacggagctcacaagatcggggagcacaataacgttgggtccaaatggcacctagatggaaaggaaaagatgcaaaagctaaaaaggatgcacaagctgaagcgctcaaggaacccatgtcaaagattgtatctcaacttcagtcttctctagttcaatcaaatacttgtggatttctctctggtagtagtgtacacttagcagtgggagcagaacaacttcatttgctcgataaagcatgctttggctcacctgtgagaacagttgaaaaggacaaacctcggtttcaattaagctttgaggaggcattctacctatgctattccttgaaatgccttaagattaataatgacagtgatgatactagtccccaaaacagtgaagagctgtggcattacatgaagtcaaagaaagaaacattcccttgtttctacaaggcttattcccacctgagaatgaaaaactgggtagtgaggtcaggagctcagtatggtgcagatttcgttgtctattgtcaccatccagctcgggtccattccgagtatggtgtgcttgttttatcagatggagaagataaagatctaaatggaaggttgagagtatggtctgatgttcattgcacaactcgacttcttggaggtgttgcaaaaatcttattggttttgtatgtcaatagaaatggtagcagcaatgagtctccattatgtttggcaaactacaccattgaagagcacacaatcaccagatggaatccagaacagtgccgcgaaaagatggtaattcatgctaattctgataatggaactgggtaaatacttcatcatatggacgcaacaaaatatatcaaacatgaaaaaaaaagtattttttttattgtctttgtccaaagatattagttattcaagcataacaatattcttaaagatttgattccttttccgttt

SEQ ID NO: 10231 - protein, 255 aa, Glycine max
  peptide (1)..(255): Ceres Seq. ID no. 14308601
  misc_feature (126)..(211): Pfam Name: Pfam Description:  tRNA intron endonuclease
  misc_feature (1)..(242): NCBI GI NO: 15231186 NR Description: expressed protein [Arabidopsis thaliana]
  misc_feature (1)..(242): NCBI GI NO: 6635256 NR Description: tRNA intron endonuclease [Arabidopsis thaliana]
  misc_feature (1)..(242): NCBI GI NO: 15238643 NR Description: tRNA intron endonuclease - like protein
  misc_feature (66)..(235): NCBI GI NO: 39644952 NR Description: MGC2776 protein [Homo sapiens]
  misc_feature (36)..(235): NCBI GI NO: 39841065 NR Description: similar to hypothetical protein MGC2776
  misc_feature (66)..(235): NCBI GI NO: 13376882 NR Description: hypothetical protein MGC2776 [Homo sapiens]
  misc_feature (86)..(235): NCBI GI NO: 22760473 NR Description: unnamed protein product [Homo sapiens]
  misc_feature (83)..(177): NCBI GI NO: 31202529 NR Description: ENSANGP00000010953 [Anopheles gambiae]
  misc_feature (77)..(210): NCBI GI NO: 32412256 NR Description: hypothetical protein
  misc_feature (1)..(242): NCBI GI NO: 19571750 NR Description: SPAPB17E12.07c [Schizosaccharomyces pombe]
MAPRWKGKDAKAKKDAQAEALKEPMSKIVSQLQSSLVQSNTCGFLSGSSVHLAVGAEQLHLLDKACFGSPVRTVEKDKPRFQLSFEEAFYLCYSLKCLKINNDSDDTSPQNSEELWHYMKSKKETFPCFYKAYSHLRMKNWVVRSGAQYGADFVVYCHHPARVHSEYGVLVLSDGEDKDLNGRLRVWSDVHCTTRLLGGVAKILLVLYVNRNGSSNESPLCLANYTIEEHTITRWNPEQCREKMVIHANSDNGTG

SEQ ID NO: 10232 - protein, 231 aa, Glycine max
  peptide (1)..(231): Ceres Seq. ID no. 14308602
  misc_feature (102)..(187): Pfam Name: Pfam Description:  tRNA intron endonuclease
  misc_feature (1)..(218): NCBI GI NO: 15231186 NR Description: expressed protein [Arabidopsis thaliana]
  misc_feature (1)..(218): NCBI GI NO: 6635256 NR Description: tRNA intron endonuclease [Arabidopsis thaliana]
  misc_feature (1)..(218): NCBI GI NO: 15238643 NR Description: tRNA intron endonuclease - like protein
  misc_feature (42)..(211): NCBI GI NO: 39644952 NR Description: MGC2776 protein [Homo sapiens]
  misc_feature (12)..(211): NCBI GI NO: 39841065 NR Description: similar to hypothetical protein MGC2776
  misc_feature (42)..(211): NCBI GI NO: 13376882 NR Description: hypothetical protein MGC2776 [Homo sapiens]
  misc_feature (62)..(211): NCBI GI NO: 22760473 NR Description: unnamed protein product [Homo sapiens]
  misc_feature (59)..(153): NCBI GI NO: 31202529 NR Description: ENSANGP00000010953 [Anopheles gambiae]
  misc_feature (53)..(186): NCBI GI NO: 32412256 NR Description: hypothetical protein
  misc_feature (1)..(218): NCBI GI NO: 19571750 NR Description: SPAPB17E12.07c [Schizosaccharomyces pombe]
MSKIVSQLQSSLVQSNTCGFLSGSSVHLAVGAEQLHLLDKACFGSPVRTVEKDKPRFQLSFEEAFYLCYSLKCLKINNDSDDTSPQNSEELWHYMKSKKETFPCFYKAYSHLRMKNWVVRSGAQYGADFVVYCHHPARVHSEYGVLVLSDGEDKDLNGRLRVWSDVHCTTRLLGGVAKILLVLYVNRNGSSNESPLCLANYTIEEHTITRWNPEQCREKMVIHANSDNGTG

SEQ ID NO: 10233 - protein, 137 aa, Glycine max
  peptide (1)..(137): Ceres Seq. ID no. 14308603
  misc_feature (8)..(93): Pfam Name: Pfam Description:  tRNA intron endonuclease
  misc_feature (1)..(124): NCBI GI NO: 15231186 NR Description: expressed protein [Arabidopsis thaliana]
  misc_feature (1)..(124): NCBI GI NO: 6635256 NR Description: tRNA intron endonuclease [Arabidopsis thaliana]
  misc_feature (1)..(124): NCBI GI NO: 15238643 NR Description: tRNA intron endonuclease - like protein
  misc_feature (1)..(117): NCBI GI NO: 39644952 NR Description: MGC2776 protein [Homo sapiens]
  misc_feature (1)..(117): NCBI GI NO: 39841065 NR Description: similar to hypothetical protein MGC2776
  misc_feature (1)..(117): NCBI GI NO: 13376882 NR Description: hypothetical protein MGC2776 [Homo sapiens]
  misc_feature (1)..(117): NCBI GI NO: 22760473 NR Description: unnamed protein product [Homo sapiens]
  misc_feature (1)..(59): NCBI GI NO: 31202529 NR Description: ENSANGP00000010953 [Anopheles gambiae]
  misc_feature (1)..(92): NCBI GI NO: 32412256 NR Description: hypothetical protein
  misc_feature (1)..(124): NCBI GI NO: 19571750 NR Description: SPAPB17E12.07c [Schizosaccharomyces pombe]
MKSKKETFPCFYKAYSHLRMKNWVVRSGAQYGADFVVYCHHPARVHSEYGVLVLSDGEDKDLNGRLRVWSDVHCTTRLLGGVAKILLVLYVNRNGSSNESPLCLANYTIEEHTITRWNPEQCREKMVIHANSDNGTG

SEQ ID NO: 10234 - DNA, 1457 bp, Glycine max
  misc_feature (1)..(1457): Ceres Seq. ID no. 13577044
gaggtcagtcaatcattcattcctattccttctttctcttccaattccaaatcacaacccttcgttttccctctctagaatcttcttctccattcaattcctactccttttttcctctctgtccctctctctctccctctctcatggcttccgatctcgaagcaaaagccaaagaggccttcgtcgaagaccacttcgaactcgccgtggaccttctctctcaggccattcatctcgaacccaacaaagccgaattctacgccgaccgcgcccaagccaacatcaaactcaacaacttcactgaggctgtggctgatgctaacaaagcaattgaattgaatccttctctaccaaaagcatatttgcggaaaggtactgcttgcatgaagcttgaggaatatgaaactgcaaaggctgctctggaggtgggtgcatcattgtctccagacaactcaaggtttgctactttgatcaaagaatgtgataagctcattgcagaatcttataccccacctattatagaggaaaaggccacaacagaagatgttactccaaaagatgttcagcaacaagatgatcttctagagaagccaacagttacagtgactaaacctaaatataggcatgaattctaccagaaacatgatcaggtggttgtgaccatatttgcaaagaaaatcccaaaggaaagcattactgttgacttcggtgaacaaatactaagtgttagtattaatgtcacaggagaagacacatatgtttttcaacctcgcttatttggaaagatcataccttccaattgtcaatatgaagttttgtccaccaaaattgaaattcgtcttgcaaaagcagaacctattcactggacatctctagaattcaccagagacatcgttgttcaacagagggttaatgcttcttcagttactggaagtcaaagaccttcttacccatcctcaaaacaaacaagagattgggacaagattgaagctcaagtcaagaaagaggagaaagatgaaaagcttgatggcgatgctgcattgaacaaatttttccgcgaaatatatcaagatgcagatgaggatacaagaagagcaatgaaaaagtcatttgttgagtctaatgggacagttctgtctacaaactggaaagaagtgggaacaaagaaggtagagggaagtcctcctgatggcatggagttgaagaaatgggaatattaagacattttctggatcagtgttgcatatatttttatgtgggattattatacttcgtttactttttttttggttagttaactactgaactgaagatactattttctttattttttttttaatgttcatgaggtgttgtgtccgtcttcgctagaacctgaattcatggttgttggttgaggacaaggctcttcactttggtgaatataattcatggttgttgacaaaaaaaaaaaaaaa

SEQ ID NO: 10235 - protein, 405 aa, Glycine max
  peptide (1)..(405): Ceres Seq. ID no. 13577045
  misc_feature (324)..(403): Pfam Name: Pfam Description:  SGS domain
  misc_feature (48)..(404): NCBI GI NO: 29468339 NR Description: SGT1 [Nicotiana benthamiana]
  misc_feature (49)..(405): NCBI GI NO: 17017306 NR Description: SGT1 [Hordeum vulgare]
  misc_feature (80)..(404): NCBI GI NO: 6468695 NR Description: putative protein phosphatase [Rubus idaeus]
  misc_feature (48)..(405): NCBI GI NO: 40974915 NR Description: SGT1-like protein [Brassica oleracea]
  misc_feature (48)..(405): NCBI GI NO: 15237122 NR Description: phosphatase - related [Arabidopsis thaliana]
  misc_feature (48)..(404): NCBI GI NO: 17017308 NR Description: SGT1a [Arabidopsis thaliana]
  misc_feature (49)..(405): NCBI GI NO: 6581058 NR Description: Sgt1 [Oryza sativa]
  misc_feature (48)..(404): NCBI GI NO: 15236528 NR Description: phosphatase - related [Arabidopsis thaliana]
  misc_feature (49)..(405): NCBI GI NO: 34912836 NR Description: Sgt1 [Oryza sativa (japonica cultivar-group)]
  misc_feature (48)..(405): NCBI GI NO: 40974917 NR Description: SGT1-like protein [Brassica oleracea]
GQSIIHSYSFFLFQFQITTLRFPSLESSSPFNSYSFFPLCPSLSPSLMASDLEAKAKEAFVEDHFELAVDLLSQAIHLEPNKAEFYADRAQANIKLNNFTEAVADANKAIELNPSLPKAYLRKGTACMKLEEYETAKAALEVGASLSPDNSRFATLIKECDKLIAESYTPPIIEEKATTEDVTPKDVQQQDDLLEKPTVTVTKPKYRHEFYQKHDQVVVTIFAKKIPKESITVDFGEQILSVSINVTGEDTYVFQPRLFGKIIPSNCQYEVLSTKIEIRLAKAEPIHWTSLEFTRDIVVQQRVNASSVTGSQRPSYPSSKQTRDWDKIEAQVKKEEKDEKLDGDAALNKFFREIYQDADEDTRRAMKKSFVESNGTVLSTNWKEVGTKKVEGSPPDGMELKKWEY

SEQ ID NO: 10236 - protein, 358 aa, Glycine max
  peptide (1)..(358): Ceres Seq. ID no. 13577046
  misc_feature (277)..(356): Pfam Name: Pfam Description:  SGS domain
  misc_feature (1)..(357): NCBI GI NO: 29468339 NR Description: SGT1 [Nicotiana benthamiana]
  misc_feature (2)..(358): NCBI GI NO: 17017306 NR Description: SGT1 [Hordeum vulgare]
  misc_feature (33)..(357): NCBI GI NO: 6468695 NR Description: putative protein phosphatase [Rubus idaeus]
  misc_feature (1)..(358): NCBI GI NO: 40974915 NR Description: SGT1-like protein [Brassica oleracea]
  misc_feature (1)..(358): NCBI GI NO: 15237122 NR Description: phosphatase - related [Arabidopsis thaliana]
  misc_feature (1)..(357): NCBI GI NO: 17017308 NR Description: SGT1a [Arabidopsis thaliana]
  misc_feature (2)..(358): NCBI GI NO: 6581058 NR Description: Sgt1 [Oryza sativa]
  misc_feature (1)..(357): NCBI GI NO: 15236528 NR Description: phosphatase - related [Arabidopsis thaliana]
  misc_feature (2)..(358): NCBI GI NO: 34912836 NR Description: Sgt1 [Oryza sativa (japonica cultivar-group)]
  misc_feature (1)..(358): NCBI GI NO: 40974917 NR Description: SGT1-like protein [Brassica oleracea]
MASDLEAKAKEAFVEDHFELAVDLLSQAIHLEPNKAEFYADRAQANIKLNNFTEAVADANKAIELNPSLPKAYLRKGTACMKLEEYETAKAALEVGASLSPDNSRFATLIKECDKLIAESYTPPIIEEKATTEDVTPKDVQQQDDLLEKPTVTVTKPKYRHEFYQKHDQVVVTIFAKKIPKESITVDFGEQILSVSINVTGEDTYVFQPRLFGKIIPSNCQYEVLSTKIEIRLAKAEPIHWTSLEFTRDIVVQQRVNASSVTGSQRPSYPSSKQTRDWDKIEAQVKKEEKDEKLDGDAALNKFFREIYQDADEDTRRAMKKSFVESNGTVLSTNWKEVGTKKVEGSPPDGMELKKWEY

SEQ ID NO: 10237 - protein, 278 aa, Glycine max
  peptide (1)..(278): Ceres Seq. ID no. 13577047
  misc_feature (197)..(276): Pfam Name: Pfam Description:  SGS domain
  misc_feature (1)..(277): NCBI GI NO: 29468339 NR Description: SGT1 [Nicotiana benthamiana]
  misc_feature (1)..(278): NCBI GI NO: 17017306 NR Description: SGT1 [Hordeum vulgare]
  misc_feature (1)..(277): NCBI GI NO: 6468695 NR Description: putative protein phosphatase [Rubus idaeus]
  misc_feature (1)..(278): NCBI GI NO: 40974915 NR Description: SGT1-like protein [Brassica oleracea]
  misc_feature (1)..(278): NCBI GI NO: 15237122 NR Description: phosphatase - related [Arabidopsis thaliana]
  misc_feature (1)..(277): NCBI GI NO: 17017308 NR Description: SGT1a [Arabidopsis thaliana]
  misc_feature (1)..(278): NCBI GI NO: 6581058 NR Description: Sgt1 [Oryza sativa]
  misc_feature (1)..(277): NCBI GI NO: 15236528 NR Description: phosphatase - related [Arabidopsis thaliana]
  misc_feature (1)..(278): NCBI GI NO: 34912836 NR Description: Sgt1 [Oryza sativa (japonica cultivar-group)]
  misc_feature (1)..(278): NCBI GI NO: 40974917 NR Description: SGT1-like protein [Brassica oleracea]
MKLEEYETAKAALEVGASLSPDNSRFATLIKECDKLIAESYTPPIIEEKATTEDVTPKDVQQQDDLLEKPTVTVTKPKYRHEFYQKHDQVVVTIFAKKIPKESITVDFGEQILSVSINVTGEDTYVFQPRLFGKIIPSNCQYEVLSTKIEIRLAKAEPIHWTSLEFTRDIVVQQRVNASSVTGSQRPSYPSSKQTRDWDKIEAQVKKEEKDEKLDGDAALNKFFREIYQDADEDTRRAMKKSFVESNGTVLSTNWKEVGTKKVEGSPPDGMELKKWEY

SEQ ID NO: 10238 - DNA, 655 bp, Glycine max
  misc_feature (1)..(655): Ceres Seq. ID no. 14312594
acaaacgtgaagacctcactaaagaggttctgattgatgaatggttccatacaggggatattggagagtggcaacctaatggaagcatgaaaattattgatcggaagaagaatatatttaagctttcacaaggagaatatgttgctgtcgaaaacctggagaatatttacggtcaagtttcttctattgaatctatatgggtttatggaaacagttttgaggccttccttgtggctgttgttaaccccagtaagcaagcacttgaacattgggcccaagaaaatggtatatccatggacttcaattctctctgtgaagatgctcgagcaaaaagttacataattgaagagctctcaaagattgcgaaggaaaagaagttgaaaggttttgagtttataaaagcagttcaccttgactcaattccatttgacatggaacgtgaccttatcactccaacatacaagaagaagaggccacagttgcttaaatactatcagaatgccattgacaacatgtataagagtggaagtaaacccagtgcctgagacctgatttgggagataatttattttctgtatgtgatggtgtttgtctccgttcaattgtttccttttggtgactgtatatacgctgagtagttatatagggatacgtc

SEQ ID NO: 10239 - protein, 180 aa, Glycine max
  peptide (1)..(180): Ceres Seq. ID no. 14312595
  misc_feature (1)..(67): Pfam Name: Pfam Description:  AMP-binding enzyme
  misc_feature (19)..(180): NCBI GI NO: 3127892 NR Description: acyl-coA synthetase [Cicer arietinum]
  misc_feature (1)..(174): NCBI GI NO: 34911190 NR Description: putative acyl-CoA synthetase
  misc_feature (1)..(180): NCBI GI NO: 7437845 NR Description: probable long-chain-fatty-acid-CoA ligase (EC6
  misc_feature (1)..(174): NCBI GI NO: 15236634 NR Description: long-chain-fatty-acid--CoA ligase
  misc_feature (1)..(174): NCBI GI NO: 15237023 NR Description: long-chain-fatty-acid--CoA ligase
  misc_feature (1)..(174): NCBI GI NO: 20805871 NR Description: long chain acyl-CoA synthetase 5
  misc_feature (1)..(173): NCBI GI NO: 34898260 NR Description: similar to long-chain-fatty-acid--CoA ligase 1
  misc_feature (1)..(165): NCBI GI NO: 7437841 NR Description: probable long-chain-fatty-acid-CoA ligase (EC6
  misc_feature (1)..(173): NCBI GI NO: 15217631 NR Description: long-chain-fatty-acid--CoA ligase
  misc_feature (1)..(180): NCBI GI NO: 22330132 NR Description: long-chain-fatty-acid--CoA ligase
KREDLTKEVLIDEWFHTGDIGEWQPNGSMKIIDRKKNIFKLSQGEYVAVENLENIYGQVSSIESIWVYGNSFEAFLVAVVNPSKQALEHWAQENGISMDFNSLCEDARAKSYIIEELSKIAKEKKLKGFEFIKAVHLDSIPFDMERDLITPTYKKKRPQLLKYYQNAIDNMYKSGSKPSA

SEQ ID NO: 10240 - protein, 152 aa, Glycine max
  peptide (1)..(152): Ceres Seq. ID no. 14312596
  misc_feature (1)..(152): NCBI GI NO: 3127892 NR Description: acyl-coA synthetase [Cicer arietinum]
  misc_feature (1)..(146): NCBI GI NO: 34911190 NR Description: putative acyl-CoA synthetase
  misc_feature (1)..(152): NCBI GI NO: 7437845 NR Description: probable long-chain-fatty-acid-CoA ligase (EC6
  misc_feature (1)..(146): NCBI GI NO: 15236634 NR Description: long-chain-fatty-acid--CoA ligase
  misc_feature (1)..(146): NCBI GI NO: 15237023 NR Description: long-chain-fatty-acid--CoA ligase
  misc_feature (1)..(146): NCBI GI NO: 20805871 NR Description: long chain acyl-CoA synthetase 5
  misc_feature (1)..(145): NCBI GI NO: 34898260 NR Description: similar to long-chain-fatty-acid--CoA ligase 1
  misc_feature (1)..(137): NCBI GI NO: 7437841 NR Description: probable long-chain-fatty-acid-CoA ligase (EC6
  misc_feature (1)..(145): NCBI GI NO: 15217631 NR Description: long-chain-fatty-acid--CoA ligase
  misc_feature (1)..(152): NCBI GI NO: 22330132 NR Description: long-chain-fatty-acid--CoA ligase
MKIIDRKKNIFKLSQGEYVAVENLENIYGQVSSIESIWVYGNSFEAFLVAVVNPSKQALEHWAQENGISMDFNSLCEDARAKSYIIEELSKIAKEKKLKGFEFIKAVHLDSIPFDMERDLITPTYKKKRPQLLKYYQNAIDNMYKSGSKPSA

SEQ ID NO: 10241 - DNA, 1060 bp, Glycine max
  misc_feature (1)..(1060): Ceres Seq. ID no. 14308640
attttgctgtggaagaagaataagaccaaggttttaattagagcctcgtttgtgcaagtgaaaaataggatcacattgacctattcttttttcaagctcttttaattgtcttgggaagaaaatgaacccagaaatgaatggggttgaggctgagaagaggcaagagaatggacatgagaaagtggattatgatgtgcaagagaaaatagactatgtttttaaggtggtggtgataggggactcagcagttggaaagactcaaatactctcaaggtttgcaaagaatgagttctgctttgactcaaagtccaccattggggttgaattccagactaggactgtcactattaatgccaaagtcatcaaagctcagatctgggacactgctggccaggaaaggtacagggctgtaacaagtgcatactacagaggtgcattaggggcaatgcttgtctacgacataacgaagaggcaatcgtttgatcatgtagcgagatgggtggaggagctgcgtgcgcacgcagatagctccattgtgatcatgttggttgggaacaaagctgatcttgtggaccagagaatggtaccaactgaggatgcagtggagtttgctgaggaccaaggcctcttcttctccgagacttcagctctcagtggtgacaatgtggagagtgcatttctcaaattgctagaagagatcaatagggtagtgtccaaaaaggctttggaatgtggtttagggaaggagaatggtgacaccaatgttgcctcactcaaaggaacaaaggttgatataatcttaggtcctgaattggaaattagtgagatgaagaaattgtcttcgtgctcttgttaatattggtagtgagatttaagtttgtgtattttgattttgagtttgggaaaaagagcagagtgagtgaaaagtatatatacatgagtatccttaacggtgagtgtggaaggctaagttgattttatttgctattgctttccatgctgagttgaagagtaatagttatcctgtttcgttatgattatgaattattacagttatggc

SEQ ID NO: 10242 - protein, 244 aa, Glycine max
  peptide (1)..(244): Ceres Seq. ID no. 14308641
  misc_feature (34)..(194): Pfam Name: Pfam Description:  Ras family
  misc_feature (1)..(244): NCBI GI NO: 1370144 NR Description: RAB11B [Lotus corniculatus var. japonicus]
  misc_feature (1)..(244): NCBI GI NO: 5926718 NR Description: PRA2 [Pisum sativum]
  misc_feature (25)..(244): NCBI GI NO: 7438429 NR Description: GTP-binding protein - garden pea (fragment)
  misc_feature (1)..(244): NCBI GI NO: 30677910 NR Description: GTP-binding protein, putative
  misc_feature (24)..(229): NCBI GI NO: 15238392 NR Description: Ras family GTP-binding protein
  misc_feature (24)..(239): NCBI GI NO: 3024500 NR Description: Ras-related protein Rab11A
  misc_feature (24)..(243): NCBI GI NO: 3024505 NR Description: RAS-RELATED PROTEIN RAB11D
  misc_feature (24)..(239): NCBI GI NO: 7438425 NR Description: GTP-binding protein sra1 - soybean (fragment)
  misc_feature (24)..(242): NCBI GI NO: 7438430 NR Description: GTP-binding protein - garden pea
  misc_feature (24)..(243): NCBI GI NO: 3024503 NR Description: RAS-RELATED PROTEIN RAB11C
MNPEMNGVEAEKRQENGHEKVDYDVQEKIDYVFKVVVIGDSAVGKTQILSRFAKNEFCFDSKSTIGVEFQTRTVTINAKVIKAQIWDTAGQERYRAVTSAYYRGALGAMLVYDITKRQSFDHVARWVEELRAHADSSIVIMLVGNKADLVDQRMVPTEDAVEFAEDQGLFFSETSALSGDNVESAFLKLLEEINRVVSKKALECGLGKENGDTNVASLKGTKVDIILGPELEISEMKKLSSCSC

SEQ ID NO: 10243 - protein, 240 aa, Glycine max
  peptide (1)..(240): Ceres Seq. ID no. 14308642
  misc_feature (30)..(190): Pfam Name: Pfam Description:  Ras family
  misc_feature (1)..(240): NCBI GI NO: 1370144 NR Description: RAB11B [Lotus corniculatus var. japonicus]
  misc_feature (1)..(240): NCBI GI NO: 5926718 NR Description: PRA2 [Pisum sativum]
  misc_feature (21)..(240): NCBI GI NO: 7438429 NR Description: GTP-binding protein - garden pea (fragment)
  misc_feature (1)..(240): NCBI GI NO: 30677910 NR Description: GTP-binding protein, putative
  misc_feature (20)..(225): NCBI GI NO: 15238392 NR Description: Ras family GTP-binding protein
  misc_feature (20)..(235): NCBI GI NO: 3024500 NR Description: Ras-related protein Rab11A
  misc_feature (20)..(239): NCBI GI NO: 3024505 NR Description: RAS-RELATED PROTEIN RAB11D
  misc_feature (20)..(235): NCBI GI NO: 7438425 NR Description: GTP-binding protein sra1 - soybean (fragment)
  misc_feature (20)..(238): NCBI GI NO: 7438430 NR Description: GTP-binding protein - garden pea
  misc_feature (20)..(239): NCBI GI NO: 3024503 NR Description: RAS-RELATED PROTEIN RAB11C
MNGVEAEKRQENGHEKVDYDVQEKIDYVFKVVVIGDSAVGKTQILSRFAKNEFCFDSKSTIGVEFQTRTVTINAKVIKAQIWDTAGQERYRAVTSAYYRGALGAMLVYDITKRQSFDHVARWVEELRAHADSSIVIMLVGNKADLVDQRMVPTEDAVEFAEDQGLFFSETSALSGDNVESAFLKLLEEINRVVSKKALECGLGKENGDTNVASLKGTKVDIILGPELEISEMKKLSSCSC

SEQ ID NO: 10244 - protein, 136 aa, Glycine max
  peptide (1)..(136): Ceres Seq. ID no. 14308643
  misc_feature (1)..(86): Pfam Name: Pfam Description:  Ras family
  misc_feature (1)..(136): NCBI GI NO: 1370144 NR Description: RAB11B [Lotus corniculatus var. japonicus]
  misc_feature (1)..(136): NCBI GI NO: 5926718 NR Description: PRA2 [Pisum sativum]
  misc_feature (1)..(136): NCBI GI NO: 7438429 NR Description: GTP-binding protein - garden pea (fragment)
  misc_feature (1)..(136): NCBI GI NO: 30677910 NR Description: GTP-binding protein, putative
  misc_feature (1)..(121): NCBI GI NO: 15238392 NR Description: Ras family GTP-binding protein
  misc_feature (1)..(131): NCBI GI NO: 3024500 NR Description: Ras-related protein Rab11A
  misc_feature (1)..(135): NCBI GI NO: 3024505 NR Description: RAS-RELATED PROTEIN RAB11D
  misc_feature (1)..(131): NCBI GI NO: 7438425 NR Description: GTP-binding protein sra1 - soybean (fragment)
  misc_feature (1)..(134): NCBI GI NO: 7438430 NR Description: GTP-binding protein - garden pea
  misc_feature (1)..(135): NCBI GI NO: 3024503 NR Description: RAS-RELATED PROTEIN RAB11C
MLVYDITKRQSFDHVARWVEELRAHADSSIVIMLVGNKADLVDQRMVPTEDAVEFAEDQGLFFSETSALSGDNVESAFLKLLEEINRVVSKKALECGLGKENGDTNVASLKGTKVDIILGPELEISEMKKLSSCSC

SEQ ID NO: 10245 - DNA, 1000 bp, Glycine max
  misc_feature (1)..(1000): Ceres Seq. ID no. 15226793
aatcatcaccatcaatggcttccatgggctctctgaagatgatttcgtccctcaaactctcccgttcaagttgttctatctctccccttcaaacccaaaagcaagtaggttcaagtctctttcaatccttcccaaccaaaactttaaaattctcagctacccctcaagtatctacatccagaagaagtaccaacaagaccactaccactgcattcttcttcaataaccaaaagcagcatcaagattcctcacagccagccaaagttcaagaactctttgtctacgagatcaacgaacgcgaccgaggaagtcctgcataccttaggctaagccagaagccagttaactctctaggagacttagtgccattcagcaacaagatatactctggagacttgcaaaagagactagggataactgcaggcttgtgtgtgctcatccagcatgagcctgagaaaaagggtgatagatatgaggccatttacagcttctactttggaaactatggccacatatcagtgcaaggagcctatctcacattccaagacacatatctggcagttacaggaggctctggaatctttgaaggtgcttctggacaagtgaagcttcaccaacttgtgttccctttcaagctgttctacaccttctatttgaagggtgttcctgatttgcctcctgaactgcttgggaaacctgttgaaccttcaccaagtgttgagccttctcctgctgctatggctaccgagcctcatgcctgtttgccaaacttcaccaactgataatgattatgatgatgcaattgagccttttttgtttttcaggaaattttagttttgaacccaaaataaagtctaggtgttgcatattgactgtataccaaaattcgccaactgatgatgatgcaattgagtccttttcttttgcagaaaattttattttggacccaaaataaaatctgggtgttgcagatttactatatcaaaaaaaaaaaaaaaaa

SEQ ID NO: 10246 - protein, 259 aa, Glycine max
  peptide (1)..(259): Ceres Seq. ID no. 15226794
  misc_feature (81)..(259): Pfam Name: Pfam Description:  Allene oxide cyclase
  misc_feature (5)..(259): NCBI GI NO: 40644132 NR Description: allene oxide cyclase [Medicago truncatula]
  misc_feature (7)..(259): NCBI GI NO: 16416376 NR Description: mangrin [Bruguiera sexangula]
  misc_feature (19)..(259): NCBI GI NO: 40644130 NR Description: allene oxide cyclase [Nicotiana tabacum]
  misc_feature (22)..(259): NCBI GI NO: 8977961 NR Description: allene oxide cyclase [Lycopersicon esculentum]
  misc_feature (70)..(259): NCBI GI NO: 21727906 NR Description: allene oxide cyclase
  misc_feature (54)..(259): NCBI GI NO: 1362093 NR Description: hypothetical protein
  misc_feature (15)..(257): NCBI GI NO: 23956574 NR Description: allene oxide cyclase [Solanum tuberosum]
  misc_feature (46)..(259): NCBI GI NO: 39980760 NR Description: allene oxide cyclase [Zea mays]
  misc_feature (25)..(259): NCBI GI NO: 40643247 NR Description: allene oxide cyclase [Hordeum vulgare]
  misc_feature (13)..(259): NCBI GI NO: 15222241 NR Description: allene oxide cyclase family [Arabidopsis thaliana]
SSPSMASMGSLKMISSLKLSRSSCSISPLQTQKQVGSSLFQSFPTKTLKFSATPQVSTSRRSTNKTTTTAFFFNNQKQHQDSSQPAKVQELFVYEINERDRGSPAYLRLSQKPVNSLGDLVPFSNKIYSGDLQKRLGITAGLCVLIQHEPEKKGDRYEAIYSFYFGNYGHISVQGAYLTFQDTYLAVTGGSGIFEGASGQVKLHQLVFPFKLFYTFYLKGVPDLPPELLGKPVEPSPSVEPSPAAMATEPHACLPNFTN

SEQ ID NO: 10247 - protein, 255 aa, Glycine max
  peptide (1)..(255): Ceres Seq. ID no. 15226795
  misc_feature (77)..(255): Pfam Name: Pfam Description:  Allene oxide cyclase
  misc_feature (1)..(255): NCBI GI NO: 40644132 NR Description: allene oxide cyclase [Medicago truncatula]
  misc_feature (3)..(255): NCBI GI NO: 16416376 NR Description: mangrin [Bruguiera sexangula]
  misc_feature (15)..(255): NCBI GI NO: 40644130 NR Description: allene oxide cyclase [Nicotiana tabacum]
  misc_feature (18)..(255): NCBI GI NO: 8977961 NR Description: allene oxide cyclase [Lycopersicon esculentum]
  misc_feature (66)..(255): NCBI GI NO: 21727906 NR Description: allene oxide cyclase
  misc_feature (50)..(255): NCBI GI NO: 1362093 NR Description: hypothetical protein
  misc_feature (11)..(253): NCBI GI NO: 23956574 NR Description: allene oxide cyclase [Solanum tuberosum]
  misc_feature (42)..(255): NCBI GI NO: 39980760 NR Description: allene oxide cyclase [Zea mays]
  misc_feature (21)..(255): NCBI GI NO: 40643247 NR Description: allene oxide cyclase [Hordeum vulgare]
  misc_feature (9)..(255): NCBI GI NO: 15222241 NR Description: allene oxide cyclase family [Arabidopsis thaliana]
MASMGSLKMISSLKLSRSSCSISPLQTQKQVGSSLFQSFPTKTLKFSATPQVSTSRRSTNKTTTTAFFFNNQKQHQDSSQPAKVQELFVYEINERDRGSPAYLRLSQKPVNSLGDLVPFSNKIYSGDLQKRLGITAGLCVLIQHEPEKKGDRYEAIYSFYFGNYGHISVQGAYLTFQDTYLAVTGGSGIFEGASGQVKLHQLVFPFKLFYTFYLKGVPDLPPELLGKPVEPSPSVEPSPAAMATEPHACLPNFTN

SEQ ID NO: 10248 - protein, 252 aa, Glycine max
  peptide (1)..(252): Ceres Seq. ID no. 15226796
  misc_feature (74)..(252): Pfam Name: Pfam Description:  Allene oxide cyclase
  misc_feature (1)..(252): NCBI GI NO: 40644132 NR Description: allene oxide cyclase [Medicago truncatula]
  misc_feature (1)..(252): NCBI GI NO: 16416376 NR Description: mangrin [Bruguiera sexangula]
  misc_feature (12)..(252): NCBI GI NO: 40644130 NR Description: allene oxide cyclase [Nicotiana tabacum]
  misc_feature (15)..(252): NCBI GI NO: 8977961 NR Description: allene oxide cyclase [Lycopersicon esculentum]
  misc_feature (63)..(252): NCBI GI NO: 21727906 NR Description: allene oxide cyclase
  misc_feature (47)..(252): NCBI GI NO: 1362093 NR Description: hypothetical protein
  misc_feature (8)..(250): NCBI GI NO: 23956574 NR Description: allene oxide cyclase [Solanum tuberosum]
  misc_feature (39)..(252): NCBI GI NO: 39980760 NR Description: allene oxide cyclase [Zea mays]
  misc_feature (18)..(252): NCBI GI NO: 40643247 NR Description: allene oxide cyclase [Hordeum vulgare]
  misc_feature (6)..(252): NCBI GI NO: 15222241 NR Description: allene oxide cyclase family [Arabidopsis thaliana]
MGSLKMISSLKLSRSSCSISPLQTQKQVGSSLFQSFPTKTLKFSATPQVSTSRRSTNKTTTTAFFFNNQKQHQDSSQPAKVQELFVYEINERDRGSPAYLRLSQKPVNSLGDLVPFSNKIYSGDLQKRLGITAGLCVLIQHEPEKKGDRYEAIYSFYFGNYGHISVQGAYLTFQDTYLAVTGGSGIFEGASGQVKLHQLVFPFKLFYTFYLKGVPDLPPELLGKPVEPSPSVEPSPAAMATEPHACLPNFTN

SEQ ID NO: 10249 - DNA, 1897 bp, Glycine max
  misc_feature (1)..(1897): Ceres Seq. ID no. 15225226
gaagaaatgacacactattgatgaattaaatagaaatttatgatgctcgcgtctgtataggattggtaatttggtattagtagtggtagtaacagttgtagatgtttttttaaatttgttttcattatcttgtgtggcttctattttgcattattgtccctgctactaatgttttctctcttgcagaaaagccaaggacagagagtgcaatttcaactgtgggttctcttccccacccaactagtacacgatttattgcttatgaagagcttaaagaagcaacaaacaattttgaaccagcgagtgttcttggagaaggagggtttggtagagtttttaaaggtgtcttaaatgatggtactcatgtagcaattaagaggcttacaaatggagggcaacagggtgacaaagagtttttggttgaggttgagatgcttagccggttgcatcatcgtaaccttgtaaaactagtgggatactttagtaatcgtgactcatcacaaaatgtactttgctatgagcttgtccctaatggaagtttggaggcttggcttcatggtcccttgggaatcaattgtcctttggattgggacaccagaatgaagattgcgcttgatgctgcaaggggactttcatacctgcatgaagactcacagccctgtgtaatacatagagacttcaaggcatccaacatattgcttgagaacaattttcatgctaaggttgcagattttggtcttgctaagcaagcacctgaaggcagatctaattatttgtctactcgtgtcatggggacatttgggtacgttgctcctgaatatgccatgactggacacctacttgttaaaagtgacgtttatagctatggtgttgtcttgctggaactgcttactggcaggaagcctgtggatatgtcacagccaactggacaagagaatcttgttacttgggttagttccataccttgtgagacaatgttatttatgtcaagttcagagcaacttcccatgttttctatatttatactaggaaatatgaaagatttaatttaaatccatcctttgaaacttttacattgagtaggtagttagtaagttcatttttcctttcaggctaggccaatccttagagataaggaccggttggaagagattgctgatccaagacttggtggaaagtatccaaaggaagattttgtacgtgtttgcactattgctgcagcctgtgttgctctagaagcaaaccaacgacccacaatgggtgaagtggtacagtcacttaaaatggtgcagcgcgtcacagaataccaagattctgtgttagcctcatccaatgcacgacccaacctacgacagtcctctagcacttttgaatttgatggaacatcttcaatgttctcttcaggtccttactctggtctaagtgcctttgacaatgacaacatttctaggactgtggttttctctgaagatctttgtgaaggacgatgaaaactgagaaaacttagccattcataatgttttctttctttcccatttttgtgagcactttgcaagctttcaaccaaaatgtttttttaacctcatgaagcataaggcacataatttttccaaatagatttaagcattttgttggtgagtggaagggtaatatgattgtaataattgcttgtataaatagaacaaaattcgttagcagattagttatttaaaaagatgagttgggtaattgcttgtataaatagaacaaaatttgccaaaccggctcactagttttatttatcctttgacttgaacaaaggaagacatcacttgtattcttcgattgtgttaattgatttctttgagctgcttttgtcaaaaaaaaaaaaaaaaaaaaaaaaaaaaaaaaaaaaaaa

SEQ ID NO: 10250 - protein, 206 aa, Glycine max
  peptide (1)..(206): Ceres Seq. ID no. 15225227
  misc_feature (1)..(177): NCBI GI NO: 7488203 NR Description: probable serine/threonine-specific protein kinase
  misc_feature (1)..(177): NCBI GI NO: 30679031 NR Description: protein kinase family [Arabidopsis thaliana]
  misc_feature (1)..(177): NCBI GI NO: 34902828 NR Description: unnamed protein product
  misc_feature (1)..(173): NCBI GI NO: 32488293 NR Description: OSJNBb0065L13.2
  misc_feature (1)..(191): NCBI GI NO: 20453162 NR Description: At5g56885 [Arabidopsis thaliana]
  misc_feature (1)..(191): NCBI GI NO: 22327898 NR Description: protein kinase family [Arabidopsis thaliana]
  misc_feature (1)..(173): NCBI GI NO: 30680947 NR Description: protein kinase family [Arabidopsis thaliana]
  misc_feature (1)..(173): NCBI GI NO: 25287641 NR Description: probable protein kinase
  misc_feature (1)..(173): NCBI GI NO: 34903544 NR Description: putative protein kinase APK1AArabidopsis thaliana
  misc_feature (1)..(173): NCBI GI NO: 34910468 NR Description: putative protein kinase
MLSRLHHRNLVKLVGYFSNRDSSQNVLCYELVPNGSLEAWLHGPLGINCPLDWDTRMKIALDAARGLSYLHEDSQPCVIHRDFKASNILLENNFHAKVADFGLAKQAPEGRSNYLSTRVMGTFGYVAPEYAMTGHLLVKSDVYSYGVVLLELLTGRKPVDMSQPTGQENLVTWVSSIPCETMLFMSSSEQLPMFSIFILGNMKDLI

SEQ ID NO: 10251 - protein, 150 aa, Glycine max
  peptide (1)..(150): Ceres Seq. ID no. 15225228
  misc_feature (1)..(121): NCBI GI NO: 7488203 NR Description: probable serine/threonine-specific protein kinase
  misc_feature (1)..(121): NCBI GI NO: 30679031 NR Description: protein kinase family [Arabidopsis thaliana]
  misc_feature (1)..(121): NCBI GI NO: 34902828 NR Description: unnamed protein product
  misc_feature (1)..(117): NCBI GI NO: 32488293 NR Description: OSJNBb0065L13.2
  misc_feature (1)..(135): NCBI GI NO: 20453162 NR Description: At5g56885 [Arabidopsis thaliana]
  misc_feature (1)..(135): NCBI GI NO: 22327898 NR Description: protein kinase family [Arabidopsis thaliana]
  misc_feature (1)..(117): NCBI GI NO: 30680947 NR Description: protein kinase family [Arabidopsis thaliana]
  misc_feature (1)..(117): NCBI GI NO: 25287641 NR Description: probable protein kinase
  misc_feature (1)..(117): NCBI GI NO: 34903544 NR Description: putative protein kinase APK1AArabidopsis thaliana
  misc_feature (1)..(117): NCBI GI NO: 34910468 NR Description: putative protein kinase
MKIALDAARGLSYLHEDSQPCVIHRDFKASNILLENNFHAKVADFGLAKQAPEGRSNYLSTRVMGTFGYVAPEYAMTGHLLVKSDVYSYGVVLLELLTGRKPVDMSQPTGQENLVTWVSSIPCETMLFMSSSEQLPMFSIFILGNMKDLI

SEQ ID NO: 10252 - DNA, 1568 bp, Glycine max
  misc_feature (1)..(1568): Ceres Seq. ID no. 14308243
agcactagcactgcaattcactgtaatgggtcaagtgttacaagatcagagaggtttgtggactcagatacagagacctttttggacacaatgcagaggagttggtccatgttgccatggaatagaagcttcgagggatggactttcaaaagaacctcctcaagtaaacgagagcctttgacctcacattcaactcattccatgggaccatactttgatcacaataaatgcactgcaagtggctgggaaaatagggaactttggagtagagatgggaaaacaaagctcaaaaccaatgtgttctttgcttcctttgatcaaagaagcaaaaaagcatgtggtgagagtgcatgtacagcactagcagtgtgcatagctcactggcttcattccaaccacaacatgccaacaagggctcaatttgatagcctcatcaaaaagggttcctctaaatggagaaagctgagtcatagtgatcactacctaaagcttttccctgataagcattttgatttagagacaatcttggaagccaacattaggccactagttgttatccctcaaaattcctacacaggatttttctcccctgagaagtttaaatgcttagaaggagccatgtcctttgatgatatttgggatgagataactagaaatgatggtgtggttgatcatgagccaagaatttacatagtgagttggaatgaccatttctttgttctgaaagtggaagttgatgcttgttatgtgattgacactttgggggagaggctttttgagggatgcaaaaaggctttcatgttgaagtttgatggttcaagtttgatgcatgcaaagggaagtaagaaaggaagaggtgagatagtttgcaaaggaaaagagtgttgtaaagagttcatcaaacgctttcttgctgccataccacttaggcaactagaagaggaagagcaaaataaagggactgtctataatccttattttcacaggaaattgcagattgacttccattatagtttgttatcatccttgtcttcagtttcttcaattggtgaacctttacaacctaattatatagcaagacattagttatataactcaattgctaaccttgtgagtcttgagcaattgttacaattagaaaaccaaaaaacccggcttcttgtctgaagacaaaatgttcaggtgagataagtcctaagcactcattaggataaggtaagcctcaaagcttgaagagtgtttatagaaatacttatagataacctatcaacaagttccttgcattggtaataggcttcgaacttaaattcttgtaagatgagtcttattcttaaaaactagaccaactttcgttggcaaaaactcagcttcttttctagcagagtttgctggcagcttctttttggtgacaactactactaaccctttacaaagtgtgattttactggattgagcaacccaaatatccattagcatcactcagagaataaaacctttgaggctgattcttgttaacgttgctgtatttagtggagtggatctgaatgaaaaagaaaagaaattggtct

SEQ ID NO: 10253 - protein, 361 aa, Glycine max
  peptide (1)..(361): Ceres Seq. ID no. 14308244
  misc_feature (44)..(342): NCBI GI NO: 25412320 NR Description: hypothetical protein At2g25460
  misc_feature (37)..(340): NCBI GI NO: 34903512 NR Description: P0001B06.8
  misc_feature (72)..(271): NCBI GI NO: 15238352 NR Description: expressed protein [Arabidopsis thaliana]
  misc_feature (287)..(338): NCBI GI NO: 15238352 NR Description: expressed protein [Arabidopsis thaliana]
  misc_feature (50)..(277): NCBI GI NO: 15229852 NR Description: hypothetical protein [Arabidopsis thaliana]
  misc_feature (155)..(271): NCBI GI NO: 15226799 NR Description: hypothetical protein [Arabidopsis thaliana]
  misc_feature (279)..(338): NCBI GI NO: 15226799 NR Description: hypothetical protein [Arabidopsis thaliana]
  misc_feature (44)..(217): NCBI GI NO: 17063176 NR Description: SYNC1 protein [Arabidopsis thaliana]
  misc_feature (44)..(217): NCBI GI NO: 18400834 NR Description: SYNC1 protein [Arabidopsis thaliana]
  misc_feature (193)..(346): NCBI GI NO: 15229852 NR Description: hypothetical protein [Arabidopsis thaliana]
STSTAIHCNGSSVTRSERFVDSDTETFLDTMQRSWSMLPWNRSFEGWTFKRTSSSKREPLTSHSTHSMGPYFDHNKCTASGWENRELWSRDGKTKLKTNVFFASFDQRSKKACGESACTALAVCIAHWLHSNHNMPTRAQFDSLIKKGSSKWRKLSHSDHYLKLFPDKHFDLETILEANIRPLVVIPQNSYTGFFSPEKFKCLEGAMSFDDIWDEITRNDGVVDHEPRIYIVSWNDHFFVLKVEVDACYVIDTLGERLFEGCKKAFMLKFDGSSLMHAKGSKKGRGEIVCKGKECCKEFIKRFLAAIPLRQLEEEEQNKGTVYNPYFHRKLQIDFHYSLLSSLSSVSSIGEPLQPNYIARH

SEQ ID NO: 10254 - protein, 331 aa, Glycine max
  peptide (1)..(331): Ceres Seq. ID no. 14308245
  misc_feature (14)..(312): NCBI GI NO: 25412320 NR Description: hypothetical protein At2g25460
  misc_feature (7)..(310): NCBI GI NO: 34903512 NR Description: P0001B06.8
  misc_feature (42)..(241): NCBI GI NO: 15238352 NR Description: expressed protein [Arabidopsis thaliana]
  misc_feature (257)..(308): NCBI GI NO: 15238352 NR Description: expressed protein [Arabidopsis thaliana]
  misc_feature (20)..(247): NCBI GI NO: 15229852 NR Description: hypothetical protein [Arabidopsis thaliana]
  misc_feature (125)..(241): NCBI GI NO: 15226799 NR Description: hypothetical protein [Arabidopsis thaliana]
  misc_feature (249)..(308): NCBI GI NO: 15226799 NR Description: hypothetical protein [Arabidopsis thaliana]
  misc_feature (14)..(187): NCBI GI NO: 17063176 NR Description: SYNC1 protein [Arabidopsis thaliana]
  misc_feature (14)..(187): NCBI GI NO: 18400834 NR Description: SYNC1 protein [Arabidopsis thaliana]
  misc_feature (163)..(316): NCBI GI NO: 15229852 NR Description: hypothetical protein [Arabidopsis thaliana]
MQRSWSMLPWNRSFEGWTFKRTSSSKREPLTSHSTHSMGPYFDHNKCTASGWENRELWSRDGKTKLKTNVFFASFDQRSKKACGESACTALAVCIAHWLHSNHNMPTRAQFDSLIKKGSSKWRKLSHSDHYLKLFPDKHFDLETILEANIRPLVVIPQNSYTGFFSPEKFKCLEGAMSFDDIWDEITRNDGVVDHEPRIYIVSWNDHFFVLKVEVDACYVIDTLGERLFEGCKKAFMLKFDGSSLMHAKGSKKGRGEIVCKGKECCKEFIKRFLAAIPLRQLEEEEQNKGTVYNPYFHRKLQIDFHYSLLSSLSSVSSIGEPLQPNYIARH

SEQ ID NO: 10255 - protein, 325 aa, Glycine max
  peptide (1)..(325): Ceres Seq. ID no. 14308246
  misc_feature (8)..(306): NCBI GI NO: 25412320 NR Description: hypothetical protein At2g25460
  misc_feature (1)..(304): NCBI GI NO: 34903512 NR Description: P0001B06.8
  misc_feature (36)..(235): NCBI GI NO: 15238352 NR Description: expressed protein [Arabidopsis thaliana]
  misc_feature (251)..(302): NCBI GI NO: 15238352 NR Description: expressed protein [Arabidopsis thaliana]
  misc_feature (14)..(241): NCBI GI NO: 15229852 NR Description: hypothetical protein [Arabidopsis thaliana]
  misc_feature (119)..(235): NCBI GI NO: 15226799 NR Description: hypothetical protein [Arabidopsis thaliana]
  misc_feature (243)..(302): NCBI GI NO: 15226799 NR Description: hypothetical protein [Arabidopsis thaliana]
  misc_feature (8)..(181): NCBI GI NO: 17063176 NR Description: SYNC1 protein [Arabidopsis thaliana]
  misc_feature (8)..(181): NCBI GI NO: 18400834 NR Description: SYNC1 protein [Arabidopsis thaliana]
  misc_feature (157)..(310): NCBI GI NO: 15229852 NR Description: hypothetical protein [Arabidopsis thaliana]
MLPWNRSFEGWTFKRTSSSKREPLTSHSTHSMGPYFDHNKCTASGWENRELWSRDGKTKLKTNVFFASFDQRSKKACGESACTALAVCIAHWLHSNHNMPTRAQFDSLIKKGSSKWRKLSHSDHYLKLFPDKHFDLETILEANIRPLVVIPQNSYTGFFSPEKFKCLEGAMSFDDIWDEITRNDGVVDHEPRIYIVSWNDHFFVLKVEVDACYVIDTLGERLFEGCKKAFMLKFDGSSLMHAKGSKKGRGEIVCKGKECCKEFIKRFLAAIPLRQLEEEEQNKGTVYNPYFHRKLQIDFHYSLLSSLSSVSSIGEPLQPNYIARH

SEQ ID NO: 10256 - DNA, 1498 bp, Glycine max
  misc_feature (1)..(1498): Ceres Seq. ID no. 14310807
atctagtatatatcttacccttagacacaacaaattccacataacaatttcatctagcaatgttaaaaaaccaaccacaaccagattggcctgagcccattgtccgggttcagtccttatccgaaaactgcatagattcaatccctgaaaggtacatcaagccttctactgatagaccatccataagaagttctaattttgatgatgccaatattccaatcatcgaccttggtggtctgtttggtgctgaccaacgtgtctcagactcaattcttaggcaaatctcagaggcttgcaaagagtggggcttcttccaagtcactaaccatggtgttagccctgatttgatggacaaggctagggaaacttggcgtcaattctttcacatgcccatggaggtgaagcagcaatatgccaactcgccaaaaacctatgaagggtacggaagcagacttggaattgagaaaggtgctattcttgattggagtgattactattttcttcactatcttcccttgccactcaaggactataacaaatggcctgcctcgcctccctcttgcaggaaagtgtttgatgagtatgggagagagttagtgaagctatgtgggaggttgatgaaggctttgtcaataaaccttggattagatgaaaaaattcttcaaaatggttttgggggagaagacataggggcatgtctaagagtgaatttttaccctaaatgtccacggccagagttgacgttgggtttgtcatcacactcagaccctggaggaatgactatgttgcttccagatgatcaagttcctggtcttcaagttcgaaaatgtgataattggattaccgtgaagcctgcacgccatgcttttatcgtcaatatcggagaccaaattcaggttctaagcaatgcaatttacaagagtgtggagcacagagtgatagtaaattcagataaagagagagtttctctggcatttttctacaaccccaaaagtgatatacccattgagccaataaaagagctggtaacaccggaaaagccctcactctacccagcaatgaccttcgatgaatacagactcttcattagaatgagaggacctcgaggcaaatctcaagttgaatctttaaagtctcccagatgatcaattctgctcataggcttttattgcttgcattctatgtccatttcaaatagtaagtcactatatatgacgtgtttggtttcacgtctttacagcgtgcgtgcgtgtttagtttcacgtcttggatgtgattttttttacatcttagatgttattttaagaagttaatagttatatatagttttcatgtctgaaatgtgattccttacttctcaagagtttacaagcacgctataccttattggtgtataattaattgtaaatcttgtaactagatcgggatttgtttgcacattgagccacagagtaaggatatgtaagagagattggatatatagatatgatattgtttt

SEQ ID NO: 10257 - protein, 361 aa, Glycine max
  peptide (1)..(361): Ceres Seq. ID no. 14310808
  misc_feature (210)..(310): Pfam Name: II Pfam Description: 2OG-Fe
  misc_feature (3)..(361): NCBI GI NO: 15239179 NR Description: oxidoreductase, 2OG-Fe(II) oxygenase family
  misc_feature (9)..(361): NCBI GI NO: 21537324 NR Description: leucoanthocyanidin dioxygenase-like protein
  misc_feature (10)..(361): NCBI GI NO: 15229694 NR Description: oxidoreductase, 2OG-Fe(II) oxygenase family
  misc_feature (9)..(361): NCBI GI NO: 15228785 NR Description: oxidoreductase, 2OG-Fe(II) oxygenase family
  misc_feature (9)..(281): NCBI GI NO: 34907994 NR Description: leucoanthocyanidin dioxygenase-like protein
  misc_feature (276)..(358): NCBI GI NO: 34907994 NR Description: leucoanthocyanidin dioxygenase-like protein
  misc_feature (10)..(357): NCBI GI NO: 15224472 NR Description: oxidoreductase, 2OG-Fe(II) oxygenase family
  misc_feature (10)..(357): NCBI GI NO: 21554535 NR Description: putative anthocyanidin synthase
  misc_feature (12)..(339): NCBI GI NO: 14916566 NR Description: Flavonol synthase (FLS) (CitFLS)
  misc_feature (14)..(339): NCBI GI NO: 31978953 NR Description: flavonol synthase [Petroselinum crispum]
MLKNQPQPDWPEPIVRVQSLSENCIDSIPERYIKPSTDRPSIRSSNFDDANIPIIDLGGLFGADQRVSDSILRQISEACKEWGFFQVTNHGVSPDLMDKARETWRQFFHMPMEVKQQYANSPKTYEGYGSRLGIEKGAILDWSDYYFLHYLPLPLKDYNKWPASPPSCRKVFDEYGRELVKLCGRLMKALSINLGLDEKILQNGFGGEDIGACLRVNFYPKCPRPELTLGLSSHSDPGGMTMLLPDDQVPGLQVRKCDNWITVKPARHAFIVNIGDQIQVLSNAIYKSVEHRVIVNSDKERVSLAFFYNPKSDIPIEPIKELVTPEKPSLYPAMTFDEYRLFIRMRGPRGKSQVESLKSPR

SEQ ID NO: 10258 - protein, 265 aa, Glycine max
  peptide (1)..(265): Ceres Seq. ID no. 14310809
  misc_feature (114)..(214): Pfam Name: II Pfam Description: 2OG-Fe
  misc_feature (1)..(265): NCBI GI NO: 15239179 NR Description: oxidoreductase, 2OG-Fe(II) oxygenase family
  misc_feature (1)..(265): NCBI GI NO: 21537324 NR Description: leucoanthocyanidin dioxygenase-like protein
  misc_feature (1)..(265): NCBI GI NO: 15229694 NR Description: oxidoreductase, 2OG-Fe(II) oxygenase family
  misc_feature (1)..(265): NCBI GI NO: 15228785 NR Description: oxidoreductase, 2OG-Fe(II) oxygenase family
  misc_feature (1)..(185): NCBI GI NO: 34907994 NR Description: leucoanthocyanidin dioxygenase-like protein
  misc_feature (180)..(262): NCBI GI NO: 34907994 NR Description: leucoanthocyanidin dioxygenase-like protein
  misc_feature (1)..(261): NCBI GI NO: 15224472 NR Description: oxidoreductase, 2OG-Fe(II) oxygenase family
  misc_feature (1)..(261): NCBI GI NO: 21554535 NR Description: putative anthocyanidin synthase
  misc_feature (1)..(243): NCBI GI NO: 14916566 NR Description: Flavonol synthase (FLS) (CitFLS)
  misc_feature (1)..(243): NCBI GI NO: 31978953 NR Description: flavonol synthase [Petroselinum crispum]
MDKARETWRQFFHMPMEVKQQYANSPKTYEGYGSRLGIEKGAILDWSDYYFLHYLPLPLKDYNKWPASPPSCRKVFDEYGRELVKLCGRLMKALSINLGLDEKILQNGFGGEDIGACLRVNFYPKCPRPELTLGLSSHSDPGGMTMLLPDDQVPGLQVRKCDNWITVKPARHAFIVNIGDQIQVLSNAIYKSVEHRVIVNSDKERVSLAFFYNPKSDIPIEPIKELVTPEKPSLYPAMTFDEYRLFIRMRGPRGKSQVESLKSPR

SEQ ID NO: 10259 - protein, 252 aa, Glycine max
  peptide (1)..(252): Ceres Seq. ID no. 14310810
  misc_feature (101)..(201): Pfam Name: II Pfam Description: 2OG-Fe
  misc_feature (1)..(252): NCBI GI NO: 15239179 NR Description: oxidoreductase, 2OG-Fe(II) oxygenase family
  misc_feature (1)..(252): NCBI GI NO: 21537324 NR Description: leucoanthocyanidin dioxygenase-like protein
  misc_feature (1)..(252): NCBI GI NO: 15229694 NR Description: oxidoreductase, 2OG-Fe(II) oxygenase family
  misc_feature (1)..(252): NCBI GI NO: 15228785 NR Description: oxidoreductase, 2OG-Fe(II) oxygenase family
  misc_feature (1)..(172): NCBI GI NO: 34907994 NR Description: leucoanthocyanidin dioxygenase-like protein
  misc_feature (167)..(249): NCBI GI NO: 34907994 NR Description: leucoanthocyanidin dioxygenase-like protein
  misc_feature (1)..(248): NCBI GI NO: 15224472 NR Description: oxidoreductase, 2OG-Fe(II) oxygenase family
  misc_feature (1)..(248): NCBI GI NO: 21554535 NR Description: putative anthocyanidin synthase
  misc_feature (1)..(230): NCBI GI NO: 14916566 NR Description: Flavonol synthase (FLS) (CitFLS)
  misc_feature (1)..(230): NCBI GI NO: 31978953 NR Description: flavonol synthase [Petroselinum crispum]
MPMEVKQQYANSPKTYEGYGSRLGIEKGAILDWSDYYFLHYLPLPLKDYNKWPASPPSCRKVFDEYGRELVKLCGRLMKALSINLGLDEKILQNGFGGEDIGACLRVNFYPKCPRPELTLGLSSHSDPGGMTMLLPDDQVPGLQVRKCDNWITVKPARHAFIVNIGDQIQVLSNAIYKSVEHRVIVNSDKERVSLAFFYNPKSDIPIEPIKELVTPEKPSLYPAMTFDEYRLFIRMRGPRGKSQVESLKSPR

SEQ ID NO: 10260 - DNA, 1281 bp, Glycine max
  misc_feature (1)..(1281): Ceres Seq. ID no. 15176949
ggcagcaaagtgaataatggcttcactttccaccttcctcacactcactctcttcttcctctcacacgttaacgccaaagaaatcgtcatcaccgaagagggttacaccgtgaccaccgtattcgacggccacaagcctcacatcttccctttcaccgttctccagcgacccttttcctccgatctcatccttctcgattccgtcaacagcactttctacacggcgcaattccccattactgaagaaagcgttttcacgaggctttctggcgatgggtctgtggggtattctgatggggacgtgggttctgctcggttcgccaaacccagaagctttgcttttgatatgagagggaatgtgtatgttgctgataagtccaaccgtgcaataaggaaaattagtgccaagggtgtgaccacgattgctgggggagagttctcagaaaagtcaagaacaaaggatgggcctgcacttaatgcatcattttcaaatgattttgacctgactttcattcctgggctgtgtgctttgctcgtgtcagatcacatgcatagattggtccgccagattaatttgatggaggaggattgcacccttggttctaaacctggactaggtgcagttatgacttggactcttggattaggactttcatgcttacttggcttagtaattggaattgtggtgcgtccttacatcatccctaatacagaaaggcaccaacccttgccacttcaccgagacatggaagcgttacctaaccagtctggggaagctagcacagacgctcttcttcggcgccaaaagcgcaattgctagctgcagttgctcctctgtttacaaaatcctgatgagcttttggagattgagtctctctcatcttgtttgcatgtctagaattagaatcaacatagtttctccaaggccacatctggaatcagtgtctttgctagatttagatgcctgcaatagcggtgaggtaacaaagtcaggtaagtattatgaccaattgaaggatttgatgagttttgatgaagattcaaacaatggcaaggcaacctttaacaaaggaaatgatagcataggaaggaggaatgtgtgctatgaaggtgatgtcatgatgaaggctaacatgggctttgtagagacacctaaagataacaataacattgttcgtcaagaatcttctgtgtgtaaaatgggtattgtgaagcgtagatgaagttatttgtaagacatgaactatgttatgaaactagcatgcatatattttgtcaccg

SEQ ID NO: 10261 - protein, 267 aa, Glycine max
  peptide (1)..(267): Ceres Seq. ID no. 15176950
  misc_feature (101)..(128): Pfam Name: Pfam Description:  NHL repeat
  misc_feature (8)..(260): NCBI GI NO: 18395326 NR Description: expressed protein [Arabidopsis thaliana]
  misc_feature (8)..(208): NCBI GI NO: 25402992 NR Description: protein T23E23.6 [imported] - Arabidopsis thaliana
  misc_feature (3)..(225): NCBI GI NO: 11357718 NR Description: hypothetical protein F2G14_10 - Arabidopsisthaliana
  misc_feature (3)..(225): NCBI GI NO: 30685100 NR Description: expressed protein [Arabidopsis thaliana]
  misc_feature (18)..(224): NCBI GI NO: 30698020 NR Description: expressed protein [Arabidopsis thaliana]
  misc_feature (27)..(224): NCBI GI NO: 30698018 NR Description: expressed protein [Arabidopsis thaliana]
  misc_feature (18)..(216): NCBI GI NO: 9369390 NR Description: T23E23.5 [Arabidopsis thaliana]
  misc_feature (18)..(192): NCBI GI NO: 7485679 NR Description: hypothetical protein F17O7
  misc_feature (18)..(211): NCBI GI NO: 22329761 NR Description: expressed protein [Arabidopsis thaliana]
  misc_feature (27)..(192): NCBI GI NO: 22331093 NR Description: expressed protein [Arabidopsis thaliana]
MASLSTFLTLTLFFLSHVNAKEIVITEEGYTVTTVFDGHKPHIFPFTVLQRPFSSDLILLDSVNSTFYTAQFPITEESVFTRLSGDGSVGYSDGDVGSARFAKPRSFAFDMRGNVYVADKSNRAIRKISAKGVTTIAGGEFSEKSRTKDGPALNASFSNDFDLTFIPGLCALLVSDHMHRLVRQINLMEEDCTLGSKPGLGAVMTWTLGLGLSCLLGLVIGIVVRPYIIPNTERHQPLPLHRDMEALPNQSGEASTDALLRRQKRNC

SEQ ID NO: 10262 - protein, 157 aa, Glycine max
  peptide (1)..(157): Ceres Seq. ID no. 15176951
  misc_feature (1)..(150): NCBI GI NO: 18395326 NR Description: expressed protein [Arabidopsis thaliana]
  misc_feature (1)..(98): NCBI GI NO: 25402992 NR Description: protein T23E23.6 [imported] - Arabidopsis thaliana
  misc_feature (1)..(115): NCBI GI NO: 11357718 NR Description: hypothetical protein F2G14_10 - Arabidopsisthaliana
  misc_feature (1)..(115): NCBI GI NO: 30685100 NR Description: expressed protein [Arabidopsis thaliana]
  misc_feature (1)..(114): NCBI GI NO: 30698020 NR Description: expressed protein [Arabidopsis thaliana]
  misc_feature (1)..(114): NCBI GI NO: 30698018 NR Description: expressed protein [Arabidopsis thaliana]
  misc_feature (1)..(106): NCBI GI NO: 9369390 NR Description: T23E23.5 [Arabidopsis thaliana]
  misc_feature (1)..(82): NCBI GI NO: 7485679 NR Description: hypothetical protein F17O7
  misc_feature (1)..(101): NCBI GI NO: 22329761 NR Description: expressed protein [Arabidopsis thaliana]
  misc_feature (1)..(82): NCBI GI NO: 22331093 NR Description: expressed protein [Arabidopsis thaliana]
MRGNVYVADKSNRAIRKISAKGVTTIAGGEFSEKSRTKDGPALNASFSNDFDLTFIPGLCALLVSDHMHRLVRQINLMEEDCTLGSKPGLGAVMTWTLGLGLSCLLGLVIGIVVRPYIIPNTERHQPLPLHRDMEALPNQSGEASTDALLRRQKRNC

SEQ ID NO: 10263 - DNA, 1275 bp, Glycine max
  misc_feature (1)..(1275): Ceres Seq. ID no. 14313575
aaacttatcctaacaggcaatcgaacaactgcttaacatatattacgaatgacaaacttgctcaaagtaattgttagctatgtactacgattgtgtagccttaataactacatcacttgaaatatcattgtttttcctcaaagcccacctagcgggggcaagactttgtcattgatatcgatctttttcatcaattttttaaaatagcattttctacttatctaaaattccattctatgatcaggtgctgataacctaattcctgtggagttggcactgaagatagtcagtaagataagatcgaaggagagattcacagtttatattgtcatcccaatgtggcctgaaggttccccttcttctacttcagtgcaagagatactcttttggcagggacaaacaatgaaaatgatgtatgaaatcatagctctggagttaaaatctatgcagcttgatagtcatccacaagattacctcaatttttactgtcttggaaaccgagagcagttgacaactgaagtttcaagttcaagtaattcaccttcagataatggcgaaacggtttcagcctcacaaaagttccgacggtttatgatttatgtacatgccaaaggaatgattgtggatgatgaatatgtaattcttgggtctgccaatataaatcaacgatctttggctggatccagagatactgagatagcaatgggtgcacatcaaccgcatcatacatggagtcagaaaaagaggcatccacatggtcaggtatatgggtatagaatgtctttgtgggcagaacacatggaaaccatagaagcttgcttcaaggagcctgaaagcttggagtgtgtgaaaagtgtgaacaagattgctgaagacaactggaagaagtacacagctgatgactatactccattgcaagggcacataatgaagtatcccgtgtgtgtaaatgcctatgggaaggtaaagtccttaactggatttgagtctttcccagatgttggtggcaaggtgcttggctcccggtctacccttcctgacgctctaactacatagcataccctcttaatttctacgtgaaaataagtaccaaagtctcagagaagaagagagagggatcaattggattttgctggcgtgcttggtgtaaactgttaaaaagaggccttgcccctgcatttttttaaaccatttacacggtggtatagtatgcaacaggctgcgtatatagtaaattattattaatcagtggactgtatgtcacagccacattgt

SEQ ID NO: 10264 - protein, 239 aa, Glycine max
  peptide (1)..(239): Ceres Seq. ID no. 14313576
  misc_feature (85)..(112): Pfam Name: Pfam Description:  Phospholipase D. Active site motif
  misc_feature (1)..(239): NCBI GI NO: 22795064 NR Description: phospholipase D delta isoform 1a
  misc_feature (1)..(239): NCBI GI NO: 22795060 NR Description: phospholipase D delta isoform 1b
  misc_feature (1)..(239): NCBI GI NO: 23477711 NR Description: phospholipase D delta isoform [Gossypium hirsutum]
  misc_feature (1)..(239): NCBI GI NO: 7486399 NR Description: hypothetical protein F4B14
  misc_feature (1)..(239): NCBI GI NO: 15592894 NR Description: phospholipase D-like protein p98
  misc_feature (1)..(239): NCBI GI NO: 30690488 NR Description: phospholipase D -related [Arabidopsis thaliana]
  misc_feature (1)..(239): NCBI GI NO: 15983515 NR Description: AT4g35790/F4B14_60 [Arabidopsis thaliana]
  misc_feature (1)..(239): NCBI GI NO: 18419668 NR Description: phospholipase D -related [Arabidopsis thaliana]
  misc_feature (1)..(239): NCBI GI NO: 18765909 NR Description: phospholipase D nu-2 [Oryza sativa]
  misc_feature (1)..(239): NCBI GI NO: 34394829 NR Description: putative phospholipase D
MWPEGSPSSTSVQEILFWQGQTMKMMYEIIALELKSMQLDSHPQDYLNFYCLGNREQLTTEVSSSSNSPSDNGETVSASQKFRRFMIYVHAKGMIVDDEYVILGSANINQRSLAGSRDTEIAMGAHQPHHTWSQKKRHPHGQVYGYRMSLWAEHMETIEACFKEPESLECVKSVNKIAEDNWKKYTADDYTPLQGHIMKYPVCVNAYGKVKSLTGFESFPDVGGKVLGSRSTLPDALTT

SEQ ID NO: 10265 - protein, 217 aa, Glycine max
  peptide (1)..(217): Ceres Seq. ID no. 14313577
  misc_feature (63)..(90): Pfam Name: Pfam Description:  Phospholipase D. Active site motif
  misc_feature (1)..(217): NCBI GI NO: 22795064 NR Description: phospholipase D delta isoform 1a
  misc_feature (1)..(217): NCBI GI NO: 22795060 NR Description: phospholipase D delta isoform 1b
  misc_feature (1)..(217): NCBI GI NO: 23477711 NR Description: phospholipase D delta isoform [Gossypium hirsutum]
  misc_feature (1)..(217): NCBI GI NO: 7486399 NR Description: hypothetical protein F4B14
  misc_feature (1)..(217): NCBI GI NO: 18419668 NR Description: phospholipase D -related [Arabidopsis thaliana]
  misc_feature (1)..(217): NCBI GI NO: 30690488 NR Description: phospholipase D -related [Arabidopsis thaliana]
  misc_feature (1)..(217): NCBI GI NO: 15983515 NR Description: AT4g35790/F4B14_60 [Arabidopsis thaliana]
  misc_feature (1)..(217): NCBI GI NO: 15592894 NR Description: phospholipase D-like protein p98
  misc_feature (1)..(217): NCBI GI NO: 18765909 NR Description: phospholipase D nu-2 [Oryza sativa]
  misc_feature (1)..(217): NCBI GI NO: 34394829 NR Description: putative phospholipase D
MKMMYEIIALELKSMQLDSHPQDYLNFYCLGNREQLTTEVSSSSNSPSDNGETVSASQKFRRFMIYVHAKGMIVDDEYVILGSANINQRSLAGSRDTEIAMGAHQPHHTWSQKKRHPHGQVYGYRMSLWAEHMETIEACFKEPESLECVKSVNKIAEDNWKKYTADDYTPLQGHIMKYPVCVNAYGKVKSLTGFESFPDVGGKVLGSRSTLPDALTT

SEQ ID NO: 10266 - protein, 215 aa, Glycine max
  peptide (1)..(215): Ceres Seq. ID no. 14313578
  misc_feature (61)..(88): Pfam Name: Pfam Description:  Phospholipase D. Active site motif
  misc_feature (1)..(215): NCBI GI NO: 22795064 NR Description: phospholipase D delta isoform 1a
  misc_feature (1)..(215): NCBI GI NO: 22795060 NR Description: phospholipase D delta isoform 1b
  misc_feature (1)..(215): NCBI GI NO: 23477711 NR Description: phospholipase D delta isoform [Gossypium hirsutum]
  misc_feature (1)..(215): NCBI GI NO: 7486399 NR Description: hypothetical protein F4B14
  misc_feature (1)..(215): NCBI GI NO: 15983515 NR Description: AT4g35790/F4B14_60 [Arabidopsis thaliana]
  misc_feature (1)..(215): NCBI GI NO: 30690488 NR Description: phospholipase D -related [Arabidopsis thaliana]
  misc_feature (1)..(215): NCBI GI NO: 18419668 NR Description: phospholipase D -related [Arabidopsis thaliana]
  misc_feature (1)..(215): NCBI GI NO: 15592894 NR Description: phospholipase D-like protein p98
  misc_feature (1)..(215): NCBI GI NO: 18765909 NR Description: phospholipase D nu-2 [Oryza sativa]
  misc_feature (1)..(215): NCBI GI NO: 34394829 NR Description: putative phospholipase D
MMYEIIALELKSMQLDSHPQDYLNFYCLGNREQLTTEVSSSSNSPSDNGETVSASQKFRRFMIYVHAKGMIVDDEYVILGSANINQRSLAGSRDTEIAMGAHQPHHTWSQKKRHPHGQVYGYRMSLWAEHMETIEACFKEPESLECVKSVNKIAEDNWKKYTADDYTPLQGHIMKYPVCVNAYGKVKSLTGFESFPDVGGKVLGSRSTLPDALTT

SEQ ID NO: 10267 - DNA, 2647 bp, Glycine max
  misc_feature (1)..(2647): Ceres Seq. ID no. 15226720
cagctacgtaggccccccccccgaattcaacattgcccagaatggaaagccatggtgtccaaatatgtctccgccataccagaatgtcaccacaatatatagcaggttaggcaccagtggaaaaaaattgaatattcacttgagaaaacaaaggattcaagcctacctcccatcataaatgccattgaaatttacagagtaataaacttccagcaatcagatacacaccaaggagatgttgacgcgattgcaaccatcaagtcagtttatgggatgacaagagattggcaaggtgatccatgctcccctgtagcctacttgtggaatggtttgaattgtacttaccgcggaaatgagaacccgagaatcacaactttgaatttatcttcaagcgaattgtcaggaatgatagatccttccatttcatatctcaccatgttggagaagttggatttatcaaacaataacttaaatggtgaagttcctgattttctatctagattacagcacttgaagatcataaatttagataacaacaacctcacgggttcaattccatcagaactagttaaaaaatctaaggaaggtttcctatcactaagtgtgggccaaaatctgtatctatgtgaatctggtcaatgcaacgagaagaaaaagaaaaagaacattgttactcccttgttagcgtcagttagtggggttttgatccttgtggtggctgtggcagctatatcgtggactcttaaaaagagaaagccgaaagaaaagaatcaaagtgagatgtcagctcaatgcacagaacaagatgattcattacatcaattcaaaaaacaaatatactcacactctgatgtccttagaatcacgaacaatttcaatacaattgttggtaaaggtgggttcggaacagtttatctgggttatatcgatggcactccagttgcagtgaaaatgctttctacctcttcagttcatggttatcaacaatttcaggcagaagttaaacttctaatgagagttcatcatgcgaatctcacctcccttgttggttattgtaatgaaggagacaataagggtctcatatatgagtacatggctaatggaaacttacatgaacatctgtctggtaaacacatcaaatcaaaattcctgacctgggaagacagacttcgtatagcagtggatgcagccttaggattggagtaccttcaaactggttgcaagcctcctataatccacagagacgtaaaatctacaaacatcttgttggatgaaaagttacaagcaaagttatctgattttggtctatccaaaattatcccaattgatgggggaactcatgtgtcaactgttgttgctggtactccaggttatctagatcctgagtactacatatccaatagattaacacagaaaagtgacatttatggctttggagttgttcttctagaaataatcacttgtcaaccagtaatagcatggaatgaagaaaggactcacataattcaatgggttagatccctgattgggataggggatatcaagggcattgttgactcaaggttagaaggagattttgacattaactcagcttggaaagccgtagaaatagcaatggcgtgtgtttccttaaatcccagtgaaaggccaatcatgagggtaatagtgactgaactaaaggaaactttagcaaccgaattagctcgaactaaacacaacagtgctgattcaataaattcaatcgaaccggtcaccatgaatctggacactgaattcactccactggctagataaaagataagaataacaaaataatcttgtaataaataatgtgttcaaagatggagatgaactaggtaagaggtcttcctcttgtgcaattccagaatgagatcaagtcacataagaggaattgatgttacataataagaagttggtatatgctcttacttttgaacagtgatacttgtataactggtacacttgcactccgtttgaatctgtgtttgagagtggtgaatgtagtgtagtgtgcaaagttgcaaagagaataagagtaaataacaagaaatgaaaatcagtttttgtttttcaaawrwaaaaaaaaaaaaaaaaaaaaaaaaaaaaaaaaaaaaaaaaaaaaaaaaaaaaaaaaaaaaaaaaaaaaaaaaaaaaaaaaaaattwwaaaaaaaaaaaaaaaaaattttccggcccccgggggaacccctttttttaaaggggcccccccccgggggggaccccccttttttttcccttttagggggggtawttttcgggttggggaaaaatggggaaaaagtttttcccgggggaaatttttttcccccccaaattcccccaaaaataaaagccggaaaaaaaaaggggaaaacccggggggcccaaggggggggcyaacccccctttwttggggggggsccccgggccctttttcaaggggaaaaactkggggggccatttttttwaawaawccccccmccccggggaaaaaggggttttgcaattggggccttttcccttttccccgcaaaaaaaacccggggctcgggggtttggttgggggaaagggaattcttttcctcaaaggggggaaaaaggttttccccaaaaaccggggaaaacccc

SEQ ID NO: 10268 - protein, 506 aa, Glycine max
  peptide (1)..(506): Ceres Seq. ID no. 15226721
  misc_feature (1)..(308): NCBI GI NO: 9837280 NR Description: leaf senescence-associated receptor-like proteinkinase
  misc_feature (307)..(506): NCBI GI NO: 9837280 NR Description: leaf senescence-associated receptor-like proteinkinase
  misc_feature (1)..(506): NCBI GI NO: 15218033 NR Description: leucine rich repeat protein kinase, putative
  misc_feature (1)..(506): NCBI GI NO: 39104601 NR Description: unknown protein [Arabidopsis thaliana]
  misc_feature (1)..(506): NCBI GI NO: 2129635 NR Description: serine/threonine-specific receptor protein kinase
  misc_feature (1)..(506): NCBI GI NO: 15233796 NR Description: light repressible receptor protein kinase
  misc_feature (1)..(506): NCBI GI NO: 15227015 NR Description: leucine rich repeat protein kinase, putative
  misc_feature (1)..(506): NCBI GI NO: 15218050 NR Description: leucine rich repeat protein kinase, putative
  misc_feature (1)..(506): NCBI GI NO: 25387148 NR Description: probable protein kinase
  misc_feature (1)..(506): NCBI GI NO: 9294681 NR Description: receptor-like protein kinase
MTRDWQGDPCSPVAYLWNGLNCTYRGNENPRITTLNLSSSELSGMIDPSISYLTMLEKLDLSNNNLNGEVPDFLSRLQHLKIINLDNNNLTGSIPSELVKKSKEGFLSLSVGQNLYLCESGQCNEKKKKKNIVTPLLASVSGVLILVVAVAAISWTLKKRKPKEKNQSEMSAQCTEQDDSLHQFKKQIYSHSDVLRITNNFNTIVGKGGFGTVYLGYIDGTPVAVKMLSTSSVHGYQQFQAEVKLLMRVHHANLTSLVGYCNEGDNKGLIYEYMANGNLHEHLSGKHIKSKFLTWEDRLRIAVDAALGLEYLQTGCKPPIIHRDVKSTNILLDEKLQAKLSDFGLSKIIPIDGGTHVSTVVAGTPGYLDPEYYISNRLTQKSDIYGFGVVLLEIITCQPVIAWNEERTHIIQWVRSLIGIGDIKGIVDSRLEGDFDINSAWKAVEIAMACVSLNPSERPIMRVIVTELKETLATELARTKHNSADSINSIEPVTMNLDTEFTPLAR

SEQ ID NO: 10269 - protein, 462 aa, Glycine max
  peptide (1)..(462): Ceres Seq. ID no. 15226722
  misc_feature (1)..(264): NCBI GI NO: 9837280 NR Description: leaf senescence-associated receptor-like proteinkinase
  misc_feature (263)..(462): NCBI GI NO: 9837280 NR Description: leaf senescence-associated receptor-like proteinkinase
  misc_feature (1)..(462): NCBI GI NO: 15218033 NR Description: leucine rich repeat protein kinase, putative
  misc_feature (1)..(462): NCBI GI NO: 39104601 NR Description: unknown protein [Arabidopsis thaliana]
  misc_feature (1)..(462): NCBI GI NO: 2129635 NR Description: serine/threonine-specific receptor protein kinase
  misc_feature (1)..(462): NCBI GI NO: 15233796 NR Description: light repressible receptor protein kinase
  misc_feature (1)..(462): NCBI GI NO: 15227015 NR Description: leucine rich repeat protein kinase, putative
  misc_feature (1)..(462): NCBI GI NO: 15218050 NR Description: leucine rich repeat protein kinase, putative
  misc_feature (1)..(462): NCBI GI NO: 25387148 NR Description: probable protein kinase
  misc_feature (1)..(462): NCBI GI NO: 9294681 NR Description: receptor-like protein kinase
MIDPSISYLTMLEKLDLSNNNLNGEVPDFLSRLQHLKIINLDNNNLTGSIPSELVKKSKEGFLSLSVGQNLYLCESGQCNEKKKKKNIVTPLLASVSGVLILVVAVAAISWTLKKRKPKEKNQSEMSAQCTEQDDSLHQFKKQIYSHSDVLRITNNFNTIVGKGGFGTVYLGYIDGTPVAVKMLSTSSVHGYQQFQAEVKLLMRVHHANLTSLVGYCNEGDNKGLIYEYMANGNLHEHLSGKHIKSKFLTWEDRLRIAVDAALGLEYLQTGCKPPIIHRDVKSTNILLDEKLQAKLSDFGLSKIIPIDGGTHVSTVVAGTPGYLDPEYYISNRLTQKSDIYGFGVVLLEIITCQPVIAWNEERTHIIQWVRSLIGIGDIKGIVDSRLEGDFDINSAWKAVEIAMACVSLNPSERPIMRVIVTELKETLATELARTKHNSADSINSIEPVTMNLDTEFTPLAR

SEQ ID NO: 10270 - protein, 452 aa, Glycine max
  peptide (1)..(452): Ceres Seq. ID no. 15226723
  misc_feature (1)..(254): NCBI GI NO: 9837280 NR Description: leaf senescence-associated receptor-like proteinkinase
  misc_feature (253)..(452): NCBI GI NO: 9837280 NR Description: leaf senescence-associated receptor-like proteinkinase
  misc_feature (1)..(452): NCBI GI NO: 15218033 NR Description: leucine rich repeat protein kinase, putative
  misc_feature (1)..(452): NCBI GI NO: 39104601 NR Description: unknown protein [Arabidopsis thaliana]
  misc_feature (1)..(452): NCBI GI NO: 2129635 NR Description: serine/threonine-specific receptor protein kinase
  misc_feature (1)..(452): NCBI GI NO: 15233796 NR Description: light repressible receptor protein kinase
  misc_feature (1)..(452): NCBI GI NO: 15227015 NR Description: leucine rich repeat protein kinase, putative
  misc_feature (1)..(452): NCBI GI NO: 15218050 NR Description: leucine rich repeat protein kinase, putative
  misc_feature (1)..(452): NCBI GI NO: 25387148 NR Description: probable protein kinase
  misc_feature (1)..(452): NCBI GI NO: 9294681 NR Description: receptor-like protein kinase
MLEKLDLSNNNLNGEVPDFLSRLQHLKIINLDNNNLTGSIPSELVKKSKEGFLSLSVGQNLYLCESGQCNEKKKKKNIVTPLLASVSGVLILVVAVAAISWTLKKRKPKEKNQSEMSAQCTEQDDSLHQFKKQIYSHSDVLRITNNFNTIVGKGGFGTVYLGYIDGTPVAVKMLSTSSVHGYQQFQAEVKLLMRVHHANLTSLVGYCNEGDNKGLIYEYMANGNLHEHLSGKHIKSKFLTWEDRLRIAVDAALGLEYLQTGCKPPIIHRDVKSTNILLDEKLQAKLSDFGLSKIIPIDGGTHVSTVVAGTPGYLDPEYYISNRLTQKSDIYGFGVVLLEIITCQPVIAWNEERTHIIQWVRSLIGIGDIKGIVDSRLEGDFDINSAWKAVEIAMACVSLNPSERPIMRVIVTELKETLATELARTKHNSADSINSIEPVTMNLDTEFTPLAR

SEQ ID NO: 10271 - DNA, 1421 bp, Glycine max
  misc_feature (1)..(1421): Ceres Seq. ID no. 15226750
gaaacccaaccgtatccttcattcttctcctaaatcctaatccttcttcactttcagttctcagcatgggaagttctggaacaaccgactatggagcatacacataccaaaaccttgagagggaaccttactggccctctgaaaagctcagaatttccatcactggggctggtggtttcattgcctcacacattgctcgccgcctcaagaccgagggacattacatcattgcttctgattggaagaagaatgagcacatgactgaggacatgttctgccatgaattccatcttgttgaccttagggtcatggataactgcttgacagttaccaagggtgtggaccatgttttcaatcttgctgctgatatgggtgggatgggttttatccagtccaaccactcagtcattatgtacaacaacaccatgattagcttcaacatgattgaggctgccaggatcaatggtgttaagaggtttttttatgcctctagtgcttgtatctatcctgaattcaaacagttggagacaaatgtgagtttgaaggagtctgatgcctggcctgctgagccacaagatgcatatgggctggagaagcttgcaacagaagagttatgcaagcattataacaaggattttggaattgagtgccggattgggagattccataacatatatggtccttatgggacatggaagggtggaagggagaaggctcctgctgctttttgtcgcaagacacttacttccaaagatcgatttgagatgtggggagatggattgcaaacaagatccttcaccttcattgatgagtgtgttgaaggtgtactgagattgactaaatcagacttccgggagccagtgaatattggaagtgatgaaatggtcagtatgaatgagatggcagagattgttcttagctttgaggataagaatataccaatataccatattcctggcccagaaggtgttcggggccgtaattcagacaatacattaatcaaagagaaacttggctgggctccaactatgaagttgaaggatgggctgagaattacatacttttggatcaaagagcagcttgagaaagagaaggcagaaggtgttgatttatcaggctatggatcatccaaagtggttcagactcaagccccagttcaacttggctcgctacgtgctgcagatggcaaagaataaagctgctagtgcaagggatgttcggcagttgcagcagatggcaaagaataagagtgaacaatgcatttccaagtgaagggcaggcttttatgttgctattttgtagagatctatggttacagattagctattgaagttagttttggaacttgttcatgtatttgtaacggatggtgttatgttcttgttttgtttgaggtaataataataactgctgcttaaggt

SEQ ID NO: 10272 - protein, 397 aa, Glycine max
  peptide (1)..(397): Ceres Seq. ID no. 15226751
  misc_feature (51)..(360): Pfam Name: Pfam Description:  NAD dependent epimerase/dehydratase family
  misc_feature (22)..(397): NCBI GI NO: 37534380 NR Description: putative epimerase/dehydratase
  misc_feature (22)..(397): NCBI GI NO: 15241945 NR Description: NAD-dependent epimerase/dehydratase family
  misc_feature (32)..(362): NCBI GI NO: 28170704 NR Description: Ata17 protein
  misc_feature (53)..(363): NCBI GI NO: 9937230 NR Description: sugar epimerase BlmG [Streptomyces verticillus]
  misc_feature (53)..(199): NCBI GI NO: 23008810 NR Description: COG0451: Nucleoside-diphosphate-sugar epimerases
  misc_feature (47)..(361): NCBI GI NO: 24212751 NR Description: dTDPglucose 4,6-dehydratase
  misc_feature (46)..(358): NCBI GI NO: 22298175 NR Description: GDP-fucose synthetase
  misc_feature (48)..(363): NCBI GI NO: 23137167 NR Description: COG0451: Nucleoside-diphosphate-sugar epimerases
  misc_feature (48)..(363): NCBI GI NO: 23138039 NR Description: COG0451: Nucleoside-diphosphate-sugar epimerases
  misc_feature (50)..(357): NCBI GI NO: 32472697 NR Description: dTDP-glucose 4-6-dehydratase [Pirellula sp. 1]
NPTVSFILLLNPNPSSLSVLSMGSSGTTDYGAYTYQNLEREPYWPSEKLRISITGAGGFIASHIARRLKTEGHYIIASDWKKNEHMTEDMFCHEFHLVDLRVMDNCLTVTKGVDHVFNLAADMGGMGFIQSNHSVIMYNNTMISFNMIEAARINGVKRFFYASSACIYPEFKQLETNVSLKESDAWPAEPQDAYGLEKLATEELCKHYNKDFGIECRIGRFHNIYGPYGTWKGGREKAPAAFCRKTLTSKDRFEMWGDGLQTRSFTFIDECVEGVLRLTKSDFREPVNIGSDEMVSMNEMAEIVLSFEDKNIPIYHIPGPEGVRGRNSDNTLIKEKLGWAPTMKLKDGLRITYFWIKEQLEKEKAEGVDLSGYGSSKVVQTQAPVQLGSLRAADGKE

SEQ ID NO: 10273 - protein, 376 aa, Glycine max
  peptide (1)..(376): Ceres Seq. ID no. 15226752
  misc_feature (30)..(339): Pfam Name: Pfam Description:  NAD dependent epimerase/dehydratase family
  misc_feature (1)..(376): NCBI GI NO: 37534380 NR Description: putative epimerase/dehydratase
  misc_feature (1)..(376): NCBI GI NO: 15241945 NR Description: NAD-dependent epimerase/dehydratase family
  misc_feature (11)..(341): NCBI GI NO: 28170704 NR Description: Ata17 protein
  misc_feature (32)..(342): NCBI GI NO: 9937230 NR Description: sugar epimerase BlmG [Streptomyces verticillus]
  misc_feature (32)..(178): NCBI GI NO: 23008810 NR Description: COG0451: Nucleoside-diphosphate-sugar epimerases
  misc_feature (26)..(340): NCBI GI NO: 24212751 NR Description: dTDPglucose 4,6-dehydratase
  misc_feature (25)..(337): NCBI GI NO: 22298175 NR Description: GDP-fucose synthetase
  misc_feature (27)..(342): NCBI GI NO: 23137167 NR Description: COG0451: Nucleoside-diphosphate-sugar epimerases
  misc_feature (27)..(342): NCBI GI NO: 23138039 NR Description: COG0451: Nucleoside-diphosphate-sugar epimerases
  misc_feature (29)..(336): NCBI GI NO: 32472697 NR Description: dTDP-glucose 4-6-dehydratase [Pirellula sp. 1]
MGSSGTTDYGAYTYQNLEREPYWPSEKLRISITGAGGFIASHIARRLKTEGHYIIASDWKKNEHMTEDMFCHEFHLVDLRVMDNCLTVTKGVDHVFNLAADMGGMGFIQSNHSVIMYNNTMISFNMIEAARINGVKRFFYASSACIYPEFKQLETNVSLKESDAWPAEPQDAYGLEKLATEELCKHYNKDFGIECRIGRFHNIYGPYGTWKGGREKAPAAFCRKTLTSKDRFEMWGDGLQTRSFTFIDECVEGVLRLTKSDFREPVNIGSDEMVSMNEMAEIVLSFEDKNIPIYHIPGPEGVRGRNSDNTLIKEKLGWAPTMKLKDGLRITYFWIKEQLEKEKAEGVDLSGYGSSKVVQTQAPVQLGSLRAADGKE

SEQ ID NO: 10274 - protein, 312 aa, Glycine max
  peptide (1)..(312): Ceres Seq. ID no. 15226753
  misc_feature (1)..(275): Pfam Name: Pfam Description:  NAD dependent epimerase/dehydratase family
  misc_feature (1)..(312): NCBI GI NO: 37534380 NR Description: putative epimerase/dehydratase
  misc_feature (1)..(312): NCBI GI NO: 15241945 NR Description: NAD-dependent epimerase/dehydratase family
  misc_feature (1)..(277): NCBI GI NO: 28170704 NR Description: Ata17 protein
  misc_feature (1)..(278): NCBI GI NO: 9937230 NR Description: sugar epimerase BlmG [Streptomyces verticillus]
  misc_feature (1)..(114): NCBI GI NO: 23008810 NR Description: COG0451: Nucleoside-diphosphate-sugar epimerases
  misc_feature (1)..(276): NCBI GI NO: 24212751 NR Description: dTDPglucose 4,6-dehydratase
  misc_feature (1)..(273): NCBI GI NO: 22298175 NR Description: GDP-fucose synthetase
  misc_feature (1)..(278): NCBI GI NO: 23137167 NR Description: COG0451: Nucleoside-diphosphate-sugar epimerases
  misc_feature (1)..(278): NCBI GI NO: 23138039 NR Description: COG0451: Nucleoside-diphosphate-sugar epimerases
  misc_feature (1)..(272): NCBI GI NO: 32472697 NR Description: dTDP-glucose 4-6-dehydratase [Pirellula sp. 1]
MTEDMFCHEFHLVDLRVMDNCLTVTKGVDHVFNLAADMGGMGFIQSNHSVIMYNNTMISFNMIEAARINGVKRFFYASSACIYPEFKQLETNVSLKESDAWPAEPQDAYGLEKLATEELCKHYNKDFGIECRIGRFHNIYGPYGTWKGGREKAPAAFCRKTLTSKDRFEMWGDGLQTRSFTFIDECVEGVLRLTKSDFREPVNIGSDEMVSMNEMAEIVLSFEDKNIPIYHIPGPEGVRGRNSDNTLIKEKLGWAPTMKLKDGLRITYFWIKEQLEKEKAEGVDLSGYGSSKVVQTQAPVQLGSLRAADGKE

SEQ ID NO: 10275 - DNA, 1950 bp, Glycine max
  misc_feature (1)..(1950): Ceres Seq. ID no. 15169037
aaaaaaagttgaaaaccctcacacagaaagagtggtttgtgcggtggtgaagaagcgttcggaatagaagaagaagatgtcgtcggtttacgttctagagcctccgacgaaggggaaggtggtggtgaacactacgcgcggtcctttggacattgagctgtggccgaaagaggctccgaaggccgcgaggaacttcgttcagctctgcctcgaaaactattacggcaacaccatcttccaccgcatcatcaaggacttcctcgtccaaagcggcgaccccaccggcaccggcaccggtggtgaaagcatttatggtggtgtttttgctgatgagtttcattcacgtctgaaattcaagcacagaggaatagttgcaatggccaatgccggaactctgaattccaatggaagtcagtttttcatcactctcgaccgctgtgattggcttgatcgcaagcataccatttttggaaaagtgacgggagatacaatgtataatcttttgaggctgggtgaacttgaaactgataagaatgaccggcctttagatccgccgaagatattatcagttgaggtgttatggaatccatttgaagatattgttccaagaacacttcaaaaacttcagattgaagctaaagctgatacaaaaaataaagaatcagggaaaaaaggcgtaaaaaaattgaacttgctttcatttggggaagaagctgaagaagaggaaaaggaattggcatcggtgaagcaaaagattaagagcagtcacgatgtcttgaacgatcctcgtcttctaaaggaagatactcttaataatgaactgagttcatcaagaagagatatgcaattatctgtaagggatgcacttaactcaaagaaagacgagcctcagaaagattcagatgctggtagcacggcatgtcttgatttcagtgatgatgatgaagcagattttgatgcaagaatgcgcatgcaaatactcaaaaagaggaaggagttgggtgatctccctcccaagccaaagttgcgaaatgcaggaaggtccagtccagagaaccatgatacgtcgtctgcagccaggtccaatgctgtaagtgttgatgaggatcaaccaaaggtggaaaaattgtccttgaagaaaaagggagttggatctgaagcaagagctgaacgaatgtctaatgcagatgcagatttgcaactattgaatcaagctgagagaggaagacaattgcagaagcagaagaaacgcagacttcaagggcgtgaagatgaagttctggctaaacttgaaaaatttaagaattctttatcagcaaaggcgacacccccaactgatgaatctgaagacgttagtaatgaggaattgtcagactggaaaggtgttagtttaaagtttgccccacagactggcaaggaccgcatgtctcgcaatgaagacccaaacgactatgttgtgcatgaccctcttctggagaaggggaaagagaagttcaataggatgatagccaaacaaaagagacgagaacgagagtgggctgggagttcccttacttgaccttacatgtgccaacatggctgtgtaaatatacaaagctgattggttttcaaggctagcacatcactgtgctgctgggaaagtaaacttgccctaataggaacccaggagaaaaatgttgcatggaggagtttagcaaacatggttggcaagtacattgatattggtgagtgagatgtggggttactcatgaaaggacctactttgaattgttcgtatttttggtccaatgtcaaaagatgtattgtgtagattttaacacaccaagttgttgtgttttatatatttaggattcaagagaatattgtattattgtggaactaacgatttcggcagatgaagtcgttactcagaattatgctagttgagatgggttttacgttgcactattt

SEQ ID NO: 10276 - protein, 493 aa, Glycine max
  peptide (1)..(493): Ceres Seq. ID no. 15169038
  misc_feature (1)..(492): NCBI GI NO: 30689591 NR Description: expressed protein [Arabidopsis thaliana]
  misc_feature (1)..(493): NCBI GI NO: 21902020 NR Description: B1097D05.21
  misc_feature (1)..(401): NCBI GI NO: 7486212 NR Description: hypothetical protein F26P21
  misc_feature (401)..(447): NCBI GI NO: 7486212 NR Description: hypothetical protein F26P21
  misc_feature (1)..(485): NCBI GI NO: 37182260 NR Description: SDCCAG10 [Homo sapiens]
  misc_feature (1)..(363): NCBI GI NO: 29436797 NR Description: Unknown (protein for MGC:56702) [Danio rerio]
  misc_feature (1)..(436): NCBI GI NO: 31198449 NR Description: ENSANGP00000020743 [Anopheles gambiae]
  misc_feature (1)..(472): NCBI GI NO: 21357249 NR Description: CG10907-PA [Drosophila melanogaster]
  misc_feature (1)..(472): NCBI GI NO: 39591493 NR Description: Hypothetical protein CBG21016
  misc_feature (1)..(228): NCBI GI NO: 27516689 NR Description: cyclophilin-16; OvCYP-16 [Onchocerca volvulus]
MSSVYVLEPPTKGKVVVNTTRGPLDIELWPKEAPKAARNFVQLCLENYYGNTIFHRIIKDFLVQSGDPTGTGTGGESIYGGVFADEFHSRLKFKHRGIVAMANAGTLNSNGSQFFITLDRCDWLDRKHTIFGKVTGDTMYNLLRLGELETDKNDRPLDPPKILSVEVLWNPFEDIVPRTLQKLQIEAKADTKNKESGKKGVKKLNLLSFGEEAEEEEKELASVKQKIKSSHDVLNDPRLLKEDTLNNELSSSRRDMQLSVRDALNSKKDEPQKDSDAGSTACLDFSDDDEADFDARMRMQILKKRKELGDLPPKPKLRNAGRSSPENHDTSSAARSNAVSVDEDQPKVEKLSLKKKGVGSEARAERMSNADADLQLLNQAERGRQLQKQKKRRLQGREDEVLAKLEKFKNSLSAKATPPTDESEDVSNEELSDWKGVSLKFAPQTGKDRMSRNEDPNDYVVHDPLLEKGKEKFNRMIAKQKRREREWAGSSLT

SEQ ID NO: 10277 - protein, 393 aa, Glycine max
  peptide (1)..(393): Ceres Seq. ID no. 15169039
  misc_feature (1)..(392): NCBI GI NO: 30689591 NR Description: expressed protein [Arabidopsis thaliana]
  misc_feature (1)..(393): NCBI GI NO: 21902020 NR Description: B1097D05.21
  misc_feature (1)..(301): NCBI GI NO: 7486212 NR Description: hypothetical protein F26P21
  misc_feature (301)..(347): NCBI GI NO: 7486212 NR Description: hypothetical protein F26P21
  misc_feature (1)..(385): NCBI GI NO: 37182260 NR Description: SDCCAG10 [Homo sapiens]
  misc_feature (1)..(263): NCBI GI NO: 29436797 NR Description: Unknown (protein for MGC:56702) [Danio rerio]
  misc_feature (1)..(336): NCBI GI NO: 31198449 NR Description: ENSANGP00000020743 [Anopheles gambiae]
  misc_feature (1)..(372): NCBI GI NO: 21357249 NR Description: CG10907-PA [Drosophila melanogaster]
  misc_feature (1)..(372): NCBI GI NO: 39591493 NR Description: Hypothetical protein CBG21016
  misc_feature (1)..(128): NCBI GI NO: 27516689 NR Description: cyclophilin-16; OvCYP-16 [Onchocerca volvulus]
MANAGTLNSNGSQFFITLDRCDWLDRKHTIFGKVTGDTMYNLLRLGELETDKNDRPLDPPKILSVEVLWNPFEDIVPRTLQKLQIEAKADTKNKESGKKGVKKLNLLSFGEEAEEEEKELASVKQKIKSSHDVLNDPRLLKEDTLNNELSSSRRDMQLSVRDALNSKKDEPQKDSDAGSTACLDFSDDDEADFDARMRMQILKKRKELGDLPPKPKLRNAGRSSPENHDTSSAARSNAVSVDEDQPKVEKLSLKKKGVGSEARAERMSNADADLQLLNQAERGRQLQKQKKRRLQGREDEVLAKLEKFKNSLSAKATPPTDESEDVSNEELSDWKGVSLKFAPQTGKDRMSRNEDPNDYVVHDPLLEKGKEKFNRMIAKQKRREREWAGSSLT

SEQ ID NO: 10278 - protein, 355 aa, Glycine max
  peptide (1)..(355): Ceres Seq. ID no. 15169040
  misc_feature (1)..(354): NCBI GI NO: 30689591 NR Description: expressed protein [Arabidopsis thaliana]
  misc_feature (1)..(355): NCBI GI NO: 21902020 NR Description: B1097D05.21
  misc_feature (1)..(263): NCBI GI NO: 7486212 NR Description: hypothetical protein F26P21
  misc_feature (263)..(309): NCBI GI NO: 7486212 NR Description: hypothetical protein F26P21
  misc_feature (1)..(347): NCBI GI NO: 37182260 NR Description: SDCCAG10 [Homo sapiens]
  misc_feature (1)..(225): NCBI GI NO: 29436797 NR Description: Unknown (protein for MGC:56702) [Danio rerio]
  misc_feature (1)..(298): NCBI GI NO: 31198449 NR Description: ENSANGP00000020743 [Anopheles gambiae]
  misc_feature (1)..(334): NCBI GI NO: 21357249 NR Description: CG10907-PA [Drosophila melanogaster]
  misc_feature (1)..(334): NCBI GI NO: 39591493 NR Description: Hypothetical protein CBG21016
  misc_feature (1)..(90): NCBI GI NO: 27516689 NR Description: cyclophilin-16; OvCYP-16 [Onchocerca volvulus]
MYNLLRLGELETDKNDRPLDPPKILSVEVLWNPFEDIVPRTLQKLQIEAKADTKNKESGKKGVKKLNLLSFGEEAEEEEKELASVKQKIKSSHDVLNDPRLLKEDTLNNELSSSRRDMQLSVRDALNSKKDEPQKDSDAGSTACLDFSDDDEADFDARMRMQILKKRKELGDLPPKPKLRNAGRSSPENHDTSSAARSNAVSVDEDQPKVEKLSLKKKGVGSEARAERMSNADADLQLLNQAERGRQLQKQKKRRLQGREDEVLAKLEKFKNSLSAKATPPTDESEDVSNEELSDWKGVSLKFAPQTGKDRMSRNEDPNDYVVHDPLLEKGKEKFNRMIAKQKRREREWAGSSLT

SEQ ID NO: 10279 - DNA, 2107 bp, Glycine max
  misc_feature (1)..(2107): Ceres Seq. ID no. 15172491
gatgcatcacttttcttacctacaaatgaaaaagagaataatacaagagaaaataatgttgctaagattaaagttgtggtacgcaaaagaccattaaataagaaggaacttgctaagaaggaggatgatattgtaactgtatatgacaatgcatatttgacagtccatgaacccaaactaaaggttgatttgacagcttatgtggagaagcatgagttttgttttgatgctgttcttgacgagaatgttaccaatgatgaagtatatcgagttaccgtagaaccaattattcccacaatttttgagaaaaccaaagctacttgttttgcttatggtcagacaggaagtggcaaaacatacacaatgcaaccgttgccgctcagagctgcagaagaccttgttagacaattgcatcgaccagtatatcgaaatcagagatttaaattgtggcttagttactttgagatatatggtggaaaactttttgatcttcttagtgatagaaagaaactctgcatgagagaagatggacggcagcaagtgtgtattgtaggactgcaagaatttgaagtttctgatgtacaaattgtcaaagaattcattgaaaaggggaatgcagcaagaagtacagggtcaaccggtgcaaatgaggagtcctccagatcacatgctatcttacaactggttgtaaagaggcacaatgaggtaaaagagagcaggcggaacaataatgatgtaaatgaggcaaaaagtgggaaggttgtggggaagatttcttttattgatcttgctggaagtgaaagaggtgctgatactactgacaatgatcgtcagacaaggattgaaggtgctgaaatcaacaagagccttttggctttgaaggagtgcattcgtgctttggacaatgaccagatccatattccttttcgtggaagcaagcttacagaagtgctccgggactcctttgttggaaattcaaaaactgttatgatctcttgtatatccccaaatgctgggtcatgtgaacacacacttaataccttgagatatgcagaccgagttaaaagtctatccaagagtggaaatcctagaaaggaccaggccccaaatcctataccaccaccagcaattaaagaggtttcatccacatcttcacttccaggtagtgttggtgcagaggattttaataatggtcaacgtcaagaggtaaaaacaatggacatgagcaggaaagttgtcgaaaaggaaagttctttgtacagctccgctgctgatgttgacaaacaatcaagtttttcttctagttgtcaattcaatgggcgagaggaaaaaagctcagcttctgccccaatggacagggaaaagtttgaagtaaagaattcttacggtggtgattctaccagtcagaagatgaactcttattccctaaatgttacagatgagaaagtgcaaagggtgtctcctccacgcagaaaagggactaaggaggagaaatctgaaagatctgtaaattgggtaaaacgggatgtcgatggttatgatcattccaccacaagctccaaacagcagagcacaggaaattataacattaccactggatcggggcagtctgaaacagaatcctcttctaatgtgaatatcagcgcaatacttgaggaggaagaagcattaattgctgctcataggaaggaaattgaagacacaatggagattgttcgtgaagaaatgaaactactggcagaagtggaccagccgggaagtcttattgacaactacgtgacccagttgagtttcgtgctttctcgcaaagcagctagtctcgtcagtctccaagcacgccttgcaagattccaacatcgactaaaagaacaagagatactaagtagaaaaagagtgccccgttaagagactcggtttctcttgttcagtgatgacgtgtatgttcttgatgtcatttctcagtgtttgttagcgatatagttttaaaggtttttgttcattttataaaaaaaaatggatcttttgttgggtattcaaattaaatttactcaaatgtatatttgtcccttctgtgatattattatgcccaccttattattgcctttgc

SEQ ID NO: 10280 - protein, 634 aa, Glycine max
  peptide (1)..(634): Ceres Seq. ID no. 15172492
  misc_feature (6)..(634): NCBI GI NO: 15228274 NR Description: kinesin-related protein TBK5, putative
  misc_feature (255)..(634): NCBI GI NO: 34897620 NR Description: kinesin-like protein [Oryza sativa]
  misc_feature (9)..(233): NCBI GI NO: 34897620 NR Description: kinesin-like protein [Oryza sativa]
  misc_feature (16)..(461): NCBI GI NO: 13536983 NR Description: BY-2 kinesin-like protein 10 [Nicotiana tabacum]
  misc_feature (498)..(627): NCBI GI NO: 13536983 NR Description: BY-2 kinesin-like protein 10 [Nicotiana tabacum]
  misc_feature (20)..(451): NCBI GI NO: 34912848 NR Description: kinesin-like protein
  misc_feature (546)..(633): NCBI GI NO: 34912848 NR Description: kinesin-like protein
  misc_feature (3)..(416): NCBI GI NO: 9294452 NR Description: contains similarity to kinesin heavychain~gene_id:MSL1
  misc_feature (3)..(416): NCBI GI NO: 18401002 NR Description: kinesin-like protein TBK5, putative
  misc_feature (540)..(627): NCBI GI NO: 9294452 NR Description: contains similarity to kinesin heavychain~gene_id:MSL1
DASLFLPTNEKENNTRENNVAKIKVVVRKRPLNKKELAKKEDDIVTVYDNAYLTVHEPKLKVDLTAYVEKHEFCFDAVLDENVTNDEVYRVTVEPIIPTIFEKTKATCFAYGQTGSGKTYTMQPLPLRAAEDLVRQLHRPVYRNQRFKLWLSYFEIYGGKLFDLLSDRKKLCMREDGRQQVCIVGLQEFEVSDVQIVKEFIEKGNAARSTGSTGANEESSRSHAILQLVVKRHNEVKESRRNNNDVNEAKSGKVVGKISFIDLAGSERGADTTDNDRQTRIEGAEINKSLLALKECIRALDNDQIHIPFRGSKLTEVLRDSFVGNSKTVMISCISPNAGSCEHTLNTLRYADRVKSLSKSGNPRKDQAPNPIPPPAIKEVSSTSSLPGSVGAEDFNNGQRQEVKTMDMSRKVVEKESSLYSSAADVDKQSSFSSSCQFNGREEKSSASAPMDREKFEVKNSYGGDSTSQKMNSYSLNVTDEKVQRVSPPRRKGTKEEKSERSVNWVKRDVDGYDHSTTSSKQQSTGNYNITTGSGQSETESSSNVNISAILEEEEALIAAHRKEIEDTMEIVREEMKLLAEVDQPGSLIDNYVTQLSFVLSRKAASLVSLQARLARFQHRLKEQEILSRKRVPR

SEQ ID NO: 10281 - protein, 513 aa, Glycine max
  peptide (1)..(513): Ceres Seq. ID no. 15172493
  misc_feature (1)..(513): NCBI GI NO: 15228274 NR Description: kinesin-related protein TBK5, putative
  misc_feature (134)..(513): NCBI GI NO: 34897620 NR Description: kinesin-like protein [Oryza sativa]
  misc_feature (1)..(112): NCBI GI NO: 34897620 NR Description: kinesin-like protein [Oryza sativa]
  misc_feature (1)..(340): NCBI GI NO: 13536983 NR Description: BY-2 kinesin-like protein 10 [Nicotiana tabacum]
  misc_feature (377)..(506): NCBI GI NO: 13536983 NR Description: BY-2 kinesin-like protein 10 [Nicotiana tabacum]
  misc_feature (1)..(330): NCBI GI NO: 34912848 NR Description: kinesin-like protein
  misc_feature (425)..(512): NCBI GI NO: 34912848 NR Description: kinesin-like protein
  misc_feature (1)..(295): NCBI GI NO: 9294452 NR Description: contains similarity to kinesin heavychain~gene_id:MSL1
  misc_feature (1)..(295): NCBI GI NO: 18401002 NR Description: kinesin-like protein TBK5, putative
  misc_feature (419)..(506): NCBI GI NO: 9294452 NR Description: contains similarity to kinesin heavychain~gene_id:MSL1
MQPLPLRAAEDLVRQLHRPVYRNQRFKLWLSYFEIYGGKLFDLLSDRKKLCMREDGRQQVCIVGLQEFEVSDVQIVKEFIEKGNAARSTGSTGANEESSRSHAILQLVVKRHNEVKESRRNNNDVNEAKSGKVVGKISFIDLAGSERGADTTDNDRQTRIEGAEINKSLLALKECIRALDNDQIHIPFRGSKLTEVLRDSFVGNSKTVMISCISPNAGSCEHTLNTLRYADRVKSLSKSGNPRKDQAPNPIPPPAIKEVSSTSSLPGSVGAEDFNNGQRQEVKTMDMSRKVVEKESSLYSSAADVDKQSSFSSSCQFNGREEKSSASAPMDREKFEVKNSYGGDSTSQKMNSYSLNVTDEKVQRVSPPRRKGTKEEKSERSVNWVKRDVDGYDHSTTSSKQQSTGNYNITTGSGQSETESSSNVNISAILEEEEALIAAHRKEIEDTMEIVREEMKLLAEVDQPGSLIDNYVTQLSFVLSRKAASLVSLQARLARFQHRLKEQEILSRKRVPR

SEQ ID NO: 10282 - protein, 462 aa, Glycine max
  peptide (1)..(462): Ceres Seq. ID no. 15172494
  misc_feature (1)..(462): NCBI GI NO: 15228274 NR Description: kinesin-related protein TBK5, putative
  misc_feature (83)..(462): NCBI GI NO: 34897620 NR Description: kinesin-like protein [Oryza sativa]
  misc_feature (1)..(61): NCBI GI NO: 34897620 NR Description: kinesin-like protein [Oryza sativa]
  misc_feature (1)..(289): NCBI GI NO: 13536983 NR Description: BY-2 kinesin-like protein 10 [Nicotiana tabacum]
  misc_feature (326)..(455): NCBI GI NO: 13536983 NR Description: BY-2 kinesin-like protein 10 [Nicotiana tabacum]
  misc_feature (1)..(279): NCBI GI NO: 34912848 NR Description: kinesin-like protein
  misc_feature (374)..(461): NCBI GI NO: 34912848 NR Description: kinesin-like protein
  misc_feature (1)..(244): NCBI GI NO: 9294452 NR Description: contains similarity to kinesin heavychain~gene_id:MSL1
  misc_feature (1)..(244): NCBI GI NO: 18401002 NR Description: kinesin-like protein TBK5, putative
  misc_feature (368)..(455): NCBI GI NO: 9294452 NR Description: contains similarity to kinesin heavychain~gene_id:MSL1
MREDGRQQVCIVGLQEFEVSDVQIVKEFIEKGNAARSTGSTGANEESSRSHAILQLVVKRHNEVKESRRNNNDVNEAKSGKVVGKISFIDLAGSERGADTTDNDRQTRIEGAEINKSLLALKECIRALDNDQIHIPFRGSKLTEVLRDSFVGNSKTVMISCISPNAGSCEHTLNTLRYADRVKSLSKSGNPRKDQAPNPIPPPAIKEVSSTSSLPGSVGAEDFNNGQRQEVKTMDMSRKVVEKESSLYSSAADVDKQSSFSSSCQFNGREEKSSASAPMDREKFEVKNSYGGDSTSQKMNSYSLNVTDEKVQRVSPPRRKGTKEEKSERSVNWVKRDVDGYDHSTTSSKQQSTGNYNITTGSGQSETESSSNVNISAILEEEEALIAAHRKEIEDTMEIVREEMKLLAEVDQPGSLIDNYVTQLSFVLSRKAASLVSLQARLARFQHRLKEQEILSRKRVPR

SEQ ID NO: 10283 - DNA, 1228 bp, Glycine max
  misc_feature (1)..(1228): Ceres Seq. ID no. 14308683
gttttatggcagaaataggtgcacggcaggcatgggtttcagcttttgtgactcaatcacccaccataaccattattatcagtacatagtactagttaatctcagtcatgcctattcctaggtttatgctcttttcatcccagcatcgctccactgctgcggccctcgctcttcttcgaaggtgcgttccctctacgacaactcaatctgttaggtattcaaaatcaacaagtcacggtaaaacaaaacattatcttcatcctgtattccaaccagaatccagctccgcctcccaggtttctcgctcatggggtgcctatgttgttccagctgctgttcttggatttgctgggcttgcagctttttttcactataatgatgagagaagagcggttcccaaaggtcatcagggtggtggcctcagaaatgttgccaatggacccataattgggggtccatttacactaattaatacagagaaacaagcaattacagaacgtaattttcttgggaattgggtcctcctctactttggttatacctcatcccccgatcttgggccagagcaagtccaaattatggccaacgcaattgatatattagaatcaaaacagaatctcaagattctaccagtatttgtttccattgatcctcaacgtgatactccctcacaacttcgtgcttaccttaaagagtttgattcaagaatcataggattaactggacctgttgcagctattaggcagatggctcaagaatatcgtgtttactttaaaaaggtagaagaggatggcaatgattatcttgttgactgttcccacaacatgtatttgctgaatcctaaattggaggttacgagatgctttggagtcgagtatagtgcagaggagttgtcagaagcgatagtgaaagagctgaacagaaacccctcttgaatggttacgagatgctttggagtcgagtatagtgcggaggagatgtttctgtttttcgttttcttttaattagatcacagaataatttacatgtgatgaattaagttttactttagacgattggatttagctttgctttattttcaactagacttgcagaaaaatgtagtggcaatctgagcttcattttaagtttcgcgggcatttagttcttggctaacatcttagatggatgttttatacctgaatgttttcacattcaccttcatctaacaagcactttggttttagtt

SEQ ID NO: 10284 - protein, 275 aa, Glycine max
  peptide (1)..(275): Ceres Seq. ID no. 14308684
  misc_feature (75)..(258): Pfam Name: Pfam Description:  SCO1/SenC
  misc_feature (19)..(270): NCBI GI NO: 18420515 NR Description: expressed protein [Arabidopsis thaliana]
  misc_feature (19)..(270): NCBI GI NO: 7487210 NR Description: hypothetical protein T19P19
  misc_feature (67)..(272): NCBI GI NO: 6403490 NR Description: putative SCO1 protein [Arabidopsis thaliana]
  misc_feature (67)..(272): NCBI GI NO: 18398306 NR Description: SCO1 protein -related [Arabidopsis thaliana]
  misc_feature (19)..(165): NCBI GI NO: 26450269 NR Description: unknown protein [Arabidopsis thaliana]
  misc_feature (1)..(271): NCBI GI NO: 40740887 NR Description: hypothetical protein AN4842.2
  misc_feature (58)..(266): NCBI GI NO: 19112079 NR Description: putative cytochrome C oxidase assembly protein
  misc_feature (67)..(270): NCBI GI NO: 4759068 NR Description: cytochrome oxidase deficient homolog 1
  misc_feature (67)..(270): NCBI GI NO: 32420339 NR Description: hypothetical protein [Neurospora crassa]
  misc_feature (51)..(267): NCBI GI NO: 12311839 NR Description: possible SCO2 protein precursor [Leishmania major]
MPIPRFMLFSSQHRSTAAALALLRRCVPSTTTQSVRYSKSTSHGKTKHYLHPVFQPESSSASQVSRSWGAYVVPAAVLGFAGLAAFFHYNDERRAVPKGHQGGGLRNVANGPIIGGPFTLINTEKQAITERNFLGNWVLLYFGYTSSPDLGPEQVQIMANAIDILESKQNLKILPVFVSIDPQRDTPSQLRAYLKEFDSRIIGLTGPVAAIRQMAQEYRVYFKKVEEDGNDYLVDCSHNMYLLNPKLEVTRCFGVEYSAEELSEAIVKELNRNPS

SEQ ID NO: 10285 - protein, 269 aa, Glycine max
  peptide (1)..(269): Ceres Seq. ID no. 14308685
  misc_feature (69)..(252): Pfam Name: Pfam Description:  SCO1/SenC
  misc_feature (13)..(264): NCBI GI NO: 18420515 NR Description: expressed protein [Arabidopsis thaliana]
  misc_feature (13)..(264): NCBI GI NO: 7487210 NR Description: hypothetical protein T19P19
  misc_feature (61)..(266): NCBI GI NO: 6403490 NR Description: putative SCO1 protein [Arabidopsis thaliana]
  misc_feature (61)..(266): NCBI GI NO: 18398306 NR Description: SCO1 protein -related [Arabidopsis thaliana]
  misc_feature (13)..(159): NCBI GI NO: 26450269 NR Description: unknown protein [Arabidopsis thaliana]
  misc_feature (1)..(265): NCBI GI NO: 40740887 NR Description: hypothetical protein AN4842.2
  misc_feature (52)..(260): NCBI GI NO: 19112079 NR Description: putative cytochrome C oxidase assembly protein
  misc_feature (61)..(264): NCBI GI NO: 4759068 NR Description: cytochrome oxidase deficient homolog 1
  misc_feature (61)..(264): NCBI GI NO: 32420339 NR Description: hypothetical protein [Neurospora crassa]
  misc_feature (45)..(261): NCBI GI NO: 12311839 NR Description: possible SCO2 protein precursor [Leishmania major]
MLFSSQHRSTAAALALLRRCVPSTTTQSVRYSKSTSHGKTKHYLHPVFQPESSSASQVSRSWGAYVVPAAVLGFAGLAAFFHYNDERRAVPKGHQGGGLRNVANGPIIGGPFTLINTEKQAITERNFLGNWVLLYFGYTSSPDLGPEQVQIMANAIDILESKQNLKILPVFVSIDPQRDTPSQLRAYLKEFDSRIIGLTGPVAAIRQMAQEYRVYFKKVEEDGNDYLVDCSHNMYLLNPKLEVTRCFGVEYSAEELSEAIVKELNRNPS

SEQ ID NO: 10286 - DNA, 1344 bp, Glycine max
  misc_feature (1)..(1344): Ceres Seq. ID no. 14308727
aaaccaaaccaaaccaaacctctctttctcagtttctctctcttagggttttctcctcccccattgacccaccgtccatcgcaaaggaagtcgcgcccaatttccatggtttgtagattaaatcttaaagcagtaagtcatcatggataaatcagagcagactcagcagcaacatcagcatgggatgggcgttgccacaggtgctagccaaatggcctattcttctcactacccgactgctcccatggtggcttctggcacgcctgctgtagctgttccttccccaactcaggctccagctgccttctctagttctgctcaccagcttgcataccagcaagcacagcatttccaccaccaacagcagcaacaccaacaacagcagcttcaaatgttctggtcaaaccaaatgcaagaaattgagcaaacaattgactttaaaaaccacagtcttcctcttgctcggataaaaaagataatgaaagctgatgaagatgtccggatgatttctgcagaagctccagtcatatttgcaaaagcatgtgaaatgttcatattagagttgacgttgagatcttggatccacacagaagagaacaagaggagaactctacaaaagaatgatatagcagctgctatttcgagaaacgatgtttttgatttcttggttgatattatcccaagagatgagttgaaagaggaaggacttggaataaccaaggctactattccattggtgaattctccagctgatatgccatattactatgtccctccacagcatcctgttgtaggacctcctgggatgatcatgggcaagcccgttggtgctgagcaagcaacgctgtattctacacagcagcctcgacctcccatggcgttcatgccatggccccatacacaaccccagcaacagcagccaccccaacatcaacaaacagactcatgatgacaatgcaattcaattaggtcggaaagtagcatgcaccttatgattattacaaatttacttaatgcctttaagtcagctgtagtttagtgttttgcattgaaaaatgccaaagattgtttgaggtttcttgcactcatttatgattgtatgagctcttatgctgagttacttttggttgtgtttatttgaggtactggtgtggtagttaaattagtttgtagctgtccataagtaaacagcgtagctgcttaattaggaggtctgaaatgatgaaatagtttgtattgttattgcagaaggtaggttttattcagtatttcattctattgcaatggctgaatttaatgctcatccgcttagtaccaaaaaaaaaaaaaaaaaagaattcgaga

SEQ ID NO: 10287 - protein, 268 aa, Glycine max
  peptide (1)..(268): Ceres Seq. ID no. 14308728
  misc_feature (102)..(166): Pfam Name: CBF/NF-Y Pfam Description: Histone-like transcription factor
  misc_feature (45)..(213): NCBI GI NO: 15223482 NR Description: transcription factor Hap5a, putative
  misc_feature (45)..(213): NCBI GI NO: 21554704 NR Description: transcription factor, putative
  misc_feature (10)..(265): NCBI GI NO: 15223986 NR Description: transcription factor Hap5a, putative
  misc_feature (10)..(265): NCBI GI NO: 6289057 NR Description: heme activated protein [Arabidopsis thaliana]
  misc_feature (65)..(265): NCBI GI NO: 25372763 NR Description: hypothetical protein
  misc_feature (46)..(260): NCBI GI NO: 15221912 NR Description: transcription factor Hap5a, putative
  misc_feature (70)..(227): NCBI GI NO: 15228405 NR Description: transcription factor Hap5a, putative
  misc_feature (41)..(253): NCBI GI NO: 15242784 NR Description: transcription factor Hap5a, putative
  misc_feature (90)..(213): NCBI GI NO: 2398533 NR Description: Transcription factor [Arabidopsis thaliana]
  misc_feature (90)..(213): NCBI GI NO: 25404100 NR Description: transcription factor
MDKSEQTQQQHQHGMGVATGASQMAYSSHYPTAPMVASGTPAVAVPSPTQAPAAFSSSAHQLAYQQAQHFHHQQQQHQQQQLQMFWSNQMQEIEQTIDFKNHSLPLARIKKIMKADEDVRMISAEAPVIFAKACEMFILELTLRSWIHTEENKRRTLQKNDIAAAISRNDVFDFLVDIIPRDELKEEGLGITKATIPLVNSPADMPYYYVPPQHPVVGPPGMIMGKPVGAEQATLYSTQQPRPPMAFMPWPHTQPQQQQPPQHQQTDS

SEQ ID NO: 10288 - protein, 254 aa, Glycine max
  peptide (1)..(254): Ceres Seq. ID no. 14308729
  misc_feature (88)..(152): Pfam Name: CBF/NF-Y Pfam Description: Histone-like transcription factor
  misc_feature (31)..(199): NCBI GI NO: 15223482 NR Description: transcription factor Hap5a, putative
  misc_feature (31)..(199): NCBI GI NO: 21554704 NR Description: transcription factor, putative
  misc_feature (1)..(251): NCBI GI NO: 15223986 NR Description: transcription factor Hap5a, putative
  misc_feature (1)..(251): NCBI GI NO: 6289057 NR Description: heme activated protein [Arabidopsis thaliana]
  misc_feature (51)..(251): NCBI GI NO: 25372763 NR Description: hypothetical protein
  misc_feature (32)..(246): NCBI GI NO: 15221912 NR Description: transcription factor Hap5a, putative
  misc_feature (56)..(213): NCBI GI NO: 15228405 NR Description: transcription factor Hap5a, putative
  misc_feature (27)..(239): NCBI GI NO: 15242784 NR Description: transcription factor Hap5a, putative
  misc_feature (76)..(199): NCBI GI NO: 2398533 NR Description: Transcription factor [Arabidopsis thaliana]
  misc_feature (76)..(199): NCBI GI NO: 25404100 NR Description: transcription factor
MGVATGASQMAYSSHYPTAPMVASGTPAVAVPSPTQAPAAFSSSAHQLAYQQAQHFHHQQQQHQQQQLQMFWSNQMQEIEQTIDFKNHSLPLARIKKIMKADEDVRMISAEAPVIFAKACEMFILELTLRSWIHTEENKRRTLQKNDIAAAISRNDVFDFLVDIIPRDELKEEGLGITKATIPLVNSPADMPYYYVPPQHPVVGPPGMIMGKPVGAEQATLYSTQQPRPPMAFMPWPHTQPQQQQPPQHQQTDS

SEQ ID NO: 10289 - protein, 245 aa, Glycine max
  peptide (1)..(245): Ceres Seq. ID no. 14308730
  misc_feature (79)..(143): Pfam Name: CBF/NF-Y Pfam Description: Histone-like transcription factor
  misc_feature (22)..(190): NCBI GI NO: 15223482 NR Description: transcription factor Hap5a, putative
  misc_feature (22)..(190): NCBI GI NO: 21554704 NR Description: transcription factor, putative
  misc_feature (1)..(242): NCBI GI NO: 15223986 NR Description: transcription factor Hap5a, putative
  misc_feature (1)..(242): NCBI GI NO: 6289057 NR Description: heme activated protein [Arabidopsis thaliana]
  misc_feature (42)..(242): NCBI GI NO: 25372763 NR Description: hypothetical protein
  misc_feature (23)..(237): NCBI GI NO: 15221912 NR Description: transcription factor Hap5a, putative
  misc_feature (47)..(204): NCBI GI NO: 15228405 NR Description: transcription factor Hap5a, putative
  misc_feature (18)..(230): NCBI GI NO: 15242784 NR Description: transcription factor Hap5a, putative
  misc_feature (67)..(190): NCBI GI NO: 2398533 NR Description: Transcription factor [Arabidopsis thaliana]
  misc_feature (67)..(190): NCBI GI NO: 25404100 NR Description: transcription factor
MAYSSHYPTAPMVASGTPAVAVPSPTQAPAAFSSSAHQLAYQQAQHFHHQQQQHQQQQLQMFWSNQMQEIEQTIDFKNHSLPLARIKKIMKADEDVRMISAEAPVIFAKACEMFILELTLRSWIHTEENKRRTLQKNDIAAAISRNDVFDFLVDIIPRDELKEEGLGITKATIPLVNSPADMPYYYVPPQHPVVGPPGMIMGKPVGAEQATLYSTQQPRPPMAFMPWPHTQPQQQQPPQHQQTDS

SEQ ID NO: 10290 - DNA, 1958 bp, Glycine max
  misc_feature (1)..(1958): Ceres Seq. ID no. 15226288
rvcgggscccccctcgagtcagctacgtaggcccccccccccaggagtttctgcatgtggaaattcagagtcaagcttaccacttcccagtcaaaaccattctgagcaacaagtttttcatgatgagtggccagcaactgaacaaccaattgctagaaatgcacaggaactaaacatgtctgcttcttctaatgccaatgggccatttgagcatcctagcttgcatgtaaatgcaattggtttacacaggaactgtgaattagacacagccccagtttcatggggggatgttgcttgtgataatgatgcttttgaaaaaaatgaatctgcttctatatctagagaacatactgttttgagcagcaacactggactacgatcccattccaactctaacttaaggaatactatttcctctgatcattgtagttcttatgggcatggtgaagacgtgtcatcagccgcttcaattttccagcggctaagtataggagaatccaaacagaaagtgccaacatttgaagatgatcctgcagtggttattccaattcatttacaagccttaggtgctgactgttcacatttgagttttggtacatataatggcagcagtactgcatcttctgtccttcttaattctaatcatctttcaaaaagtgacttggaagagaagtctgcagctgtagatgattcttcggctcagttcctggatgcaagttatgatttccagagagataagcagcatggatttgatgttcttaaaggagcagcaggtgataaaaacagtgacatcctttcatctgataagcaatggtttgtgaagcatattgttcctgaggaaacttttgagaatgaacacatcatcaaggcatctgtatcagatcctagattgcaaaaatcacactgggagaatacttcactgccattgaagcagccaggggtgcagagtggaaaccatttgaattttccaagaggattgtatgctgactcaaattcaatacctggtgatgtgttggcgttgctcatgtcacaatctcaaactgcaagacacagtaacacagtttcatccataagcaatcctgccttctccatgtctaaggtcatggagccaggtgcctttcctctacctatgagatctgcacttccccgggatcctacagtgcattcctcatcacactttcatcaattgcctgacacaaaaggatatttttccctgccccagaataggtcatacaatacaaccataaattctcagttaccattttcaggcaatactgtatacaatcaatctccagcagacatgaagtacaaccttctacaaaatagaaatgaattccttacaaatagattgcctcctgccactgccagagatgcatttggctatggaaatcttggctcttccatttatagttctggaagctttctgtctaatccatctcctggtcatatgatgccttcaagtaactttaatgagattttaccttctcagtataatggtggacgtaacataaactctattcaacagcatggtagcttttctcattgggattacggagccgagccaagatctttgtttatcccgaagagaacccagtcacagtatgctactcctggatatgctgaccttcatcattctgagacacgggttttggaaaaatatcagcagccaggtgattttcaagatttgccatccaagcagttgcatccattttggcaacgcgacaaccttcatcattctgagacacgggttttggaagaacatcagcagccaggtgattttcaagatttgccgtccaagcagttgcatccattttggcagcacgataactaatactatacatcctgcttgttttttcttcccttttttgtatacagaattattttagtaggtttaggtgaattatggtgttattttcattcagatgcttgagcgttaattcaattgtagatcttttttg

SEQ ID NO: 10291 - protein, 609 aa, Glycine max
  peptide (1)..(609): Ceres Seq. ID no. 15226289
  misc_feature (150)..(397): NCBI GI NO: 34910870 NR Description: P0003E08.1
  misc_feature (356)..(607): NCBI GI NO: 34910870 NR Description: P0003E08.1
  misc_feature (21)..(321): NCBI GI NO: 15236766 NR Description: hypothetical protein [Arabidopsis thaliana]
  misc_feature (1)..(1): Xaa is any aa, unknown or other
  misc_feature (2)..(2): Xaa is any aa, unknown or other
XXPPSSQLRRPPPPGVSACGNSESSLPLPSQNHSEQQVFHDEWPATEQPIARNAQELNMSASSNANGPFEHPSLHVNAIGLHRNCELDTAPVSWGDVACDNDAFEKNESASISREHTVLSSNTGLRSHSNSNLRNTISSDHCSSYGHGEDVSSAASIFQRLSIGESKQKVPTFEDDPAVVIPIHLQALGADCSHLSFGTYNGSSTASSVLLNSNHLSKSDLEEKSAAVDDSSAQFLDASYDFQRDKQHGFDVLKGAAGDKNSDILSSDKQWFVKHIVPEETFENEHIIKASVSDPRLQKSHWENTSLPLKQPGVQSGNHLNFPRGLYADSNSIPGDVLALLMSQSQTARHSNTVSSISNPAFSMSKVMEPGAFPLPMRSALPRDPTVHSSSHFHQLPDTKGYFSLPQNRSYNTTINSQLPFSGNTVYNQSPADMKYNLLQNRNEFLTNRLPPATARDAFGYGNLGSSIYSSGSFLSNPSPGHMMPSSNFNEILPSQYNGGRNINSIQQHGSFSHWDYGAEPRSLFIPKRTQSQYATPGYADLHHSETRVLEKYQQPGDFQDLPSKQLHPFWQRDNLHHSETRVLEEHQQPGDFQDLPSKQLHPFWQHDN

SEQ ID NO: 10292 - protein, 551 aa, Glycine max
  peptide (1)..(551): Ceres Seq. ID no. 15226290
  misc_feature (92)..(339): NCBI GI NO: 34910870 NR Description: P0003E08.1
  misc_feature (298)..(549): NCBI GI NO: 34910870 NR Description: P0003E08.1
  misc_feature (1)..(263): NCBI GI NO: 15236766 NR Description: hypothetical protein [Arabidopsis thaliana]
MSASSNANGPFEHPSLHVNAIGLHRNCELDTAPVSWGDVACDNDAFEKNESASISREHTVLSSNTGLRSHSNSNLRNTISSDHCSSYGHGEDVSSAASIFQRLSIGESKQKVPTFEDDPAVVIPIHLQALGADCSHLSFGTYNGSSTASSVLLNSNHLSKSDLEEKSAAVDDSSAQFLDASYDFQRDKQHGFDVLKGAAGDKNSDILSSDKQWFVKHIVPEETFENEHIIKASVSDPRLQKSHWENTSLPLKQPGVQSGNHLNFPRGLYADSNSIPGDVLALLMSQSQTARHSNTVSSISNPAFSMSKVMEPGAFPLPMRSALPRDPTVHSSSHFHQLPDTKGYFSLPQNRSYNTTINSQLPFSGNTVYNQSPADMKYNLLQNRNEFLTNRLPPATARDAFGYGNLGSSIYSSGSFLSNPSPGHMMPSSNFNEILPSQYNGGRNINSIQQHGSFSHWDYGAEPRSLFIPKRTQSQYATPGYADLHHSETRVLEKYQQPGDFQDLPSKQLHPFWQRDNLHHSETRVLEEHQQPGDFQDLPSKQLHPFWQHDN

SEQ ID NO: 10293 - DNA, 1104 bp, Glycine max
  misc_feature (1)..(1104): Ceres Seq. ID no. 15169184
gcttccctctctcatcctctctgccgcttccccgctctccccaaactactctgtgccccgtcagatcgacctggactttggcgacagctacttctcgacgggcggcacgggcgtgctgctacttctgcttcctctcccacgcttgctgagctgatggctacatcagagccagtacaagagagtttggtggtgcactactcacaacctagtaggccccgggtcctccttgctgcttcaggaagtgtagccgctataaaatttgaaagcctttgccgtagcttctctgagtgggcggatgtccgagctgtggccaccacgtcatccttgcacttcgttgatagatcatctctaccaagtggcatcgttctttacactgatgacgatgaatggtctacctggaagaagataggagatgaagtcttacacatcgagctgcggaaatgggcagacgttatggtgattgctccattgtcagcaaataccctggctaagatcgccggtgggttatgcgacaacctcttgacctgcatcgtgagagcgtgggactacagcaaaccgctctttgttgccccagccatgaacacgttaatgtggaacaacccattcacggagcggcatcttcacacaatcaaccaactgggcatagccttgatccccccagttaccaaaaggctggcctgtggcgattacgggaacggcgcaatggccgaaacctcgcagatccatacttccgtgaggctcgcgtgcaagacgcaaccgcacgatgcgagcagttcactcgcgggtcctgtcagtaataaccggccatctagctgatgcagcggttggccacttgattgtcaagcttaggaatttgttttatctgcagtgtgcatctggagtgttgtaccagattttttttcaactagagtttgtgtgtattgaattagggggaaaggttgttgtcacatgataacaataacttccaatgatgactctattcagtttgtaattgtctgtgggagtacaattatgcagctgtattgtctgctacaatattgtttgtttgtgtgtgtgggagtggggggtgctgttgccacagagatagattcctccctgcccagt

SEQ ID NO: 10294 - protein, 271 aa, Glycine max
  peptide (1)..(271): Ceres Seq. ID no. 15169185
  misc_feature (72)..(192): Pfam Name: Pfam Description:  Flavoprotein
  misc_feature (69)..(254): NCBI GI NO: 15229569 NR Description: HAL3A protein [Arabidopsis thaliana]
  misc_feature (69)..(254): NCBI GI NO: 28948673 NR Description: Chain A, Ppc Decarboxylase Mutant C175s
  misc_feature (71)..(252): NCBI GI NO: 8778701 NR Description: T1N15.24 [Arabidopsis thaliana]
  misc_feature (71)..(252): NCBI GI NO: 13124308 NR Description: Halotolerance protein Hal3b
  misc_feature (70)..(246): NCBI GI NO: 9634784 NR Description: ORF FPV114 HAL3 domain [Fowlpox virus]
  misc_feature (73)..(246): NCBI GI NO: 40556079 NR Description: CNPV141 HAL3-like domain protein [Canarypox virus]
  misc_feature (70)..(253): NCBI GI NO: 37590890 NR Description: Unknown (protein for MGC:73297) [Danio rerio]
  misc_feature (135)..(248): NCBI GI NO: 12583571 NR Description: putative halotolerance protein HAL3 homolog
  misc_feature (67)..(246): NCBI GI NO: 28849879 NR Description: RIKEN cDNA 8430432M10 [Mus musculus]
  misc_feature (48)..(246): NCBI GI NO: 34863489 NR Description: similar to RIKEN cDNA 8430432M10
ASLSHPLCRFPALPKLLCAPSDRPGLWRQLLLDGRHGRAATSASSPTLAELMATSEPVQESLVVHYSQPSRPRVLLAASGSVAAIKFESLCRSFSEWADVRAVATTSSLHFVDRSSLPSGIVLYTDDDEWSTWKKIGDEVLHIELRKWADVMVIAPLSANTLAKIAGGLCDNLLTCIVRAWDYSKPLFVAPAMNTLMWNNPFTERHLHTINQLGIALIPPVTKRLACGDYGNGAMAETSQIHTSVRLACKTQPHDASSSLAGPVSNNRPSS

SEQ ID NO: 10295 - protein, 220 aa, Glycine max
  peptide (1)..(220): Ceres Seq. ID no. 15169186
  misc_feature (21)..(141): Pfam Name: Pfam Description:  Flavoprotein
  misc_feature (18)..(203): NCBI GI NO: 15229569 NR Description: HAL3A protein [Arabidopsis thaliana]
  misc_feature (18)..(203): NCBI GI NO: 28948673 NR Description: Chain A, Ppc Decarboxylase Mutant C175s
  misc_feature (20)..(201): NCBI GI NO: 8778701 NR Description: T1N15.24 [Arabidopsis thaliana]
  misc_feature (20)..(201): NCBI GI NO: 13124308 NR Description: Halotolerance protein Hal3b
  misc_feature (19)..(195): NCBI GI NO: 9634784 NR Description: ORF FPV114 HAL3 domain [Fowlpox virus]
  misc_feature (22)..(195): NCBI GI NO: 40556079 NR Description: CNPV141 HAL3-like domain protein [Canarypox virus]
  misc_feature (19)..(202): NCBI GI NO: 37590890 NR Description: Unknown (protein for MGC:73297) [Danio rerio]
  misc_feature (84)..(197): NCBI GI NO: 12583571 NR Description: putative halotolerance protein HAL3 homolog
  misc_feature (16)..(195): NCBI GI NO: 28849879 NR Description: RIKEN cDNA 8430432M10 [Mus musculus]
  misc_feature (1)..(195): NCBI GI NO: 34863489 NR Description: similar to RIKEN cDNA 8430432M10
MATSEPVQESLVVHYSQPSRPRVLLAASGSVAAIKFESLCRSFSEWADVRAVATTSSLHFVDRSSLPSGIVLYTDDDEWSTWKKIGDEVLHIELRKWADVMVIAPLSANTLAKIAGGLCDNLLTCIVRAWDYSKPLFVAPAMNTLMWNNPFTERHLHTINQLGIALIPPVTKRLACGDYGNGAMAETSQIHTSVRLACKTQPHDASSSLAGPVSNNRPSS

SEQ ID NO: 10296 - DNA, 1891 bp, Glycine max
  misc_feature (1)..(1891): Ceres Seq. ID no. 14310520
aaaacaaaaaagaccatggtaatggtaaaccctctaaattattggggaagacaaaagaatgagaaagaaagctgccctttctctcgctactcctcctaccccaaacaaaactttcccattacaaattgtggaatgaagaaagaatggcaagacaagtgagtagtagtatagtagtaattgacccatcaaacaaacaagcataacccatgtaattgttattgtagatagatagagtgagtgagtgagcactgtgttgtgtatatagtagtgtgtaaactctccccaacagacagacacgccgccactcaattatttctgtccatttcttcttcccatattgttctcgtgtgttgtgtgtgtcagtgttttggtgtgtgtgtgtgtgtgtgtgtgagtgagagaaagagaaaaaaagaaaagaaaaagagtgtcttggggcggttttggtttgagtttaacactttcatttcgaagatgccgcgcccagggccaaggccttacgagtgcgtgagaagggcttggcacagcgagcgccaccaacccgtgagaggttccatcattcagcagattttcagggtcgtcaatgacgctcacagtcccgcaaccaagaagaacaaggaatggcaggagaagctccccgtggtggttctcaaggccgaagaaatcatgtactccaaagccaattccgaggcagagtacttgaatcctgacacgctctgggaccgcctcaatgatgccgttaacacaatcatacggagagatgagacaaccgagacaggaggcctcttgcccccatgtgttgaagctgcacttaacttgggatgcaaagccgtgagaacttccagaagtgatcggcacaataacccaaggacttacctttctccaaggattcaacagcctccttgtctgcctcctaaacctgttgcggggaatcccttgaactatgcaaaagtcacaactcctgctgtgtcaccaattcctgtgccagattctatccacccaaatagcaggctcatgggttcctctaagtaccctttctcagaaggtatcccttctggtcatcaccagccattgacaatggaagctagaccctcattgaacttgggttcagtttaccctttgtactatggttatgaagccagagaacctgaaccttggacgactgctacagataccacgtgttctgatacaatctttgttggcagaccagtcatttcagtccctgagccttcaggaattggtctatcggaaaacttctcctatggtacattccatcacgttgcaaacagaatgagaaaagagactgctgttggcactcaggaggcagcaccagatagggaatgtgacttgtctttgaggttgggtcaatgtctgcatccgtgttcaagcagcaaaagtagttcagcatatgaagtagatgatgttggtttaggagtttcaccggaaagctgcaagtttagccatttatccttgcagagaaatagagagttctgtttttatcctagagagacaggttatggcaccattgagtccacttctggtaaatgtaatgtagagggtgaagatctgaatttagaggcaactcttcggaagcgcaaagcacctttatgtggtaacaacgaggaagatgggcaattttgccggaatccaggggtcccatccaatcgttttactagtaggccaggttcgtagacagtttcttgttgtatcatagtatatgcatttgcatttctagatagatgaatgatccaaaatgttgtttaatcctcttatgtagactctttatgtgtagctctgcttgtgaaaaattttagaagctggcgttgagttgctaattgcattttctcccaatgtgaactgtatataaaatcttagtttgctttgcttaaag

SEQ ID NO: 10297 - protein, 405 aa, Glycine max
  peptide (1)..(405): Ceres Seq. ID no. 14310521
  misc_feature (1)..(218): NCBI GI NO: 15230072 NR Description: expressed protein [Arabidopsis thaliana]
  misc_feature (1)..(211): NCBI GI NO: 22329083 NR Description: expressed protein [Arabidopsis thaliana]
  misc_feature (38)..(218): NCBI GI NO: 11994234 NR Description: gene_id:MUJ8.5~unknown protein
MPRPGPRPYECVRRAWHSERHQPVRGSIIQQIFRVVNDAHSPATKKNKEWQEKLPVVVLKAEEIMYSKANSEAEYLNPDTLWDRLNDAVNTIIRRDETTETGGLLPPCVEAALNLGCKAVRTSRSDRHNNPRTYLSPRIQQPPCLPPKPVAGNPLNYAKVTTPAVSPIPVPDSIHPNSRLMGSSKYPFSEGIPSGHHQPLTMEARPSLNLGSVYPLYYGYEAREPEPWTTATDTTCSDTIFVGRPVISVPEPSGIGLSENFSYGTFHHVANRMRKETAVGTQEAAPDRECDLSLRLGQCLHPCSSSKSSSAYEVDDVGLGVSPESCKFSHLSLQRNREFCFYPRETGYGTIESTSGKCNVEGEDLNLEATLRKRKAPLCGNNEEDGQFCRNPGVPSNRFTSRPGS

SEQ ID NO: 10298 - protein, 341 aa, Glycine max
  peptide (1)..(341): Ceres Seq. ID no. 14310522
  misc_feature (1)..(154): NCBI GI NO: 15230072 NR Description: expressed protein [Arabidopsis thaliana]
  misc_feature (1)..(147): NCBI GI NO: 22329083 NR Description: expressed protein [Arabidopsis thaliana]
  misc_feature (1)..(154): NCBI GI NO: 11994234 NR Description: gene_id:MUJ8.5~unknown protein
MYSKANSEAEYLNPDTLWDRLNDAVNTIIRRDETTETGGLLPPCVEAALNLGCKAVRTSRSDRHNNPRTYLSPRIQQPPCLPPKPVAGNPLNYAKVTTPAVSPIPVPDSIHPNSRLMGSSKYPFSEGIPSGHHQPLTMEARPSLNLGSVYPLYYGYEAREPEPWTTATDTTCSDTIFVGRPVISVPEPSGIGLSENFSYGTFHHVANRMRKETAVGTQEAAPDRECDLSLRLGQCLHPCSSSKSSSAYEVDDVGLGVSPESCKFSHLSLQRNREFCFYPRETGYGTIESTSGKCNVEGEDLNLEATLRKRKAPLCGNNEEDGQFCRNPGVPSNRFTSRPGS

SEQ ID NO: 10299 - protein, 225 aa, Glycine max
  peptide (1)..(225): Ceres Seq. ID no. 14310523
  misc_feature (1)..(38): NCBI GI NO: 15230072 NR Description: expressed protein [Arabidopsis thaliana]
  misc_feature (1)..(31): NCBI GI NO: 22329083 NR Description: expressed protein [Arabidopsis thaliana]
  misc_feature (1)..(38): NCBI GI NO: 11994234 NR Description: gene_id:MUJ8.5~unknown protein
MGSSKYPFSEGIPSGHHQPLTMEARPSLNLGSVYPLYYGYEAREPEPWTTATDTTCSDTIFVGRPVISVPEPSGIGLSENFSYGTFHHVANRMRKETAVGTQEAAPDRECDLSLRLGQCLHPCSSSKSSSAYEVDDVGLGVSPESCKFSHLSLQRNREFCFYPRETGYGTIESTSGKCNVEGEDLNLEATLRKRKAPLCGNNEEDGQFCRNPGVPSNRFTSRPGS

SEQ ID NO: 10300 - DNA, 1503 bp, Glycine max
  misc_feature (1)..(1503): Ceres Seq. ID no. 15178181
gagattaataataataagagagtaaggaagggcactccaagactttggtggagagcaagagctataagtgtgagaagtgattggaaattgttggaacccaccctatcaacaaggagaagctgttttcgttcgtcgccactaacactaatcgtttcttcaatgccttacgagaaggaactcgccgctgcaaagaaagcagtcactctcgctgctcgtctctgccagaaagttcagaaggctcttctgcaatccgatgtgcactcaaagtcagacaaaagtcctgtcacagtggctgattatggttcacaagcattggtcagctttatacttgagagagaacttccttctgaatcattttcattagtagctgaggaggattcaggtgatcttcgtaaggaaagtggccaggatactctgaatcgcattacagaacttgtcaatgatactcttgctagtgaaggatcaaatagcttttctactttaacaacagatgacgtgcttgtggccatcgacagtggtaaatctgaaggtggttcagttggacggcactgggttttggatccgatagatggtactaaagggtttgtaagaggagattaatatgctatagcattagctttgttacatgaaggcaaaattgtattgggtgtcttggcttgtccaaatcttccactggcatccattggctctaatcagcagcattcttcttcaaatgaagttggttgtctcttctttgctaaagttggtgatggaacatatatgcaagcactgggcggttctacacaaactagggtgcatgtctgtgatattgataatccagaggaagcatcatttttcgaatcttttgaagcagcacactccttgcatgacttatctagctcaatcgcagaaaaacttggtgtcaaagcaccaccagtcagaattgatagccaagcaaaatatggagctttgtcaagaggagatggggctatatatttgcgtttccctcacagaggataccgtgaaaaaatatgggatcatgctgctggcagcattgttgtgactgaagctggaggtattgccatggatgctgcggggaaccctttggacttttcaaaaggaaagtttcttgatgttgtatctggtattattgttacaaaccagaaattgatgccatcacttctgacagcagttaaagaagcactcaatgagaaagcatcatccttgtgatttccatttaagcgaatgattctacaaatgagcttgctaacgttgttgtcggctcgtgttatatggggccttcccctcaattgtgctatatttcattctgatgaagttaaacaaatgatgggacttcctctgatacttcctttgtagcagcagatttgtgctctggttttttgcagctgctattttcttctccttctatatacctgtccttttctctccttttctattaataaacagagatgagagatcttatataaacttgtttgataattaattcttctagattaacttgtc

SEQ ID NO: 10301 - protein, 199 aa, Glycine max
  peptide (1)..(199): Ceres Seq. ID no. 15178182
  misc_feature (54)..(199): NCBI GI NO: 15237567 NR Description: 3(2),5-bisphosphate nucleotidase
  misc_feature (55)..(199): NCBI GI NO: 3913517 NR Description: 3'
  misc_feature (50)..(199): NCBI GI NO: 14268820 NR Description: diphosphonucleotide phosphatase 1 [Zea mays]
  misc_feature (54)..(199): NCBI GI NO: 15237589 NR Description: 3(2),5-bisphosphate nucleotidase (emb|CAB05889.1)
  misc_feature (54)..(199): NCBI GI NO: 18424775 NR Description: 3(2),5-bisphosphate nucleotidase
  misc_feature (54)..(199): NCBI GI NO: 21618152 NR Description: 3(2),5-bisphosphate nucleotidase
  misc_feature (54)..(199): NCBI GI NO: 34395640 NR Description: Probable SAL4 phosphatase
  misc_feature (54)..(199): NCBI GI NO: 8777312 NR Description: 3'(2'),5'-bisphosphate nucleotidase
  misc_feature (56)..(199): NCBI GI NO: 15451579 NR Description: Putative PAP-specific phosphatase [Oryza sativa]
  misc_feature (54)..(199): NCBI GI NO: 40744789 NR Description: hypothetical protein AN1769.2
EINNNKRVRKGTPRLWWRARAISVRSDWKLLEPTLSTRRSCFRSSPLTLIVSSMPYEKELAAAKKAVTLAARLCQKVQKALLQSDVHSKSDKSPVTVADYGSQALVSFILERELPSESFSLVAEEDSGDLRKESGQDTLNRITELVNDTLASEGSNSFSTLTTDDVLVAIDSGKSEGGSVGRHWVLDPIDGTKGFVRGD

SEQ ID NO: 10302 - protein, 149 aa, Glycine max
  peptide (1)..(149): Ceres Seq. ID no. 15178183
  misc_feature (1)..(149): NCBI GI NO: 15237567 NR Description: 3(2),5-bisphosphate nucleotidase
  misc_feature (1)..(145): NCBI GI NO: 3913517 NR Description: 3'
  misc_feature (1)..(149): NCBI GI NO: 14268820 NR Description: diphosphonucleotide phosphatase 1 [Zea mays]
  misc_feature (1)..(145): NCBI GI NO: 15237589 NR Description: 3(2),5-bisphosphate nucleotidase (emb|CAB05889.1)
  misc_feature (1)..(145): NCBI GI NO: 18424775 NR Description: 3(2),5-bisphosphate nucleotidase
  misc_feature (1)..(145): NCBI GI NO: 21618152 NR Description: 3(2),5-bisphosphate nucleotidase
  misc_feature (1)..(145): NCBI GI NO: 34395640 NR Description: Probable SAL4 phosphatase
  misc_feature (1)..(145): NCBI GI NO: 8777312 NR Description: 3'(2'),5'-bisphosphate nucleotidase
  misc_feature (1)..(141): NCBI GI NO: 15451579 NR Description: Putative PAP-specific phosphatase [Oryza sativa]
  misc_feature (1)..(142): NCBI GI NO: 40744789 NR Description: hypothetical protein AN1769.2
MQALGGSTQTRVHVCDIDNPEEASFFESFEAAHSLHDLSSSIAEKLGVKAPPVRIDSQAKYGALSRGDGAIYLRFPHRGYREKIWDHAAGSIVVTEAGGIAMDAAGNPLDFSKGKFLDVVSGIIVTNQKLMPSLLTAVKEALNEKASSL

SEQ ID NO: 10303 - protein, 146 aa, Glycine max
  peptide (1)..(146): Ceres Seq. ID no. 15178184
  misc_feature (1)..(146): NCBI GI NO: 15237567 NR Description: 3(2),5-bisphosphate nucleotidase
  misc_feature (2)..(146): NCBI GI NO: 3913517 NR Description: 3'
  misc_feature (1)..(146): NCBI GI NO: 14268820 NR Description: diphosphonucleotide phosphatase 1 [Zea mays]
  misc_feature (1)..(146): NCBI GI NO: 15237589 NR Description: 3(2),5-bisphosphate nucleotidase (emb|CAB05889.1)
  misc_feature (1)..(146): NCBI GI NO: 18424775 NR Description: 3(2),5-bisphosphate nucleotidase
  misc_feature (1)..(146): NCBI GI NO: 21618152 NR Description: 3(2),5-bisphosphate nucleotidase
  misc_feature (1)..(146): NCBI GI NO: 34395640 NR Description: Probable SAL4 phosphatase
  misc_feature (1)..(146): NCBI GI NO: 8777312 NR Description: 3'(2'),5'-bisphosphate nucleotidase
  misc_feature (3)..(146): NCBI GI NO: 15451579 NR Description: Putative PAP-specific phosphatase [Oryza sativa]
  misc_feature (1)..(146): NCBI GI NO: 40744789 NR Description: hypothetical protein AN1769.2
MPYEKELAAAKKAVTLAARLCQKVQKALLQSDVHSKSDKSPVTVADYGSQALVSFILERELPSESFSLVAEEDSGDLRKESGQDTLNRITELVNDTLASEGSNSFSTLTTDDVLVAIDSGKSEGGSVGRHWVLDPIDGTKGFVRGD

SEQ ID NO: 10304 - DNA, 1508 bp, Glycine max
  misc_feature (1)..(1508): Ceres Seq. ID no. 14312293
gattccgcagcttgttactctcttctctctcaaaacaaaacttgaatccatccatactctacataccccttgcccttgctttgcttctttctttctcacaagcaccagcagcactcaaatcaatcaatcgtttttaatgcccttgcttctccctctttccgtgtgtatgtaaaatctttgtttttatcagaggtggtgcagaaagttgtatctcagatccctatatacaccgaaaacgatacaactgtgtgctgtgtacactgtgcactgtgcttctccctctctctctctctctctcacaaaatcataatcattttacatattacacctattaccgaatagagtggtcctcaacctcaacctaaaagcctcactttttttgttttccccgataaccctattcaacccaatcctcctttcccttttcctttgacaaaaggaaaggaagaaatgcaagaaccaagcttgggattgatgggtgaggtctccggcgatcaccaccgtcagctgaaggcggagataacgactcatccgctgtacgagcagcttctggcagcacacgtggcatgcctccgtgtggccaccccgatcgaccagcttccactcatcgatgctcagttatctcagtctcaccatcttctacgctcttatgtctcacacaacactcattctctctcccctcatcaccgccaagaacttgacaacttcctggcacaatatttgatagttctgtgtactttcaaagaacagcttcagcaacatgtaagagtccacgccgtcgaggctgtcatggcctgccgtgatatcgaaaatgccttacaagctctaactggagtgagtttgggagaaggaactggtgcaacaatgtcagatgatgaagatgatttacaaatggatatttctttagatcaatctagcgcggaagggcatgacatgatgggatttggtccattacttcctacagaatctgaaaggtcattgatggaaagagttcgccaggaactaaagattgagctgaaacagggtttcaagtcaagaattgaagatgtcagggaagaaatattaaggaaacgtagagctgggaaattaccaggtgacacaacttctgtgttaaagaactggtggcagcaacatgcaaagtggccttacccaactgaagatgacaaggcaaaacttgtggaggagacagggttgcagctgaagcaaattaataattggttcatcaaccaaaggaaacgcaactggcacagtaactctcaatcggttacctctttgaagtcgaagcgcaagaggtagacatattattttgtccctaactatgtggaacagctagcaagcaacacaactatatataaggacatgcttaatattgctgatagagtgtagtcccactaaggatgcaaaagatggtagatgcatgtgggttactgtaatattgtaagatagctgaaacaaattatagactggctgtaaatttgtggaatttaacgtatgcaaacttttctttt

SEQ ID NO: 10305 - protein, 281 aa, Glycine max
  peptide (1)..(281): Ceres Seq. ID no. 14312294
  misc_feature (73)..(128): Pfam Name: Pfam Description:  KNOX2 domain
  misc_feature (15)..(281): NCBI GI NO: 4098246 NR Description: homeobox 2 protein [Lycopersicon esculentum]
  misc_feature (1)..(280): NCBI GI NO: 18407708 NR Description: homeodomain-containing protein HD1 -related
  misc_feature (1)..(280): NCBI GI NO: 1170191 NR Description: Homeobox protein HD1
  misc_feature (12)..(280): NCBI GI NO: 25386223 NR Description: hypothetical protein F16P17.16
  misc_feature (12)..(280): NCBI GI NO: 26451690 NR Description: putative homeodomain transcription factor KNAT6
  misc_feature (5)..(280): NCBI GI NO: 21618231 NR Description: homeodomain-containing protein HD1, putative
  misc_feature (18)..(281): NCBI GI NO: 14149141 NR Description: KNOX family class 2 homeodomain protein
  misc_feature (10)..(281): NCBI GI NO: 3023961 NR Description: Homeobox protein knotted-1 like 3 (KNAP3)
  misc_feature (10)..(280): NCBI GI NO: 15238743 NR Description: KNAT3 homeodomain protein [Arabidopsis thaliana]
  misc_feature (10)..(280): NCBI GI NO: 21554222 NR Description: KNAT3 homeodomain protein [Arabidopsis thaliana]
MQEPSLGLMGEVSGDHHRQLKAEITTHPLYEQLLAAHVACLRVATPIDQLPLIDAQLSQSHHLLRSYVSHNTHSLSPHHRQELDNFLAQYLIVLCTFKEQLQQHVRVHAVEAVMACRDIENALQALTGVSLGEGTGATMSDDEDDLQMDISLDQSSAEGHDMMGFGPLLPTESERSLMERVRQELKIELKQGFKSRIEDVREEILRKRRAGKLPGDTTSVLKNWWQQHAKWPYPTEDDKAKLVEETGLQLKQINNWFINQRKRNWHSNSQSVTSLKSKRKR

SEQ ID NO: 10306 - protein, 273 aa, Glycine max
  peptide (1)..(273): Ceres Seq. ID no. 14312295
  misc_feature (65)..(120): Pfam Name: Pfam Description:  KNOX2 domain
  misc_feature (7)..(273): NCBI GI NO: 4098246 NR Description: homeobox 2 protein [Lycopersicon esculentum]
  misc_feature (1)..(272): NCBI GI NO: 18407708 NR Description: homeodomain-containing protein HD1 -related
  misc_feature (1)..(272): NCBI GI NO: 1170191 NR Description: Homeobox protein HD1
  misc_feature (4)..(272): NCBI GI NO: 25386223 NR Description: hypothetical protein F16P17.16
  misc_feature (4)..(272): NCBI GI NO: 26451690 NR Description: putative homeodomain transcription factor KNAT6
  misc_feature (1)..(272): NCBI GI NO: 21618231 NR Description: homeodomain-containing protein HD1, putative
  misc_feature (10)..(273): NCBI GI NO: 14149141 NR Description: KNOX family class 2 homeodomain protein
  misc_feature (2)..(273): NCBI GI NO: 3023961 NR Description: Homeobox protein knotted-1 like 3 (KNAP3)
  misc_feature (2)..(272): NCBI GI NO: 15238743 NR Description: KNAT3 homeodomain protein [Arabidopsis thaliana]
  misc_feature (2)..(272): NCBI GI NO: 21554222 NR Description: KNAT3 homeodomain protein [Arabidopsis thaliana]
MGEVSGDHHRQLKAEITTHPLYEQLLAAHVACLRVATPIDQLPLIDAQLSQSHHLLRSYVSHNTHSLSPHHRQELDNFLAQYLIVLCTFKEQLQQHVRVHAVEAVMACRDIENALQALTGVSLGEGTGATMSDDEDDLQMDISLDQSSAEGHDMMGFGPLLPTESERSLMERVRQELKIELKQGFKSRIEDVREEILRKRRAGKLPGDTTSVLKNWWQQHAKWPYPTEDDKAKLVEETGLQLKQINNWFINQRKRNWHSNSQSVTSLKSKRKR

SEQ ID NO: 10307 - protein, 168 aa, Glycine max
  peptide (1)..(168): Ceres Seq. ID no. 14312296
  misc_feature (94)..(150): Pfam Name: Pfam Description:  Homeobox domain
  misc_feature (1)..(168): NCBI GI NO: 4098246 NR Description: homeobox 2 protein [Lycopersicon esculentum]
  misc_feature (1)..(167): NCBI GI NO: 18407708 NR Description: homeodomain-containing protein HD1 -related
  misc_feature (1)..(167): NCBI GI NO: 1170191 NR Description: Homeobox protein HD1
  misc_feature (1)..(167): NCBI GI NO: 25386223 NR Description: hypothetical protein F16P17.16
  misc_feature (1)..(167): NCBI GI NO: 26451690 NR Description: putative homeodomain transcription factor KNAT6
  misc_feature (1)..(167): NCBI GI NO: 21618231 NR Description: homeodomain-containing protein HD1, putative
  misc_feature (1)..(168): NCBI GI NO: 14149141 NR Description: KNOX family class 2 homeodomain protein
  misc_feature (1)..(168): NCBI GI NO: 3023961 NR Description: Homeobox protein knotted-1 like 3 (KNAP3)
  misc_feature (1)..(167): NCBI GI NO: 15238743 NR Description: KNAT3 homeodomain protein [Arabidopsis thaliana]
  misc_feature (1)..(167): NCBI GI NO: 21554222 NR Description: KNAT3 homeodomain protein [Arabidopsis thaliana]
MACRDIENALQALTGVSLGEGTGATMSDDEDDLQMDISLDQSSAEGHDMMGFGPLLPTESERSLMERVRQELKIELKQGFKSRIEDVREEILRKRRAGKLPGDTTSVLKNWWQQHAKWPYPTEDDKAKLVEETGLQLKQINNWFINQRKRNWHSNSQSVTSLKSKRKR

SEQ ID NO: 10308 - DNA, 1339 bp, Glycine max
  misc_feature (1)..(1339): Ceres Seq. ID no. 15169142
aattttcatgtatgttagcaattaattttgattaatttatatcttgaattaattaattaatgttcactcattctggtcaatacagttagttaggtaattgtaaaacaatcatagaacatatcttttccatttttatctcatgaaaaatgagttaaaaataagattatatgaaatggaacatgtgcaaggttatgtttgtctaaaatgtctgaggatagaacaacattaactcaactggttgaatttctggtggtctcttcatttgtaagtagtgttatcttgtggcaacttgcctcttctgacgataaagttttatagtcttgagggttatagatgtcacaaatagctttcaataacctaaagtaaacatatgccatgtatgcagaattccaaaaacaattggtgtctcaattccaatgaaggcaactttcttcataacttacataatggtggatgggtgggctggatgtgctggtgagattttaaggttgaagccattgatattttatcacttgaaaaacttcttcttagtgaagactgaaaaggaccgtgaagaagcaatggatccagggacatttggtttcaatacaggcgaacctcaaatacaactgtatttcttacttggccttgtgtatgctgtagtcacaccatttctacttccatacatcatagtgttctttggcttggcatatgtcgtctaccgtcatcagattattaatgtctacaaccaagagtatgagagtgctgcagcattctggcctgatgtccatggacgtattatatttgcgttagtgatctcacagctgctgttaatggggttattgagtacaaaagaagctgctaactcaactccattgctcattactctcccaattctgacaatatcattccatctgtattgcaagggacgatatgaacctgctttcgttaagcatccattacaggaagcaatgatgaaggacacattggagcgtgcaagagagccaaacttcaatttgaaagagttccttcagaatgcatatatccatccggtgtttaagggtgatgatgacagtgacagtgatgtaatgagcgaaaactgggaggagcaagaacctgtacttgtacaaacaaagcgccagtcccggaaaaacacaccattgcctagcaaacatagcggttcattatcatcttgaatgccacttcttatgagcataaaactagagcaatagatagtttgaagttcactattggtggcactgctgcatgatatacccaaactctactctcttttttttctgtatataaatcagaatctagataatctttcaatgaagtatataacagaagtatgcaggtc

SEQ ID NO: 10309 - protein, 252 aa, Glycine max
  peptide (1)..(252): Ceres Seq. ID no. 15169143
  misc_feature (1)..(218): Pfam Name: Pfam Description:  Domain of unknown function DUF221
  misc_feature (1)..(251): NCBI GI NO: 15233476 NR Description: ERD4 protein-related [Arabidopsis thaliana]
  misc_feature (1)..(252): NCBI GI NO: 34913548 NR Description: OJ1029_F04.25
  misc_feature (1)..(251): NCBI GI NO: 15810533 NR Description: unknown protein [Arabidopsis thaliana]
  misc_feature (1)..(252): NCBI GI NO: 15234725 NR Description: ERD4 protein-related [Arabidopsis thaliana]
  misc_feature (1)..(238): NCBI GI NO: 15233100 NR Description: ERD4 protein-related [Arabidopsis thaliana]
  misc_feature (1)..(247): NCBI GI NO: 17381104 NR Description: unknown protein [Arabidopsis thaliana]
  misc_feature (1)..(247): NCBI GI NO: 22328665 NR Description: ERD4 protein-related [Arabidopsis thaliana]
  misc_feature (1)..(252): NCBI GI NO: 25402694 NR Description: hypothetical protein
  misc_feature (1)..(252): NCBI GI NO: 7486105 NR Description: hypothetical protein F24O1
  misc_feature (1)..(252): NCBI GI NO: 25404887 NR Description: protein F24O1.4 [imported] - Arabidopsis thaliana
MKATFFITYIMVDGWAGCAGEILRLKPLIFYHLKNFFLVKTEKDREEAMDPGTFGFNTGEPQIQLYFLLGLVYAVVTPFLLPYIIVFFGLAYVVYRHQIINVYNQEYESAAAFWPDVHGRIIFALVISQLLLMGLLSTKEAANSTPLLITLPILTISFHLYCKGRYEPAFVKHPLQEAMMKDTLERAREPNFNLKEFLQNAYIHPVFKGDDDSDSDVMSENWEEQEPVLVQTKRQSRKNTPLPSKHSGSLSS

SEQ ID NO: 10310 - protein, 242 aa, Glycine max
  peptide (1)..(242): Ceres Seq. ID no. 15169144
  misc_feature (1)..(208): Pfam Name: Pfam Description:  Domain of unknown function DUF221
  misc_feature (1)..(241): NCBI GI NO: 15233476 NR Description: ERD4 protein-related [Arabidopsis thaliana]
  misc_feature (1)..(242): NCBI GI NO: 34913548 NR Description: OJ1029_F04.25
  misc_feature (1)..(241): NCBI GI NO: 15810533 NR Description: unknown protein [Arabidopsis thaliana]
  misc_feature (1)..(242): NCBI GI NO: 15234725 NR Description: ERD4 protein-related [Arabidopsis thaliana]
  misc_feature (1)..(228): NCBI GI NO: 15233100 NR Description: ERD4 protein-related [Arabidopsis thaliana]
  misc_feature (1)..(237): NCBI GI NO: 17381104 NR Description: unknown protein [Arabidopsis thaliana]
  misc_feature (1)..(237): NCBI GI NO: 22328665 NR Description: ERD4 protein-related [Arabidopsis thaliana]
  misc_feature (1)..(242): NCBI GI NO: 25402694 NR Description: hypothetical protein
  misc_feature (1)..(242): NCBI GI NO: 7486105 NR Description: hypothetical protein F24O1
  misc_feature (1)..(242): NCBI GI NO: 25404887 NR Description: protein F24O1.4 [imported] - Arabidopsis thaliana
MVDGWAGCAGEILRLKPLIFYHLKNFFLVKTEKDREEAMDPGTFGFNTGEPQIQLYFLLGLVYAVVTPFLLPYIIVFFGLAYVVYRHQIINVYNQEYESAAAFWPDVHGRIIFALVISQLLLMGLLSTKEAANSTPLLITLPILTISFHLYCKGRYEPAFVKHPLQEAMMKDTLERAREPNFNLKEFLQNAYIHPVFKGDDDSDSDVMSENWEEQEPVLVQTKRQSRKNTPLPSKHSGSLSS

SEQ ID NO: 10311 - protein, 204 aa, Glycine max
  peptide (1)..(204): Ceres Seq. ID no. 15169145
  misc_feature (1)..(170): Pfam Name: Pfam Description:  Domain of unknown function DUF221
  misc_feature (1)..(203): NCBI GI NO: 15233476 NR Description: ERD4 protein-related [Arabidopsis thaliana]
  misc_feature (1)..(204): NCBI GI NO: 34913548 NR Description: OJ1029_F04.25
  misc_feature (1)..(203): NCBI GI NO: 15810533 NR Description: unknown protein [Arabidopsis thaliana]
  misc_feature (1)..(204): NCBI GI NO: 15234725 NR Description: ERD4 protein-related [Arabidopsis thaliana]
  misc_feature (1)..(190): NCBI GI NO: 15233100 NR Description: ERD4 protein-related [Arabidopsis thaliana]
  misc_feature (1)..(199): NCBI GI NO: 17381104 NR Description: unknown protein [Arabidopsis thaliana]
  misc_feature (1)..(199): NCBI GI NO: 22328665 NR Description: ERD4 protein-related [Arabidopsis thaliana]
  misc_feature (1)..(204): NCBI GI NO: 25402694 NR Description: hypothetical protein
  misc_feature (1)..(204): NCBI GI NO: 7486105 NR Description: hypothetical protein F24O1
  misc_feature (1)..(204): NCBI GI NO: 25404887 NR Description: protein F24O1.4 [imported] - Arabidopsis thaliana
MDPGTFGFNTGEPQIQLYFLLGLVYAVVTPFLLPYIIVFFGLAYVVYRHQIINVYNQEYESAAAFWPDVHGRIIFALVISQLLLMGLLSTKEAANSTPLLITLPILTISFHLYCKGRYEPAFVKHPLQEAMMKDTLERAREPNFNLKEFLQNAYIHPVFKGDDDSDSDVMSENWEEQEPVLVQTKRQSRKNTPLPSKHSGSLSS

SEQ ID NO: 10312 - DNA, 1129 bp, Glycine max
  misc_feature (1)..(1129): Ceres Seq. ID no. 14308766
gaatcgattactatactagtaataaattgtacaaaaaataaaaatataaataatataaatataaaaagaacaaacacaaattttatgtgattagtcgcggtatttaaaataaaaaatgaaagtagacaaataaaaaaggaaaggagatgtttgaataaaaataattccccttcaagttcttattttttgagaggacaggacaatatgaatgttttattatgctctatcaacacattaaaaagattatatgatatatctgctgtggaagtaggtcaacatttctattggcaaatagggagtttccaagtacatgcccaagtacttattacttcttgggttgtaattgctctcttattggtttcagccattctaattattcgaaatctgcaaaccattcccgctttcggtcagaatttctttgaatatgttcttgaattcattcgagacgtgagcaaaactcaaattggagaagaatatggtccgtgggttccttttattggaactttgtttctatttatttttgtttctaattggtcgggggctcttttaccttggaaaatcatacaattacctcacggggagttagctgcacccacaaatgatataaatactaccgttgctttagctttacttacatcaattgcatatttctatgcgggtctttcaaaaaaaggattagcttattttaataaatacatccaaccaaccccaatccttttaccgattaacatcttagaagatttcacaaaacccttatctcttagttttcgacttttcggaaatatattagctgatgaattagtagttgttgttcttgtttctttagtacctttagtagttcctatacctgtcatgttccttggattattcacaagcggtattcaagctctcatttttgctactttagctgcggcttatataggtgaatccatggaaggccatcattgaccagtttttatacaaaatagtccttttcgtttagcttgccgcacatatattgcggctcaatataatctacttagtaaacatctatatctatctacctatatctatatagatataggtagatagatatagatagatattcgattagcatatattagcatatattagtatatattggatattc

SEQ ID NO: 10313 - protein, 247 aa, Glycine max
  peptide (1)..(247): Ceres Seq. ID no. 14308767
  misc_feature (91)..(241): Pfam Name: Pfam Description:  ATP synthase A chain
  misc_feature (1)..(247): NCBI GI NO: 13518440 NR Description: ATP synthase CF0 A chain
  misc_feature (1)..(247): NCBI GI NO: 114659 NR Description: ATP synthase A chain precursor (Subunit IV)
  misc_feature (1)..(247): NCBI GI NO: 11465942 NR Description: ATP synthase CF0 A chain [Nicotiana tabacum]
  misc_feature (1)..(247): NCBI GI NO: 7525021 NR Description: ATP synthase CF0 A chain [Arabidopsis thaliana]
  misc_feature (1)..(247): NCBI GI NO: 11466781 NR Description: ATP synthase CF0 A chain
  misc_feature (1)..(247): NCBI GI NO: 32480831 NR Description: ATPase a subunit [Calycanthus fertilis var. ferax]
  misc_feature (1)..(247): NCBI GI NO: 37533318 NR Description: putative ATPase a subunit from chromosome 10chloroplast insertion
  misc_feature (1)..(247): NCBI GI NO: 14017566 NR Description: ATP synthase CF0 A chain [Triticum aestivum]
  misc_feature (1)..(247): NCBI GI NO: 11467186 NR Description: ATP synthase CF0 A chain [Zea mays]
  misc_feature (1)..(247): NCBI GI NO: 13518332 NR Description: ATP synthase CF0 A chain
MNVLLCSINTLKRLYDISAVEVGQHFYWQIGSFQVHAQVLITSWVVIALLLVSAILIIRNLQTIPAFGQNFFEYVLEFIRDVSKTQIGEEYGPWVPFIGTLFLFIFVSNWSGALLPWKIIQLPHGELAAPTNDINTTVALALLTSIAYFYAGLSKKGLAYFNKYIQPTPILLPINILEDFTKPLSLSFRLFGNILADELVVVVLVSLVPLVVPIPVMFLGLFTSGIQALIFATLAAAYIGESMEGHH

SEQ ID NO: 10314 - DNA, 1060 bp, Glycine max
  misc_feature (1)..(1060): Ceres Seq. ID no. 14308057
aaaaaactgagtgatgatggactacacctacgacaccaagcatcgcacaatggaacctcatgggataaggggtgtaatggacttggagcatcaaattcactacctggaaactgaggcttatagttctattttgaaggctttcattgctcaatctgatcttcttacttggggcaaagaggggcttatgactgagctgcgaaaggaactaaatgttacagatattgaacatggagaaatcctactgaaaataaattcagaccagttaattaagcagataagggagcagaggaaattggcatctcaagctaaggattatattaaacctagtgctcctgattgtgtttgtgcttcgatgggaaattcagtgataagaatgaaaactccttcctctgctgcattttatactcagaagaaaatgtcacactgccaagcttctctaatttccactcccattccttctccaatgcctccaaaatttaatgatgatccattgaatgctgagtttgcccacggaaatgtgcagcaatctatggaaatgttaaattgtaatgttcagttaccacctgttggaggaggaagaggactgaaaggaaagtatccattgcagaaggatttacacagatctcaccttgtcaagttaaagaaaagatctgatttaattcagcttcgtgcaacagatagggttatccacgatgttaagaagatgcttttcagtagagggaaacctgacccagttgatattgagagagcaaaaaggactcttacggaacaagaaatagctataactgaagcacttggtaaagtggctaatgtgttagagaggggtgatgcacctaatcagatgcaacgttatgaactctctaagaatactcctggaggacaagaaatgatgatacatgctaatttccgtgaactaattggtaatggtaggttgaataaacatggggttcattctgatctgtgcagttagggtgatgatttcatggcatagatatggagcttttaactctgatgaggctatacaacttatatagtgatattgctggattggtttagtgaa

SEQ ID NO: 10315 - protein, 318 aa, Glycine max
  peptide (1)..(318): Ceres Seq. ID no. 14308058
  misc_feature (24)..(96): Pfam Name: Pfam Description:  ENT domain
  misc_feature (187)..(292): NCBI GI NO: 11358228 NR Description: hypothetical protein T24H18
  misc_feature (23)..(128): NCBI GI NO: 11358228 NR Description: hypothetical protein T24H18
  misc_feature (23)..(150): NCBI GI NO: 38637206 NR Description: unknown protein
  misc_feature (183)..(278): NCBI GI NO: 38637206 NR Description: unknown protein
  misc_feature (23)..(128): NCBI GI NO: 30684221 NR Description: expressed protein [Arabidopsis thaliana]
  misc_feature (187)..(275): NCBI GI NO: 30684221 NR Description: expressed protein [Arabidopsis thaliana]
  misc_feature (13)..(153): NCBI GI NO: 19387275 NR Description: unknown [Oryza sativa (japonica cultivar-group)]
  misc_feature (24)..(93): NCBI GI NO: 15229958 NR Description: expressed protein [Arabidopsis thaliana]
  misc_feature (24)..(93): NCBI GI NO: 9294111 NR Description: emb|CAB88266
  misc_feature (23)..(152): NCBI GI NO: 15224878 NR Description: hypothetical protein [Arabidopsis thaliana]
MMDYTYDTKHRTMEPHGIRGVMDLEHQIHYLETEAYSSILKAFIAQSDLLTWGKEGLMTELRKELNVTDIEHGEILLKINSDQLIKQIREQRKLASQAKDYIKPSAPDCVCASMGNSVIRMKTPSSAAFYTQKKMSHCQASLISTPIPSPMPPKFNDDPLNAEFAHGNVQQSMEMLNCNVQLPPVGGGRGLKGKYPLQKDLHRSHLVKLKKRSDLIQLRATDRVIHDVKKMLFSRGKPDPVDIERAKRTLTEQEIAITEALGKVANVLERGDAPNQMQRYELSKNTPGGQEMMIHANFRELIGNGRLNKHGVHSDLCS

SEQ ID NO: 10316 - protein, 317 aa, Glycine max
  peptide (1)..(317): Ceres Seq. ID no. 14308059
  misc_feature (23)..(95): Pfam Name: Pfam Description:  ENT domain
  misc_feature (186)..(291): NCBI GI NO: 11358228 NR Description: hypothetical protein T24H18
  misc_feature (22)..(127): NCBI GI NO: 11358228 NR Description: hypothetical protein T24H18
  misc_feature (22)..(149): NCBI GI NO: 38637206 NR Description: unknown protein
  misc_feature (182)..(277): NCBI GI NO: 38637206 NR Description: unknown protein
  misc_feature (22)..(127): NCBI GI NO: 30684221 NR Description: expressed protein [Arabidopsis thaliana]
  misc_feature (186)..(274): NCBI GI NO: 30684221 NR Description: expressed protein [Arabidopsis thaliana]
  misc_feature (12)..(152): NCBI GI NO: 19387275 NR Description: unknown [Oryza sativa (japonica cultivar-group)]
  misc_feature (23)..(92): NCBI GI NO: 15229958 NR Description: expressed protein [Arabidopsis thaliana]
  misc_feature (23)..(92): NCBI GI NO: 9294111 NR Description: emb|CAB88266
  misc_feature (22)..(151): NCBI GI NO: 15224878 NR Description: hypothetical protein [Arabidopsis thaliana]
MDYTYDTKHRTMEPHGIRGVMDLEHQIHYLETEAYSSILKAFIAQSDLLTWGKEGLMTELRKELNVTDIEHGEILLKINSDQLIKQIREQRKLASQAKDYIKPSAPDCVCASMGNSVIRMKTPSSAAFYTQKKMSHCQASLISTPIPSPMPPKFNDDPLNAEFAHGNVQQSMEMLNCNVQLPPVGGGRGLKGKYPLQKDLHRSHLVKLKKRSDLIQLRATDRVIHDVKKMLFSRGKPDPVDIERAKRTLTEQEIAITEALGKVANVLERGDAPNQMQRYELSKNTPGGQEMMIHANFRELIGNGRLNKHGVHSDLCS

SEQ ID NO: 10317 - protein, 306 aa, Glycine max
  peptide (1)..(306): Ceres Seq. ID no. 14308060
  misc_feature (12)..(84): Pfam Name: Pfam Description:  ENT domain
  misc_feature (175)..(280): NCBI GI NO: 11358228 NR Description: hypothetical protein T24H18
  misc_feature (11)..(116): NCBI GI NO: 11358228 NR Description: hypothetical protein T24H18
  misc_feature (11)..(138): NCBI GI NO: 38637206 NR Description: unknown protein
  misc_feature (171)..(266): NCBI GI NO: 38637206 NR Description: unknown protein
  misc_feature (11)..(116): NCBI GI NO: 30684221 NR Description: expressed protein [Arabidopsis thaliana]
  misc_feature (175)..(263): NCBI GI NO: 30684221 NR Description: expressed protein [Arabidopsis thaliana]
  misc_feature (1)..(141): NCBI GI NO: 19387275 NR Description: unknown [Oryza sativa (japonica cultivar-group)]
  misc_feature (12)..(81): NCBI GI NO: 15229958 NR Description: expressed protein [Arabidopsis thaliana]
  misc_feature (12)..(81): NCBI GI NO: 9294111 NR Description: emb|CAB88266
  misc_feature (11)..(140): NCBI GI NO: 15224878 NR Description: hypothetical protein [Arabidopsis thaliana]
MEPHGIRGVMDLEHQIHYLETEAYSSILKAFIAQSDLLTWGKEGLMTELRKELNVTDIEHGEILLKINSDQLIKQIREQRKLASQAKDYIKPSAPDCVCASMGNSVIRMKTPSSAAFYTQKKMSHCQASLISTPIPSPMPPKFNDDPLNAEFAHGNVQQSMEMLNCNVQLPPVGGGRGLKGKYPLQKDLHRSHLVKLKKRSDLIQLRATDRVIHDVKKMLFSRGKPDPVDIERAKRTLTEQEIAITEALGKVANVLERGDAPNQMQRYELSKNTPGGQEMMIHANFRELIGNGRLNKHGVHSDLCS

SEQ ID NO: 10318 - DNA, 1553 bp, Glycine max
  misc_feature (1)..(1553): Ceres Seq. ID no. 14308723
aaattttcaagtcccagcctatggactctgcttcattcgctcatcctttgatttcccacgtcatcactagctcaagcttgcatcgttcctacggtattcatcacagtgcaagactaggcctatggaagaacaaagtctggaactcagcttgttgtgctgctggagtagaagacttgtttgacgatagtaatttgaagagaaatgagaatggttccctcttagtgatgccgaaggtgatccagattgtccctctaaaggctactcttccattgaacgagcgcttaatgcattacgccaaggcaagtttgtgattgtggtagatgatgaaaacggcgatattgaaggaaatcttatcatggctgcatctcttactagtcccaaggatattgccttcatgattaagcacggatcagggatcgtttctgttggcatgaaagaggaggatcttcaaagactgaacctccctttaatgtcaccagagactgaagatgaggactcttctgctcccaccttcactatcacagtggatgtgaaatctggaacttctacgggtgtatcagctgctgatagagcgaaaactgttcttgctctgtcatctcctgagtccaaatcagaggatttcagaaaaccgggtcatgtgtttcctcttaagtacagaaatggtggggttcttagaagagcaggtcacactgaggcctcactggacttagttgcactggctggcttgcccccaatttctgttctttcggctcttgttgatgaaaatgatggctctatgcaatctttgctcaatttaagaaagttagcatcggaatacaccttaccaattgtctcaataactgatttgataaggtatcggagaaagagagaaaaattggttgaaagaacctcagtttctcgcctgcctactaaatggggcctatttcaagcatattgctacagctcaaagttggatggaactgaacatgtggctgttgtaaagggagatatgggagatggacaagatgtgctagtacgagtacattcagaatgtttaactggggatatatttggatcagctcggtgtgactgtggcaaccagttagatttggcaatgcggttaatagaagaagcaggtaggggagtagttgtgtatcttcgaggtcatgagggaagaggcattggccttggtcacaaacttaaagcgtataatttgcaggatcaaggtcatgacacggtccaagcaaacatagaactcggcttagctgttgatgctcgtgaatatgggattggtgcacagattttgagggatataggagttcgaacaatgcggcttatgacaaacaacccagcaaagtttgttggtcttaaaggatatggtttggcagtggtagggcgagttcctgtgttgacaccaatcacagaggaaaacaagagatacctggaaacaaaaaggaccaaaatgggtcatatttatggctctgatttacaaggatcattacctggattcaacggttctactgtaaataacggagactcactggagaacacatagtctacacaaaaacttacag

SEQ ID NO: 10319 - protein, 392 aa, Glycine max
  peptide (1)..(392): Ceres Seq. ID no. 14308724
  misc_feature (173)..(344): Pfam Name: Pfam Description:  GTP cyclohydrolase II
  misc_feature (1)..(370): NCBI GI NO: 18424277 NR Description: GTP cyclohydrolase II / 3
  misc_feature (1)..(376): NCBI GI NO: 29367375 NR Description: GTP cyclohydrolase II/3
  misc_feature (1)..(375): NCBI GI NO: 27735197 NR Description: Riboflavin biosynthesis protein ribA
  misc_feature (1)..(375): NCBI GI NO: 30697989 NR Description: GTP cyclohydrolase II
  misc_feature (1)..(392): NCBI GI NO: 7436011 NR Description: GTP cyclohydrolase II (EC 3
  misc_feature (1)..(346): NCBI GI NO: 25290324 NR Description: probable GTP cyclohydrolase
  misc_feature (1)..(346): NCBI GI NO: 30681714 NR Description: GTP cyclohydrolase -related [Arabidopsis thaliana]
  misc_feature (1)..(365): NCBI GI NO: 23018011 NR Description: hypothetical protein [Thermobifida fusca]
  misc_feature (1)..(381): NCBI GI NO: 15608553 NR Description: ribA2 [Mycobacterium tuberculosis H37Rv]
  misc_feature (1)..(381): NCBI GI NO: 15827210 NR Description: putative GTP cyclohydrolase II/3
MAASLTSPKDIAFMIKHGSGIVSVGMKEEDLQRLNLPLMSPETEDEDSSAPTFTITVDVKSGTSTGVSAADRAKTVLALSSPESKSEDFRKPGHVFPLKYRNGGVLRRAGHTEASLDLVALAGLPPISVLSALVDENDGSMQSLLNLRKLASEYTLPIVSITDLIRYRRKREKLVERTSVSRLPTKWGLFQAYCYSSKLDGTEHVAVVKGDMGDGQDVLVRVHSECLTGDIFGSARCDCGNQLDLAMRLIEEAGRGVVVYLRGHEGRGIGLGHKLKAYNLQDQGHDTVQANIELGLAVDAREYGIGAQILRDIGVRTMRLMTNNPAKFVGLKGYGLAVVGRVPVLTPITEENKRYLETKRTKMGHIYGSDLQGSLPGFNGSTVNNGDSLENT

SEQ ID NO: 10320 - protein, 379 aa, Glycine max
  peptide (1)..(379): Ceres Seq. ID no. 14308725
  misc_feature (160)..(331): Pfam Name: Pfam Description:  GTP cyclohydrolase II
  misc_feature (1)..(357): NCBI GI NO: 18424277 NR Description: GTP cyclohydrolase II / 3
  misc_feature (1)..(363): NCBI GI NO: 29367375 NR Description: GTP cyclohydrolase II/3
  misc_feature (1)..(362): NCBI GI NO: 27735197 NR Description: Riboflavin biosynthesis protein ribA
  misc_feature (1)..(362): NCBI GI NO: 30697989 NR Description: GTP cyclohydrolase II
  misc_feature (1)..(379): NCBI GI NO: 7436011 NR Description: GTP cyclohydrolase II (EC 3
  misc_feature (1)..(333): NCBI GI NO: 25290324 NR Description: probable GTP cyclohydrolase
  misc_feature (1)..(333): NCBI GI NO: 30681714 NR Description: GTP cyclohydrolase -related [Arabidopsis thaliana]
  misc_feature (1)..(352): NCBI GI NO: 23018011 NR Description: hypothetical protein [Thermobifida fusca]
  misc_feature (1)..(368): NCBI GI NO: 15608553 NR Description: ribA2 [Mycobacterium tuberculosis H37Rv]
  misc_feature (1)..(368): NCBI GI NO: 15827210 NR Description: putative GTP cyclohydrolase II/3
MIKHGSGIVSVGMKEEDLQRLNLPLMSPETEDEDSSAPTFTITVDVKSGTSTGVSAADRAKTVLALSSPESKSEDFRKPGHVFPLKYRNGGVLRRAGHTEASLDLVALAGLPPISVLSALVDENDGSMQSLLNLRKLASEYTLPIVSITDLIRYRRKREKLVERTSVSRLPTKWGLFQAYCYSSKLDGTEHVAVVKGDMGDGQDVLVRVHSECLTGDIFGSARCDCGNQLDLAMRLIEEAGRGVVVYLRGHEGRGIGLGHKLKAYNLQDQGHDTVQANIELGLAVDAREYGIGAQILRDIGVRTMRLMTNNPAKFVGLKGYGLAVVGRVPVLTPITEENKRYLETKRTKMGHIYGSDLQGSLPGFNGSTVNNGDSLENT

SEQ ID NO: 10321 - protein, 367 aa, Glycine max
  peptide (1)..(367): Ceres Seq. ID no. 14308726
  misc_feature (148)..(319): Pfam Name: Pfam Description:  GTP cyclohydrolase II
  misc_feature (1)..(345): NCBI GI NO: 18424277 NR Description: GTP cyclohydrolase II / 3
  misc_feature (1)..(351): NCBI GI NO: 29367375 NR Description: GTP cyclohydrolase II/3
  misc_feature (1)..(350): NCBI GI NO: 27735197 NR Description: Riboflavin biosynthesis protein ribA
  misc_feature (1)..(350): NCBI GI NO: 30697989 NR Description: GTP cyclohydrolase II
  misc_feature (1)..(367): NCBI GI NO: 7436011 NR Description: GTP cyclohydrolase II (EC 3
  misc_feature (1)..(321): NCBI GI NO: 25290324 NR Description: probable GTP cyclohydrolase
  misc_feature (1)..(321): NCBI GI NO: 30681714 NR Description: GTP cyclohydrolase -related [Arabidopsis thaliana]
  misc_feature (1)..(340): NCBI GI NO: 23018011 NR Description: hypothetical protein [Thermobifida fusca]
  misc_feature (1)..(356): NCBI GI NO: 15608553 NR Description: ribA2 [Mycobacterium tuberculosis H37Rv]
  misc_feature (1)..(356): NCBI GI NO: 15827210 NR Description: putative GTP cyclohydrolase II/3
MKEEDLQRLNLPLMSPETEDEDSSAPTFTITVDVKSGTSTGVSAADRAKTVLALSSPESKSEDFRKPGHVFPLKYRNGGVLRRAGHTEASLDLVALAGLPPISVLSALVDENDGSMQSLLNLRKLASEYTLPIVSITDLIRYRRKREKLVERTSVSRLPTKWGLFQAYCYSSKLDGTEHVAVVKGDMGDGQDVLVRVHSECLTGDIFGSARCDCGNQLDLAMRLIEEAGRGVVVYLRGHEGRGIGLGHKLKAYNLQDQGHDTVQANIELGLAVDAREYGIGAQILRDIGVRTMRLMTNNPAKFVGLKGYGLAVVGRVPVLTPITEENKRYLETKRTKMGHIYGSDLQGSLPGFNGSTVNNGDSLENT

SEQ ID NO: 10322 - DNA, 1215 bp, Glycine max
  misc_feature (1)..(1215): Ceres Seq. ID no. 15169278
ggagtgcaataattctgattctaccgtcatcaactaggagaagaagcttcattttctgcaaaatggatccctctgcgccattgctatttaaccacctcaagggtgcagacccgttcttcctgctggcgggtcctaatgtgattgaatcggaggagcacattctccggatggctaagaacatcaagagtgttgcatctgaagttggaataccattggttttcaagtcaagctttgacaaagctaaccgaacatcatcaaaatcatttcgtggcccggggatggctgagggattgaagatactcgagaaggtaaaaatagcttatgacattcctatagtgacagatgtgcatgagaccatccagtgtgaagcagttggcagagttgcagatatcattcagattccagcattcttgtgtcgccaaacagatcttctagttgcagcagccaaaactgggaaaattatcaacattaagaagggccagttctgtgctccttctgtgatgacaaattcagctgaaaaggttcggttagctggaaatcctaatgtgatggtttgtgagagaggaacaatgtttggatacaatgatttgattgttgatccacgtaacttggagtggatgagagaagccaattgtcccattgtagctgatataactcactcactacaacagcctgctggaaagatgttggatgggggaggtgttgcaagtggaggtcttcgagaactaataccttgcattgcaaggacagcagttgccgttggagtggatgggatcttcatggaggtgcatgatgatccactgaatgcacctgttgatggcccaacacagtggcctttgcgccactttaaggagctacttgaagagcttgtagccattgctagggtaagcaaagggaagcaacggttcaacattgatctcacaccatttcgtgaataaaaaaaatggtgatggttttcagttattctgaatgtaatttctttaccattggtcttttaagattgttcaagggtgaatgcaaaactgtctcctctcacaagttccttataaggagagtttatcttaaaaatattatttgatgatcaatgcatgttacaatgaagtggtaacactataccaactcaagtttgtcacatatcctgtgtagccttaatcatgtcagttactaaagttgaggcaattaattgaatattaagatataggtagattaattatt

SEQ ID NO: 10323 - protein, 311 aa, Glycine max
  peptide (1)..(311): Ceres Seq. ID no. 15169279
  misc_feature (21)..(311): NCBI GI NO: 6647535 NR Description: 2-dehydro-3-deoxyphosphooctonate aldolase
  misc_feature (27)..(311): NCBI GI NO: 15219400 NR Description: 2-dehydro-3-deoxyphosphooctonate aldolase -related
  misc_feature (27)..(311): NCBI GI NO: 21360537 NR Description: AT5g09730/F17I14_80 [Arabidopsis thaliana]
  misc_feature (27)..(311): NCBI GI NO: 13620976 NR Description: 2-dehydro-3-deoxyphosphooctonate aldolase
  misc_feature (21)..(311): NCBI GI NO: 15219214 NR Description: 3-deoxy-D-manno-2- octulosonate-8-phosphate synthase-related
  misc_feature (21)..(311): NCBI GI NO: 25291179 NR Description: hypothetical protein F3O9.14
  misc_feature (24)..(309): NCBI GI NO: 13509333 NR Description: 3-desoxy-D-manno octulosonic acid-8-phosphatesynthase
  misc_feature (21)..(311): NCBI GI NO: 29367487 NR Description: putative 2-dehydro-3-deoxyphosphooctonate aldolase
  misc_feature (75)..(257): NCBI GI NO: 32169731 NR Description: 3-deoxy-D-manno-2-octulosonic acid-8-phosphate
  misc_feature (30)..(297): NCBI GI NO: 22999110 NR Description: hypothetical protein [Magnetococcus sp. MC-1]
SAIILILPSSTRRRSFIFCKMDPSAPLLFNHLKGADPFFLLAGPNVIESEEHILRMAKNIKSVASEVGIPLVFKSSFDKANRTSSKSFRGPGMAEGLKILEKVKIAYDIPIVTDVHETIQCEAVGRVADIIQIPAFLCRQTDLLVAAAKTGKIINIKKGQFCAPSVMTNSAEKVRLAGNPNVMVCERGTMFGYNDLIVDPRNLEWMREANCPIVADITHSLQQPAGKMLDGGGVASGGLRELIPCIARTAVAVGVDGIFMEVHDDPLNAPVDGPTQWPLRHFKELLEELVAIARVSKGKQRFNIDLTPFRE

SEQ ID NO: 10324 - protein, 291 aa, Glycine max
  peptide (1)..(291): Ceres Seq. ID no. 15169280
  misc_feature (1)..(291): NCBI GI NO: 6647535 NR Description: 2-dehydro-3-deoxyphosphooctonate aldolase
  misc_feature (7)..(291): NCBI GI NO: 15219400 NR Description: 2-dehydro-3-deoxyphosphooctonate aldolase -related
  misc_feature (7)..(291): NCBI GI NO: 21360537 NR Description: AT5g09730/F17I14_80 [Arabidopsis thaliana]
  misc_feature (7)..(291): NCBI GI NO: 13620976 NR Description: 2-dehydro-3-deoxyphosphooctonate aldolase
  misc_feature (1)..(291): NCBI GI NO: 15219214 NR Description: 3-deoxy-D-manno-2- octulosonate-8-phosphate synthase-related
  misc_feature (1)..(291): NCBI GI NO: 25291179 NR Description: hypothetical protein F3O9.14
  misc_feature (4)..(289): NCBI GI NO: 13509333 NR Description: 3-desoxy-D-manno octulosonic acid-8-phosphatesynthase
  misc_feature (1)..(291): NCBI GI NO: 29367487 NR Description: putative 2-dehydro-3-deoxyphosphooctonate aldolase
  misc_feature (55)..(237): NCBI GI NO: 32169731 NR Description: 3-deoxy-D-manno-2-octulosonic acid-8-phosphate
  misc_feature (10)..(277): NCBI GI NO: 22999110 NR Description: hypothetical protein [Magnetococcus sp. MC-1]
MDPSAPLLFNHLKGADPFFLLAGPNVIESEEHILRMAKNIKSVASEVGIPLVFKSSFDKANRTSSKSFRGPGMAEGLKILEKVKIAYDIPIVTDVHETIQCEAVGRVADIIQIPAFLCRQTDLLVAAAKTGKIINIKKGQFCAPSVMTNSAEKVRLAGNPNVMVCERGTMFGYNDLIVDPRNLEWMREANCPIVADITHSLQQPAGKMLDGGGVASGGLRELIPCIARTAVAVGVDGIFMEVHDDPLNAPVDGPTQWPLRHFKELLEELVAIARVSKGKQRFNIDLTPFRE

SEQ ID NO: 10325 - protein, 256 aa, Glycine max
  peptide (1)..(256): Ceres Seq. ID no. 15169281
  misc_feature (1)..(256): NCBI GI NO: 6647535 NR Description: 2-dehydro-3-deoxyphosphooctonate aldolase
  misc_feature (1)..(256): NCBI GI NO: 15219400 NR Description: 2-dehydro-3-deoxyphosphooctonate aldolase -related
  misc_feature (1)..(256): NCBI GI NO: 21360537 NR Description: AT5g09730/F17I14_80 [Arabidopsis thaliana]
  misc_feature (1)..(256): NCBI GI NO: 13620976 NR Description: 2-dehydro-3-deoxyphosphooctonate aldolase
  misc_feature (1)..(256): NCBI GI NO: 15219214 NR Description: 3-deoxy-D-manno-2- octulosonate-8-phosphate synthase-related
  misc_feature (1)..(256): NCBI GI NO: 25291179 NR Description: hypothetical protein F3O9.14
  misc_feature (1)..(254): NCBI GI NO: 13509333 NR Description: 3-desoxy-D-manno octulosonic acid-8-phosphatesynthase
  misc_feature (1)..(256): NCBI GI NO: 29367487 NR Description: putative 2-dehydro-3-deoxyphosphooctonate aldolase
  misc_feature (20)..(202): NCBI GI NO: 32169731 NR Description: 3-deoxy-D-manno-2-octulosonic acid-8-phosphate
  misc_feature (1)..(242): NCBI GI NO: 22999110 NR Description: hypothetical protein [Magnetococcus sp. MC-1]
MAKNIKSVASEVGIPLVFKSSFDKANRTSSKSFRGPGMAEGLKILEKVKIAYDIPIVTDVHETIQCEAVGRVADIIQIPAFLCRQTDLLVAAAKTGKIINIKKGQFCAPSVMTNSAEKVRLAGNPNVMVCERGTMFGYNDLIVDPRNLEWMREANCPIVADITHSLQQPAGKMLDGGGVASGGLRELIPCIARTAVAVGVDGIFMEVHDDPLNAPVDGPTQWPLRHFKELLEELVAIARVSKGKQRFNIDLTPFRE

SEQ ID NO: 10326 - DNA, 1392 bp, Glycine max
  misc_feature (1)..(1392): Ceres Seq. ID no. 14313413
acggtctctccatacaccgccaccacatagaaccactgatcgacacgtttgcgccttcattaagctgaggaatagttgtaacttagggacaatgacgtcttcagtggttgaaggtggacgcgacgaggggaaacacgaaccctcggatttcatcacggaaaccatgaatctgacgtctccaaacctttcacttcttcccagtgaaactgaaacattcttgagcgcagcaatttccctcaaggacaaggtggtggaggagacttggaaccggagagatcaagtggttgatccgacggtgtacacgggtctgttgggcaccgccttcacttgcttgcggtcgtaccaggttaccggttgccggaacgacttgatattatgcagcgatatcattgacacgtgtgtcaccgctgcacgtgcctccctcaggcacgtgacttttttgtgtggtagaggaggcgtttatgcgcttggtgctgtcgttgccaattacatggaggaccttccaaagcgtgacctgtttttgggtctattctttgaggtggcaaaagagagagccctaccagttggaccagaggaaggtggttttggaatgtcatatgatcttctgtatggacgagctggattcttatggggtgcattgtttgtgaacaagcacctaggagatgatgcagtgcccaaagacattttgatgcctattattgatgcagtgttggcgggtggtagagcaggagcatctgatgttgaagactgtccattgatgtatagatggcatggaactaggtacttgggtgcagcaaatggccttgctggtatccttcatgtgctgctacattttccacttcctagagaggatgctgaggatgtcaagggaactttgaggtacctcatgagtaagcgtttccctcacagtggaaactacccctccagtgaagggaatccgagggataagttagtgcaatggggtcatggtgcaactggcatggccatcacattgtctaaagcagcacaggtatttccaaatgacagagaactacgagatgctgcaatagaagcaggagaagttgtatggaagagtggattggtgaagaaggtgggacttgcagatggggtatctggaaatgcctatgccttcctttccctctacagactcactaaagagagcatatacgaagagagagcaaagtcattcgcttccttcatgtatgataatgcaaaatctctggcttctgccaatggctattcactttcccaaggacttgctgggacagtatgcctctggtttgatctacttgcacccgacagctctaggttcccaggttatgaactatagatggttccagtagagatggaaaatgttaggtagacaccaatcataagtgatatgatcttgac

SEQ ID NO: 10327 - protein, 442 aa, Glycine max
  peptide (1)..(442): Ceres Seq. ID no. 14313414
  misc_feature (79)..(442): Pfam Name: Pfam Description:  Lanthionine synthetase C-like protein
  misc_feature (31)..(442): NCBI GI NO: 8489877 NR Description: putative 7-transmembrane G-protein-coupled receptor
  misc_feature (57)..(442): NCBI GI NO: 15238395 NR Description: G protein-coupled receptor-related protein
  misc_feature (57)..(442): NCBI GI NO: 15451140 NR Description: G protein-coupled receptor-like protein
  misc_feature (49)..(442): NCBI GI NO: 37535720 NR Description: putative lanthionine synthetase
  misc_feature (51)..(442): NCBI GI NO: 15219126 NR Description: G protein-coupled receptor -related
  misc_feature (62)..(442): NCBI GI NO: 21742091 NR Description: OSJNBa0074L08.13
  misc_feature (49)..(442): NCBI GI NO: 30681129 NR Description: expressed protein [Arabidopsis thaliana]
  misc_feature (79)..(442): NCBI GI NO: 25411993 NR Description: hypothetical protein At2g20770
  misc_feature (60)..(442): NCBI GI NO: 19526936 NR Description: RIKEN cDNA 1700003F10 [Mus musculus]
  misc_feature (96)..(442): NCBI GI NO: 8923911 NR Description: LanC lantibiotic synthetase component C-like 2
RSLHTPPPHRTTDRHVCAFIKLRNSCNLGTMTSSVVEGGRDEGKHEPSDFITETMNLTSPNLSLLPSETETFLSAAISLKDKVVEETWNRRDQVVDPTVYTGLLGTAFTCLRSYQVTGCRNDLILCSDIIDTCVTAARASLRHVTFLCGRGGVYALGAVVANYMEDLPKRDLFLGLFFEVAKERALPVGPEEGGFGMSYDLLYGRAGFLWGALFVNKHLGDDAVPKDILMPIIDAVLAGGRAGASDVEDCPLMYRWHGTRYLGAANGLAGILHVLLHFPLPREDAEDVKGTLRYLMSKRFPHSGNYPSSEGNPRDKLVQWGHGATGMAITLSKAAQVFPNDRELRDAAIEAGEVVWKSGLVKKVGLADGVSGNAYAFLSLYRLTKESIYEERAKSFASFMYDNAKSLASANGYSLSQGLAGTVCLWFDLLAPDSSRFPGYEL

SEQ ID NO: 10328 - protein, 412 aa, Glycine max
  peptide (1)..(412): Ceres Seq. ID no. 14313415
  misc_feature (49)..(412): Pfam Name: Pfam Description:  Lanthionine synthetase C-like protein
  misc_feature (1)..(412): NCBI GI NO: 8489877 NR Description: putative 7-transmembrane G-protein-coupled receptor
  misc_feature (27)..(412): NCBI GI NO: 15238395 NR Description: G protein-coupled receptor-related protein
  misc_feature (27)..(412): NCBI GI NO: 15451140 NR Description: G protein-coupled receptor-like protein
  misc_feature (19)..(412): NCBI GI NO: 37535720 NR Description: putative lanthionine synthetase
  misc_feature (21)..(412): NCBI GI NO: 15219126 NR Description: G protein-coupled receptor -related
  misc_feature (32)..(412): NCBI GI NO: 21742091 NR Description: OSJNBa0074L08.13
  misc_feature (19)..(412): NCBI GI NO: 30681129 NR Description: expressed protein [Arabidopsis thaliana]
  misc_feature (49)..(412): NCBI GI NO: 25411993 NR Description: hypothetical protein At2g20770
  misc_feature (30)..(412): NCBI GI NO: 19526936 NR Description: RIKEN cDNA 1700003F10 [Mus musculus]
  misc_feature (66)..(412): NCBI GI NO: 8923911 NR Description: LanC lantibiotic synthetase component C-like 2
MTSSVVEGGRDEGKHEPSDFITETMNLTSPNLSLLPSETETFLSAAISLKDKVVEETWNRRDQVVDPTVYTGLLGTAFTCLRSYQVTGCRNDLILCSDIIDTCVTAARASLRHVTFLCGRGGVYALGAVVANYMEDLPKRDLFLGLFFEVAKERALPVGPEEGGFGMSYDLLYGRAGFLWGALFVNKHLGDDAVPKDILMPIIDAVLAGGRAGASDVEDCPLMYRWHGTRYLGAANGLAGILHVLLHFPLPREDAEDVKGTLRYLMSKRFPHSGNYPSSEGNPRDKLVQWGHGATGMAITLSKAAQVFPNDRELRDAAIEAGEVVWKSGLVKKVGLADGVSGNAYAFLSLYRLTKESIYEERAKSFASFMYDNAKSLASANGYSLSQGLAGTVCLWFDLLAPDSSRFPGYEL

SEQ ID NO: 10329 - protein, 388 aa, Glycine max
  peptide (1)..(388): Ceres Seq. ID no. 14313416
  misc_feature (25)..(388): Pfam Name: Pfam Description:  Lanthionine synthetase C-like protein
  misc_feature (1)..(388): NCBI GI NO: 8489877 NR Description: putative 7-transmembrane G-protein-coupled receptor
  misc_feature (3)..(388): NCBI GI NO: 15238395 NR Description: G protein-coupled receptor-related protein
  misc_feature (3)..(388): NCBI GI NO: 15451140 NR Description: G protein-coupled receptor-like protein
  misc_feature (1)..(388): NCBI GI NO: 37535720 NR Description: putative lanthionine synthetase
  misc_feature (1)..(388): NCBI GI NO: 15219126 NR Description: G protein-coupled receptor -related
  misc_feature (8)..(388): NCBI GI NO: 21742091 NR Description: OSJNBa0074L08.13
  misc_feature (1)..(388): NCBI GI NO: 30681129 NR Description: expressed protein [Arabidopsis thaliana]
  misc_feature (25)..(388): NCBI GI NO: 25411993 NR Description: hypothetical protein At2g20770
  misc_feature (6)..(388): NCBI GI NO: 19526936 NR Description: RIKEN cDNA 1700003F10 [Mus musculus]
  misc_feature (42)..(388): NCBI GI NO: 8923911 NR Description: LanC lantibiotic synthetase component C-like 2
MNLTSPNLSLLPSETETFLSAAISLKDKVVEETWNRRDQVVDPTVYTGLLGTAFTCLRSYQVTGCRNDLILCSDIIDTCVTAARASLRHVTFLCGRGGVYALGAVVANYMEDLPKRDLFLGLFFEVAKERALPVGPEEGGFGMSYDLLYGRAGFLWGALFVNKHLGDDAVPKDILMPIIDAVLAGGRAGASDVEDCPLMYRWHGTRYLGAANGLAGILHVLLHFPLPREDAEDVKGTLRYLMSKRFPHSGNYPSSEGNPRDKLVQWGHGATGMAITLSKAAQVFPNDRELRDAAIEAGEVVWKSGLVKKVGLADGVSGNAYAFLSLYRLTKESIYEERAKSFASFMYDNAKSLASANGYSLSQGLAGTVCLWFDLLAPDSSRFPGYEL

SEQ ID NO: 10330 - DNA, 1716 bp, Glycine max
  misc_feature (1)..(1716): Ceres Seq. ID no. 14310588
tatatatatatatataatccaggtccaagataaagatggagagaaaagatggaagcaagttgatgtaaacttgacggaccatgtcaacatccccacattccccgaaggaaaaacagcggaatcttatgataaatattttcatgattatttatcaagcatagcaatggagcaattaccacaaagcagaccattatgggatattcacataatcaattaccttacaagtgatgcatccagcactataatatttaagcttcaccatgcacttggagatggctattctctcatgggtgcttttctttcttgtcttcaacgagccgatgacccttctcttcccttgtcctttccttctctcaaacaatctaaacaagaaccttcttccactaaaagcttttgcagaaaattttcttggatgtgttcctctgccttcaacactgtctcagattttggatggagtgtattgaagagtagcatcattagtgatgataaaacaccgataaggtttggagacgaaggagccgactatcaaccaatttccatatcaagcatgacattctccattgaccacatcagggacatcaaatcaaggctcggagtgacaataaatgatgtggtcactggaattgtcttctatggaactagattatatatgcaagatatggactccaaatcaaagaccgcacactccacagcattggtattactgaatacgagaaacgttgaaggttaccaatcgatcaatgatatgctaaatactaaagccacgggtccatgggggaacagaattaccttcttgcatgttccaataccgaaattaaatgaaacaagaactacaaaccctcttgaatttatttgggacacacataacataatcaagaggaagaaacaatctctaggagttgtactcaccgggacacttttgaagatagagggcaaattgaggggacaagaggcagtagctaaacgcattcgtggcacattgacaaaatcaagtgcagtgatttcaaacttggctggaccaatacaacaaatggctttagctaaccatcctgtgaaaggcttgtatttcacattggccggtggacctgaagtatgtattctgaatccctttcatttttcaattaatcatcaattcaacatgtgagaatctgaattgaggtgggtggggtgaaataaggcaaaaaaaaaattataatcaatttataatagcgaaaattggaatggtcattttaagaaggctttaatttctaatttattttgcttaaggaaaaaagtttttaacccaacagatctctctttgttcctttacttaactagttgcagtgatacataagaaatatttaaacatcatttgattgtatttgcagagtctagtcatttcagttatgagctatatgggagtcctaagtgttaccctcaaaacggaaaaagacttcatagacgaacataaattgaagttgtgcatgcaaagtgcatttgagataattctccaagcagctatggaaattcctcaggaaaccaaaccttagtatttggtttggatgattggaacagcttattacgaaaattagagagagagagagatatggagaatttaccatattatttctccggatttatcaacgccttaagtaattgcttgtctatagtatatttgtcgtatgtttggaaagatcaatacacgaggcccaccttattttggatctgtttaggcct

SEQ ID NO: 10331 - protein, 380 aa, Glycine max
  peptide (1)..(380): Ceres Seq. ID no. 14310589
  misc_feature (8)..(217): Pfam Name: Pfam Description:  Condensation domain
  misc_feature (6)..(375): NCBI GI NO: 34909900 NR Description: P0665A11.10
  misc_feature (12)..(368): NCBI GI NO: 9759186 NR Description: emb|CAB66399
  misc_feature (12)..(368): NCBI GI NO: 30696326 NR Description: expressed protein [Arabidopsis thaliana]
  misc_feature (12)..(368): NCBI GI NO: 26451548 NR Description: unknown protein [Arabidopsis thaliana]
  misc_feature (17)..(368): NCBI GI NO: 34911182 NR Description: P0019E03.6
  misc_feature (11)..(368): NCBI GI NO: 30687731 NR Description: hypothetical protein [Arabidopsis thaliana]
  misc_feature (10)..(368): NCBI GI NO: 15242259 NR Description: hypothetical protein [Arabidopsis thaliana]
  misc_feature (13)..(366): NCBI GI NO: 15218351 NR Description: expressed protein [Arabidopsis thaliana]
  misc_feature (11)..(372): NCBI GI NO: 18421632 NR Description: expressed protein [Arabidopsis thaliana]
  misc_feature (11)..(372): NCBI GI NO: 9758716 NR Description: emb|CAB66398
IYIYIIQVQDKDGEKRWKQVDVNLTDHVNIPTFPEGKTAESYDKYFHDYLSSIAMEQLPQSRPLWDIHIINYLTSDASSTIIFKLHHALGDGYSLMGAFLSCLQRADDPSLPLSFPSLKQSKQEPSSTKSFCRKFSWMCSSAFNTVSDFGWSVLKSSIISDDKTPIRFGDEGADYQPISISSMTFSIDHIRDIKSRLGVTINDVVTGIVFYGTRLYMQDMDSKSKTAHSTALVLLNTRNVEGYQSINDMLNTKATGPWGNRITFLHVPIPKLNETRTTNPLEFIWDTHNIIKRKKQSLGVVLTGTLLKIEGKLRGQEAVAKRIRGTLTKSSAVISNLAGPIQQMALANHPVKGLYFTLAGGPEVCILNPFHFSINHQFNM

SEQ ID NO: 10332 - protein, 326 aa, Glycine max
  peptide (1)..(326): Ceres Seq. ID no. 14310590
  misc_feature (1)..(163): Pfam Name: Pfam Description:  Condensation domain
  misc_feature (1)..(321): NCBI GI NO: 34909900 NR Description: P0665A11.10
  misc_feature (1)..(314): NCBI GI NO: 9759186 NR Description: emb|CAB66399
  misc_feature (1)..(314): NCBI GI NO: 30696326 NR Description: expressed protein [Arabidopsis thaliana]
  misc_feature (1)..(314): NCBI GI NO: 26451548 NR Description: unknown protein [Arabidopsis thaliana]
  misc_feature (1)..(314): NCBI GI NO: 34911182 NR Description: P0019E03.6
  misc_feature (1)..(314): NCBI GI NO: 30687731 NR Description: hypothetical protein [Arabidopsis thaliana]
  misc_feature (1)..(314): NCBI GI NO: 15242259 NR Description: hypothetical protein [Arabidopsis thaliana]
  misc_feature (1)..(312): NCBI GI NO: 15218351 NR Description: expressed protein [Arabidopsis thaliana]
  misc_feature (1)..(318): NCBI GI NO: 18421632 NR Description: expressed protein [Arabidopsis thaliana]
  misc_feature (1)..(318): NCBI GI NO: 9758716 NR Description: emb|CAB66398
MEQLPQSRPLWDIHIINYLTSDASSTIIFKLHHALGDGYSLMGAFLSCLQRADDPSLPLSFPSLKQSKQEPSSTKSFCRKFSWMCSSAFNTVSDFGWSVLKSSIISDDKTPIRFGDEGADYQPISISSMTFSIDHIRDIKSRLGVTINDVVTGIVFYGTRLYMQDMDSKSKTAHSTALVLLNTRNVEGYQSINDMLNTKATGPWGNRITFLHVPIPKLNETRTTNPLEFIWDTHNIIKRKKQSLGVVLTGTLLKIEGKLRGQEAVAKRIRGTLTKSSAVISNLAGPIQQMALANHPVKGLYFTLAGGPEVCILNPFHFSINHQFNM

SEQ ID NO: 10333 - protein, 285 aa, Glycine max
  peptide (1)..(285): Ceres Seq. ID no. 14310591
  misc_feature (1)..(122): Pfam Name: Pfam Description:  Condensation domain
  misc_feature (1)..(280): NCBI GI NO: 34909900 NR Description: P0665A11.10
  misc_feature (1)..(273): NCBI GI NO: 9759186 NR Description: emb|CAB66399
  misc_feature (1)..(273): NCBI GI NO: 30696326 NR Description: expressed protein [Arabidopsis thaliana]
  misc_feature (1)..(273): NCBI GI NO: 26451548 NR Description: unknown protein [Arabidopsis thaliana]
  misc_feature (1)..(273): NCBI GI NO: 34911182 NR Description: P0019E03.6
  misc_feature (1)..(273): NCBI GI NO: 30687731 NR Description: hypothetical protein [Arabidopsis thaliana]
  misc_feature (1)..(273): NCBI GI NO: 15242259 NR Description: hypothetical protein [Arabidopsis thaliana]
  misc_feature (1)..(271): NCBI GI NO: 15218351 NR Description: expressed protein [Arabidopsis thaliana]
  misc_feature (1)..(277): NCBI GI NO: 18421632 NR Description: expressed protein [Arabidopsis thaliana]
  misc_feature (1)..(277): NCBI GI NO: 9758716 NR Description: emb|CAB66398
MGAFLSCLQRADDPSLPLSFPSLKQSKQEPSSTKSFCRKFSWMCSSAFNTVSDFGWSVLKSSIISDDKTPIRFGDEGADYQPISISSMTFSIDHIRDIKSRLGVTINDVVTGIVFYGTRLYMQDMDSKSKTAHSTALVLLNTRNVEGYQSINDMLNTKATGPWGNRITFLHVPIPKLNETRTTNPLEFIWDTHNIIKRKKQSLGVVLTGTLLKIEGKLRGQEAVAKRIRGTLTKSSAVISNLAGPIQQMALANHPVKGLYFTLAGGPEVCILNPFHFSINHQFNM

SEQ ID NO: 10334 - DNA, 1141 bp, Glycine max
  misc_feature (1)..(1141): Ceres Seq. ID no. 14313397
gagccatacaaaaggtctcaaaaactgcggttcctgagtagagaggtttgtttgttgtcgtttgagaggattcgatcaagcgaatcttgttttcgaagctcaaattgaattgaacagtaaattcctggaagggaacgaagcagaaaatgggagacacaaaccacgcgtccaccgtcgatgacgatttgcttctcaaaaacttcttcgccgaagttagcgaagttgaaagagacaacgaagtgcttaggattctctcttgttttaagttgaatccatttgagtatctaaacctaccatttgattcatcaattgatgatgtgaaaaagcagtaccgcaagttatcattaatggttcacccggataaatgtaagcatccacaagcaaaggaggcttttggagcattagcgaaagctcaacagttactaatggatcaaaatgaaagagattatattcttagccaagttaattcagctaaagaagaacttagagcaaagaggaagaagcagctgaagaaagatacagcttcaaaaatgaaatctttggttgaagagggaaaatatgacaaacagtatgaacaatcagaggaattccggcaggagctcaaagtcaaagttcgtgaactattaacagaacaagaatggaggagaagaaaaatgcaaatgaggatatctgaggaggaaggcagattaaaaagggatgaagaggaacagaaagaaatgtggaaaagaaagcgtgaacatgaggaggaatgggaaggaacacgagaaaagagggtatccagttggagagattttatgaagggtggaaagaagaataagaaaggagaaattcggccaccgaagctgaagacagaagatcccaacaaatcctacgttcaaaggcctgtaaaaagaggttaggggttctgccgttgagtttgaagatcacagcaatcaattgaaaccaggagttcgagagaacttatttatgcaggccatcttttgtgtatcagttagatacttttaaacagatttattactggagtcatttgaggcatgttaatggtgtagacctccgacgaatgactctatccactttgcatcccaatactgataaataggaattactggtcatccgcagcgagccattttagtgttaggtt

SEQ ID NO: 10335 - protein, 250 aa, Glycine max
  peptide (1)..(250): Ceres Seq. ID no. 14313398
  misc_feature (42)..(105): Pfam Name: Pfam Description:  DnaJ domain
  misc_feature (10)..(250): NCBI GI NO: 22326960 NR Description: DnaJ protein family [Arabidopsis thaliana]
  misc_feature (1)..(236): NCBI GI NO: 7657611 NR Description: DnaJ (Hsp40) homolog, subfamily C, member 8
  misc_feature (19)..(236): NCBI GI NO: 21620116 NR Description: similar to DnaJ
  misc_feature (19)..(236): NCBI GI NO: 34784000 NR Description: Unknown (protein for IMAGE:5148567) [Mus musculus]
  misc_feature (19)..(225): NCBI GI NO: 27369493 NR Description: DnaJ (Hsp40) homolog, subfamily C, member 8
  misc_feature (17)..(236): NCBI GI NO: 21355117 NR Description: CG10375-PA [Drosophila melanogaster]
  misc_feature (12)..(219): NCBI GI NO: 31200283 NR Description: ENSANGP00000019596 [Anopheles gambiae]
  misc_feature (26)..(230): NCBI GI NO: 19112214 NR Description: DNA J domain containing protein
  misc_feature (22)..(225): NCBI GI NO: 23619009 NR Description: DNAJ protein, putative [Plasmodium falciparum 3D7]
  misc_feature (19)..(203): NCBI GI NO: 34871854 NR Description: similar to DnaJ homolog subfamily C member 8
MGDTNHASTVDDDLLLKNFFAEVSEVERDNEVLRILSCFKLNPFEYLNLPFDSSIDDVKKQYRKLSLMVHPDKCKHPQAKEAFGALAKAQQLLMDQNERDYILSQVNSAKEELRAKRKKQLKKDTASKMKSLVEEGKYDKQYEQSEEFRQELKVKVRELLTEQEWRRRKMQMRISEEEGRLKRDEEEQKEMWKRKREHEEEWEGTREKRVSSWRDFMKGGKKNKKGEIRPPKLKTEDPNKSYVQRPVKRG

SEQ ID NO: 10336 - protein, 183 aa, Glycine max
  peptide (1)..(183): Ceres Seq. ID no. 14313399
  misc_feature (11)..(183): Pfam Name: Pfam Description:  Caldesmon
  misc_feature (1)..(183): NCBI GI NO: 22326960 NR Description: DnaJ protein family [Arabidopsis thaliana]
  misc_feature (1)..(169): NCBI GI NO: 7657611 NR Description: DnaJ (Hsp40) homolog, subfamily C, member 8
  misc_feature (1)..(169): NCBI GI NO: 21620116 NR Description: similar to DnaJ
  misc_feature (1)..(169): NCBI GI NO: 34784000 NR Description: Unknown (protein for IMAGE:5148567) [Mus musculus]
  misc_feature (1)..(158): NCBI GI NO: 27369493 NR Description: DnaJ (Hsp40) homolog, subfamily C, member 8
  misc_feature (1)..(169): NCBI GI NO: 21355117 NR Description: CG10375-PA [Drosophila melanogaster]
  misc_feature (1)..(152): NCBI GI NO: 31200283 NR Description: ENSANGP00000019596 [Anopheles gambiae]
  misc_feature (1)..(163): NCBI GI NO: 19112214 NR Description: DNA J domain containing protein
  misc_feature (1)..(158): NCBI GI NO: 23619009 NR Description: DNAJ protein, putative [Plasmodium falciparum 3D7]
  misc_feature (1)..(136): NCBI GI NO: 34871854 NR Description: similar to DnaJ homolog subfamily C member 8
MVHPDKCKHPQAKEAFGALAKAQQLLMDQNERDYILSQVNSAKEELRAKRKKQLKKDTASKMKSLVEEGKYDKQYEQSEEFRQELKVKVRELLTEQEWRRRKMQMRISEEEGRLKRDEEEQKEMWKRKREHEEEWEGTREKRVSSWRDFMKGGKKNKKGEIRPPKLKTEDPNKSYVQRPVKRG

SEQ ID NO: 10337 - protein, 157 aa, Glycine max
  peptide (1)..(157): Ceres Seq. ID no. 14313400
  misc_feature (1)..(157): Pfam Name: Pfam Description:  Caldesmon
  misc_feature (1)..(157): NCBI GI NO: 22326960 NR Description: DnaJ protein family [Arabidopsis thaliana]
  misc_feature (1)..(143): NCBI GI NO: 7657611 NR Description: DnaJ (Hsp40) homolog, subfamily C, member 8
  misc_feature (1)..(143): NCBI GI NO: 21620116 NR Description: similar to DnaJ
  misc_feature (1)..(143): NCBI GI NO: 34784000 NR Description: Unknown (protein for IMAGE:5148567) [Mus musculus]
  misc_feature (1)..(132): NCBI GI NO: 27369493 NR Description: DnaJ (Hsp40) homolog, subfamily C, member 8
  misc_feature (1)..(143): NCBI GI NO: 21355117 NR Description: CG10375-PA [Drosophila melanogaster]
  misc_feature (1)..(126): NCBI GI NO: 31200283 NR Description: ENSANGP00000019596 [Anopheles gambiae]
  misc_feature (1)..(137): NCBI GI NO: 19112214 NR Description: DNA J domain containing protein
  misc_feature (1)..(132): NCBI GI NO: 23619009 NR Description: DNAJ protein, putative [Plasmodium falciparum 3D7]
  misc_feature (1)..(110): NCBI GI NO: 34871854 NR Description: similar to DnaJ homolog subfamily C member 8
MDQNERDYILSQVNSAKEELRAKRKKQLKKDTASKMKSLVEEGKYDKQYEQSEEFRQELKVKVRELLTEQEWRRRKMQMRISEEEGRLKRDEEEQKEMWKRKREHEEEWEGTREKRVSSWRDFMKGGKKNKKGEIRPPKLKTEDPNKSYVQRPVKRG

SEQ ID NO: 10338 - DNA, 1314 bp, Glycine max
  misc_feature (1)..(1314): Ceres Seq. ID no. 15169372
aaggcttcatttgtgtcacaactcagaaaggaaagctttgaggtttcttccgcattttagagtggtgagaggatggtgggtgttatttcgttggtaacagggatggctggtcctagtgggtttggatcagcttccactgcagaacaggttactgatggaattgatgccagcaacctcactgcaattatcacaggaggagcaagtggtataggcttggagacagcaagagtgttggctcttcgaaaggtccatgtgatcattgcagttcggaacatggtgtctgcaaaggaggctaaacaacaaatactagaggagaatgagtctgcacgagtggacgtaatgaagctcgacctttgctcagtgaattctattacatcatttgtggacaacttcatagctcttgatcttcctctcaacattttaataaacaatgctggagtaatgttctgcccattcaagctctcagaggatggcattgagatgcaatttgcaacaaaccatcttggtcatttccacttgacaaacctgcttcttgacaaaatgcaacaaactgcaaaagccactggaatagagggcaggatcataaatctgtcatcaattgcccataactacacttatagaaaggggattagatttaataagatcaatgaacgaaaaggttatggtaacaagaaggcgtatgggcagtccaagttagcaaacatattacatacaaatgagctttctcgtcgcctgcaggaagagggtgtgaatatcacagccaactcggtccatccaggagtgataatgactcctcttatgagacactcatcttaccttatgcatttcttaaaggtcttcaccttttacatatggaagaacgtcccccagggagcagccacgacatgctatgttgctctccacccaagcgtgaaaggtgtaactgggaagtactttgtggattgcaatcaatgcaaaccaagttcacacgccaaaaacaaacagcttgcaaagaaactctgggatttcagtaacgatttgatcaaatcaatttcgaaagcttgagtgcacttgcagctaggtggttttctccttagggaaattaaaagccttcgttgtggtcaccagtttatgaaaactagctcgttatgcaataaaaagcacgttacagttatagttataatttgtcgttgtctgaggatgtttccaaacattttattccccactgaaccaccaggaggtgtttcatttcttttcatccaaacatttctgtatcaaacgtttcgtttcatccataagttagttgtgtagttacaatcaaataaaattgtttgt

SEQ ID NO: 10339 - protein, 323 aa, Glycine max
  peptide (1)..(323): Ceres Seq. ID no. 15169373
  misc_feature (2)..(322): NCBI GI NO: 18413950 NR Description: short-chain dehydrogenase/reductase family protein
  misc_feature (2)..(322): NCBI GI NO: 20260302 NR Description: putative protein [Arabidopsis thaliana]
  misc_feature (2)..(322): NCBI GI NO: 21554820 NR Description: putativepod-specific dehydrogenase SAC25
  misc_feature (2)..(322): NCBI GI NO: 34895876 NR Description: P0009G03.18
  misc_feature (2)..(322): NCBI GI NO: 15224306 NR Description: short-chain dehydrogenase/reductase family protein
  misc_feature (4)..(320): NCBI GI NO: 629592 NR Description: hypothetical protein - rape
  misc_feature (10)..(321): NCBI GI NO: 30686197 NR Description: short-chain dehydrogenase/reductase family protein
  misc_feature (10)..(319): NCBI GI NO: 23297050 NR Description: unknown protein [Arabidopsis thaliana]
  misc_feature (13)..(313): NCBI GI NO: 15233359 NR Description: short-chain dehydrogenase/reductase family protein
  misc_feature (1)..(322): NCBI GI NO: 15233666 NR Description: short-chain dehydrogenase/reductase family protein
MVGVISLVTGMAGPSGFGSASTAEQVTDGIDASNLTAIITGGASGIGLETARVLALRKVHVIIAVRNMVSAKEAKQQILEENESARVDVMKLDLCSVNSITSFVDNFIALDLPLNILINNAGVMFCPFKLSEDGIEMQFATNHLGHFHLTNLLLDKMQQTAKATGIEGRIINLSSIAHNYTYRKGIRFNKINERKGYGNKKAYGQSKLANILHTNELSRRLQEEGVNITANSVHPGVIMTPLMRHSSYLMHFLKVFTFYIWKNVPQGAATTCYVALHPSVKGVTGKYFVDCNQCKPSSHAKNKQLAKKLWDFSNDLIKSISKA

SEQ ID NO: 10340 - protein, 313 aa, Glycine max
  peptide (1)..(313): Ceres Seq. ID no. 15169374
  misc_feature (1)..(312): NCBI GI NO: 18413950 NR Description: short-chain dehydrogenase/reductase family protein
  misc_feature (1)..(312): NCBI GI NO: 20260302 NR Description: putative protein [Arabidopsis thaliana]
  misc_feature (1)..(312): NCBI GI NO: 21554820 NR Description: putativepod-specific dehydrogenase SAC25
  misc_feature (1)..(312): NCBI GI NO: 34895876 NR Description: P0009G03.18
  misc_feature (1)..(312): NCBI GI NO: 15224306 NR Description: short-chain dehydrogenase/reductase family protein
  misc_feature (1)..(310): NCBI GI NO: 629592 NR Description: hypothetical protein - rape
  misc_feature (1)..(311): NCBI GI NO: 30686197 NR Description: short-chain dehydrogenase/reductase family protein
  misc_feature (1)..(309): NCBI GI NO: 23297050 NR Description: unknown protein [Arabidopsis thaliana]
  misc_feature (3)..(303): NCBI GI NO: 15233359 NR Description: short-chain dehydrogenase/reductase family protein
  misc_feature (1)..(312): NCBI GI NO: 15233666 NR Description: short-chain dehydrogenase/reductase family protein
MAGPSGFGSASTAEQVTDGIDASNLTAIITGGASGIGLETARVLALRKVHVIIAVRNMVSAKEAKQQILEENESARVDVMKLDLCSVNSITSFVDNFIALDLPLNILINNAGVMFCPFKLSEDGIEMQFATNHLGHFHLTNLLLDKMQQTAKATGIEGRIINLSSIAHNYTYRKGIRFNKINERKGYGNKKAYGQSKLANILHTNELSRRLQEEGVNITANSVHPGVIMTPLMRHSSYLMHFLKVFTFYIWKNVPQGAATTCYVALHPSVKGVTGKYFVDCNQCKPSSHAKNKQLAKKLWDFSNDLIKSISKA

SEQ ID NO: 10341 - protein, 256 aa, Glycine max
  peptide (1)..(256): Ceres Seq. ID no. 15169375
  misc_feature (1)..(255): NCBI GI NO: 18413950 NR Description: short-chain dehydrogenase/reductase family protein
  misc_feature (1)..(255): NCBI GI NO: 20260302 NR Description: putative protein [Arabidopsis thaliana]
  misc_feature (1)..(255): NCBI GI NO: 21554820 NR Description: putativepod-specific dehydrogenase SAC25
  misc_feature (1)..(255): NCBI GI NO: 34895876 NR Description: P0009G03.18
  misc_feature (1)..(255): NCBI GI NO: 15224306 NR Description: short-chain dehydrogenase/reductase family protein
  misc_feature (1)..(253): NCBI GI NO: 629592 NR Description: hypothetical protein - rape
  misc_feature (1)..(254): NCBI GI NO: 30686197 NR Description: short-chain dehydrogenase/reductase family protein
  misc_feature (1)..(252): NCBI GI NO: 23297050 NR Description: unknown protein [Arabidopsis thaliana]
  misc_feature (1)..(246): NCBI GI NO: 15233359 NR Description: short-chain dehydrogenase/reductase family protein
  misc_feature (1)..(255): NCBI GI NO: 15233666 NR Description: short-chain dehydrogenase/reductase family protein
MVSAKEAKQQILEENESARVDVMKLDLCSVNSITSFVDNFIALDLPLNILINNAGVMFCPFKLSEDGIEMQFATNHLGHFHLTNLLLDKMQQTAKATGIEGRIINLSSIAHNYTYRKGIRFNKINERKGYGNKKAYGQSKLANILHTNELSRRLQEEGVNITANSVHPGVIMTPLMRHSSYLMHFLKVFTFYIWKNVPQGAATTCYVALHPSVKGVTGKYFVDCNQCKPSSHAKNKQLAKKLWDFSNDLIKSISKA

SEQ ID NO: 10342 - DNA, 1108 bp, Glycine max
  misc_feature (1)..(1108): Ceres Seq. ID no. 14308575
tttgtgttttcaaccgaaaacttggccttcatttttatttgatttgttacacataagctaagcaagtgccaattcactcgtccatctgtagatttttcttcacatgaacacttttgtttttatacttgctttacataagaatatttggccatataacttcccttttaaccctccctttcaggtcttcttcgttgtggtaagagctgccggttaagatggacaaactacctcagaccagatattaaacgtggttcctttacacttgaggatgaaaaactaatcatacagcttcatggtatccttggaaataggtgggctgctatagcctctcagctaccaggaagaacagacaatgagataaaaaacttatggaacacccacttgaagaaacgtctcatttgcatgggccttgacccacaaacccaccaaccactagcctctccacataaccctaatgacaaggctcatgcatcatcatccacttcaacccgccacatggcccagtgggagagtgcaaggcttgaagcagaggcaaggctctcaagggaaccacacttatactacaacaacaacaaaactgactctgactacttcctacgaatttggaactctgatcttggagaatcttttcgtgatgtccacaaattagaatcttcaatcaaatgtgagtcacagtctgccacaacggatttggcttccttaaccccagcaagcattgtgaaagaggagtttctgtggggtgttaagaaaattgtctcggattcatcatcaagctctagtgaactacaccatgactcttgtgacacttctttgcagctcttgttagactttcctatgaacaatgacatgagcttcttagaattatgagacaccaacagccccttccttacccttaattagtgcatgtatgatgttgttgatatgctgacatgtagctttttgttggctattttgtagacttatagcatgttaggataattaactatcataattgattttggaaggaaattatgctgaaaattgaaaaaagtgaaagcaactatttgttgcttggactttcaatgagaatttggaattgattcggggaaaaaaaaaaaaaaaaaaaaag

SEQ ID NO: 10343 - protein, 154 aa, Glycine max
  peptide (1)..(154): Ceres Seq. ID no. 14308576
  misc_feature (1)..(153): NCBI GI NO: 15233066 NR Description: myb DNA-binding protein (MYB17)
  misc_feature (1)..(152): NCBI GI NO: 4115565 NR Description: MYB homologue [Perilla frutescens]
  misc_feature (1)..(153): NCBI GI NO: 11358681 NR Description: probable transcription factor MYB17
  misc_feature (1)..(56): NCBI GI NO: 282964 NR Description: myb-related protein 1 - garden petunia
  misc_feature (1)..(52): NCBI GI NO: 28628947 NR Description: MYB1 [Dendrobium sp. XMW-2002-1]
  misc_feature (1)..(57): NCBI GI NO: 15232045 NR Description: myb family transcription factor
  misc_feature (1)..(49): NCBI GI NO: 27125807 NR Description: MYB27 protein
  misc_feature (1)..(58): NCBI GI NO: 629737 NR Description: myb-related protein MIXTA - garden snapdragon
  misc_feature (1)..(61): NCBI GI NO: 15242272 NR Description: myb family transcription factor
  misc_feature (1)..(132): NCBI GI NO: 13346188 NR Description: GHMYB25 [Gossypium hirsutum]
MGLDPQTHQPLASPHNPNDKAHASSSTSTRHMAQWESARLEAEARLSREPHLYYNNNKTDSDYFLRIWNSDLGESFRDVHKLESSIKCESQSATTDLASLTPASIVKEEFLWGVKKIVSDSSSSSSELHHDSCDTSLQLLLDFPMNNDMSFLEL

SEQ ID NO: 10344 - protein, 123 aa, Glycine max
  peptide (1)..(123): Ceres Seq. ID no. 14308577
  misc_feature (1)..(122): NCBI GI NO: 15233066 NR Description: myb DNA-binding protein (MYB17)
  misc_feature (1)..(121): NCBI GI NO: 4115565 NR Description: MYB homologue [Perilla frutescens]
  misc_feature (1)..(122): NCBI GI NO: 11358681 NR Description: probable transcription factor MYB17
  misc_feature (1)..(25): NCBI GI NO: 282964 NR Description: myb-related protein 1 - garden petunia
  misc_feature (1)..(21): NCBI GI NO: 28628947 NR Description: MYB1 [Dendrobium sp. XMW-2002-1]
  misc_feature (1)..(26): NCBI GI NO: 15232045 NR Description: myb family transcription factor
  misc_feature (1)..(18): NCBI GI NO: 27125807 NR Description: MYB27 protein
  misc_feature (1)..(27): NCBI GI NO: 629737 NR Description: myb-related protein MIXTA - garden snapdragon
  misc_feature (1)..(30): NCBI GI NO: 15242272 NR Description: myb family transcription factor
  misc_feature (1)..(101): NCBI GI NO: 13346188 NR Description: GHMYB25 [Gossypium hirsutum]
MAQWESARLEAEARLSREPHLYYNNNKTDSDYFLRIWNSDLGESFRDVHKLESSIKCESQSATTDLASLTPASIVKEEFLWGVKKIVSDSSSSSSELHHDSCDTSLQLLLDFPMNNDMSFLEL

SEQ ID NO: 10345 - DNA, 613 bp, Glycine max
  misc_feature (1)..(613): Ceres Seq. ID no. 15169443
gacgttcattcggcttgcttgattgttccaggtattcgcagtcgaccgtgtcctcggagcacgatgaaggttgttgctgcctacctgcttgctgtcctcgctgggaatgccagcccctccgctgaggatttgactggcattctggagtcagttggctgtgaagttgacaatgaaaggatggaactgctgctgtcccaactgagcggtaaggacatcaccgagctcattgccgcgggcagagagaagtttgcttcagtcccatgtggcggcggcggtgtggctgttgcggcaggtgcacctgctgctggcggagctgctcctgcagctgaggcaaagaaagaagagaaggtggaagagaaggaagaaagcgatgatgatatgggcttcagcctcttcgactaggttgcacagtcatcacagtattgtttcgggcagtgaaatcaaagggaaaccagagtcatgtttagattttaaccttattttatgttggaaagtactgcaaagactgctaattgtctctgtatttggtaattcagctgtagattgctatgatggttgggatttactcgtgaaccagagtttttctatcttatatcctgaattggttatcccg

SEQ ID NO: 10346 - protein, 133 aa, Glycine max
  peptide (1)..(133): Ceres Seq. ID no. 15169444
  misc_feature (38)..(132): Pfam Name: Pfam Description:  60s Acidic ribosomal protein
  misc_feature (22)..(133): NCBI GI NO: 1173073 NR Description: 60S ACIDIC RIBOSOMAL PROTEIN P2A (P2)
  misc_feature (22)..(133): NCBI GI NO: 4204372 NR Description: acidic ribosomal protein P2a-2 [Zea mays]
  misc_feature (22)..(133): NCBI GI NO: 899610 NR Description: acidic ribosomal protein P2
  misc_feature (30)..(133): NCBI GI NO: 4204374 NR Description: acidic ribosomal protein P2a-3 [Zea mays]
  misc_feature (13)..(133): NCBI GI NO: 34906408 NR Description: putative 60S acidic ribosomal protein P2A
  misc_feature (23)..(133): NCBI GI NO: 32400774 NR Description: acidic ribosomal protein P2 [Triticum aestivum]
  misc_feature (40)..(133): NCBI GI NO: 4204376 NR Description: acidic ribosomal protein P2a-4 [Zea mays]
  misc_feature (14)..(133): NCBI GI NO: 32400796 NR Description: acidic ribosomal protein [Triticum aestivum]
  misc_feature (22)..(133): NCBI GI NO: 24473796 NR Description: 60s acidic ribosomal protein [Prunus dulcis]
  misc_feature (22)..(133): NCBI GI NO: 39587678 NR Description: Hypothetical protein CBG01783
DVHSACLIVPGIRSRPCPRSTMKVVAAYLLAVLAGNASPSAEDLTGILESVGCEVDNERMELLLSQLSGKDITELIAAGREKFASVPCGGGGVAVAAGAPAAGGAAPAAEAKKEEKVEEKEESDDDMGFSLFD

SEQ ID NO: 10347 - protein, 112 aa, Glycine max
  peptide (1)..(112): Ceres Seq. ID no. 15169445
  misc_feature (17)..(111): Pfam Name: Pfam Description:  60s Acidic ribosomal protein
  misc_feature (1)..(112): NCBI GI NO: 1173073 NR Description: 60S ACIDIC RIBOSOMAL PROTEIN P2A (P2)
  misc_feature (1)..(112): NCBI GI NO: 4204372 NR Description: acidic ribosomal protein P2a-2 [Zea mays]
  misc_feature (1)..(112): NCBI GI NO: 899610 NR Description: acidic ribosomal protein P2
  misc_feature (9)..(112): NCBI GI NO: 4204374 NR Description: acidic ribosomal protein P2a-3 [Zea mays]
  misc_feature (1)..(112): NCBI GI NO: 34906408 NR Description: putative 60S acidic ribosomal protein P2A
  misc_feature (2)..(112): NCBI GI NO: 32400774 NR Description: acidic ribosomal protein P2 [Triticum aestivum]
  misc_feature (19)..(112): NCBI GI NO: 4204376 NR Description: acidic ribosomal protein P2a-4 [Zea mays]
  misc_feature (1)..(112): NCBI GI NO: 32400796 NR Description: acidic ribosomal protein [Triticum aestivum]
  misc_feature (1)..(112): NCBI GI NO: 24473796 NR Description: 60s acidic ribosomal protein [Prunus dulcis]
  misc_feature (1)..(112): NCBI GI NO: 39587678 NR Description: Hypothetical protein CBG01783
MKVVAAYLLAVLAGNASPSAEDLTGILESVGCEVDNERMELLLSQLSGKDITELIAAGREKFASVPCGGGGVAVAAGAPAAGGAAPAAEAKKEEKVEEKEESDDDMGFSLFD

SEQ ID NO: 10348 - protein, 81 aa, Glycine max
  peptide (1)..(81): Ceres Seq. ID no. 15169446
MMIWASASSTRLHSHHSIVSGSEIKGKPESCLDFNLILCWKVLQRLLIVSVFGNSAVDCYDGWDLLVNQSFSILYPELVIP

SEQ ID NO: 10349 - DNA, 1565 bp, Glycine max
  misc_feature (1)..(1565): Ceres Seq. ID no. 15176349
atagcagcaccgcaccgcaccgcaccaggtcttctttttttctttcatggcggaggaaattacttctcaattaaaaaaaaatttgctggatgaagaaaatggaacatcaagtcatgttgtagaaggggctgctgatgctgatgctgatgctgagctttctccaccatcacaaaaaggagatgacgctaaagaagtttcaaagaagaaaaagaagaaatctaaaagcaagaaaaagaaagaactcttacaacagactgatccaccatcaatttctgttattaaccttttcccatctggagattttcctgaaggtgaaattcagcagtacaaagacgataacctatggagaactacttcagaggagaagagagaactggagcgcctgcagaaaccattatataattcagttcgtcgagcggcagaagttcatcgtcaggttcgcaaatatattaaaggcattttaaagcccggaatgttgatgactgacatatgtgaaacattggagaacactgttcgtaagctaatatcagaggatggccttcaagcaggcattgcattccccacaggatgctctttaaattgggttgctgctcactggaccccaaattcaggggataagactatactttagtatgatgatgtgatgaaattggattttggtacccatgttgatggatatatagttgactgtgcttttaccgtggcattcaaccccatgtttgatccactgcttgaagcctctcgtgaagcaaccaatacgggtattaaggaagctggaatcgatgtgcgcctttgtgacattggtgccgcaattcaagaggtcatggaatcttatgaagttgagattaatgggaaggtgtatcaagttaagagtatacggaatttgaatggacatagcattggtcgctaccaaatccatgctggaaaatctgttcccattgtgaagggtggggagcagacaaagatggaagagggtgaattttttgctattgaaacctttgcatcaacggggaaaggatatgtacgagaagacctggaatgcagccactacatgaaaaattttgatgttggtcatatcccactgagattgcctagagcgaagcaactgttagcaactattaacaagaacttctctactttggccttttgtaggcggtatttagatcgcctaggggagactaaatacttaatggcattaaagaacttgtgtgactctggcattgttcagccttatcctcctctatgtgatgtgaaaggaagctatgtatcacaattcgagcatacaatcttactccgaccaacatgcaaagaagttatatcaaagggtgacgattactaatgtggatttgaagtttttttgctttgttttatatatatatatatatatatatatatatatatatatatatatatatatatttaatactcactgtaccattatctttgtgaactgttttcattataccatcaacacttcggttttatatatgtgcctatggaggacgccattactagtttaataattggatatttccccaatagataaacatcgtattagaaggtcc

SEQ ID NO: 10350 - protein, 231 aa, Glycine max
  peptide (1)..(231): Ceres Seq. ID no. 15176350
  misc_feature (1)..(231): NCBI GI NO: 18411408 NR Description: methionine aminopeptidase 2 -related
  misc_feature (1)..(231): NCBI GI NO: 17473819 NR Description: putative protein [Arabidopsis thaliana]
  misc_feature (1)..(231): NCBI GI NO: 11264654 NR Description: hypothetical protein F24G16
  misc_feature (1)..(231): NCBI GI NO: 11320962 NR Description: methionine aminopeptidase-like protein
  misc_feature (1)..(231): NCBI GI NO: 7435570 NR Description: methionyl aminopeptidase (EC 3
  misc_feature (1)..(231): NCBI GI NO: 18406472 NR Description: methionine aminopeptidase -related
  misc_feature (1)..(231): NCBI GI NO: 38636687 NR Description: putative methionyl aminopeptidase (EC 3
  misc_feature (1)..(231): NCBI GI NO: 5803092 NR Description: methionyl aminopeptidase 2
  misc_feature (1)..(231): NCBI GI NO: 1703275 NR Description: Methionine aminopeptidase 2
  misc_feature (1)..(231): NCBI GI NO: 5821855 NR Description: Human Methionine Aminopeptidase 2
MKLDFGTHVDGYIVDCAFTVAFNPMFDPLLEASREATNTGIKEAGIDVRLCDIGAAIQEVMESYEVEINGKVYQVKSIRNLNGHSIGRYQIHAGKSVPIVKGGEQTKMEEGEFFAIETFASTGKGYVREDLECSHYMKNFDVGHIPLRLPRAKQLLATINKNFSTLAFCRRYLDRLGETKYLMALKNLCDSGIVQPYPPLCDVKGSYVSQFEHTILLRPTCKEVISKGDDY

SEQ ID NO: 10351 - protein, 207 aa, Glycine max
  peptide (1)..(207): Ceres Seq. ID no. 15176351
  misc_feature (1)..(207): NCBI GI NO: 18411408 NR Description: methionine aminopeptidase 2 -related
  misc_feature (1)..(207): NCBI GI NO: 17473819 NR Description: putative protein [Arabidopsis thaliana]
  misc_feature (1)..(207): NCBI GI NO: 11264654 NR Description: hypothetical protein F24G16
  misc_feature (1)..(207): NCBI GI NO: 11320962 NR Description: methionine aminopeptidase-like protein
  misc_feature (1)..(207): NCBI GI NO: 7435570 NR Description: methionyl aminopeptidase (EC 3
  misc_feature (1)..(207): NCBI GI NO: 18406472 NR Description: methionine aminopeptidase -related
  misc_feature (1)..(207): NCBI GI NO: 38636687 NR Description: putative methionyl aminopeptidase (EC 3
  misc_feature (1)..(207): NCBI GI NO: 5803092 NR Description: methionyl aminopeptidase 2
  misc_feature (1)..(207): NCBI GI NO: 1703275 NR Description: Methionine aminopeptidase 2
  misc_feature (1)..(207): NCBI GI NO: 5821855 NR Description: Human Methionine Aminopeptidase 2
MFDPLLEASREATNTGIKEAGIDVRLCDIGAAIQEVMESYEVEINGKVYQVKSIRNLNGHSIGRYQIHAGKSVPIVKGGEQTKMEEGEFFAIETFASTGKGYVREDLECSHYMKNFDVGHIPLRLPRAKQLLATINKNFSTLAFCRRYLDRLGETKYLMALKNLCDSGIVQPYPPLCDVKGSYVSQFEHTILLRPTCKEVISKGDDY

SEQ ID NO: 10352 - protein, 194 aa, Glycine max
  peptide (1)..(194): Ceres Seq. ID no. 15176352
  misc_feature (34)..(194): NCBI GI NO: 18411408 NR Description: methionine aminopeptidase 2 -related
  misc_feature (34)..(194): NCBI GI NO: 17473819 NR Description: putative protein [Arabidopsis thaliana]
  misc_feature (34)..(194): NCBI GI NO: 11264654 NR Description: hypothetical protein F24G16
  misc_feature (4)..(194): NCBI GI NO: 11320962 NR Description: methionine aminopeptidase-like protein
  misc_feature (1)..(194): NCBI GI NO: 7435570 NR Description: methionyl aminopeptidase (EC 3
  misc_feature (1)..(194): NCBI GI NO: 18406472 NR Description: methionine aminopeptidase -related
  misc_feature (32)..(194): NCBI GI NO: 38636687 NR Description: putative methionyl aminopeptidase (EC 3
  misc_feature (15)..(194): NCBI GI NO: 5803092 NR Description: methionyl aminopeptidase 2
  misc_feature (14)..(194): NCBI GI NO: 1703275 NR Description: Methionine aminopeptidase 2
  misc_feature (15)..(194): NCBI GI NO: 5821855 NR Description: Human Methionine Aminopeptidase 2
MAEEITSQLKKNLLDEENGTSSHVVEGAADADADAELSPPSQKGDDAKEVSKKKKKKSKSKKKKELLQQTDPPSISVINLFPSGDFPEGEIQQYKDDNLWRTTSEEKRELERLQKPLYNSVRRAAEVHRQVRKYIKGILKPGMLMTDICETLENTVRKLISEDGLQAGIAFPTGCSLNWVAAHWTPNSGDKTIL

SEQ ID NO: 10353 - DNA, 499 bp, Glycine max
  misc_feature (1)..(499): Ceres Seq. ID no. 14308880
ttacctcggaggagactgccaaggtcaaggctgccggcaaggcgtggtacaagaccatgatctcggacagtgactacaccgagtttgagaacttcaccaagtggctcggagtgacgcagtgaagcggcctttgagacctagttaagttttgattagttgtgtcgctgaacttgtattgagacgaaatagtattttatcaatctgtcttatcctgcatcttcacaacaagttacctatctgtggactttaagcctgcatgttcgttttatttctccattgccgtgggagcatagtatttgcatgttcgaaccaattatctggattatggtatggatttgtgcacataatgtctgttcatgatgcttgtggtctagtgccgtttggccttgtagtagtactacttccgtatccgtctcagagataattgatgttttagaaagtaagtgatgttttaggtttgttgaacaatcgactaaatttataagatttttttttgacc

SEQ ID NO: 10354 - protein, 55 aa, Glycine max
  peptide (1)..(55): Ceres Seq. ID no. 14308881
MFVLFLHCRGSIVFACSNQLSGLWYGFVHIMSVHDACGLVPFGLVVVLLPYPSQR

SEQ ID NO: 10355 - protein, 39 aa, Glycine max
  peptide (1)..(39): Ceres Seq. ID no. 14308882
  misc_feature (3)..(39): NCBI GI NO: 34897236 NR Description: putative 60S ribosomal protein L1
  misc_feature (3)..(39): NCBI GI NO: 34393487 NR Description: putative 60S ribosomal protein L4/L1
  misc_feature (1)..(39): NCBI GI NO: 13605831 NR Description: AT5g02870/F9G14_180 [Arabidopsis thaliana]
  misc_feature (1)..(39): NCBI GI NO: 17367847 NR Description: 60S ribosomal protein L4 (L1)
  misc_feature (1)..(39): NCBI GI NO: 15232723 NR Description: 60S ribosomal protein L4/L1 (RPL4A)
  misc_feature (1)..(39): NCBI GI NO: 21593543 NR Description: 60S ribosomal protein L4-B (L1)
  misc_feature (1)..(39): NCBI GI NO: 15242558 NR Description: 60S ribosomal protein L4/L1 (RPL4D)
  misc_feature (1)..(39): NCBI GI NO: 26450328 NR Description: putative 60S ribosomal protein
  misc_feature (1)..(39): NCBI GI NO: 25403525 NR Description: probable 60S ribosomal protein
TSEETAKVKAAGKAWYKTMISDSDYTEFENFTKWLGVTQ

SEQ ID NO: 10356 - DNA, 1372 bp, Glycine max
  misc_feature (1)..(1372): Ceres Seq. ID no. 15176230
agagtgctacttgaaaaattgttctcaccgtgtgtgtgttgtgtgtgtgtgtgagagagagagagagagagagagagaaagagagagagagagaggttaggctatggctgatgagagcgtcgttgagtccccagtgaagaggcagagagatgatgatgaagaaaatgaggtctctgtttccatggatgtggagggtggcaaagaccctcttagtaacggtttatcatctgtgattcctgggtggttctctgaaattagttcaatgtggcctggagaggctcactccttgaaggtggaaaagattttgtttcaaggaaagtctgaataccagaatgtcatggtcttccagtcatcaacatatggcaaggttcttgttttagatggagtaattcagctaacagaaagggatgaatgtgcctaccaagaaatgatcactcatcttcctctttgctctattccaaaccccaaaaaggttttggttatcggtggaggtgatggaggggtcatacgagaagtagcacaccattcttcagttgaaaagatagacatttgtgaaattgacaagatggttgttgatgtctccaaacaatacttccctgatgtagctgttgggtatgatgatcctcgtgtgacacttcatattggtgatggagttgcatttctgaaggaagttcctgaaggaacttatgatgctgttatagtggattcatccgatcctattggtcctgctcaagagctttttgaaaagcccttcttttcgtcagttgcaaaggctcttcgtccaggtggagttgtgtgcactcaggcagaaagcatatggcttcatatggatataattgaggacattgtggctaattgtcgccagatttttaaaggctctgtcaactatgcttggactactgttcctacatacccaagtgggatgattggttttatgctttgctcaactgagggaccacctgttgatttcaagcatccagtgaatcccatagatgaaaatgagagtcagaagtcagtaagaccgctgaaattttacaactctgagattcataccgcagctttctgcttgccgtcgtttgcgaagaggaagattggttctaaagcaaattaagaagattttctaaacctttgaaggagctcatgtggctgttgtagaagtccaacattcatcctttctgtattggtccatctatcaatgagctatggaataagtcagattaaatttggcattgaatattaacgtttatttctggaaatgagttttaggtgataaaggtataattgatggattcagttgtcagtgactttcctcataaacacatttaaaaatgtggaactatgaatatctgtttaggaaaattttgtttaatgc

SEQ ID NO: 10357 - protein, 335 aa, Glycine max
  peptide (1)..(335): Ceres Seq. ID no. 15176231
  misc_feature (46)..(291): Pfam Name: Pfam Description:  Spermine/spermidine synthase
  misc_feature (1)..(333): NCBI GI NO: 12229957 NR Description: Spermidine synthase 2
  misc_feature (8)..(335): NCBI GI NO: 12229958 NR Description: Spermidine synthase 1
  misc_feature (1)..(334): NCBI GI NO: 23495354 NR Description: spermidine synthase [Malus x domestica]
  misc_feature (1)..(334): NCBI GI NO: 23495352 NR Description: spermidine synthase [Malus x domestica]
  misc_feature (36)..(335): NCBI GI NO: 6094335 NR Description: Spermidine synthase
  misc_feature (1)..(333): NCBI GI NO: 12230013 NR Description: Spermidine synthase
  misc_feature (1)..(333): NCBI GI NO: 15150055 NR Description: spermidine synthase [Solanum tuberosum]
  misc_feature (11)..(335): NCBI GI NO: 15220885 NR Description: spermidine synthase -related
  misc_feature (39)..(335): NCBI GI NO: 12229998 NR Description: Spermidine synthase 1
  misc_feature (40)..(333): NCBI GI NO: 6094328 NR Description: Spermidine synthase 1
MADESVVESPVKRQRDDDEENEVSVSMDVEGGKDPLSNGLSSVIPGWFSEISSMWPGEAHSLKVEKILFQGKSEYQNVMVFQSSTYGKVLVLDGVIQLTERDECAYQEMITHLPLCSIPNPKKVLVIGGGDGGVIREVAHHSSVEKIDICEIDKMVVDVSKQYFPDVAVGYDDPRVTLHIGDGVAFLKEVPEGTYDAVIVDSSDPIGPAQELFEKPFFSSVAKALRPGGVVCTQAESIWLHMDIIEDIVANCRQIFKGSVNYAWTTVPTYPSGMIGFMLCSTEGPPVDFKHPVNPIDENESQKSVRPLKFYNSEIHTAAFCLPSFAKRKIGSKAN

SEQ ID NO: 10358 - protein, 309 aa, Glycine max
  peptide (1)..(309): Ceres Seq. ID no. 15176232
  misc_feature (20)..(265): Pfam Name: Pfam Description:  Spermine/spermidine synthase
  misc_feature (1)..(307): NCBI GI NO: 12229957 NR Description: Spermidine synthase 2
  misc_feature (1)..(309): NCBI GI NO: 12229958 NR Description: Spermidine synthase 1
  misc_feature (1)..(308): NCBI GI NO: 23495354 NR Description: spermidine synthase [Malus x domestica]
  misc_feature (1)..(308): NCBI GI NO: 23495352 NR Description: spermidine synthase [Malus x domestica]
  misc_feature (10)..(309): NCBI GI NO: 6094335 NR Description: Spermidine synthase
  misc_feature (1)..(307): NCBI GI NO: 12230013 NR Description: Spermidine synthase
  misc_feature (1)..(307): NCBI GI NO: 15150055 NR Description: spermidine synthase [Solanum tuberosum]
  misc_feature (1)..(309): NCBI GI NO: 15220885 NR Description: spermidine synthase -related
  misc_feature (13)..(309): NCBI GI NO: 12229998 NR Description: Spermidine synthase 1
  misc_feature (14)..(307): NCBI GI NO: 6094328 NR Description: Spermidine synthase 1
MDVEGGKDPLSNGLSSVIPGWFSEISSMWPGEAHSLKVEKILFQGKSEYQNVMVFQSSTYGKVLVLDGVIQLTERDECAYQEMITHLPLCSIPNPKKVLVIGGGDGGVIREVAHHSSVEKIDICEIDKMVVDVSKQYFPDVAVGYDDPRVTLHIGDGVAFLKEVPEGTYDAVIVDSSDPIGPAQELFEKPFFSSVAKALRPGGVVCTQAESIWLHMDIIEDIVANCRQIFKGSVNYAWTTVPTYPSGMIGFMLCSTEGPPVDFKHPVNPIDENESQKSVRPLKFYNSEIHTAAFCLPSFAKRKIGSKAN

SEQ ID NO: 10359 - protein, 282 aa, Glycine max
  peptide (1)..(282): Ceres Seq. ID no. 15176233
  misc_feature (1)..(238): Pfam Name: Pfam Description:  Spermine/spermidine synthase
  misc_feature (1)..(280): NCBI GI NO: 12229957 NR Description: Spermidine synthase 2
  misc_feature (1)..(282): NCBI GI NO: 12229958 NR Description: Spermidine synthase 1
  misc_feature (1)..(281): NCBI GI NO: 23495354 NR Description: spermidine synthase [Malus x domestica]
  misc_feature (1)..(281): NCBI GI NO: 23495352 NR Description: spermidine synthase [Malus x domestica]
  misc_feature (1)..(282): NCBI GI NO: 6094335 NR Description: Spermidine synthase
  misc_feature (1)..(280): NCBI GI NO: 12230013 NR Description: Spermidine synthase
  misc_feature (1)..(280): NCBI GI NO: 15150055 NR Description: spermidine synthase [Solanum tuberosum]
  misc_feature (1)..(282): NCBI GI NO: 15220885 NR Description: spermidine synthase -related
  misc_feature (1)..(282): NCBI GI NO: 12229998 NR Description: Spermidine synthase 1
  misc_feature (1)..(280): NCBI GI NO: 6094328 NR Description: Spermidine synthase 1
MWPGEAHSLKVEKILFQGKSEYQNVMVFQSSTYGKVLVLDGVIQLTERDECAYQEMITHLPLCSIPNPKKVLVIGGGDGGVIREVAHHSSVEKIDICEIDKMVVDVSKQYFPDVAVGYDDPRVTLHIGDGVAFLKEVPEGTYDAVIVDSSDPIGPAQELFEKPFFSSVAKALRPGGVVCTQAESIWLHMDIIEDIVANCRQIFKGSVNYAWTTVPTYPSGMIGFMLCSTEGPPVDFKHPVNPIDENESQKSVRPLKFYNSEIHTAAFCLPSFAKRKIGSKAN

SEQ ID NO: 10360 - DNA, 1486 bp, Glycine max
  misc_feature (1)..(1486): Ceres Seq. ID no. 14308209
acacaagattgagacacgaaacagaaaatgccaggactcacagcaccttccgattactcccaagaacccccccgccactcttctcttctcatcaacgccaaggaacctttcaatgcggagccaccgcgtgctgcgttggttgcttcctacgtcaccccttccgatttcttctataagaggaaccacggtccaatccccatcgttgagaacatcaacagatattccgtgaacgtgtccggcttggtggagcgtcccaaacagctcttcatgaaagatatatggatgcttccaaagtataatgtcactgccacgttgcagtgtgcaggtaatcgaaggactgctatgagcaagaccaaaacagtgaagggagttggctgggatgtttctgctattggaaatgctatttggggtggagccaaattgtctgatgttcttgaactcattggaattccaaagttgactagtgtcactgaatttggtggaagacatgtggaattcgtaagcattgataagtgcaaggaggaaaatggaggcccatacaaggcttcaataccactcagtcaggccacaaatcctgaagcagatgttctactagcttatgaaatgaatggtgaacctcttaacagggatcatgggtatccattacgtgtggttgttcctggtgtcattggagcccggtctgttaaatggctggaagatatcaatatcattgaagaagaatgtcagggtttcttcatgcaaaaggactacaaaatgtttccaccatcagtgaattgggataatattgattggtctacccggagaccccaaatggatttcccagttcagtgtgttatatgttctcttgaagacgtgagcacaataaagcctgggaaggtaaaaattagtggatatgcagcatcaggaggtggcagaggcattgagagagtagatgtgtctgttgatggaggcaaaacatggatggaagcctcaagaattcagaaaagtggggttccttatatatcagaacatgccagcagtgacaaatgggcatgggtgctgtttgaagtcacagctgatatccttcacagcactgagataattgcaaaagcggtagattctgctgcaaatgtccaacctgaaaaggttgaagacatttggaaccttagaggtattttaaacacttcatggcatcgagtgaaagttcaagcgagttactcaaacctgtaaaagtagcaccaacttcccaatcgagcctttatgactctctcccccaacaatgcttggtggattttgaagcttctctgtttgaactatgaacactgaaaacacctgaacaggcatcgcaatcagttgtaaaaaagtctttatacaaataagctataggcaagggattataagaaaaatccttgggtttctcagagtttttcatggaatatctgttcttcgtttcttcgaggaaataatttgagatcgtaaacatgattcgtctggcactttgaatttc

SEQ ID NO: 10361 - protein, 393 aa, Glycine max
  peptide (1)..(393): Ceres Seq. ID no. 14308210
  misc_feature (3)..(237): Pfam Name: Pfam Description:  Oxidoreductase molybdopterin binding domain
  misc_feature (1)..(393): NCBI GI NO: 15232230 NR Description: sulfite oxidase, putative [Arabidopsis thaliana]
  misc_feature (1)..(393): NCBI GI NO: 6468008 NR Description: sulfite oxidase [Arabidopsis thaliana]
  misc_feature (1)..(389): NCBI GI NO: 22759584 NR Description: Moco containing protein
  misc_feature (6)..(386): NCBI GI NO: 3212610 NR Description: Chain A, Sulfite Oxidase From Chicken Liver
  misc_feature (6)..(383): NCBI GI NO: 28558813 NR Description: Sulfite oxidase
  misc_feature (6)..(383): NCBI GI NO: 86440 NR Description: sulfite oxidase (EC 1.8.3.1), hepatic - chicken
  misc_feature (2)..(387): NCBI GI NO: 586053 NR Description: Sulfite oxidase, mitochondrial precursor
  misc_feature (2)..(387): NCBI GI NO: 40254758 NR Description: sulfite oxidase [Rattus norvegicus]
  misc_feature (2)..(387): NCBI GI NO: 30424565 NR Description: sulfite oxidase [Mus musculus]
  misc_feature (2)..(389): NCBI GI NO: 4557867 NR Description: SUOX gene product [Homo sapiens]
MPGLTAPSDYSQEPPRHSSLLINAKEPFNAEPPRAALVASYVTPSDFFYKRNHGPIPIVENINRYSVNVSGLVERPKQLFMKDIWMLPKYNVTATLQCAGNRRTAMSKTKTVKGVGWDVSAIGNAIWGGAKLSDVLELIGIPKLTSVTEFGGRHVEFVSIDKCKEENGGPYKASIPLSQATNPEADVLLAYEMNGEPLNRDHGYPLRVVVPGVIGARSVKWLEDINIIEEECQGFFMQKDYKMFPPSVNWDNIDWSTRRPQMDFPVQCVICSLEDVSTIKPGKVKISGYAASGGGRGIERVDVSVDGGKTWMEASRIQKSGVPYISEHASSDKWAWVLFEVTADILHSTEIIAKAVDSAANVQPEKVEDIWNLRGILNTSWHRVKVQASYSNL

SEQ ID NO: 10362 - protein, 313 aa, Glycine max
  peptide (1)..(313): Ceres Seq. ID no. 14308211
  misc_feature (1)..(157): Pfam Name: Pfam Description:  Oxidoreductase molybdopterin binding domain
  misc_feature (1)..(313): NCBI GI NO: 15232230 NR Description: sulfite oxidase, putative [Arabidopsis thaliana]
  misc_feature (1)..(313): NCBI GI NO: 6468008 NR Description: sulfite oxidase [Arabidopsis thaliana]
  misc_feature (1)..(309): NCBI GI NO: 22759584 NR Description: Moco containing protein
  misc_feature (1)..(306): NCBI GI NO: 3212610 NR Description: Chain A, Sulfite Oxidase From Chicken Liver
  misc_feature (1)..(303): NCBI GI NO: 28558813 NR Description: Sulfite oxidase
  misc_feature (1)..(303): NCBI GI NO: 86440 NR Description: sulfite oxidase (EC 1.8.3.1), hepatic - chicken
  misc_feature (1)..(307): NCBI GI NO: 586053 NR Description: Sulfite oxidase, mitochondrial precursor
  misc_feature (1)..(307): NCBI GI NO: 40254758 NR Description: sulfite oxidase [Rattus norvegicus]
  misc_feature (1)..(307): NCBI GI NO: 30424565 NR Description: sulfite oxidase [Mus musculus]
  misc_feature (1)..(309): NCBI GI NO: 4557867 NR Description: SUOX gene product [Homo sapiens]
MKDIWMLPKYNVTATLQCAGNRRTAMSKTKTVKGVGWDVSAIGNAIWGGAKLSDVLELIGIPKLTSVTEFGGRHVEFVSIDKCKEENGGPYKASIPLSQATNPEADVLLAYEMNGEPLNRDHGYPLRVVVPGVIGARSVKWLEDINIIEEECQGFFMQKDYKMFPPSVNWDNIDWSTRRPQMDFPVQCVICSLEDVSTIKPGKVKISGYAASGGGRGIERVDVSVDGGKTWMEASRIQKSGVPYISEHASSDKWAWVLFEVTADILHSTEIIAKAVDSAANVQPEKVEDIWNLRGILNTSWHRVKVQASYSNL

SEQ ID NO: 10363 - protein, 308 aa, Glycine max
  peptide (1)..(308): Ceres Seq. ID no. 14308212
  misc_feature (1)..(152): Pfam Name: Pfam Description:  Oxidoreductase molybdopterin binding domain
  misc_feature (1)..(308): NCBI GI NO: 15232230 NR Description: sulfite oxidase, putative [Arabidopsis thaliana]
  misc_feature (1)..(308): NCBI GI NO: 6468008 NR Description: sulfite oxidase [Arabidopsis thaliana]
  misc_feature (1)..(304): NCBI GI NO: 22759584 NR Description: Moco containing protein
  misc_feature (1)..(301): NCBI GI NO: 3212610 NR Description: Chain A, Sulfite Oxidase From Chicken Liver
  misc_feature (1)..(298): NCBI GI NO: 28558813 NR Description: Sulfite oxidase
  misc_feature (1)..(298): NCBI GI NO: 86440 NR Description: sulfite oxidase (EC 1.8.3.1), hepatic - chicken
  misc_feature (1)..(302): NCBI GI NO: 586053 NR Description: Sulfite oxidase, mitochondrial precursor
  misc_feature (1)..(302): NCBI GI NO: 40254758 NR Description: sulfite oxidase [Rattus norvegicus]
  misc_feature (1)..(302): NCBI GI NO: 30424565 NR Description: sulfite oxidase [Mus musculus]
  misc_feature (1)..(304): NCBI GI NO: 4557867 NR Description: SUOX gene product [Homo sapiens]
MLPKYNVTATLQCAGNRRTAMSKTKTVKGVGWDVSAIGNAIWGGAKLSDVLELIGIPKLTSVTEFGGRHVEFVSIDKCKEENGGPYKASIPLSQATNPEADVLLAYEMNGEPLNRDHGYPLRVVVPGVIGARSVKWLEDINIIEEECQGFFMQKDYKMFPPSVNWDNIDWSTRRPQMDFPVQCVICSLEDVSTIKPGKVKISGYAASGGGRGIERVDVSVDGGKTWMEASRIQKSGVPYISEHASSDKWAWVLFEVTADILHSTEIIAKAVDSAANVQPEKVEDIWNLRGILNTSWHRVKVQASYSNL

SEQ ID NO: 10364 - DNA, 1353 bp, Glycine max
  misc_feature (1)..(1353): Ceres Seq. ID no. 15176887
gttgtgaatcttgtgatcatcgaaagtcactgtagtctattttgtctacaaaatatctggactgacggagtagaaacaactgcaccacaaggggattggggataatttcaagtcagtcttcttctctatcttccgttttttctgagaaagtaacaaatgtgagtcgctaagcgtatcaaactcgtgaacacagttagttaattagttttctcattctcattcaaagtacgtctagtgtttgcaaaaatggaagaagaaagtgcgttgaggccgatggacgctgagcaactgagagagcaggctcataagatggtcgacttcattgccgattactacaaaaccatcgaagacttccccgttctaagccaagttcagccaggttatcttgggaagcttttaccagattctgcacctgattctcctgagtcattgcaaaatgttttggatgatgtgcaggaaaaaatactgccaggggtgacgcactggcaaagcccaaattattttgcgtattttccttccaacagtagcattgctgggtttctaggagagatgctcagtgcgggtcttaacatcgtgggtttcagctggataacttctcctgctgcaattgaacttgagacgattgttctggattggcttgcaaaggctttccagctgcctgattatttctattctagtgggaaaggtggtggagttatacagggaactgcaagtgaagctgtactagttgtcttattagctgcccgtgacaagatcttaaggagggttggaaggaatgcccttcctaagcttgtgatgtatgcatctgatcaaacacactctgctttactaaaagcttgccagatagcaggaattaatccagagctatgcaggttgcttaaaactgattcttccacaaattatgcactttctcctgatgtgctttctgaagcaatttcaaatgacattgctggcggtcttgtaccctttttcttatgtgctactgtaagaattgaaggcttatatgaatttgtgaatttgtaacaaattgctatataatgcgttaacttaactgcccattgtctatgtgtgtgtgtcttatgtccaatattttatcatacatgtttactgaatttttaaattagaaattgctcaactcatctgagtatcagataaagggataacatatccttcttcatgttgttcagagctctgtctcttcattatttgttgctggggaacagattgttttatacctgttaatatggtatatgtttggactaataaaggggagagagcaagggactgagatccctgtctgatcctaaaagaaataactgtctgatagacagttaactgttatgtaacacatgg

SEQ ID NO: 10365 - protein, 258 aa, Glycine max
  peptide (1)..(258): Ceres Seq. ID no. 15176888
  misc_feature (44)..(247): Pfam Name: Pfam Description:  Pyridoxal-dependent decarboxylase conserved domain
  misc_feature (1)..(247): NCBI GI NO: 5911778 NR Description: tyrosine decarboxylase [Arabidopsis thaliana]
  misc_feature (1)..(247): NCBI GI NO: 5911780 NR Description: tyrosine decarboxylase [Arabidopsis thaliana]
  misc_feature (1)..(247): NCBI GI NO: 30680963 NR Description: tyrosine decarboxylase -related
  misc_feature (10)..(247): NCBI GI NO: 25290992 NR Description: probable tyrosine decarboxylase
  misc_feature (4)..(247): NCBI GI NO: 33147039 NR Description: putative tyrosine decarboxylase
  misc_feature (7)..(247): NCBI GI NO: 15235393 NR Description: aromatic amino-acid decarboxylase - like protein
  misc_feature (9)..(247): NCBI GI NO: 12620328 NR Description: tyrosine/dopa decarboxylase
  misc_feature (9)..(247): NCBI GI NO: 3282523 NR Description: tyrosine/dopa decarboxylase [Papaver somniferum]
  misc_feature (9)..(247): NCBI GI NO: 3282527 NR Description: tyrosine/dopa decarboxylase [Papaver somniferum]
  misc_feature (1)..(247): NCBI GI NO: 1174828 NR Description: TYROSINE DECARBOXYLASE 2
MEEESALRPMDAEQLREQAHKMVDFIADYYKTIEDFPVLSQVQPGYLGKLLPDSAPDSPESLQNVLDDVQEKILPGVTHWQSPNYFAYFPSNSSIAGFLGEMLSAGLNIVGFSWITSPAAIELETIVLDWLAKAFQLPDYFYSSGKGGGVIQGTASEAVLVVLLAARDKILRRVGRNALPKLVMYASDQTHSALLKACQIAGINPELCRLLKTDSSTNYALSPDVLSEAISNDIAGGLVPFFLCATVRIEGLYEFVNL

SEQ ID NO: 10366 - protein, 249 aa, Glycine max
  peptide (1)..(249): Ceres Seq. ID no. 15176889
  misc_feature (35)..(238): Pfam Name: Pfam Description:  Pyridoxal-dependent decarboxylase conserved domain
  misc_feature (1)..(238): NCBI GI NO: 5911778 NR Description: tyrosine decarboxylase [Arabidopsis thaliana]
  misc_feature (1)..(238): NCBI GI NO: 30680963 NR Description: tyrosine decarboxylase -related
  misc_feature (1)..(238): NCBI GI NO: 5911780 NR Description: tyrosine decarboxylase [Arabidopsis thaliana]
  misc_feature (1)..(238): NCBI GI NO: 25290992 NR Description: probable tyrosine decarboxylase
  misc_feature (1)..(238): NCBI GI NO: 33147039 NR Description: putative tyrosine decarboxylase
  misc_feature (1)..(238): NCBI GI NO: 15235393 NR Description: aromatic amino-acid decarboxylase - like protein
  misc_feature (1)..(238): NCBI GI NO: 12620328 NR Description: tyrosine/dopa decarboxylase
  misc_feature (1)..(238): NCBI GI NO: 3282523 NR Description: tyrosine/dopa decarboxylase [Papaver somniferum]
  misc_feature (1)..(238): NCBI GI NO: 3282527 NR Description: tyrosine/dopa decarboxylase [Papaver somniferum]
  misc_feature (1)..(238): NCBI GI NO: 1174828 NR Description: TYROSINE DECARBOXYLASE 2
MDAEQLREQAHKMVDFIADYYKTIEDFPVLSQVQPGYLGKLLPDSAPDSPESLQNVLDDVQEKILPGVTHWQSPNYFAYFPSNSSIAGFLGEMLSAGLNIVGFSWITSPAAIELETIVLDWLAKAFQLPDYFYSSGKGGGVIQGTASEAVLVVLLAARDKILRRVGRNALPKLVMYASDQTHSALLKACQIAGINPELCRLLKTDSSTNYALSPDVLSEAISNDIAGGLVPFFLCATVRIEGLYEFVNL

SEQ ID NO: 10367 - protein, 237 aa, Glycine max
  peptide (1)..(237): Ceres Seq. ID no. 15176890
  misc_feature (23)..(226): Pfam Name: Pfam Description:  Pyridoxal-dependent decarboxylase conserved domain
  misc_feature (1)..(226): NCBI GI NO: 5911778 NR Description: tyrosine decarboxylase [Arabidopsis thaliana]
  misc_feature (1)..(226): NCBI GI NO: 5911780 NR Description: tyrosine decarboxylase [Arabidopsis thaliana]
  misc_feature (1)..(226): NCBI GI NO: 30680963 NR Description: tyrosine decarboxylase -related
  misc_feature (1)..(226): NCBI GI NO: 25290992 NR Description: probable tyrosine decarboxylase
  misc_feature (1)..(226): NCBI GI NO: 33147039 NR Description: putative tyrosine decarboxylase
  misc_feature (1)..(226): NCBI GI NO: 15235393 NR Description: aromatic amino-acid decarboxylase - like protein
  misc_feature (1)..(226): NCBI GI NO: 12620328 NR Description: tyrosine/dopa decarboxylase
  misc_feature (1)..(226): NCBI GI NO: 3282523 NR Description: tyrosine/dopa decarboxylase [Papaver somniferum]
  misc_feature (1)..(226): NCBI GI NO: 3282527 NR Description: tyrosine/dopa decarboxylase [Papaver somniferum]
  misc_feature (1)..(226): NCBI GI NO: 1174828 NR Description: TYROSINE DECARBOXYLASE 2
MVDFIADYYKTIEDFPVLSQVQPGYLGKLLPDSAPDSPESLQNVLDDVQEKILPGVTHWQSPNYFAYFPSNSSIAGFLGEMLSAGLNIVGFSWITSPAAIELETIVLDWLAKAFQLPDYFYSSGKGGGVIQGTASEAVLVVLLAARDKILRRVGRNALPKLVMYASDQTHSALLKACQIAGINPELCRLLKTDSSTNYALSPDVLSEAISNDIAGGLVPFFLCATVRIEGLYEFVNL

SEQ ID NO: 10368 - DNA, 1185 bp, Glycine max
  misc_feature (1)..(1185): Ceres Seq. ID no. 15224330
actacctacctacccttttgcagccacttaaacaaagtcattgacaaaagcacacaaagtctcttcccctcataaagcactgattttcacgcagaactcagctttagttcgtgcttcattaacatgggtgctggtgactactacaaaatactgaaggtgaagcatgatgccactgatgaagaagtgaagaaggcttataagaaattggcaatgaaatggcacccagataagaaccttgaagaccctcttaggaaagaagagtttgaggccaagtttaaacaagtttctgaggcctatgatgtgcttagtgacccaaagaagcgccagatctatgacttgtacggtcactatccccttaactctcaacgcttcaccaaggaatatggctatgggaacatgaaggatgcaggggtggttgaaagcagcttgctttgtacccttgaagagctttacaacggttgcaaaaagaagttgaaggtctcaaggattgttcctgatgaattcggagagttaaggtctgtagaagaaatcttgaagatagacataaagcctggttggaagaagggcacaaaaataacttttcctgggaaaggcaaccaagaaccaggatttgctccatctgatctaatttttgagttggatgagaagcctcatgctattttcaagagggatggaaatgatcttgtagtgatgcataagatattacttgtggatgctctcacaggaaagactctcaacttgactactttggatggaagagatctcacaatcaaagtggctgatattgtgaaacctggctatgagctggtggtcccaaatgaaggcatgcccatctcaaaggaacctggcaagaaaggaaacctcagaatcatgtttgatgttatgtttccatcaaggctgaccacacaacagaagtatgatctgaaaaggattctcagtgatgttgattactaagccaattaatggctgtaactatccattaacatcctctttcacatgaagatcagtttacactgtaaataacttaaaagtaattccacttatctataagaagtttgtgcatattacaaattatacctagcatagttgctactgctaccatatatgaagcatgatgtagctttgtaaacaagtctatatcaatatttttacagttttagtaattttactctgctgttttagatt

SEQ ID NO: 10369 - protein, 276 aa, Glycine max
  peptide (1)..(276): Ceres Seq. ID no. 15224331
  misc_feature (149)..(271): Pfam Name: Pfam Description:  DnaJ C terminal region
  misc_feature (93)..(271): NCBI GI NO: 15218515 NR Description: heat shock protein, putative
  misc_feature (93)..(271): NCBI GI NO: 21593202 NR Description: putative heat-shock protein [Arabidopsis thaliana]
  misc_feature (1)..(80): NCBI GI NO: 15218515 NR Description: heat shock protein, putative
  misc_feature (1)..(80): NCBI GI NO: 21593202 NR Description: putative heat-shock protein [Arabidopsis thaliana]
  misc_feature (93)..(271): NCBI GI NO: 15218901 NR Description: DnaJ protein family [Arabidopsis thaliana]
  misc_feature (1)..(84): NCBI GI NO: 15218901 NR Description: DnaJ protein family [Arabidopsis thaliana]
  misc_feature (88)..(274): NCBI GI NO: 15228294 NR Description: heat shock protein, putative
  misc_feature (1)..(80): NCBI GI NO: 15228294 NR Description: heat shock protein, putative
  misc_feature (98)..(272): NCBI GI NO: 15240968 NR Description: DnaJ protein family [Arabidopsis thaliana]
  misc_feature (1)..(96): NCBI GI NO: 15240968 NR Description: DnaJ protein family [Arabidopsis thaliana]
MGAGDYYKILKVKHDATDEEVKKAYKKLAMKWHPDKNLEDPLRKEEFEAKFKQVSEAYDVLSDPKKRQIYDLYGHYPLNSQRFTKEYGYGNMKDAGVVESSLLCTLEELYNGCKKKLKVSRIVPDEFGELRSVEEILKIDIKPGWKKGTKITFPGKGNQEPGFAPSDLIFELDEKPHAIFKRDGNDLVVMHKILLVDALTGKTLNLTTLDGRDLTIKVADIVKPGYELVVPNEGMPISKEPGKKGNLRIMFDVMFPSRLTTQQKYDLKRILSDVDY

SEQ ID NO: 10370 - protein, 247 aa, Glycine max
  peptide (1)..(247): Ceres Seq. ID no. 15224332
  misc_feature (120)..(242): Pfam Name: Pfam Description:  DnaJ C terminal region
  misc_feature (64)..(242): NCBI GI NO: 15218515 NR Description: heat shock protein, putative
  misc_feature (64)..(242): NCBI GI NO: 21593202 NR Description: putative heat-shock protein [Arabidopsis thaliana]
  misc_feature (1)..(51): NCBI GI NO: 15218515 NR Description: heat shock protein, putative
  misc_feature (1)..(51): NCBI GI NO: 21593202 NR Description: putative heat-shock protein [Arabidopsis thaliana]
  misc_feature (64)..(242): NCBI GI NO: 15218901 NR Description: DnaJ protein family [Arabidopsis thaliana]
  misc_feature (1)..(55): NCBI GI NO: 15218901 NR Description: DnaJ protein family [Arabidopsis thaliana]
  misc_feature (59)..(245): NCBI GI NO: 15228294 NR Description: heat shock protein, putative
  misc_feature (1)..(51): NCBI GI NO: 15228294 NR Description: heat shock protein, putative
  misc_feature (69)..(243): NCBI GI NO: 15240968 NR Description: DnaJ protein family [Arabidopsis thaliana]
  misc_feature (1)..(67): NCBI GI NO: 15240968 NR Description: DnaJ protein family [Arabidopsis thaliana]
MKWHPDKNLEDPLRKEEFEAKFKQVSEAYDVLSDPKKRQIYDLYGHYPLNSQRFTKEYGYGNMKDAGVVESSLLCTLEELYNGCKKKLKVSRIVPDEFGELRSVEEILKIDIKPGWKKGTKITFPGKGNQEPGFAPSDLIFELDEKPHAIFKRDGNDLVVMHKILLVDALTGKTLNLTTLDGRDLTIKVADIVKPGYELVVPNEGMPISKEPGKKGNLRIMFDVMFPSRLTTQQKYDLKRILSDVDY

SEQ ID NO: 10371 - protein, 185 aa, Glycine max
  peptide (1)..(185): Ceres Seq. ID no. 15224333
  misc_feature (58)..(180): Pfam Name: Pfam Description:  DnaJ C terminal region
  misc_feature (2)..(180): NCBI GI NO: 15218515 NR Description: heat shock protein, putative
  misc_feature (2)..(180): NCBI GI NO: 21593202 NR Description: putative heat-shock protein [Arabidopsis thaliana]
  misc_feature (2)..(180): NCBI GI NO: 15218901 NR Description: DnaJ protein family [Arabidopsis thaliana]
  misc_feature (1)..(183): NCBI GI NO: 15228294 NR Description: heat shock protein, putative
  misc_feature (7)..(181): NCBI GI NO: 15240968 NR Description: DnaJ protein family [Arabidopsis thaliana]
  misc_feature (1)..(180): NCBI GI NO: 15225377 NR Description: heat shock protein, putative
  misc_feature (7)..(180): NCBI GI NO: 6179940 NR Description: DnaJ-like protein [Nicotiana tabacum]
  misc_feature (7)..(180): NCBI GI NO: 34905276 NR Description: putative heat shock protein
  misc_feature (7)..(180): NCBI GI NO: 15235310 NR Description: heat shock protein, putative
  misc_feature (7)..(180): NCBI GI NO: 11863723 NR Description: DnaJ like protein [Lycopersicon esculentum]
MKDAGVVESSLLCTLEELYNGCKKKLKVSRIVPDEFGELRSVEEILKIDIKPGWKKGTKITFPGKGNQEPGFAPSDLIFELDEKPHAIFKRDGNDLVVMHKILLVDALTGKTLNLTTLDGRDLTIKVADIVKPGYELVVPNEGMPISKEPGKKGNLRIMFDVMFPSRLTTQQKYDLKRILSDVDY

SEQ ID NO: 10372 - DNA, 1191 bp, Glycine max
  misc_feature (1)..(1191): Ceres Seq. ID no. 14306381
aatacgaaattctttgaaaaagaattgtaaccgttattagcaaaaagaagatgatactttttcaaatatctatttcaagctatagtttagattcttattccatcattaatttccacttatgccttgtagatttatcctattttgcttatcaaggcttcaagcctatttacttggtattttatttttatgttctgttttatatccctatctactcacttgtgatattttctttgacttccatacaccagatcaaattttcttggtacaaagttcattatatacgatacacagcctccatactcttctgcccatatatgccctcctgggactgggaagacgagccgcagattttattccaaaaaggtctcgcctaaggtcccatctgggagttacaacatagctcaggtaacatatgaattaaatgtgcttgggactcgaggaccaagaaagatgcactgcgttatgcattcaataccagcttcagcactagatgcaggtggcactgttcctggccagccagagcttcttccccgttccctggaggactcgtttcggagcatctcgttttcaaagtctctagatcattctattgagttcagcagttcgcgattttctgagattggggaatcctgcatcgaagatgatgatggcaagatgagacccttggttctgaaaaacaagcttccaagatggcatgaacagttacaatgttggtgccttaatttccgtggacgagtaacagttgcgtctgttaaaaactttcagttgattgctgccacccaaccagctgctggtgcacctacaccatctcaaccagctccaccggagcacgataagatcattcttcagtttggcaaagttgggaaggacatgttcaccatggattatcggtaccctttatctgcattccaagcttttgcaatatgcttgagcagctttgacaccaaattggcttgtgaataagataaatcatgaatcagaagggttataagtgagctaatgaaacaatgatgttgatggtatatttccctttgtttttcttttcttttcctattttcattatcagtatcatgggagtaggcaattgttgttactcagcttttgtatgactaaattgtaaccgtagtgcatctctgatgtaataggattttagagcatttttaacatacaatgttgctatgtttctttctc

SEQ ID NO: 10373 - protein, 170 aa, Glycine max
  peptide (1)..(170): Ceres Seq. ID no. 14306382
  misc_feature (1)..(170): Pfam Name: Pfam Description:  Tub family
  misc_feature (1)..(170): NCBI GI NO: 15222543 NR Description: F-box containing tubby family protein
  misc_feature (1)..(170): NCBI GI NO: 25082857 NR Description: unknown protein [Arabidopsis thaliana]
  misc_feature (1)..(121): NCBI GI NO: 5777631 NR Description: CAA303719.1 protein [Oryza sativa]
  misc_feature (110)..(170): NCBI GI NO: 5777631 NR Description: CAA303719.1 protein [Oryza sativa]
  misc_feature (1)..(121): NCBI GI NO: 32480039 NR Description: OSJNBa0039K24.2
  misc_feature (110)..(170): NCBI GI NO: 32480039 NR Description: OSJNBa0039K24.2
  misc_feature (1)..(157): NCBI GI NO: 28188595 NR Description: unknown protein [Arabidopsis thaliana]
  misc_feature (1)..(157): NCBI GI NO: 28188613 NR Description: unknown protein [Arabidopsis thaliana]
  misc_feature (1)..(157): NCBI GI NO: 28188615 NR Description: unknown protein [Arabidopsis thaliana]
  misc_feature (1)..(170): NCBI GI NO: 15223772 NR Description: F-box containing tubby family protein
MHCVMHSIPASALDAGGTVPGQPELLPRSLEDSFRSISFSKSLDHSIEFSSSRFSEIGESCIEDDDGKMRPLVLKNKLPRWHEQLQCWCLNFRGRVTVASVKNFQLIAATQPAAGAPTPSQPAPPEHDKIILQFGKVGKDMFTMDYRYPLSAFQAFAICLSSFDTKLACE

SEQ ID NO: 10374 - protein, 166 aa, Glycine max
  peptide (1)..(166): Ceres Seq. ID no. 14306383
  misc_feature (1)..(166): Pfam Name: Pfam Description:  Tub family
  misc_feature (1)..(166): NCBI GI NO: 15222543 NR Description: F-box containing tubby family protein
  misc_feature (1)..(166): NCBI GI NO: 25082857 NR Description: unknown protein [Arabidopsis thaliana]
  misc_feature (1)..(117): NCBI GI NO: 5777631 NR Description: CAA303719.1 protein [Oryza sativa]
  misc_feature (106)..(166): NCBI GI NO: 5777631 NR Description: CAA303719.1 protein [Oryza sativa]
  misc_feature (1)..(117): NCBI GI NO: 32480039 NR Description: OSJNBa0039K24.2
  misc_feature (106)..(166): NCBI GI NO: 32480039 NR Description: OSJNBa0039K24.2
  misc_feature (1)..(153): NCBI GI NO: 28188595 NR Description: unknown protein [Arabidopsis thaliana]
  misc_feature (1)..(153): NCBI GI NO: 28188613 NR Description: unknown protein [Arabidopsis thaliana]
  misc_feature (1)..(153): NCBI GI NO: 28188615 NR Description: unknown protein [Arabidopsis thaliana]
  misc_feature (1)..(166): NCBI GI NO: 15223772 NR Description: F-box containing tubby family protein
MHSIPASALDAGGTVPGQPELLPRSLEDSFRSISFSKSLDHSIEFSSSRFSEIGESCIEDDDGKMRPLVLKNKLPRWHEQLQCWCLNFRGRVTVASVKNFQLIAATQPAAGAPTPSQPAPPEHDKIILQFGKVGKDMFTMDYRYPLSAFQAFAICLSSFDTKLACE

SEQ ID NO: 10375 - protein, 107 aa, Glycine max
  peptide (1)..(107): Ceres Seq. ID no. 14306384
MILFQISISSYSLDSYSIINFHLCLVDLSYFAYQGFKPIYLVFYFYVLFYIPIYSLVIFSLTSIHQIKFSWYKVHYIRYTASILFCPYMPSWDWEDEPQILFQKGLA

SEQ ID NO: 10376 - DNA, 1319 bp, Glycine max
  misc_feature (1)..(1319): Ceres Seq. ID no. 13523550
ttttattatgcatggtcactgatactaacatccaacacttggtgccctaggttcttatttgccaaatgcttcatggcacaataggaaaatccaaaaagaatataattttttgaggtttcggtggccaagtttgaaccaccattacaaaagcattgaaggagggtgtacatgtaaaaaatgtaatataaaatttgttgtgaaagcgacctctgaaaaatcttttgagtctgaacctcaagcttttgatccaaaaagcattttggactctgtcaagaattccttggatgctttctacaggttttccagacctcacacagttattggcacagcattaagcataatttctgtgtccctccttgctgttgagaaaatatcagatatatctccattattttttactggtgtgttggaggctgtggttgctgccctgtttatgaatatttatattgttggtttgaatcaattgtctgatgttgaaatagacaagataaacaagccgtatcttccattagcatctggggaatattcctttgaaactggtgtcactattgttgcatctttttcaattctgagtttttggcttggctgggttgtaggttcatggccattattttgggccctttttgtaagctttgtgctaggaactgcttattcaatcaatgtgcctctgttgagatggaagaggtttgcagtgcttgcagcgatgtgcattctagctgttcgggcagtaatagttcaacttgcatttttccttcacatccagactcatgtatacaagaggccacctgtcttttcaagatcattgatttttgctactgcattcatgagcttcttctctgtagttatagcactgtttaaggatatacctgacattgaaggagataaagtatttggcatccaatctttttcagtgcgtttaggtcagaagccggtattctggacttgtgttatccttcttgaaatagcttatggagtcgccctcctggtgggagctgcatctccttgtctttggagcaaaattgtcacgggtctgggacacgctgttctggcttcaattctctggtttcatgccaaatctgtagatttgaawgyttaagcwaaagcttcgataacatccttctatatgtttatttggaagctattttatgcagaatacttactcattccttttgttagatgaggatgcagcggcaatattgacttgagaattagttttgtttaaatggtgctgcctttgtcacaggccggcttggagtcgctacattagttttaagtttttaattgctaatttaaawgaagawatatttcttttkggatgg

SEQ ID NO: 10377 - protein, 220 aa, Glycine max
  peptide (1)..(220): Ceres Seq. ID no. 15222846
  misc_feature (1)..(220): Pfam Name: Pfam Description:  UbiA prenyltransferase family
  misc_feature (1)..(220): NCBI GI NO: 30680535 NR Description: tocopherol polyprenyltransferase
  misc_feature (1)..(220): NCBI GI NO: 33391138 NR Description: homogentisic acid geranylgeranyl transferase
  misc_feature (1)..(220): NCBI GI NO: 33391142 NR Description: homogentisic acid geranylgeranyl transferase
  misc_feature (1)..(220): NCBI GI NO: 33391144 NR Description: homogentisic acid geranylgeranyl transferase
  misc_feature (1)..(78): NCBI GI NO: 7485781 NR Description: hypothetical protein F19F24
  misc_feature (125)..(220): NCBI GI NO: 7485781 NR Description: hypothetical protein F19F24
  misc_feature (1)..(220): NCBI GI NO: 23125851 NR Description: hypothetical protein [Nostoc punctiforme]
  misc_feature (1)..(220): NCBI GI NO: 16330366 NR Description: unknown protein [Synechocystis sp. PCC 6803]
  misc_feature (1)..(220): NCBI GI NO: 17230940 NR Description: hypothetical protein [Nostoc sp. PCC 7120]
  misc_feature (1)..(220): NCBI GI NO: 37519852 NR Description: unknown protein [Gloeobacter violaceus]
  misc_feature (219)..(219): Xaa is any aa, unknown or other
  misc_feature (220)..(220): Xaa is any aa, unknown or other
MNIYIVGLNQLSDVEIDKINKPYLPLASGEYSFETGVTIVASFSILSFWLGWVVGSWPLFWALFVSFVLGTAYSINVPLLRWKRFAVLAAMCILAVRAVIVQLAFFLHIQTHVYKRPPVFSRSLIFATAFMSFFSVVIALFKDIPDIEGDKVFGIQSFSVRLGQKPVFWTCVILLEIAYGVALLVGAASPCLWSKIVTGLGHAVLASILWFHAKSVDLXX

SEQ ID NO: 10378 - protein, 130 aa, Glycine max
  peptide (1)..(130): Ceres Seq. ID no. 15222847
  misc_feature (1)..(130): Pfam Name: Pfam Description:  UbiA prenyltransferase family
  misc_feature (1)..(130): NCBI GI NO: 30680535 NR Description: tocopherol polyprenyltransferase
  misc_feature (1)..(130): NCBI GI NO: 33391138 NR Description: homogentisic acid geranylgeranyl transferase
  misc_feature (1)..(130): NCBI GI NO: 33391142 NR Description: homogentisic acid geranylgeranyl transferase
  misc_feature (1)..(130): NCBI GI NO: 33391144 NR Description: homogentisic acid geranylgeranyl transferase
  misc_feature (35)..(130): NCBI GI NO: 7485781 NR Description: hypothetical protein F19F24
  misc_feature (1)..(130): NCBI GI NO: 23125851 NR Description: hypothetical protein [Nostoc punctiforme]
  misc_feature (1)..(130): NCBI GI NO: 16330366 NR Description: unknown protein [Synechocystis sp. PCC 6803]
  misc_feature (1)..(130): NCBI GI NO: 17230940 NR Description: hypothetical protein [Nostoc sp. PCC 7120]
  misc_feature (1)..(130): NCBI GI NO: 37519852 NR Description: unknown protein [Gloeobacter violaceus]
  misc_feature (1)..(17): NCBI GI NO: 23039416 NR Description: hypothetical protein
  misc_feature (129)..(129): Xaa is any aa, unknown or other
  misc_feature (130)..(130): Xaa is any aa, unknown or other
MCILAVRAVIVQLAFFLHIQTHVYKRPPVFSRSLIFATAFMSFFSVVIALFKDIPDIEGDKVFGIQSFSVRLGQKPVFWTCVILLEIAYGVALLVGAASPCLWSKIVTGLGHAVLASILWFHAKSVDLXX

SEQ ID NO: 10379 - DNA, 1248 bp, Glycine max
  misc_feature (1)..(1248): Ceres Seq. ID no. 15175949
aaaaacaccatcagcatcttcactcaccacgaaggttccgttctctgtggatctatatctctagggcacgttacgtggaaggaagctcttcaccgacttcaatcgaagaagatggattacagtgctggttcgagtctgtttccgttgcaccgttgcaaaaccattcacctggtgaggcacgcgcaggggattcacaatgtggagggtgacaaaaactacaaagcctacatgaaccccgattacttcgatgctcatctcactcccttgggatggcaacaggttgacaatttgcgtaagcatgttcgcgactctggccttatcaacaccattgatctagtcattgcatcttctctgatgaggactctacaaacatctgttggcgtatttggaggtgagggctacacagataaaacagacgtccttcctcttatggttgcaaatgcaggaaatagctaccgtgctgcaatttcaagtctaaattccccaccaattgttactgttgaactttgtcgtgaacatttgggagttcatccctgtgacagaagaagaagtgttagcgagtatcaatttctttttcccgctgttgatttttcactgttagatagtgatgaggatacctggtggaaggccaatgttagagagacaaaggaagaacttgcagctagggggatgaagttccttaactggttgtggacacgaaaagagaaggagatagcaattgtgacacatagtggattcttgtttcatactctgaatgcctttggaagtgattgccaccccttggtaaagaaagaaatatccaagcactttgctaattgtgaacttcgctccatggtcattgtggatagaggtatgataggattggaacaatcaaccactaactatccaggcaagataccttcagggctggacctccctagtgatgttgcagatgagaagtctgagaaataatggatttggcttcttctacttgtttgtatgtgttcaggaccattcaagcattggttcttctatttgaagttcactattacaaaatctaacatgattatgtcagattatacaaactgtgctgattctgtcttgaaatttatcaattattgtctgcagaaaatatttgttaacaattataaccttgttggaaatcagatgacccatgtgtggcaacacagtcacaaaacacttctgtttgttgatggaacagtttcggaagaggattggttgcctcactcgtgtcacaaattcattgtt

SEQ ID NO: 10380 - protein, 316 aa, Glycine max
  peptide (1)..(316): Ceres Seq. ID no. 15175950
  misc_feature (53)..(291): Pfam Name: Pfam Description:  Phosphoglycerate mutase family
  misc_feature (38)..(316): NCBI GI NO: 15237708 NR Description: ZW10-related protein [Arabidopsis thaliana]
  misc_feature (38)..(313): NCBI GI NO: 21700765 NR Description: unknown [Glycine max]
  misc_feature (38)..(313): NCBI GI NO: 21700767 NR Description: unknown [Glycine max]
  misc_feature (44)..(310): NCBI GI NO: 38344765 NR Description: OSJNBa0068L06.8
  misc_feature (33)..(313): NCBI GI NO: 25372930 NR Description: hypothetical protein ZW10
  misc_feature (33)..(313): NCBI GI NO: 25372931 NR Description: hypothetical protein F19C14.10
  misc_feature (38)..(313): NCBI GI NO: 15217922 NR Description: expressed protein [Arabidopsis thaliana]
  misc_feature (38)..(307): NCBI GI NO: 15227803 NR Description: expressed protein [Arabidopsis thaliana]
  misc_feature (33)..(174): NCBI GI NO: 30696245 NR Description: expressed protein [Arabidopsis thaliana]
  misc_feature (175)..(313): NCBI GI NO: 30696245 NR Description: expressed protein [Arabidopsis thaliana]
KNTISIFTHHEGSVLCGSISLGHVTWKEALHRLQSKKMDYSAGSSLFPLHRCKTIHLVRHAQGIHNVEGDKNYKAYMNPDYFDAHLTPLGWQQVDNLRKHVRDSGLINTIDLVIASSLMRTLQTSVGVFGGEGYTDKTDVLPLMVANAGNSYRAAISSLNSPPIVTVELCREHLGVHPCDRRRSVSEYQFLFPAVDFSLLDSDEDTWWKANVRETKEELAARGMKFLNWLWTRKEKEIAIVTHSGFLFHTLNAFGSDCHPLVKKEISKHFANCELRSMVIVDRGMIGLEQSTTNYPGKIPSGLDLPSDVADEKSEK

SEQ ID NO: 10381 - protein, 279 aa, Glycine max
  peptide (1)..(279): Ceres Seq. ID no. 15175951
  misc_feature (16)..(254): Pfam Name: Pfam Description:  Phosphoglycerate mutase family
  misc_feature (1)..(279): NCBI GI NO: 15237708 NR Description: ZW10-related protein [Arabidopsis thaliana]
  misc_feature (1)..(276): NCBI GI NO: 21700765 NR Description: unknown [Glycine max]
  misc_feature (1)..(276): NCBI GI NO: 21700767 NR Description: unknown [Glycine max]
  misc_feature (7)..(273): NCBI GI NO: 38344765 NR Description: OSJNBa0068L06.8
  misc_feature (1)..(276): NCBI GI NO: 25372930 NR Description: hypothetical protein ZW10
  misc_feature (1)..(276): NCBI GI NO: 25372931 NR Description: hypothetical protein F19C14.10
  misc_feature (1)..(276): NCBI GI NO: 15217922 NR Description: expressed protein [Arabidopsis thaliana]
  misc_feature (1)..(270): NCBI GI NO: 15227803 NR Description: expressed protein [Arabidopsis thaliana]
  misc_feature (1)..(137): NCBI GI NO: 30696245 NR Description: expressed protein [Arabidopsis thaliana]
  misc_feature (138)..(276): NCBI GI NO: 30696245 NR Description: expressed protein [Arabidopsis thaliana]
MDYSAGSSLFPLHRCKTIHLVRHAQGIHNVEGDKNYKAYMNPDYFDAHLTPLGWQQVDNLRKHVRDSGLINTIDLVIASSLMRTLQTSVGVFGGEGYTDKTDVLPLMVANAGNSYRAAISSLNSPPIVTVELCREHLGVHPCDRRRSVSEYQFLFPAVDFSLLDSDEDTWWKANVRETKEELAARGMKFLNWLWTRKEKEIAIVTHSGFLFHTLNAFGSDCHPLVKKEISKHFANCELRSMVIVDRGMIGLEQSTTNYPGKIPSGLDLPSDVADEKSEK

SEQ ID NO: 10382 - protein, 240 aa, Glycine max
  peptide (1)..(240): Ceres Seq. ID no. 15175952
  misc_feature (1)..(215): Pfam Name: Pfam Description:  Phosphoglycerate mutase family
  misc_feature (1)..(240): NCBI GI NO: 15237708 NR Description: ZW10-related protein [Arabidopsis thaliana]
  misc_feature (1)..(237): NCBI GI NO: 21700765 NR Description: unknown [Glycine max]
  misc_feature (1)..(237): NCBI GI NO: 21700767 NR Description: unknown [Glycine max]
  misc_feature (1)..(234): NCBI GI NO: 38344765 NR Description: OSJNBa0068L06.8
  misc_feature (1)..(237): NCBI GI NO: 25372930 NR Description: hypothetical protein ZW10
  misc_feature (1)..(237): NCBI GI NO: 25372931 NR Description: hypothetical protein F19C14.10
  misc_feature (1)..(237): NCBI GI NO: 15217922 NR Description: expressed protein [Arabidopsis thaliana]
  misc_feature (1)..(231): NCBI GI NO: 15227803 NR Description: expressed protein [Arabidopsis thaliana]
  misc_feature (1)..(98): NCBI GI NO: 30696245 NR Description: expressed protein [Arabidopsis thaliana]
  misc_feature (99)..(237): NCBI GI NO: 30696245 NR Description: expressed protein [Arabidopsis thaliana]
MNPDYFDAHLTPLGWQQVDNLRKHVRDSGLINTIDLVIASSLMRTLQTSVGVFGGEGYTDKTDVLPLMVANAGNSYRAAISSLNSPPIVTVELCREHLGVHPCDRRRSVSEYQFLFPAVDFSLLDSDEDTWWKANVRETKEELAARGMKFLNWLWTRKEKEIAIVTHSGFLFHTLNAFGSDCHPLVKKEISKHFANCELRSMVIVDRGMIGLEQSTTNYPGKIPSGLDLPSDVADEKSEK

SEQ ID NO: 10383 - DNA, 1591 bp, Glycine max
  misc_feature (1)..(1591): Ceres Seq. ID no. 15177969
gaatgaacaaagagcccatttatgtcttcaatgtagaaacttgatttggacaagctcaagagcattccatcagtgtcttgagctccaaatggagaacacctggatcctgacttttcaccttctcctcctcctgctccatccaaatgcagcaaaaggggccattggtgttggtgttggtgttggtggcagaggtggcataggtgttggcattggcattgggggcagtgttaacaccccagggccctctggatcaaacctcaagagtgccttcacagcactccaggcatggaaatctgccatgaccgatgacccattgaagattctggatacttgggttggtcccaatgtgtgttcctacagaggtgtcttctgtgcaaactctcaggatgataatggaattgtcacaacagcagcaactgagtcttctattgttgcaggaatagatctcaaccatgcaaacctccaagggacccttgtcaaagatctctctttgctctctgacatcactcttttccatctcaacagtaacaggttttctggctcactccctgacacattcagggacctcacttcactccaagagttggacctcagcaacaaccagctctcaggccctttccccatggtcactctctccatgccaagcctcatctacttggacctcagattcaacaacttctcaggccaacttcctgatcaactcttcaacaagaaacttgatgctatattcctcaacaacaacaactttggaggtgaaattccagacagtttgggaaattcacctgcctcagtcatcaacttggccaacaacaagttgagtggaagcatccctttcagctttggcttcatgggttcaggactgaaggagattctcttccttaacaaccagttaacaggttgcattccacaaggagtagggatcttcactgagatgcaagtttttgatgtgagcttcaactcactcatgggccatttgcctgacactatgagttgcttgcaagacatagaggttcttaatttggcacataacaagctttctggggagttatccgatgtggtatgctctttgagaagcctattaaatctaactgttgcttacaacttcttctctgggctgagccaggaatgttcaaggctattcagtgtggggtttgatttctcggataattgtattcctggaagggatatgcaaagaccccaaccggactgctctataatccctggtggtagtctcaattgtcttagaattcctactccaaaacctcttgtttgcgctgctctggctgcaactttgtctaagcacacaaattcacgttccttttctccctgatgctgggtggctactacagcttggttagttggtcgtggcttttacattaattaatgctgctatcaatttaattcatatatagtcacagtcacagctttctgctaattttattcgatcttcatggattcggtattcttggcccgcacggataagatgtgccttgatttgagaaacttctatgatggtgttaacaaacaagataatttatgtgtctcgtggcatgcttgcttgcttcatttgattgccactggtttttacttc

SEQ ID NO: 10384 - protein, 442 aa, Glycine max
  peptide (1)..(442): Ceres Seq. ID no. 15177970
  misc_feature (32)..(436): NCBI GI NO: 15233499 NR Description: extensin-related protein [Arabidopsis thaliana]
  misc_feature (38)..(431): NCBI GI NO: 15224840 NR Description: leucine rich repeat protein family
  misc_feature (79)..(421): NCBI GI NO: 15228861 NR Description: leucine-rich repeat extensin family
  misc_feature (68)..(427): NCBI GI NO: 15235668 NR Description: leucine-rich repeat extensin family
  misc_feature (86)..(425): NCBI GI NO: 15230120 NR Description: leucine-rich repeat extensin family
  misc_feature (61)..(413): NCBI GI NO: 34912294 NR Description: putative extensin-like protein
  misc_feature (84)..(413): NCBI GI NO: 5917664 NR Description: extensin-like protein [Lycopersicon esculentum]
  misc_feature (82)..(413): NCBI GI NO: 20259488 NR Description: unknown protein [Arabidopsis thaliana]
  misc_feature (82)..(413): NCBI GI NO: 30685162 NR Description: leucine-rich repeat extensin family
  misc_feature (75)..(413): NCBI GI NO: 15222149 NR Description: leucine-rich repeat extensin family
NEQRAHLCLQCRNLIWTSSRAFHQCLELQMENTWILTFHLLLLLLHPNAAKGAIGVGVGVGGRGGIGVGIGIGGSVNTPGPSGSNLKSAFTALQAWKSAMTDDPLKILDTWVGPNVCSYRGVFCANSQDDNGIVTTAATESSIVAGIDLNHANLQGTLVKDLSLLSDITLFHLNSNRFSGSLPDTFRDLTSLQELDLSNNQLSGPFPMVTLSMPSLIYLDLRFNNFSGQLPDQLFNKKLDAIFLNNNNFGGEIPDSLGNSPASVINLANNKLSGSIPFSFGFMGSGLKEILFLNNQLTGCIPQGVGIFTEMQVFDVSFNSLMGHLPDTMSCLQDIEVLNLAHNKLSGELSDVVCSLRSLLNLTVAYNFFSGLSQECSRLFSVGFDFSDNCIPGRDMQRPQPDCSIIPGGSLNCLRIPTPKPLVCAALAATLSKHTNSRSFSP

SEQ ID NO: 10385 - protein, 413 aa, Glycine max
  peptide (1)..(413): Ceres Seq. ID no. 15177971
  misc_feature (3)..(407): NCBI GI NO: 15233499 NR Description: extensin-related protein [Arabidopsis thaliana]
  misc_feature (9)..(402): NCBI GI NO: 15224840 NR Description: leucine rich repeat protein family
  misc_feature (50)..(392): NCBI GI NO: 15228861 NR Description: leucine-rich repeat extensin family
  misc_feature (39)..(398): NCBI GI NO: 15235668 NR Description: leucine-rich repeat extensin family
  misc_feature (57)..(396): NCBI GI NO: 15230120 NR Description: leucine-rich repeat extensin family
  misc_feature (32)..(384): NCBI GI NO: 34912294 NR Description: putative extensin-like protein
  misc_feature (55)..(384): NCBI GI NO: 5917664 NR Description: extensin-like protein [Lycopersicon esculentum]
  misc_feature (53)..(384): NCBI GI NO: 20259488 NR Description: unknown protein [Arabidopsis thaliana]
  misc_feature (53)..(384): NCBI GI NO: 30685162 NR Description: leucine-rich repeat extensin family
  misc_feature (46)..(384): NCBI GI NO: 15222149 NR Description: leucine-rich repeat extensin family
MENTWILTFHLLLLLLHPNAAKGAIGVGVGVGGRGGIGVGIGIGGSVNTPGPSGSNLKSAFTALQAWKSAMTDDPLKILDTWVGPNVCSYRGVFCANSQDDNGIVTTAATESSIVAGIDLNHANLQGTLVKDLSLLSDITLFHLNSNRFSGSLPDTFRDLTSLQELDLSNNQLSGPFPMVTLSMPSLIYLDLRFNNFSGQLPDQLFNKKLDAIFLNNNNFGGEIPDSLGNSPASVINLANNKLSGSIPFSFGFMGSGLKEILFLNNQLTGCIPQGVGIFTEMQVFDVSFNSLMGHLPDTMSCLQDIEVLNLAHNKLSGELSDVVCSLRSLLNLTVAYNFFSGLSQECSRLFSVGFDFSDNCIPGRDMQRPQPDCSIIPGGSLNCLRIPTPKPLVCAALAATLSKHTNSRSFSP

SEQ ID NO: 10386 - protein, 343 aa, Glycine max
  peptide (1)..(343): Ceres Seq. ID no. 15177972
  misc_feature (1)..(337): NCBI GI NO: 15233499 NR Description: extensin-related protein [Arabidopsis thaliana]
  misc_feature (1)..(332): NCBI GI NO: 15224840 NR Description: leucine rich repeat protein family
  misc_feature (1)..(322): NCBI GI NO: 15228861 NR Description: leucine-rich repeat extensin family
  misc_feature (1)..(328): NCBI GI NO: 15235668 NR Description: leucine-rich repeat extensin family
  misc_feature (1)..(326): NCBI GI NO: 15230120 NR Description: leucine-rich repeat extensin family
  misc_feature (1)..(314): NCBI GI NO: 34912294 NR Description: putative extensin-like protein
  misc_feature (1)..(314): NCBI GI NO: 5917664 NR Description: extensin-like protein [Lycopersicon esculentum]
  misc_feature (1)..(314): NCBI GI NO: 20259488 NR Description: unknown protein [Arabidopsis thaliana]
  misc_feature (1)..(314): NCBI GI NO: 30685162 NR Description: leucine-rich repeat extensin family
  misc_feature (1)..(314): NCBI GI NO: 15222149 NR Description: leucine-rich repeat extensin family
MTDDPLKILDTWVGPNVCSYRGVFCANSQDDNGIVTTAATESSIVAGIDLNHANLQGTLVKDLSLLSDITLFHLNSNRFSGSLPDTFRDLTSLQELDLSNNQLSGPFPMVTLSMPSLIYLDLRFNNFSGQLPDQLFNKKLDAIFLNNNNFGGEIPDSLGNSPASVINLANNKLSGSIPFSFGFMGSGLKEILFLNNQLTGCIPQGVGIFTEMQVFDVSFNSLMGHLPDTMSCLQDIEVLNLAHNKLSGELSDVVCSLRSLLNLTVAYNFFSGLSQECSRLFSVGFDFSDNCIPGRDMQRPQPDCSIIPGGSLNCLRIPTPKPLVCAALAATLSKHTNSRSFSP

SEQ ID NO: 10387 - DNA, 1116 bp, Glycine max
  misc_feature (1)..(1116): Ceres Seq. ID no. 13594100
tttgaattttattagaatatggaaattgagcattatggttagtgccaaaatgatatgaaaatttagaattgagactgtacaactcctttgcagtttggttatttctgtgttctgtctcaatttgaatatgcagagtgtggaaaacggacatggtttggggacaaaagagaggaacaagctccaattgagtcaaatgaatttcttccaaggttaaggaggcaaaagtcagtaacttctaggtctcagtatataaacaaaaaggaactaagagtttgtgttggaacatggaatgttggaggaaagcttccacctgatgacctagatattgaggggggggggggcattaacgagctagctgatatctatgttcttagtcttcaggagattgtaccattaaatccgggtaacattttttgtgttgaagacactcgaccgagacagaaatgggaaaacattattcgagatgcacttaatagagttagatcaaaagcaccaaagatgaaatccttcagtgatcccccatcaccatcaaaatttaagccatcaaatgatgcgccagacatagaagaagaaacattacttgaaagtgatggtgatattggtgaggaagtccatcctttggatgaagaacacaatgtttatgatggaggtgcaaataaaccaaccacatatgaagaagccttgaatactaattttcaggcttcagatgttgttgatattgccaacacaaaagagccaataggcaatgatttaaagagacagatttatgatggaaagaggtgatgccttggctgtattgaagaatagtatgagtgaccctaacaatgttcttcaaagttggaattgtacccttgtcactccttgcacatggtttcatgttaattgcaacagtgaaaatagcgtgacccgtgttgatcttggaaatgcaaacctttcgggtcatcttgttccacagcttggtcagctcctaattttggaatgcttgtaagttacaaaacagatatgacattattggctcaaatatgcttaattttactagtaattcttgattgttggctgaaatagatatgaccaggcaaaggttatgctaaaagtaaatatgataacggttatttt

SEQ ID NO: 10388 - protein, 94 aa, Glycine max
  peptide (1)..(94): Ceres Seq. ID no. 13594101
  misc_feature (1)..(44): NCBI GI NO: 18409892 NR Description: inositol polyphosphate 5-phosphatase, putative
  misc_feature (1)..(44): NCBI GI NO: 25352249 NR Description: hypothetical protein F14O23.9
  misc_feature (1)..(44): NCBI GI NO: 15081807 NR Description: At1g71710/F14O23_9 [Arabidopsis thaliana]
  misc_feature (1)..(44): NCBI GI NO: 12323727 NR Description: putative inositol polyphosphate phosphatase
  misc_feature (1)..(88): NCBI GI NO: 30693006 NR Description: inositol polyphosphate 5-phosphatase I (IP5PI)
  misc_feature (1)..(88): NCBI GI NO: 4204695 NR Description: putative inositol polyphosphate 5-phosphatase At5P1
  misc_feature (1)..(88): NCBI GI NO: 10444261 NR Description: inositol polyphosphate 5-phosphatase I
  misc_feature (1)..(88): NCBI GI NO: 18399139 NR Description: inositol polyphosphate 5-phosphatase II, putative
  misc_feature (1)..(61): NCBI GI NO: 34910610 NR Description: P0683B11.14
  misc_feature (1)..(33): NCBI GI NO: 34906250 NR Description: P0489A01.10
MKSFSDPPSPSKFKPSNDAPDIEEETLLESDGDIGEEVHPLDEEHNVYDGGANKPTTYEEALNTNFQASDVVDIANTKEPIGNDLKRQIYDGKR

SEQ ID NO: 10389 - protein, 73 aa, Glycine max
  peptide (1)..(73): Ceres Seq. ID no. 13594102
  misc_feature (5)..(73): NCBI GI NO: 14573459 NR Description: somatic embryogenesis receptor-like kinase 3
  misc_feature (5)..(73): NCBI GI NO: 18418211 NR Description: somatic embryogenesis receptor-related kinase -like
  misc_feature (5)..(73): NCBI GI NO: 30678986 NR Description: leucine-rich repeat protein kinase family
  misc_feature (5)..(73): NCBI GI NO: 7489030 NR Description: leucine-rich repeat protein LRP - tomato
  misc_feature (5)..(73): NCBI GI NO: 15229760 NR Description: leucine rich repeat protein family
  misc_feature (5)..(73): NCBI GI NO: 15242153 NR Description: leucine rich repeat protein (LRP), putative
  misc_feature (5)..(73): NCBI GI NO: 30385250 NR Description: leucine-rich repeat protein
  misc_feature (5)..(73): NCBI GI NO: 29468120 NR Description: leucine-rich repeat protein [Oryza sativa]
  misc_feature (2)..(73): NCBI GI NO: 15218543 NR Description: somatic embryogenesis receptor-related kinase
  misc_feature (5)..(73): NCBI GI NO: 24461285 NR Description: leucine-rich repeat protein [Capsicum annuum]
MMERGDALAVLKNSMSDPNNVLQSWNCTLVTPCTWFHVNCNSENSVTRVDLGNANLSGHLVPQLGQLLILECL

SEQ ID NO: 10390 - protein, 72 aa, Glycine max
  peptide (1)..(72): Ceres Seq. ID no. 13594103
  misc_feature (4)..(72): NCBI GI NO: 14573459 NR Description: somatic embryogenesis receptor-like kinase 3
  misc_feature (4)..(72): NCBI GI NO: 18418211 NR Description: somatic embryogenesis receptor-related kinase -like
  misc_feature (4)..(72): NCBI GI NO: 30678986 NR Description: leucine-rich repeat protein kinase family
  misc_feature (4)..(72): NCBI GI NO: 7489030 NR Description: leucine-rich repeat protein LRP - tomato
  misc_feature (4)..(72): NCBI GI NO: 15229760 NR Description: leucine rich repeat protein family
  misc_feature (4)..(72): NCBI GI NO: 30385250 NR Description: leucine-rich repeat protein
  misc_feature (4)..(72): NCBI GI NO: 15242153 NR Description: leucine rich repeat protein (LRP), putative
  misc_feature (4)..(72): NCBI GI NO: 29468120 NR Description: leucine-rich repeat protein [Oryza sativa]
  misc_feature (1)..(72): NCBI GI NO: 15218543 NR Description: somatic embryogenesis receptor-related kinase
  misc_feature (4)..(72): NCBI GI NO: 24461285 NR Description: leucine-rich repeat protein [Capsicum annuum]
MERGDALAVLKNSMSDPNNVLQSWNCTLVTPCTWFHVNCNSENSVTRVDLGNANLSGHLVPQLGQLLILECL

SEQ ID NO: 10391 - DNA, 1575 bp, Glycine max
  misc_feature (1)..(1575): Ceres Seq. ID no. 15226870
aaggaacctttgtttttgttgttgttgttgttgttcgtctggattgggttggctttagggctttgaatgccatctggggttttgctctcaggcaatcaagctccaaagctgacccctttctctcacttctaactcacataccttgttccattcttcactttctctctctagaactacaatggtagaagacatgtgtttcctctacaaggaaattcttgttatgaagcctccaaagagatcaccaatgttgttaaggacggcagtcataatattttcgatggtttgtggcgtttttatcttctctgtatgtctaaagcagataagcacccaagctaggactacatttatggacttcaaagtcattgacaaccattctcagagtatattgaagctaatgaatactcacctactacattatcccaaaccttcatcctttagcaggaacgagtgcgctcataatcctgtattattctttgccatattgtccaatcagagatctggtagtgggtggtttgagacccttttgaatagccacgttaatgtaagctcctatggggagatattttctgttagagagagaaggcaaaatgtttcttcaattttgctgactttagataaagtttacaatttggactggttcaatagtgcttccaagaatgagtgctctgctgcaactggtttgaagtggatgcttaatcagggattggtggagcaccataaggaaatagcagaatatttcaatcatagacgtgtttcaattatatttcttttccggagaaacttgctacgcaggatggtatcaatgctagccaattcatatgatcgttatgccaagctattgaatggaacgcacaaggctcatgtacactctgcagaagaggctgagattctttcgaagtacaagcctatcataaattctacatcattgctggatgacttgaaagatatggagatgagatctgctaaggctttagaatacttcaacagcactcggcatataattgtgtactatgaggatcttatgagaaatcacactctaaaagacgtgcaagagtttttaggattgccacagatggagttaacgagccgtcacgttaagatacatagaggaccattgtcagaccacattcagaactgggatgacgttaacaagacactgaaaggaaccatttatgagagttttcttgaagctgactattagtcgttatctcttctattctaactgctggagaaaggtgtaaataccatgccaactttgctgatcttttgccccctcaggaaagcctcagggttcaaaagttttggttttggttctggaacattacctcagtgttctgatgcctttttttgtcaccacctcgtgatcaattaacaccgttgataaatgaatgcttcttgtttctttgtagtatttttttttgttttttcttcttttttttttacctttctttagtgaacatgtatatggctttgccactaattgatttaagtaaagacgagcattgttttgttcaaaccggtgttcaatgatttgtttgtttgttcaattttaacccaatagatagataatacttg

SEQ ID NO: 10392 - protein, 340 aa, Glycine max
  peptide (1)..(340): Ceres Seq. ID no. 15226871
  misc_feature (1)..(340): NCBI GI NO: 40823013 NR Description: At2g15730 [Arabidopsis thaliana]
  misc_feature (1)..(340): NCBI GI NO: 22329158 NR Description: hypothetical protein [Arabidopsis thaliana]
  misc_feature (10)..(340): NCBI GI NO: 29824462 NR Description: unknown protein
  misc_feature (15)..(340): NCBI GI NO: 33146729 NR Description: unknown protein
  misc_feature (10)..(234): NCBI GI NO: 14029013 NR Description: Unknown protein [Oryza sativa]
  misc_feature (265)..(340): NCBI GI NO: 14029013 NR Description: Unknown protein [Oryza sativa]
  misc_feature (149)..(340): NCBI GI NO: 34904786 NR Description: contains ESTsAU096411
  misc_feature (15)..(175): NCBI GI NO: 34904786 NR Description: contains ESTsAU096411
  misc_feature (90)..(308): NCBI GI NO: 15229813 NR Description: expressed protein [Arabidopsis thaliana]
  misc_feature (234)..(340): NCBI GI NO: 25411661 NR Description: hypothetical protein At2g15730
MVEDMCFLYKEILVMKPPKRSPMLLRTAVIIFSMVCGVFIFSVCLKQISTQARTTFMDFKVIDNHSQSILKLMNTHLLHYPKPSSFSRNECAHNPVLFFAILSNQRSGSGWFETLLNSHVNVSSYGEIFSVRERRQNVSSILLTLDKVYNLDWFNSASKNECSAATGLKWMLNQGLVEHHKEIAEYFNHRRVSIIFLFRRNLLRRMVSMLANSYDRYAKLLNGTHKAHVHSAEEAEILSKYKPIINSTSLLDDLKDMEMRSAKALEYFNSTRHIIVYYEDLMRNHTLKDVQEFLGLPQMELTSRHVKIHRGPLSDHIQNWDDVNKTLKGTIYESFLEADY

SEQ ID NO: 10393 - protein, 336 aa, Glycine max
  peptide (1)..(336): Ceres Seq. ID no. 15226872
  misc_feature (1)..(336): NCBI GI NO: 40823013 NR Description: At2g15730 [Arabidopsis thaliana]
  misc_feature (1)..(336): NCBI GI NO: 22329158 NR Description: hypothetical protein [Arabidopsis thaliana]
  misc_feature (6)..(336): NCBI GI NO: 29824462 NR Description: unknown protein
  misc_feature (11)..(336): NCBI GI NO: 33146729 NR Description: unknown protein
  misc_feature (6)..(230): NCBI GI NO: 14029013 NR Description: Unknown protein [Oryza sativa]
  misc_feature (261)..(336): NCBI GI NO: 14029013 NR Description: Unknown protein [Oryza sativa]
  misc_feature (145)..(336): NCBI GI NO: 34904786 NR Description: contains ESTsAU096411
  misc_feature (11)..(171): NCBI GI NO: 34904786 NR Description: contains ESTsAU096411
  misc_feature (86)..(304): NCBI GI NO: 15229813 NR Description: expressed protein [Arabidopsis thaliana]
  misc_feature (230)..(336): NCBI GI NO: 25411661 NR Description: hypothetical protein At2g15730
MCFLYKEILVMKPPKRSPMLLRTAVIIFSMVCGVFIFSVCLKQISTQARTTFMDFKVIDNHSQSILKLMNTHLLHYPKPSSFSRNECAHNPVLFFAILSNQRSGSGWFETLLNSHVNVSSYGEIFSVRERRQNVSSILLTLDKVYNLDWFNSASKNECSAATGLKWMLNQGLVEHHKEIAEYFNHRRVSIIFLFRRNLLRRMVSMLANSYDRYAKLLNGTHKAHVHSAEEAEILSKYKPIINSTSLLDDLKDMEMRSAKALEYFNSTRHIIVYYEDLMRNHTLKDVQEFLGLPQMELTSRHVKIHRGPLSDHIQNWDDVNKTLKGTIYESFLEADY

SEQ ID NO: 10394 - protein, 326 aa, Glycine max
  peptide (1)..(326): Ceres Seq. ID no. 15226873
  misc_feature (1)..(326): NCBI GI NO: 40823013 NR Description: At2g15730 [Arabidopsis thaliana]
  misc_feature (1)..(326): NCBI GI NO: 22329158 NR Description: hypothetical protein [Arabidopsis thaliana]
  misc_feature (1)..(326): NCBI GI NO: 29824462 NR Description: unknown protein
  misc_feature (1)..(326): NCBI GI NO: 33146729 NR Description: unknown protein
  misc_feature (1)..(220): NCBI GI NO: 14029013 NR Description: Unknown protein [Oryza sativa]
  misc_feature (251)..(326): NCBI GI NO: 14029013 NR Description: Unknown protein [Oryza sativa]
  misc_feature (135)..(326): NCBI GI NO: 34904786 NR Description: contains ESTsAU096411
  misc_feature (1)..(161): NCBI GI NO: 34904786 NR Description: contains ESTsAU096411
  misc_feature (76)..(294): NCBI GI NO: 15229813 NR Description: expressed protein [Arabidopsis thaliana]
  misc_feature (220)..(326): NCBI GI NO: 25411661 NR Description: hypothetical protein At2g15730
MKPPKRSPMLLRTAVIIFSMVCGVFIFSVCLKQISTQARTTFMDFKVIDNHSQSILKLMNTHLLHYPKPSSFSRNECAHNPVLFFAILSNQRSGSGWFETLLNSHVNVSSYGEIFSVRERRQNVSSILLTLDKVYNLDWFNSASKNECSAATGLKWMLNQGLVEHHKEIAEYFNHRRVSIIFLFRRNLLRRMVSMLANSYDRYAKLLNGTHKAHVHSAEEAEILSKYKPIINSTSLLDDLKDMEMRSAKALEYFNSTRHIIVYYEDLMRNHTLKDVQEFLGLPQMELTSRHVKIHRGPLSDHIQNWDDVNKTLKGTIYESFLEADY

SEQ ID NO: 10395 - protein, 307 aa, Glycine max
  peptide (1)..(307): Ceres Seq. ID no. 15226874
  misc_feature (1)..(307): NCBI GI NO: 40823013 NR Description: At2g15730 [Arabidopsis thaliana]
  misc_feature (1)..(307): NCBI GI NO: 22329158 NR Description: hypothetical protein [Arabidopsis thaliana]
  misc_feature (1)..(307): NCBI GI NO: 29824462 NR Description: unknown protein
  misc_feature (1)..(307): NCBI GI NO: 33146729 NR Description: unknown protein
  misc_feature (1)..(201): NCBI GI NO: 14029013 NR Description: Unknown protein [Oryza sativa]
  misc_feature (232)..(307): NCBI GI NO: 14029013 NR Description: Unknown protein [Oryza sativa]
  misc_feature (116)..(307): NCBI GI NO: 34904786 NR Description: contains ESTsAU096411
  misc_feature (1)..(142): NCBI GI NO: 34904786 NR Description: contains ESTsAU096411
  misc_feature (57)..(275): NCBI GI NO: 15229813 NR Description: expressed protein [Arabidopsis thaliana]
  misc_feature (201)..(307): NCBI GI NO: 25411661 NR Description: hypothetical protein At2g15730
MVCGVFIFSVCLKQISTQARTTFMDFKVIDNHSQSILKLMNTHLLHYPKPSSFSRNECAHNPVLFFAILSNQRSGSGWFETLLNSHVNVSSYGEIFSVRERRQNVSSILLTLDKVYNLDWFNSASKNECSAATGLKWMLNQGLVEHHKEIAEYFNHRRVSIIFLFRRNLLRRMVSMLANSYDRYAKLLNGTHKAHVHSAEEAEILSKYKPIINSTSLLDDLKDMEMRSAKALEYFNSTRHIIVYYEDLMRNHTLKDVQEFLGLPQMELTSRHVKIHRGPLSDHIQNWDDVNKTLKGTIYESFLEADY

SEQ ID NO: 10396 - DNA, 1379 bp, Glycine max
  misc_feature (1)..(1379): Ceres Seq. ID no. 14312277
aaaaaccccttcccttccacatacactcttctccaatctcaccccaaaaaaacttgcaacaaaccaaaaaccatgcttgatgaatcagtctcatccaccccaacattcttgggcagcctgtacagctggttcacccccactgtcttcttcctcctcctccaactagtcattggcaccattttcatcatctcaaaccttaccaacacccacaaacaccaacaacaagaaccacaacaagcacatgactttccacaccaccatcttcccagatccccttccatgctccaaagactcaaatccatcaacttttacccttcttcccctttcagatcccaagaccttcaaaaccctcattttcacaacgctcatgaaaatgaacaacctcaacttgctagatctccctccgttctccagagactcaaatccatcaacctctacagttacttccctaccgaacccttcacttccaaactcacacccgaccagcacgtgccggagaaaccgtacgtgcgagaacaaaaccaaccgcaacaagtggtggaaacggacgaggaaaaagaagagggttatgatgactatgttgtcgaagatgacaacaacatcattatgagcacgcacaattacaattataacctcggagtctccgaagagggtggtgctggttcttcctcgctggacgagatttactgcaagctgcagcagcagggacaagagggtcatttcgagcggacgcactccgacacgaagccggcgtccggggaggttccggtgaagcttccgaggaagatgaagaagtcggcgagcagcaagtcggcgttctcgcacttcaaggaggacgacatcgtggagactcgccggccggccaccgtgagggaggccaaggtaaccggcggcgccgccgaggacgacgccgaggtggacgccaaggccgacgacttcatcaacaagttcaagcaacagctgaagctccagaggctggattccatcatcaggtacaaggaaatgattggcagagggtctgctaagtaagtactagttattaacaattattattattatcataatactatttttgttttactatgttattgataacaattatctactagttttatggatgagtaatctaattttcattggataacttaattggtcacgtctagcaggattatccgtttattacattttagtgtaatattttatttttttgttagtttttaattaggtttttttgtttctttttttgtaaaattagtgagcttttttggggggttggttatgtgaagtagggtgctgagtgtggcttgttcattttcagccactacttgtgggatgttgggaattagttgtaagttgttgctttatgttgatgactcctc

SEQ ID NO: 10397 - protein, 342 aa, Glycine max
  peptide (1)..(342): Ceres Seq. ID no. 14312278
  misc_feature (122)..(342): NCBI GI NO: 15225251 NR Description: expressed protein [Arabidopsis thaliana]
  misc_feature (32)..(150): NCBI GI NO: 549977 NR Description: cDNA-5-encoded protein
  misc_feature (243)..(336): NCBI GI NO: 549977 NR Description: cDNA-5-encoded protein
  misc_feature (37)..(163): NCBI GI NO: 18423922 NR Description: expressed protein [Arabidopsis thaliana]
  misc_feature (240)..(336): NCBI GI NO: 18423922 NR Description: expressed protein [Arabidopsis thaliana]
  misc_feature (37)..(150): NCBI GI NO: 15236117 NR Description: uncharacterized protein [Arabidopsis thaliana]
  misc_feature (243)..(336): NCBI GI NO: 15236117 NR Description: uncharacterized protein [Arabidopsis thaliana]
  misc_feature (37)..(163): NCBI GI NO: 21592758 NR Description: unknown [Arabidopsis thaliana]
  misc_feature (240)..(336): NCBI GI NO: 21592758 NR Description: unknown [Arabidopsis thaliana]
  misc_feature (37)..(163): NCBI GI NO: 14326479 NR Description: AT5g56980/MHM17_10 [Arabidopsis thaliana]
KNPFPSTYTLLQSHPKKTCNKPKTMLDESVSSTPTFLGSLYSWFTPTVFFLLLQLVIGTIFIISNLTNTHKHQQQEPQQAHDFPHHHLPRSPSMLQRLKSINFYPSSPFRSQDLQNPHFHNAHENEQPQLARSPSVLQRLKSINLYSYFPTEPFTSKLTPDQHVPEKPYVREQNQPQQVVETDEEKEEGYDDYVVEDDNNIIMSTHNYNYNLGVSEEGGAGSSSLDEIYCKLQQQGQEGHFERTHSDTKPASGEVPVKLPRKMKKSASSKSAFSHFKEDDIVETRRPATVREAKVTGGAAEDDAEVDAKADDFINKFKQQLKLQRLDSIIRYKEMIGRGSAK

SEQ ID NO: 10398 - protein, 318 aa, Glycine max
  peptide (1)..(318): Ceres Seq. ID no. 14312279
  misc_feature (98)..(318): NCBI GI NO: 15225251 NR Description: expressed protein [Arabidopsis thaliana]
  misc_feature (8)..(126): NCBI GI NO: 549977 NR Description: cDNA-5-encoded protein
  misc_feature (219)..(312): NCBI GI NO: 549977 NR Description: cDNA-5-encoded protein
  misc_feature (13)..(139): NCBI GI NO: 18423922 NR Description: expressed protein [Arabidopsis thaliana]
  misc_feature (216)..(312): NCBI GI NO: 18423922 NR Description: expressed protein [Arabidopsis thaliana]
  misc_feature (13)..(126): NCBI GI NO: 15236117 NR Description: uncharacterized protein [Arabidopsis thaliana]
  misc_feature (219)..(312): NCBI GI NO: 15236117 NR Description: uncharacterized protein [Arabidopsis thaliana]
  misc_feature (13)..(139): NCBI GI NO: 21592758 NR Description: unknown [Arabidopsis thaliana]
  misc_feature (216)..(312): NCBI GI NO: 21592758 NR Description: unknown [Arabidopsis thaliana]
  misc_feature (13)..(139): NCBI GI NO: 14326479 NR Description: AT5g56980/MHM17_10 [Arabidopsis thaliana]
MLDESVSSTPTFLGSLYSWFTPTVFFLLLQLVIGTIFIISNLTNTHKHQQQEPQQAHDFPHHHLPRSPSMLQRLKSINFYPSSPFRSQDLQNPHFHNAHENEQPQLARSPSVLQRLKSINLYSYFPTEPFTSKLTPDQHVPEKPYVREQNQPQQVVETDEEKEEGYDDYVVEDDNNIIMSTHNYNYNLGVSEEGGAGSSSLDEIYCKLQQQGQEGHFERTHSDTKPASGEVPVKLPRKMKKSASSKSAFSHFKEDDIVETRRPATVREAKVTGGAAEDDAEVDAKADDFINKFKQQLKLQRLDSIIRYKEMIGRGSAK

SEQ ID NO: 10399 - protein, 249 aa, Glycine max
  peptide (1)..(249): Ceres Seq. ID no. 14312280
  misc_feature (29)..(249): NCBI GI NO: 15225251 NR Description: expressed protein [Arabidopsis thaliana]
  misc_feature (1)..(57): NCBI GI NO: 549977 NR Description: cDNA-5-encoded protein
  misc_feature (150)..(243): NCBI GI NO: 549977 NR Description: cDNA-5-encoded protein
  misc_feature (1)..(70): NCBI GI NO: 18423922 NR Description: expressed protein [Arabidopsis thaliana]
  misc_feature (147)..(243): NCBI GI NO: 18423922 NR Description: expressed protein [Arabidopsis thaliana]
  misc_feature (1)..(57): NCBI GI NO: 15236117 NR Description: uncharacterized protein [Arabidopsis thaliana]
  misc_feature (150)..(243): NCBI GI NO: 15236117 NR Description: uncharacterized protein [Arabidopsis thaliana]
  misc_feature (1)..(70): NCBI GI NO: 21592758 NR Description: unknown [Arabidopsis thaliana]
  misc_feature (147)..(243): NCBI GI NO: 21592758 NR Description: unknown [Arabidopsis thaliana]
  misc_feature (1)..(70): NCBI GI NO: 14326479 NR Description: AT5g56980/MHM17_10 [Arabidopsis thaliana]
MLQRLKSINFYPSSPFRSQDLQNPHFHNAHENEQPQLARSPSVLQRLKSINLYSYFPTEPFTSKLTPDQHVPEKPYVREQNQPQQVVETDEEKEEGYDDYVVEDDNNIIMSTHNYNYNLGVSEEGGAGSSSLDEIYCKLQQQGQEGHFERTHSDTKPASGEVPVKLPRKMKKSASSKSAFSHFKEDDIVETRRPATVREAKVTGGAAEDDAEVDAKADDFINKFKQQLKLQRLDSIIRYKEMIGRGSAK

SEQ ID NO: 10400 - DNA, 1455 bp, Glycine max
  misc_feature (1)..(1455): Ceres Seq. ID no. 14310524
acattttctacgtattgaatctcaagattctaagagagattttgctgctctttgaagaagggtgtttgcttgattttggtgatgtcgctgctctcagatctcatcaaccttaacctctcagacactactgagaaggtgatcgcagagtacatatggatcggtggatcaggaatggacctgaggagcaaagcaaggactctcccaggaccagttagcgacccttcaaagcttcccaagtggaactatgatggttccagcacaggccaagctcctggagaagacagtgaagtgattatatacccacaagccattttcagggatccattcagaaggggcaacaatatcttggttatctgtgatgcttacactccagctggagaacccattcccactaacaagaggcacgatgctgccaaggttttcagccatcctgatgttgttgctgaagagacatggtatggtattgagcaggaatacaccttgttgcagaaagatatccaatggcctcttgggtggcctgttggtggtttccctggaccacagggtccatactactgtggtgttggcgctgacaaggcttttggccgtgacattgttgacgcacattacaaagcctgtctttatgctggcatcaacatcagtggaattaatggagaagtgatgcccggtcagtgggaattccaagttggaccttcagttggaatctcagctggtgacgaggtgtgggcagctcgttacatcttggagaggatcactgagattgctggtgtggtggtttcctttgatcccaagccaattcagggtgattggaatggtgctggtgctcacacaaactacagcactaagtccatgagaaatgatggtggctatgaagtgatcaaaaccgccattgagaagttggggaagagacacaaggagcacattgctgcttatggagaaggcaacgagcgtcgtttgacagggcgccacgaaaccgctgacatcaacaccttcttatggggagttgcaaaccgtggagcttcagttagggttgggagggacacagagaaagcagggaagggatattttgaggacagaaggccagcttctaacatggacccatatgtggttacttccatgattgcagacacaaccattctgtggaagccatgagcaaaacttgcatgttgtctccctttggatggaacaaggaacaaggaacaaggaacagttatgcttttctaagtagggtttggtcctttttattttttaccttttgatttttctaggatttcgatttgtggctactttggttggtgcaaccaactgccaagggttgttcattgttttctattcctttccctcgttttccgattgttacaataataataataataatgtaatatggttattttcagtctcaaacaaaagtaatgctgattgtgaagtataataatatatgaaattgtcatgtcc

SEQ ID NO: 10401 - protein, 356 aa, Glycine max
  peptide (1)..(356): Ceres Seq. ID no. 14310525
  misc_feature (103)..(355): Pfam Name: Pfam Description:  Glutamine synthetase, catalytic domain
  misc_feature (1)..(356): NCBI GI NO: 10946357 NR Description: cytosolic glutamine synthetase GSbeta1
  misc_feature (1)..(356): NCBI GI NO: 417060 NR Description: Glutamine synthetase nodule isozyme
  misc_feature (1)..(356): NCBI GI NO: 121334 NR Description: Glutamine synthetase PR-1
  misc_feature (1)..(356): NCBI GI NO: 121336 NR Description: Glutamine synthetase cytosolic isozyme 1
  misc_feature (1)..(356): NCBI GI NO: 121368 NR Description: Glutamine synthetase, cytosolic isozyme
  misc_feature (1)..(356): NCBI GI NO: 12643762 NR Description: GLUTAMINE SYNTHETASE, CYTOSOLIC ISOZYME
  misc_feature (1)..(356): NCBI GI NO: 2073448 NR Description: glutamine synthetase
  misc_feature (1)..(356): NCBI GI NO: 1835156 NR Description: glutamine synthetase [Medicago truncatula]
  misc_feature (1)..(356): NCBI GI NO: 1707959 NR Description: GLUTAMINE SYNTHETASE CYTOSOLIC ISOZYME 2
  misc_feature (1)..(356): NCBI GI NO: 1246768 NR Description: glutamate synthetase; glutamate--ammonia ligase
MSLLSDLINLNLSDTTEKVIAEYIWIGGSGMDLRSKARTLPGPVSDPSKLPKWNYDGSSTGQAPGEDSEVIIYPQAIFRDPFRRGNNILVICDAYTPAGEPIPTNKRHDAAKVFSHPDVVAEETWYGIEQEYTLLQKDIQWPLGWPVGGFPGPQGPYYCGVGADKAFGRDIVDAHYKACLYAGINISGINGEVMPGQWEFQVGPSVGISAGDEVWAARYILERITEIAGVVVSFDPKPIQGDWNGAGAHTNYSTKSMRNDGGYEVIKTAIEKLGKRHKEHIAAYGEGNERRLTGRHETADINTFLWGVANRGASVRVGRDTEKAGKGYFEDRRPASNMDPYVVTSMIADTTILWKP

SEQ ID NO: 10402 - protein, 326 aa, Glycine max
  peptide (1)..(326): Ceres Seq. ID no. 14310526
  misc_feature (73)..(325): Pfam Name: Pfam Description:  Glutamine synthetase, catalytic domain
  misc_feature (1)..(326): NCBI GI NO: 10946357 NR Description: cytosolic glutamine synthetase GSbeta1
  misc_feature (1)..(326): NCBI GI NO: 417060 NR Description: Glutamine synthetase nodule isozyme
  misc_feature (1)..(326): NCBI GI NO: 121334 NR Description: Glutamine synthetase PR-1
  misc_feature (1)..(326): NCBI GI NO: 121336 NR Description: Glutamine synthetase cytosolic isozyme 1
  misc_feature (1)..(326): NCBI GI NO: 121368 NR Description: Glutamine synthetase, cytosolic isozyme
  misc_feature (1)..(326): NCBI GI NO: 12643762 NR Description: GLUTAMINE SYNTHETASE, CYTOSOLIC ISOZYME
  misc_feature (1)..(326): NCBI GI NO: 2073448 NR Description: glutamine synthetase
  misc_feature (1)..(326): NCBI GI NO: 1835156 NR Description: glutamine synthetase [Medicago truncatula]
  misc_feature (1)..(326): NCBI GI NO: 1707959 NR Description: GLUTAMINE SYNTHETASE CYTOSOLIC ISOZYME 2
  misc_feature (1)..(326): NCBI GI NO: 1246768 NR Description: glutamate synthetase; glutamate--ammonia ligase
MDLRSKARTLPGPVSDPSKLPKWNYDGSSTGQAPGEDSEVIIYPQAIFRDPFRRGNNILVICDAYTPAGEPIPTNKRHDAAKVFSHPDVVAEETWYGIEQEYTLLQKDIQWPLGWPVGGFPGPQGPYYCGVGADKAFGRDIVDAHYKACLYAGINISGINGEVMPGQWEFQVGPSVGISAGDEVWAARYILERITEIAGVVVSFDPKPIQGDWNGAGAHTNYSTKSMRNDGGYEVIKTAIEKLGKRHKEHIAAYGEGNERRLTGRHETADINTFLWGVANRGASVRVGRDTEKAGKGYFEDRRPASNMDPYVVTSMIADTTILWKP

SEQ ID NO: 10403 - DNA, 1722 bp, Glycine max
  misc_feature (1)..(1722): Ceres Seq. ID no. 14311808
atcccggaaatggagggtggtggtgacgttaagggttgggcgttggagtttcttctccgggctcagaacccagtcgttcccagtaacctaattaagaaagtcattctaatagtccccctttcagacttttattccaggctcaagaagacgcttcttctccgagcccttcaagatcacttgttcgctgtctctgtccctgagtccgttctcgaaaccctcgagcaagtcgaggaactccaccgcctcggcgatgacgacgacggagctctggtcaccacctcatccgccatgagcgccgcctactgtgccgtcgcggtggagtgcactctcaagcacctgctgctggagctacacaacaaccctgcttatctcggcgcggtgaacaggatatggcgcggtagggttcggctcatgagcggttccggggaggggagcctcctgctctcgccagagctggagcggtggagaaccgacattgaagcttcccttctggattcgtcggtgagggagaggttggcctccattgatacaagaagggatgccgtcttcaagctccgggattatttgaaggaagcttggaccgatttggggccttcatttcttgagcgagcggcgttggcgcatataaacaacaatgccctagccgcgaatcactctgaggattctcaacagccggagagagaaattgagaagtgcactgctgctcctgctgaggaagtgcatccctcaacagatgttgagatccaaaaggttggggagtgcggttctgtggagttgcaaaagttggctgaggattctctacttgatttgttggaagtgaatgaggaggcatcgatggaagaacaaagtagagatgtagatgtaccttgcccacatgctattaatgacaatgaggctgatctgatggaaaaggatcaaacttctgccgaggaagtgcttccctcaacaactgttgaggtccaaaaggttagggaatgtggttccgtggagttgcaaaagttggctaaggattctctacttaattcgttggaagtgaatgaggaggcacatattgaaagtagagatgcagatgtaccttgcccacttgttattagtaacaatgaggctgatctgatggaaaaggatcaaacttctatccctcataatcatgaccataagccaagtttaatggaaagaaatagttctgctcgtatttatgagtgggatgattcaatagatggcttggaggatggaacatcagatcatgcaactagatttaatttgcctagtcccaaggggagaaaagtttctccattgaataagtacaaacctgcaaacattacaaagaggagaaaagtgaaaaaatggagtcagttggaagaggagactctaaggactgctgtagacaagtttggcaggggaaattggaagttaatcctagattctcacaaagatatatttgaagagagaactgaagttgatttgaaggacaagtggagaaatatgacgtaatatgggtgcaaatgaatcacaatgtggaatattgcagagggcggtagatcgtgtggatatctttttggcttaagcagagtctacttcctaaatttctttaatttagctcttcaaactattgtctcctaatttgatgtctgtggttgtattttggattaagtaatattcatactattttcatgtttgtacttttaatgacactaacgatggtaaaatgacaggagtttatat

SEQ ID NO: 10404 - protein, 496 aa, Glycine max
  peptide (1)..(496): Ceres Seq. ID no. 14311809
  misc_feature (446)..(495): Pfam Name: Pfam Description:  Myb-like DNA-binding domain
  misc_feature (234)..(495): NCBI GI NO: 40388419 NR Description: ANTHER INDEHISCENCE1
  misc_feature (13)..(314): NCBI GI NO: 15218285 NR Description: expressed protein [Arabidopsis thaliana]
  misc_feature (13)..(205): NCBI GI NO: 15237172 NR Description: unknown protein (gb|AAF63134.1) -related
  misc_feature (386)..(496): NCBI GI NO: 34394040 NR Description: unknown protein
  misc_feature (207)..(493): NCBI GI NO: 22329375 NR Description: myb family transcription factor
  misc_feature (376)..(495): NCBI GI NO: 15218285 NR Description: expressed protein [Arabidopsis thaliana]
  misc_feature (207)..(493): NCBI GI NO: 25406946 NR Description: hypothetical protein
IPEMEGGGDVKGWALEFLLRAQNPVVPSNLIKKVILIVPLSDFYSRLKKTLLLRALQDHLFAVSVPESVLETLEQVEELHRLGDDDDGALVTTSSAMSAAYCAVAVECTLKHLLLELHNNPAYLGAVNRIWRGRVRLMSGSGEGSLLLSPELERWRTDIEASLLDSSVRERLASIDTRRDAVFKLRDYLKEAWTDLGPSFLERAALAHINNNALAANHSEDSQQPEREIEKCTAAPAEEVHPSTDVEIQKVGECGSVELQKLAEDSLLDLLEVNEEASMEEQSRDVDVPCPHAINDNEADLMEKDQTSAEEVLPSTTVEVQKVRECGSVELQKLAKDSLLNSLEVNEEAHIESRDADVPCPLVISNNEADLMEKDQTSIPHNHDHKPSLMERNSSARIYEWDDSIDGLEDGTSDHATRFNLPSPKGRKVSPLNKYKPANITKRRKVKKWSQLEEETLRTAVDKFGRGNWKLILDSHKDIFEERTEVDLKDKWRNMT

SEQ ID NO: 10405 - protein, 493 aa, Glycine max
  peptide (1)..(493): Ceres Seq. ID no. 14311810
  misc_feature (443)..(492): Pfam Name: Pfam Description:  Myb-like DNA-binding domain
  misc_feature (231)..(492): NCBI GI NO: 40388419 NR Description: ANTHER INDEHISCENCE1
  misc_feature (10)..(311): NCBI GI NO: 15218285 NR Description: expressed protein [Arabidopsis thaliana]
  misc_feature (10)..(202): NCBI GI NO: 15237172 NR Description: unknown protein (gb|AAF63134.1) -related
  misc_feature (383)..(493): NCBI GI NO: 34394040 NR Description: unknown protein
  misc_feature (204)..(490): NCBI GI NO: 22329375 NR Description: myb family transcription factor
  misc_feature (373)..(492): NCBI GI NO: 15218285 NR Description: expressed protein [Arabidopsis thaliana]
  misc_feature (204)..(490): NCBI GI NO: 25406946 NR Description: hypothetical protein
MEGGGDVKGWALEFLLRAQNPVVPSNLIKKVILIVPLSDFYSRLKKTLLLRALQDHLFAVSVPESVLETLEQVEELHRLGDDDDGALVTTSSAMSAAYCAVAVECTLKHLLLELHNNPAYLGAVNRIWRGRVRLMSGSGEGSLLLSPELERWRTDIEASLLDSSVRERLASIDTRRDAVFKLRDYLKEAWTDLGPSFLERAALAHINNNALAANHSEDSQQPEREIEKCTAAPAEEVHPSTDVEIQKVGECGSVELQKLAEDSLLDLLEVNEEASMEEQSRDVDVPCPHAINDNEADLMEKDQTSAEEVLPSTTVEVQKVRECGSVELQKLAKDSLLNSLEVNEEAHIESRDADVPCPLVISNNEADLMEKDQTSIPHNHDHKPSLMERNSSARIYEWDDSIDGLEDGTSDHATRFNLPSPKGRKVSPLNKYKPANITKRRKVKKWSQLEEETLRTAVDKFGRGNWKLILDSHKDIFEERTEVDLKDKWRNMT

SEQ ID NO: 10406 - protein, 400 aa, Glycine max
  peptide (1)..(400): Ceres Seq. ID no. 14311811
  misc_feature (350)..(399): Pfam Name: Pfam Description:  Myb-like DNA-binding domain
  misc_feature (138)..(399): NCBI GI NO: 40388419 NR Description: ANTHER INDEHISCENCE1
  misc_feature (1)..(218): NCBI GI NO: 15218285 NR Description: expressed protein [Arabidopsis thaliana]
  misc_feature (1)..(109): NCBI GI NO: 15237172 NR Description: unknown protein (gb|AAF63134.1) -related
  misc_feature (290)..(400): NCBI GI NO: 34394040 NR Description: unknown protein
  misc_feature (111)..(397): NCBI GI NO: 22329375 NR Description: myb family transcription factor
  misc_feature (280)..(399): NCBI GI NO: 15218285 NR Description: expressed protein [Arabidopsis thaliana]
  misc_feature (111)..(397): NCBI GI NO: 25406946 NR Description: hypothetical protein
MSAAYCAVAVECTLKHLLLELHNNPAYLGAVNRIWRGRVRLMSGSGEGSLLLSPELERWRTDIEASLLDSSVRERLASIDTRRDAVFKLRDYLKEAWTDLGPSFLERAALAHINNNALAANHSEDSQQPEREIEKCTAAPAEEVHPSTDVEIQKVGECGSVELQKLAEDSLLDLLEVNEEASMEEQSRDVDVPCPHAINDNEADLMEKDQTSAEEVLPSTTVEVQKVRECGSVELQKLAKDSLLNSLEVNEEAHIESRDADVPCPLVISNNEADLMEKDQTSIPHNHDHKPSLMERNSSARIYEWDDSIDGLEDGTSDHATRFNLPSPKGRKVSPLNKYKPANITKRRKVKKWSQLEEETLRTAVDKFGRGNWKLILDSHKDIFEERTEVDLKDKWRNMT

SEQ ID NO: 10407 - DNA, 1368 bp, Glycine max
  misc_feature (1)..(1368): Ceres Seq. ID no. 13638160
ctctttcgttatctggtcatggttgtttgcgacttctgggagctcagtctcgctcagagtcagagaaaaacacccaaatcaaatattatcatggagcccagcttggatttgagactgggctttgtccccaaacccctttccctgtttttcggcgacgtttctgggaacagagacaagtgcgacaaagtggtcacactcgatggcttcgtgcagagattggaggaagagttgacaaaggtcgaggctttcaaacgcgagcttcctctctgcattctcctcctaaacgatgctatagcgagattgaaggaggaaaaagtgaagtgttcgggaatgcaagatccgcctcttaaaaccagttcaggaggaaatgaaaatgaaaactctgagaagaagaattggatgagttcagcacagctttggagcactcagaaatccaaatcgaggaatgaggaagatgataggtctgtgccagcgaactcaattaatgggaattcgtgtgtccccgagaaggagggctcgcaagttccgagctttggtttgatggctcgtgcttctgaactgagtcatagcaattccaagagtgttggtggagatactagttctggctcctctttgctccgtgttgaggtacagagtcagccacagccgccgcagcatatgcagcagaatccgaggaaacaacggcggtgctggtcgccggagcttcaccggcgctttgtggacgcccttcaacaacttggtggagcacaagtggccactcctaaacagattagagaactgatgcaggtggaaggccttacaaatgatgaagtgaaaagtcatttgcaaaagtacaggcttcatgttaggagattcccagttttttcaattggccaggttgataatggctcatggatgacacaggatgaatgtggggataaatcaaagggaaacatgtcacagtctggttctccacagggtcctctcacacctctgctcctaggaggagcaggatccgctaagggtctctcaagccctggacggaacagtgtggatgcagaagatgagcaatcatcagattgccggaattggaaaggagggctccaccaccagcagcttgaaactgataatcacagcctctaaaattttgcagataaatgataatacaatacataaaatgatgaggagttgaaggcccagaatttgacaacataagaataatagagatctaacacataaaagaactatagggatcaagtttatgctaccagtattttaaactgtttggtagagagcaactgaggttttgcagatttttcaaggtttcttcttttctatttttaaactcagtatagttgtatggagcttaaattttactgggcaattttc

SEQ ID NO: 10408 - protein, 373 aa, Glycine max
  peptide (1)..(373): Ceres Seq. ID no. 13638161
  misc_feature (228)..(279): Pfam Name: Pfam Description:  Myb-like DNA-binding domain
  misc_feature (34)..(356): NCBI GI NO: 18419989 NR Description: cytoskeletal protein -related
  misc_feature (200)..(358): NCBI GI NO: 33146555 NR Description: putative cytoskeletal protein-like protein
  misc_feature (34)..(178): NCBI GI NO: 33146555 NR Description: putative cytoskeletal protein-like protein
  misc_feature (34)..(356): NCBI GI NO: 14532434 NR Description: AT4g37180/C7A10_180 [Arabidopsis thaliana]
  misc_feature (34)..(356): NCBI GI NO: 30690890 NR Description: cytoskeletal protein -related
  misc_feature (200)..(358): NCBI GI NO: 34915398 NR Description: contains ESTsAU055771
  misc_feature (34)..(178): NCBI GI NO: 34915398 NR Description: contains ESTsAU055771
  misc_feature (47)..(347): NCBI GI NO: 18402692 NR Description: myb family transcription factor
  misc_feature (47)..(347): NCBI GI NO: 21554992 NR Description: unknown [Arabidopsis thaliana]
  misc_feature (31)..(164): NCBI GI NO: 18395562 NR Description: myb family transcription factor
LFRYLVMVVCDFWELSLAQSQRKTPKSNIIMEPSLDLRLGFVPKPLSLFFGDVSGNRDKCDKVVTLDGFVQRLEEELTKVEAFKRELPLCILLLNDAIARLKEEKVKCSGMQDPPLKTSSGGNENENSEKKNWMSSAQLWSTQKSKSRNEEDDRSVPANSINGNSCVPEKEGSQVPSFGLMARASELSHSNSKSVGGDTSSGSSLLRVEVQSQPQPPQHMQQNPRKQRRCWSPELHRRFVDALQQLGGAQVATPKQIRELMQVEGLTNDEVKSHLQKYRLHVRRFPVFSIGQVDNGSWMTQDECGDKSKGNMSQSGSPQGPLTPLLLGGAGSAKGLSSPGRNSVDAEDEQSSDCRNWKGGLHHQQLETDNHSL

SEQ ID NO: 10409 - protein, 367 aa, Glycine max
  peptide (1)..(367): Ceres Seq. ID no. 13638162
  misc_feature (222)..(273): Pfam Name: Pfam Description:  Myb-like DNA-binding domain
  misc_feature (28)..(350): NCBI GI NO: 18419989 NR Description: cytoskeletal protein -related
  misc_feature (194)..(352): NCBI GI NO: 33146555 NR Description: putative cytoskeletal protein-like protein
  misc_feature (28)..(172): NCBI GI NO: 33146555 NR Description: putative cytoskeletal protein-like protein
  misc_feature (28)..(350): NCBI GI NO: 14532434 NR Description: AT4g37180/C7A10_180 [Arabidopsis thaliana]
  misc_feature (28)..(350): NCBI GI NO: 30690890 NR Description: cytoskeletal protein -related
  misc_feature (194)..(352): NCBI GI NO: 34915398 NR Description: contains ESTsAU055771
  misc_feature (28)..(172): NCBI GI NO: 34915398 NR Description: contains ESTsAU055771
  misc_feature (41)..(341): NCBI GI NO: 18402692 NR Description: myb family transcription factor
  misc_feature (41)..(341): NCBI GI NO: 21554992 NR Description: unknown [Arabidopsis thaliana]
  misc_feature (25)..(158): NCBI GI NO: 18395562 NR Description: myb family transcription factor
MVVCDFWELSLAQSQRKTPKSNIIMEPSLDLRLGFVPKPLSLFFGDVSGNRDKCDKVVTLDGFVQRLEEELTKVEAFKRELPLCILLLNDAIARLKEEKVKCSGMQDPPLKTSSGGNENENSEKKNWMSSAQLWSTQKSKSRNEEDDRSVPANSINGNSCVPEKEGSQVPSFGLMARASELSHSNSKSVGGDTSSGSSLLRVEVQSQPQPPQHMQQNPRKQRRCWSPELHRRFVDALQQLGGAQVATPKQIRELMQVEGLTNDEVKSHLQKYRLHVRRFPVFSIGQVDNGSWMTQDECGDKSKGNMSQSGSPQGPLTPLLLGGAGSAKGLSSPGRNSVDAEDEQSSDCRNWKGGLHHQQLETDNHSL

SEQ ID NO: 10410 - protein, 343 aa, Glycine max
  peptide (1)..(343): Ceres Seq. ID no. 13638163
  misc_feature (198)..(249): Pfam Name: Pfam Description:  Myb-like DNA-binding domain
  misc_feature (4)..(326): NCBI GI NO: 18419989 NR Description: cytoskeletal protein -related
  misc_feature (170)..(328): NCBI GI NO: 33146555 NR Description: putative cytoskeletal protein-like protein
  misc_feature (4)..(148): NCBI GI NO: 33146555 NR Description: putative cytoskeletal protein-like protein
  misc_feature (4)..(326): NCBI GI NO: 14532434 NR Description: AT4g37180/C7A10_180 [Arabidopsis thaliana]
  misc_feature (4)..(326): NCBI GI NO: 30690890 NR Description: cytoskeletal protein -related
  misc_feature (170)..(328): NCBI GI NO: 34915398 NR Description: contains ESTsAU055771
  misc_feature (4)..(148): NCBI GI NO: 34915398 NR Description: contains ESTsAU055771
  misc_feature (17)..(317): NCBI GI NO: 18402692 NR Description: myb family transcription factor
  misc_feature (17)..(317): NCBI GI NO: 21554992 NR Description: unknown [Arabidopsis thaliana]
  misc_feature (1)..(134): NCBI GI NO: 18395562 NR Description: myb family transcription factor
MEPSLDLRLGFVPKPLSLFFGDVSGNRDKCDKVVTLDGFVQRLEEELTKVEAFKRELPLCILLLNDAIARLKEEKVKCSGMQDPPLKTSSGGNENENSEKKNWMSSAQLWSTQKSKSRNEEDDRSVPANSINGNSCVPEKEGSQVPSFGLMARASELSHSNSKSVGGDTSSGSSLLRVEVQSQPQPPQHMQQNPRKQRRCWSPELHRRFVDALQQLGGAQVATPKQIRELMQVEGLTNDEVKSHLQKYRLHVRRFPVFSIGQVDNGSWMTQDECGDKSKGNMSQSGSPQGPLTPLLLGGAGSAKGLSSPGRNSVDAEDEQSSDCRNWKGGLHHQQLETDNHSL

SEQ ID NO: 10411 - DNA, 1430 bp, Glycine max
  misc_feature (1)..(1430): Ceres Seq. ID no. 15227289
  misc_feature (1428)..(1428): n is a, c, t, g, unknown, or other
  misc_feature (1426)..(1426): n is a, c, t, g, unknown, or other
  misc_feature (1425)..(1425): n is a, c, t, g, unknown, or other
  misc_feature (1427)..(1427): n is a, c, t, g, unknown, or other
ccgggccccccctcgagtcagctacgtaggcccccccccccaattttcataattatttttttctttgaaaccagccaagagggttatttttgatccctcaaagctaatttctctctctctttttttatttccgggactgaagaggttgtctatttgaaatctccttcatcctttcctttcttgtagaaaactttttaaatttttttgtcagtgggtgttttaattaaccacctgttcttcaagttttagaaagacgcaggttgaattaattagtatcatggcagctttgatggatttttacagcagcagcccagagtttcaacttcactcagatccattcaggggagaactaatggaagttcttgaaccttttatgaaaagtccttctcccaactatttcccttcctccccctccctccctaatctttactcaaacgggttatccagcaacacccaaagcttaattggcttcgggcaagcgcaacccacatctcttgtgggcctgaaccacctaaccccatctcagatctctcagatccaagcccaaatccagatccaggcccagcagcatcagaatcgcagcaacaccctgagcttccttgggccgaagcccatccccatgaagcacgcgggcatgcctccgaagcccacgaagctttacagaggggtgagacagaggcactggggaaagtgggtggctgagatcagacttcccaagaaccggaccaggctgtggctgggaaccttcgacaccgccgaggaagccgctctggcatacgacaaggccgcgtacaagctccgaggtgacttcgccaggctcaacttcccaaacctgcgacaccagggttcctccgtcggtggtgatttcggggagtacaagcctcttcattccgctgttgacgccaagcttcaggccatttgcgaaggcctggctgagctgcagaaacaggggaagaccgagaagcctccgaggaagtcgcgttccaaactcgcggagaaggttgtttccgacaaggagaacaacaactcttgtaaggtggaagctgcgtcctggtcgtcggaaggttcttcgccgctttcggatctgacgtttgctgacgtgagcgaggctcagtgggaaggtgattcggataattataatctccagaagtacccctcttatgagatcgattgggattctctgtgaagtgtcctattatgtatggtctagtctaggtcttagtgtctcttaggtggctgctactgcaatggagtttttggcaattgcagggctagtactattctgtgtataatctctctaccttgctcacagctggtttttttcttgcttgaccagggagaattagtccgcttaatatgtttttcaagtgcatcgctgtaatctacttcaatttcatcatcttataaaatatattattctactannnnaa

SEQ ID NO: 10412 - protein, 302 aa, Glycine max
  peptide (1)..(302): Ceres Seq. ID no. 15227290
  misc_feature (125)..(189): Pfam Name: Pfam Description:  AP2 domain
  misc_feature (1)..(302): NCBI GI NO: 6573771 NR Description: F28K19.29 [Arabidopsis thaliana]
  misc_feature (1)..(302): NCBI GI NO: 15218204 NR Description: AP2 domain transcription factor RAP2.4
  misc_feature (1)..(302): NCBI GI NO: 13877779 NR Description: putative AP2 domain-containing protein
  misc_feature (64)..(302): NCBI GI NO: 27436378 NR Description: dehydration-responsive element binding protein 3
  misc_feature (98)..(302): NCBI GI NO: 2281633 NR Description: AP2 domain containing protein RAP2.4
  misc_feature (108)..(302): NCBI GI NO: 15219839 NR Description: AP2 domain transcription factor, putative
  misc_feature (1)..(84): NCBI GI NO: 15219839 NR Description: AP2 domain transcription factor, putative
  misc_feature (126)..(302): NCBI GI NO: 12324244 NR Description: putative AP2 domain transcriptional regulator
  misc_feature (102)..(251): NCBI GI NO: 8571476 NR Description: apetala2 domain-containing protein
  misc_feature (26)..(302): NCBI GI NO: 15236020 NR Description: AP2 domain transcription factor, putative
MAALMDFYSSSPEFQLHSDPFRGELMEVLEPFMKSPSPNYFPSSPSLPNLYSNGLSSNTQSLIGFGQAQPTSLVGLNHLTPSQISQIQAQIQIQAQQHQNRSNTLSFLGPKPIPMKHAGMPPKPTKLYRGVRQRHWGKWVAEIRLPKNRTRLWLGTFDTAEEAALAYDKAAYKLRGDFARLNFPNLRHQGSSVGGDFGEYKPLHSAVDAKLQAICEGLAELQKQGKTEKPPRKSRSKLAEKVVSDKENNNSCKVEAASWSSEGSSPLSDLTFADVSEAQWEGDSDNYNLQKYPSYEIDWDSL

SEQ ID NO: 10413 - protein, 298 aa, Glycine max
  peptide (1)..(298): Ceres Seq. ID no. 15227291
  misc_feature (121)..(185): Pfam Name: Pfam Description:  AP2 domain
  misc_feature (1)..(298): NCBI GI NO: 6573771 NR Description: F28K19.29 [Arabidopsis thaliana]
  misc_feature (1)..(298): NCBI GI NO: 15218204 NR Description: AP2 domain transcription factor RAP2.4
  misc_feature (1)..(298): NCBI GI NO: 13877779 NR Description: putative AP2 domain-containing protein
  misc_feature (60)..(298): NCBI GI NO: 27436378 NR Description: dehydration-responsive element binding protein 3
  misc_feature (94)..(298): NCBI GI NO: 2281633 NR Description: AP2 domain containing protein RAP2.4
  misc_feature (104)..(298): NCBI GI NO: 15219839 NR Description: AP2 domain transcription factor, putative
  misc_feature (1)..(80): NCBI GI NO: 15219839 NR Description: AP2 domain transcription factor, putative
  misc_feature (122)..(298): NCBI GI NO: 12324244 NR Description: putative AP2 domain transcriptional regulator
  misc_feature (98)..(247): NCBI GI NO: 8571476 NR Description: apetala2 domain-containing protein
  misc_feature (22)..(298): NCBI GI NO: 15236020 NR Description: AP2 domain transcription factor, putative
MDFYSSSPEFQLHSDPFRGELMEVLEPFMKSPSPNYFPSSPSLPNLYSNGLSSNTQSLIGFGQAQPTSLVGLNHLTPSQISQIQAQIQIQAQQHQNRSNTLSFLGPKPIPMKHAGMPPKPTKLYRGVRQRHWGKWVAEIRLPKNRTRLWLGTFDTAEEAALAYDKAAYKLRGDFARLNFPNLRHQGSSVGGDFGEYKPLHSAVDAKLQAICEGLAELQKQGKTEKPPRKSRSKLAEKVVSDKENNNSCKVEAASWSSEGSSPLSDLTFADVSEAQWEGDSDNYNLQKYPSYEIDWDSL

SEQ ID NO: 10414 - protein, 277 aa, Glycine max
  peptide (1)..(277): Ceres Seq. ID no. 15227292
  misc_feature (100)..(164): Pfam Name: Pfam Description:  AP2 domain
  misc_feature (1)..(277): NCBI GI NO: 6573771 NR Description: F28K19.29 [Arabidopsis thaliana]
  misc_feature (1)..(277): NCBI GI NO: 15218204 NR Description: AP2 domain transcription factor RAP2.4
  misc_feature (1)..(277): NCBI GI NO: 13877779 NR Description: putative AP2 domain-containing protein
  misc_feature (39)..(277): NCBI GI NO: 27436378 NR Description: dehydration-responsive element binding protein 3
  misc_feature (73)..(277): NCBI GI NO: 2281633 NR Description: AP2 domain containing protein RAP2.4
  misc_feature (83)..(277): NCBI GI NO: 15219839 NR Description: AP2 domain transcription factor, putative
  misc_feature (1)..(59): NCBI GI NO: 15219839 NR Description: AP2 domain transcription factor, putative
  misc_feature (101)..(277): NCBI GI NO: 12324244 NR Description: putative AP2 domain transcriptional regulator
  misc_feature (77)..(226): NCBI GI NO: 8571476 NR Description: apetala2 domain-containing protein
  misc_feature (1)..(277): NCBI GI NO: 15236020 NR Description: AP2 domain transcription factor, putative
MEVLEPFMKSPSPNYFPSSPSLPNLYSNGLSSNTQSLIGFGQAQPTSLVGLNHLTPSQISQIQAQIQIQAQQHQNRSNTLSFLGPKPIPMKHAGMPPKPTKLYRGVRQRHWGKWVAEIRLPKNRTRLWLGTFDTAEEAALAYDKAAYKLRGDFARLNFPNLRHQGSSVGGDFGEYKPLHSAVDAKLQAICEGLAELQKQGKTEKPPRKSRSKLAEKVVSDKENNNSCKVEAASWSSEGSSPLSDLTFADVSEAQWEGDSDNYNLQKYPSYEIDWDSL

SEQ ID NO: 10415 - DNA, 1413 bp, Glycine max
  misc_feature (1)..(1413): Ceres Seq. ID no. 14308608
gagggacaacaacaacaattctgcaccaattagctcacaaaactttcaagggtttgatgatcataataataactcttcttctgatcatcatcacaccactttcactgactgcttacatggttccatggattacaacaccctctctagagtctttgacatgtcttgttcatcttctgaagtgatctcctccattgatgaaaaccccaagaagcctagtgcaggaggagactctgtgggggtcagggggaaccaatcaacacctaattcatctgtctcttcgccatccaatgaagctgaagcaattatagaagaagactcaaccaagagccagaaagataagcagccaaaagcgtgtgaagctgatggagatgaaaagcctaagaaagagaacaaacccaaaaagaaagagaaaaagccaagggagcctcgttttgccttcttgactaaaagtgagatcgatcatcttgaagatggatacagatggagaaaatatggacagaaagcggtcaagaatagtccatacccaaggagctattatagatgcacgagtcagaagtgcggtgtaaagaaaagggtggagaggtcattccaggacccaacaattgtgatcacaacatacgaagggcaacacaaccatcactgtccagcaactctgaggggcagtgctgcaagcatgttgtcatcaccttccttttttggttcctcttatatggcgtcaagcttaccccaagattttcttgctcagttggttccaagttatagccaaattaatgatcaccaaagtccaatgtttcaccaaaacctttcccataatctccatccacagcctcaacagcagcaccagttccaactctctcatgaccatggtttgttgcaagacctactaccatcattccctggcaaacacgagccatgaactcactaaaaacctagtgcatgttttgatttatttattttaggaaaaataatggttttatatttcatcactactagaaaaattaaaattagtaacggaataatctatgtaggttttttaaaaaatccgttactaaaatttggtgatctgatctcaaattaattagtgaaggaaaattaattttctatcactaattttgatcaccaatttattgatttttagaagtatttctaggagtttttaaaagaaaaaacaattgctttttcaagataaaccagaatcaaacatgcacttaacccatttctattagcgtatggtggagcttgcagtgtattgcacactgtctatatataagtatgtgtagtaattaagtagtagtagattccctcttggttaattacctcctctctttaagtcacatgtatgtacctagatttgtatggaaatgaaaaacattgattattcttaaatgagtatttagaattacttcagatggc

SEQ ID NO: 10416 - protein, 304 aa, Glycine max
  peptide (1)..(304): Ceres Seq. ID no. 14308609
  misc_feature (155)..(212): Pfam Name: Pfam Description:  WRKY DNA -binding domain
  misc_feature (20)..(303): NCBI GI NO: 15220582 NR Description: WRKY family transcription factor
  misc_feature (33)..(304): NCBI GI NO: 15236785 NR Description: WRKY family transcription factor
  misc_feature (31)..(225): NCBI GI NO: 34912866 NR Description: putative DNA-binding protein homolog
  misc_feature (33)..(304): NCBI GI NO: 7484934 NR Description: DNA-binding protein homolog T9A21
  misc_feature (42)..(303): NCBI GI NO: 25518132 NR Description: F1N18.10 protein - Arabidopsis thaliana
  misc_feature (51)..(304): NCBI GI NO: 15237428 NR Description: WRKY family transcription factor
  misc_feature (18)..(282): NCBI GI NO: 15239913 NR Description: WRKY family transcription factor
  misc_feature (85)..(279): NCBI GI NO: 15226550 NR Description: WRKY family transcription factor
  misc_feature (85)..(279): NCBI GI NO: 21536889 NR Description: putative WRKY-type DNA binding protein
  misc_feature (56)..(221): NCBI GI NO: 34910900 NR Description: P0003E08.17
RDNNNNSAPISSQNFQGFDDHNNNSSSDHHHTTFTDCLHGSMDYNTLSRVFDMSCSSSEVISSIDENPKKPSAGGDSVGVRGNQSTPNSSVSSPSNEAEAIIEEDSTKSQKDKQPKACEADGDEKPKKENKPKKKEKKPREPRFAFLTKSEIDHLEDGYRWRKYGQKAVKNSPYPRSYYRCTSQKCGVKKRVERSFQDPTIVITTYEGQHNHHCPATLRGSAASMLSSPSFFGSSYMASSLPQDFLAQLVPSYSQINDHQSPMFHQNLSHNLHPQPQQQHQFQLSHDHGLLQDLLPSFPGKHEP

SEQ ID NO: 10417 - protein, 263 aa, Glycine max
  peptide (1)..(263): Ceres Seq. ID no. 14308610
  misc_feature (114)..(171): Pfam Name: Pfam Description:  WRKY DNA -binding domain
  misc_feature (1)..(262): NCBI GI NO: 15220582 NR Description: WRKY family transcription factor
  misc_feature (1)..(263): NCBI GI NO: 15236785 NR Description: WRKY family transcription factor
  misc_feature (1)..(184): NCBI GI NO: 34912866 NR Description: putative DNA-binding protein homolog
  misc_feature (1)..(263): NCBI GI NO: 7484934 NR Description: DNA-binding protein homolog T9A21
  misc_feature (1)..(262): NCBI GI NO: 25518132 NR Description: F1N18.10 protein - Arabidopsis thaliana
  misc_feature (10)..(263): NCBI GI NO: 15237428 NR Description: WRKY family transcription factor
  misc_feature (1)..(241): NCBI GI NO: 15239913 NR Description: WRKY family transcription factor
  misc_feature (44)..(238): NCBI GI NO: 15226550 NR Description: WRKY family transcription factor
  misc_feature (44)..(238): NCBI GI NO: 21536889 NR Description: putative WRKY-type DNA binding protein
  misc_feature (15)..(180): NCBI GI NO: 34910900 NR Description: P0003E08.17
MDYNTLSRVFDMSCSSSEVISSIDENPKKPSAGGDSVGVRGNQSTPNSSVSSPSNEAEAIIEEDSTKSQKDKQPKACEADGDEKPKKENKPKKKEKKPREPRFAFLTKSEIDHLEDGYRWRKYGQKAVKNSPYPRSYYRCTSQKCGVKKRVERSFQDPTIVITTYEGQHNHHCPATLRGSAASMLSSPSFFGSSYMASSLPQDFLAQLVPSYSQINDHQSPMFHQNLSHNLHPQPQQQHQFQLSHDHGLLQDLLPSFPGKHEP

SEQ ID NO: 10418 - protein, 252 aa, Glycine max
  peptide (1)..(252): Ceres Seq. ID no. 14308611
  misc_feature (103)..(160): Pfam Name: Pfam Description:  WRKY DNA -binding domain
  misc_feature (1)..(251): NCBI GI NO: 15220582 NR Description: WRKY family transcription factor
  misc_feature (1)..(252): NCBI GI NO: 15236785 NR Description: WRKY family transcription factor
  misc_feature (1)..(173): NCBI GI NO: 34912866 NR Description: putative DNA-binding protein homolog
  misc_feature (1)..(252): NCBI GI NO: 7484934 NR Description: DNA-binding protein homolog T9A21
  misc_feature (1)..(251): NCBI GI NO: 25518132 NR Description: F1N18.10 protein - Arabidopsis thaliana
  misc_feature (1)..(252): NCBI GI NO: 15237428 NR Description: WRKY family transcription factor
  misc_feature (1)..(230): NCBI GI NO: 15239913 NR Description: WRKY family transcription factor
  misc_feature (33)..(227): NCBI GI NO: 15226550 NR Description: WRKY family transcription factor
  misc_feature (33)..(227): NCBI GI NO: 21536889 NR Description: putative WRKY-type DNA binding protein
  misc_feature (4)..(169): NCBI GI NO: 34910900 NR Description: P0003E08.17
MSCSSSEVISSIDENPKKPSAGGDSVGVRGNQSTPNSSVSSPSNEAEAIIEEDSTKSQKDKQPKACEADGDEKPKKENKPKKKEKKPREPRFAFLTKSEIDHLEDGYRWRKYGQKAVKNSPYPRSYYRCTSQKCGVKKRVERSFQDPTIVITTYEGQHNHHCPATLRGSAASMLSSPSFFGSSYMASSLPQDFLAQLVPSYSQINDHQSPMFHQNLSHNLHPQPQQQHQFQLSHDHGLLQDLLPSFPGKHEP

SEQ ID NO: 10419 - DNA, 1686 bp, Glycine max
  misc_feature (1)..(1686): Ceres Seq. ID no. 14307548
ctggtagtgtgctccgttgagataaacctgagtgagagtgaggcgaagggggagaaagctaaaactaaaaaatgtcatcttctaagctcacactgtacggaatcggaaccgcactcttccgcacccgtagaactgcacccgtaactgtaactccccactctccctttctcttcttcaaacccattcccttcccgccgtgcttcctccgcccggattcctcttcctcctcctccttctccgcagctgcagccgccgcagaaaccctaccctccgtcgaccacccctggccggaatgggtctccttcgtcgaccgcttgaacaccaaaggctacctccccaaaacctcctcttccgacgacaccgtaagcctttacgccaacatgaactctctcaaggacgcttgtctcagcttcgcgcgtgaccgttacgaccttttcaatttgctgcctacaaatgatatccaagcagtggttgagggtgggtgccctaatcttctccgtaaagctgttaattcagctaagaggctgagagcacacctgcaattagatgaaggggatgattttgaaactgatgcccgaactgttgatatagttcgaatacttttgttctacgcactagatccacttgtgctttctggaggagacaaaccaccgggccgggaagttattgaatcatctgtcagaaaacttctctctcagctaattgagttgagtgagtcccctgctcctgcccctgctcctgctcgttcaaagcctactgcacaggatggtgtggtagaaggccaatctctaagtgttacgactaatcaattgtttaaagatgttgagatgaagaaaggtgactggatgtgtccaaaatgcaatttcatgaacttttctagaaatacacaatgcctgaattgtaaggaagacaagcctaaggatattaacccgtttactgttcaaatgaagccaggagattggacctgtcctgaatgcaattatttaaattttgccagaaacagactatgtctagaatgcaaaatagaggggccggcgaaggaagctaataccattgaagttgaaaggaaaaaaggagattggacttgcccacaatgtgggttcatgaattatgctaggaacacgaaatgtttgcgttgtcctgagacaaggcctaagaaacatcctggggactggaattgtcccgggtgtgggttcatgaattttgctagtaaaatgaagtgtttgcattgtcaagagccaaacccaagttccaagaaatatagtggggattggagttgccccaaatgcgatttctacaattatgcaagaaatatggcttgcctgaagtgcaatgctgaacgccctaaagaacaaccaaccgttgactatgaggaccatgaatggagacgatcaaactgattaggggaaaaaacgccatcgggctatatcatatagggaggtcacaattgtgctggtgggctgtaacaaatattttgttattgatgcattctctgcccatttttctttctcaatcttccaattaatggtgctaagtgcttcttcacttattggaaatggtacaaaaacgataattagagatactttaaagttatttgattgcatatgaatgtgttttaatataatcatgtacagatctaaaagtaaatttacagagattgaatcttgtgaatgttgttatagcttt

SEQ ID NO: 10420 - protein, 442 aa, Glycine max
  peptide (1)..(442): Ceres Seq. ID no. 14307549
  misc_feature (254)..(283): Pfam Name: Pfam Description:  Zn-finger in Ran binding protein and others
  misc_feature (163)..(440): NCBI GI NO: 15221905 NR Description: expressed protein [Arabidopsis thaliana]
  misc_feature (1)..(162): NCBI GI NO: 15221905 NR Description: expressed protein [Arabidopsis thaliana]
  misc_feature (165)..(337): NCBI GI NO: 13702809 NR Description: putative ARP protein [Oryza sativa]
  misc_feature (24)..(96): NCBI GI NO: 13702809 NR Description: putative ARP protein [Oryza sativa]
  misc_feature (92)..(162): NCBI GI NO: 13702809 NR Description: putative ARP protein [Oryza sativa]
  misc_feature (44)..(362): NCBI GI NO: 18409643 NR Description: expressed protein [Arabidopsis thaliana]
  misc_feature (46)..(362): NCBI GI NO: 13324787 NR Description: hypothetical protein [Oryza sativa]
  misc_feature (66)..(362): NCBI GI NO: 21593408 NR Description: unknown [Arabidopsis thaliana]
  misc_feature (323)..(394): NCBI GI NO: 13702809 NR Description: putative ARP protein [Oryza sativa]
  misc_feature (44)..(381): NCBI GI NO: 25372841 NR Description: hypothetical protein F5A18.17
MSSSKLTLYGIGTALFRTRRTAPVTVTPHSPFLFFKPIPFPPCFLRPDSSSSSSFSAAAAAAETLPSVDHPWPEWVSFVDRLNTKGYLPKTSSSDDTVSLYANMNSLKDACLSFARDRYDLFNLLPTNDIQAVVEGGCPNLLRKAVNSAKRLRAHLQLDEGDDFETDARTVDIVRILLFYALDPLVLSGGDKPPGREVIESSVRKLLSQLIELSESPAPAPAPARSKPTAQDGVVEGQSLSVTTNQLFKDVEMKKGDWMCPKCNFMNFSRNTQCLNCKEDKPKDINPFTVQMKPGDWTCPECNYLNFARNRLCLECKIEGPAKEANTIEVERKKGDWTCPQCGFMNYARNTKCLRCPETRPKKHPGDWNCPGCGFMNFASKMKCLHCQEPNPSSKKYSGDWSCPKCDFYNYARNMACLKCNAERPKEQPTVDYEDHEWRRSN

SEQ ID NO: 10421 - protein, 339 aa, Glycine max
  peptide (1)..(339): Ceres Seq. ID no. 14307550
  misc_feature (151)..(180): Pfam Name: Pfam Description:  Zn-finger in Ran binding protein and others
  misc_feature (60)..(337): NCBI GI NO: 15221905 NR Description: expressed protein [Arabidopsis thaliana]
  misc_feature (1)..(59): NCBI GI NO: 15221905 NR Description: expressed protein [Arabidopsis thaliana]
  misc_feature (62)..(234): NCBI GI NO: 13702809 NR Description: putative ARP protein [Oryza sativa]
  misc_feature (1)..(59): NCBI GI NO: 13702809 NR Description: putative ARP protein [Oryza sativa]
  misc_feature (1)..(259): NCBI GI NO: 18409643 NR Description: expressed protein [Arabidopsis thaliana]
  misc_feature (1)..(259): NCBI GI NO: 13324787 NR Description: hypothetical protein [Oryza sativa]
  misc_feature (1)..(259): NCBI GI NO: 21593408 NR Description: unknown [Arabidopsis thaliana]
  misc_feature (220)..(291): NCBI GI NO: 13702809 NR Description: putative ARP protein [Oryza sativa]
  misc_feature (1)..(278): NCBI GI NO: 25372841 NR Description: hypothetical protein F5A18.17
  misc_feature (255)..(338): NCBI GI NO: 13702809 NR Description: putative ARP protein [Oryza sativa]
MNSLKDACLSFARDRYDLFNLLPTNDIQAVVEGGCPNLLRKAVNSAKRLRAHLQLDEGDDFETDARTVDIVRILLFYALDPLVLSGGDKPPGREVIESSVRKLLSQLIELSESPAPAPAPARSKPTAQDGVVEGQSLSVTTNQLFKDVEMKKGDWMCPKCNFMNFSRNTQCLNCKEDKPKDINPFTVQMKPGDWTCPECNYLNFARNRLCLECKIEGPAKEANTIEVERKKGDWTCPQCGFMNYARNTKCLRCPETRPKKHPGDWNCPGCGFMNFASKMKCLHCQEPNPSSKKYSGDWSCPKCDFYNYARNMACLKCNAERPKEQPTVDYEDHEWRRSN

SEQ ID NO: 10422 - DNA, 1390 bp, Glycine max
  misc_feature (1)..(1390): Ceres Seq. ID no. 14304120
ctcactcactcactcattgtccttactcacccctctctctattagcattagcatcaaaaacactctcttggttatccaatccaaacaccacccttcttctcataccctgctcagttagcagcagctactctcattcctctaccggagcaaaactataaacaaaaaaaacaagtccatcgtatgggtctcttagcatcctcatgcttcattctcattgctctcctactcctcactcccaaaggtgttatgggtgccaccttcacattctttaacaaatgcgactacacagtgtggcctgggattctcgcaaatgccggtagcccaccactcgacagcaccggttttgagctccccaaggacacttctcgcgccttccaagctcccaccggctggtccggtcgtttctggggccgaaccggttgcaccttcgacggatccggcgccggctcatgcctcaccggcgactgcggctccggccaagtcgaatgcaacggcgccggagccgccccgccggcaaccctggcggagttcacgctcggcaccggaggtcaagacttctacgacgtgagcctcgttgatggctacaatcttcccatgatcgtggaaggcactggtgggtcgggtctttgcgcctccacgggttgtacctcggatctgaaccagcaatgtcctgcggagctgagagcctcggagggaagcgcgtgcaagagcgcgtgtgaggcttttggtagccctgagtactgctgcagcggcgcgtatggctcacccgccacttgcaggccgtccatttactcggagatgttcaaggctgcttgccctaggtcttatagctacgcatacgatgatgctacgagtacgtttacgtgttccggcgccgattataccgttaccttctgtccatcctctccaagtcagaaatcttcacgagataccactaccaaccccatgacctcaacaacaacatcaccagggtcagggacagtgacaggaaccggaaccggaacaggatccgaaggggcagtggtatacacgggtgcggacaacggcgttgcgtataatacagttacggattccgggtcaagttcaggatccggaggagaaacaatgctcgcagatgggtcatatttagctggtttagccatgggagactcccctgaaagaacagtttccatcgcgtttgtttactctgctagctttttgcttattctcttcctgctttagctgcaccagcattgtttgttaaatgtgtaaatggctcttagattttcgggtttttcgtgggtgggttcaagaattttggctttgccagtaaagctggcagattctctccctcattgtaaaccaccttccaaaagattcgccagaaaaagtattccgtgtttcattcgtt

SEQ ID NO: 10423 - protein, 346 aa, Glycine max
  peptide (1)..(346): Ceres Seq. ID no. 14304121
  misc_feature (31)..(240): Pfam Name: Pfam Description:  Thaumatin family
  misc_feature (5)..(344): NCBI GI NO: 21592749 NR Description: putative thaumatin-like protein
  misc_feature (5)..(344): NCBI GI NO: 18420282 NR Description: thaumatin-like protein, putative
  misc_feature (20)..(344): NCBI GI NO: 7442168 NR Description: pathogenesis-related protein F20M13
  misc_feature (9)..(243): NCBI GI NO: 15233738 NR Description: thaumatin family [Arabidopsis thaliana]
  misc_feature (9)..(243): NCBI GI NO: 2262099 NR Description: thaumatin isolog [Arabidopsis thaliana]
  misc_feature (4)..(271): NCBI GI NO: 25296204 NR Description: hypothetical protein T20H2.19
  misc_feature (1)..(295): NCBI GI NO: 37531042 NR Description: putative thaumatin-like protein
  misc_feature (1)..(286): NCBI GI NO: 15222875 NR Description: thaumatin family [Arabidopsis thaliana]
  misc_feature (23)..(271): NCBI GI NO: 30686652 NR Description: thaumatin family [Arabidopsis thaliana]
  misc_feature (1)..(248): NCBI GI NO: 15233437 NR Description: thaumatin family [Arabidopsis thaliana]
MGLLASSCFILIALLLLTPKGVMGATFTFFNKCDYTVWPGILANAGSPPLDSTGFELPKDTSRAFQAPTGWSGRFWGRTGCTFDGSGAGSCLTGDCGSGQVECNGAGAAPPATLAEFTLGTGGQDFYDVSLVDGYNLPMIVEGTGGSGLCASTGCTSDLNQQCPAELRASEGSACKSACEAFGSPEYCCSGAYGSPATCRPSIYSEMFKAACPRSYSYAYDDATSTFTCSGADYTVTFCPSSPSQKSSRDTTTNPMTSTTTSPGSGTVTGTGTGTGSEGAVVYTGADNGVAYNTVTDSGSSSGSGGETMLADGSYLAGLAMGDSPERTVSIAFVYSASFLLILFLL

SEQ ID NO: 10424 - protein, 324 aa, Glycine max
  peptide (1)..(324): Ceres Seq. ID no. 14304122
  misc_feature (9)..(218): Pfam Name: Pfam Description:  Thaumatin family
  misc_feature (1)..(322): NCBI GI NO: 21592749 NR Description: putative thaumatin-like protein
  misc_feature (1)..(322): NCBI GI NO: 18420282 NR Description: thaumatin-like protein, putative
  misc_feature (1)..(322): NCBI GI NO: 7442168 NR Description: pathogenesis-related protein F20M13
  misc_feature (1)..(221): NCBI GI NO: 15233738 NR Description: thaumatin family [Arabidopsis thaliana]
  misc_feature (1)..(221): NCBI GI NO: 2262099 NR Description: thaumatin isolog [Arabidopsis thaliana]
  misc_feature (1)..(249): NCBI GI NO: 25296204 NR Description: hypothetical protein T20H2.19
  misc_feature (1)..(273): NCBI GI NO: 37531042 NR Description: putative thaumatin-like protein
  misc_feature (1)..(264): NCBI GI NO: 15222875 NR Description: thaumatin family [Arabidopsis thaliana]
  misc_feature (1)..(249): NCBI GI NO: 30686652 NR Description: thaumatin family [Arabidopsis thaliana]
  misc_feature (1)..(226): NCBI GI NO: 15233437 NR Description: thaumatin family [Arabidopsis thaliana]
MGATFTFFNKCDYTVWPGILANAGSPPLDSTGFELPKDTSRAFQAPTGWSGRFWGRTGCTFDGSGAGSCLTGDCGSGQVECNGAGAAPPATLAEFTLGTGGQDFYDVSLVDGYNLPMIVEGTGGSGLCASTGCTSDLNQQCPAELRASEGSACKSACEAFGSPEYCCSGAYGSPATCRPSIYSEMFKAACPRSYSYAYDDATSTFTCSGADYTVTFCPSSPSQKSSRDTTTNPMTSTTTSPGSGTVTGTGTGTGSEGAVVYTGADNGVAYNTVTDSGSSSGSGGETMLADGSYLAGLAMGDSPERTVSIAFVYSASFLLILFLL

SEQ ID NO: 10425 - protein, 208 aa, Glycine max
  peptide (1)..(208): Ceres Seq. ID no. 14304123
  misc_feature (1)..(102): Pfam Name: Pfam Description:  Thaumatin family
  misc_feature (1)..(206): NCBI GI NO: 21592749 NR Description: putative thaumatin-like protein
  misc_feature (1)..(206): NCBI GI NO: 18420282 NR Description: thaumatin-like protein, putative
  misc_feature (1)..(206): NCBI GI NO: 7442168 NR Description: pathogenesis-related protein F20M13
  misc_feature (1)..(105): NCBI GI NO: 15233738 NR Description: thaumatin family [Arabidopsis thaliana]
  misc_feature (1)..(105): NCBI GI NO: 2262099 NR Description: thaumatin isolog [Arabidopsis thaliana]
  misc_feature (1)..(133): NCBI GI NO: 25296204 NR Description: hypothetical protein T20H2.19
  misc_feature (1)..(157): NCBI GI NO: 37531042 NR Description: putative thaumatin-like protein
  misc_feature (1)..(148): NCBI GI NO: 15222875 NR Description: thaumatin family [Arabidopsis thaliana]
  misc_feature (1)..(133): NCBI GI NO: 30686652 NR Description: thaumatin family [Arabidopsis thaliana]
  misc_feature (1)..(110): NCBI GI NO: 15233437 NR Description: thaumatin family [Arabidopsis thaliana]
MIVEGTGGSGLCASTGCTSDLNQQCPAELRASEGSACKSACEAFGSPEYCCSGAYGSPATCRPSIYSEMFKAACPRSYSYAYDDATSTFTCSGADYTVTFCPSSPSQKSSRDTTTNPMTSTTTSPGSGTVTGTGTGTGSEGAVVYTGADNGVAYNTVTDSGSSSGSGGETMLADGSYLAGLAMGDSPERTVSIAFVYSASFLLILFLL

SEQ ID NO: 10426 - DNA, 1132 bp, Glycine max
  misc_feature (1)..(1132): Ceres Seq. ID no. 14313103
gttctacagttctcttggtcatgttcaacaaagcagccctctcctcttacaatttcccatttgcaaatgtcatcacacttgctcagatggtgtttgcatttattattctctacgtgttgagatccttgaagataatttctttcacagctggtgaatcgctgagcagttctaagaatacaataatatttgtgtcctataggacattagcccagacacttcctcttgctttaacttatttgctttttatggtagtgaccatggaagcagtgcgcggtataaacattcccatgtacaccaccctcaggcgaactgttgtcgccttcacaatggttatggagtattttctgtcagggcagacacattcaagatttgttgttggaagtgttgggataatcatagccggtgcttttgttgctggagctcgtgacttggcatttgatgctttttcctattcagttgtatttgtagaaaacatgtgtaaggcagtatacctggcttctgtttctcgtgttggtaaatccagcggcctcaatatttttggtattgtatggtgcaatgtggtgatttgtggaccaatcttgtttctctggtccttactcagaggagatctccaagcaacactaaactttccatacttcttttcccgtggatttcaggttgtgatgcttctttcctgcgcttttactttctttataaactacatcgtagttttgaatacaactatcaactcggcacttacacaggcaatctgtggtaacttaaaggatgttttcacaagtggtattggttggttattattcggaggacttccatatgacttgttcaatattcttggtcaagtacttggcttccttgggtcctgtttgtatgcttattgtaaactgatgcaagcagtatgaggatgacctttcaggtgggtgtttaggaacatcaaaacaccaaacaagcatcgtatagtgtccctacaaattttttagggtttacaaattaagtcaacagaaaaaggtcaaatatcaaattatctttatcaaaatttacagtataaaaaatgtttttgtctgcccaagtgtaacttagggaatgacaatagaaatgaattcctgaaaatatttaatataaaagcgtttaattt

SEQ ID NO: 10427 - protein, 298 aa, Glycine max
  peptide (1)..(298): Ceres Seq. ID no. 14313104
  misc_feature (2)..(291): NCBI GI NO: 17535737 NR Description: SQuashed Vulva SQV-7
  misc_feature (217)..(285): NCBI GI NO: 15236724 NR Description: expressed protein [Arabidopsis thaliana]
  misc_feature (43)..(86): NCBI GI NO: 15236724 NR Description: expressed protein [Arabidopsis thaliana]
  misc_feature (2)..(291): NCBI GI NO: 39590273 NR Description: Hypothetical protein CBG11203
  misc_feature (1)..(291): NCBI GI NO: 32766366 NR Description: Unknown (protein for MGC:63651) [Danio rerio]
  misc_feature (1)..(291): NCBI GI NO: 1665787 NR Description: Similar to a C
  misc_feature (1)..(291): NCBI GI NO: 14028875 NR Description: solute carrier family 35
  misc_feature (1)..(291): NCBI GI NO: 26340190 NR Description: unnamed protein product [Mus musculus]
  misc_feature (1)..(291): NCBI GI NO: 17647441 NR Description: fringe connection CG3874-PA
  misc_feature (1)..(291): NCBI GI NO: 14971008 NR Description: UDP-sugar transporter [Drosophila melanogaster]
STVLLVMFNKAALSSYNFPFANVITLAQMVFAFIILYVLRSLKIISFTAGESLSSSKNTIIFVSYRTLAQTLPLALTYLLFMVVTMEAVRGINIPMYTTLRRTVVAFTMVMEYFLSGQTHSRFVVGSVGIIIAGAFVAGARDLAFDAFSYSVVFVENMCKAVYLASVSRVGKSSGLNIFGIVWCNVVICGPILFLWSLLRGDLQATLNFPYFFSRGFQVVMLLSCAFTFFINYIVVLNTTINSALTQAICGNLKDVFTSGIGWLLFGGLPYDLFNILGQVLGFLGSCLYAYCKLMQAV

SEQ ID NO: 10428 - protein, 292 aa, Glycine max
  peptide (1)..(292): Ceres Seq. ID no. 14313105
  misc_feature (1)..(285): NCBI GI NO: 17535737 NR Description: SQuashed Vulva SQV-7
  misc_feature (211)..(279): NCBI GI NO: 15236724 NR Description: expressed protein [Arabidopsis thaliana]
  misc_feature (37)..(80): NCBI GI NO: 15236724 NR Description: expressed protein [Arabidopsis thaliana]
  misc_feature (1)..(285): NCBI GI NO: 39590273 NR Description: Hypothetical protein CBG11203
  misc_feature (1)..(285): NCBI GI NO: 32766366 NR Description: Unknown (protein for MGC:63651) [Danio rerio]
  misc_feature (1)..(285): NCBI GI NO: 1665787 NR Description: Similar to a C
  misc_feature (1)..(285): NCBI GI NO: 14028875 NR Description: solute carrier family 35
  misc_feature (1)..(285): NCBI GI NO: 26340190 NR Description: unnamed protein product [Mus musculus]
  misc_feature (1)..(285): NCBI GI NO: 17647441 NR Description: fringe connection CG3874-PA
  misc_feature (1)..(285): NCBI GI NO: 14971008 NR Description: UDP-sugar transporter [Drosophila melanogaster]
MFNKAALSSYNFPFANVITLAQMVFAFIILYVLRSLKIISFTAGESLSSSKNTIIFVSYRTLAQTLPLALTYLLFMVVTMEAVRGINIPMYTTLRRTVVAFTMVMEYFLSGQTHSRFVVGSVGIIIAGAFVAGARDLAFDAFSYSVVFVENMCKAVYLASVSRVGKSSGLNIFGIVWCNVVICGPILFLWSLLRGDLQATLNFPYFFSRGFQVVMLLSCAFTFFINYIVVLNTTINSALTQAICGNLKDVFTSGIGWLLFGGLPYDLFNILGQVLGFLGSCLYAYCKLMQAV

SEQ ID NO: 10429 - protein, 270 aa, Glycine max
  peptide (1)..(270): Ceres Seq. ID no. 14313106
  misc_feature (1)..(263): NCBI GI NO: 17535737 NR Description: SQuashed Vulva SQV-7
  misc_feature (189)..(257): NCBI GI NO: 15236724 NR Description: expressed protein [Arabidopsis thaliana]
  misc_feature (15)..(58): NCBI GI NO: 15236724 NR Description: expressed protein [Arabidopsis thaliana]
  misc_feature (1)..(263): NCBI GI NO: 39590273 NR Description: Hypothetical protein CBG11203
  misc_feature (1)..(263): NCBI GI NO: 32766366 NR Description: Unknown (protein for MGC:63651) [Danio rerio]
  misc_feature (1)..(263): NCBI GI NO: 1665787 NR Description: Similar to a C
  misc_feature (1)..(263): NCBI GI NO: 14028875 NR Description: solute carrier family 35
  misc_feature (1)..(263): NCBI GI NO: 26340190 NR Description: unnamed protein product [Mus musculus]
  misc_feature (1)..(263): NCBI GI NO: 17647441 NR Description: fringe connection CG3874-PA
  misc_feature (1)..(263): NCBI GI NO: 14971008 NR Description: UDP-sugar transporter [Drosophila melanogaster]
MVFAFIILYVLRSLKIISFTAGESLSSSKNTIIFVSYRTLAQTLPLALTYLLFMVVTMEAVRGINIPMYTTLRRTVVAFTMVMEYFLSGQTHSRFVVGSVGIIIAGAFVAGARDLAFDAFSYSVVFVENMCKAVYLASVSRVGKSSGLNIFGIVWCNVVICGPILFLWSLLRGDLQATLNFPYFFSRGFQVVMLLSCAFTFFINYIVVLNTTINSALTQAICGNLKDVFTSGIGWLLFGGLPYDLFNILGQVLGFLGSCLYAYCKLMQAV

SEQ ID NO: 10430 - DNA, 1078 bp, Glycine max
  misc_feature (1)..(1078): Ceres Seq. ID no. 14313088
gtcggttacagagataataatcctgcagcactttcagactttctgcaatctgtgcactgtttaattccatattatcctttatctatctctttatctctcttctgcaaagtgcaaaccctacttactactttcacagctcctacctcctattcctctcccttcccatactctctgctcctaactttttctctcttctcccctttcttccattcctccttgtctctcgcaacgcgaaattcatggacgtggacatactgaaaacttccacgagtgacaacatcagcatggacatgatgatgacgatgatgcaaatggaaaagttccctgaattttgtgaacctttttataacaacaacaacaacactagtactgctcctctctacccagaaaacgagctcttaataaactccaccaccactctacccgtgttctccaacgttattaacaacccaaacgttataactccaccaccatcttcctctaattttattcaacaacaacccatgacaccccatcttgaacccaacttggagaagaggaattctgtggcggctatgagggagatgattttccgcgtagcagtgatgcaacctattcatatagaccctgaatccatcaagccaccgaagagaaggaacgtgaagatttcaaaagatccgcagagtgtggcggcgaggcacagaagagaaaggataagcgagagaataaggatacttcagagattagttcctggtgggaccaaaatggacacggcttctatgttggatgaagccattcactacgtgaagttcttgaagaagcaagtgcagacgctggaacaagcaggggcaagtagacccttgaatgttgttggcttccctactactgcgtccaacgccaataataataatagttattctggttttgtgaagagttgtcagccttatccaatgctgggttctgcagcttctaaacaattgcttagttgagaagtgtttgtttgatacatgcatgaaaaatgaaaatcaatgaattatatatgtggtttttattttattttttatcttcatagtattgtgatcgatcgtgcatggattat

SEQ ID NO: 10431 - protein, 242 aa, Glycine max
  peptide (1)..(242): Ceres Seq. ID no. 14313089
  misc_feature (139)..(186): Pfam Name: Pfam Description:  Helix-loop-helix DNA-binding domain
  misc_feature (18)..(194): NCBI GI NO: 15240189 NR Description: (bHLH088) putative bHLH transcription factor
  misc_feature (12)..(235): NCBI GI NO: 15229725 NR Description: bHLH protein family [Arabidopsis thaliana]
  misc_feature (37)..(200): NCBI GI NO: 15242494 NR Description: bHLH protein family [Arabidopsis thaliana]
  misc_feature (90)..(223): NCBI GI NO: 34910410 NR Description: P0692C11.28
  misc_feature (68)..(197): NCBI GI NO: 15236714 NR Description: bHLH protein family [Arabidopsis thaliana]
  misc_feature (79)..(193): NCBI GI NO: 9294680 NR Description: emb|CAB62312
  misc_feature (79)..(193): NCBI GI NO: 15232534 NR Description: bHLH protein family [Arabidopsis thaliana]
  misc_feature (79)..(193): NCBI GI NO: 28393737 NR Description: unknown protein [Arabidopsis thaliana]
  misc_feature (91)..(241): NCBI GI NO: 34914234 NR Description: P0697C12.24
  misc_feature (91)..(241): NCBI GI NO: 15289790 NR Description: P0002B05.9
MDVDILKTSTSDNISMDMMMTMMQMEKFPEFCEPFYNNNNNTSTAPLYPENELLINSTTTLPVFSNVINNPNVITPPPSSSNFIQQQPMTPHLEPNLEKRNSVAAMREMIFRVAVMQPIHIDPESIKPPKRRNVKISKDPQSVAARHRRERISERIRILQRLVPGGTKMDTASMLDEAIHYVKFLKKQVQTLEQAGASRPLNVVGFPTTASNANNNNSYSGFVKSCQPYPMLGSAASKQLLS

SEQ ID NO: 10432 - protein, 227 aa, Glycine max
  peptide (1)..(227): Ceres Seq. ID no. 14313090
  misc_feature (124)..(171): Pfam Name: Pfam Description:  Helix-loop-helix DNA-binding domain
  misc_feature (3)..(179): NCBI GI NO: 15240189 NR Description: (bHLH088) putative bHLH transcription factor
  misc_feature (1)..(220): NCBI GI NO: 15229725 NR Description: bHLH protein family [Arabidopsis thaliana]
  misc_feature (22)..(185): NCBI GI NO: 15242494 NR Description: bHLH protein family [Arabidopsis thaliana]
  misc_feature (75)..(208): NCBI GI NO: 34910410 NR Description: P0692C11.28
  misc_feature (53)..(182): NCBI GI NO: 15236714 NR Description: bHLH protein family [Arabidopsis thaliana]
  misc_feature (64)..(178): NCBI GI NO: 9294680 NR Description: emb|CAB62312
  misc_feature (64)..(178): NCBI GI NO: 15232534 NR Description: bHLH protein family [Arabidopsis thaliana]
  misc_feature (64)..(178): NCBI GI NO: 28393737 NR Description: unknown protein [Arabidopsis thaliana]
  misc_feature (76)..(226): NCBI GI NO: 34914234 NR Description: P0697C12.24
  misc_feature (76)..(226): NCBI GI NO: 15289790 NR Description: P0002B05.9
MDMMMTMMQMEKFPEFCEPFYNNNNNTSTAPLYPENELLINSTTTLPVFSNVINNPNVITPPPSSSNFIQQQPMTPHLEPNLEKRNSVAAMREMIFRVAVMQPIHIDPESIKPPKRRNVKISKDPQSVAARHRRERISERIRILQRLVPGGTKMDTASMLDEAIHYVKFLKKQVQTLEQAGASRPLNVVGFPTTASNANNNNSYSGFVKSCQPYPMLGSAASKQLLS

SEQ ID NO: 10433 - protein, 225 aa, Glycine max
  peptide (1)..(225): Ceres Seq. ID no. 14313091
  misc_feature (122)..(169): Pfam Name: Pfam Description:  Helix-loop-helix DNA-binding domain
  misc_feature (1)..(177): NCBI GI NO: 15240189 NR Description: (bHLH088) putative bHLH transcription factor
  misc_feature (1)..(218): NCBI GI NO: 15229725 NR Description: bHLH protein family [Arabidopsis thaliana]
  misc_feature (20)..(183): NCBI GI NO: 15242494 NR Description: bHLH protein family [Arabidopsis thaliana]
  misc_feature (73)..(206): NCBI GI NO: 34910410 NR Description: P0692C11.28
  misc_feature (51)..(180): NCBI GI NO: 15236714 NR Description: bHLH protein family [Arabidopsis thaliana]
  misc_feature (62)..(176): NCBI GI NO: 9294680 NR Description: emb|CAB62312
  misc_feature (62)..(176): NCBI GI NO: 15232534 NR Description: bHLH protein family [Arabidopsis thaliana]
  misc_feature (62)..(176): NCBI GI NO: 28393737 NR Description: unknown protein [Arabidopsis thaliana]
  misc_feature (74)..(224): NCBI GI NO: 34914234 NR Description: P0697C12.24
  misc_feature (74)..(224): NCBI GI NO: 15289790 NR Description: P0002B05.9
MMMTMMQMEKFPEFCEPFYNNNNNTSTAPLYPENELLINSTTTLPVFSNVINNPNVITPPPSSSNFIQQQPMTPHLEPNLEKRNSVAAMREMIFRVAVMQPIHIDPESIKPPKRRNVKISKDPQSVAARHRRERISERIRILQRLVPGGTKMDTASMLDEAIHYVKFLKKQVQTLEQAGASRPLNVVGFPTTASNANNNNSYSGFVKSCQPYPMLGSAASKQLLS

SEQ ID NO: 10434 - protein, 218 aa, Glycine max
  peptide (1)..(218): Ceres Seq. ID no. 14313092
  misc_feature (115)..(162): Pfam Name: Pfam Description:  Helix-loop-helix DNA-binding domain
  misc_feature (1)..(170): NCBI GI NO: 15240189 NR Description: (bHLH088) putative bHLH transcription factor
  misc_feature (1)..(211): NCBI GI NO: 15229725 NR Description: bHLH protein family [Arabidopsis thaliana]
  misc_feature (13)..(176): NCBI GI NO: 15242494 NR Description: bHLH protein family [Arabidopsis thaliana]
  misc_feature (66)..(199): NCBI GI NO: 34910410 NR Description: P0692C11.28
  misc_feature (44)..(173): NCBI GI NO: 15236714 NR Description: bHLH protein family [Arabidopsis thaliana]
  misc_feature (55)..(169): NCBI GI NO: 9294680 NR Description: emb|CAB62312
  misc_feature (55)..(169): NCBI GI NO: 15232534 NR Description: bHLH protein family [Arabidopsis thaliana]
  misc_feature (55)..(169): NCBI GI NO: 28393737 NR Description: unknown protein [Arabidopsis thaliana]
  misc_feature (67)..(217): NCBI GI NO: 34914234 NR Description: P0697C12.24
  misc_feature (67)..(217): NCBI GI NO: 15289790 NR Description: P0002B05.9
MEKFPEFCEPFYNNNNNTSTAPLYPENELLINSTTTLPVFSNVINNPNVITPPPSSSNFIQQQPMTPHLEPNLEKRNSVAAMREMIFRVAVMQPIHIDPESIKPPKRRNVKISKDPQSVAARHRRERISERIRILQRLVPGGTKMDTASMLDEAIHYVKFLKKQVQTLEQAGASRPLNVVGFPTTASNANNNNSYSGFVKSCQPYPMLGSAASKQLLS

SEQ ID NO: 10435 - DNA, 1393 bp, Glycine max
  misc_feature (1)..(1393): Ceres Seq. ID no. 14307526
aacacaacaacacacgttgtacagtgtgatgcccaaaccgagaccacttcgaaagagcgaaacgcagtgttagcattgttcctcaacaaaaaaaaaaaaaaaagaagaaaaaagactcagttgtgtatcgttgcagctctactagctagggtttcgcaagtgcgatcgaagaagaacgatggcgatggctgctgctctgcgtcgcgaaggaaggcgtttgacccaaccaatcaacgccctccgttcctctctcatctctcaagaccaatcccctcatggcgcgcgcttcatttccactcaagtggtgagaaaccgaatgaagagtgtgaggaatatccagaagatcaccaaggccatgaagatggttgccgcatccaagctgagagccgttcagaccagagctgaaaattcccgcggcctctggcagccgttcaccgctcttctcggcgacaatcccagtgctgatgttaagaaaaacgttgttgttaccatctcttcggacaaaggtctttgtggtggaatcaattccacgtctgtcaagataagcagggttttgtacaaattgaattctgggcctgataaagagacaaaatatgtcatattgggagagaaggctaaagctcaattgttgcgtgactcaaggaaacacattgtgctcagccttactgaattgcagaaaaatcccctgaattacactcaggtgtctgtcttggcagatgacattctaaagaatgtggagtatgacgcattaaggattgttttcaacaaatttcattctgttgtacaatttttgccaacagtgtcaactgtactgtctcctgaggttattgagagagaggctgaatcaggaggaaagctcggggaattggattcatatgagattgaaggtggcgaaacaaaagctgaaattcttcagaatctggctgagttccagttttcttgtgtgatgtacaatgccgtgttggagaatgcctgtagtgagcaaggagcaagaatgtctgcaatggacagctctagcaggaatgctggggatatgcttgatcgtctcacgctcacctataacagaactcgtcaagcatcaatcaccactgaattgatagagattatctctggagcttcagcactggaaggctaattgcaggagagcaatatgtaattattcagcagtctcccataccttcgcatagcgaagagcctctgggcaatggggtacgaagtttttttataatatcgttgtgttcttttgaaatttgttggtgccacatttttttgatcttacctcgactcctgtaataagtgttccaaggtcaaacccatgatgaggattttcctagttgaggctagatatttctggaattatgtttttgaattaaagatggagtctgtctttttt

SEQ ID NO: 10436 - protein, 318 aa, Glycine max
  peptide (1)..(318): Ceres Seq. ID no. 14307527
  misc_feature (38)..(316): Pfam Name: Pfam Description:  ATP synthase
  misc_feature (1)..(318): NCBI GI NO: 543867 NR Description: ATP synthase gamma chain, mitochondrial precursor
  misc_feature (1)..(317): NCBI GI NO: 15227257 NR Description: mitochondrial F1-ATPase, gamma subunit
  misc_feature (1)..(317): NCBI GI NO: 22530902 NR Description: mitochondrial F1-ATPase, gamma subunit
  misc_feature (5)..(317): NCBI GI NO: 7436158 NR Description: probable H+-transporting two-sector ATPase (EC3
  misc_feature (175)..(318): NCBI GI NO: 37532654 NR Description: putative ATP SYNTHASE GAMMA CHAIN
  misc_feature (41)..(174): NCBI GI NO: 37532654 NR Description: putative ATP SYNTHASE GAMMA CHAIN
  misc_feature (155)..(318): NCBI GI NO: 7436157 NR Description: probable H+-transporting two-sector ATPase (EC3
  misc_feature (39)..(316): NCBI GI NO: 11466530 NR Description: ATP synthase F1 subunit alpha
  misc_feature (46)..(316): NCBI GI NO: 38512238 NR Description: Mitochondrial ATP synthase gamma-subunit
  misc_feature (25)..(316): NCBI GI NO: 39581406 NR Description: Hypothetical protein CBG22500
MAMAAALRREGRRLTQPINALRSSLISQDQSPHGARFISTQVVRNRMKSVRNIQKITKAMKMVAASKLRAVQTRAENSRGLWQPFTALLGDNPSADVKKNVVVTISSDKGLCGGINSTSVKISRVLYKLNSGPDKETKYVILGEKAKAQLLRDSRKHIVLSLTELQKNPLNYTQVSVLADDILKNVEYDALRIVFNKFHSVVQFLPTVSTVLSPEVIEREAESGGKLGELDSYEIEGGETKAEILQNLAEFQFSCVMYNAVLENACSEQGARMSAMDSSSRNAGDMLDRLTLTYNRTRQASITTELIEIISGASALEG

SEQ ID NO: 10437 - protein, 316 aa, Glycine max
  peptide (1)..(316): Ceres Seq. ID no. 14307528
  misc_feature (36)..(314): Pfam Name: Pfam Description:  ATP synthase
  misc_feature (1)..(316): NCBI GI NO: 543867 NR Description: ATP synthase gamma chain, mitochondrial precursor
  misc_feature (1)..(315): NCBI GI NO: 15227257 NR Description: mitochondrial F1-ATPase, gamma subunit
  misc_feature (1)..(315): NCBI GI NO: 22530902 NR Description: mitochondrial F1-ATPase, gamma subunit
  misc_feature (3)..(315): NCBI GI NO: 7436158 NR Description: probable H+-transporting two-sector ATPase (EC3
  misc_feature (173)..(316): NCBI GI NO: 37532654 NR Description: putative ATP SYNTHASE GAMMA CHAIN
  misc_feature (39)..(172): NCBI GI NO: 37532654 NR Description: putative ATP SYNTHASE GAMMA CHAIN
  misc_feature (153)..(316): NCBI GI NO: 7436157 NR Description: probable H+-transporting two-sector ATPase (EC3
  misc_feature (37)..(314): NCBI GI NO: 11466530 NR Description: ATP synthase F1 subunit alpha
  misc_feature (44)..(314): NCBI GI NO: 38512238 NR Description: Mitochondrial ATP synthase gamma-subunit
  misc_feature (23)..(314): NCBI GI NO: 39581406 NR Description: Hypothetical protein CBG22500
MAAALRREGRRLTQPINALRSSLISQDQSPHGARFISTQVVRNRMKSVRNIQKITKAMKMVAASKLRAVQTRAENSRGLWQPFTALLGDNPSADVKKNVVVTISSDKGLCGGINSTSVKISRVLYKLNSGPDKETKYVILGEKAKAQLLRDSRKHIVLSLTELQKNPLNYTQVSVLADDILKNVEYDALRIVFNKFHSVVQFLPTVSTVLSPEVIEREAESGGKLGELDSYEIEGGETKAEILQNLAEFQFSCVMYNAVLENACSEQGARMSAMDSSSRNAGDMLDRLTLTYNRTRQASITTELIEIISGASALEG

SEQ ID NO: 10438 - protein, 272 aa, Glycine max
  peptide (1)..(272): Ceres Seq. ID no. 14307529
  misc_feature (1)..(270): Pfam Name: Pfam Description:  ATP synthase
  misc_feature (1)..(272): NCBI GI NO: 543867 NR Description: ATP synthase gamma chain, mitochondrial precursor
  misc_feature (1)..(271): NCBI GI NO: 15227257 NR Description: mitochondrial F1-ATPase, gamma subunit
  misc_feature (1)..(271): NCBI GI NO: 22530902 NR Description: mitochondrial F1-ATPase, gamma subunit
  misc_feature (1)..(271): NCBI GI NO: 7436158 NR Description: probable H+-transporting two-sector ATPase (EC3
  misc_feature (129)..(272): NCBI GI NO: 37532654 NR Description: putative ATP SYNTHASE GAMMA CHAIN
  misc_feature (1)..(128): NCBI GI NO: 37532654 NR Description: putative ATP SYNTHASE GAMMA CHAIN
  misc_feature (109)..(272): NCBI GI NO: 7436157 NR Description: probable H+-transporting two-sector ATPase (EC3
  misc_feature (1)..(270): NCBI GI NO: 11466530 NR Description: ATP synthase F1 subunit alpha
  misc_feature (1)..(270): NCBI GI NO: 38512238 NR Description: Mitochondrial ATP synthase gamma-subunit
  misc_feature (1)..(270): NCBI GI NO: 39581406 NR Description: Hypothetical protein CBG22500
MKSVRNIQKITKAMKMVAASKLRAVQTRAENSRGLWQPFTALLGDNPSADVKKNVVVTISSDKGLCGGINSTSVKISRVLYKLNSGPDKETKYVILGEKAKAQLLRDSRKHIVLSLTELQKNPLNYTQVSVLADDILKNVEYDALRIVFNKFHSVVQFLPTVSTVLSPEVIEREAESGGKLGELDSYEIEGGETKAEILQNLAEFQFSCVMYNAVLENACSEQGARMSAMDSSSRNAGDMLDRLTLTYNRTRQASITTELIEIISGASALEG

SEQ ID NO: 10439 - DNA, 1766 bp, Glycine max
  misc_feature (1)..(1766): Ceres Seq. ID no. 15226449
attctccatttccacactctcatcagattcgggtcgggttagcgttatcggataacttcgcccataaattctctgtttacggggcgaaaatgacagtattcttagccacgaggctcgtgtttcggagatccccgccgcttctctggcggcgcagcttttctcgggcggcggtagaggccgaaaaggacatgttgccgtgccgtcgcttccgttgttcgattactctccgcctccgtatgcggggcccaccgctgacgagattctggcaaagcgcagggagtatctgagtccttccatcttgcacttctacaagaatcccgtgaacatagtggagggtaagaagcagtacctgtttgacgagaaggggagaaggtacgtggatgcgtttggagggattgctacggtgtgctgcgggcactgtcaccctgatgtggtcgaagccatagtcaaccaaaccaaaaagttgcagcactccacagttctctaccttaacaacgccatcgccgatttcgctcaagctttgacttccaagcttcccggtaatctcaaggtggtgtttttcacaaactctggaacagaagcaaacgaattggcgatactgattgcaaggttatacacagggtgtcatgacataatatctctaaggaatgcttatcatggtaatgcagctgggacaatgggagctacagctcaaagcatctggaaatttaatgtagtacagagtggtgttcatcatgcagtgaatccagacccttatagaggcattttcggttctgatggagagaagtatgcaagagatgtacaagatatcattaacttcggaacttctggaaatgttgcagccttcatttctgaagccatacagggagtggggggtatcattgaattggctcctggttacttgccagctgtgtacaataccattaaaaaagcaggaggacttttcatagctgatgaggttcaggctggctttggtcgcactggtagccatttctggggatttgaggcccacaatgttgttcctgacatagtgacaatggctaagggcattggaaatgtcattcctcttggtgctgttgtaactactccagagatcgcagaggtcttaacccgccggagctactttaacacatttggtggcaaccctgtttgtactgctgcagggttggctgttttaaaagtaatagagaaagagcagcttcaacaaaacgcgtttgtggttggatcctatttgaaagaaaggctcactgccctcaaggacaaatatgaattaattggtgatgtgaggggaagaggcctaatgctaggagttgaacttgtcactgatcgtgaacttaaaattccagcaaaaggtgaaacgctgcatgtaatggaccaaatgaaagaattaggagtacttattggtaagggtggttactatggaaatgtcttcagaattacacccccgttgtgtttcaccaaagaagatgcagactttgtagcagacgcaatggacttgaccttgtctagaatgtgaagctgagccaagatcctagctttaataaaagtctattatatcataaatgaaactgtattatctcatctccatagctggtaaaaattacatagatgcagacttatatagctaaaatagcagaccaatctactgtgatcttaggctatgcatgagccaacaactcgttgtctcttgtttgatgtttatctttccaaatgaatgagccaacaactcgttgtctcttgctttgtcgtcaaaaaaaaaaaaaaaa

SEQ ID NO: 10440 - protein, 279 aa, Glycine max
  peptide (1)..(279): Ceres Seq. ID no. 15226450
  misc_feature (1)..(279): Pfam Name: Pfam Description:  Aminotransferase class-III
  misc_feature (1)..(279): NCBI GI NO: 15231974 NR Description: alanine--glyoxylate aminotransferase
  misc_feature (1)..(279): NCBI GI NO: 15224499 NR Description: alanine--glyoxylate aminotransferase
  misc_feature (1)..(279): NCBI GI NO: 15028237 NR Description: putative beta-alanine-pyruvate aminotransferase
  misc_feature (1)..(279): NCBI GI NO: 5731259 NR Description: alanine:glyoxylate aminotransferase 2 homolog
  misc_feature (1)..(279): NCBI GI NO: 18420498 NR Description: alanine--glyoxylate aminotransferase
  misc_feature (35)..(277): NCBI GI NO: 16198011 NR Description: LD24726p [Drosophila melanogaster]
  misc_feature (35)..(277): NCBI GI NO: 28574759 NR Description: CG11241-PA [Drosophila melanogaster]
  misc_feature (1)..(32): NCBI GI NO: 16198011 NR Description: LD24726p [Drosophila melanogaster]
  misc_feature (1)..(32): NCBI GI NO: 28574759 NR Description: CG11241-PA [Drosophila melanogaster]
  misc_feature (36)..(270): NCBI GI NO: 39595899 NR Description: Hypothetical protein CBG12888
MGATAQSIWKFNVVQSGVHHAVNPDPYRGIFGSDGEKYARDVQDIINFGTSGNVAAFISEAIQGVGGIIELAPGYLPAVYNTIKKAGGLFIADEVQAGFGRTGSHFWGFEAHNVVPDIVTMAKGIGNVIPLGAVVTTPEIAEVLTRRSYFNTFGGNPVCTAAGLAVLKVIEKEQLQQNAFVVGSYLKERLTALKDKYELIGDVRGRGLMLGVELVTDRELKIPAKGETLHVMDQMKELGVLIGKGGYYGNVFRITPPLCFTKEDADFVADAMDLTLSRM

SEQ ID NO: 10441 - protein, 159 aa, Glycine max
  peptide (1)..(159): Ceres Seq. ID no. 15226451
  misc_feature (1)..(159): Pfam Name: Pfam Description:  Aminotransferase class-III
  misc_feature (1)..(159): NCBI GI NO: 15231974 NR Description: alanine--glyoxylate aminotransferase
  misc_feature (1)..(159): NCBI GI NO: 15224499 NR Description: alanine--glyoxylate aminotransferase
  misc_feature (1)..(159): NCBI GI NO: 15028237 NR Description: putative beta-alanine-pyruvate aminotransferase
  misc_feature (1)..(159): NCBI GI NO: 5731259 NR Description: alanine:glyoxylate aminotransferase 2 homolog
  misc_feature (1)..(159): NCBI GI NO: 18420498 NR Description: alanine--glyoxylate aminotransferase
  misc_feature (1)..(157): NCBI GI NO: 16198011 NR Description: LD24726p [Drosophila melanogaster]
  misc_feature (1)..(157): NCBI GI NO: 28574759 NR Description: CG11241-PA [Drosophila melanogaster]
  misc_feature (1)..(150): NCBI GI NO: 39595899 NR Description: Hypothetical protein CBG12888
  misc_feature (1)..(150): NCBI GI NO: 32564660 NR Description: aminotransferase class-III (48.6 kD) (1G742)
  misc_feature (1)..(149): NCBI GI NO: 7507520 NR Description: hypothetical protein T09B4
MAKGIGNVIPLGAVVTTPEIAEVLTRRSYFNTFGGNPVCTAAGLAVLKVIEKEQLQQNAFVVGSYLKERLTALKDKYELIGDVRGRGLMLGVELVTDRELKIPAKGETLHVMDQMKELGVLIGKGGYYGNVFRITPPLCFTKEDADFVADAMDLTLSRM

SEQ ID NO: 10442 - DNA, 1343 bp, Glycine max
  misc_feature (1)..(1343): Ceres Seq. ID no. 13594185
gccttagtctgtgttgagacttgagagtaaggtttcaaattgaaaccttttttttcagtagtttttcacttgcgtatatcactatattcgttgtgttctgtaggttgtgtgcataacacaatcaattaagaagctgtgattctgattcagaatcagaatgttgcgaagatggagcaaagcagttactccaatctccaaatttggatcgcagcagagtcatttgaatttcgtgaaggacgtcacgcgccaaagctacgccggggttgcacccgcgccaacaacgatagaggataaacctcaaccccccgtggttaaacttgacaaaatgttttggtctaagccctgttcgctggccctgccccgggactcacccctcaaagctgaagaacctgattatcagggcatcaagcgtttcatgctcaagctcatgctgttttatagtaagcagagcaagtcaattcgaggcgctaatgttgtgtaccgaagaattgtttctcaaattgataaacctcccatttatgaagtgtttaacttggagaaaacattcaaaacaacattctctttacttgtacttcatatgtggttatgtttgcgtcgcttgaagcaagagggaaatgagggtgttgaatttggccagtacctttatgagatttacaatcatgatgtggagctaagagtctctaaagctggagttaacctactactgactaagtggatgaaagagctcgagaagattttttatgggaacattgttgcttatgatactgccatacttccagaagctaaaccgggtgatttttctaatgttatatggaggaatatattctctgaagatggttcttcaacaccagatgctgctgcatctcaatcagtacaggcgatggccagatatgctcgccgtgaagtaagttgcatgaccttaacagataaagaagcactatattcagggaattttatgttcacctctttgaagcatgagaacagaagcggaaaggggcctcaatgatgaagtggtgatttctaaatttgtgatttagcaaattgaaaatacacgctgttcttattttatttattttttacaaaaaaattgttgaataattatgacataaagctcatgtccttctccgtaaggcttttattatacttgattagcttggtgcccagaaactagaactctcatattcttgccctgtaaaatgagaaaagaaaaagggcagaagtgactgaaaaatgttgttctttctcatttttggtcatctgttcctctttactttgctttaacggcttcaatggtttgcctttgttatttgagacattacaaattttcaatacaatgcaatatt

SEQ ID NO: 10443 - protein, 282 aa, Glycine max; identical to SEQ ID NO: 8930
  peptide (1)..(282): Ceres Seq. ID no. 13594186
  misc_feature (122)..(256): Pfam Name: Pfam Description:  Ubiquinol-cytochrome C chaperone
  misc_feature (1)..(274): NCBI GI NO: 30696021 NR Description: expressed protein [Arabidopsis thaliana]
  misc_feature (37)..(281): NCBI GI NO: 33146996 NR Description: unknown protein
  misc_feature (52)..(256): NCBI GI NO: 8843859 NR Description: contains similarity to unknownprotein~dbj|BAA91854
  misc_feature (92)..(271): NCBI GI NO: 28558076 NR Description: Basic FGF-repressed Zic binding protein homolog
  misc_feature (92)..(271): NCBI GI NO: 39794451 NR Description: Unknown (protein for MGC:76279)
  misc_feature (102)..(268): NCBI GI NO: 22964668 NR Description: hypothetical protein [Rhodopseudomonas palustris]
  misc_feature (92)..(275): NCBI GI NO: 9256564 NR Description: basic FGF repressed, Zic binding protein
  misc_feature (107)..(268): NCBI GI NO: 27380134 NR Description: bll5023 [Bradyrhizobium japonicum]
  misc_feature (65)..(275): NCBI GI NO: 26346196 NR Description: unnamed protein product [Mus musculus]
  misc_feature (105)..(272): NCBI GI NO: 13476949 NR Description: unknown protein [Mesorhizobium loti]

SEQ ID NO: 10444 - protein, 226 aa, Glycine max; identical to SEQ ID NO: 8931
  peptide (1)..(226): Ceres Seq. ID no. 13594187
  misc_feature (66)..(200): Pfam Name: Pfam Description:  Ubiquinol-cytochrome C chaperone
  misc_feature (1)..(218): NCBI GI NO: 30696021 NR Description: expressed protein [Arabidopsis thaliana]
  misc_feature (1)..(225): NCBI GI NO: 33146996 NR Description: unknown protein
  misc_feature (1)..(200): NCBI GI NO: 8843859 NR Description: contains similarity to unknownprotein~dbj|BAA91854
  misc_feature (36)..(215): NCBI GI NO: 28558076 NR Description: Basic FGF-repressed Zic binding protein homolog
  misc_feature (36)..(215): NCBI GI NO: 39794451 NR Description: Unknown (protein for MGC:76279)
  misc_feature (46)..(212): NCBI GI NO: 22964668 NR Description: hypothetical protein [Rhodopseudomonas palustris]
  misc_feature (36)..(219): NCBI GI NO: 9256564 NR Description: basic FGF repressed, Zic binding protein
  misc_feature (51)..(212): NCBI GI NO: 27380134 NR Description: bll5023 [Bradyrhizobium japonicum]
  misc_feature (9)..(219): NCBI GI NO: 26346196 NR Description: unnamed protein product [Mus musculus]
  misc_feature (49)..(216): NCBI GI NO: 13476949 NR Description: unknown protein [Mesorhizobium loti]

SEQ ID NO: 10445 - protein, 196 aa, Glycine max; identical to SEQ ID NO: 8932
  peptide (1)..(196): Ceres Seq. ID no. 13594188
  misc_feature (36)..(170): Pfam Name: Pfam Description:  Ubiquinol-cytochrome C chaperone
  misc_feature (1)..(188): NCBI GI NO: 30696021 NR Description: expressed protein [Arabidopsis thaliana]
  misc_feature (1)..(195): NCBI GI NO: 33146996 NR Description: unknown protein
  misc_feature (1)..(170): NCBI GI NO: 8843859 NR Description: contains similarity to unknownprotein~dbj|BAA91854
  misc_feature (6)..(185): NCBI GI NO: 28558076 NR Description: Basic FGF-repressed Zic binding protein homolog
  misc_feature (6)..(185): NCBI GI NO: 39794451 NR Description: Unknown (protein for MGC:76279)
  misc_feature (16)..(182): NCBI GI NO: 22964668 NR Description: hypothetical protein [Rhodopseudomonas palustris]
  misc_feature (6)..(189): NCBI GI NO: 9256564 NR Description: basic FGF repressed, Zic binding protein
  misc_feature (21)..(182): NCBI GI NO: 27380134 NR Description: bll5023 [Bradyrhizobium japonicum]
  misc_feature (1)..(189): NCBI GI NO: 26346196 NR Description: unnamed protein product [Mus musculus]
  misc_feature (19)..(186): NCBI GI NO: 13476949 NR Description: unknown protein [Mesorhizobium loti]

SEQ ID NO: 10446 - DNA, 1518 bp, Glycine max
  misc_feature (1)..(1518): Ceres Seq. ID no. 13594151
attcacccaacacttcaactccatcttcttccatccatttcctctttctcgatctgttccaaattcacttcacacacaggaaagaagatggagactcgcgccgccgcaaagagaaaggcaaatgccgccaccatagtctttgtcgaaaaacaataccccaacaagaggcagcgggttgtgttgggtgaacttcccaatttacaaaaccttattgtctccgaaactcaaaattcgcgcaaagagaagctcctatgtcggaagaatcccaatgagaagaaaccatcacccacaaacaacaacacctttccttcccctcagatcaacgaatcttatgattcggatatccacgggtatcttcgtgaaatggagatgcagaataagagaagaccaatggttgactacattgaaaaggttcagaaaattgttaccccaaccatgagagcaatattggtggattggttagtggaggtagctgtggagtacaagcttctatcggatactcttcatctctctgtatcatacatcgataggtttttatcagttaatccagtcagtaaatccagacttcagttactgggtgtttcgtccatgctcattgctgcaaaatatgaggagatggatccacctggtgtggacgagttttgcagcatcactgatcacacttatgacaagacagaggttgtgaagatggaagctgacatacttaagtccctaatgtttgaaatgggaaatcctactgtaagcacctttctaaggaggtatgctgatgttgcttctaatgaccaaaaaactccaaatttgcagattgaatttttgggcagctatattggcgagctaagtttgttggactatgattgtttaagattcttgccttctattgtggctgcctcggttatatttcttgccaagttcattatctgtcctgaagtgcatccatggacttcttccttgtgtgaatgctcgggttacaagccagctgagttgaaagaatgtgtccttatcttgcatgacttgtatttgtcaagaaaggcagcatccttcaaagctgttcgggcaaaatacaagcagcaaaagttcgaatgtgtggcaaacctgcctacccctccatatgtaccgagttgttactttgaagaccagtggtgcagtgaattccttgataaatgatcaaaccgaccattgcttgcatgggcatggcttagaaatttgatgcgtaggtttttgtctttgaattgcaagagcaacaggatttcattagataccaaagttcaattcccattcctgatgaactatcagggagaagacctttaaataaggatcaaataacaagatcttagaatgtacaactgcatacttgcaacatgtattaggagaattacggtgtaggatgaaccgaaaattgcattgttcttacagagaatttttatcttagtgaagtagtttttagacatatttgttaggaattttataatttttaattaattaatatggattatatattataaaaaaaaaaaaaaaaaa

SEQ ID NO: 10447 - protein, 387 aa, Glycine max
  peptide (1)..(387): Ceres Seq. ID no. 13594152
  misc_feature (245)..(372): Pfam Name: Pfam Description:  Cyclin, C-terminal domain
  misc_feature (30)..(379): NCBI GI NO: 7438514 NR Description: cyclin a1-type, mitosis-specific - soybean
  misc_feature (32)..(378): NCBI GI NO: 7438513 NR Description: cyclin A-type (clone 59) - common tobacco
  misc_feature (32)..(378): NCBI GI NO: 7438516 NR Description: cyclin A-type - Madagascar periwinkle
  misc_feature (32)..(378): NCBI GI NO: 15239172 NR Description: cyclin, putative [Arabidopsis thaliana]
  misc_feature (32)..(378): NCBI GI NO: 15220147 NR Description: cyclin, putative [Arabidopsis thaliana]
  misc_feature (37)..(377): NCBI GI NO: 7242793 NR Description: cyclin A3.1 [Pisum sativum]
  misc_feature (32)..(378): NCBI GI NO: 30694019 NR Description: cyclin family [Arabidopsis thaliana]
  misc_feature (32)..(378): NCBI GI NO: 40538955 NR Description: putative A-type cyclin
  misc_feature (49)..(378): NCBI GI NO: 5420278 NR Description: cyclin A3 [Lycopersicon esculentum]
  misc_feature (53)..(378): NCBI GI NO: 116167 NR Description: G2/MITOTIC-SPECIFIC CYCLIN C13-1 (A-LIKE CYCLIN)
IHPTLQLHLLPSISSFSICSKFTSHTGKKMETRAAAKRKANAATIVFVEKQYPNKRQRVVLGELPNLQNLIVSETQNSRKEKLLCRKNPNEKKPSPTNNNTFPSPQINESYDSDIHGYLREMEMQNKRRPMVDYIEKVQKIVTPTMRAILVDWLVEVAVEYKLLSDTLHLSVSYIDRFLSVNPVSKSRLQLLGVSSMLIAAKYEEMDPPGVDEFCSITDHTYDKTEVVKMEADILKSLMFEMGNPTVSTFLRRYADVASNDQKTPNLQIEFLGSYIGELSLLDYDCLRFLPSIVAASVIFLAKFIICPEVHPWTSSLCECSGYKPAELKECVLILHDLYLSRKAASFKAVRAKYKQQKFECVANLPTPPYVPSCYFEDQWCSEFLDK

SEQ ID NO: 10448 - protein, 358 aa, Glycine max
  peptide (1)..(358): Ceres Seq. ID no. 13594153
  misc_feature (216)..(343): Pfam Name: Pfam Description:  Cyclin, C-terminal domain
  misc_feature (1)..(350): NCBI GI NO: 7438514 NR Description: cyclin a1-type, mitosis-specific - soybean
  misc_feature (3)..(349): NCBI GI NO: 7438513 NR Description: cyclin A-type (clone 59) - common tobacco
  misc_feature (3)..(349): NCBI GI NO: 7438516 NR Description: cyclin A-type - Madagascar periwinkle
  misc_feature (3)..(349): NCBI GI NO: 15239172 NR Description: cyclin, putative [Arabidopsis thaliana]
  misc_feature (3)..(349): NCBI GI NO: 15220147 NR Description: cyclin, putative [Arabidopsis thaliana]
  misc_feature (8)..(348): NCBI GI NO: 7242793 NR Description: cyclin A3.1 [Pisum sativum]
  misc_feature (3)..(349): NCBI GI NO: 30694019 NR Description: cyclin family [Arabidopsis thaliana]
  misc_feature (3)..(349): NCBI GI NO: 40538955 NR Description: putative A-type cyclin
  misc_feature (20)..(349): NCBI GI NO: 5420278 NR Description: cyclin A3 [Lycopersicon esculentum]
  misc_feature (24)..(349): NCBI GI NO: 116167 NR Description: G2/MITOTIC-SPECIFIC CYCLIN C13-1 (A-LIKE CYCLIN)
METRAAAKRKANAATIVFVEKQYPNKRQRVVLGELPNLQNLIVSETQNSRKEKLLCRKNPNEKKPSPTNNNTFPSPQINESYDSDIHGYLREMEMQNKRRPMVDYIEKVQKIVTPTMRAILVDWLVEVAVEYKLLSDTLHLSVSYIDRFLSVNPVSKSRLQLLGVSSMLIAAKYEEMDPPGVDEFCSITDHTYDKTEVVKMEADILKSLMFEMGNPTVSTFLRRYADVASNDQKTPNLQIEFLGSYIGELSLLDYDCLRFLPSIVAASVIFLAKFIICPEVHPWTSSLCECSGYKPAELKECVLILHDLYLSRKAASFKAVRAKYKQQKFECVANLPTPPYVPSCYFEDQWCSEFLDK

SEQ ID NO: 10449 - protein, 266 aa, Glycine max
  peptide (1)..(266): Ceres Seq. ID no. 13594154
  misc_feature (124)..(251): Pfam Name: Pfam Description:  Cyclin, C-terminal domain
  misc_feature (1)..(258): NCBI GI NO: 7438514 NR Description: cyclin a1-type, mitosis-specific - soybean
  misc_feature (1)..(257): NCBI GI NO: 7438513 NR Description: cyclin A-type (clone 59) - common tobacco
  misc_feature (1)..(257): NCBI GI NO: 7438516 NR Description: cyclin A-type - Madagascar periwinkle
  misc_feature (1)..(257): NCBI GI NO: 15239172 NR Description: cyclin, putative [Arabidopsis thaliana]
  misc_feature (1)..(257): NCBI GI NO: 15220147 NR Description: cyclin, putative [Arabidopsis thaliana]
  misc_feature (1)..(256): NCBI GI NO: 7242793 NR Description: cyclin A3.1 [Pisum sativum]
  misc_feature (1)..(257): NCBI GI NO: 30694019 NR Description: cyclin family [Arabidopsis thaliana]
  misc_feature (1)..(257): NCBI GI NO: 40538955 NR Description: putative A-type cyclin
  misc_feature (1)..(257): NCBI GI NO: 5420278 NR Description: cyclin A3 [Lycopersicon esculentum]
  misc_feature (1)..(257): NCBI GI NO: 116167 NR Description: G2/MITOTIC-SPECIFIC CYCLIN C13-1 (A-LIKE CYCLIN)
MEMQNKRRPMVDYIEKVQKIVTPTMRAILVDWLVEVAVEYKLLSDTLHLSVSYIDRFLSVNPVSKSRLQLLGVSSMLIAAKYEEMDPPGVDEFCSITDHTYDKTEVVKMEADILKSLMFEMGNPTVSTFLRRYADVASNDQKTPNLQIEFLGSYIGELSLLDYDCLRFLPSIVAASVIFLAKFIICPEVHPWTSSLCECSGYKPAELKECVLILHDLYLSRKAASFKAVRAKYKQQKFECVANLPTPPYVPSCYFEDQWCSEFLDK

SEQ ID NO: 10450 - DNA, 2021 bp, Glycine max
  misc_feature (1)..(2021): Ceres Seq. ID no. 13594189
gaaaaactactttctgagacaacgacgacgttgtatagcagtccttcttcttctttctgtgttgacggtggcgttgatctgattggaattcaggatcaatggcaggggcagcctctgctctgttcctcctcgacatcaaaggccgcgtcctcatctggcgcgactaccgcggcgacgtctccgccctcgacgccgaacgcttcttcaccaaactcatcgaaaaacaggccgatccgcaagctcaagatccggttgtgcacgacaacggcgtgacctacatgttcatccagcacagcaacgtctacctcatgatagccaccagacataactgcaatgccgccagcctcctctttttcctgcaccgcatcgtcgatgtgtttaagcactactttgaagaattggaagaggaatcgcttcgggacaatttcgtcgtcgtgtatgagctacttgatgagattatggactttggctaccctcagtacaccgaggcgcagattcttagtgagtttattaagactgatgcttatagaatggaagttacgcagagacctcccatggctgtgactaatgccgtgtcgtggcgcagcgaagggataaactataagaaaaatgaggttttcttggatgtggtggagagtgttaatatacttgtcaatagcaatggacaaataattagatctgacgtcgttggggctttgaagatgagaacgtatttgagtggtatgcctgagtgcaaacttggtttaaatgatagagtattgttagaggcgcaaggtagaacaaccaagggaaaggctattgacttggaagacataaaatttcatcagtgtgtgcgtttggctcgatttgaaaacgatcgaacaatttcctttataccacctgatggatcgtttgatttgatgacatacaggctcagtacacaggttaagcctttaatttgggtggaagcaaatgttgaaaagcattcaaagagtcggattgagattatggtaaaagctaggagtcaatttaaggaacgtagcactgccacaaacgttgagattgagttgcctgtgcctgttgatgcaaccaatcctaatgttcgaacttcaatgggatctgcatcatatgcacccgaaaaagatgcgttaatctggaaaattagatccttccccggaggcaaggagtatatgttaagagcagagtttcatcttcccagtataacagatgaggaagcaactcctgagagaaaagctcctatacgtgtgaaatttgaaataccatattttactgtttctggaatacaggtaagatatttgaagattattgagaaaagtgggtatcaggctcttccatgggtgagatacataacgatggctggagagtatgaattgaggcttatttaagaatttgtatctttctttggtgctggaattccaccaaataatcgtgccaacttccatgatcaatggttttaaactggtggatgggagagggactcttgagtaaaattagagtttatttggcctgatcatatctcctcttgcgtcatgatagttttggcaacagatcgtaaattgctcattgtccgtaaagttcataacttcaagtcaggaattggcaagtgtaaggctgtatcttctgtgtaagtcctttttgttcaaatctgtttgttgggaaaatgtctgatttttttttcctcttgttttcttttcttttatttacgatctgtcaatctttgccattgtcttcaatttgatttatttgtaagagaattattagcttttgtattactaagattgaatattttccccatctttatttgtattcataacctgacccatcttgtgtattaatatggtgccatatccctccctttctgaacaaaaaccatgtatttttttaccattcattcaaaaagttgattgcaggtcaatggcagaaaagaaaaaaaaaaaaaaaaaaaaaaaaaaaaaaaaccaaaaaaaaaaaaaaaaaagcttatcgataccgtcgacctcgagggggggcccggtacccaa

SEQ ID NO: 10451 - protein, 428 aa, Glycine max
  peptide (1)..(428): Ceres Seq. ID no. 13594190
  misc_feature (8)..(427): Pfam Name: Pfam Description:  Adaptor complexes medium subunit family
  misc_feature (1)..(428): NCBI GI NO: 15219810 NR Description: clathrin adaptor medium chain protein MU1B -related
  misc_feature (1)..(428): NCBI GI NO: 34910334 NR Description: putative clathrin-associated protein
  misc_feature (1)..(428): NCBI GI NO: 15220202 NR Description: clathrin-coat assembly protein -related
  misc_feature (111)..(428): NCBI GI NO: 6573741 NR Description: F20B24.16 [Arabidopsis thaliana]
  misc_feature (1)..(92): NCBI GI NO: 6573741 NR Description: F20B24.16 [Arabidopsis thaliana]
  misc_feature (5)..(427): NCBI GI NO: 28949965 NR Description: probable clathrin assembly protein AP47
  misc_feature (4)..(426): NCBI GI NO: 14210504 NR Description: adaptor-related protein complex 1, mu 1 subunit
  misc_feature (4)..(426): NCBI GI NO: 6671557 NR Description: adaptor-related protein complex AP-1, mu subunit 1
  misc_feature (1)..(427): NCBI GI NO: 21913172 NR Description: mu1 adaptin [Toxoplasma gondii]
  misc_feature (4)..(426): NCBI GI NO: 24645407 NR Description: CG9388-PA [Drosophila melanogaster]
MAGAASALFLLDIKGRVLIWRDYRGDVSALDAERFFTKLIEKQADPQAQDPVVHDNGVTYMFIQHSNVYLMIATRHNCNAASLLFFLHRIVDVFKHYFEELEEESLRDNFVVVYELLDEIMDFGYPQYTEAQILSEFIKTDAYRMEVTQRPPMAVTNAVSWRSEGINYKKNEVFLDVVESVNILVNSNGQIIRSDVVGALKMRTYLSGMPECKLGLNDRVLLEAQGRTTKGKAIDLEDIKFHQCVRLARFENDRTISFIPPDGSFDLMTYRLSTQVKPLIWVEANVEKHSKSRIEIMVKARSQFKERSTATNVEIELPVPVDATNPNVRTSMGSASYAPEKDALIWKIRSFPGGKEYMLRAEFHLPSITDEEATPERKAPIRVKFEIPYFTVSGIQVRYLKIIEKSGYQALPWVRYITMAGEYELRLI

SEQ ID NO: 10452 - protein, 368 aa, Glycine max
  peptide (1)..(368): Ceres Seq. ID no. 13594191
  misc_feature (1)..(367): Pfam Name: Pfam Description:  Adaptor complexes medium subunit family
  misc_feature (1)..(368): NCBI GI NO: 15219810 NR Description: clathrin adaptor medium chain protein MU1B -related
  misc_feature (1)..(368): NCBI GI NO: 34910334 NR Description: putative clathrin-associated protein
  misc_feature (1)..(368): NCBI GI NO: 15220202 NR Description: clathrin-coat assembly protein -related
  misc_feature (51)..(368): NCBI GI NO: 6573741 NR Description: F20B24.16 [Arabidopsis thaliana]
  misc_feature (1)..(32): NCBI GI NO: 6573741 NR Description: F20B24.16 [Arabidopsis thaliana]
  misc_feature (1)..(367): NCBI GI NO: 28949965 NR Description: probable clathrin assembly protein AP47
  misc_feature (1)..(366): NCBI GI NO: 14210504 NR Description: adaptor-related protein complex 1, mu 1 subunit
  misc_feature (1)..(366): NCBI GI NO: 6671557 NR Description: adaptor-related protein complex AP-1, mu subunit 1
  misc_feature (1)..(367): NCBI GI NO: 21913172 NR Description: mu1 adaptin [Toxoplasma gondii]
  misc_feature (1)..(366): NCBI GI NO: 24645407 NR Description: CG9388-PA [Drosophila melanogaster]
MFIQHSNVYLMIATRHNCNAASLLFFLHRIVDVFKHYFEELEEESLRDNFVVVYELLDEIMDFGYPQYTEAQILSEFIKTDAYRMEVTQRPPMAVTNAVSWRSEGINYKKNEVFLDVVESVNILVNSNGQIIRSDVVGALKMRTYLSGMPECKLGLNDRVLLEAQGRTTKGKAIDLEDIKFHQCVRLARFENDRTISFIPPDGSFDLMTYRLSTQVKPLIWVEANVEKHSKSRIEIMVKARSQFKERSTATNVEIELPVPVDATNPNVRTSMGSASYAPEKDALIWKIRSFPGGKEYMLRAEFHLPSITDEEATPERKAPIRVKFEIPYFTVSGIQVRYLKIIEKSGYQALPWVRYITMAGEYELRLI

SEQ ID NO: 10453 - protein, 358 aa, Glycine max
  peptide (1)..(358): Ceres Seq. ID no. 13594192
  misc_feature (1)..(357): Pfam Name: Pfam Description:  Adaptor complexes medium subunit family
  misc_feature (1)..(358): NCBI GI NO: 15219810 NR Description: clathrin adaptor medium chain protein MU1B -related
  misc_feature (1)..(358): NCBI GI NO: 34910334 NR Description: putative clathrin-associated protein
  misc_feature (1)..(358): NCBI GI NO: 15220202 NR Description: clathrin-coat assembly protein -related
  misc_feature (41)..(358): NCBI GI NO: 6573741 NR Description: F20B24.16 [Arabidopsis thaliana]
  misc_feature (1)..(22): NCBI GI NO: 6573741 NR Description: F20B24.16 [Arabidopsis thaliana]
  misc_feature (1)..(357): NCBI GI NO: 28949965 NR Description: probable clathrin assembly protein AP47
  misc_feature (1)..(356): NCBI GI NO: 14210504 NR Description: adaptor-related protein complex 1, mu 1 subunit
  misc_feature (1)..(356): NCBI GI NO: 6671557 NR Description: adaptor-related protein complex AP-1, mu subunit 1
  misc_feature (1)..(357): NCBI GI NO: 21913172 NR Description: mu1 adaptin [Toxoplasma gondii]
  misc_feature (1)..(356): NCBI GI NO: 24645407 NR Description: CG9388-PA [Drosophila melanogaster]
MIATRHNCNAASLLFFLHRIVDVFKHYFEELEEESLRDNFVVVYELLDEIMDFGYPQYTEAQILSEFIKTDAYRMEVTQRPPMAVTNAVSWRSEGINYKKNEVFLDVVESVNILVNSNGQIIRSDVVGALKMRTYLSGMPECKLGLNDRVLLEAQGRTTKGKAIDLEDIKFHQCVRLARFENDRTISFIPPDGSFDLMTYRLSTQVKPLIWVEANVEKHSKSRIEIMVKARSQFKERSTATNVEIELPVPVDATNPNVRTSMGSASYAPEKDALIWKIRSFPGGKEYMLRAEFHLPSITDEEATPERKAPIRVKFEIPYFTVSGIQVRYLKIIEKSGYQALPWVRYITMAGEYELRLI

SEQ ID NO: 10454 - DNA, 1618 bp, Glycine max
  misc_feature (1)..(1618): Ceres Seq. ID no. 15177783
aactactaaagggataaaatatgactactattagtgatgatcagtgattagtgtgattagtgcgtgcgattcattgtgtttgtgtagtagtgagtgactttgggttgggtttcgtctcaactcaacaaacgtcgtcgttctcccatttccaatctttctccaatggcttcttctgcttccttaatcaactcgttgacttgctcttcgcctgcacccactcagcactgtttcgccttcacccgcaccaccgccaccgctaccgccacgtcactgagacaattcaacagccaccgtccgcccccactcaccacgaggatctcctcgtcgccttccaccgttgtctgcaaagctgtctccgttaagccccaaaccgaaaccgaaggtctcaacattgctgacgatgtcacacagctcatagggaaaacgccgatggtttacctcaacaatatcgtgaagggttctgtggccaatattgctgcgaagcttgagattatggagccctgttgtagtgtcaaggacaggattggttttagtatgataaatgatgctgagcagagaggagctataacacctgggaagagtatattggtggaacctactagtgggaacacaggaattggtcttgcctttatagcagcttcaagaggatataagctaattttgacaatgcctgcttcaatgagtttagaaagacgggttcttttgaaagcatttggggccgagcttgttttgactgatgcagcaaagggcatgaatggagcagtacaaaaagctgaagaaattttaaaaagtacccccaattcatacatgcttcaacaatttgataatccttcaaatcctaaggttcattatgagacaactggcccggagatatgggaagatactagaggaaagatagatattttagttgcaggaattggaaccggtggaactgtttctggagctggccaattcctaaaacaacaaaatccgaaaatacaggttattggcgtagagcctctggaaagcaacatacttacaggtggaaagccaggacctcacaaaattcagggtattggggctggttttgtgcccaggaatttggatcaagatgtgcttgatgaagttatagcgatatcaagtgatgaagcagttgaaactgcaaagcaattagcactccaggaaggcttgctggtgggaatttcttcaggagctgcagctgcagctgctttgaaggttggaaagaggcctgagaatgcaggaaagcttattggggttgtcttcccaagctttggtgaaagatatttgtcaactattcttttccagtcaatacgggaagaatgcgagaaaatgcaacctgagccatgaattgactttgcttgttaatgtttcatactcattttccacaagtatctgtatggaatgacagtgtcagatgtccatgttatgcccgtgtttctcatttttgacactcaagaaattagataactgtgtacaggtcattgatttgacttacaacacagattaatgacccttgattgaagaaattttagatgtaataattattggcattgatgacaacgtagcaaatttctgccttatgttcgctattaaaaaataattgatgaaacagtttatc

SEQ ID NO: 10455 - protein, 394 aa, Glycine max
  peptide (1)..(394): Ceres Seq. ID no. 15177784
  misc_feature (81)..(370): Pfam Name: Pfam Description:  Pyridoxal-phosphate dependent enzyme
  misc_feature (5)..(393): NCBI GI NO: 12081919 NR Description: plastidic cysteine synthase 1 [Solanum tuberosum]
  misc_feature (1)..(393): NCBI GI NO: 22331875 NR Description: cysteine synthase, mitochondrial
  misc_feature (1)..(393): NCBI GI NO: 30695056 NR Description: cysteine synthase, mitochondrial
  misc_feature (56)..(393): NCBI GI NO: 11131628 NR Description: Cysteine synthase, chloroplast precursor
  misc_feature (1)..(393): NCBI GI NO: 12643295 NR Description: CYSTEINE SYNTHASE, MITOCHONDRIAL PRECURSOR
  misc_feature (1)..(393): NCBI GI NO: 15224351 NR Description: cysteine synthase, chloroplast
  misc_feature (51)..(393): NCBI GI NO: 303902 NR Description: cysteine synthase [Spinacia oleracea]
  misc_feature (51)..(393): NCBI GI NO: 12644209 NR Description: CYSTEINE SYNTHASE, CHLOROPLAST PRECURSOR
  misc_feature (1)..(393): NCBI GI NO: 572517 NR Description: cysteine synthase [Arabidopsis thaliana]
  misc_feature (1)..(393): NCBI GI NO: 25291707 NR Description: cysteine synthase (EC 4
MASSASLINSLTCSSPAPTQHCFAFTRTTATATATSLRQFNSHRPPPLTTRISSSPSTVVCKAVSVKPQTETEGLNIADDVTQLIGKTPMVYLNNIVKGSVANIAAKLEIMEPCCSVKDRIGFSMINDAEQRGAITPGKSILVEPTSGNTGIGLAFIAASRGYKLILTMPASMSLERRVLLKAFGAELVLTDAAKGMNGAVQKAEEILKSTPNSYMLQQFDNPSNPKVHYETTGPEIWEDTRGKIDILVAGIGTGGTVSGAGQFLKQQNPKIQVIGVEPLESNILTGGKPGPHKIQGIGAGFVPRNLDQDVLDEVIAISSDEAVETAKQLALQEGLLVGISSGAAAAAALKVGKRPENAGKLIGVVFPSFGERYLSTILFQSIREECEKMQPEP

SEQ ID NO: 10456 - protein, 305 aa, Glycine max
  peptide (1)..(305): Ceres Seq. ID no. 15177785
  misc_feature (1)..(281): Pfam Name: Pfam Description:  Pyridoxal-phosphate dependent enzyme
  misc_feature (1)..(304): NCBI GI NO: 12081919 NR Description: plastidic cysteine synthase 1 [Solanum tuberosum]
  misc_feature (1)..(304): NCBI GI NO: 22331875 NR Description: cysteine synthase, mitochondrial
  misc_feature (1)..(304): NCBI GI NO: 30695056 NR Description: cysteine synthase, mitochondrial
  misc_feature (1)..(304): NCBI GI NO: 11131628 NR Description: Cysteine synthase, chloroplast precursor
  misc_feature (1)..(304): NCBI GI NO: 12643295 NR Description: CYSTEINE SYNTHASE, MITOCHONDRIAL PRECURSOR
  misc_feature (1)..(304): NCBI GI NO: 15224351 NR Description: cysteine synthase, chloroplast
  misc_feature (1)..(304): NCBI GI NO: 303902 NR Description: cysteine synthase [Spinacia oleracea]
  misc_feature (1)..(304): NCBI GI NO: 12644209 NR Description: CYSTEINE SYNTHASE, CHLOROPLAST PRECURSOR
  misc_feature (1)..(304): NCBI GI NO: 572517 NR Description: cysteine synthase [Arabidopsis thaliana]
  misc_feature (1)..(304): NCBI GI NO: 25291707 NR Description: cysteine synthase (EC 4
MVYLNNIVKGSVANIAAKLEIMEPCCSVKDRIGFSMINDAEQRGAITPGKSILVEPTSGNTGIGLAFIAASRGYKLILTMPASMSLERRVLLKAFGAELVLTDAAKGMNGAVQKAEEILKSTPNSYMLQQFDNPSNPKVHYETTGPEIWEDTRGKIDILVAGIGTGGTVSGAGQFLKQQNPKIQVIGVEPLESNILTGGKPGPHKIQGIGAGFVPRNLDQDVLDEVIAISSDEAVETAKQLALQEGLLVGISSGAAAAAALKVGKRPENAGKLIGVVFPSFGERYLSTILFQSIREECEKMQPEP

SEQ ID NO: 10457 - protein, 284 aa, Glycine max
  peptide (1)..(284): Ceres Seq. ID no. 15177786
  misc_feature (1)..(260): Pfam Name: Pfam Description:  Pyridoxal-phosphate dependent enzyme
  misc_feature (1)..(283): NCBI GI NO: 12081919 NR Description: plastidic cysteine synthase 1 [Solanum tuberosum]
  misc_feature (1)..(283): NCBI GI NO: 22331875 NR Description: cysteine synthase, mitochondrial
  misc_feature (1)..(283): NCBI GI NO: 30695056 NR Description: cysteine synthase, mitochondrial
  misc_feature (1)..(283): NCBI GI NO: 11131628 NR Description: Cysteine synthase, chloroplast precursor
  misc_feature (1)..(283): NCBI GI NO: 12643295 NR Description: CYSTEINE SYNTHASE, MITOCHONDRIAL PRECURSOR
  misc_feature (1)..(283): NCBI GI NO: 15224351 NR Description: cysteine synthase, chloroplast
  misc_feature (1)..(283): NCBI GI NO: 303902 NR Description: cysteine synthase [Spinacia oleracea]
  misc_feature (1)..(283): NCBI GI NO: 12644209 NR Description: CYSTEINE SYNTHASE, CHLOROPLAST PRECURSOR
  misc_feature (1)..(283): NCBI GI NO: 572517 NR Description: cysteine synthase [Arabidopsis thaliana]
  misc_feature (1)..(283): NCBI GI NO: 25291707 NR Description: cysteine synthase (EC 4
MEPCCSVKDRIGFSMINDAEQRGAITPGKSILVEPTSGNTGIGLAFIAASRGYKLILTMPASMSLERRVLLKAFGAELVLTDAAKGMNGAVQKAEEILKSTPNSYMLQQFDNPSNPKVHYETTGPEIWEDTRGKIDILVAGIGTGGTVSGAGQFLKQQNPKIQVIGVEPLESNILTGGKPGPHKIQGIGAGFVPRNLDQDVLDEVIAISSDEAVETAKQLALQEGLLVGISSGAAAAAALKVGKRPENAGKLIGVVFPSFGERYLSTILFQSIREECEKMQPEP

SEQ ID NO: 10458 - DNA, 1842 bp, Glycine max
  misc_feature (1)..(1842): Ceres Seq. ID no. 14308540
ttaatcaatactttatgcacttttgttactagcacatgtgattgatattgaattgctctgctgttggatctctgcactggaaatttgtttcattttatatgttctaaacacggcttaggaaacctggcatgggagttattactgtttctacctcagctgctaggactccattaagattgaatacaaggttgatcagtcatcagcaggagaaaattcctctacccctagaaacagcgaagaaacaccagaaaagagtaggaaagactagtgagtcactgaagagagtgagagccgtctctactgttgaaacctctccatgcaccttggatgtggactacaatgaagctgcagccaaacttgaaaatatatataaactcagccctgtatctgatacctgtaatgtggaagatatagatagtaaaatcgagagagtcttgcggaggaggaagaaggttagtgaggaacgtgatgatggaaattgtgataatgtggttagaaaccagaataagaaggccaaacgattgagtcttgataagaggattgcattgaaaaataatgcaaaggaggaggtgattgatcaaactcagaagaaaaggaatgttaagaatagagtacaaaatattgatgtgcttatcagggattattcagcatcaactgatttagttagcatggactggaagaaaatgaagattccgccagttcttccttcttcagaacatgcatggttgttcaagttgatgcagccaatgaaggcactcctacaagcaaaagaagatttaaaggaagtggataaagaaattacaggtggtgaactagctgatgcaacaaacatgagtattattcaagtaaggaaagctatagaggttggtcgagctgcgagaaacaaactcataaagcacaatctccggcttgtattgttcgtgatcaacaaatattttcaagattttgcaagtggcccgaggtttcaagatctttgtcaggcaggagttaagggacttatcacagcaattgatcgttttgagccaaaaagaagacttcagctatctacatacagtttattttggataagacattctatcgttcgttccataaccctctcaagcttcacacgtgttccttttggacttgaaagggttagagtagatatccaaagaacaaaacttaagttaacatttgagctccagaggtcaccaacggaagaagagttagtagaaagaattgggatctcacttgaaagatatcatgaagtaatgaaggcatcaaaacccattttatcccttcattcaagacatataaccacgcaagaggagtatattaatgggattactgatgttgatggtgttaatggtgataataggaggcaacttgctgttctaagacttgctcttgatgatgtgcttgattccctgaagccaaaggagagcctagtgatcaggcagagatatggacttgatggcaagggtgacagaacattgggagaaattgctgggaacttgaatatttctagggaaattgtccggaagcatgaagtcaaagctctcatgaagcttaagcatccagctcggttggattatcttcgtcgttatgttgtataaattaacaaatatatatatatgcttccattggtgtcattttagtcccacgtacgctacctatagccatgcccttgataattctcataacaattatttaagtatacaaaattataatcatttgtcatgtaatttgtatatgaaggagttattgctcataagaaataacaacccaatacatgttacatgtaatgtgttgtgttcatgaattacattccaaattatataatagttgctagagttcatgtcg

SEQ ID NO: 10459 - protein, 488 aa, Glycine max
  peptide (1)..(488): Ceres Seq. ID no. 14308541
  misc_feature (254)..(327): Pfam Name: Pfam Description:  Sigma-70 region 2
  misc_feature (18)..(488): NCBI GI NO: 15237896 NR Description: sigma-related factor (emb CAA77213.1)
  misc_feature (69)..(487): NCBI GI NO: 30698488 NR Description: Sig5 [Oryza sativa (japonica cultivar-group)]
  misc_feature (18)..(252): NCBI GI NO: 15010718 NR Description: AT5g24120/MLE8_4 [Arabidopsis thaliana]
  misc_feature (191)..(487): NCBI GI NO: 23128093 NR Description: hypothetical protein [Nostoc punctiforme]
  misc_feature (191)..(487): NCBI GI NO: 558881 NR Description: SigA [Synechococcus sp. PCC 7002]
  misc_feature (191)..(487): NCBI GI NO: 1588486 NR Description: RNA polymerase sigma factor
  misc_feature (191)..(487): NCBI GI NO: 17232755 NR Description: transcription initiation factor sigma
  misc_feature (74)..(487): NCBI GI NO: 16332132 NR Description: RNA polymerase sigma factor
  misc_feature (123)..(487): NCBI GI NO: 217140 NR Description: principal sigma factor [Synechococcus sp.]
  misc_feature (191)..(487): NCBI GI NO: 23041419 NR Description: hypothetical protein
MGVITVSTSAARTPLRLNTRLISHQQEKIPLPLETAKKHQKRVGKTSESLKRVRAVSTVETSPCTLDVDYNEAAAKLENIYKLSPVSDTCNVEDIDSKIERVLRRRKKVSEERDDGNCDNVVRNQNKKAKRLSLDKRIALKNNAKEEVIDQTQKKRNVKNRVQNIDVLIRDYSASTDLVSMDWKKMKIPPVLPSSEHAWLFKLMQPMKALLQAKEDLKEVDKEITGGELADATNMSIIQVRKAIEVGRAARNKLIKHNLRLVLFVINKYFQDFASGPRFQDLCQAGVKGLITAIDRFEPKRRLQLSTYSLFWIRHSIVRSITLSSFTRVPFGLERVRVDIQRTKLKLTFELQRSPTEEELVERIGISLERYHEVMKASKPILSLHSRHITTQEEYINGITDVDGVNGDNRRQLAVLRLALDDVLDSLKPKESLVIRQRYGLDGKGDRTLGEIAGNLNISREIVRKHEVKALMKLKHPARLDYLRRYVV

SEQ ID NO: 10460 - protein, 308 aa, Glycine max
  peptide (1)..(308): Ceres Seq. ID no. 14308542
  misc_feature (74)..(147): Pfam Name: Pfam Description:  Sigma-70 region 2
  misc_feature (1)..(308): NCBI GI NO: 15237896 NR Description: sigma-related factor (emb CAA77213.1)
  misc_feature (1)..(307): NCBI GI NO: 30698488 NR Description: Sig5 [Oryza sativa (japonica cultivar-group)]
  misc_feature (1)..(72): NCBI GI NO: 15010718 NR Description: AT5g24120/MLE8_4 [Arabidopsis thaliana]
  misc_feature (11)..(307): NCBI GI NO: 23128093 NR Description: hypothetical protein [Nostoc punctiforme]
  misc_feature (11)..(307): NCBI GI NO: 558881 NR Description: SigA [Synechococcus sp. PCC 7002]
  misc_feature (11)..(307): NCBI GI NO: 1588486 NR Description: RNA polymerase sigma factor
  misc_feature (11)..(307): NCBI GI NO: 17232755 NR Description: transcription initiation factor sigma
  misc_feature (1)..(307): NCBI GI NO: 16332132 NR Description: RNA polymerase sigma factor
  misc_feature (1)..(307): NCBI GI NO: 217140 NR Description: principal sigma factor [Synechococcus sp.]
  misc_feature (11)..(307): NCBI GI NO: 23041419 NR Description: hypothetical protein
MDWKKMKIPPVLPSSEHAWLFKLMQPMKALLQAKEDLKEVDKEITGGELADATNMSIIQVRKAIEVGRAARNKLIKHNLRLVLFVINKYFQDFASGPRFQDLCQAGVKGLITAIDRFEPKRRLQLSTYSLFWIRHSIVRSITLSSFTRVPFGLERVRVDIQRTKLKLTFELQRSPTEEELVERIGISLERYHEVMKASKPILSLHSRHITTQEEYINGITDVDGVNGDNRRQLAVLRLALDDVLDSLKPKESLVIRQRYGLDGKGDRTLGEIAGNLNISREIVRKHEVKALMKLKHPARLDYLRRYVV

SEQ ID NO: 10461 - protein, 303 aa, Glycine max
  peptide (1)..(303): Ceres Seq. ID no. 14308543
  misc_feature (69)..(142): Pfam Name: Pfam Description:  Sigma-70 region 2
  misc_feature (1)..(303): NCBI GI NO: 15237896 NR Description: sigma-related factor (emb CAA77213.1)
  misc_feature (1)..(302): NCBI GI NO: 30698488 NR Description: Sig5 [Oryza sativa (japonica cultivar-group)]
  misc_feature (1)..(67): NCBI GI NO: 15010718 NR Description: AT5g24120/MLE8_4 [Arabidopsis thaliana]
  misc_feature (6)..(302): NCBI GI NO: 23128093 NR Description: hypothetical protein [Nostoc punctiforme]
  misc_feature (6)..(302): NCBI GI NO: 558881 NR Description: SigA [Synechococcus sp. PCC 7002]
  misc_feature (6)..(302): NCBI GI NO: 1588486 NR Description: RNA polymerase sigma factor
  misc_feature (6)..(302): NCBI GI NO: 17232755 NR Description: transcription initiation factor sigma
  misc_feature (1)..(302): NCBI GI NO: 16332132 NR Description: RNA polymerase sigma factor
  misc_feature (1)..(302): NCBI GI NO: 217140 NR Description: principal sigma factor [Synechococcus sp.]
  misc_feature (6)..(302): NCBI GI NO: 23041419 NR Description: hypothetical protein
MKIPPVLPSSEHAWLFKLMQPMKALLQAKEDLKEVDKEITGGELADATNMSIIQVRKAIEVGRAARNKLIKHNLRLVLFVINKYFQDFASGPRFQDLCQAGVKGLITAIDRFEPKRRLQLSTYSLFWIRHSIVRSITLSSFTRVPFGLERVRVDIQRTKLKLTFELQRSPTEEELVERIGISLERYHEVMKASKPILSLHSRHITTQEEYINGITDVDGVNGDNRRQLAVLRLALDDVLDSLKPKESLVIRQRYGLDGKGDRTLGEIAGNLNISREIVRKHEVKALMKLKHPARLDYLRRYVV

SEQ ID NO: 10462 - DNA, 1607 bp, Glycine max
  misc_feature (1)..(1607): Ceres Seq. ID no. 14313097
aataatagtgcagtgcgtttcagtggtggaaagtggaaaccgtaatcgccaagctggaaagaaaacgctccatttctgcgccactctctgccttatcgccccatttccgttccaacattgtcagagagcaacacagattagtcgtagcagtgagaggcatcggagggggaataaaacatggtttcaacagcaacagaaacagagcaagattagaaagcgccagggtgcgcacgttagcaccgaaccccgtgggttcctctcccctaactcgcttcgcccccacggcattcctacgctgatccacactcaaaacgcatcacaaaaaacaccgtttcgcaaccctaacggaggaggggggtaaaaaaaaaaactgaaaaaaatgtttcggataacgagattctcggggtttttctccgccgcaatgtttgtgattgttcttgttattctctccccctccttccaatccgaagccattcgatcctcccaccgattttccttccggaaagcccctccgttccgcaatgccgccgaatgcggttcaatttccggtgaaaccaccaccgtctgcgacccttccttggtccacgtcgccataaccctcgacgtcgactacctccgcggctcaatcgccgccgtgcactccatcctccacaactccctctgtccggagaacatcttcttccatttcctcgtctccgacaccaacctccaaaccctagttgaatccacgttccctaacttgaagttcaacgtctattacttcgatccgaacatcgtcgctcacttgatctcctcctccgtgcggcaggcgttggagcagcctctcaattacgcgagaaattacctcgttgaccttctggagagttgcgtggagagggtgatctacttggactccgatctggtggtagtggatgacgtggcgaaactgtggagcgcgagtctggactcacgcgccatcggcgcgccggagtactgccacgcgaacttcacgaagtatttcacggcggggttctggtcggagccgaggttgtcggggacgttcgcgcagcggagggcgtgctacttcaacacgggggtgatggtgatggatctggtgaagtggaggaaggaagggtacaccaagagaatcgagaggtggatggagattcagaagagtgataggatctacgagcttggttctctgccgccgtttttgctggtgtttgcgggacacgtggcgcccattgagcaccggtggaaccagcatggtttgggcggggataacgtgaagggtagttgccgtgacttgcaccctggtccggttagtttgttgcattggtctggtagtgggaagccatggatccgtttaagttccaaacgcccctgtcctctggattctctatgggctccctttgatttgtatgcacactcttcctcttaaactaattcttccctctcatttaattcaatttctctttgcttgtcatttttcgctagttagatgttattcatctatttcttctccctaaactttttctccggaaaatttgtatgtcatttctattctattattttcctgtcattcctgatttgaaaataaaagaaaaagaaaagaaagcggattttct

SEQ ID NO: 10463 - protein, 346 aa, Glycine max
  peptide (1)..(346): Ceres Seq. ID no. 14313098
  misc_feature (1)..(345): NCBI GI NO: 22331906 NR Description: glycosyltransferase family 8
  misc_feature (6)..(345): NCBI GI NO: 11281926 NR Description: hypothetical protein F26K9
  misc_feature (1)..(344): NCBI GI NO: 15235247 NR Description: glycosyltransferase family 8
  misc_feature (1)..(344): NCBI GI NO: 21554300 NR Description: putative glycosyl transferase
  misc_feature (1)..(344): NCBI GI NO: 15217851 NR Description: glycosyltransferase family 8
  misc_feature (1)..(312): NCBI GI NO: 20258800 NR Description: putative glycosyl transferase
  misc_feature (39)..(346): NCBI GI NO: 18409445 NR Description: glycosyltransferase family 8
  misc_feature (40)..(346): NCBI GI NO: 15221684 NR Description: glycosyltransferase family 8
  misc_feature (8)..(341): NCBI GI NO: 30689156 NR Description: galactinol synthase, putative
  misc_feature (12)..(344): NCBI GI NO: 18391493 NR Description: glycosyltransferase family 8
MFRITRFSGFFSAAMFVIVLVILSPSFQSEAIRSSHRFSFRKAPPFRNAAECGSISGETTTVCDPSLVHVAITLDVDYLRGSIAAVHSILHNSLCPENIFFHFLVSDTNLQTLVESTFPNLKFNVYYFDPNIVAHLISSSVRQALEQPLNYARNYLVDLLESCVERVIYLDSDLVVVDDVAKLWSASLDSRAIGAPEYCHANFTKYFTAGFWSEPRLSGTFAQRRACYFNTGVMVMDLVKWRKEGYTKRIERWMEIQKSDRIYELGSLPPFLLVFAGHVAPIEHRWNQHGLGGDNVKGSCRDLHPGPVSLLHWSGSGKPWIRLSSKRPCPLDSLWAPFDLYAHSSS

SEQ ID NO: 10464 - protein, 332 aa, Glycine max
  peptide (1)..(332): Ceres Seq. ID no. 14313099
  misc_feature (1)..(331): NCBI GI NO: 22331906 NR Description: glycosyltransferase family 8
  misc_feature (1)..(331): NCBI GI NO: 11281926 NR Description: hypothetical protein F26K9
  misc_feature (1)..(330): NCBI GI NO: 15235247 NR Description: glycosyltransferase family 8
  misc_feature (1)..(330): NCBI GI NO: 21554300 NR Description: putative glycosyl transferase
  misc_feature (1)..(330): NCBI GI NO: 15217851 NR Description: glycosyltransferase family 8
  misc_feature (1)..(298): NCBI GI NO: 20258800 NR Description: putative glycosyl transferase
  misc_feature (25)..(332): NCBI GI NO: 18409445 NR Description: glycosyltransferase family 8
  misc_feature (26)..(332): NCBI GI NO: 15221684 NR Description: glycosyltransferase family 8
  misc_feature (1)..(327): NCBI GI NO: 30689156 NR Description: galactinol synthase, putative
  misc_feature (1)..(330): NCBI GI NO: 18391493 NR Description: glycosyltransferase family 8
MFVIVLVILSPSFQSEAIRSSHRFSFRKAPPFRNAAECGSISGETTTVCDPSLVHVAITLDVDYLRGSIAAVHSILHNSLCPENIFFHFLVSDTNLQTLVESTFPNLKFNVYYFDPNIVAHLISSSVRQALEQPLNYARNYLVDLLESCVERVIYLDSDLVVVDDVAKLWSASLDSRAIGAPEYCHANFTKYFTAGFWSEPRLSGTFAQRRACYFNTGVMVMDLVKWRKEGYTKRIERWMEIQKSDRIYELGSLPPFLLVFAGHVAPIEHRWNQHGLGGDNVKGSCRDLHPGPVSLLHWSGSGKPWIRLSSKRPCPLDSLWAPFDLYAHSSS

SEQ ID NO: 10465 - DNA, 1339 bp, Glycine max
  misc_feature (1)..(1339): Ceres Seq. ID no. 14316499
gaatccttcatatcactgccggcgcgcaagagaggaccatccttgttctgccctctacctcgttcatacaaacatttcgcacacgcagctctatctctccacaacacatccaccatgggtctcatcaagggcggcttcttgcgcctgttccaaacactgctatacgcgctctgcttctgctgcgccggcattgccctcggcatctactcatacttcctcgcggtccaagccgatcgcgaccagggcatccccagatggcaaaaggctgttgagggtatctccggcgtggctgttctgtacaccatcgctgccgtggtcctcacttgctgccttggtggtatcagcttcttcgccttcaccgcgattgtccttgacatcctcttcgtcggcggcttcattgccatcgctgttctgacccgccacggtgcttcctcttgcactggcatcgtcaacacccctctcggtatcggcaatgccaacgccaactctgagggcttcggcaacaacggtctcggcactggaaacggcgagaacctcacctacgctgtttctcctcgcaacgcttgccgcatgaacacagccgtcttcgccgtgtctattgttgccgctttcctgttcctcatcaccgctctcttccaagtcttccttgtccgcaagcacaagaaggagaagcgtttcggccctggcccgtccaacaactacaccagcggccctgccaagcgcaacttctggcagcgcaagaagaagaccaacgacagggatcttgagaaggatgtcatcactcccgcaccagctggcaccctcaccactggccatgccaccgacatccgtccctcgcacgacacggcctacactggaagcactgtcgctgcccccggcgacaggtacgacaaggtcgacggcgccaacggctacgctacccagcagcacaccggccacgcggctcacggttcccacggcgcctactacggagctcctcagggaaccgccaacccgtacaccatggacactaatggcgatcacactctgcttcgcgagaacaaccctgtctaccgcggcgttgcttagatcaatgattgtcccatcggcaacacgatcaacaactagacttcgagtctactgacagctagtctttcgggactgatcagctgccttttctttctgtttgctccatgacgcgatttaatgaacaagataccactataatgccacctgtaacataggacttctgaaaagaaggtgatacgaagttgggattggatggtggcgaggagcgatgtttactctaatatatgtaattgcaagaatgacagcggcacctagccgtttaataactaag

SEQ ID NO: 10466 - protein, 355 aa, Glycine max
  peptide (1)..(355): Ceres Seq. ID no. 14316500
  misc_feature (44)..(313): NCBI GI NO: 40747543 NR Description: hypothetical protein AN0600.2
  misc_feature (39)..(341): NCBI GI NO: 32404848 NR Description: hypothetical protein
ESFISLPARKRGPSLFCPLPRSYKHFAHAALSLHNTSTMGLIKGGFLRLFQTLLYALCFCCAGIALGIYSYFLAVQADRDQGIPRWQKAVEGISGVAVLYTIAAVVLTCCLGGISFFAFTAIVLDILFVGGFIAIAVLTRHGASSCTGIVNTPLGIGNANANSEGFGNNGLGTGNGENLTYAVSPRNACRMNTAVFAVSIVAAFLFLITALFQVFLVRKHKKEKRFGPGPSNNYTSGPAKRNFWQRKKKTNDRDLEKDVITPAPAGTLTTGHATDIRPSHDTAYTGSTVAAPGDRYDKVDGANGYATQQHTGHAAHGSHGAYYGAPQGTANPYTMDTNGDHTLLRENNPVYRGVA

SEQ ID NO: 10467 - protein, 317 aa, Glycine max
  peptide (1)..(317): Ceres Seq. ID no. 14316501
  misc_feature (6)..(275): NCBI GI NO: 40747543 NR Description: hypothetical protein AN0600.2
  misc_feature (1)..(303): NCBI GI NO: 32404848 NR Description: hypothetical protein
MGLIKGGFLRLFQTLLYALCFCCAGIALGIYSYFLAVQADRDQGIPRWQKAVEGISGVAVLYTIAAVVLTCCLGGISFFAFTAIVLDILFVGGFIAIAVLTRHGASSCTGIVNTPLGIGNANANSEGFGNNGLGTGNGENLTYAVSPRNACRMNTAVFAVSIVAAFLFLITALFQVFLVRKHKKEKRFGPGPSNNYTSGPAKRNFWQRKKKTNDRDLEKDVITPAPAGTLTTGHATDIRPSHDTAYTGSTVAAPGDRYDKVDGANGYATQQHTGHAAHGSHGAYYGAPQGTANPYTMDTNGDHTLLRENNPVYRGVA

SEQ ID NO: 10468 - DNA, 1717 bp, Glycine max
  misc_feature (1)..(1717): Ceres Seq. ID no. 14309682
tttcctcttctttgcatcatcattctcattccttctttctaaactaaccaactttttttcaaacaaattcgattctttcttcatttttaacctaattttcttttcgatccaaaaaatggctctctcgcgcgttgttgctcaatcgtcgcaatcgaatcttctgaaacccctagcgtcgtacttatcactacgacgccgttcggtttcgacttcgtcagacccactcacgatagagacctcggtgcccttcacctcccacaactgcgacgcgccgtcacgcgccgtggagacctcctcggcggagctctttgcgttcttccacgacatggcgctgatgcggcggatggagatcgcggcggactcgctctacaaggcgaagctgatccgcggcttctgccacctctacgacggtcaggaggctgtcgccgtcggcatggaggccgccatcacgcgcaaggactgcgtcatcaccgcctaccgcgaccattgcaccttcctcgcccgtggcggaaccctaatcgagatcttctccgagctcatgggccgccgcgacggctgctccaaggggaaagggggatccatgcacttttataggaaggaaggtggcttctacggtggccatggaatcgttggggcgcaggttccgcttgggtgtggcttggcttttgctcagaagtattgtaaagatgagaatgttacgttttctatgtacggtgatggtgctgccaatcagggccagttgttcgaggcgcttaacatttccgctctttgggatctcccctccattttggtctgcgagaataatcactatggaatggggacagctgagtggagagctgctaagagtcctgcttattacaagcgtggggattatgttcctggattgaaggtagatggcatggatgctcttgctgtgaaacaagcttgtaaatttgcaaaggagtttgctttgaagaatggtcccattattcttgaaatggacacatacagataccatggccactccatgtctgatcctggcagcacataccgtacacgtgatgagatttctggtgtgagacaggagcgtgatccaattgagagagtaagaaagctactattgactcacgagattgctactgaaaaggagctaaaggacattgaaaaggaaataagaaaagaagttgatgaagccattgccaaagcaaaggaaagtcaaatgccagagccatctgatttatttaccaatgtatatgtaaaaggctttggtgtcgaggcttgtggcgctgataggaaagaagttagagctattttgccctgatggaaaacttttcctttgaatttcttttccttagttttggaccgatcaaaataatgaagaataaaaggttcagaagatcatctctacctatttgttgagctttccccaaattgtatatgaaattgattcttcagtagcaatggggcggaaattaatgttttgccatgtaattttggaggatctaacactcatatgacctcaattgattaagcatgcaactagtgtcctgcaaatttggaggatttcgttatgcaaaacctccatgattggcaaaattttgccattattttatttttaggtattcacaagattgtgttccaattgaaaccattttttggctataagagtctttggacagttaaaaatttgatgcctgtacattgcagattgaattggtgatacaggttggattatgtt

SEQ ID NO: 10469 - protein, 432 aa, Glycine max
  peptide (1)..(432): Ceres Seq. ID no. 14309683
  misc_feature (109)..(404): Pfam Name: Pfam Description:  Dehydrogenase E1 component
  misc_feature (39)..(432): NCBI GI NO: 1709449 NR Description: Pyruvate dehydrogenase E1 component alpha subunit
  misc_feature (39)..(432): NCBI GI NO: 15221692 NR Description: pyruvate dehydrogenase E1 alpha subunit
  misc_feature (39)..(432): NCBI GI NO: 13430788 NR Description: putative pyruvate dehydrogenase e1 alpha subunit
  misc_feature (39)..(432): NCBI GI NO: 15218940 NR Description: pyruvate dehydrogenase e1 alpha subunit -related
  misc_feature (39)..(432): NCBI GI NO: 1709453 NR Description: Pyruvate dehydrogenase E1 component alpha subunit
  misc_feature (39)..(432): NCBI GI NO: 23306664 NR Description: pyruvate dehydrogenase E1a-like subunit IAR4
  misc_feature (39)..(432): NCBI GI NO: 2117533 NR Description: pyruvate dehydrogenase (lipoamide) (EC 1
  misc_feature (39)..(432): NCBI GI NO: 12003246 NR Description: pyruvate dehydrogenase [Lycopersicon esculentum]
  misc_feature (49)..(432): NCBI GI NO: 28465343 NR Description: pyruvate dehydrogenase E1alpha subunit
  misc_feature (49)..(432): NCBI GI NO: 28465345 NR Description: pyruvate dehydrogenase E1 alpha subunit
FLFFASSFSFLLSKLTNFFSNKFDSFFIFNLIFFSIQKMALSRVVAQSSQSNLLKPLASYLSLRRRSVSTSSDPLTIETSVPFTSHNCDAPSRAVETSSAELFAFFHDMALMRRMEIAADSLYKAKLIRGFCHLYDGQEAVAVGMEAAITRKDCVITAYRDHCTFLARGGTLIEIFSELMGRRDGCSKGKGGSMHFYRKEGGFYGGHGIVGAQVPLGCGLAFAQKYCKDENVTFSMYGDGAANQGQLFEALNISALWDLPSILVCENNHYGMGTAEWRAAKSPAYYKRGDYVPGLKVDGMDALAVKQACKFAKEFALKNGPIILEMDTYRYHGHSMSDPGSTYRTRDEISGVRQERDPIERVRKLLLTHEIATEKELKDIEKEIRKEVDEAIAKAKESQMPEPSDLFTNVYVKGFGVEACGADRKEVRAILP

SEQ ID NO: 10470 - protein, 394 aa, Glycine max
  peptide (1)..(394): Ceres Seq. ID no. 14309684
  misc_feature (71)..(366): Pfam Name: Pfam Description:  Dehydrogenase E1 component
  misc_feature (1)..(394): NCBI GI NO: 1709449 NR Description: Pyruvate dehydrogenase E1 component alpha subunit
  misc_feature (1)..(394): NCBI GI NO: 15221692 NR Description: pyruvate dehydrogenase E1 alpha subunit
  misc_feature (1)..(394): NCBI GI NO: 13430788 NR Description: putative pyruvate dehydrogenase e1 alpha subunit
  misc_feature (1)..(394): NCBI GI NO: 15218940 NR Description: pyruvate dehydrogenase e1 alpha subunit -related
  misc_feature (1)..(394): NCBI GI NO: 1709453 NR Description: Pyruvate dehydrogenase E1 component alpha subunit
  misc_feature (1)..(394): NCBI GI NO: 23306664 NR Description: pyruvate dehydrogenase E1a-like subunit IAR4
  misc_feature (1)..(394): NCBI GI NO: 2117533 NR Description: pyruvate dehydrogenase (lipoamide) (EC 1
  misc_feature (1)..(394): NCBI GI NO: 12003246 NR Description: pyruvate dehydrogenase [Lycopersicon esculentum]
  misc_feature (11)..(394): NCBI GI NO: 28465343 NR Description: pyruvate dehydrogenase E1alpha subunit
  misc_feature (11)..(394): NCBI GI NO: 28465345 NR Description: pyruvate dehydrogenase E1 alpha subunit
MALSRVVAQSSQSNLLKPLASYLSLRRRSVSTSSDPLTIETSVPFTSHNCDAPSRAVETSSAELFAFFHDMALMRRMEIAADSLYKAKLIRGFCHLYDGQEAVAVGMEAAITRKDCVITAYRDHCTFLARGGTLIEIFSELMGRRDGCSKGKGGSMHFYRKEGGFYGGHGIVGAQVPLGCGLAFAQKYCKDENVTFSMYGDGAANQGQLFEALNISALWDLPSILVCENNHYGMGTAEWRAAKSPAYYKRGDYVPGLKVDGMDALAVKQACKFAKEFALKNGPIILEMDTYRYHGHSMSDPGSTYRTRDEISGVRQERDPIERVRKLLLTHEIATEKELKDIEKEIRKEVDEAIAKAKESQMPEPSDLFTNVYVKGFGVEACGADRKEVRAILP

SEQ ID NO: 10471 - protein, 324 aa, Glycine max
  peptide (1)..(324): Ceres Seq. ID no. 14309685
  misc_feature (1)..(296): Pfam Name: Pfam Description:  Dehydrogenase E1 component
  misc_feature (1)..(324): NCBI GI NO: 1709449 NR Description: Pyruvate dehydrogenase E1 component alpha subunit
  misc_feature (1)..(324): NCBI GI NO: 15221692 NR Description: pyruvate dehydrogenase E1 alpha subunit
  misc_feature (1)..(324): NCBI GI NO: 13430788 NR Description: putative pyruvate dehydrogenase e1 alpha subunit
  misc_feature (1)..(324): NCBI GI NO: 15218940 NR Description: pyruvate dehydrogenase e1 alpha subunit -related
  misc_feature (1)..(324): NCBI GI NO: 1709453 NR Description: Pyruvate dehydrogenase E1 component alpha subunit
  misc_feature (1)..(324): NCBI GI NO: 23306664 NR Description: pyruvate dehydrogenase E1a-like subunit IAR4
  misc_feature (1)..(324): NCBI GI NO: 2117533 NR Description: pyruvate dehydrogenase (lipoamide) (EC 1
  misc_feature (1)..(324): NCBI GI NO: 12003246 NR Description: pyruvate dehydrogenase [Lycopersicon esculentum]
  misc_feature (1)..(324): NCBI GI NO: 28465343 NR Description: pyruvate dehydrogenase E1alpha subunit
  misc_feature (1)..(324): NCBI GI NO: 28465345 NR Description: pyruvate dehydrogenase E1 alpha subunit
MALMRRMEIAADSLYKAKLIRGFCHLYDGQEAVAVGMEAAITRKDCVITAYRDHCTFLARGGTLIEIFSELMGRRDGCSKGKGGSMHFYRKEGGFYGGHGIVGAQVPLGCGLAFAQKYCKDENVTFSMYGDGAANQGQLFEALNISALWDLPSILVCENNHYGMGTAEWRAAKSPAYYKRGDYVPGLKVDGMDALAVKQACKFAKEFALKNGPIILEMDTYRYHGHSMSDPGSTYRTRDEISGVRQERDPIERVRKLLLTHEIATEKELKDIEKEIRKEVDEAIAKAKESQMPEPSDLFTNVYVKGFGVEACGADRKEVRAILP

SEQ ID NO: 10472 - DNA, 961 bp, Glycine max
  misc_feature (1)..(961): Ceres Seq. ID no. 14308171
atagagaaacagataagggcgctctccgtaccatcttcctaatcctccttacatttgcagtgttcccatgtctcctacccactgaagtcgaacccctatttttcctctccctaatggcttctcaagttcttcttcagcaggcactgtttgcccccaagctaagtttcccttcttcttctcgtaacgtggcgttaatttctagggttccttccaccccaatttcatggcgttgcactcccctcattgctaagcctagtttcgtagtgagagctgacaccaacctcgatggcggtggtgaagccaccgaggatgttccttcggataatgctgaaaaagtttcggaaggcgaagcagaacaagtttcggattctgaagctccgaaatcgcctagaaaaccccgagtcaaactcggagacattatggggatattgaatcagagggcaattgaggcatccgagaagcaaagaccaactccagacattaggactggggatattgtcgaaatcaaattggaggttcctgagaacaagcgtaggttgtccatttataaagggattgtcatctcaaaacaaaatgctggtattcacacgactattcgaatccgaagaatcattgccggcactggggttgagatagtcttcccagtttactcaccaaacatcaaagaaatcaaagtggtaagtcaccgtaaggtcaggagggcaagattgtactatctgagagacaagcttccgagattctccactttcaagtgatactcggataccccacctttcctcacgttattcgtcgaactagtctgctgatccaggataagtgctgcggagctttaatttttttaatttcaatttgttctgttgtagaatacatcatttttcttcccctttgtgtatcttcccttaaatcgaaacaagtgtactgaaccttgatagtattgagaaatttgaagtgtttcttctgc

SEQ ID NO: 10473 - protein, 250 aa, Glycine max
  peptide (1)..(250): Ceres Seq. ID no. 14308172
  misc_feature (145)..(250): Pfam Name: Pfam Description:  Ribosomal protein L19
  misc_feature (52)..(250): NCBI GI NO: 7582403 NR Description: plastid ribosomal protein L19 precursor
  misc_feature (86)..(250): NCBI GI NO: 18414915 NR Description: ribosomal protein L19, putative
  misc_feature (83)..(250): NCBI GI NO: 8809601 NR Description: contains similarity to plastid ribosomal proteinL19~gene_id:MQL5
  misc_feature (83)..(250): NCBI GI NO: 18422764 NR Description: ribosomal protein L19, putative
  misc_feature (86)..(250): NCBI GI NO: 21592584 NR Description: contains similarity to plastid ribosomal proteinL19
  misc_feature (41)..(250): NCBI GI NO: 14140122 NR Description: putative plastid ribosomal protein L19 precursor
  misc_feature (36)..(243): NCBI GI NO: 15239778 NR Description: ribosomal protein L19, putative
  misc_feature (36)..(243): NCBI GI NO: 15234249 NR Description: ribosomal protein L19, putative
  misc_feature (37)..(243): NCBI GI NO: 18395422 NR Description: ribosomal protein L19, putative
  misc_feature (86)..(177): NCBI GI NO: 7485084 NR Description: hypothetical protein - Arabidopsis thaliana
RETDKGALRTIFLILLTFAVFPCLLPTEVEPLFFLSLMASQVLLQQALFAPKLSFPSSSRNVALISRVPSTPISWRCTPLIAKPSFVVRADTNLDGGGEATEDVPSDNAEKVSEGEAEQVSDSEAPKSPRKPRVKLGDIMGILNQRAIEASEKQRPTPDIRTGDIVEIKLEVPENKRRLSIYKGIVISKQNAGIHTTIRIRRIIAGTGVEIVFPVYSPNIKEIKVVSHRKVRRARLYYLRDKLPRFSTFK

SEQ ID NO: 10474 - protein, 213 aa, Glycine max
  peptide (1)..(213): Ceres Seq. ID no. 14308173
  misc_feature (108)..(213): Pfam Name: Pfam Description:  Ribosomal protein L19
  misc_feature (15)..(213): NCBI GI NO: 7582403 NR Description: plastid ribosomal protein L19 precursor
  misc_feature (49)..(213): NCBI GI NO: 18414915 NR Description: ribosomal protein L19, putative
  misc_feature (46)..(213): NCBI GI NO: 8809601 NR Description: contains similarity to plastid ribosomal proteinL19~gene_id:MQL5
  misc_feature (46)..(213): NCBI GI NO: 18422764 NR Description: ribosomal protein L19, putative
  misc_feature (49)..(213): NCBI GI NO: 21592584 NR Description: contains similarity to plastid ribosomal proteinL19
  misc_feature (4)..(213): NCBI GI NO: 14140122 NR Description: putative plastid ribosomal protein L19 precursor
  misc_feature (1)..(206): NCBI GI NO: 15239778 NR Description: ribosomal protein L19, putative
  misc_feature (1)..(206): NCBI GI NO: 15234249 NR Description: ribosomal protein L19, putative
  misc_feature (1)..(206): NCBI GI NO: 18395422 NR Description: ribosomal protein L19, putative
  misc_feature (49)..(140): NCBI GI NO: 7485084 NR Description: hypothetical protein - Arabidopsis thaliana
MASQVLLQQALFAPKLSFPSSSRNVALISRVPSTPISWRCTPLIAKPSFVVRADTNLDGGGEATEDVPSDNAEKVSEGEAEQVSDSEAPKSPRKPRVKLGDIMGILNQRAIEASEKQRPTPDIRTGDIVEIKLEVPENKRRLSIYKGIVISKQNAGIHTTIRIRRIIAGTGVEIVFPVYSPNIKEIKVVSHRKVRRARLYYLRDKLPRFSTFK

SEQ ID NO: 10475 - DNA, 1394 bp, Glycine max
  misc_feature (1)..(1394): Ceres Seq. ID no. 14313107
atattgttttgattgttcattcaagttcaaacttgaatttgattcatctgatctaaccaatgaaatcaaaatcgggattcgattgcagttgcaggtctctctatttggtgcttattacttattattaaggtttctttcttctgttgaaatggtctttagtaattatatttctgccaatgaatctcattgtttaattctgattatacctttcccgaaatgcaattagcgtcaaatggtgacaaggaagaatgttcagaaagcgaacccatcttgaatcatcaccatcttcatttgccaccacccggagaatcctccttttcctgtgaaattattcctatttctgctgctgcttccggcgatgatgatttacaaaacgttcgggttgatgagacttgtcatctcgtaaatgcagatcagccacaatgccgaatatgcctcgatattgtaggagaagatttaattgctccatgccattgcaaaggtacgcaaaagtacgtccacagatcatgtctcgataattggagatccaccaaggaggggttcgcgttttctcactgtacagagtgcagagctgtcttcatattacgtgcaaatgtcccaccagatcggtggtggttgagattaaaatttcagttccttgttgctagagatcatgcattcattttcataattgttcagctggttgttgctttcttgggagtgcttgtgtacaaattttatggagatgaactgagggaaatgtttggttatgaagaacatccatatggattttatacaatggctgttctagccattgttttggttggtttgctctatggcttcttcatagcgataatatgtggtcaaagaatcaatgaacgccactaccatgttcttgccaaacaagaattgactaaggaatatgtggttgaagatcgagaacatgtaaagaatgtgcctgaacttgaccccagccatgtgacagagctaaggatgttgggcctttactagttggatgcatcttctgcatagtcacattgaatttgttgtatttgcggcttgtctccatggtccccttcacatttgtagatcacattggtctgttcagagtgatgccccattaatatggctgtttgggcaccaactggcagtgcacagccacatgggtgttgtttattgtactctattttgattctttatttttaatttatatttttctggcgaaacttgtgaaagaaacatgcagttcacctagaaaattgctcttgtgaatcaatgttgtttggtggagtataaaggaaaaaggtgcagatcctatgaacatgagatattttgtatttgtaacttgtataagtcccttgatgtaacttattttacaatattttttttcatttctatacaaaatattataatcg

SEQ ID NO: 10476 - protein, 257 aa, Glycine max
  peptide (1)..(257): Ceres Seq. ID no. 14313108
  misc_feature (70)..(117): Pfam Name: RING finger Pfam Description: Zinc finger, C3HC4 type
  misc_feature (31)..(257): NCBI GI NO: 18403075 NR Description: zinc finger
  misc_feature (31)..(257): NCBI GI NO: 26450547 NR Description: unknown protein [Arabidopsis thaliana]
  misc_feature (66)..(198): NCBI GI NO: 28393273 NR Description: unknown protein [Arabidopsis thaliana]
  misc_feature (182)..(256): NCBI GI NO: 28393273 NR Description: unknown protein [Arabidopsis thaliana]
  misc_feature (1)..(199): NCBI GI NO: 18391230 NR Description: zinc finger
  misc_feature (1)..(199): NCBI GI NO: 21593635 NR Description: unknown [Arabidopsis thaliana]
  misc_feature (183)..(256): NCBI GI NO: 18391230 NR Description: zinc finger
  misc_feature (183)..(256): NCBI GI NO: 21593635 NR Description: unknown [Arabidopsis thaliana]
  misc_feature (1)..(185): NCBI GI NO: 25402638 NR Description: hypothetical protein
  misc_feature (66)..(160): NCBI GI NO: 15227153 NR Description: zinc finger
MQLASNGDKEECSESEPILNHHHLHLPPPGESSFSCEIIPISAAASGDDDLQNVRVDETCHLVNADQPQCRICLDIVGEDLIAPCHCKGTQKYVHRSCLDNWRSTKEGFAFSHCTECRAVFILRANVPPDRWWLRLKFQFLVARDHAFIFIIVQLVVAFLGVLVYKFYGDELREMFGYEEHPYGFYTMAVLAIVLVGLLYGFFIAIICGQRINERHYHVLAKQELTKEYVVEDREHVKNVPELDPSHVTELRMLGLY

SEQ ID NO: 10477 - DNA, 1663 bp, Glycine max
  misc_feature (1)..(1663): Ceres Seq. ID no. 15177648
tcatacgatatggatagggtgttctcagtggacgatatctccgatcacttctggcagccgcctatccctgtctccgccgcccaaacttcctcccagatgagccgcagcgcctccgagtgggccttccaacgcttcctccaggaagcttccgcctccgcaccctctcctccgtcttcttcctccgccgccgacgtcgtattcgtcgagatcgaagatcaacctaaacccgcccctccccctccgtcaaacggcgccgttctccccaatgcccctggtcccgtcccccttgactccgacgaataccaggccttcctcaagagcaagcttaacctcgcatgcgccgccgtcgccatgactaggggatctttggctaaatctcaagacccgtcccctttttctgaaggtggatcacagccgactaatccttctctagttgaatctcagactacttctaaaggatctattccttctgaaaatgatccatctaagttacaagataaagataccaatgtaccagttgggattccttccatacctgccatgcaaaagaaacctgctgttgcaattaggccatctacaagtggatcatcaagagaacagtcagatgatgaggacattgagggagagacatctatgattgacaacacggaccctgctgatgtaaaacgagtaaggaggatgctatccaatagggagtcagcccgacgctgtagaagaagaaagcaggctcatttaactgacctagaaacacaggtttctcaattaagaggtgaaaattctaccttgttaaagcgccttactgatgttagtcagaaatacagcgactctgctgttgacaacagagttttaaaagctgatgttgaaacattaagaacaaaggtaaagctctactttatacttaaacctactggctctttctaacaagttccataggtttggctgacaagatggaggatggtgtccaatgagggtcatcttttacagtgaagaaaagctaaattagaattaatgttgcttcatctgtttggacaaagtttatctgacatgtgtgtttgtcatttcctaccatgttattctcatttttaggtgaagatggccgaagagaccgtcaaaagaattactggattgaacccattgcttcatgccatgtctgatatatcatcactgggcctgccatcatttgatggaagaagcccttcagacacttcagctgatgcagctgttcctgtgcaagatgatccacatcatcacttctatcaacccacatctactaatcctattcccagtcatgatccgatagtcaacaatggattggggggcatttcttcaattgaaaatgtgcagcagaatgctgcagtagtgctaggtgggaacaagatgggtcaaacagcatccctgcagcgggtggctagcttggaacatctacaggagcggattcgtggtggacctccatctaatggggagcagtgactaattagccaaatctcctggatgctttgccaggaaattattctaaaacagttatttctgttggttataactagaggcctattcttctggaatacattgtaattcaattgatggggcacatgatgttggattcaattagtgcaccccgtatttttttaaaaaataatataaaatgaactttactttctagttc

SEQ ID NO: 10478 - protein, 306 aa, Glycine max
  peptide (1)..(306): Ceres Seq. ID no. 15177649
  misc_feature (218)..(282): Pfam Name: Pfam Description:  bZIP transcription factor
  misc_feature (49)..(296): NCBI GI NO: 16797791 NR Description: bZIP transcription factor [Nicotiana tabacum]
  misc_feature (55)..(296): NCBI GI NO: 7488648 NR Description: bZIP DNA-binding protein HBF-1 - soybean
  misc_feature (73)..(296): NCBI GI NO: 100163 NR Description: light-induced protein CPRF-2 - parsley
  misc_feature (73)..(296): NCBI GI NO: 2842757 NR Description: Light-inducible protein CPRF-2
  misc_feature (4)..(296): NCBI GI NO: 2130145 NR Description: seed storage protein opaque-2 - maize
  misc_feature (4)..(296): NCBI GI NO: 542187 NR Description: OHP1 protein - maize
  misc_feature (4)..(296): NCBI GI NO: 34897226 NR Description: bZIP protein
  misc_feature (4)..(296): NCBI GI NO: 7489532 NR Description: probable DNA binding protein - rice
  misc_feature (4)..(296): NCBI GI NO: 542188 NR Description: OHP2 protein - maize
  misc_feature (4)..(295): NCBI GI NO: 16797791 NR Description: bZIP transcription factor [Nicotiana tabacum]
SYDMDRVFSVDDISDHFWQPPIPVSAAQTSSQMSRSASEWAFQRFLQEASASAPSPPSSSSAADVVFVEIEDQPKPAPPPPSNGAVLPNAPGPVPLDSDEYQAFLKSKLNLACAAVAMTRGSLAKSQDPSPFSEGGSQPTNPSLVESQTTSKGSIPSENDPSKLQDKDTNVPVGIPSIPAMQKKPAVAIRPSTSGSSREQSDDEDIEGETSMIDNTDPADVKRVRRMLSNRESARRCRRRKQAHLTDLETQVSQLRGENSTLLKRLTDVSQKYSDSAVDNRVLKADVETLRTKVKLYFILKPTGSF

SEQ ID NO: 10479 - protein, 303 aa, Glycine max
  peptide (1)..(303): Ceres Seq. ID no. 15177650
  misc_feature (215)..(279): Pfam Name: Pfam Description:  bZIP transcription factor
  misc_feature (46)..(293): NCBI GI NO: 16797791 NR Description: bZIP transcription factor [Nicotiana tabacum]
  misc_feature (52)..(293): NCBI GI NO: 7488648 NR Description: bZIP DNA-binding protein HBF-1 - soybean
  misc_feature (70)..(293): NCBI GI NO: 100163 NR Description: light-induced protein CPRF-2 - parsley
  misc_feature (70)..(293): NCBI GI NO: 2842757 NR Description: Light-inducible protein CPRF-2
  misc_feature (1)..(293): NCBI GI NO: 2130145 NR Description: seed storage protein opaque-2 - maize
  misc_feature (1)..(293): NCBI GI NO: 542187 NR Description: OHP1 protein - maize
  misc_feature (1)..(293): NCBI GI NO: 34897226 NR Description: bZIP protein
  misc_feature (1)..(293): NCBI GI NO: 7489532 NR Description: probable DNA binding protein - rice
  misc_feature (1)..(293): NCBI GI NO: 542188 NR Description: OHP2 protein - maize
  misc_feature (1)..(292): NCBI GI NO: 16797791 NR Description: bZIP transcription factor [Nicotiana tabacum]
MDRVFSVDDISDHFWQPPIPVSAAQTSSQMSRSASEWAFQRFLQEASASAPSPPSSSSAADVVFVEIEDQPKPAPPPPSNGAVLPNAPGPVPLDSDEYQAFLKSKLNLACAAVAMTRGSLAKSQDPSPFSEGGSQPTNPSLVESQTTSKGSIPSENDPSKLQDKDTNVPVGIPSIPAMQKKPAVAIRPSTSGSSREQSDDEDIEGETSMIDNTDPADVKRVRRMLSNRESARRCRRRKQAHLTDLETQVSQLRGENSTLLKRLTDVSQKYSDSAVDNRVLKADVETLRTKVKLYFILKPTGSF

SEQ ID NO: 10480 - protein, 274 aa, Glycine max
  peptide (1)..(274): Ceres Seq. ID no. 15177651
  misc_feature (186)..(250): Pfam Name: Pfam Description:  bZIP transcription factor
  misc_feature (17)..(264): NCBI GI NO: 16797791 NR Description: bZIP transcription factor [Nicotiana tabacum]
  misc_feature (23)..(264): NCBI GI NO: 7488648 NR Description: bZIP DNA-binding protein HBF-1 - soybean
  misc_feature (41)..(264): NCBI GI NO: 100163 NR Description: light-induced protein CPRF-2 - parsley
  misc_feature (41)..(264): NCBI GI NO: 2842757 NR Description: Light-inducible protein CPRF-2
  misc_feature (1)..(264): NCBI GI NO: 2130145 NR Description: seed storage protein opaque-2 - maize
  misc_feature (1)..(264): NCBI GI NO: 542187 NR Description: OHP1 protein - maize
  misc_feature (1)..(264): NCBI GI NO: 34897226 NR Description: bZIP protein
  misc_feature (1)..(264): NCBI GI NO: 7489532 NR Description: probable DNA binding protein - rice
  misc_feature (1)..(264): NCBI GI NO: 542188 NR Description: OHP2 protein - maize
  misc_feature (1)..(263): NCBI GI NO: 16797791 NR Description: bZIP transcription factor [Nicotiana tabacum]
MSRSASEWAFQRFLQEASASAPSPPSSSSAADVVFVEIEDQPKPAPPPPSNGAVLPNAPGPVPLDSDEYQAFLKSKLNLACAAVAMTRGSLAKSQDPSPFSEGGSQPTNPSLVESQTTSKGSIPSENDPSKLQDKDTNVPVGIPSIPAMQKKPAVAIRPSTSGSSREQSDDEDIEGETSMIDNTDPADVKRVRRMLSNRESARRCRRRKQAHLTDLETQVSQLRGENSTLLKRLTDVSQKYSDSAVDNRVLKADVETLRTKVKLYFILKPTGSF

SEQ ID NO: 10481 - DNA, 1277 bp, Glycine max
  misc_feature (1)..(1277): Ceres Seq. ID no. 14308571
attactaatcaaaattttgagtgcatctttgattatttctctgttttcttcactacctaccgtctttcatgacaaactgtctagtctttatggcggcatgtgctgattgatgtctcaataagatccaagagaccaagattgtcattaatccggttgattatgatgtagggctttgccaggatcttttaattccagtaaccaactttcataatgaagacaagggctatatggttttacctggagatgtttttgatttgcctattcggaaggacattattcatcgtgttgttaggtggcagcttgcaaaacgacaacaggggactcactcaacaaaaactatcagtgaggtcagtggcactgggagaaaaccttggaatcaaaagggaactggtagagcaaggcatggttcattgcgtgggcctcaggtagtgaagcattctgctcattacttgctagtccatctttattccttctttcttctcatttttttgtgttcttattgtccatttttagcagttgaaattaacaaacttaatgaatggtaacagttcaggggtggtgccaccatgcatggccctaagccccgaagccatgctttcaaagtcaataagaaggttcgacgtctagggctgaagattgctttatcagctcgtgcagcagaaggaaagcttcttgtttttgaggatctggcggttcccacacataaaaccaagaatattgtgaattattacaatcaaatggaggataccaagaaactgctgcttgtagatggcgctatagatgaaaagttaaaattatctacacaaaatctacactatgttaacgtacttccctccattggcttgaatgtctacagcattttgctgcatgatacattggtgatgtcccgagctgctgtgagcaaaattgttgagcgcatgcatactccaataaatcgttgaggctgtaactttttattgtgcttcgcttcatttactcggaaataggaacatttctgtagcaacataaaaagatccaatgagaatatctttggtacgaggtgtctgttttaattacataagttaggcaagttatgccattttgcccatgttgaaggttggaacttaggaacttgatgatcgaaatttgacgttcatgtgattaggtttatcttgttttccggtggttgaatctcatttttcaattctttcacatgcataggatctgataaacctgtacatcattcatgacctagtgtccttcattcatgaatttaaccaatatagtttgtctttggc

SEQ ID NO: 10482 - protein, 124 aa, Glycine max
  peptide (1)..(124): Ceres Seq. ID no. 14308572
  misc_feature (1)..(117): Pfam Name: Pfam Description:  Ribosomal protein L4/L1 family
  misc_feature (1)..(124): NCBI GI NO: 21553676 NR Description: 50S ribosomal protein L4 [Arabidopsis thaliana]
  misc_feature (1)..(124): NCBI GI NO: 18399235 NR Description: ribosomal protein L4p family
  misc_feature (1)..(124): NCBI GI NO: 25411960 NR Description: 50S ribosomal protein L4
  misc_feature (1)..(118): NCBI GI NO: 22966121 NR Description: hypothetical protein [Rhodospirillum rubrum]
  misc_feature (1)..(118): NCBI GI NO: 23014087 NR Description: hypothetical protein
  misc_feature (1)..(118): NCBI GI NO: 15892928 NR Description: 50S ribosomal protein L4 [Rickettsia conorii]
  misc_feature (1)..(117): NCBI GI NO: 15965110 NR Description: PROBABLE 50S RIBOSOMAL PROTEIN L4
  misc_feature (1)..(118): NCBI GI NO: 15604504 NR Description: 50S RIBOSOMAL PROTEIN L4 (rplD)
  misc_feature (1)..(117): NCBI GI NO: 15889241 NR Description: AGR_C_3553p [Agrobacterium tumefaciens]
  misc_feature (1)..(117): NCBI GI NO: 13470552 NR Description: 50S ribosomal protein L4 [Mesorhizobium loti]
MHGPKPRSHAFKVNKKVRRLGLKIALSARAAEGKLLVFEDLAVPTHKTKNIVNYYNQMEDTKKLLLVDGAIDEKLKLSTQNLHYVNVLPSIGLNVYSILLHDTLVMSRAAVSKIVERMHTPINR

SEQ ID NO: 10483 - protein, 105 aa, Glycine max
  peptide (1)..(105): Ceres Seq. ID no. 14308573
  misc_feature (1)..(66): Pfam Name: Pfam Description:  Ribosomal protein L4/L1 family
  misc_feature (1)..(66): NCBI GI NO: 21553676 NR Description: 50S ribosomal protein L4 [Arabidopsis thaliana]
  misc_feature (1)..(66): NCBI GI NO: 18399235 NR Description: ribosomal protein L4p family
  misc_feature (1)..(66): NCBI GI NO: 25411960 NR Description: 50S ribosomal protein L4
  misc_feature (1)..(66): NCBI GI NO: 22966121 NR Description: hypothetical protein [Rhodospirillum rubrum]
  misc_feature (1)..(66): NCBI GI NO: 23014087 NR Description: hypothetical protein
  misc_feature (1)..(67): NCBI GI NO: 15892928 NR Description: 50S ribosomal protein L4 [Rickettsia conorii]
  misc_feature (1)..(66): NCBI GI NO: 15965110 NR Description: PROBABLE 50S RIBOSOMAL PROTEIN L4
  misc_feature (1)..(67): NCBI GI NO: 15604504 NR Description: 50S RIBOSOMAL PROTEIN L4 (rplD)
  misc_feature (1)..(66): NCBI GI NO: 15889241 NR Description: AGR_C_3553p [Agrobacterium tumefaciens]
  misc_feature (1)..(66): NCBI GI NO: 13470552 NR Description: 50S ribosomal protein L4 [Mesorhizobium loti]
MVLPGDVFDLPIRKDIIHRVVRWQLAKRQQGTHSTKTISEVSGTGRKPWNQKGTGRARHGSLRGPQVVKHSAHYLLVHLYSFFLLIFLCSYCPFLAVEINKLNEW

SEQ ID NO: 10484 - protein, 72 aa, Glycine max
  peptide (1)..(72): Ceres Seq. ID no. 14308574
MKTRAIWFYLEMFLICLFGRTLFIVLLGGSLQNDNRGLTQQKLSVRSVALGENLGIKRELVEQGMVHCVGLR

SEQ ID NO: 10485 - DNA, 1160 bp, Glycine max
  misc_feature (1)..(1160): Ceres Seq. ID no. 14309711
aatgattatcaatgtggactaaactaagcttctgtgctacttgtggtcctgtaacaacttcaagtctacaagtacaaggtgatgaatcctgaaatgcaaaattcaaatgttgatcaattctgaccttttcttttgacaagagaaaatttatttaaagatataactcaagggatgtactaatgataatgataatacaattgcatctcctgaggaataccctattatctggatggattattaaaattttacatcatttttttttcttctccgaaatataagcctgatttgatgctaaacagcacatgcatcattgaaagaggccagcagtttgttttattgtttttaaagtttccataatagtattattctttttaaaatttgtttcctgaaaaaagtttttctttttgcttttaccataaagtcaataatggcaaaatctttcgtgaaataagattcccgttcgttcctttttatgcttttccaacttagttcatgtcctttttgagctcggcttccattttaaccttgcttttttcttatatttgtagcctgcaggtggtcaaagtaacatcttatttggtgaagcatccgttgagaagacagcaaagaagatacataaccagaagttcgcggagctgacaggcaataatattttccaaggagatgttcctccaggctcagctgagaagcctctgagcagggctaagctcagagaaatgactggcagtgacatatttgctgatggaaagacagaaatcaaagaccctgtgcgaggtgcccggaaaccccctggtggagagagcagcattgccttggtttaagttatttttaatttacaaaaaatactagcaatatattctctaatatttattttttctgacatactttctattgatagaaattcgcgtgagtcttgctaaatatgtgactctcatccacaaacaagtgaaactcacatgaatttcagtcaatgaaagaaagcagataaaaaaagtattagaaaatgtgttgttagctttcctctttaacttatcccctttgacataggaattctataaattcgtctgaacttccatgtttttctgtagaagggtcagtgtgttcgattatcagcattgtaagtttcaactttcaatgaacgtggcataacctttacattt

SEQ ID NO: 10486 - protein, 48 aa, Glycine max
  peptide (1)..(48): Ceres Seq. ID no. 14309712
MSFLSSASILTLLFSYICSLQVVKVTSYLVKHPLRRQQRRYITRSSRS

SEQ ID NO: 10487 - protein, 35 aa, Glycine max
  peptide (1)..(35): Ceres Seq. ID no. 14309713
MERQKSKTLCEVPGNPLVERAALPWFKLFLIYKKY

SEQ ID NO: 10488 - protein, 34 aa, Glycine max
  peptide (1)..(34): Ceres Seq. ID no. 14309714
  misc_feature (1)..(34): NCBI GI NO: 15236057 NR Description: expressed protein [Arabidopsis thaliana]
  misc_feature (1)..(34): NCBI GI NO: 30692553 NR Description: expressed protein [Arabidopsis thaliana]
  misc_feature (1)..(34): NCBI GI NO: 21553689 NR Description: unknown [Arabidopsis thaliana]
  misc_feature (1)..(34): NCBI GI NO: 38347099 NR Description: OSJNBa0006M15.14
  misc_feature (1)..(34): NCBI GI NO: 33146622 NR Description: hypothetical protein
  misc_feature (1)..(34): NCBI GI NO: 18399920 NR Description: expressed protein [Arabidopsis thaliana]
  misc_feature (1)..(34): NCBI GI NO: 25361079 NR Description: hypothetical protein At2g22270
  misc_feature (1)..(34): NCBI GI NO: 30699309 NR Description: expressed protein [Arabidopsis thaliana]
  misc_feature (1)..(34): NCBI GI NO: 25361078 NR Description: unknown protein T11I11.9
  misc_feature (1)..(34): NCBI GI NO: 18399883 NR Description: expressed protein [Arabidopsis thaliana]
MTGSDIFADGKTEIKDPVRGARKPPGGESSIALV

SEQ ID NO: 10489 - DNA, 1128 bp, Glycine max
  misc_feature (1)..(1128): Ceres Seq. ID no. 14311969
gaaaaactacccttccctttcgtcgttctccgtctccctcatttgttcactttctctctctaaatccctaaaccagatctcgcactcgcgctttctctctctaggattcgacaatggcggccgctccctcgcctcgcgaagagaacgtgtacatggcgaagctcgccgagcaggccgagcgctacgaagagatggtggagttcatggagaaggtctccgccgccgccgacaacgaggagctcaccgtcgaggagaggaacctcctctccgtcgcgtacaagaacgtgatcggagcgcgccgcgcctcgtggcgcatcatctcctcgatcgagcagaaggaggagagccgcggcaacgaggaccacgtctccgtcatccgcgactaccgatccaagatcgagtccgagctctccaacatctgcgacggtattctcaagctcctcgactctcgcttcattccctccgcttcctccggcgattccaaggtcttctacctcaagatgaagggagattaccacaggtacctcgccgagttcaagaccggcgccgagcgtaaggaggctgccgagagcactctctctgcatacaaagccgctcaggacattgcaaatgccgaactgcctccaactcatccaattaggcttggccttgcacttaacttctctgtattttactacgaaatccttaactctcccgatcgtgcctgcaaccttgcaaaacaggcttttgatgaagctattgctgaattggatacactgggagaggagtcatacaaggatagcactctgatcatgcaactccttcgtgataacctcaccctttggacctctgacatgcaggatgatggagcagatgaaattaaagaagcagcaccgaaacaggatgaccagtaaaaatattttactgctaattagaattgaacttctcctccatatctttttgaagggagaaggtgtttgttgctaatatctctttggtactgagattttaggcattcatgtttgttatgattgtggatgtactgggccgtttttagtttgtccttccattttcaagtgttttccaaattgcctattttattaaggacgctgaagtttttattatatggaattggaattttaagattct

SEQ ID NO: 10490 - protein, 259 aa, Glycine max
  peptide (1)..(259): Ceres Seq. ID no. 14311970
  misc_feature (8)..(245): Pfam Name: Pfam Description:  14-3-3 protein
  misc_feature (1)..(259): NCBI GI NO: 13928452 NR Description: 14-3-3 protein [Vigna angularis]
  misc_feature (1)..(259): NCBI GI NO: 4850247 NR Description: 14-3-3-like protein [Pisum sativum]
  misc_feature (1)..(259): NCBI GI NO: 1168196 NR Description: 14-3-3-LIKE PROTEIN
  misc_feature (1)..(259): NCBI GI NO: 1168195 NR Description: 14-3-3-LIKE PROTEIN
  misc_feature (1)..(259): NCBI GI NO: 8099063 NR Description: 14-3-3 protein [Populus x canescens]
  misc_feature (1)..(259): NCBI GI NO: 1168189 NR Description: 14-3-3-LIKE PROTEIN A (VFA-1433A)
  misc_feature (1)..(259): NCBI GI NO: 4775555 NR Description: 14-3-3-like protein [Pisum sativum]
  misc_feature (6)..(258): NCBI GI NO: 26454608 NR Description: 14-3-3 protein 6
  misc_feature (6)..(258): NCBI GI NO: 3023190 NR Description: 14-3-3-LIKE PROTEIN 16R
  misc_feature (1)..(259): NCBI GI NO: 3766535 NR Description: 14-3-3 protein [Solanum tuberosum]
MAAAPSPREENVYMAKLAEQAERYEEMVEFMEKVSAAADNEELTVEERNLLSVAYKNVIGARRASWRIISSIEQKEESRGNEDHVSVIRDYRSKIESELSNICDGILKLLDSRFIPSASSGDSKVFYLKMKGDYHRYLAEFKTGAERKEAAESTLSAYKAAQDIANAELPPTHPIRLGLALNFSVFYYEILNSPDRACNLAKQAFDEAIAELDTLGEESYKDSTLIMQLLRDNLTLWTSDMQDDGADEIKEAAPKQDDQ

SEQ ID NO: 10491 - protein, 246 aa, Glycine max
  peptide (1)..(246): Ceres Seq. ID no. 14311971
  misc_feature (1)..(232): Pfam Name: Pfam Description:  14-3-3 protein
  misc_feature (1)..(246): NCBI GI NO: 13928452 NR Description: 14-3-3 protein [Vigna angularis]
  misc_feature (1)..(246): NCBI GI NO: 4850247 NR Description: 14-3-3-like protein [Pisum sativum]
  misc_feature (1)..(246): NCBI GI NO: 1168196 NR Description: 14-3-3-LIKE PROTEIN
  misc_feature (1)..(246): NCBI GI NO: 1168195 NR Description: 14-3-3-LIKE PROTEIN
  misc_feature (1)..(246): NCBI GI NO: 8099063 NR Description: 14-3-3 protein [Populus x canescens]
  misc_feature (1)..(246): NCBI GI NO: 1168189 NR Description: 14-3-3-LIKE PROTEIN A (VFA-1433A)
  misc_feature (1)..(246): NCBI GI NO: 4775555 NR Description: 14-3-3-like protein [Pisum sativum]
  misc_feature (1)..(245): NCBI GI NO: 26454608 NR Description: 14-3-3 protein 6
  misc_feature (1)..(245): NCBI GI NO: 3023190 NR Description: 14-3-3-LIKE PROTEIN 16R
  misc_feature (1)..(246): NCBI GI NO: 3766535 NR Description: 14-3-3 protein [Solanum tuberosum]
MAKLAEQAERYEEMVEFMEKVSAAADNEELTVEERNLLSVAYKNVIGARRASWRIISSIEQKEESRGNEDHVSVIRDYRSKIESELSNICDGILKLLDSRFIPSASSGDSKVFYLKMKGDYHRYLAEFKTGAERKEAAESTLSAYKAAQDIANAELPPTHPIRLGLALNFSVFYYEILNSPDRACNLAKQAFDEAIAELDTLGEESYKDSTLIMQLLRDNLTLWTSDMQDDGADEIKEAAPKQDDQ

SEQ ID NO: 10492 - protein, 233 aa, Glycine max
  peptide (1)..(233): Ceres Seq. ID no. 14311972
  misc_feature (1)..(219): Pfam Name: Pfam Description:  14-3-3 protein
  misc_feature (1)..(233): NCBI GI NO: 13928452 NR Description: 14-3-3 protein [Vigna angularis]
  misc_feature (1)..(233): NCBI GI NO: 4850247 NR Description: 14-3-3-like protein [Pisum sativum]
  misc_feature (1)..(233): NCBI GI NO: 1168196 NR Description: 14-3-3-LIKE PROTEIN
  misc_feature (1)..(233): NCBI GI NO: 1168195 NR Description: 14-3-3-LIKE PROTEIN
  misc_feature (1)..(233): NCBI GI NO: 8099063 NR Description: 14-3-3 protein [Populus x canescens]
  misc_feature (1)..(233): NCBI GI NO: 1168189 NR Description: 14-3-3-LIKE PROTEIN A (VFA-1433A)
  misc_feature (1)..(233): NCBI GI NO: 4775555 NR Description: 14-3-3-like protein [Pisum sativum]
  misc_feature (1)..(232): NCBI GI NO: 26454608 NR Description: 14-3-3 protein 6
  misc_feature (1)..(232): NCBI GI NO: 3023190 NR Description: 14-3-3-LIKE PROTEIN 16R
  misc_feature (1)..(233): NCBI GI NO: 3766535 NR Description: 14-3-3 protein [Solanum tuberosum]
MVEFMEKVSAAADNEELTVEERNLLSVAYKNVIGARRASWRIISSIEQKEESRGNEDHVSVIRDYRSKIESELSNICDGILKLLDSRFIPSASSGDSKVFYLKMKGDYHRYLAEFKTGAERKEAAESTLSAYKAAQDIANAELPPTHPIRLGLALNFSVFYYEILNSPDRACNLAKQAFDEAIAELDTLGEESYKDSTLIMQLLRDNLTLWTSDMQDDGADEIKEAAPKQDDQ

SEQ ID NO: 10493 - DNA, 1480 bp, Glycine max
  misc_feature (1)..(1480): Ceres Seq. ID no. 13594132
aggaaagaaaagaaaaacatggttggtgaaggagaaaagccgaaggcagtgataataggaggtagcatagcagggatatcaagtgcacatgctctcaccttagctggttgggatgtacttgtgcttgagaaaaccacctcacctccaactggaagccccactggtgcaggtcttggactcaattctttgtcccaacaaatcatccactcttggcttccaccacaccaaaaacaactccttcacaacaccactttaacactcaccattgatcagaaccatgcaactgatagtgagaagaagtttagctggacattgacaagagatgagagttttaacttcagagcagcacattgggctgatctccatggccttctgtacaatgcactgccaccaaatgtatttttgtggggtcacctttttctctcagtccatgttgctgatgataagggttcagtcatagtaaaggctaaagtactagaaactggcaagattatagagatagtaggggattttcttgttgcggcagatggttgtctctcttccctccgccagaaatatctccccgattttaaactcagatattctggctattgtgcttggagaggggttcttgatttttcaaaaattgagaattcagaaaccatcaatggtatcagaaaggcataccctgatctaggaaaatgcttgtactttgacttggcctctggcacacacactgtgttgtatgagctgcaaaacaagaagctcaattggatttggtatgtgaatcagcctgagcctgaagttaagggaacatcggtgacaatgaaagtaaacaatgacatgatccagaaaatgcaccaagaagcggaacaagtttggattcctgagttggtaaaggtcataaaggaaacaaaggaccctttcttaaatttcatatatgatagtgatcccttagagaagatcttttgggacaatgtggtattggtaggggatgcagctcaccccacaactcctcactgccttagaagcactaacatgtcaatattggatgcagcagtgttaggcaaatgcatagagaagtggggaccagaaaagcttggatcagctttagaagagtatcagttcgttaggctaccagtcacttccaaggaagttctgtactcaaggcgtcttggccgattgaaacaagggctagttctacctgatagagaaccttttgacccaaagttaattaggccagaggactgccaggagcttctactgaggaacacaccattttttaatgatgagccgttgtcactgctttgataccatcttacatttcttcatctgattgcttatagcagtgagttttatgactgctttgaaaatagatgtcttacttagcaccatccatacatctgtttgcacactgataatattttggaccctttcccataactgatttggtgccttttggcctcaaatttttgtttttgctattaatagttttatcatc

SEQ ID NO: 10494 - protein, 429 aa, Glycine max
  peptide (1)..(429): Ceres Seq. ID no. 13594133
  misc_feature (169)..(383): Pfam Name: Pfam Description:  Monooxygenase
  misc_feature (12)..(426): NCBI GI NO: 15239022 NR Description: monooxygenase family [Arabidopsis thaliana]
  misc_feature (120)..(398): NCBI GI NO: 33601729 NR Description: putative monooxygenase [Bordetella bronchiseptica]
  misc_feature (15)..(58): NCBI GI NO: 33601729 NR Description: putative monooxygenase [Bordetella bronchiseptica]
  misc_feature (118)..(368): NCBI GI NO: 22986825 NR Description: hypothetical protein [Burkholderia fungorum]
  misc_feature (4)..(60): NCBI GI NO: 22986825 NR Description: hypothetical protein [Burkholderia fungorum]
  misc_feature (169)..(392): NCBI GI NO: 5916090 NR Description: hypothetical protein [Ralstonia eutropha]
  misc_feature (14)..(60): NCBI GI NO: 5916090 NR Description: hypothetical protein [Ralstonia eutropha]
  misc_feature (15)..(205): NCBI GI NO: 15925296 NR Description: hypothetical protein
  misc_feature (266)..(390): NCBI GI NO: 15925296 NR Description: hypothetical protein
  misc_feature (15)..(205): NCBI GI NO: 21283954 NR Description: ORFID:MW2225~hypothetical protein
RKEKKNMVGEGEKPKAVIIGGSIAGISSAHALTLAGWDVLVLEKTTSPPTGSPTGAGLGLNSLSQQIIHSWLPPHQKQLLHNTTLTLTIDQNHATDSEKKFSWTLTRDESFNFRAAHWADLHGLLYNALPPNVFLWGHLFLSVHVADDKGSVIVKAKVLETGKIIEIVGDFLVAADGCLSSLRQKYLPDFKLRYSGYCAWRGVLDFSKIENSETINGIRKAYPDLGKCLYFDLASGTHTVLYELQNKKLNWIWYVNQPEPEVKGTSVTMKVNNDMIQKMHQEAEQVWIPELVKVIKETKDPFLNFIYDSDPLEKIFWDNVVLVGDAAHPTTPHCLRSTNMSILDAAVLGKCIEKWGPEKLGSALEEYQFVRLPVTSKEVLYSRRLGRLKQGLVLPDREPFDPKLIRPEDCQELLLRNTPFFNDEPLSLL

SEQ ID NO: 10495 - protein, 423 aa, Glycine max
  peptide (1)..(423): Ceres Seq. ID no. 13594134
  misc_feature (163)..(377): Pfam Name: Pfam Description:  Monooxygenase
  misc_feature (6)..(420): NCBI GI NO: 15239022 NR Description: monooxygenase family [Arabidopsis thaliana]
  misc_feature (114)..(392): NCBI GI NO: 33601729 NR Description: putative monooxygenase [Bordetella bronchiseptica]
  misc_feature (9)..(52): NCBI GI NO: 33601729 NR Description: putative monooxygenase [Bordetella bronchiseptica]
  misc_feature (112)..(362): NCBI GI NO: 22986825 NR Description: hypothetical protein [Burkholderia fungorum]
  misc_feature (1)..(54): NCBI GI NO: 22986825 NR Description: hypothetical protein [Burkholderia fungorum]
  misc_feature (163)..(386): NCBI GI NO: 5916090 NR Description: hypothetical protein [Ralstonia eutropha]
  misc_feature (8)..(54): NCBI GI NO: 5916090 NR Description: hypothetical protein [Ralstonia eutropha]
  misc_feature (9)..(199): NCBI GI NO: 15925296 NR Description: hypothetical protein
  misc_feature (260)..(384): NCBI GI NO: 15925296 NR Description: hypothetical protein
  misc_feature (9)..(199): NCBI GI NO: 21283954 NR Description: ORFID:MW2225~hypothetical protein
MVGEGEKPKAVIIGGSIAGISSAHALTLAGWDVLVLEKTTSPPTGSPTGAGLGLNSLSQQIIHSWLPPHQKQLLHNTTLTLTIDQNHATDSEKKFSWTLTRDESFNFRAAHWADLHGLLYNALPPNVFLWGHLFLSVHVADDKGSVIVKAKVLETGKIIEIVGDFLVAADGCLSSLRQKYLPDFKLRYSGYCAWRGVLDFSKIENSETINGIRKAYPDLGKCLYFDLASGTHTVLYELQNKKLNWIWYVNQPEPEVKGTSVTMKVNNDMIQKMHQEAEQVWIPELVKVIKETKDPFLNFIYDSDPLEKIFWDNVVLVGDAAHPTTPHCLRSTNMSILDAAVLGKCIEKWGPEKLGSALEEYQFVRLPVTSKEVLYSRRLGRLKQGLVLPDREPFDPKLIRPEDCQELLLRNTPFFNDEPLSLL

SEQ ID NO: 10496 - DNA, 1312 bp, Glycine max
  misc_feature (1)..(1312): Ceres Seq. ID no. 14312933
atcaaacactgcacttcatttggttggttcatatctcacttaattttgtgtcctttccatttacatattccacattcattaattttgagaaacatttagtgtatgttacatctggggaaggcttaaagtagatttactttgggtccatggtatccactgacttaaattactttgccaaaccatcattctcaacctcaatccacaaggaaaataattgtaccatagatagaaggctgacatttttaatttgaacctttgattttgagtggtttgtaaaatttaaaccccctcatcctaactaaactttatttgtgaatgtaatcccttctgagacactcataattcatgcatggtgtgcttgtacatttcaggttcaggtacttgcagtaagagaacatattgtaaaactaaaagggaaaaatggccttagatcactttgaggagactgtgcaccaaaaaggaaattggaaatcttccagtgaaatcattgcagattctgatagaaatgcctctggtgactttgactgcaacatctgcctggagtgtgtgcaagatccagtggtgacactttgtggtcatctttattgctggccctgcatatacaaatggcttcattttcaaagcacctctttggatgatgaagaacaacagaggccacaatgtcctgtatgcaaatcagaagtttctcaatcctcccttgttccattatacggccgtggccaaaccacattaccttctaaagggaagccacgtcaagtaggcactgtcataccacaaagacctcatggtccaagaacacttaacactagaagtgtttcacaacctatttctcaaagttaccatccctatagtaatccttatcatcctcaacaacacttcaactcgattccaagcggttacacctcacctatgattagaacaactggttcaatagacaacacatttggaatctttggtgagatgatatatgcaagggtctttggtaaccacgtgtcaaacattcatacatacgccaattcgtacaatctttcggggaccagtaacccaaggatgagaagacatttaatgcaagttgataaatcactcagcagaataagttgtttcctcctttgctgcctagttttgtgtctgctcttattctgattgctacttcattttcatcattagttatagtgcatccttacatagaatacattcactcattgatccagatgtattctatgttagagaagctgcaaattgatgctgagttatgtgtaaattaccaatctctctacgagctatatgaagtgaataatgatattctcatacc

SEQ ID NO: 10497 - protein, 240 aa, Glycine max
  peptide (1)..(240): Ceres Seq. ID no. 14312934
  misc_feature (36)..(84): Pfam Name: RING finger Pfam Description: Zinc finger, C3HC4 type
  misc_feature (6)..(240): NCBI GI NO: 22795037 NR Description: putative RING protein [Populus x canescens]
  misc_feature (26)..(240): NCBI GI NO: 15236326 NR Description: E3 ubiquitin ligase, RMA1 [Arabidopsis thaliana]
  misc_feature (29)..(240): NCBI GI NO: 30687607 NR Description: zinc finger
  misc_feature (29)..(138): NCBI GI NO: 15235242 NR Description: zinc finger
  misc_feature (172)..(240): NCBI GI NO: 15235242 NR Description: zinc finger
  misc_feature (29)..(231): NCBI GI NO: 7488309 NR Description: RING zinc finger protein F27G19
  misc_feature (34)..(240): NCBI GI NO: 38346627 NR Description: OSJNBa0074L08.21
  misc_feature (18)..(238): NCBI GI NO: 15224062 NR Description: zinc finger
  misc_feature (25)..(238): NCBI GI NO: 21553849 NR Description: putative RING zinc finger protein
  misc_feature (25)..(125): NCBI GI NO: 18394721 NR Description: zinc finger
MALDHFEETVHQKGNWKSSSEIIADSDRNASGDFDCNICLECVQDPVVTLCGHLYCWPCIYKWLHFQSTSLDDEEQQRPQCPVCKSEVSQSSLVPLYGRGQTTLPSKGKPRQVGTVIPQRPHGPRTLNTRSVSQPISQSYHPYSNPYHPQQHFNSIPSGYTSPMIRTTGSIDNTFGIFGEMIYARVFGNHVSNIHTYANSYNLSGTSNPRMRRHLMQVDKSLSRISCFLLCCLVLCLLLF

SEQ ID NO: 10498 - DNA, 1166 bp, Glycine max
  misc_feature (1)..(1166): Ceres Seq. ID no. 15224613
gtagaatatgcatcatcactttggaaaaaagaacctaaaacaaaacatggcacctcaaatttctagaggcagagtccctattgttgttttgctagcctctctagtcctccccctcctttttcaagaatattcttcttcttctgtgttcattgcaagtgcatcagcttcagaatcagatgttgatctgttagaatttcccttaaatttagaatacttggaggctgagtttttcttatttggttccttgggtcatggattggatgtggttgctccaaatttaagtgagggaggaccccctcccattggtgccagattggccagacttgagaacctcatcagggatatcatcttgcagtttggtttgcaggaagttggacacttgagggccataaagagcacagtgagagggttcccaaggccgttacttgatctaagcacagcatcttttgcaaaagtaatgaatagtgcatttgggagacctcttgttcctccctttgacccctatgctaattcgatcaactatctgttagcatcttatgtgattccctatgttggtctcactggttatgttggtgccaatccactgctgcaaaatgctacttccaagaggtttgttgcagggcttctaggagtagagtccgggcaagatgcagttattcgaacattgttgtatgaacgccaagcatcattggtgcaaccatacaaagtgactgtggcagagtttacagatcgcatttcaatgcttaggaacaagctaggaaatgcaggtgtgaaagacgagggtcttgtggtgcctagagtgcaaggtgctgagggtagtgtcacagacaacattctcgctggtgacaaagattcactatcatatcctagaactccagaggaaatattgaggataatatatggaggaggtgatgaacatgttcctggtggtttctaccctaacggagcatgtggtcgcatagctaaatcttacttgaagtacactacttaaagctagagtatgtgttgtagttatatgtgtcttgaaattgttatgcctaccctatcacaataaattattattataataagagagtatgttgcttgatcatatggctacaatttgtaagtgatgattaattaccaataatcgaatctttggtaatatatatttaaaaatcaatatc

SEQ ID NO: 10499 - protein, 327 aa, Glycine max
  peptide (1)..(327): Ceres Seq. ID no. 15224614
  misc_feature (28)..(323): NCBI GI NO: 21593191 NR Description: dessication-related protein, putative
  misc_feature (28)..(323): NCBI GI NO: 18401988 NR Description: dessication-related protein -related
  misc_feature (49)..(323): NCBI GI NO: 25357137 NR Description: hypothetical protein T2J15.11
  misc_feature (41)..(323): NCBI GI NO: 38346151 NR Description: OSJNBb0118P14.11
  misc_feature (55)..(317): NCBI GI NO: 118926 NR Description: Desiccation-related protein PCC13-62 precursor
  misc_feature (50)..(323): NCBI GI NO: 15228845 NR Description: expressed protein [Arabidopsis thaliana]
  misc_feature (184)..(324): NCBI GI NO: 12083528 NR Description: similar to Arabidopsis thaliana hypotheticalprotein
  misc_feature (56)..(197): NCBI GI NO: 12083528 NR Description: similar to Arabidopsis thaliana hypotheticalprotein
  misc_feature (28)..(321): NCBI GI NO: 22984403 NR Description: hypothetical protein [Burkholderia fungorum]
  misc_feature (70)..(318): NCBI GI NO: 16263242 NR Description: Conserved hypothetical protein
MHHHFGKKNLKQNMAPQISRGRVPIVVLLASLVLPLLFQEYSSSSVFIASASASESDVDLLEFPLNLEYLEAEFFLFGSLGHGLDVVAPNLSEGGPPPIGARLARLENLIRDIILQFGLQEVGHLRAIKSTVRGFPRPLLDLSTASFAKVMNSAFGRPLVPPFDPYANSINYLLASYVIPYVGLTGYVGANPLLQNATSKRFVAGLLGVESGQDAVIRTLLYERQASLVQPYKVTVAEFTDRISMLRNKLGNAGVKDEGLVVPRVQGAEGSVTDNILAGDKDSLSYPRTPEEILRIIYGGGDEHVPGGFYPNGACGRIAKSYLKYTT

SEQ ID NO: 10500 - protein, 314 aa, Glycine max
  peptide (1)..(314): Ceres Seq. ID no. 15224615
  misc_feature (15)..(310): NCBI GI NO: 21593191 NR Description: dessication-related protein, putative
  misc_feature (15)..(310): NCBI GI NO: 18401988 NR Description: dessication-related protein -related
  misc_feature (36)..(310): NCBI GI NO: 25357137 NR Description: hypothetical protein T2J15.11
  misc_feature (28)..(310): NCBI GI NO: 38346151 NR Description: OSJNBb0118P14.11
  misc_feature (42)..(304): NCBI GI NO: 118926 NR Description: Desiccation-related protein PCC13-62 precursor
  misc_feature (37)..(310): NCBI GI NO: 15228845 NR Description: expressed protein [Arabidopsis thaliana]
  misc_feature (171)..(311): NCBI GI NO: 12083528 NR Description: similar to Arabidopsis thaliana hypotheticalprotein
  misc_feature (43)..(184): NCBI GI NO: 12083528 NR Description: similar to Arabidopsis thaliana hypotheticalprotein
  misc_feature (15)..(308): NCBI GI NO: 22984403 NR Description: hypothetical protein [Burkholderia fungorum]
  misc_feature (57)..(305): NCBI GI NO: 16263242 NR Description: Conserved hypothetical protein
MAPQISRGRVPIVVLLASLVLPLLFQEYSSSSVFIASASASESDVDLLEFPLNLEYLEAEFFLFGSLGHGLDVVAPNLSEGGPPPIGARLARLENLIRDIILQFGLQEVGHLRAIKSTVRGFPRPLLDLSTASFAKVMNSAFGRPLVPPFDPYANSINYLLASYVIPYVGLTGYVGANPLLQNATSKRFVAGLLGVESGQDAVIRTLLYERQASLVQPYKVTVAEFTDRISMLRNKLGNAGVKDEGLVVPRVQGAEGSVTDNILAGDKDSLSYPRTPEEILRIIYGGGDEHVPGGFYPNGACGRIAKSYLKYTT

SEQ ID NO: 10501 - protein, 177 aa, Glycine max
  peptide (1)..(177): Ceres Seq. ID no. 15224616
  misc_feature (1)..(173): NCBI GI NO: 21593191 NR Description: dessication-related protein, putative
  misc_feature (1)..(173): NCBI GI NO: 18401988 NR Description: dessication-related protein -related
  misc_feature (1)..(173): NCBI GI NO: 25357137 NR Description: hypothetical protein T2J15.11
  misc_feature (1)..(173): NCBI GI NO: 38346151 NR Description: OSJNBb0118P14.11
  misc_feature (1)..(167): NCBI GI NO: 118926 NR Description: Desiccation-related protein PCC13-62 precursor
  misc_feature (1)..(173): NCBI GI NO: 15228845 NR Description: expressed protein [Arabidopsis thaliana]
  misc_feature (34)..(174): NCBI GI NO: 12083528 NR Description: similar to Arabidopsis thaliana hypotheticalprotein
  misc_feature (1)..(47): NCBI GI NO: 12083528 NR Description: similar to Arabidopsis thaliana hypotheticalprotein
  misc_feature (1)..(171): NCBI GI NO: 22984403 NR Description: hypothetical protein [Burkholderia fungorum]
  misc_feature (1)..(168): NCBI GI NO: 16263242 NR Description: Conserved hypothetical protein
MNSAFGRPLVPPFDPYANSINYLLASYVIPYVGLTGYVGANPLLQNATSKRFVAGLLGVESGQDAVIRTLLYERQASLVQPYKVTVAEFTDRISMLRNKLGNAGVKDEGLVVPRVQGAEGSVTDNILAGDKDSLSYPRTPEEILRIIYGGGDEHVPGGFYPNGACGRIAKSYLKYTT

SEQ ID NO: 10502 - DNA, 1293 bp, Glycine max
  misc_feature (1)..(1293): Ceres Seq. ID no. 13581563
  misc_feature (1100)..(1100): n is a, c, t, g, unknown, or other
  misc_feature (1091)..(1091): n is a, c, t, g, unknown, or other
aagcctttttttcataaagtgttttaaagaaaaaaaatcatttgggctaaatgaagacagaatatctaaatttatacaatcgtgcatcatggcaaaggtaatttcctagctttagagcaatgtacctcttaaacagtgttaacatcctcataattaagatttattacagtctctcacaaattcttttacaatgtgtccagattcttctgacaatgtatgcattgaagactgttatataagcactggtgatgatctgattgccatcaagagcgggtgggatgagtatggcattgcatatggtcgcccaagcacaaacattatcatccacaggctagttggtaaaactcaaacaagtgggattgctattggaagtgagatgtctggtggtgtatctgaagttcatgcagaagatattcaattctatgattcatataatgcaatcagaataaagacttctcctggcaggggtggttacgttagaaacatctatgtctctaacgtgaccttggctaatgtagatattgctattacgttcactggtttatatggggagcatccagatgatgcttatgacccaaatgctctacctgtaatagaaaaagttacaatcaaggatgtggtaggagaaaatatcaaaactgcaggtcttatagagggtatagaaggtgacaattttgtcaacatttgcctgtcaaacattatccttaacgtgacctcaaactatccatggaactgctcctacgttaaaggatattctgacttagtccagccagaagcttgtgagcctctcaaggagagaatattccctgatcattgttcagattgttactatttgacaaatcaaattcagagttcgaatagtcaaaatagagcaggacaaacttcaggtgacataagaggttgagtggagttgcccaactgtgattgtccatctgcagaaagataccgagaaatgattggtttttgtaacttgtgtgcagtaacaaaataattgagtgatttatcagaaataggaagttggatgatttcatgtcttgctttttctagctacatatggctttggaaaagaaaattgcaaagttttgtgtttntaatgattntaagggaaagaatgtgtttggctattgatagaggtgagatatggctaccctgacataattccctcttgccaaaaatgttatcggacacaggagattttgcagtagtacgaggctggtgcttgttggctttacatcccttttgattgaataaggaatccaataaataaacttcctagaaaggtggaatttacgc

SEQ ID NO: 10503 - protein, 237 aa, Glycine max
  peptide (1)..(237): Ceres Seq. ID no. 13581564
  misc_feature (1)..(197): Pfam Name: Pfam Description:  Glycosyl hydrolases family 28
  misc_feature (3)..(228): NCBI GI NO: 11263971 NR Description: hypothetical protein T17J13
  misc_feature (3)..(228): NCBI GI NO: 18412253 NR Description: polygalacturonase, putative [Arabidopsis thaliana]
  misc_feature (1)..(211): NCBI GI NO: 34393209 NR Description: putative polygalacturonase
  misc_feature (3)..(201): NCBI GI NO: 40714685 NR Description: putative polygalacturonase
  misc_feature (3)..(211): NCBI GI NO: 34912726 NR Description: putative polygalacturonase
  misc_feature (1)..(213): NCBI GI NO: 15236625 NR Description: polygalacturonase, putative [Arabidopsis thaliana]
  misc_feature (3)..(201): NCBI GI NO: 34897760 NR Description: ESTs AU029388
  misc_feature (1)..(203): NCBI GI NO: 15236514 NR Description: polygalacturonase, putative [Arabidopsis thaliana]
  misc_feature (3)..(200): NCBI GI NO: 15238207 NR Description: polygalacturonase, putative [Arabidopsis thaliana]
  misc_feature (3)..(203): NCBI GI NO: 22329119 NR Description: polygalacturonase, putative [Arabidopsis thaliana]
MCPDSSDNVCIEDCYISTGDDLIAIKSGWDEYGIAYGRPSTNIIIHRLVGKTQTSGIAIGSEMSGGVSEVHAEDIQFYDSYNAIRIKTSPGRGGYVRNIYVSNVTLANVDIAITFTGLYGEHPDDAYDPNALPVIEKVTIKDVVGENIKTAGLIEGIEGDNFVNICLSNIILNVTSNYPWNCSYVKGYSDLVQPEACEPLKERIFPDHCSDCYYLTNQIQSSNSQNRAGQTSGDIRG

SEQ ID NO: 10504 - protein, 175 aa, Glycine max
  peptide (1)..(175): Ceres Seq. ID no. 13581565
  misc_feature (1)..(135): Pfam Name: Pfam Description:  Glycosyl hydrolases family 28
  misc_feature (1)..(166): NCBI GI NO: 11263971 NR Description: hypothetical protein T17J13
  misc_feature (1)..(166): NCBI GI NO: 18412253 NR Description: polygalacturonase, putative [Arabidopsis thaliana]
  misc_feature (1)..(149): NCBI GI NO: 34393209 NR Description: putative polygalacturonase
  misc_feature (1)..(139): NCBI GI NO: 40714685 NR Description: putative polygalacturonase
  misc_feature (1)..(149): NCBI GI NO: 34912726 NR Description: putative polygalacturonase
  misc_feature (1)..(151): NCBI GI NO: 15236625 NR Description: polygalacturonase, putative [Arabidopsis thaliana]
  misc_feature (1)..(139): NCBI GI NO: 34897760 NR Description: ESTs AU029388
  misc_feature (1)..(141): NCBI GI NO: 15236514 NR Description: polygalacturonase, putative [Arabidopsis thaliana]
  misc_feature (1)..(138): NCBI GI NO: 15238207 NR Description: polygalacturonase, putative [Arabidopsis thaliana]
  misc_feature (1)..(141): NCBI GI NO: 22329119 NR Description: polygalacturonase, putative [Arabidopsis thaliana]
MSGGVSEVHAEDIQFYDSYNAIRIKTSPGRGGYVRNIYVSNVTLANVDIAITFTGLYGEHPDDAYDPNALPVIEKVTIKDVVGENIKTAGLIEGIEGDNFVNICLSNIILNVTSNYPWNCSYVKGYSDLVQPEACEPLKERIFPDHCSDCYYLTNQIQSSNSQNRAGQTSGDIRG

SEQ ID NO: 10505 - DNA, 369 bp, Glycine max
  misc_feature (1)..(369): Ceres Seq. ID no. 13594143
  misc_feature (152)..(152): n is a, c, t, g, unknown, or other
  misc_feature (208)..(208): n is a, c, t, g, unknown, or other
  misc_feature (210)..(210): n is a, c, t, g, unknown, or other
  misc_feature (211)..(211): n is a, c, t, g, unknown, or other
  misc_feature (153)..(153): n is a, c, t, g, unknown, or other
  misc_feature (209)..(209): n is a, c, t, g, unknown, or other
  misc_feature (151)..(151): n is a, c, t, g, unknown, or other
gtagaaacagaacttcgttgcaaaatatgggtgcttctgacgacaaccccacaactttctccaagttgtcttcaataactttgatgttcttgcactgcccttggttacgcttgtttaccctttatatgcttcaattaaggccatcgagacnnngtctactactgacgatcaacaatggctcacgtattggattctgtattccattctnnnnaatctttgagctcacatttgccaaagttcttgaactgcttcccatttggctttttgccaagttgatattcacttgctggttggttctgcctcacttcaatggggctgcggctgtttataggaattacatcagaccattttatatgaacccccaaatcc

SEQ ID NO: 10506 - protein, 122 aa, Glycine max
  peptide (1)..(122): Ceres Seq. ID no. 13594144
  misc_feature (71)..(121): NCBI GI NO: 15222421 NR Description: AtHVA22c [Arabidopsis thaliana]
  misc_feature (71)..(121): NCBI GI NO: 15221266 NR Description: AtHVA22a [Arabidopsis thaliana]
  misc_feature (71)..(120): NCBI GI NO: 4884934 NR Description: AtHVA22b [Arabidopsis thaliana]
  misc_feature (71)..(120): NCBI GI NO: 15241840 NR Description: AtHVA22b-related protein [Arabidopsis thaliana]
  misc_feature (68)..(114): NCBI GI NO: 18423191 NR Description: expressed protein [Arabidopsis thaliana]
  misc_feature (68)..(114): NCBI GI NO: 8777395 NR Description: gene_id:MFB16
  misc_feature (68)..(114): NCBI GI NO: 18416458 NR Description: abscisic acid-induced - like protein
  misc_feature (71)..(117): NCBI GI NO: 34910810 NR Description: P0042A10.34
  misc_feature (68)..(114): NCBI GI NO: 7484787 NR Description: abscisic acid-induced protein homolog F13M23
  misc_feature (68)..(114): NCBI GI NO: 1076715 NR Description: abscisic acid-induced protein HVA22 - barley
  misc_feature (50)..(50): Xaa is any aa, unknown or other
  misc_feature (51)..(51): Xaa is any aa, unknown or other
  misc_feature (69)..(69): Xaa is any aa, unknown or other
  misc_feature (70)..(70): Xaa is any aa, unknown or other
RNRTSLQNMGASDDNPTTFSKLSSITLMFLHCPWLRLFTLYMLQLRPSRXXLLLTINNGSRIGFCIPFXXIFELTFAKVLELLPIWLFAKLIFTCWLVLPHFNGAAAVYRNYIRPFYMNPQI

SEQ ID NO: 10507 - protein, 114 aa, Glycine max
  peptide (1)..(114): Ceres Seq. ID no. 13594145
  misc_feature (63)..(113): NCBI GI NO: 15222421 NR Description: AtHVA22c [Arabidopsis thaliana]
  misc_feature (63)..(113): NCBI GI NO: 15221266 NR Description: AtHVA22a [Arabidopsis thaliana]
  misc_feature (63)..(112): NCBI GI NO: 4884934 NR Description: AtHVA22b [Arabidopsis thaliana]
  misc_feature (63)..(112): NCBI GI NO: 15241840 NR Description: AtHVA22b-related protein [Arabidopsis thaliana]
  misc_feature (60)..(106): NCBI GI NO: 18423191 NR Description: expressed protein [Arabidopsis thaliana]
  misc_feature (60)..(106): NCBI GI NO: 8777395 NR Description: gene_id:MFB16
  misc_feature (60)..(106): NCBI GI NO: 18416458 NR Description: abscisic acid-induced - like protein
  misc_feature (63)..(109): NCBI GI NO: 34910810 NR Description: P0042A10.34
  misc_feature (60)..(106): NCBI GI NO: 7484787 NR Description: abscisic acid-induced protein homolog F13M23
  misc_feature (60)..(106): NCBI GI NO: 1076715 NR Description: abscisic acid-induced protein HVA22 - barley
  misc_feature (42)..(42): Xaa is any aa, unknown or other
  misc_feature (43)..(43): Xaa is any aa, unknown or other
  misc_feature (61)..(61): Xaa is any aa, unknown or other
  misc_feature (62)..(62): Xaa is any aa, unknown or other
MGASDDNPTTFSKLSSITLMFLHCPWLRLFTLYMLQLRPSRXXLLLTINNGSRIGFCIPFXXIFELTFAKVLELLPIWLFAKLIFTCWLVLPHFNGAAAVYRNYIRPFYMNPQI

SEQ ID NO: 10508 - protein, 95 aa, Glycine max
  peptide (1)..(95): Ceres Seq. ID no. 13594146
  misc_feature (44)..(94): NCBI GI NO: 15222421 NR Description: AtHVA22c [Arabidopsis thaliana]
  misc_feature (44)..(94): NCBI GI NO: 15221266 NR Description: AtHVA22a [Arabidopsis thaliana]
  misc_feature (44)..(93): NCBI GI NO: 4884934 NR Description: AtHVA22b [Arabidopsis thaliana]
  misc_feature (44)..(93): NCBI GI NO: 15241840 NR Description: AtHVA22b-related protein [Arabidopsis thaliana]
  misc_feature (41)..(87): NCBI GI NO: 18423191 NR Description: expressed protein [Arabidopsis thaliana]
  misc_feature (41)..(87): NCBI GI NO: 8777395 NR Description: gene_id:MFB16
  misc_feature (41)..(87): NCBI GI NO: 18416458 NR Description: abscisic acid-induced - like protein
  misc_feature (44)..(90): NCBI GI NO: 34910810 NR Description: P0042A10.34
  misc_feature (41)..(87): NCBI GI NO: 7484787 NR Description: abscisic acid-induced protein homolog F13M23
  misc_feature (41)..(87): NCBI GI NO: 1076715 NR Description: abscisic acid-induced protein HVA22 - barley
  misc_feature (23)..(23): Xaa is any aa, unknown or other
  misc_feature (24)..(24): Xaa is any aa, unknown or other
  misc_feature (42)..(42): Xaa is any aa, unknown or other
  misc_feature (43)..(43): Xaa is any aa, unknown or other
MFLHCPWLRLFTLYMLQLRPSRXXLLLTINNGSRIGFCIPFXXIFELTFAKVLELLPIWLFAKLIFTCWLVLPHFNGAAAVYRNYIRPFYMNPQI

SEQ ID NO: 10509 - DNA, 1283 bp, Glycine max
  misc_feature (1)..(1283): Ceres Seq. ID no. 14309707
aactcaaagaaaagcaaaatgtttttgtacaatttcatcgtgcaggaagtgaagataaaacaaagacaaaaacagcatcaggactacaaccaacttttttagagtcttggacaaaggattggaaatgtaatcccaatatgatcagtttagagtttgaaatatacaaacacaagttcttatcaaacgatttattgggtagagcagtattagacttacaaaattacacattcgtgacaaaaaaaccaaaaatcatcatacttccagttcaattagtcaaacaaaaggtaaaatcaactctcacagatcaaccatctatcgtcattcaaatcacaccagaagattttggttaccatccatcaccatacgtatggacatggtcatatgaacaacaagaacccactttgattatggatcttgccgatgtagtacaagtttcttgctctgaaactgcaacctattttgtaacagagaaaggttcactatacaaattagcaattggagaacatgtaccaataaaaattgaaacattaacacctgttctaaaagtagcagcaggattcgatcatgtgcttttcatttcgaaggataaaacagtgcaaagttttggtgaaaacaattatggacaattgggattggatgattttacatcacgatctattgcatcaacagttcaattggcacctggattatcggatgcagaatctgtttttgcaggtagaaatgtttcattctttgttgcatccaatggagatgcttatgcatgtggtgataattctaaaaatcaattaggattaagaaacaatgagttaattgcgcgtccaaaaattcttgacattaaaaatatatcttgtttacgtacatttaaagactttaccatggcaattagtcatgattcattatactttaccggtatttgtaacggattcgtgtcaaatacatggttgcatgtgttaactggaacaagatttatgtctgttgcaggatggagcgatatttttgctctatcaagagaaggaaaagtgtttaaatgtgatcttgaagaagataaggcagagattgttgaagaattatcaacgaaaaatatcactgaaattgttgctggatttaatcatttaatagctatggaagagaatggtgatgttacttacatacaagaaggacttggagataagttaaagtttttggagtcaaataaggcattatcgattgcagcttctggtactcaaagcatagtagttaccagagatttgtaaaaattacaacattaaatacaaatttgaagc

SEQ ID NO: 10510 - protein, 416 aa, Glycine max
  peptide (1)..(416): Ceres Seq. ID no. 14309708
  misc_feature (156)..(368): NCBI GI NO: 23113311 NR Description: hypothetical protein
  misc_feature (182)..(308): NCBI GI NO: 19074229 NR Description: REGULATOR OF CHROMOSOME CONDENSATION
  misc_feature (124)..(311): NCBI GI NO: 39582597 NR Description: Hypothetical protein CBG08488
  misc_feature (126)..(268): NCBI GI NO: 12844231 NR Description: unnamed protein product [Mus musculus]
LKEKQNVFVQFHRAGSEDKTKTKTASGLQPTFLESWTKDWKCNPNMISLEFEIYKHKFLSNDLLGRAVLDLQNYTFVTKKPKIIILPVQLVKQKVKSTLTDQPSIVIQITPEDFGYHPSPYVWTWSYEQQEPTLIMDLADVVQVSCSETATYFVTEKGSLYKLAIGEHVPIKIETLTPVLKVAAGFDHVLFISKDKTVQSFGENNYGQLGLDDFTSRSIASTVQLAPGLSDAESVFAGRNVSFFVASNGDAYACGDNSKNQLGLRNNELIARPKILDIKNISCLRTFKDFTMAISHDSLYFTGICNGFVSNTWLHVLTGTRFMSVAGWSDIFALSREGKVFKCDLEEDKAEIVEELSTKNITEIVAGFNHLIAMEENGDVTYIQEGLGDKLKFLESNKALSIAASGTQSIVVTRDL

SEQ ID NO: 10511 - protein, 371 aa, Glycine max
  peptide (1)..(371): Ceres Seq. ID no. 14309709
  misc_feature (111)..(323): NCBI GI NO: 23113311 NR Description: hypothetical protein
  misc_feature (137)..(263): NCBI GI NO: 19074229 NR Description: REGULATOR OF CHROMOSOME CONDENSATION
  misc_feature (79)..(266): NCBI GI NO: 39582597 NR Description: Hypothetical protein CBG08488
  misc_feature (81)..(223): NCBI GI NO: 12844231 NR Description: unnamed protein product [Mus musculus]
MISLEFEIYKHKFLSNDLLGRAVLDLQNYTFVTKKPKIIILPVQLVKQKVKSTLTDQPSIVIQITPEDFGYHPSPYVWTWSYEQQEPTLIMDLADVVQVSCSETATYFVTEKGSLYKLAIGEHVPIKIETLTPVLKVAAGFDHVLFISKDKTVQSFGENNYGQLGLDDFTSRSIASTVQLAPGLSDAESVFAGRNVSFFVASNGDAYACGDNSKNQLGLRNNELIARPKILDIKNISCLRTFKDFTMAISHDSLYFTGICNGFVSNTWLHVLTGTRFMSVAGWSDIFALSREGKVFKCDLEEDKAEIVEELSTKNITEIVAGFNHLIAMEENGDVTYIQEGLGDKLKFLESNKALSIAASGTQSIVVTRDL

SEQ ID NO: 10512 - protein, 281 aa, Glycine max
  peptide (1)..(281): Ceres Seq. ID no. 14309710
  misc_feature (21)..(233): NCBI GI NO: 23113311 NR Description: hypothetical protein
  misc_feature (47)..(173): NCBI GI NO: 19074229 NR Description: REGULATOR OF CHROMOSOME CONDENSATION
  misc_feature (1)..(176): NCBI GI NO: 39582597 NR Description: Hypothetical protein CBG08488
  misc_feature (1)..(133): NCBI GI NO: 12844231 NR Description: unnamed protein product [Mus musculus]
MDLADVVQVSCSETATYFVTEKGSLYKLAIGEHVPIKIETLTPVLKVAAGFDHVLFISKDKTVQSFGENNYGQLGLDDFTSRSIASTVQLAPGLSDAESVFAGRNVSFFVASNGDAYACGDNSKNQLGLRNNELIARPKILDIKNISCLRTFKDFTMAISHDSLYFTGICNGFVSNTWLHVLTGTRFMSVAGWSDIFALSREGKVFKCDLEEDKAEIVEELSTKNITEIVAGFNHLIAMEENGDVTYIQEGLGDKLKFLESNKALSIAASGTQSIVVTRDL

SEQ ID NO: 10513 - DNA, 932 bp, Glycine max
  misc_feature (1)..(932): Ceres Seq. ID no. 14312537
gatttaatctacttgatgcttgacaaggctgatgaacagactgacaggcgccttgctaaacatattgtgtccctacactttgagaatcccgagaacgtggaacaggacgtgttggacatttctacattaaccgattatgttagctatgcccgaaagcacatacacccacagctttctgatgaagccgctgaagaattgactagaggttacgtagaaataagaaaaagaggaaattttcctgggagtagcaaaaaggtgataacagcaacaccaaggcagattgagagtctgatacgcctaagtgaagcattggctcggatgcgcttctcagaatgggttgaaaagcatgatgtaatggaggcatttcggcttttggaagttgcaatgcagcagtctgcaacggatcattctactggaactattgacatggatcttattactactggagtttcggcaagtgaaagaatgaggcgagaaagtctgcaacaagcaactcgtaacataatcatggagaaaatgcagattgggggaccatctatgcgcttattggagttattggaagaattgaagaaacaggatactggtagcgaagttcatcttaatgatctaaggaatgcaattgctactctggctacagaaggatttgttaccatgcacggtgacattgtaaaaagatcttgatggcacgagacagtagtgacatcaggggactgtcttatagttattaattatagtgggttactgtttttattctttaaccttcttacccaatcatatgcatccggagttcaatgttacgtacatatttttatatacggtgtcttgtgaatgcatctattggtagttatttggttttatctttttccttatccgaacatctttactgttaggtgtttcattttataattaaacatgtattacctttcttgacg

SEQ ID NO: 10514 - protein, 226 aa, Glycine max
  peptide (1)..(226): Ceres Seq. ID no. 14312538
  misc_feature (1)..(130): Pfam Name: Pfam Description:  MCM2/3/5 family
  misc_feature (1)..(225): NCBI GI NO: 30679660 NR Description: DNA replication licensing factor, putative
  misc_feature (1)..(203): NCBI GI NO: 34913746 NR Description: putative cdc21 protein
  misc_feature (1)..(203): NCBI GI NO: 25411709 NR Description: probable CDC21 protein
  misc_feature (1)..(226): NCBI GI NO: 40738855 NR Description: hypothetical protein AN6070.2
  misc_feature (1)..(224): NCBI GI NO: 34870013 NR Description: mini chromosome maintenance deficient 4 homolog
  misc_feature (1)..(224): NCBI GI NO: 1705521 NR Description: DNA REPLICATION LICENSING FACTOR MCM4
  misc_feature (1)..(224): NCBI GI NO: 12848061 NR Description: unnamed protein product [Mus musculus]
  misc_feature (1)..(224): NCBI GI NO: 31982197 NR Description: minichromosome maintenance protein 4
  misc_feature (1)..(224): NCBI GI NO: 26354819 NR Description: unnamed protein product [Mus musculus]
  misc_feature (1)..(222): NCBI GI NO: 28829641 NR Description: similar to essential for initiation of DNAreplication
DLIYLMLDKADEQTDRRLAKHIVSLHFENPENVEQDVLDISTLTDYVSYARKHIHPQLSDEAAEELTRGYVEIRKRGNFPGSSKKVITATPRQIESLIRLSEALARMRFSEWVEKHDVMEAFRLLEVAMQQSATDHSTGTIDMDLITTGVSASERMRRESLQQATRNIIMEKMQIGGPSMRLLELLEELKKQDTGSEVHLNDLRNAIATLATEGFVTMHGDIVKRS

SEQ ID NO: 10515 - protein, 221 aa, Glycine max
  peptide (1)..(221): Ceres Seq. ID no. 14312539
  misc_feature (1)..(125): Pfam Name: Pfam Description:  MCM2/3/5 family
  misc_feature (1)..(220): NCBI GI NO: 30679660 NR Description: DNA replication licensing factor, putative
  misc_feature (1)..(198): NCBI GI NO: 34913746 NR Description: putative cdc21 protein
  misc_feature (1)..(198): NCBI GI NO: 25411709 NR Description: probable CDC21 protein
  misc_feature (1)..(221): NCBI GI NO: 40738855 NR Description: hypothetical protein AN6070.2
  misc_feature (1)..(219): NCBI GI NO: 34870013 NR Description: mini chromosome maintenance deficient 4 homolog
  misc_feature (1)..(219): NCBI GI NO: 1705521 NR Description: DNA REPLICATION LICENSING FACTOR MCM4
  misc_feature (1)..(219): NCBI GI NO: 12848061 NR Description: unnamed protein product [Mus musculus]
  misc_feature (1)..(219): NCBI GI NO: 26354819 NR Description: unnamed protein product [Mus musculus]
  misc_feature (1)..(219): NCBI GI NO: 31982197 NR Description: minichromosome maintenance protein 4
  misc_feature (1)..(217): NCBI GI NO: 28829641 NR Description: similar to essential for initiation of DNAreplication
MLDKADEQTDRRLAKHIVSLHFENPENVEQDVLDISTLTDYVSYARKHIHPQLSDEAAEELTRGYVEIRKRGNFPGSSKKVITATPRQIESLIRLSEALARMRFSEWVEKHDVMEAFRLLEVAMQQSATDHSTGTIDMDLITTGVSASERMRRESLQQATRNIIMEKMQIGGPSMRLLELLEELKKQDTGSEVHLNDLRNAIATLATEGFVTMHGDIVKRS

SEQ ID NO: 10516 - protein, 120 aa, Glycine max
  peptide (1)..(120): Ceres Seq. ID no. 14312540
  misc_feature (1)..(119): NCBI GI NO: 30679660 NR Description: DNA replication licensing factor, putative
  misc_feature (1)..(97): NCBI GI NO: 34913746 NR Description: putative cdc21 protein
  misc_feature (1)..(97): NCBI GI NO: 25411709 NR Description: probable CDC21 protein
  misc_feature (1)..(120): NCBI GI NO: 40738855 NR Description: hypothetical protein AN6070.2
  misc_feature (1)..(118): NCBI GI NO: 34870013 NR Description: mini chromosome maintenance deficient 4 homolog
  misc_feature (1)..(118): NCBI GI NO: 1705521 NR Description: DNA REPLICATION LICENSING FACTOR MCM4
  misc_feature (1)..(118): NCBI GI NO: 12848061 NR Description: unnamed protein product [Mus musculus]
  misc_feature (1)..(118): NCBI GI NO: 31982197 NR Description: minichromosome maintenance protein 4
  misc_feature (1)..(118): NCBI GI NO: 26354819 NR Description: unnamed protein product [Mus musculus]
  misc_feature (1)..(116): NCBI GI NO: 28829641 NR Description: similar to essential for initiation of DNAreplication
MRFSEWVEKHDVMEAFRLLEVAMQQSATDHSTGTIDMDLITTGVSASERMRRESLQQATRNIIMEKMQIGGPSMRLLELLEELKKQDTGSEVHLNDLRNAIATLATEGFVTMHGDIVKRS

SEQ ID NO: 10517 - DNA, 1311 bp, Glycine max
  misc_feature (1)..(1311): Ceres Seq. ID no. 15172170
ttgatttggttgaccgtctaggacgcaagataataatagatccgacgaaaagttatggaaaggtggccatgataggagttttttcaagcatcgggaccatcattctactctttggtttgtggcggttgcgtaaagttgtaaggaaaaagatagcaaagaaacgcaaagaaaagttcttcaaacaaaatggaggattgttgttagaacaaagactatctactggtgaagttaatgttgacaaaactaaactctttagcttaaaggaattagggaaggccactgatcactttaatataaacagaatacttggaaaaggaggtcaaggtacagtttacaaaggtatgttagtagatggaaaaattgttgcagtgaaaaaatttaaggtcaacggaaatgttgaagaattcatcaacgaatttgtcattctttcacaaattaaccacagaaatgtggttaagttgttgggatgttgtttggagactgaaatccctttgcttgtttatgaattcattcccaatggtaacctttatgaatatttacatggacaaaatgatgagttaccaatgacatgggatatgcgtttgagaattgccactgaagtggctggagctctattttacttgcactcagctgcttctcaacccatttatcatagagatgtgaagtcaacaaatatattattggatgagaagtataaggcaaaagtagcagactttggggcatcaagaatggtttccattgaagccactcacctcactactgcagttcaaggaacttttggatacttagatcctgaatattttcatacaagtcaattgacagagaagagtgatgtctacagctttggagtggttcttgttgaacttttaacaggacaaaaaccaatatcctcagtgaacgaacaaggacttcaaagtttagcttcatattttcttctttgtatggaggaaaatcgtttttttgatattgttgatgcaagagtcatgcaggaagtggagaaagaacacataattgtagttgccaatcttgcaagaagatgcttacagttgaatgggagaaagcgaccaactatgaaagaagtcacattagaattggaaagtatccaaaaactggaaaaccagtgtaatgcacaagagcaacaagaagaacttgagcttgctggaaatgaagatagccaattttgggctgcgtattctacaacttcgactgcagggcaaacttcagacagcaaaacatcaaccttggagattatgcctattcttatcaaataattgttgaattctcttaacttgttttgttgtgtgtaaaatt

SEQ ID NO: 10518 - protein, 422 aa, Glycine max
  peptide (1)..(422): Ceres Seq. ID no. 15172171
  misc_feature (20)..(419): NCBI GI NO: 15223546 NR Description: WAK-like kinase (WLK) [Arabidopsis thaliana]
  misc_feature (20)..(392): NCBI GI NO: 25287654 NR Description: protein F18O14.11
  misc_feature (23)..(419): NCBI GI NO: 15219447 NR Description: WAK-like kinase (WLK) [Arabidopsis thaliana]
  misc_feature (23)..(413): NCBI GI NO: 25405037 NR Description: protein F20B17.10
  misc_feature (19)..(420): NCBI GI NO: 15219445 NR Description: WAK-like kinase (WLK) [Arabidopsis thaliana]
  misc_feature (19)..(420): NCBI GI NO: 30699443 NR Description: WAK-like kinase (WLK) [Arabidopsis thaliana]
  misc_feature (25)..(420): NCBI GI NO: 25405037 NR Description: protein F20B17.10
  misc_feature (24)..(392): NCBI GI NO: 15222427 NR Description: WAK-like kinase (WLK) [Arabidopsis thaliana]
  misc_feature (11)..(384): NCBI GI NO: 15219132 NR Description: WAK-like kinase (WLK) [Arabidopsis thaliana]
  misc_feature (25)..(418): NCBI GI NO: 15219181 NR Description: wall-associated kinase -related
DLVDRLGRKIIIDPTKSYGKVAMIGVFSSIGTIILLFGLWRLRKVVRKKIAKKRKEKFFKQNGGLLLEQRLSTGEVNVDKTKLFSLKELGKATDHFNINRILGKGGQGTVYKGMLVDGKIVAVKKFKVNGNVEEFINEFVILSQINHRNVVKLLGCCLETEIPLLVYEFIPNGNLYEYLHGQNDELPMTWDMRLRIATEVAGALFYLHSAASQPIYHRDVKSTNILLDEKYKAKVADFGASRMVSIEATHLTTAVQGTFGYLDPEYFHTSQLTEKSDVYSFGVVLVELLTGQKPISSVNEQGLQSLASYFLLCMEENRFFDIVDARVMQEVEKEHIIVVANLARRCLQLNGRKRPTMKEVTLELESIQKLENQCNAQEQQEELELAGNEDSQFWAAYSTTSTAGQTSDSKTSTLEIMPILIK

SEQ ID NO: 10519 - protein, 400 aa, Glycine max
  peptide (1)..(400): Ceres Seq. ID no. 15172172
  misc_feature (1)..(397): NCBI GI NO: 15223546 NR Description: WAK-like kinase (WLK) [Arabidopsis thaliana]
  misc_feature (1)..(370): NCBI GI NO: 25287654 NR Description: protein F18O14.11
  misc_feature (1)..(397): NCBI GI NO: 15219447 NR Description: WAK-like kinase (WLK) [Arabidopsis thaliana]
  misc_feature (1)..(391): NCBI GI NO: 25405037 NR Description: protein F20B17.10
  misc_feature (1)..(398): NCBI GI NO: 15219445 NR Description: WAK-like kinase (WLK) [Arabidopsis thaliana]
  misc_feature (1)..(398): NCBI GI NO: 30699443 NR Description: WAK-like kinase (WLK) [Arabidopsis thaliana]
  misc_feature (3)..(398): NCBI GI NO: 25405037 NR Description: protein F20B17.10
  misc_feature (2)..(370): NCBI GI NO: 15222427 NR Description: WAK-like kinase (WLK) [Arabidopsis thaliana]
  misc_feature (1)..(362): NCBI GI NO: 15219132 NR Description: WAK-like kinase (WLK) [Arabidopsis thaliana]
  misc_feature (3)..(396): NCBI GI NO: 15219181 NR Description: wall-associated kinase -related
MIGVFSSIGTIILLFGLWRLRKVVRKKIAKKRKEKFFKQNGGLLLEQRLSTGEVNVDKTKLFSLKELGKATDHFNINRILGKGGQGTVYKGMLVDGKIVAVKKFKVNGNVEEFINEFVILSQINHRNVVKLLGCCLETEIPLLVYEFIPNGNLYEYLHGQNDELPMTWDMRLRIATEVAGALFYLHSAASQPIYHRDVKSTNILLDEKYKAKVADFGASRMVSIEATHLTTAVQGTFGYLDPEYFHTSQLTEKSDVYSFGVVLVELLTGQKPISSVNEQGLQSLASYFLLCMEENRFFDIVDARVMQEVEKEHIIVVANLARRCLQLNGRKRPTMKEVTLELESIQKLENQCNAQEQQEELELAGNEDSQFWAAYSTTSTAGQTSDSKTSTLEIMPILIK

SEQ ID NO: 10520 - protein, 309 aa, Glycine max
  peptide (1)..(309): Ceres Seq. ID no. 15172173
  misc_feature (1)..(306): NCBI GI NO: 15223546 NR Description: WAK-like kinase (WLK) [Arabidopsis thaliana]
  misc_feature (1)..(279): NCBI GI NO: 25287654 NR Description: protein F18O14.11
  misc_feature (1)..(306): NCBI GI NO: 15219447 NR Description: WAK-like kinase (WLK) [Arabidopsis thaliana]
  misc_feature (1)..(300): NCBI GI NO: 25405037 NR Description: protein F20B17.10
  misc_feature (1)..(307): NCBI GI NO: 15219445 NR Description: WAK-like kinase (WLK) [Arabidopsis thaliana]
  misc_feature (1)..(307): NCBI GI NO: 30699443 NR Description: WAK-like kinase (WLK) [Arabidopsis thaliana]
  misc_feature (1)..(307): NCBI GI NO: 25405037 NR Description: protein F20B17.10
  misc_feature (1)..(279): NCBI GI NO: 15222427 NR Description: WAK-like kinase (WLK) [Arabidopsis thaliana]
  misc_feature (1)..(271): NCBI GI NO: 15219132 NR Description: WAK-like kinase (WLK) [Arabidopsis thaliana]
  misc_feature (1)..(305): NCBI GI NO: 15219181 NR Description: wall-associated kinase -related
MLVDGKIVAVKKFKVNGNVEEFINEFVILSQINHRNVVKLLGCCLETEIPLLVYEFIPNGNLYEYLHGQNDELPMTWDMRLRIATEVAGALFYLHSAASQPIYHRDVKSTNILLDEKYKAKVADFGASRMVSIEATHLTTAVQGTFGYLDPEYFHTSQLTEKSDVYSFGVVLVELLTGQKPISSVNEQGLQSLASYFLLCMEENRFFDIVDARVMQEVEKEHIIVVANLARRCLQLNGRKRPTMKEVTLELESIQKLENQCNAQEQQEELELAGNEDSQFWAAYSTTSTAGQTSDSKTSTLEIMPILIK

SEQ ID NO: 10521 - DNA, 1986 bp, Glycine max
  misc_feature (1)..(1986): Ceres Seq. ID no. 15176298
agatatcgatcgatcaccctctttcataatattcccagctggtcccccaaaaatcaatcaaatggcggcgaaacgattttttgatgattctgatcaagacaacaataataagccaccaggcgataaacggatgagaactacaccaagaccttcttttgcttcggtaataggagaagtggtgatggtgaaaaacttgcagaaccttttctcaggcttggagcccttgcttagaagagtggtgaatgaagagatggagagagtgatgaggcattttagtgtgccacgttcaatattaagtaggtccccttcgttgaggatagaagcagcatcaatggagcaagaatcaaagtatgaactggtgttcagcaagaagctatcggtccctatattcacgggaagcagaatagtggacatagatgggaattccatccacgtgattctggttgacaaaagtggcggtgaagtagtagcggttcccactagtctgggccacccgataaagctagagatagtggtgcttgatggggattttccagctcccaacaacaacaaggaagaatattcatggacgagtgaggagttcaacaaccacatagtgaaggagagaactgggaagaggccattgctcactggagaattgaatctcaccatgagagatgggattgcactaattgaagagattgagttcactgataactctagttggatacgaagcaggaagttcagagttgcagttagggtggctcctgggagtaatcaaactgttcgaattcgtgaaggaatcactgagccatttgttgttaaggatcaccgtggtgaattgtacaagaaacatcacccacctatgctcaacgacgaagtgtggcgcctagagaagattggtaaagacggagctttccacaaaaaattgtccaaagaggggataaacagcgttcaagacttcctcaagttatactttgttgatttccataggctcaaaaagattttgggcgttgggatgtcagataaaatgtgggatgtgacaatcaagcatgcaaagacttgcgagaagggcaacaaatactacgcgtaccgtgggcataattttaccgtctttctgaattccatatgccagttggttagagctgatatcaacggccaaacttttcctggcagagagctaagcaacatgactaggagctatatggaaaaattggtgagagaagcatatgctagatggaatgacttggaagaaattgatgcggctctgttaacccaaggtgaaaccttggaggaatttccaaacaatcatcaggcatcactaatagcatatgatcagaatgactactttggtgataaatctgccgaagttggtaactatgtaccaacccataatgcacaaatgggatgcagcgactggcaagtgaatggaacatttggcacaacatcattcgtgaatggcggcataccttacagcttctcagattcacaatcggacagtgacataaccccctcagttgatgctgccgcaaggtggcattaggaaaattatttagtactttgactttcagctgtaaatacgaattaacagttgaagaatcaaattaggttcagtgacttagtgtgtgaagtcttgttggcccattacataaactgtgtccagcctgccttggcttatattgggctttcttttctttctggttaggcgtagtttattatgaggcccatttcaaggatatgtgcaaagatgaggcctggctcttctgcaaaatatgcaacctgcctttgctgggctaatgttgctatgttttataatttcagctatcacgaaacagaatgatgctttataaatagtgataagataaatgatgcaatcctttgattatactgtatgcattttttgtttatgatttgatttaagagtctcattctgcttttagcttgcaaatgttcatgttctgggactatctattcacacatcacaacaaatgaaattgatccaattcc

SEQ ID NO: 10522 - protein, 506 aa, Glycine max
  peptide (1)..(506): Ceres Seq. ID no. 15176299
  misc_feature (31)..(456): NCBI GI NO: 25406296 NR Description: hypothetical protein F25P22.22
  misc_feature (39)..(417): NCBI GI NO: 34895622 NR Description: putative calmodulin-binding protein
  misc_feature (29)..(417): NCBI GI NO: 15242785 NR Description: calmodulin-binding protein [Arabidopsis thaliana]
  misc_feature (80)..(477): NCBI GI NO: 25354646 NR Description: probable calmodulin-binding protein
  misc_feature (17)..(81): NCBI GI NO: 25354646 NR Description: probable calmodulin-binding protein
  misc_feature (34)..(437): NCBI GI NO: 30687005 NR Description: calmodulin-binding protein [Arabidopsis thaliana]
  misc_feature (41)..(413): NCBI GI NO: 32482927 NR Description: OSJNBa0058G03.4
  misc_feature (31)..(488): NCBI GI NO: 22329041 NR Description: calmodulin-binding protein [Arabidopsis thaliana]
  misc_feature (28)..(460): NCBI GI NO: 38637566 NR Description: putative calmodulin-binding protein
  misc_feature (128)..(413): NCBI GI NO: 7489107 NR Description: calmodulin-binding protein TCB60 - common tobacco
DIDRSPSFIIFPAGPPKINQMAAKRFFDDSDQDNNNKPPGDKRMRTTPRPSFASVIGEVVMVKNLQNLFSGLEPLLRRVVNEEMERVMRHFSVPRSILSRSPSLRIEAASMEQESKYELVFSKKLSVPIFTGSRIVDIDGNSIHVILVDKSGGEVVAVPTSLGHPIKLEIVVLDGDFPAPNNNKEEYSWTSEEFNNHIVKERTGKRPLLTGELNLTMRDGIALIEEIEFTDNSSWIRSRKFRVAVRVAPGSNQTVRIREGITEPFVVKDHRGELYKKHHPPMLNDEVWRLEKIGKDGAFHKKLSKEGINSVQDFLKLYFVDFHRLKKILGVGMSDKMWDVTIKHAKTCEKGNKYYAYRGHNFTVFLNSICQLVRADINGQTFPGRELSNMTRSYMEKLVREAYARWNDLEEIDAALLTQGETLEEFPNNHQASLIAYDQNDYFGDKSAEVGNYVPTHNAQMGCSDWQVNGTFGTTSFVNGGIPYSFSDSQSDSDITPSVDAAARWH

SEQ ID NO: 10523 - protein, 486 aa, Glycine max
  peptide (1)..(486): Ceres Seq. ID no. 15176300
  misc_feature (11)..(436): NCBI GI NO: 25406296 NR Description: hypothetical protein F25P22.22
  misc_feature (19)..(397): NCBI GI NO: 34895622 NR Description: putative calmodulin-binding protein
  misc_feature (9)..(397): NCBI GI NO: 15242785 NR Description: calmodulin-binding protein [Arabidopsis thaliana]
  misc_feature (60)..(457): NCBI GI NO: 25354646 NR Description: probable calmodulin-binding protein
  misc_feature (1)..(61): NCBI GI NO: 25354646 NR Description: probable calmodulin-binding protein
  misc_feature (14)..(417): NCBI GI NO: 30687005 NR Description: calmodulin-binding protein [Arabidopsis thaliana]
  misc_feature (21)..(393): NCBI GI NO: 32482927 NR Description: OSJNBa0058G03.4
  misc_feature (11)..(468): NCBI GI NO: 22329041 NR Description: calmodulin-binding protein [Arabidopsis thaliana]
  misc_feature (8)..(440): NCBI GI NO: 38637566 NR Description: putative calmodulin-binding protein
  misc_feature (108)..(393): NCBI GI NO: 7489107 NR Description: calmodulin-binding protein TCB60 - common tobacco
MAAKRFFDDSDQDNNNKPPGDKRMRTTPRPSFASVIGEVVMVKNLQNLFSGLEPLLRRVVNEEMERVMRHFSVPRSILSRSPSLRIEAASMEQESKYELVFSKKLSVPIFTGSRIVDIDGNSIHVILVDKSGGEVVAVPTSLGHPIKLEIVVLDGDFPAPNNNKEEYSWTSEEFNNHIVKERTGKRPLLTGELNLTMRDGIALIEEIEFTDNSSWIRSRKFRVAVRVAPGSNQTVRIREGITEPFVVKDHRGELYKKHHPPMLNDEVWRLEKIGKDGAFHKKLSKEGINSVQDFLKLYFVDFHRLKKILGVGMSDKMWDVTIKHAKTCEKGNKYYAYRGHNFTVFLNSICQLVRADINGQTFPGRELSNMTRSYMEKLVREAYARWNDLEEIDAALLTQGETLEEFPNNHQASLIAYDQNDYFGDKSAEVGNYVPTHNAQMGCSDWQVNGTFGTTSFVNGGIPYSFSDSQSDSDITPSVDAAARWH

SEQ ID NO: 10524 - protein, 463 aa, Glycine max
  peptide (1)..(463): Ceres Seq. ID no. 15176301
  misc_feature (1)..(413): NCBI GI NO: 25406296 NR Description: hypothetical protein F25P22.22
  misc_feature (1)..(374): NCBI GI NO: 34895622 NR Description: putative calmodulin-binding protein
  misc_feature (1)..(374): NCBI GI NO: 15242785 NR Description: calmodulin-binding protein [Arabidopsis thaliana]
  misc_feature (37)..(434): NCBI GI NO: 25354646 NR Description: probable calmodulin-binding protein
  misc_feature (1)..(38): NCBI GI NO: 25354646 NR Description: probable calmodulin-binding protein
  misc_feature (1)..(394): NCBI GI NO: 30687005 NR Description: calmodulin-binding protein [Arabidopsis thaliana]
  misc_feature (1)..(370): NCBI GI NO: 32482927 NR Description: OSJNBa0058G03.4
  misc_feature (1)..(445): NCBI GI NO: 22329041 NR Description: calmodulin-binding protein [Arabidopsis thaliana]
  misc_feature (1)..(417): NCBI GI NO: 38637566 NR Description: putative calmodulin-binding protein
  misc_feature (85)..(370): NCBI GI NO: 7489107 NR Description: calmodulin-binding protein TCB60 - common tobacco
MRTTPRPSFASVIGEVVMVKNLQNLFSGLEPLLRRVVNEEMERVMRHFSVPRSILSRSPSLRIEAASMEQESKYELVFSKKLSVPIFTGSRIVDIDGNSIHVILVDKSGGEVVAVPTSLGHPIKLEIVVLDGDFPAPNNNKEEYSWTSEEFNNHIVKERTGKRPLLTGELNLTMRDGIALIEEIEFTDNSSWIRSRKFRVAVRVAPGSNQTVRIREGITEPFVVKDHRGELYKKHHPPMLNDEVWRLEKIGKDGAFHKKLSKEGINSVQDFLKLYFVDFHRLKKILGVGMSDKMWDVTIKHAKTCEKGNKYYAYRGHNFTVFLNSICQLVRADINGQTFPGRELSNMTRSYMEKLVREAYARWNDLEEIDAALLTQGETLEEFPNNHQASLIAYDQNDYFGDKSAEVGNYVPTHNAQMGCSDWQVNGTFGTTSFVNGGIPYSFSDSQSDSDITPSVDAAARWH

SEQ ID NO: 10525 - DNA, 1810 bp, Glycine max
  misc_feature (1)..(1810): Ceres Seq. ID no. 14310508
aatgcctagtgaattagctatgaacaatgatgagctacatgtggttatgttcccattccttgcatttggccacattagtccatttgttcagctctccaacaagttgttctctcatggtgttcatgtcactttcttgtcagctgcatccaacattcccagaatcagatcaactcttaatctcaatccagccatcaatgttatctcactaaagttcccaaatggtataaccaacactgctgaattgccacctcacttagctggaaatctcatacacgcccttgacctcactcaagatcaggtgaagtcccttttgttggaactcaaaccccactatgttttctttgactttgcacaacattggctcccaaaattagcttctgaagttggcatcaagtctgttcatttctcagtctactctgccatttctgatgcttacattaccgtgccttctagatttgctgatgttgaaggaagaaacatcacttttgaggatcttaaaaagcctccacctgggtatcctcaaaactctaatatttccctcaaggcctttgaggccatggactttatgttcctcttcacaagatttggtgaaaaaaaccttactggttatgagcgagttttgcaaagccttggtgagtgttcattcatagtgttcaaaacgtgcaaggaaatagaaggaccctacttagactacatagaaacgcaatttcgaaaaccagttttgctatctggtccactagtccccgagccatcaaccgatgtgcttgaggaaaagtggtccaaatggttagatggtttccctgccaaatctgtcatattatgctcctttggcagtgagacatttctgagtgattatcaaatcaaagaactagccagtgggttagaactcactggcttacctttcattttggttctgaatttcccatccaatctctctgccaaagctgagttggagagagcattgccaaaagggtatttggaaagagtgaagaataggggagtggtgcacagtggttggtttcagcagcagcttgtgctgaaacactcaagtgtggggtgctatgtatgccatggtggctttagttcagtgattgaagctatggtcaatgagtgtcaactggtgctgttgcctttcaagggtgaccagtttttcaattctaaactcattgccaatgatttaaaggcaggggtagaggtgaataggagtgatgaagatgggttctttcacaaagaggatatactggaggcattgaaaactgtcatgttggaggataacaaagagcaagggaagcaaataagagaaaaccacatgcaatggagcaagtttttatcaaataaggaaattcagaacaaattcatcacagatctggttgcccagttaaagtctatggcttagtcttgtctcttccaatggaaaataaagtctaccaagactagaaagtataaactatagttcaaaatgatcatattatcatatatcaattgagatatgcgtggtcagtctcgttgttcttgtgattttgctttcccgttgtaggttttattctgtgtctcctttctcccgatcaattaatgcagttaggagattcaccttaaaaaagctaaaaattgcttttgtaacttgaagttattgtattcctactgattttggtcaagaccaagaagttgtcttataatttgtgcacatggtttgttttgaaatttagaaaggaaaaaagaaaagaaaaagtagagcatggaacaaatatcgtttgtaatataggtgaccaataaatgtagaaccattctaaataaatatggctttgaatac

SEQ ID NO: 10526 - protein, 464 aa, Glycine max
  peptide (1)..(464): Ceres Seq. ID no. 14310509
  misc_feature (1)..(464): NCBI GI NO: 2501497 NR Description: FLAVONOL 3-O-GLUCOSYLTRANSFERASE
  misc_feature (3)..(464): NCBI GI NO: 480314 NR Description: UDP rhamnose- anthocyanidin-3-glucosiderhamnosyltransferase
  misc_feature (7)..(464): NCBI GI NO: 22759895 NR Description: rhamnosyl transferase [Nierembergia sp. NB17]
  misc_feature (1)..(464): NCBI GI NO: 7433907 NR Description: anthocyanin rhamnosyltransferase - garden petunia
  misc_feature (8)..(463): NCBI GI NO: 23955910 NR Description: UDP-glucosyltransferase [Stevia rebaudiana]
  misc_feature (11)..(463): NCBI GI NO: 15239525 NR Description: glycosyltransferase family [Arabidopsis thaliana]
  misc_feature (9)..(462): NCBI GI NO: 15239543 NR Description: glycosyltransferase family [Arabidopsis thaliana]
  misc_feature (7)..(463): NCBI GI NO: 15234196 NR Description: glycosyltransferase family [Arabidopsis thaliana]
  misc_feature (7)..(463): NCBI GI NO: 15234195 NR Description: glycosyltransferase family [Arabidopsis thaliana]
  misc_feature (7)..(464): NCBI GI NO: 15982889 NR Description: AT4g27560/T29A15_50 [Arabidopsis thaliana]
MPSELAMNNDELHVVMFPFLAFGHISPFVQLSNKLFSHGVHVTFLSAASNIPRIRSTLNLNPAINVISLKFPNGITNTAELPPHLAGNLIHALDLTQDQVKSLLLELKPHYVFFDFAQHWLPKLASEVGIKSVHFSVYSAISDAYITVPSRFADVEGRNITFEDLKKPPPGYPQNSNISLKAFEAMDFMFLFTRFGEKNLTGYERVLQSLGECSFIVFKTCKEIEGPYLDYIETQFRKPVLLSGPLVPEPSTDVLEEKWSKWLDGFPAKSVILCSFGSETFLSDYQIKELASGLELTGLPFILVLNFPSNLSAKAELERALPKGYLERVKNRGVVHSGWFQQQLVLKHSSVGCYVCHGGFSSVIEAMVNECQLVLLPFKGDQFFNSKLIANDLKAGVEVNRSDEDGFFHKEDILEALKTVMLEDNKEQGKQIRENHMQWSKFLSNKEIQNKFITDLVAQLKSMA

SEQ ID NO: 10527 - protein, 458 aa, Glycine max
  peptide (1)..(458): Ceres Seq. ID no. 14310510
  misc_feature (1)..(458): NCBI GI NO: 2501497 NR Description: FLAVONOL 3-O-GLUCOSYLTRANSFERASE
  misc_feature (1)..(458): NCBI GI NO: 480314 NR Description: UDP rhamnose- anthocyanidin-3-glucosiderhamnosyltransferase
  misc_feature (1)..(458): NCBI GI NO: 22759895 NR Description: rhamnosyl transferase [Nierembergia sp. NB17]
  misc_feature (1)..(458): NCBI GI NO: 7433907 NR Description: anthocyanin rhamnosyltransferase - garden petunia
  misc_feature (2)..(457): NCBI GI NO: 23955910 NR Description: UDP-glucosyltransferase [Stevia rebaudiana]
  misc_feature (5)..(457): NCBI GI NO: 15239525 NR Description: glycosyltransferase family [Arabidopsis thaliana]
  misc_feature (3)..(456): NCBI GI NO: 15239543 NR Description: glycosyltransferase family [Arabidopsis thaliana]
  misc_feature (1)..(457): NCBI GI NO: 15234196 NR Description: glycosyltransferase family [Arabidopsis thaliana]
  misc_feature (1)..(457): NCBI GI NO: 15234195 NR Description: glycosyltransferase family [Arabidopsis thaliana]
  misc_feature (1)..(458): NCBI GI NO: 15982889 NR Description: AT4g27560/T29A15_50 [Arabidopsis thaliana]
MNNDELHVVMFPFLAFGHISPFVQLSNKLFSHGVHVTFLSAASNIPRIRSTLNLNPAINVISLKFPNGITNTAELPPHLAGNLIHALDLTQDQVKSLLLELKPHYVFFDFAQHWLPKLASEVGIKSVHFSVYSAISDAYITVPSRFADVEGRNITFEDLKKPPPGYPQNSNISLKAFEAMDFMFLFTRFGEKNLTGYERVLQSLGECSFIVFKTCKEIEGPYLDYIETQFRKPVLLSGPLVPEPSTDVLEEKWSKWLDGFPAKSVILCSFGSETFLSDYQIKELASGLELTGLPFILVLNFPSNLSAKAELERALPKGYLERVKNRGVVHSGWFQQQLVLKHSSVGCYVCHGGFSSVIEAMVNECQLVLLPFKGDQFFNSKLIANDLKAGVEVNRSDEDGFFHKEDILEALKTVMLEDNKEQGKQIRENHMQWSKFLSNKEIQNKFITDLVAQLKSMA

SEQ ID NO: 10528 - protein, 449 aa, Glycine max
  peptide (1)..(449): Ceres Seq. ID no. 14310511
  misc_feature (1)..(449): NCBI GI NO: 2501497 NR Description: FLAVONOL 3-O-GLUCOSYLTRANSFERASE
  misc_feature (1)..(449): NCBI GI NO: 480314 NR Description: UDP rhamnose- anthocyanidin-3-glucosiderhamnosyltransferase
  misc_feature (1)..(449): NCBI GI NO: 22759895 NR Description: rhamnosyl transferase [Nierembergia sp. NB17]
  misc_feature (1)..(449): NCBI GI NO: 7433907 NR Description: anthocyanin rhamnosyltransferase - garden petunia
  misc_feature (1)..(448): NCBI GI NO: 23955910 NR Description: UDP-glucosyltransferase [Stevia rebaudiana]
  misc_feature (1)..(448): NCBI GI NO: 15239525 NR Description: glycosyltransferase family [Arabidopsis thaliana]
  misc_feature (1)..(447): NCBI GI NO: 15239543 NR Description: glycosyltransferase family [Arabidopsis thaliana]
  misc_feature (1)..(448): NCBI GI NO: 15234196 NR Description: glycosyltransferase family [Arabidopsis thaliana]
  misc_feature (1)..(448): NCBI GI NO: 15234195 NR Description: glycosyltransferase family [Arabidopsis thaliana]
  misc_feature (1)..(449): NCBI GI NO: 15982889 NR Description: AT4g27560/T29A15_50 [Arabidopsis thaliana]
MFPFLAFGHISPFVQLSNKLFSHGVHVTFLSAASNIPRIRSTLNLNPAINVISLKFPNGITNTAELPPHLAGNLIHALDLTQDQVKSLLLELKPHYVFFDFAQHWLPKLASEVGIKSVHFSVYSAISDAYITVPSRFADVEGRNITFEDLKKPPPGYPQNSNISLKAFEAMDFMFLFTRFGEKNLTGYERVLQSLGECSFIVFKTCKEIEGPYLDYIETQFRKPVLLSGPLVPEPSTDVLEEKWSKWLDGFPAKSVILCSFGSETFLSDYQIKELASGLELTGLPFILVLNFPSNLSAKAELERALPKGYLERVKNRGVVHSGWFQQQLVLKHSSVGCYVCHGGFSSVIEAMVNECQLVLLPFKGDQFFNSKLIANDLKAGVEVNRSDEDGFFHKEDILEALKTVMLEDNKEQGKQIRENHMQWSKFLSNKEIQNKFITDLVAQLKSMA

SEQ ID NO: 10529 - DNA, 1104 bp, Glycine max
  misc_feature (1)..(1104): Ceres Seq. ID no. 14310572
aaaaacgtgggagccctgaatcgtgcgtgttttgcgattctgacttgtttttcatttttactttttgggcctttgaaagcttaaaaacctaaacgcccaagactcaaaacaaggcagaaccgctcaactgcgccgtgaaactcttcttctcattcacattcagttgcgcgaagcaccatcaggctctgcaaatgccaatggtggatttggagggcacagaaggttacataccttccacagagtatgtggaagacagcaacgaaacactcattaacttgactgactcaactgagcttttgtttcttaagttgccttcttccaatgattttttatctgacatacatgggcagaaattgtttctcactcttcataatgatggtaaactagccagcttcgaggattcatcaggtaaagtatatgattttgtaagctattctgctcaggagccagacgaaacagtttttgttccctctacagaaccaaaaataggaaagatttcgatgcgagtttccactgtccattaccctggtcctaaagaacttgaaaagctcaattcaactaacgcaaaacatgcacatggaaattcttctggagtcactgggacaacttcatctcgatattttcctatgcaaagtggtggagcagcttcatcaaaaggtagcagacagagaagctctctaactgaagctagtgagccatcaagtatttcaaaaagaagacacgcgtctaaatctaaatccaacttgtccgagacttcacatgagcacagcactggcatttcgtccatgtccccaaatcattctcatgaaggaaaggcaaagagaagaaaacataaggaatagtgtttcctatactcgccattggcctatttaatagtgtaatatttagaggttacattctcccaggcctttaaatatgtccggaaagactagtgctaaacttttatgttgcaaaatgataaatttaaatgtttgcattctcttttttgtcttttttttttgcaaatgttcatttgcttcagttggacaatgttcactgatgtaaggagtaagaccctttcgtgctcctatgtatacttaagggcgatgttaattttgttgtgtt

SEQ ID NO: 10530 - protein, 216 aa, Glycine max
  peptide (1)..(216): Ceres Seq. ID no. 14310573
  misc_feature (2)..(198): NCBI GI NO: 37573093 NR Description: unknown protein
  misc_feature (12)..(193): NCBI GI NO: 34904964 NR Description: OSJNBa0077M12.25
  misc_feature (48)..(215): NCBI GI NO: 34902970 NR Description: unnamed protein product
  misc_feature (15)..(216): NCBI GI NO: 15237757 NR Description: expressed protein [Arabidopsis thaliana]
MPMVDLEGTEGYIPSTEYVEDSNETLINLTDSTELLFLKLPSSNDFLSDIHGQKLFLTLHNDGKLASFEDSSGKVYDFVSYSAQEPDETVFVPSTEPKIGKISMRVSTVHYPGPKELEKLNSTNAKHAHGNSSGVTGTTSSRYFPMQSGGAASSKGSRQRSSLTEASEPSSISKRRHASKSKSNLSETSHEHSTGISSMSPNHSHEGKAKRRKHKE

SEQ ID NO: 10531 - protein, 214 aa, Glycine max
  peptide (1)..(214): Ceres Seq. ID no. 14310574
  misc_feature (1)..(196): NCBI GI NO: 37573093 NR Description: unknown protein
  misc_feature (10)..(191): NCBI GI NO: 34904964 NR Description: OSJNBa0077M12.25
  misc_feature (46)..(213): NCBI GI NO: 34902970 NR Description: unnamed protein product
  misc_feature (13)..(214): NCBI GI NO: 15237757 NR Description: expressed protein [Arabidopsis thaliana]
MVDLEGTEGYIPSTEYVEDSNETLINLTDSTELLFLKLPSSNDFLSDIHGQKLFLTLHNDGKLASFEDSSGKVYDFVSYSAQEPDETVFVPSTEPKIGKISMRVSTVHYPGPKELEKLNSTNAKHAHGNSSGVTGTTSSRYFPMQSGGAASSKGSRQRSSLTEASEPSSISKRRHASKSKSNLSETSHEHSTGISSMSPNHSHEGKAKRRKHKE

SEQ ID NO: 10532 - protein, 113 aa, Glycine max
  peptide (1)..(113): Ceres Seq. ID no. 14310575
  misc_feature (1)..(95): NCBI GI NO: 37573093 NR Description: unknown protein
  misc_feature (1)..(90): NCBI GI NO: 34904964 NR Description: OSJNBa0077M12.25
  misc_feature (1)..(112): NCBI GI NO: 34902970 NR Description: unnamed protein product
  misc_feature (1)..(113): NCBI GI NO: 15237757 NR Description: expressed protein [Arabidopsis thaliana]
MRVSTVHYPGPKELEKLNSTNAKHAHGNSSGVTGTTSSRYFPMQSGGAASSKGSRQRSSLTEASEPSSISKRRHASKSKSNLSETSHEHSTGISSMSPNHSHEGKAKRRKHKE

SEQ ID NO: 10533 - DNA, 689 bp, Glycine max
  misc_feature (1)..(689): Ceres Seq. ID no. 13637980
atctttttcttcttactctagactcttccttttctcttctctgtctaaggggtgccctgagatcacattgaacaatggtgaaggctgtggccgttcttggcagcagtgagggtgtcactggaactattcacttcgttcaggagggaagtggtccaaccaccgtaactggatctcttgctggtcttaagcctggtctccatggtttccatgtccatgccttgggggacactaccaatggttgcctctcaactggatcacatttcaatcctaataacaaggagcatggtgcccctgaggatgagaatcgtcatgctggtgatcttgggaatgttaatgtcggtgatgatggtactgtcagcttcactattactgacagccagattcctctcactggaccaaacaacatcataggaagggcggttgttgtccatgctgatcctgatgatcttgggaaaggtggtcatgagcttagcaaaactactggaaatgctggtggcagagtagcttgtggtatcattggtctgcaaggataaactaatcacatgaagttggaaacgtgctttagatttgtggaataaagtagcacccatttaaacccgtttggttaggtccggtctgtactgctgaattctgtgttttgcttgtattgtatcgacacttgatgcttaatcaaattgttacattgcttg

SEQ ID NO: 10534 - protein, 152 aa, Glycine max
  peptide (1)..(152): Ceres Seq. ID no. 13637981
  misc_feature (1)..(152): Pfam Name: SODC Pfam Description: Copper/zinc superoxide dismutase
  misc_feature (1)..(152): NCBI GI NO: 7433298 NR Description: superoxide dismutase (EC 1
  misc_feature (1)..(152): NCBI GI NO: 3860329 NR Description: superoxide dismutase [Cicer arietinum]
  misc_feature (1)..(152): NCBI GI NO: 401108 NR Description: Superoxide dismutase [Cu-Zn]
  misc_feature (1)..(152): NCBI GI NO: 4102861 NR Description: copper/zinc-superoxide dismutase
  misc_feature (1)..(152): NCBI GI NO: 13274150 NR Description: putative cytosolic CuZn-superoxide dismutase
  misc_feature (1)..(152): NCBI GI NO: 33340236 NR Description: copper/zinc superoxide dismutase [Citrus limon]
  misc_feature (1)..(152): NCBI GI NO: 3334334 NR Description: Superoxide dismutase [Cu-Zn] 1
  misc_feature (1)..(152): NCBI GI NO: 134597 NR Description: Superoxide dismutase [Cu-Zn] 4A
  misc_feature (1)..(150): NCBI GI NO: 17385628 NR Description: copper/zinc superoxide dismutase
  misc_feature (1)..(152): NCBI GI NO: 13431904 NR Description: Superoxide dismutase [Cu-Zn]
MVKAVAVLGSSEGVTGTIHFVQEGSGPTTVTGSLAGLKPGLHGFHVHALGDTTNGCLSTGSHFNPNNKEHGAPEDENRHAGDLGNVNVGDDGTVSFTITDSQIPLTGPNNIIGRAVVVHADPDDLGKGGHELSKTTGNAGGRVACGIIGLQG

SEQ ID NO: 10535 - DNA, 1300 bp, Glycine max
  misc_feature (1)..(1300): Ceres Seq. ID no. 13594147
gaactgaacttcatcttctctactgccatggccatttcatctgcatccgatttcataaatgatttgcacagcatatgttatgccttgcaatttcaagatgtgatttgactcaacttctgggatttgagaaattcattccaccctttgcaaacactagtggttcaaacatacttaaaggtgttaactatgcatcaggtggagctggaatacgcattgaaaccggctcggacatgggtgctactatcagcttgggattacagttagcaaatcacagagtcatagtttctgaaattgctacgaaacttggaagtcctgacttagctcgacaataccttgaaaagtgcttgtattatttgaacataggcaacaatgattacatgggcaactacttccgtccccagctctacccagcaagccgcatttatagccttgagcagtatgcacaagctctgattgaagagttatctctgaatttgcaggctttacatgaccttggagcgagaaagtatgtgttggctgggttgggccttataggatgcacaccagctgtgatgcattctcatgggacaaatggatcttgtgttgaagagcataatgctgctacatacgattataataacaagcttaaagctctagtggatcagttcaataacaggttctctgctaattccaaattcatccttatacacaatggatcaaacgcccttgacattgcacatgggtttttggtttcggatgctgcttgctgcccatcagggtgtaatcccaaccaaaagccgtgcaataataggagtgactatgtgttttgggatgaagttcatcccaccgaggcatggaacctagttaatgcaatatcagcttataattctaccattgatccagcctttacttatccaatgaatatcaagcaacttgtagactgtgaagttaagagggaattggagttcaggaatgagtccacttcacagctcagtgccactgaataagttctggctatcacctagtctttcatttggagctaaattaattgagttgaatatgtacgaagtaatggcctgctactgaattgaacgacaaaggggaatgaatcaagcacagttgctgttatggaatccaattcaaaatcattaagccataatgatttggtttcaaaatcctctcctgaaatttgattttgtactgtttatactcttttctttgtttagaaccaatatattgacatgagttatactatttatgtaatatttctttacaacattattatttctctctttcttaatcacatcattcatcttatttc

SEQ ID NO: 10536 - protein, 303 aa, Glycine max
  peptide (1)..(303): Ceres Seq. ID no. 13594148
  misc_feature (11)..(259): Pfam Name: Pfam Description:  GDSL-like Lipase/Acylhydrolase
  misc_feature (11)..(280): NCBI GI NO: 15220514 NR Description: GDSL-motif lipase/hydrolase protein
  misc_feature (11)..(280): NCBI GI NO: 21592417 NR Description: lipase/hydrolase, putative [Arabidopsis thaliana]
  misc_feature (11)..(280): NCBI GI NO: 15220512 NR Description: GDSL-motif lipase/hydrolase protein
  misc_feature (11)..(280): NCBI GI NO: 21594055 NR Description: lipase/hydrolase, putative [Arabidopsis thaliana]
  misc_feature (11)..(280): NCBI GI NO: 7485419 NR Description: hypothetical protein F13C5
  misc_feature (11)..(280): NCBI GI NO: 21553940 NR Description: GDSL-motif lipase/hydrolase-like protein
  misc_feature (11)..(280): NCBI GI NO: 18415211 NR Description: GDSL-motif lipase/hydrolase protein
  misc_feature (11)..(280): NCBI GI NO: 15242458 NR Description: GDSL-motif lipase/hydrolase protein
  misc_feature (11)..(280): NCBI GI NO: 34909504 NR Description: putative GDSL-motif lipase/hydrolase-like protein
  misc_feature (11)..(280): NCBI GI NO: 21618199 NR Description: GDSL-motif lipase/hydrolase-like protein
MLCLAISRCDLTQLLGFEKFIPPFANTSGSNILKGVNYASGGAGIRIETGSDMGATISLGLQLANHRVIVSEIATKLGSPDLARQYLEKCLYYLNIGNNDYMGNYFRPQLYPASRIYSLEQYAQALIEELSLNLQALHDLGARKYVLAGLGLIGCTPAVMHSHGTNGSCVEEHNAATYDYNNKLKALVDQFNNRFSANSKFILIHNGSNALDIAHGFLVSDAACCPSGCNPNQKPCNNRSDYVFWDEVHPTEAWNLVNAISAYNSTIDPAFTYPMNIKQLVDCEVKRELEFRNESTSQLSATE

SEQ ID NO: 10537 - protein, 251 aa, Glycine max
  peptide (1)..(251): Ceres Seq. ID no. 13594149
  misc_feature (1)..(207): Pfam Name: Pfam Description:  GDSL-like Lipase/Acylhydrolase
  misc_feature (1)..(228): NCBI GI NO: 15220514 NR Description: GDSL-motif lipase/hydrolase protein
  misc_feature (1)..(228): NCBI GI NO: 21592417 NR Description: lipase/hydrolase, putative [Arabidopsis thaliana]
  misc_feature (1)..(228): NCBI GI NO: 15220512 NR Description: GDSL-motif lipase/hydrolase protein
  misc_feature (1)..(228): NCBI GI NO: 21594055 NR Description: lipase/hydrolase, putative [Arabidopsis thaliana]
  misc_feature (1)..(228): NCBI GI NO: 7485419 NR Description: hypothetical protein F13C5
  misc_feature (1)..(228): NCBI GI NO: 15242458 NR Description: GDSL-motif lipase/hydrolase protein
  misc_feature (1)..(228): NCBI GI NO: 21553940 NR Description: GDSL-motif lipase/hydrolase-like protein
  misc_feature (1)..(228): NCBI GI NO: 18415211 NR Description: GDSL-motif lipase/hydrolase protein
  misc_feature (1)..(228): NCBI GI NO: 34909504 NR Description: putative GDSL-motif lipase/hydrolase-like protein
  misc_feature (1)..(228): NCBI GI NO: 21618199 NR Description: GDSL-motif lipase/hydrolase-like protein
MGATISLGLQLANHRVIVSEIATKLGSPDLARQYLEKCLYYLNIGNNDYMGNYFRPQLYPASRIYSLEQYAQALIEELSLNLQALHDLGARKYVLAGLGLIGCTPAVMHSHGTNGSCVEEHNAATYDYNNKLKALVDQFNNRFSANSKFILIHNGSNALDIAHGFLVSDAACCPSGCNPNQKPCNNRSDYVFWDEVHPTEAWNLVNAISAYNSTIDPAFTYPMNIKQLVDCEVKRELEFRNESTSQLSATE

SEQ ID NO: 10538 - protein, 202 aa, Glycine max
  peptide (1)..(202): Ceres Seq. ID no. 13594150
  misc_feature (1)..(158): Pfam Name: Pfam Description:  GDSL-like Lipase/Acylhydrolase
  misc_feature (1)..(179): NCBI GI NO: 15220514 NR Description: GDSL-motif lipase/hydrolase protein
  misc_feature (1)..(179): NCBI GI NO: 21592417 NR Description: lipase/hydrolase, putative [Arabidopsis thaliana]
  misc_feature (1)..(179): NCBI GI NO: 15220512 NR Description: GDSL-motif lipase/hydrolase protein
  misc_feature (1)..(179): NCBI GI NO: 21594055 NR Description: lipase/hydrolase, putative [Arabidopsis thaliana]
  misc_feature (1)..(179): NCBI GI NO: 7485419 NR Description: hypothetical protein F13C5
  misc_feature (1)..(179): NCBI GI NO: 15242458 NR Description: GDSL-motif lipase/hydrolase protein
  misc_feature (1)..(179): NCBI GI NO: 21553940 NR Description: GDSL-motif lipase/hydrolase-like protein
  misc_feature (1)..(179): NCBI GI NO: 18415211 NR Description: GDSL-motif lipase/hydrolase protein
  misc_feature (1)..(179): NCBI GI NO: 34909504 NR Description: putative GDSL-motif lipase/hydrolase-like protein
  misc_feature (1)..(179): NCBI GI NO: 21618199 NR Description: GDSL-motif lipase/hydrolase-like protein
MGNYFRPQLYPASRIYSLEQYAQALIEELSLNLQALHDLGARKYVLAGLGLIGCTPAVMHSHGTNGSCVEEHNAATYDYNNKLKALVDQFNNRFSANSKFILIHNGSNALDIAHGFLVSDAACCPSGCNPNQKPCNNRSDYVFWDEVHPTEAWNLVNAISAYNSTIDPAFTYPMNIKQLVDCEVKRELEFRNESTSQLSATE

SEQ ID NO: 10539 - DNA, 1607 bp, Glycine max
  misc_feature (1)..(1607): Ceres Seq. ID no. 15174513
aaaaaacaaacctgtatcatcttcttactctttcgtttgtctctcttctttccctttcccctctctttcgagggtttttctttttctttttttcccccttttttatttttccttttttttttttactttctcttgtttttcagttttgcttccatttcctttgaatccccatttcttgttcctctgcaactctaaccctagaattgaagatgcaaccacagaggttaaggcagcatgccatgttgcaaccatctctctaccaccaccccgctctccttactcctcctcagatagagcctatcttgagtggaaatctgccacctggctttgattcgagttcatgccgcagtgtttatgttggcaacattcatccccaggttacagattcccttcttcaagagcttttttcaactgcaggcgcccttgaaggatgtaaacttattaggaaagagaagtcatcctatggctttgtggactactttgatcgcagttctgctgcatttgccattgtaactctcaatgggaggaatatttttgggcagcctattaaggttaactgggcttatgctagcagccagagagaggatacctcaggtcactttaatatttttgtcggtgaccttagtcctgaggttacagatgcgacattgtatgcttgcttctctgtatatcctagttgttctgatgcaagggtaatgtgggatcagaagacaggccgttccaggggatttggatttgtttcttttcggaatcagcaggatgcccaaagtgctataaatgatttgactggaaaatggcttggaagtagacagattcgttgtaattgggcaaccaaaggggccagtgccagtgatgaaaagcagagttcggattcaaaaattgtcgtggagttgatcaatggatcatccgaagaaggccaggaaacaaccaatgatgacactcccgagaagaatcctcaatataccactgtttatgttggcaatcttgctccggaggttacttctgttgatctccatcaacattttcattctcttaatgccggaattattgaagatgttagggtgcaacgagacaaaggttttgggtttgtgagatacagtacccatgctgaagcagctcttgctatacagatgggtaatgcccgaattctatttggcaaacctatcaagtgttcatggggtagcaagcctactcctctgggaactgcctctactcctcttctgccaccttctgcaaatgtgccgggcttttctctggctggtcttgcagcatatgaacgtcaaatggctttgagtaaaatgggtggtgcacacacccttatgcatcaacaaggtcaacatgccctaaagcatgtagacatgggaatgggtgctactgggactggtttcgatgcaaggttccagaatgttgcaaccacccaacacctagtgtactatcagtaaaatgtgttggtgtgcaactctctgcgataaacaagggaggattaaagtatgtaagaatggttctacaataccgattatttcttccttccctgtccatctgctatgctaacttcatcctcccatttttttcttctgtgcttgtttatgtaatactacagttttttt

SEQ ID NO: 10540 - protein, 410 aa, Glycine max
  peptide (1)..(410): Ceres Seq. ID no. 15174514
  misc_feature (48)..(108): Pfam Name: a.k.a. RRM, RBD, or RNP domain Pfam Description: RNA recognition motif.
  misc_feature (1)..(409): NCBI GI NO: 6996560 NR Description: oligouridylate binding protein
  misc_feature (1)..(410): NCBI GI NO: 18394471 NR Description: oligouridylate binding protein (UBP1), putative
  misc_feature (1)..(410): NCBI GI NO: 15231783 NR Description: oligouridylate binding protein (UBP1), putative
  misc_feature (1)..(410): NCBI GI NO: 21593280 NR Description: oligouridylate binding protein, putative
  misc_feature (4)..(410): NCBI GI NO: 15221031 NR Description: oligouridylate binding protein (UBP1), putative
  misc_feature (27)..(195): NCBI GI NO: 25402821 NR Description: protein F1L3.2 [imported] - Arabidopsis thaliana
  misc_feature (193)..(320): NCBI GI NO: 25402821 NR Description: protein F1L3.2 [imported] - Arabidopsis thaliana
  misc_feature (308)..(410): NCBI GI NO: 25402821 NR Description: protein F1L3.2 [imported] - Arabidopsis thaliana
  misc_feature (4)..(410): NCBI GI NO: 30695647 NR Description: oligouridylate binding protein (UBP1), putative
  misc_feature (1)..(409): NCBI GI NO: 23237933 NR Description: putative oligouridylate binding protein
MQPQRLRQHAMLQPSLYHHPALLTPPQIEPILSGNLPPGFDSSSCRSVYVGNIHPQVTDSLLQELFSTAGALEGCKLIRKEKSSYGFVDYFDRSSAAFAIVTLNGRNIFGQPIKVNWAYASSQREDTSGHFNIFVGDLSPEVTDATLYACFSVYPSCSDARVMWDQKTGRSRGFGFVSFRNQQDAQSAINDLTGKWLGSRQIRCNWATKGASASDEKQSSDSKIVVELINGSSEEGQETTNDDTPEKNPQYTTVYVGNLAPEVTSVDLHQHFHSLNAGIIEDVRVQRDKGFGFVRYSTHAEAALAIQMGNARILFGKPIKCSWGSKPTPLGTASTPLLPPSANVPGFSLAGLAAYERQMALSKMGGAHTLMHQQGQHALKHVDMGMGATGTGFDARFQNVATTQHLVYYQ

SEQ ID NO: 10541 - protein, 400 aa, Glycine max
  peptide (1)..(400): Ceres Seq. ID no. 15174515
  misc_feature (38)..(98): Pfam Name: a.k.a. RRM, RBD, or RNP domain Pfam Description: RNA recognition motif.
  misc_feature (1)..(399): NCBI GI NO: 6996560 NR Description: oligouridylate binding protein
  misc_feature (1)..(400): NCBI GI NO: 18394471 NR Description: oligouridylate binding protein (UBP1), putative
  misc_feature (1)..(400): NCBI GI NO: 15231783 NR Description: oligouridylate binding protein (UBP1), putative
  misc_feature (1)..(400): NCBI GI NO: 21593280 NR Description: oligouridylate binding protein, putative
  misc_feature (1)..(400): NCBI GI NO: 15221031 NR Description: oligouridylate binding protein (UBP1), putative
  misc_feature (17)..(185): NCBI GI NO: 25402821 NR Description: protein F1L3.2 [imported] - Arabidopsis thaliana
  misc_feature (183)..(310): NCBI GI NO: 25402821 NR Description: protein F1L3.2 [imported] - Arabidopsis thaliana
  misc_feature (298)..(400): NCBI GI NO: 25402821 NR Description: protein F1L3.2 [imported] - Arabidopsis thaliana
  misc_feature (1)..(400): NCBI GI NO: 30695647 NR Description: oligouridylate binding protein (UBP1), putative
  misc_feature (1)..(399): NCBI GI NO: 23237933 NR Description: putative oligouridylate binding protein
MLQPSLYHHPALLTPPQIEPILSGNLPPGFDSSSCRSVYVGNIHPQVTDSLLQELFSTAGALEGCKLIRKEKSSYGFVDYFDRSSAAFAIVTLNGRNIFGQPIKVNWAYASSQREDTSGHFNIFVGDLSPEVTDATLYACFSVYPSCSDARVMWDQKTGRSRGFGFVSFRNQQDAQSAINDLTGKWLGSRQIRCNWATKGASASDEKQSSDSKIVVELINGSSEEGQETTNDDTPEKNPQYTTVYVGNLAPEVTSVDLHQHFHSLNAGIIEDVRVQRDKGFGFVRYSTHAEAALAIQMGNARILFGKPIKCSWGSKPTPLGTASTPLLPPSANVPGFSLAGLAAYERQMALSKMGGAHTLMHQQGQHALKHVDMGMGATGTGFDARFQNVATTQHLVYYQ

SEQ ID NO: 10542 - protein, 248 aa, Glycine max
  peptide (1)..(248): Ceres Seq. ID no. 15174516
  misc_feature (1)..(247): NCBI GI NO: 6996560 NR Description: oligouridylate binding protein
  misc_feature (1)..(248): NCBI GI NO: 18394471 NR Description: oligouridylate binding protein (UBP1), putative
  misc_feature (1)..(248): NCBI GI NO: 15231783 NR Description: oligouridylate binding protein (UBP1), putative
  misc_feature (1)..(248): NCBI GI NO: 21593280 NR Description: oligouridylate binding protein, putative
  misc_feature (1)..(248): NCBI GI NO: 15221031 NR Description: oligouridylate binding protein (UBP1), putative
  misc_feature (1)..(33): NCBI GI NO: 25402821 NR Description: protein F1L3.2 [imported] - Arabidopsis thaliana
  misc_feature (31)..(158): NCBI GI NO: 25402821 NR Description: protein F1L3.2 [imported] - Arabidopsis thaliana
  misc_feature (146)..(248): NCBI GI NO: 25402821 NR Description: protein F1L3.2 [imported] - Arabidopsis thaliana
  misc_feature (1)..(248): NCBI GI NO: 30695647 NR Description: oligouridylate binding protein (UBP1), putative
  misc_feature (1)..(247): NCBI GI NO: 23237933 NR Description: putative oligouridylate binding protein
MWDQKTGRSRGFGFVSFRNQQDAQSAINDLTGKWLGSRQIRCNWATKGASASDEKQSSDSKIVVELINGSSEEGQETTNDDTPEKNPQYTTVYVGNLAPEVTSVDLHQHFHSLNAGIIEDVRVQRDKGFGFVRYSTHAEAALAIQMGNARILFGKPIKCSWGSKPTPLGTASTPLLPPSANVPGFSLAGLAAYERQMALSKMGGAHTLMHQQGQHALKHVDMGMGATGTGFDARFQNVATTQHLVYYQ

SEQ ID NO: 10543 - DNA, 537 bp, Glycine max
  misc_feature (1)..(537): Ceres Seq. ID no. 13505109
acgaataagatgcacttccggtcatcattttaccaacatgcagattttgagttggtttctgaatataaatggacgccaaacggttcatccagctggttgaggagaagaagaagaaaattatggagagaaaggaagctcctttgaaatgggagcagaagctggaagctgctgctgaagctaaagagaggaagctgaaggttgcaaagcatacaaaaagatctggctctgatagtgacagcgattatgacagtgatgatgagagtacaaagacaagtaaaagatctcacaggaagcacagaaagcattctcactacgactctggtgaccatgagaaaaggaaagaaaaaagttccaaacggaaaacaaggaaatggtcctctgaatctagtgattatagtagtgatgactctgagagtagctttgaggaggaaagaagaagaaagaagaggcaaagcatgaagctgagagatcggggttcaagatcagattctagcaactatgattctactgctgatgaattaagcaagaggaaaagac

SEQ ID NO: 10544 - protein, 156 aa, Glycine max
  peptide (1)..(156): Ceres Seq. ID no. 13505110
  misc_feature (1)..(154): NCBI GI NO: 34895374 NR Description: P0698A04.25
  misc_feature (1)..(149): NCBI GI NO: 18379151 NR Description: expressed protein [Arabidopsis thaliana]
  misc_feature (10)..(155): NCBI GI NO: 17542856 NR Description: Putative nuclear protein, nematode specific
  misc_feature (15)..(144): NCBI GI NO: 34895374 NR Description: P0698A04.25
  misc_feature (11)..(134): NCBI GI NO: 39586156 NR Description: Hypothetical protein CBG15274
  misc_feature (21)..(155): NCBI GI NO: 1945332 NR Description: ORF YGR159c [Saccharomyces cerevisiae]
  misc_feature (10)..(155): NCBI GI NO: 23509121 NR Description: hypothetical protein [Plasmodium falciparum 3D7]
  misc_feature (10)..(153): NCBI GI NO: 20070795 NR Description: formin binding protein 3 [Homo sapiens]
  misc_feature (30)..(155): NCBI GI NO: 18401896 NR Description: expressed protein [Arabidopsis thaliana]
  misc_feature (30)..(155): NCBI GI NO: 27651999 NR Description: CAX-interacting protein 4 [Arabidopsis thaliana]
MDAKRFIQLVEEKKKKIMERKEAPLKWEQKLEAAAEAKERKLKVAKHTKRSGSDSDSDYDSDDESTKTSKRSHRKHRKHSHYDSGDHEKRKEKSSKRKTRKWSSESSDYSSDDSESSFEEERRRKKRQSMKLRDRGSRSDSSNYDSTADELSKRKR

SEQ ID NO: 10545 - protein, 139 aa, Glycine max
  peptide (1)..(139): Ceres Seq. ID no. 13505111
  misc_feature (1)..(137): NCBI GI NO: 34895374 NR Description: P0698A04.25
  misc_feature (1)..(132): NCBI GI NO: 18379151 NR Description: expressed protein [Arabidopsis thaliana]
  misc_feature (1)..(138): NCBI GI NO: 17542856 NR Description: Putative nuclear protein, nematode specific
  misc_feature (1)..(127): NCBI GI NO: 34895374 NR Description: P0698A04.25
  misc_feature (1)..(117): NCBI GI NO: 39586156 NR Description: Hypothetical protein CBG15274
  misc_feature (4)..(138): NCBI GI NO: 1945332 NR Description: ORF YGR159c [Saccharomyces cerevisiae]
  misc_feature (1)..(138): NCBI GI NO: 23509121 NR Description: hypothetical protein [Plasmodium falciparum 3D7]
  misc_feature (1)..(136): NCBI GI NO: 20070795 NR Description: formin binding protein 3 [Homo sapiens]
  misc_feature (13)..(138): NCBI GI NO: 18401896 NR Description: expressed protein [Arabidopsis thaliana]
  misc_feature (13)..(138): NCBI GI NO: 27651999 NR Description: CAX-interacting protein 4 [Arabidopsis thaliana]
MERKEAPLKWEQKLEAAAEAKERKLKVAKHTKRSGSDSDSDYDSDDESTKTSKRSHRKHRKHSHYDSGDHEKRKEKSSKRKTRKWSSESSDYSSDDSESSFEEERRRKKRQSMKLRDRGSRSDSSNYDSTADELSKRKR

SEQ ID NO: 10546 - DNA, 1265 bp, Glycine max
  misc_feature (1)..(1265): Ceres Seq. ID no. 14307496
aatgaattctcgttaaaaatattaaccatgtaggaaaaataattgcttgatatggttattatttataatatattagtttaaataaccactcctagtggttattgtcccttgatggtaaatgtttttatcaagagttctgtttctgaaattctcccttttattatatggttctttttacagggttgcttgtgctataaattctgattaactgatccttgttaactcaatgctgtcatcattcatcaggaagatacacagacctttcacatagtttccttgtgctgtctgcttaagatatgacaaaatttcagtttcctattacagggctcgagtttggttgtaagctcttatgatggtgaagacatacttgtatcatttggaggatacaatggacattacaataatgaggtctatgtccttaaaccaagccacaaatcaaccttgcaatcaaaactaatagaaaaccccattccatacagtgtttctggtgcgcataatgccgcaaatgctacccgagatctggattctgaagcaggccacaaagggattatcaaggaacttgtcatggacagtgttgattcaataaaatcaaaaggtgatgttataacagttctaaaggtcgagaaagaagatttggaatcatcgctctacaaagagaagttgcaaactcttcaactaaagcaagagctttcagaaactaaaactcgtaactctgatctttgcaaggaactccaatcaatacgtggtcagcttgcttctgagcagtcaaggtgtttcaaacttgaggtggaggttgctgaattaagtcagaagctccagacaattgggacactacagaaggaacttgagctcctgcagcggcaaaaagctgcatccgagctggctgccctgaatgcaaagcaaaagcagggttcaggtggtgtatggggttggcttgctggtgctcctccccctacccagaaagaagatgatgggtgatcgcgtgattaaactaactggattaccatgctgcatttagtttcattagcccatttttacatccaatacacttattttttttattcaattctttttttggtgaagggaataaaatttagctttctgtttaggaaaaaccccccgtaggggtcttgcaattgcagtaatacatatttcacatattctgtaattttatttacttgttcaggacagtgcatgttgttgttcccgccaatttgctgatttgtttcgaatccactattgaatgaaaagataagtattcttcc

SEQ ID NO: 10547 - protein, 137 aa, Glycine max
  peptide (1)..(137): Ceres Seq. ID no. 14307497
  misc_feature (1)..(136): NCBI GI NO: 7596769 NR Description: unknown protein [Arabidopsis thaliana]
  misc_feature (1)..(136): NCBI GI NO: 30679500 NR Description: acyl CoA binding protein (ACBP) family
  misc_feature (1)..(130): NCBI GI NO: 22327105 NR Description: acyl CoA binding protein (ACBP) family
  misc_feature (1)..(129): NCBI GI NO: 40714674 NR Description: putative transcription factor
  misc_feature (1)..(122): NCBI GI NO: 15237715 NR Description: Kelch repeat-containing protein
  misc_feature (1)..(122): NCBI GI NO: 15724206 NR Description: AT5g04420/T32M21_20 [Arabidopsis thaliana]
MDSVDSIKSKGDVITVLKVEKEDLESSLYKEKLQTLQLKQELSETKTRNSDLCKELQSIRGQLASEQSRCFKLEVEVAELSQKLQTIGTLQKELELLQRQKAASELAALNAKQKQGSGGVWGWLAGAPPPTQKEDDG

SEQ ID NO: 10548 - DNA, 1481 bp, Glycine max
  misc_feature (1)..(1481): Ceres Seq. ID no. 15169244
ggttcacatgtcacatatacactacatcttgttctaaaaagccatcatttgctatcctgaggaaacttccattctttccacaatgagcaaacccaaaactcaaagaaaaccaaccattaccaaacatgtcagccaaaaccaaaaccaagaggcacagaaaacagagaaacaaccttcatgggtggtgagaggcctactagcttgtagaaatgtgcaaatccaacaaaatcagccgcagcagaaggaagcaaaatcacccccagaagcaaaagaaaacaggaaaaaacaggaacatagaaagctgcaagaggaacgagtcccagaagaaaacagcaagaaatccaagaagatgaaatgctcaggatcgctttgtaacaacaccaagatcactgcaaagcctgacacagcaaccccagatgttcacaagaaaaggttgttactaagtgggtgcaacaacaagaacgatgcttccagcagatccatgaaagcacctcttaatgaactcaatggaaccgtgtcagcctcttcttcttctttgtcagcatcttcaacttcttctggcggtggttctttcaggggaatgccattcaggagactctccggttgttatgagtgtagaatggtggtagacccagttcttggcttcactagagacccttctctaaggagtagcatttgttcttgccctgactgtggtgagatcatgaaagctgaaagcttggaacatcaccaggctgtcaaacatgcagtttcagaactgggtccagaagacaccagcaaaaacatagttgagataatattccactccagctggctgaagaagcaatctccagtgtgcaaaatagaccgcatcctcaaggtccacaacactcagaaaacaataaccaaattcgaagagtacagagactccataaaagccaaggccacaaagctctccaagaagcaccctcgttgcatagcagacggcaacgagcttctcaggttccactgcacctccttcaattgctccctgggcctaaacggttcctccaacttgtgcaactcgataccacagtgtaacgtgtgcagcataatcaagcacgggttcaaggtcaccggaggagccggtatcttgacgacggcgacgagtggaaaggctcacgacaaggcggcgtgtgtggaggagagtgaggagaagagggcaatgctggtttgtagagtgatagcaggcagggtgaagaagaatgcagaaggtggcatggaggagtatgattctgttgctgttgccggtgctgttggagcttattctaatttggatgagttgcttgtgttcaaccctaaagctatattgccttgctttgttgtaatctatagaggcttttgaaatgtgctgtgagttgaattaatttcgtttcctttgttttgttaattaactcttttaaaagttgtagcatcttcttgtgttaaggatgagtatttgatcggtctcagatcatttttgt

SEQ ID NO: 10549 - protein, 426 aa, Glycine max
  peptide (1)..(426): Ceres Seq. ID no. 15169245
  misc_feature (20)..(424): NCBI GI NO: 38345520 NR Description: OSJNBa0039K24.23
  misc_feature (1)..(424): NCBI GI NO: 5777616 NR Description: CAA30374.1 protein [Oryza sativa]
  misc_feature (45)..(380): NCBI GI NO: 15222333 NR Description: expressed protein [Arabidopsis thaliana]
  misc_feature (356)..(424): NCBI GI NO: 15222333 NR Description: expressed protein [Arabidopsis thaliana]
  misc_feature (42)..(424): NCBI GI NO: 9802582 NR Description: T2E6.3 [Arabidopsis thaliana]
  misc_feature (42)..(425): NCBI GI NO: 15220992 NR Description: reverse transcriptase-related
  misc_feature (1)..(422): NCBI GI NO: 18416951 NR Description: expressed protein [Arabidopsis thaliana]
  misc_feature (93)..(422): NCBI GI NO: 15239695 NR Description: expressed protein [Arabidopsis thaliana]
  misc_feature (200)..(422): NCBI GI NO: 34910152 NR Description: B1070A12.19
  misc_feature (223)..(424): NCBI GI NO: 38346001 NR Description: OSJNBa0073L13.11
MSKPKTQRKPTITKHVSQNQNQEAQKTEKQPSWVVRGLLACRNVQIQQNQPQQKEAKSPPEAKENRKKQEHRKLQEERVPEENSKKSKKMKCSGSLCNNTKITAKPDTATPDVHKKRLLLSGCNNKNDASSRSMKAPLNELNGTVSASSSSLSASSTSSGGGSFRGMPFRRLSGCYECRMVVDPVLGFTRDPSLRSSICSCPDCGEIMKAESLEHHQAVKHAVSELGPEDTSKNIVEIIFHSSWLKKQSPVCKIDRILKVHNTQKTITKFEEYRDSIKAKATKLSKKHPRCIADGNELLRFHCTSFNCSLGLNGSSNLCNSIPQCNVCSIIKHGFKVTGGAGILTTATSGKAHDKAACVEESEEKRAMLVCRVIAGRVKKNAEGGMEEYDSVAVAGAVGAYSNLDELLVFNPKAILPCFVVIYRGF

SEQ ID NO: 10550 - protein, 337 aa, Glycine max
  peptide (1)..(337): Ceres Seq. ID no. 15169246
  misc_feature (1)..(335): NCBI GI NO: 38345520 NR Description: OSJNBa0039K24.23
  misc_feature (1)..(335): NCBI GI NO: 5777616 NR Description: CAA30374.1 protein [Oryza sativa]
  misc_feature (1)..(291): NCBI GI NO: 15222333 NR Description: expressed protein [Arabidopsis thaliana]
  misc_feature (267)..(335): NCBI GI NO: 15222333 NR Description: expressed protein [Arabidopsis thaliana]
  misc_feature (1)..(335): NCBI GI NO: 9802582 NR Description: T2E6.3 [Arabidopsis thaliana]
  misc_feature (1)..(336): NCBI GI NO: 15220992 NR Description: reverse transcriptase-related
  misc_feature (1)..(333): NCBI GI NO: 18416951 NR Description: expressed protein [Arabidopsis thaliana]
  misc_feature (4)..(333): NCBI GI NO: 15239695 NR Description: expressed protein [Arabidopsis thaliana]
  misc_feature (111)..(333): NCBI GI NO: 34910152 NR Description: B1070A12.19
  misc_feature (134)..(335): NCBI GI NO: 38346001 NR Description: OSJNBa0073L13.11
MKCSGSLCNNTKITAKPDTATPDVHKKRLLLSGCNNKNDASSRSMKAPLNELNGTVSASSSSLSASSTSSGGGSFRGMPFRRLSGCYECRMVVDPVLGFTRDPSLRSSICSCPDCGEIMKAESLEHHQAVKHAVSELGPEDTSKNIVEIIFHSSWLKKQSPVCKIDRILKVHNTQKTITKFEEYRDSIKAKATKLSKKHPRCIADGNELLRFHCTSFNCSLGLNGSSNLCNSIPQCNVCSIIKHGFKVTGGAGILTTATSGKAHDKAACVEESEEKRAMLVCRVIAGRVKKNAEGGMEEYDSVAVAGAVGAYSNLDELLVFNPKAILPCFVVIYRGF

SEQ ID NO: 10551 - protein, 293 aa, Glycine max
  peptide (1)..(293): Ceres Seq. ID no. 15169247
  misc_feature (1)..(291): NCBI GI NO: 38345520 NR Description: OSJNBa0039K24.23
  misc_feature (1)..(291): NCBI GI NO: 5777616 NR Description: CAA30374.1 protein [Oryza sativa]
  misc_feature (1)..(247): NCBI GI NO: 15222333 NR Description: expressed protein [Arabidopsis thaliana]
  misc_feature (223)..(291): NCBI GI NO: 15222333 NR Description: expressed protein [Arabidopsis thaliana]
  misc_feature (1)..(291): NCBI GI NO: 9802582 NR Description: T2E6.3 [Arabidopsis thaliana]
  misc_feature (1)..(292): NCBI GI NO: 15220992 NR Description: reverse transcriptase-related
  misc_feature (1)..(289): NCBI GI NO: 18416951 NR Description: expressed protein [Arabidopsis thaliana]
  misc_feature (1)..(289): NCBI GI NO: 15239695 NR Description: expressed protein [Arabidopsis thaliana]
  misc_feature (67)..(289): NCBI GI NO: 34910152 NR Description: B1070A12.19
  misc_feature (90)..(291): NCBI GI NO: 38346001 NR Description: OSJNBa0073L13.11
MKAPLNELNGTVSASSSSLSASSTSSGGGSFRGMPFRRLSGCYECRMVVDPVLGFTRDPSLRSSICSCPDCGEIMKAESLEHHQAVKHAVSELGPEDTSKNIVEIIFHSSWLKKQSPVCKIDRILKVHNTQKTITKFEEYRDSIKAKATKLSKKHPRCIADGNELLRFHCTSFNCSLGLNGSSNLCNSIPQCNVCSIIKHGFKVTGGAGILTTATSGKAHDKAACVEESEEKRAMLVCRVIAGRVKKNAEGGMEEYDSVAVAGAVGAYSNLDELLVFNPKAILPCFVVIYRGF

SEQ ID NO: 10552 - DNA, 2206 bp, Glycine max
  misc_feature (1)..(2206): Ceres Seq. ID no. 15176563
ggtatcaccccagttcaaagaaacttgacaccgattagattaggggcttcgaacaaggagccccgaaacccaaaccctaatctgattcgctttcgattatggcgtctgagagcgcttctcgatcgagttccgcggccgattcgtacattgggagcttgataagcttgacctctaagagtgagatcagatacgaaggtattctctacaacatcaacaccgaagagtccagtattggcctcagaaacgtgcggtcttttggaacagaaggaaggaaaaaggatggcccacaaatccctcccagtgacaaggtttatgagtatatacttttccgtgggactgacatcaaggatttacaggttaaatcttctccacctgtccagcctactccacaagtcaacaatgacccagctattattcagtctcactatcctttcccggtgaccacatctacaagtttgccttctgctgtaagtgggtctttgactgatcctagctctcataccacacaacttggacttcccgggtcaaattttcaagggcccttacctttgtatcaacctggagggaacataggatcgtggggagcttctccacctgctcctaatgcaaatggtggtcggcttgctatgccaccaatgtattggcaaggatattatggtgccccaaatgggcttcctcaattacaccaacaatctttgcttcaaccgccacctggtttatcaatgccttcatctatgcagcagccaatgcagtatcccaattttaccccccctttacctactgtatcttctaatttgcctgaattgccatcatctttgctgcctgtgagtgctagtacccctagtgtaacatctgcttccttgcctcctaatttgcctccagcaccttctgctttgcctcctgctccttcagccttgcctcctgctccttctgctttatctcccgttccttctgcaacgcttgcttctgaaatttttccagtatcagtagcaaataaggcacccaatgtttcaacttccgcagccatgttagcttctaacttaccatcactggctttgctgaccaatcctgctcgagatatcaatgctatagtgccggccatttccagcaaatcgaatgcaatttcaggttcaagcttgccctaccaatctgtatcccagttgtctcctgcagttgttgaatcatcgacttctatccacacagaaacatcagcaccttctttggtaaccccaggacaattattgaagcctggaccaattatagtttcttcggctcagccttcacaagcacctcataaggatgttgaagttgttcaggtatcatcaacatcatctcctgagccatctgtaccagtttctgtggaaactcaaccaccaatactgccattgccagtaacttcacggcccaatcacaggcctggtggagctcctacccaaactcatcatcatggctatagttatagaggacgtggaagaggaagaggaactgggggtttccgctcagtcacaaaattcactgaagattttgatttcacagcaatgaatgagaagttcaaaaaggatgaagtatggggtcatcttggtaaaagtaagtctcattcaaaagacaataacggggaagaaaatgcctttgatgaagattaccaagatgaagacaatgacgatgtatcaaacattgaggttaagcctgtttataacaaggacgacttctttgactcgctctcttccaacatgcatggtaatgcttcacagaatggaaggactcgatactccgaacaaatcaagattgatactgagacgtttggcgattatgtgaggtaccatggtggtcgtgggggccgtggccctggccgtggtggacgtactcgaggtggttattatggaagaggaggagggtatggctactctggacgagggaggggacgcggcatgccaagtcgcactttgtaggtggcagttaatgtttagtcatgaacatggtggagaacaagagcctaggtagccttccattaaagaaccataagtatgttagagattatgcttcattgttgtgttgcctgttatgtgtttgtttcacagaataagtaggacatttttttttctctcgtcatattaccctcttgttactcctctaccacttggtttgatggaaagatgtttgtacaacatattattttagcttatatcaacaggcagaagtttagact

SEQ ID NO: 10553 - protein, 616 aa, Glycine max
  peptide (1)..(616): Ceres Seq. ID no. 15176564
  misc_feature (193)..(440): Pfam Name: BLLF1 Pfam Description: Herpes virus major outer envelope glycoprotein
  misc_feature (1)..(616): NCBI GI NO: 13676413 NR Description: hypothetical protein [Glycine max]
  misc_feature (2)..(615): NCBI GI NO: 18395763 NR Description: expressed protein [Arabidopsis thaliana]
  misc_feature (2)..(615): NCBI GI NO: 13605704 NR Description: At1g26110/F28B23_21 [Arabidopsis thaliana]
  misc_feature (2)..(615): NCBI GI NO: 12320748 NR Description: unknown protein [Arabidopsis thaliana]
  misc_feature (116)..(615): NCBI GI NO: 20260584 NR Description: unknown protein [Arabidopsis thaliana]
  misc_feature (388)..(614): NCBI GI NO: 34894190 NR Description: P0439B06.16
  misc_feature (16)..(605): NCBI GI NO: 28881143 NR Description: conserved hypothetical protein [Neurospora crassa]
  misc_feature (343)..(614): NCBI GI NO: 28502802 NR Description: Similar to DKFZP434D1335 protein [Danio rerio]
  misc_feature (11)..(167): NCBI GI NO: 28502802 NR Description: Similar to DKFZP434D1335 protein [Danio rerio]
  misc_feature (16)..(322): NCBI GI NO: 38108398 NR Description: hypothetical protein MG02405.4
MASESASRSSSAADSYIGSLISLTSKSEIRYEGILYNINTEESSIGLRNVRSFGTEGRKKDGPQIPPSDKVYEYILFRGTDIKDLQVKSSPPVQPTPQVNNDPAIIQSHYPFPVTTSTSLPSAVSGSLTDPSSHTTQLGLPGSNFQGPLPLYQPGGNIGSWGASPPAPNANGGRLAMPPMYWQGYYGAPNGLPQLHQQSLLQPPPGLSMPSSMQQPMQYPNFTPPLPTVSSNLPELPSSLLPVSASTPSVTSASLPPNLPPAPSALPPAPSALPPAPSALSPVPSATLASEIFPVSVANKAPNVSTSAAMLASNLPSLALLTNPARDINAIVPAISSKSNAISGSSLPYQSVSQLSPAVVESSTSIHTETSAPSLVTPGQLLKPGPIIVSSAQPSQAPHKDVEVVQVSSTSSPEPSVPVSVETQPPILPLPVTSRPNHRPGGAPTQTHHHGYSYRGRGRGRGTGGFRSVTKFTEDFDFTAMNEKFKKDEVWGHLGKSKSHSKDNNGEENAFDEDYQDEDNDDVSNIEVKPVYNKDDFFDSLSSNMHGNASQNGRTRYSEQIKIDTETFGDYVRYHGGRGGRGPGRGGRTRGGYYGRGGGYGYSGRGRGRGMPSRTL

SEQ ID NO: 10554 - protein, 440 aa, Glycine max
  peptide (1)..(440): Ceres Seq. ID no. 15176565
  misc_feature (17)..(264): Pfam Name: BLLF1 Pfam Description: Herpes virus major outer envelope glycoprotein
  misc_feature (1)..(440): NCBI GI NO: 13676413 NR Description: hypothetical protein [Glycine max]
  misc_feature (1)..(439): NCBI GI NO: 18395763 NR Description: expressed protein [Arabidopsis thaliana]
  misc_feature (1)..(439): NCBI GI NO: 13605704 NR Description: At1g26110/F28B23_21 [Arabidopsis thaliana]
  misc_feature (1)..(439): NCBI GI NO: 12320748 NR Description: unknown protein [Arabidopsis thaliana]
  misc_feature (1)..(439): NCBI GI NO: 20260584 NR Description: unknown protein [Arabidopsis thaliana]
  misc_feature (212)..(438): NCBI GI NO: 34894190 NR Description: P0439B06.16
  misc_feature (1)..(429): NCBI GI NO: 28881143 NR Description: conserved hypothetical protein [Neurospora crassa]
  misc_feature (167)..(438): NCBI GI NO: 28502802 NR Description: Similar to DKFZP434D1335 protein [Danio rerio]
  misc_feature (1)..(146): NCBI GI NO: 38108398 NR Description: hypothetical protein MG02405.4
  misc_feature (1)..(141): NCBI GI NO: 11359079 NR Description: hypothetical protein - fission yeast
MPPMYWQGYYGAPNGLPQLHQQSLLQPPPGLSMPSSMQQPMQYPNFTPPLPTVSSNLPELPSSLLPVSASTPSVTSASLPPNLPPAPSALPPAPSALPPAPSALSPVPSATLASEIFPVSVANKAPNVSTSAAMLASNLPSLALLTNPARDINAIVPAISSKSNAISGSSLPYQSVSQLSPAVVESSTSIHTETSAPSLVTPGQLLKPGPIIVSSAQPSQAPHKDVEVVQVSSTSSPEPSVPVSVETQPPILPLPVTSRPNHRPGGAPTQTHHHGYSYRGRGRGRGTGGFRSVTKFTEDFDFTAMNEKFKKDEVWGHLGKSKSHSKDNNGEENAFDEDYQDEDNDDVSNIEVKPVYNKDDFFDSLSSNMHGNASQNGRTRYSEQIKIDTETFGDYVRYHGGRGGRGPGRGGRTRGGYYGRGGGYGYSGRGRGRGMPSRTL

SEQ ID NO: 10555 - protein, 437 aa, Glycine max
  peptide (1)..(437): Ceres Seq. ID no. 15176566
  misc_feature (14)..(261): Pfam Name: BLLF1 Pfam Description: Herpes virus major outer envelope glycoprotein
  misc_feature (1)..(437): NCBI GI NO: 13676413 NR Description: hypothetical protein [Glycine max]
  misc_feature (1)..(436): NCBI GI NO: 18395763 NR Description: expressed protein [Arabidopsis thaliana]
  misc_feature (1)..(436): NCBI GI NO: 13605704 NR Description: At1g26110/F28B23_21 [Arabidopsis thaliana]
  misc_feature (1)..(436): NCBI GI NO: 12320748 NR Description: unknown protein [Arabidopsis thaliana]
  misc_feature (1)..(436): NCBI GI NO: 20260584 NR Description: unknown protein [Arabidopsis thaliana]
  misc_feature (209)..(435): NCBI GI NO: 34894190 NR Description: P0439B06.16
  misc_feature (1)..(426): NCBI GI NO: 28881143 NR Description: conserved hypothetical protein [Neurospora crassa]
  misc_feature (164)..(435): NCBI GI NO: 28502802 NR Description: Similar to DKFZP434D1335 protein [Danio rerio]
  misc_feature (1)..(143): NCBI GI NO: 38108398 NR Description: hypothetical protein MG02405.4
  misc_feature (1)..(138): NCBI GI NO: 11359079 NR Description: hypothetical protein - fission yeast
MYWQGYYGAPNGLPQLHQQSLLQPPPGLSMPSSMQQPMQYPNFTPPLPTVSSNLPELPSSLLPVSASTPSVTSASLPPNLPPAPSALPPAPSALPPAPSALSPVPSATLASEIFPVSVANKAPNVSTSAAMLASNLPSLALLTNPARDINAIVPAISSKSNAISGSSLPYQSVSQLSPAVVESSTSIHTETSAPSLVTPGQLLKPGPIIVSSAQPSQAPHKDVEVVQVSSTSSPEPSVPVSVETQPPILPLPVTSRPNHRPGGAPTQTHHHGYSYRGRGRGRGTGGFRSVTKFTEDFDFTAMNEKFKKDEVWGHLGKSKSHSKDNNGEENAFDEDYQDEDNDDVSNIEVKPVYNKDDFFDSLSSNMHGNASQNGRTRYSEQIKIDTETFGDYVRYHGGRGGRGPGRGGRTRGGYYGRGGGYGYSGRGRGRGMPSRTL

SEQ ID NO: 10556 - DNA, 809 bp, Glycine max
  misc_feature (1)..(809): Ceres Seq. ID no. 15225697
taccgggccccccctcgagtcagctacgtaggccccccccccccttgaaatgttggaagtcaataaaaatttgactgaatttgctatccatggaaacagaatttccttaagttgtttaagcagaataagaaagattttggcaaggaaccaaaaagaagcaaatgaaagagagccaaataagctcaagacggaattatacagacttcaatatgaacaaaagaagattgtcgatgctaaagaaaagctcaaagttcaagaaaaggaaattaacaaagccattgaaactaaggatactttaattaaagatattgaaaaattcaaaaacaatgaaacctataaaaggaaggctttacaagataagattgaagaacaaaagagtgaattatctcgaaagaaaggttttatcagtgataaaaaagatgaattagaaaagatgaaaatcaagcaccaagctgaaatggcagtgttaaaaggggaatatgaaggagccgtgaaaaagaagactgacttagatggtgatttaaagcaaatgcaggaatcaaaggagaagatggaagaggattatatggcaactatcaatcacttgaagggtcaaatcacaaatctcaagaaaaagggagaagaccttaagaagaaagaacaatctcttaatgaagagtttagaatgctcaagatgcattaatattcatattaatcaaaatgaaaacttaagttggtcatttatagatctgttgttattttttttacttttattgtatatggtgaattagttacctttcatactctctaaattcatgaatcaaactatg

SEQ ID NO: 10557 - protein, 210 aa, Glycine max
  peptide (1)..(210): Ceres Seq. ID no. 15225698
  misc_feature (31)..(205): Pfam Name: Pfam Description:  Myosin tail
  misc_feature (34)..(200): NCBI GI NO: 24641414 NR Description: CG32662-PA [Drosophila melanogaster]
  misc_feature (29)..(205): NCBI GI NO: 37595288 NR Description: M protein [Streptococcus pyogenes]
  misc_feature (29)..(205): NCBI GI NO: 34485692 NR Description: M protein [Streptococcus pyogenes]
  misc_feature (29)..(205): NCBI GI NO: 34485690 NR Description: M protein [Streptococcus pyogenes]
  misc_feature (29)..(205): NCBI GI NO: 37595224 NR Description: M protein [Streptococcus pyogenes]
  misc_feature (32)..(208): NCBI GI NO: 12718845 NR Description: enterophilin-2L [Cavia porcellus]
  misc_feature (1)..(203): NCBI GI NO: 37181945 NR Description: SLAP [Homo sapiens]
MLEVNKNLTEFAIHGNRISLSCLSRIRKILARNQKEANEREPNKLKTELYRLQYEQKKIVDAKEKLKVQEKEINKAIETKDTLIKDIEKFKNNETYKRKALQDKIEEQKSELSRKKGFISDKKDELEKMKIKHQAEMAVLKGEYEGAVKKKTDLDGDLKQMQESKEKMEEDYMATINHLKGQITNLKKKGEDLKKKEQSLNEEFRMLKMH

SEQ ID NO: 10558 - DNA, 1201 bp, Glycine max
  misc_feature (1)..(1201): Ceres Seq. ID no. 15171984
tgaaagactctagcaacaatgaatctgcaggccaactttttgtggatactgctgtatattcacggaatcgttgttttcgtctccctctttcttcaaaagcaggaaaaagatcagttcttctgccaacaaagcgatttaagtgcaaggacttgggtgaagaagacatattcatggcttccttgatctgcaatatggatgttgattgcaaaacgtatctggtctgcaaaacagacttagattgtgtgaaaactatgcattttgatacagaggagaatagtaatgttagtaattccacccaaattccttcagaatttacattgggtactagcacaagtgatgtttcaactacatacttcatgggaaagtcaccattcccatttctggacaaatttatactgtctgttgcctctgtcgggaatataccaggaaacattcatagctggtattatttctcggaatttggattgatggtctacagcatgacaaaaaatagatactgtgagcgaattggcagacagcataaaagcaataatgtgatatatgtggttgatctacgaatggcagtgtattatcagaaatgtcatgatcctgactgcagaggttatcgatctccctcacgtcaaatcccagttcatgtgttctccaatccttcagatgtaattggttcctttgggttgttagatgatgaacagccagtagatgataagttgagacatcaacttgatgacaacaaggagcaaaatcttttacaattcaaagacactgttgaggacaactccaatgattcatggtggctagaagccataagagttgtcgaggatatggaaaataagcaaacaaagacagaggaggtaattgatgaagatgaggagtggtggcaggctgtagaaagtactgcatcccaggttgaacttacctgctccagtcaacaagaactctgcgcaatctaagtcctttggggatttgtacaaagaattttctacttgtgggatcaataaatacttcagataactaaaaaaccagagaagcagcatgttgcacttatctgctgcaaacaaccagaggatcttgtgaattgattctcttgaaggataaaaaaatgctcttgcagaggattcacattcacacacgagctgtaggagcttctctgtaagctgtaaccttttgctatgtatagataaattatcaagccagttctttt

SEQ ID NO: 10559 - protein, 315 aa, Glycine max
  peptide (1)..(315): Ceres Seq. ID no. 15171985
  misc_feature (6)..(200): NCBI GI NO: 15237266 NR Description: hypothetical protein [Arabidopsis thaliana]
  misc_feature (5)..(287): NCBI GI NO: 22749373 NR Description: hypothetical protein FLJ33167 [Homo sapiens]
  misc_feature (12)..(287): NCBI GI NO: 40675451 NR Description: 1700029A22Rik protein [Mus musculus]
  misc_feature (5)..(212): NCBI GI NO: 34878429 NR Description: similar to hypothetical protein FLJ33167
KDSSNNESAGQLFVDTAVYSRNRCFRLPLSSKAGKRSVLLPTKRFKCKDLGEEDIFMASLICNMDVDCKTYLVCKTDLDCVKTMHFDTEENSNVSNSTQIPSEFTLGTSTSDVSTTYFMGKSPFPFLDKFILSVASVGNIPGNIHSWYYFSEFGLMVYSMTKNRYCERIGRQHKSNNVIYVVDLRMAVYYQKCHDPDCRGYRSPSRQIPVHVFSNPSDVIGSFGLLDDEQPVDDKLRHQLDDNKEQNLLQFKDTVEDNSNDSWWLEAIRVVEDMENKQTKTEEVIDEDEEWWQAVESTASQVELTCSSQQELCAI

SEQ ID NO: 10560 - protein, 259 aa, Glycine max
  peptide (1)..(259): Ceres Seq. ID no. 15171986
  misc_feature (1)..(144): NCBI GI NO: 15237266 NR Description: hypothetical protein [Arabidopsis thaliana]
  misc_feature (1)..(231): NCBI GI NO: 22749373 NR Description: hypothetical protein FLJ33167 [Homo sapiens]
  misc_feature (1)..(231): NCBI GI NO: 40675451 NR Description: 1700029A22Rik protein [Mus musculus]
  misc_feature (1)..(156): NCBI GI NO: 34878429 NR Description: similar to hypothetical protein FLJ33167
MASLICNMDVDCKTYLVCKTDLDCVKTMHFDTEENSNVSNSTQIPSEFTLGTSTSDVSTTYFMGKSPFPFLDKFILSVASVGNIPGNIHSWYYFSEFGLMVYSMTKNRYCERIGRQHKSNNVIYVVDLRMAVYYQKCHDPDCRGYRSPSRQIPVHVFSNPSDVIGSFGLLDDEQPVDDKLRHQLDDNKEQNLLQFKDTVEDNSNDSWWLEAIRVVEDMENKQTKTEEVIDEDEEWWQAVESTASQVELTCSSQQELCAI

SEQ ID NO: 10561 - protein, 252 aa, Glycine max
  peptide (1)..(252): Ceres Seq. ID no. 15171987
  misc_feature (1)..(137): NCBI GI NO: 15237266 NR Description: hypothetical protein [Arabidopsis thaliana]
  misc_feature (1)..(224): NCBI GI NO: 22749373 NR Description: hypothetical protein FLJ33167 [Homo sapiens]
  misc_feature (1)..(224): NCBI GI NO: 40675451 NR Description: 1700029A22Rik protein [Mus musculus]
  misc_feature (1)..(149): NCBI GI NO: 34878429 NR Description: similar to hypothetical protein FLJ33167
MDVDCKTYLVCKTDLDCVKTMHFDTEENSNVSNSTQIPSEFTLGTSTSDVSTTYFMGKSPFPFLDKFILSVASVGNIPGNIHSWYYFSEFGLMVYSMTKNRYCERIGRQHKSNNVIYVVDLRMAVYYQKCHDPDCRGYRSPSRQIPVHVFSNPSDVIGSFGLLDDEQPVDDKLRHQLDDNKEQNLLQFKDTVEDNSNDSWWLEAIRVVEDMENKQTKTEEVIDEDEEWWQAVESTASQVELTCSSQQELCAI

SEQ ID NO: 10562 - DNA, 1465 bp, Glycine max
  misc_feature (1)..(1465): Ceres Seq. ID no. 14308103
attgaaatctgataccatgaacaaagatgctatgatcagatcagatgatgctgaatttggagaagcagatcaagatgagcaaaaatatgtagatccattggataaatttctccctcccccatcaaaaactaaatgctctgaggagttacaaagaaaaataaacaaattcctggagtataagaaggctggaaaaagttttaatgcagaagttcgcaacaggaaggactatcgaaaccctgacttcttactgcatgcagtgaggtaccaggatattgatcaaatagggtcttgcttcagtaaagatgtatttgaccctcatggatatgatccaagtgatttctatgatgaaatagaagctgatatgaggcgcgaaagtgagaggaaagagcaagaaaagaagaaagcacagaaggttgaatttatttcggggggtgcacaaccgggaattgtagctagcgcttctaggattagcatgcccattgcaggtgcttctgctgtgactgcaagtggtttgcctttggtgcctcctacagccgattctattaatcgggatggtagacagaataaaaaatcaaaatgggataaggtattcatctaaacaaatgcaatagcaactttagggacattcttcattgtgcttaagaaatttttgtgaaagataggtggatggtgataaaaaaaatcctctgccctctgcggggcaggattctgtatctactattggggttcatgcagccattttatctgctgctaatgccggcggtggatatatgcaatttgcgtaagttgataaacaaccatgaactttcatatgcattctacttctatcttttgattctggttatgctttcaatttctaagatttgattttgggttgacacgttttattgtgtagacattttttaggtgttcgcatttttccaatttgaacttatcaaatctactgaaaaaactagaatctaaattaacatattacttgcagagatttccaaatttaaatattgattttgaatagtcagtcatctatacttaagaaacgtgtttgatgttatttcatgaaattgacagtcaaatggatggaatatccagttctgacaattggcaattagctgatatagttatgtttgatacaataatctcattttgttgaacaggcaacaaaaacgacgggaggctgaggagaaaagatccactgaaaggaggttagagagaaggtcgtgagccattcagtgtggggctgtagtatcgaacattgcggataagctgtggcagagatttctctgaaacattttgtctgttaaataactttggcaatgatcgcagacactgtatatctcgaacttgaaaagaaatttcctgctccaaccgtgcccttagctggaataattcttccaattccagtacttgtgtcccatgatatggttgattgatcggttcgttgctaatgcctaatttttatttgatt

SEQ ID NO: 10563 - protein, 198 aa, Glycine max
  peptide (1)..(198): Ceres Seq. ID no. 14308104
  misc_feature (16)..(196): NCBI GI NO: 18396997 NR Description: expressed protein [Arabidopsis thaliana]
  misc_feature (7)..(168): NCBI GI NO: 21754486 NR Description: unnamed protein product [Homo sapiens]
  misc_feature (7)..(168): NCBI GI NO: 462253 NR Description: Transcriptional regulator protein HCNGP
  misc_feature (7)..(168): NCBI GI NO: 31560336 NR Description: transcriptional regulator protein [Mus musculus]
  misc_feature (25)..(168): NCBI GI NO: 28856236 NR Description: Similar to transcriptional regulator protein
  misc_feature (7)..(168): NCBI GI NO: 34875136 NR Description: similar to transcriptional regulator protein
  misc_feature (7)..(168): NCBI GI NO: 9994179 NR Description: transcriptional regulator protein [Homo sapiens]
  misc_feature (7)..(168): NCBI GI NO: 20086427 NR Description: HCNGP [Homo sapiens]
  misc_feature (37)..(143): NCBI GI NO: 31199425 NR Description: ENSANGP00000011283 [Anopheles gambiae]
  misc_feature (17)..(177): NCBI GI NO: 19921898 NR Description: CG2063-PA [Drosophila melanogaster]
LKSDTMNKDAMIRSDDAEFGEADQDEQKYVDPLDKFLPPPSKTKCSEELQRKINKFLEYKKAGKSFNAEVRNRKDYRNPDFLLHAVRYQDIDQIGSCFSKDVFDPHGYDPSDFYDEIEADMRRESERKEQEKKKAQKVEFISGGAQPGIVASASRISMPIAGASAVTASGLPLVPPTADSINRDGRQNKKSKWDKVFI

SEQ ID NO: 10564 - protein, 193 aa, Glycine max
  peptide (1)..(193): Ceres Seq. ID no. 14308105
  misc_feature (11)..(191): NCBI GI NO: 18396997 NR Description: expressed protein [Arabidopsis thaliana]
  misc_feature (2)..(163): NCBI GI NO: 21754486 NR Description: unnamed protein product [Homo sapiens]
  misc_feature (2)..(163): NCBI GI NO: 462253 NR Description: Transcriptional regulator protein HCNGP
  misc_feature (2)..(163): NCBI GI NO: 31560336 NR Description: transcriptional regulator protein [Mus musculus]
  misc_feature (20)..(163): NCBI GI NO: 28856236 NR Description: Similar to transcriptional regulator protein
  misc_feature (2)..(163): NCBI GI NO: 34875136 NR Description: similar to transcriptional regulator protein
  misc_feature (2)..(163): NCBI GI NO: 9994179 NR Description: transcriptional regulator protein [Homo sapiens]
  misc_feature (2)..(163): NCBI GI NO: 20086427 NR Description: HCNGP [Homo sapiens]
  misc_feature (32)..(138): NCBI GI NO: 31199425 NR Description: ENSANGP00000011283 [Anopheles gambiae]
  misc_feature (12)..(172): NCBI GI NO: 19921898 NR Description: CG2063-PA [Drosophila melanogaster]
MNKDAMIRSDDAEFGEADQDEQKYVDPLDKFLPPPSKTKCSEELQRKINKFLEYKKAGKSFNAEVRNRKDYRNPDFLLHAVRYQDIDQIGSCFSKDVFDPHGYDPSDFYDEIEADMRRESERKEQEKKKAQKVEFISGGAQPGIVASASRISMPIAGASAVTASGLPLVPPTADSINRDGRQNKKSKWDKVFI

SEQ ID NO: 10565 - protein, 188 aa, Glycine max
  peptide (1)..(188): Ceres Seq. ID no. 14308106
  misc_feature (6)..(186): NCBI GI NO: 18396997 NR Description: expressed protein [Arabidopsis thaliana]
  misc_feature (1)..(158): NCBI GI NO: 21754486 NR Description: unnamed protein product [Homo sapiens]
  misc_feature (1)..(158): NCBI GI NO: 462253 NR Description: Transcriptional regulator protein HCNGP
  misc_feature (1)..(158): NCBI GI NO: 31560336 NR Description: transcriptional regulator protein [Mus musculus]
  misc_feature (15)..(158): NCBI GI NO: 28856236 NR Description: Similar to transcriptional regulator protein
  misc_feature (1)..(158): NCBI GI NO: 34875136 NR Description: similar to transcriptional regulator protein
  misc_feature (1)..(158): NCBI GI NO: 9994179 NR Description: transcriptional regulator protein [Homo sapiens]
  misc_feature (1)..(158): NCBI GI NO: 20086427 NR Description: HCNGP [Homo sapiens]
  misc_feature (27)..(133): NCBI GI NO: 31199425 NR Description: ENSANGP00000011283 [Anopheles gambiae]
  misc_feature (7)..(167): NCBI GI NO: 19921898 NR Description: CG2063-PA [Drosophila melanogaster]
MIRSDDAEFGEADQDEQKYVDPLDKFLPPPSKTKCSEELQRKINKFLEYKKAGKSFNAEVRNRKDYRNPDFLLHAVRYQDIDQIGSCFSKDVFDPHGYDPSDFYDEIEADMRRESERKEQEKKKAQKVEFISGGAQPGIVASASRISMPIAGASAVTASGLPLVPPTADSINRDGRQNKKSKWDKVFI

SEQ ID NO: 10566 - DNA, 1415 bp, Glycine max
  misc_feature (1)..(1415): Ceres Seq. ID no. 14308156
aaacagagtgctatttgaaaaattgttctctcaccgtgaaagagagagagaggttaggctatggctgatgagagcgttgttgagtccccagtgaagaggcagagagatgatggtgaagaaaatggtgtctctgtttccatggacgcggagggtggcaaagaccctcttagtaacggtttatcatctgtgattcctgggtggttctctgaaatcagtgcaatgtggcctggagaggctcactccttgaaggtggaaaagattttgtttcaaggaaagtcagaataccaaaatgtcatggtcttccagtcatcaacatatggcaaggttcttgttttggatggagtaattcagctaacagaaagggatgaatgtgcctaccaagaaatgatcactcatcttcctctttgctctattccaaaccctaaaaaggttttggttatcggtggaggtgatggaggggtcatacgagaagtagcacgccattcttcagttgaaaagatagacatttgtgaaattgacaagatggttgttgatgtctccaaacaatacttccctgatgtagctgttgggtatgatgatcctcgtgtgacacttcatattggtgatggagttgcatttttgaaggaagttccagaaggaacttatgatgctgttatagtggattcatccgaccctattggtcctgctcaggagctttttgaaaagcccttctttgcgtcagttgcaaaggctctttgtcccggtggagttgtgtgtactcaggcagaaagcatttggcttcatatggatataattgaggacattgtggccaattgtcgccagatttttaaaggctctgtcaactatgcttggactactgttcctacatacccaagtgggatgattggttttatgctttgctcaactgagggaccacctgttgatttcaagcatccagttaatcccatagatgaaaatgagagtcagaagtcagtaagaccactgaaattttacaactctgagattcatacagcagctttctgtttgccgtcatttgcaaagaggaagattagttctaaagcaaattaaaaagattttcagaacctttgaaggagctcaagtggctgttgtagaagtccaacattcatccttgctgtattggtccatctatcaatgagccttggaataagtcagattaaatttggcattgaatagttaagtttatttctggaaatcaattagcaatcggattaagagtctaggcaatcctaaacggggtttaaaagtgatggcaattatcattatcaacccaagaattacctgttttataatctatctttatattcttattaataagttggagaggggaccaatcgattgacatgattaaatcaactttgaatgccgatcactatcaattggatgccataattttc

SEQ ID NO: 10567 - protein, 335 aa, Glycine max
  peptide (1)..(335): Ceres Seq. ID no. 14308157
  misc_feature (46)..(291): Pfam Name: Pfam Description:  Spermine/spermidine synthase
  misc_feature (1)..(333): NCBI GI NO: 12229957 NR Description: Spermidine synthase 2
  misc_feature (8)..(335): NCBI GI NO: 12229958 NR Description: Spermidine synthase 1
  misc_feature (1)..(334): NCBI GI NO: 23495354 NR Description: spermidine synthase [Malus x domestica]
  misc_feature (1)..(334): NCBI GI NO: 23495352 NR Description: spermidine synthase [Malus x domestica]
  misc_feature (36)..(335): NCBI GI NO: 6094335 NR Description: Spermidine synthase
  misc_feature (1)..(333): NCBI GI NO: 12230013 NR Description: Spermidine synthase
  misc_feature (27)..(334): NCBI GI NO: 6094330 NR Description: Spermidine synthase 2
  misc_feature (11)..(335): NCBI GI NO: 15220885 NR Description: spermidine synthase -related
  misc_feature (1)..(333): NCBI GI NO: 15150055 NR Description: spermidine synthase [Solanum tuberosum]
  misc_feature (40)..(333): NCBI GI NO: 6094328 NR Description: Spermidine synthase 1
MADESVVESPVKRQRDDGEENGVSVSMDAEGGKDPLSNGLSSVIPGWFSEISAMWPGEAHSLKVEKILFQGKSEYQNVMVFQSSTYGKVLVLDGVIQLTERDECAYQEMITHLPLCSIPNPKKVLVIGGGDGGVIREVARHSSVEKIDICEIDKMVVDVSKQYFPDVAVGYDDPRVTLHIGDGVAFLKEVPEGTYDAVIVDSSDPIGPAQELFEKPFFASVAKALCPGGVVCTQAESIWLHMDIIEDIVANCRQIFKGSVNYAWTTVPTYPSGMIGFMLCSTEGPPVDFKHPVNPIDENESQKSVRPLKFYNSEIHTAAFCLPSFAKRKISSKAN

SEQ ID NO: 10568 - protein, 309 aa, Glycine max
  peptide (1)..(309): Ceres Seq. ID no. 14308158
  misc_feature (20)..(265): Pfam Name: Pfam Description:  Spermine/spermidine synthase
  misc_feature (1)..(307): NCBI GI NO: 12229957 NR Description: Spermidine synthase 2
  misc_feature (1)..(309): NCBI GI NO: 12229958 NR Description: Spermidine synthase 1
  misc_feature (1)..(308): NCBI GI NO: 23495354 NR Description: spermidine synthase [Malus x domestica]
  misc_feature (1)..(308): NCBI GI NO: 23495352 NR Description: spermidine synthase [Malus x domestica]
  misc_feature (10)..(309): NCBI GI NO: 6094335 NR Description: Spermidine synthase
  misc_feature (1)..(307): NCBI GI NO: 12230013 NR Description: Spermidine synthase
  misc_feature (1)..(308): NCBI GI NO: 6094330 NR Description: Spermidine synthase 2
  misc_feature (1)..(309): NCBI GI NO: 15220885 NR Description: spermidine synthase -related
  misc_feature (1)..(307): NCBI GI NO: 15150055 NR Description: spermidine synthase [Solanum tuberosum]
  misc_feature (14)..(307): NCBI GI NO: 6094328 NR Description: Spermidine synthase 1
MDAEGGKDPLSNGLSSVIPGWFSEISAMWPGEAHSLKVEKILFQGKSEYQNVMVFQSSTYGKVLVLDGVIQLTERDECAYQEMITHLPLCSIPNPKKVLVIGGGDGGVIREVARHSSVEKIDICEIDKMVVDVSKQYFPDVAVGYDDPRVTLHIGDGVAFLKEVPEGTYDAVIVDSSDPIGPAQELFEKPFFASVAKALCPGGVVCTQAESIWLHMDIIEDIVANCRQIFKGSVNYAWTTVPTYPSGMIGFMLCSTEGPPVDFKHPVNPIDENESQKSVRPLKFYNSEIHTAAFCLPSFAKRKISSKAN

SEQ ID NO: 10569 - protein, 282 aa, Glycine max
  peptide (1)..(282): Ceres Seq. ID no. 14308159
  misc_feature (1)..(238): Pfam Name: Pfam Description:  Spermine/spermidine synthase
  misc_feature (1)..(280): NCBI GI NO: 12229957 NR Description: Spermidine synthase 2
  misc_feature (1)..(282): NCBI GI NO: 12229958 NR Description: Spermidine synthase 1
  misc_feature (1)..(281): NCBI GI NO: 23495354 NR Description: spermidine synthase [Malus x domestica]
  misc_feature (1)..(281): NCBI GI NO: 23495352 NR Description: spermidine synthase [Malus x domestica]
  misc_feature (1)..(282): NCBI GI NO: 6094335 NR Description: Spermidine synthase
  misc_feature (1)..(280): NCBI GI NO: 12230013 NR Description: Spermidine synthase
  misc_feature (1)..(281): NCBI GI NO: 6094330 NR Description: Spermidine synthase 2
  misc_feature (1)..(282): NCBI GI NO: 15220885 NR Description: spermidine synthase -related
  misc_feature (1)..(280): NCBI GI NO: 15150055 NR Description: spermidine synthase [Solanum tuberosum]
  misc_feature (1)..(280): NCBI GI NO: 6094328 NR Description: Spermidine synthase 1
MWPGEAHSLKVEKILFQGKSEYQNVMVFQSSTYGKVLVLDGVIQLTERDECAYQEMITHLPLCSIPNPKKVLVIGGGDGGVIREVARHSSVEKIDICEIDKMVVDVSKQYFPDVAVGYDDPRVTLHIGDGVAFLKEVPEGTYDAVIVDSSDPIGPAQELFEKPFFASVAKALCPGGVVCTQAESIWLHMDIIEDIVANCRQIFKGSVNYAWTTVPTYPSGMIGFMLCSTEGPPVDFKHPVNPIDENESQKSVRPLKFYNSEIHTAAFCLPSFAKRKISSKAN

SEQ ID NO: 10570 - DNA, 1587 bp, Glycine max
  misc_feature (1)..(1587): Ceres Seq. ID no. 15169415
atgaatatgatcatgaaagtattgctgctgatatttctgagctactctgtagcatactcctcatctgcgtttgagtctacaatgcacactaataattgggctgttttggtctgcacgtctcgcttctggtttaattatcggcatatggccaataccctgtcattgtataggacagttaaacggctaggaataccggatgagaggattatactcatgctagcagatgacatggcatgtaatgctagaaacaagtaccctgcccaagtttttaataatgaaaaccatatacttaatctgtatggggataatgttgaggtagactatcgtggctatgaagtgacagtggaaaactttttacgggtacttactggacgtcatgagacatctgttccaaggtccaaacgacttcttagtgatgagggaagtcatattcttctgtatatgacagggcatggaggtgatgagtttttgaagtttcaggattcagaagagcttcaaagtcacgatttagctgatgctgtgaagcaaatgaaagagaagcgcaggtttaaggagcttctgataatggtggacacctgccaagcctctactcttttttcccagcttcattcaccaggtgttttggcaattggaagtagtatgaaaggagaaaattcatattcacatcatttggattcagatgttggcgtttcagttgttgatcgttttacattttacactcttgctttctttgagaggctgaatatgtatgacaatgcttcgttgagcagccttttcaattcatataatccaaatttgttgatgtcgactgcatattacagaatggatatataccaacgctatttaaaggaggtacctgtgacaaacttctttggttctgtaatgaaaacgatacatactgattcagcctacagatcccggtcaaataaaaaaattgaggaagctaaaagcaatatgtctttggatgaatcaatctctgacagtgactcggatgacgaggatcaatttaataatttaactgctgagaaatatctctggtatagtgttggaccactatggagtgctattctcagcaatgccaatacttctgaaagcatcgatactttggtgtgctatggactgcttttaatgcttcctttgctgatattttccacatggctgtcaaagtaaagattggggaaatattccgtaagtttgttagcagagcagacacatttctttgatgctgctagatggcaccgttgcttgaaatgcaatttcacccgaaaaagcagattatttggctgcataatatgtgggacgcaaactactggtagagcagcttcatagttgttgcctatcagctgtattctgttagctattgcttttgccttggtgcagtttattctggtagccattggtgatgttggcttgctgctgctgtcatgtttcgccttgtattttgatgatgattatgattatgattgcaaactgtaaaatttttgtaaaacctcgctctatttttagatattatgttgatttccaacattagaacactgctcttttaagaactcggaaatgaaaatgcttgatcattttatctacttg

SEQ ID NO: 10571 - protein, 389 aa, Glycine max
  peptide (1)..(389): Ceres Seq. ID no. 15169416
  misc_feature (6)..(329): Pfam Name: Pfam Description:  Peptidase C13 family
  misc_feature (5)..(387): NCBI GI NO: 21537105 NR Description: putative GPI-anchor transamidase
  misc_feature (5)..(387): NCBI GI NO: 18390936 NR Description: GPI-anchor transamidase (U32517) -related
  misc_feature (5)..(345): NCBI GI NO: 7485988 NR Description: hypothetical protein F22O13
  misc_feature (5)..(345): NCBI GI NO: 9802563 NR Description: F22O13.24 [Arabidopsis thaliana]
  misc_feature (1)..(302): NCBI GI NO: 6320538 NR Description: Protein involved in the attachment ofglycosylphosphatidylinositol
  misc_feature (3)..(327): NCBI GI NO: 1518259 NR Description: gpi8 [Homo sapiens]
  misc_feature (3)..(327): NCBI GI NO: 23199983 NR Description: phosphatidylinositol glycan, class K precursor
  misc_feature (3)..(316): NCBI GI NO: 20071719 NR Description: Similar to phosphatidylinositol glycan, class K
  misc_feature (29)..(317): NCBI GI NO: 26335483 NR Description: unnamed protein product [Mus musculus]
  misc_feature (29)..(317): NCBI GI NO: 29788753 NR Description: phosphatidylinositol glycan, class K
MNMIMKVLLLIFLSYSVAYSSSAFESTMHTNNWAVLVCTSRFWFNYRHMANTLSLYRTVKRLGIPDERIILMLADDMACNARNKYPAQVFNNENHILNLYGDNVEVDYRGYEVTVENFLRVLTGRHETSVPRSKRLLSDEGSHILLYMTGHGGDEFLKFQDSEELQSHDLADAVKQMKEKRRFKELLIMVDTCQASTLFSQLHSPGVLAIGSSMKGENSYSHHLDSDVGVSVVDRFTFYTLAFFERLNMYDNASLSSLFNSYNPNLLMSTAYYRMDIYQRYLKEVPVTNFFGSVMKTIHTDSAYRSRSNKKIEEAKSNMSLDESISDSDSDDEDQFNNLTAEKYLWYSVGPLWSAILSNANTSESIDTLVCYGLLLMLPLLIFSTWLSK

SEQ ID NO: 10572 - protein, 387 aa, Glycine max
  peptide (1)..(387): Ceres Seq. ID no. 15169417
  misc_feature (4)..(327): Pfam Name: Pfam Description:  Peptidase C13 family
  misc_feature (3)..(385): NCBI GI NO: 21537105 NR Description: putative GPI-anchor transamidase
  misc_feature (3)..(385): NCBI GI NO: 18390936 NR Description: GPI-anchor transamidase (U32517) -related
  misc_feature (3)..(343): NCBI GI NO: 7485988 NR Description: hypothetical protein F22O13
  misc_feature (3)..(343): NCBI GI NO: 9802563 NR Description: F22O13.24 [Arabidopsis thaliana]
  misc_feature (1)..(300): NCBI GI NO: 6320538 NR Description: Protein involved in the attachment ofglycosylphosphatidylinositol
  misc_feature (1)..(325): NCBI GI NO: 1518259 NR Description: gpi8 [Homo sapiens]
  misc_feature (1)..(325): NCBI GI NO: 23199983 NR Description: phosphatidylinositol glycan, class K precursor
  misc_feature (1)..(314): NCBI GI NO: 20071719 NR Description: Similar to phosphatidylinositol glycan, class K
  misc_feature (27)..(315): NCBI GI NO: 26335483 NR Description: unnamed protein product [Mus musculus]
  misc_feature (27)..(315): NCBI GI NO: 29788753 NR Description: phosphatidylinositol glycan, class K
MIMKVLLLIFLSYSVAYSSSAFESTMHTNNWAVLVCTSRFWFNYRHMANTLSLYRTVKRLGIPDERIILMLADDMACNARNKYPAQVFNNENHILNLYGDNVEVDYRGYEVTVENFLRVLTGRHETSVPRSKRLLSDEGSHILLYMTGHGGDEFLKFQDSEELQSHDLADAVKQMKEKRRFKELLIMVDTCQASTLFSQLHSPGVLAIGSSMKGENSYSHHLDSDVGVSVVDRFTFYTLAFFERLNMYDNASLSSLFNSYNPNLLMSTAYYRMDIYQRYLKEVPVTNFFGSVMKTIHTDSAYRSRSNKKIEEAKSNMSLDESISDSDSDDEDQFNNLTAEKYLWYSVGPLWSAILSNANTSESIDTLVCYGLLLMLPLLIFSTWLSK

SEQ ID NO: 10573 - protein, 385 aa, Glycine max
  peptide (1)..(385): Ceres Seq. ID no. 15169418
  misc_feature (2)..(325): Pfam Name: Pfam Description:  Peptidase C13 family
  misc_feature (1)..(383): NCBI GI NO: 21537105 NR Description: putative GPI-anchor transamidase
  misc_feature (1)..(383): NCBI GI NO: 18390936 NR Description: GPI-anchor transamidase (U32517) -related
  misc_feature (1)..(341): NCBI GI NO: 7485988 NR Description: hypothetical protein F22O13
  misc_feature (1)..(341): NCBI GI NO: 9802563 NR Description: F22O13.24 [Arabidopsis thaliana]
  misc_feature (1)..(298): NCBI GI NO: 6320538 NR Description: Protein involved in the attachment ofglycosylphosphatidylinositol
  misc_feature (1)..(323): NCBI GI NO: 1518259 NR Description: gpi8 [Homo sapiens]
  misc_feature (1)..(323): NCBI GI NO: 23199983 NR Description: phosphatidylinositol glycan, class K precursor
  misc_feature (1)..(312): NCBI GI NO: 20071719 NR Description: Similar to phosphatidylinositol glycan, class K
  misc_feature (25)..(313): NCBI GI NO: 26335483 NR Description: unnamed protein product [Mus musculus]
  misc_feature (25)..(313): NCBI GI NO: 29788753 NR Description: phosphatidylinositol glycan, class K
MKVLLLIFLSYSVAYSSSAFESTMHTNNWAVLVCTSRFWFNYRHMANTLSLYRTVKRLGIPDERIILMLADDMACNARNKYPAQVFNNENHILNLYGDNVEVDYRGYEVTVENFLRVLTGRHETSVPRSKRLLSDEGSHILLYMTGHGGDEFLKFQDSEELQSHDLADAVKQMKEKRRFKELLIMVDTCQASTLFSQLHSPGVLAIGSSMKGENSYSHHLDSDVGVSVVDRFTFYTLAFFERLNMYDNASLSSLFNSYNPNLLMSTAYYRMDIYQRYLKEVPVTNFFGSVMKTIHTDSAYRSRSNKKIEEAKSNMSLDESISDSDSDDEDQFNNLTAEKYLWYSVGPLWSAILSNANTSESIDTLVCYGLLLMLPLLIFSTWLSK

SEQ ID NO: 10574 - DNA, 1435 bp, Glycine max
  misc_feature (1)..(1435): Ceres Seq. ID no. 14309678
aaaacgaatctgaaaaagatggatctgaaaccgaaaccctaaaaccaatcatggatccatttccctttccacatttagctaccacgaaacgtaattttaatttctctctcaagagtcattttccgatgaaacgcaccgttcggcccctcttcgcgctcctcctcctcctcgtcttcgctgccaccctcacctcacgcgccgtcctccgccgcggcatcctctccatcgagctcgaatcccgcgtccggatccgccgccctccgccgcagctcaactccacgctcctccaccacgccgccgtcgaaatcggcgaggagaagttcaagcaagagattcagagcctcctcgacggcaacttcggcagccaagcgcgccaccgcaccttcgtctcctggcgccgcttcatccaccatgaccgcggcggcgccgaaggcgccgtggccaacctcccggggacgctccgctcgccgctcttctatcgctactggctcgacttccggaaggtcctccacgactggttccggaagcgacgattccaacccggtatcatgtccgagttgactcggtcaattaagcttccaattgattcacacaacaacaacaaactacaaaccaataacaaaaataaaaacaaatactcttcttgtgccgtagttggaaacagtggaattttgctgaatagaaactacggtagtgaaattgattcccatgaggttgtgataaggttaaacaatgctagggttgatcactttgaaaccaaggttgggaaaaaaactagcatttcattcatgaatagtaacatcttgcatttgtgtgctagaaggggagggtgcttttgccacccttatggtgataacgttccaattgtaatgtacatttgtcaagccgtgcatttcttggactacactgtgtgcaatgcttctcacaaggctcctttgttggtcactgatcctaggtttgatgtgttgtgtgcgaggattgtgaagtactattcgttgaagaggtttgtggaggagagtgggaagggtttggagaagtggggtgaggctcatgatggttctctttttcactactcttcagggatgcaggctgtgatactggctttggggatttgtgatagggttagcatttttgggtttgggaaattggcttctgctaagcaccattaccacactaaccagaaggctgagcttcacttgcatgattatgaggctgagtatgcgttttatagggaccttgtggatgggaatagggctataccgtttcttgaggacaggtttaaggttcctcctgttgttatgtatcagtgataggtgctgaactgctactgctgcaagtggtggtggtggagggcatctgtgacttgttgttctgttattgtaatacttgtgaaatgcacagatagtggaaaaagcaaaaaatactgattcaagac

SEQ ID NO: 10575 - protein, 435 aa, Glycine max
  peptide (1)..(435): Ceres Seq. ID no. 14309679
  misc_feature (152)..(418): Pfam Name: sialyltransferase Pfam Description: Glycosyltransferase family 29
  misc_feature (42)..(434): NCBI GI NO: 15223174 NR Description: sialyltransferase family [Arabidopsis thaliana]
  misc_feature (42)..(434): NCBI GI NO: 34908454 NR Description: P0683F02.18
  misc_feature (169)..(435): NCBI GI NO: 21743080 NR Description: OSJNBb0002J11.10
  misc_feature (322)..(434): NCBI GI NO: 28416597 NR Description: At1g08280 [Arabidopsis thaliana]
  misc_feature (172)..(263): NCBI GI NO: 346465 NR Description: Gal beta 1
  misc_feature (172)..(263): NCBI GI NO: 461676 NR Description: CMP-N-acetylneuraminate-beta-galactosamide-alpha-2
  misc_feature (344)..(404): NCBI GI NO: 346465 NR Description: Gal beta 1
  misc_feature (344)..(404): NCBI GI NO: 461676 NR Description: CMP-N-acetylneuraminate-beta-galactosamide-alpha-2
  misc_feature (172)..(263): NCBI GI NO: 37652853 NR Description: alpha2,3-sialyltransferase [Xenopus laevis]
  misc_feature (344)..(405): NCBI GI NO: 37652853 NR Description: alpha2,3-sialyltransferase [Xenopus laevis]
NESEKDGSETETLKPIMDPFPFPHLATTKRNFNFSLKSHFPMKRTVRPLFALLLLLVFAATLTSRAVLRRGILSIELESRVRIRRPPPQLNSTLLHHAAVEIGEEKFKQEIQSLLDGNFGSQARHRTFVSWRRFIHHDRGGAEGAVANLPGTLRSPLFYRYWLDFRKVLHDWFRKRRFQPGIMSELTRSIKLPIDSHNNNKLQTNNKNKNKYSSCAVVGNSGILLNRNYGSEIDSHEVVIRLNNARVDHFETKVGKKTSISFMNSNILHLCARRGGCFCHPYGDNVPIVMYICQAVHFLDYTVCNASHKAPLLVTDPRFDVLCARIVKYYSLKRFVEESGKGLEKWGEAHDGSLFHYSSGMQAVILALGICDRVSIFGFGKLASAKHHYHTNQKAELHLHDYEAEYAFYRDLVDGNRAIPFLEDRFKVPPVVMYQ

SEQ ID NO: 10576 - protein, 419 aa, Glycine max
  peptide (1)..(419): Ceres Seq. ID no. 14309680
  misc_feature (136)..(402): Pfam Name: sialyltransferase Pfam Description: Glycosyltransferase family 29
  misc_feature (26)..(418): NCBI GI NO: 15223174 NR Description: sialyltransferase family [Arabidopsis thaliana]
  misc_feature (26)..(418): NCBI GI NO: 34908454 NR Description: P0683F02.18
  misc_feature (153)..(419): NCBI GI NO: 21743080 NR Description: OSJNBb0002J11.10
  misc_feature (306)..(418): NCBI GI NO: 28416597 NR Description: At1g08280 [Arabidopsis thaliana]
  misc_feature (156)..(247): NCBI GI NO: 346465 NR Description: Gal beta 1
  misc_feature (156)..(247): NCBI GI NO: 461676 NR Description: CMP-N-acetylneuraminate-beta-galactosamide-alpha-2
  misc_feature (328)..(388): NCBI GI NO: 346465 NR Description: Gal beta 1
  misc_feature (328)..(388): NCBI GI NO: 461676 NR Description: CMP-N-acetylneuraminate-beta-galactosamide-alpha-2
  misc_feature (156)..(247): NCBI GI NO: 37652853 NR Description: alpha2,3-sialyltransferase [Xenopus laevis]
  misc_feature (328)..(389): NCBI GI NO: 37652853 NR Description: alpha2,3-sialyltransferase [Xenopus laevis]
MDPFPFPHLATTKRNFNFSLKSHFPMKRTVRPLFALLLLLVFAATLTSRAVLRRGILSIELESRVRIRRPPPQLNSTLLHHAAVEIGEEKFKQEIQSLLDGNFGSQARHRTFVSWRRFIHHDRGGAEGAVANLPGTLRSPLFYRYWLDFRKVLHDWFRKRRFQPGIMSELTRSIKLPIDSHNNNKLQTNNKNKNKYSSCAVVGNSGILLNRNYGSEIDSHEVVIRLNNARVDHFETKVGKKTSISFMNSNILHLCARRGGCFCHPYGDNVPIVMYICQAVHFLDYTVCNASHKAPLLVTDPRFDVLCARIVKYYSLKRFVEESGKGLEKWGEAHDGSLFHYSSGMQAVILALGICDRVSIFGFGKLASAKHHYHTNQKAELHLHDYEAEYAFYRDLVDGNRAIPFLEDRFKVPPVVMYQ

SEQ ID NO: 10577 - protein, 394 aa, Glycine max
  peptide (1)..(394): Ceres Seq. ID no. 14309681
  misc_feature (111)..(377): Pfam Name: sialyltransferase Pfam Description: Glycosyltransferase family 29
  misc_feature (1)..(393): NCBI GI NO: 15223174 NR Description: sialyltransferase family [Arabidopsis thaliana]
  misc_feature (1)..(393): NCBI GI NO: 34908454 NR Description: P0683F02.18
  misc_feature (128)..(394): NCBI GI NO: 21743080 NR Description: OSJNBb0002J11.10
  misc_feature (281)..(393): NCBI GI NO: 28416597 NR Description: At1g08280 [Arabidopsis thaliana]
  misc_feature (131)..(222): NCBI GI NO: 346465 NR Description: Gal beta 1
  misc_feature (131)..(222): NCBI GI NO: 461676 NR Description: CMP-N-acetylneuraminate-beta-galactosamide-alpha-2
  misc_feature (303)..(363): NCBI GI NO: 346465 NR Description: Gal beta 1
  misc_feature (303)..(363): NCBI GI NO: 461676 NR Description: CMP-N-acetylneuraminate-beta-galactosamide-alpha-2
  misc_feature (131)..(222): NCBI GI NO: 37652853 NR Description: alpha2,3-sialyltransferase [Xenopus laevis]
  misc_feature (303)..(364): NCBI GI NO: 37652853 NR Description: alpha2,3-sialyltransferase [Xenopus laevis]
MKRTVRPLFALLLLLVFAATLTSRAVLRRGILSIELESRVRIRRPPPQLNSTLLHHAAVEIGEEKFKQEIQSLLDGNFGSQARHRTFVSWRRFIHHDRGGAEGAVANLPGTLRSPLFYRYWLDFRKVLHDWFRKRRFQPGIMSELTRSIKLPIDSHNNNKLQTNNKNKNKYSSCAVVGNSGILLNRNYGSEIDSHEVVIRLNNARVDHFETKVGKKTSISFMNSNILHLCARRGGCFCHPYGDNVPIVMYICQAVHFLDYTVCNASHKAPLLVTDPRFDVLCARIVKYYSLKRFVEESGKGLEKWGEAHDGSLFHYSSGMQAVILALGICDRVSIFGFGKLASAKHHYHTNQKAELHLHDYEAEYAFYRDLVDGNRAIPFLEDRFKVPPVVMYQ

SEQ ID NO: 10578 - DNA, 1251 bp, Glycine max
  misc_feature (1)..(1251): Ceres Seq. ID no. 14308152
ataacagagcacaccaacaccaacatcaacattctcattctctctcttttttctttcagttttggctttgatctttcaagttcaatggctggagatatagggagagccttgcctcctcctgattcagaagaattctcaaccttgttcaaccaactcctccacaattctcccccactaggaatggaccccaatcattcaccttctgatttcaccccacacaacaccaccatcaacatcaacagcaacaacaacaacaacactgttccttcctctccctcaaatttcaatttctctgacccccatcattacatccctgcctctgatgccaccaccttcaagcaacacaacatcaaccacaacaacaatcacacccctgatttcacttcttctcatgttgagaagagtgtggaggcatcgaaacctgtcccaccaccacgttcttcgtcaaagaggagtagagctgcagagttccataatttgtctgaaaagagaaggaggagtaggattaacgagaaaatgaaagccttacagaatttaattccaaattccaacaagacagacaaagcttcaatgctagatgaggccatagaatatttaaagcagctccagcttcaagtgcaaatgttaatgatgagaaatggtttgagcttgcatccaatgtctttgccaggaggactaagacctatgataatgcctcagactggattgaatcttgatgggagtaatggatttcagaattctacctgtgcaattgcctcatcttcaaatgatgaaagcttggtgcggcatgcctttagttttccaaagcaatgcagcatctcaaataagtctattggtgtaccctccgtgaaaaacatagcaacttcggatacctcatccacttttcatccctctattaaggatgcactctacggcaacatgccacaaccgtttatggatacaacaaagattggaaaaccctctccagacgtgtcttaaacagctcgatttcattgagggagaaaagaattttttagatggcaagtcgcctcgtaaaagggtagctttgttcaggcattataatctacatttaaatctgctgactatatgacactccattgggttgttcctggtgcagtttaatttgtagcagtttgacagagtctttgtgccattgttgacacttgcataaaaatgtacaagtattttataacttcatcaattgcaaaatgcagctaatgaacattctgcaacatgttgtgactgacttgt

SEQ ID NO: 10579 - protein, 325 aa, Glycine max
  peptide (1)..(325): Ceres Seq. ID no. 14308153
  misc_feature (154)..(203): Pfam Name: Pfam Description:  Helix-loop-helix DNA-binding domain
  misc_feature (107)..(299): NCBI GI NO: 18419937 NR Description: bHLH protein SPATULA (SPT) [Arabidopsis thaliana]
  misc_feature (107)..(299): NCBI GI NO: 25407777 NR Description: hypothetical protein AT4g36930
  misc_feature (135)..(289): NCBI GI NO: 15451582 NR Description: Putative SPATULA [Oryza sativa]
  misc_feature (146)..(223): NCBI GI NO: 15240202 NR Description: bHLH protein family [Arabidopsis thaliana]
  misc_feature (146)..(223): NCBI GI NO: 21536863 NR Description: unknown [Arabidopsis thaliana]
  misc_feature (119)..(320): NCBI GI NO: 15217533 NR Description: phytochrome interacting factor 3 (PIF3)
  misc_feature (128)..(242): NCBI GI NO: 30680903 NR Description: (bHLH015) putative bHLH transcription factor
  misc_feature (119)..(320): NCBI GI NO: 4093153 NR Description: phytochrome-associated protein 3
  misc_feature (128)..(242): NCBI GI NO: 30680909 NR Description: (bHLH015) putative bHLH transcription factor
  misc_feature (128)..(242): NCBI GI NO: 25411969 NR Description: hypothetical protein At2g20180
ITEHTNTNINILILSLFSFSFGFDLSSSMAGDIGRALPPPDSEEFSTLFNQLLHNSPPLGMDPNHSPSDFTPHNTTININSNNNNNTVPSSPSNFNFSDPHHYIPASDATTFKQHNINHNNNHTPDFTSSHVEKSVEASKPVPPPRSSSKRSRAAEFHNLSEKRRRSRINEKMKALQNLIPNSNKTDKASMLDEAIEYLKQLQLQVQMLMMRNGLSLHPMSLPGGLRPMIMPQTGLNLDGSNGFQNSTCAIASSSNDESLVRHAFSFPKQCSISNKSIGVPSVKNIATSDTSSTFHPSIKDALYGNMPQPFMDTTKIGKPSPDVS

SEQ ID NO: 10580 - protein, 297 aa, Glycine max
  peptide (1)..(297): Ceres Seq. ID no. 14308154
  misc_feature (126)..(175): Pfam Name: Pfam Description:  Helix-loop-helix DNA-binding domain
  misc_feature (79)..(271): NCBI GI NO: 18419937 NR Description: bHLH protein SPATULA (SPT) [Arabidopsis thaliana]
  misc_feature (79)..(271): NCBI GI NO: 25407777 NR Description: hypothetical protein AT4g36930
  misc_feature (107)..(261): NCBI GI NO: 15451582 NR Description: Putative SPATULA [Oryza sativa]
  misc_feature (118)..(195): NCBI GI NO: 15240202 NR Description: bHLH protein family [Arabidopsis thaliana]
  misc_feature (118)..(195): NCBI GI NO: 21536863 NR Description: unknown [Arabidopsis thaliana]
  misc_feature (91)..(292): NCBI GI NO: 15217533 NR Description: phytochrome interacting factor 3 (PIF3)
  misc_feature (100)..(214): NCBI GI NO: 30680903 NR Description: (bHLH015) putative bHLH transcription factor
  misc_feature (91)..(292): NCBI GI NO: 4093153 NR Description: phytochrome-associated protein 3
  misc_feature (100)..(214): NCBI GI NO: 30680909 NR Description: (bHLH015) putative bHLH transcription factor
  misc_feature (100)..(214): NCBI GI NO: 25411969 NR Description: hypothetical protein At2g20180
MAGDIGRALPPPDSEEFSTLFNQLLHNSPPLGMDPNHSPSDFTPHNTTININSNNNNNTVPSSPSNFNFSDPHHYIPASDATTFKQHNINHNNNHTPDFTSSHVEKSVEASKPVPPPRSSSKRSRAAEFHNLSEKRRRSRINEKMKALQNLIPNSNKTDKASMLDEAIEYLKQLQLQVQMLMMRNGLSLHPMSLPGGLRPMIMPQTGLNLDGSNGFQNSTCAIASSSNDESLVRHAFSFPKQCSISNKSIGVPSVKNIATSDTSSTFHPSIKDALYGNMPQPFMDTTKIGKPSPDVS

SEQ ID NO: 10581 - protein, 265 aa, Glycine max
  peptide (1)..(265): Ceres Seq. ID no. 14308155
  misc_feature (94)..(143): Pfam Name: Pfam Description:  Helix-loop-helix DNA-binding domain
  misc_feature (47)..(239): NCBI GI NO: 18419937 NR Description: bHLH protein SPATULA (SPT) [Arabidopsis thaliana]
  misc_feature (47)..(239): NCBI GI NO: 25407777 NR Description: hypothetical protein AT4g36930
  misc_feature (75)..(229): NCBI GI NO: 15451582 NR Description: Putative SPATULA [Oryza sativa]
  misc_feature (86)..(163): NCBI GI NO: 15240202 NR Description: bHLH protein family [Arabidopsis thaliana]
  misc_feature (86)..(163): NCBI GI NO: 21536863 NR Description: unknown [Arabidopsis thaliana]
  misc_feature (59)..(260): NCBI GI NO: 15217533 NR Description: phytochrome interacting factor 3 (PIF3)
  misc_feature (68)..(182): NCBI GI NO: 30680903 NR Description: (bHLH015) putative bHLH transcription factor
  misc_feature (59)..(260): NCBI GI NO: 4093153 NR Description: phytochrome-associated protein 3
  misc_feature (68)..(182): NCBI GI NO: 30680909 NR Description: (bHLH015) putative bHLH transcription factor
  misc_feature (68)..(182): NCBI GI NO: 25411969 NR Description: hypothetical protein At2g20180
MDPNHSPSDFTPHNTTININSNNNNNTVPSSPSNFNFSDPHHYIPASDATTFKQHNINHNNNHTPDFTSSHVEKSVEASKPVPPPRSSSKRSRAAEFHNLSEKRRRSRINEKMKALQNLIPNSNKTDKASMLDEAIEYLKQLQLQVQMLMMRNGLSLHPMSLPGGLRPMIMPQTGLNLDGSNGFQNSTCAIASSSNDESLVRHAFSFPKQCSISNKSIGVPSVKNIATSDTSSTFHPSIKDALYGNMPQPFMDTTKIGKPSPDVS

SEQ ID NO: 10582 - DNA, 1389 bp, Glycine max
  misc_feature (1)..(1389): Ceres Seq. ID no. 14312328
gaagagagagcgcattaccaaaccccccaaagaacacgttcactctcgattttgccttgcaaattgcgatttctctgcagtttcttccatcctccaactctgacctttcttgacgcgattttggtttttgtcaacttcttattgaaacccttcttcagtcttctcccatttccagagttcttataaattgatgctttttacaagtctttctgaacattccgtttccttcctccaggaaaagttagcgtgtccttaggtcacataggattttgagaaatttactttttaatttgcctctgaattaattctgcaagaagagagataatgtctggttcaaagaaatctcctttgaaggttgctaagcctagctctgctgaatcttggacgaatccatttgattctgatgatgagggaaaggatagcaaaaaatatagttcctctagaaaaacttcttcggagcgcgcacttgctacactggaagttaacaccaacccctttgatgatgatattgatgccaataagaaatcttcatcaacttcgtatgcctttcaatctgccaaccggaacaggtataagaatgattttcgtgactctggtggattagagaatcaatcggttcaagaactggagagttatgctgtttacaaggctgaagagactacaaattcagtcaacaattgtttgaagatagcagagaacataagagaggatgctaccaagacactagtcacccttgaacaacagggtgaacaaattaccaggagtcaccatgttgctgctgacattgatcacgatttaagtcggggagaaaagctcttgggaagccttggtggcctcttctccaaaacttggaaaccaaagaagacacgagcaataaccggccctgttattgttggagatgatccggtcaggagaaaggacaatcacttggagcagagagacaagttgggactgacctctgcacccaaagggcagtccaagctacggaccccccctccagaaccaacaaatgcacttgaaaaagttgaggttgaaaaaaagaagcaagatgatgcactatcagatttaagtgatctgttgggagagcttaaagacatggctgttgacatgggatccgagattgagaggcataacaaagccctgaatcatctatacgatgatgtggatgagttgaatttccgagtgaaaggtgctaatcaacgtggccgtcgtttgctcggaaaataagattgattgatttcatcattgtgtttttctctttgtatccatcatctggtttaatgaaggcaatcttttcatttagtttatacttgtgttgcattatatataaaatatgcaacagattaaataagtctgggtgcaatactacataattcaatttgttgattt

SEQ ID NO: 10583 - protein, 300 aa, Glycine max
  peptide (1)..(300): Ceres Seq. ID no. 14312329
  misc_feature (240)..(300): Pfam Name: Pfam Description:  SNARE domain
  misc_feature (1)..(300): NCBI GI NO: 21553460 NR Description: snap25a [Arabidopsis thaliana]
  misc_feature (1)..(300): NCBI GI NO: 15240163 NR Description: syntaxin SNAP33 [Arabidopsis thaliana]
  misc_feature (81)..(300): NCBI GI NO: 15222976 NR Description: synaptosomal associated protein (SNAP25A) -related
  misc_feature (22)..(300): NCBI GI NO: 32308074 NR Description: SNAP-34 [Hordeum vulgare subsp. vulgare]
  misc_feature (56)..(300): NCBI GI NO: 15241436 NR Description: SNAP25 - like protein [Arabidopsis thaliana]
  misc_feature (89)..(299): NCBI GI NO: 18765733 NR Description: synaptosomal-associated protein 25 isoform SNAP25A
  misc_feature (98)..(298): NCBI GI NO: 17737875 NR Description: Synapse protein 24 CG9474-PA
  misc_feature (89)..(299): NCBI GI NO: 40555928 NR Description: synaptosomal-associated protein 25
  misc_feature (93)..(298): NCBI GI NO: 28279149 NR Description: Similar to synaptosomal-associated protein, 23kD
  misc_feature (89)..(299): NCBI GI NO: 6755588 NR Description: synaptosomal-associated protein 25
MSGSKKSPLKVAKPSSAESWTNPFDSDDEGKDSKKYSSSRKTSSERALATLEVNTNPFDDDIDANKKSSSTSYAFQSANRNRYKNDFRDSGGLENQSVQELESYAVYKAEETTNSVNNCLKIAENIREDATKTLVTLEQQGEQITRSHHVAADIDHDLSRGEKLLGSLGGLFSKTWKPKKTRAITGPVIVGDDPVRRKDNHLEQRDKLGLTSAPKGQSKLRTPPPEPTNALEKVEVEKKKQDDALSDLSDLLGELKDMAVDMGSEIERHNKALNHLYDDVDELNFRVKGANQRGRRLLGK

SEQ ID NO: 10584 - DNA, 1157 bp, Glycine max
  misc_feature (1)..(1157): Ceres Seq. ID no. 14304136
attcacattcatcacaactcacctcacccagctagctagcttcataaggttaattagatttttttcgtggaaacaaagatctcaatacttgtgatatcatgacgatgatgagcagcaacaacaacaacaacaacaacaacgttggagaatttggagacaccactctgactaaggtttttgttgggggcttagcttgggagactccgaaggatgccctcaaagaccactttgagaagtatggtgagatccttgaagctgtcatcatttccgataagcacactgccaaatccaaaggctatggctttgtgactttcaaggaggctgaggctgccaagaaggcttgtgaggattcagcaactctcgttatcaatggccgtcgagcaaattgcaatcttgcttgcctaggtgctcgtcgcccaaggtcttcttccaatgtttcaccacctccacaaccacaaggaggatcaaacggtggagtagtgaagaacaatgcatcaagcccaccagccattaatcacgtgcagccatattattatccagtgaggacaactgctgctctgccattccataatcacactcttcctttctatgggtatgcgcctacctacattgtgacggacgtaaactacaattacaatcagaaactgtgctatggtagcggtgggacctacatgaatgggcagcatgtgtacccgaggcaggctattgtgggtgccaacacactgatgccaatgtaccctctttatcagtatcatcatccaacggagaccataggtgtaccagctcacaacttttatccaacggcatcatgggccccaatgaccatcatgtccaagccatcgtctatcgttcctcatacaggtacagttggcacaggtgagtgctttaaaagggttgtctgagaggagcttggttggctaaataacagcagagggagggaaaatggtggtggtggccgcacagagcaacattattatctgatctgtcttggctttactttccttttttttgttgttgtctttaaatattgtttcatttttagttgttaatcttaggcattttgttgttgatgagattctttcattctctttttctgtctaacatctcagcatgtgctgtgcacagttacattcagttgaaattatcgatttgttctc

SEQ ID NO: 10585 - protein, 267 aa, Glycine max
  peptide (1)..(267): Ceres Seq. ID no. 14304137
  misc_feature (26)..(84): Pfam Name: a.k.a. RRM, RBD, or RNP domain Pfam Description: RNA recognition motif.
  misc_feature (12)..(265): NCBI GI NO: 21536939 NR Description: RNA binding protein-like [Arabidopsis thaliana]
  misc_feature (12)..(265): NCBI GI NO: 15232579 NR Description: RNA recognition motif (RRM)-containing protein
  misc_feature (15)..(218): NCBI GI NO: 34907334 NR Description: P0698A10.29
  misc_feature (12)..(186): NCBI GI NO: 15226439 NR Description: RNA recognition motif (RRM)-containing protein
  misc_feature (18)..(252): NCBI GI NO: 18411885 NR Description: RNA recognition motif (RRM)-containing protein
  misc_feature (18)..(252): NCBI GI NO: 25405025 NR Description: protein F3F9.20 [imported] - Arabidopsis thaliana
  misc_feature (18)..(225): NCBI GI NO: 18394923 NR Description: RNA recognition motif (RRM)-containing protein
  misc_feature (18)..(225): NCBI GI NO: 15010636 NR Description: At1g20880/F9H16_14 [Arabidopsis thaliana]
  misc_feature (18)..(225): NCBI GI NO: 23505939 NR Description: At1g20880/F9H16_14 [Arabidopsis thaliana]
  misc_feature (18)..(225): NCBI GI NO: 22330665 NR Description: RNA recognition motif (RRM)-containing protein
MTMMSSNNNNNNNNVGEFGDTTLTKVFVGGLAWETPKDALKDHFEKYGEILEAVIISDKHTAKSKGYGFVTFKEAEAAKKACEDSATLVINGRRANCNLACLGARRPRSSSNVSPPPQPQGGSNGGVVKNNASSPPAINHVQPYYYPVRTTAALPFHNHTLPFYGYAPTYIVTDVNYNYNQKLCYGSGGTYMNGQHVYPRQAIVGANTLMPMYPLYQYHHPTETIGVPAHNFYPTASWAPMTIMSKPSSIVPHTGTVGTGECFKRVV

SEQ ID NO: 10586 - protein, 265 aa, Glycine max
  peptide (1)..(265): Ceres Seq. ID no. 14304138
  misc_feature (24)..(82): Pfam Name: a.k.a. RRM, RBD, or RNP domain Pfam Description: RNA recognition motif.
  misc_feature (10)..(263): NCBI GI NO: 21536939 NR Description: RNA binding protein-like [Arabidopsis thaliana]
  misc_feature (10)..(263): NCBI GI NO: 15232579 NR Description: RNA recognition motif (RRM)-containing protein
  misc_feature (13)..(216): NCBI GI NO: 34907334 NR Description: P0698A10.29
  misc_feature (10)..(184): NCBI GI NO: 15226439 NR Description: RNA recognition motif (RRM)-containing protein
  misc_feature (16)..(250): NCBI GI NO: 18411885 NR Description: RNA recognition motif (RRM)-containing protein
  misc_feature (16)..(250): NCBI GI NO: 25405025 NR Description: protein F3F9.20 [imported] - Arabidopsis thaliana
  misc_feature (16)..(223): NCBI GI NO: 18394923 NR Description: RNA recognition motif (RRM)-containing protein
  misc_feature (16)..(223): NCBI GI NO: 15010636 NR Description: At1g20880/F9H16_14 [Arabidopsis thaliana]
  misc_feature (16)..(223): NCBI GI NO: 23505939 NR Description: At1g20880/F9H16_14 [Arabidopsis thaliana]
  misc_feature (16)..(223): NCBI GI NO: 22330665 NR Description: RNA recognition motif (RRM)-containing protein
MMSSNNNNNNNNVGEFGDTTLTKVFVGGLAWETPKDALKDHFEKYGEILEAVIISDKHTAKSKGYGFVTFKEAEAAKKACEDSATLVINGRRANCNLACLGARRPRSSSNVSPPPQPQGGSNGGVVKNNASSPPAINHVQPYYYPVRTTAALPFHNHTLPFYGYAPTYIVTDVNYNYNQKLCYGSGGTYMNGQHVYPRQAIVGANTLMPMYPLYQYHHPTETIGVPAHNFYPTASWAPMTIMSKPSSIVPHTGTVGTGECFKRVV

SEQ ID NO: 10587 - protein, 264 aa, Glycine max
  peptide (1)..(264): Ceres Seq. ID no. 14304139
  misc_feature (23)..(81): Pfam Name: a.k.a. RRM, RBD, or RNP domain Pfam Description: RNA recognition motif.
  misc_feature (9)..(262): NCBI GI NO: 21536939 NR Description: RNA binding protein-like [Arabidopsis thaliana]
  misc_feature (9)..(262): NCBI GI NO: 15232579 NR Description: RNA recognition motif (RRM)-containing protein
  misc_feature (12)..(215): NCBI GI NO: 34907334 NR Description: P0698A10.29
  misc_feature (9)..(183): NCBI GI NO: 15226439 NR Description: RNA recognition motif (RRM)-containing protein
  misc_feature (15)..(249): NCBI GI NO: 18411885 NR Description: RNA recognition motif (RRM)-containing protein
  misc_feature (15)..(249): NCBI GI NO: 25405025 NR Description: protein F3F9.20 [imported] - Arabidopsis thaliana
  misc_feature (15)..(222): NCBI GI NO: 18394923 NR Description: RNA recognition motif (RRM)-containing protein
  misc_feature (15)..(222): NCBI GI NO: 15010636 NR Description: At1g20880/F9H16_14 [Arabidopsis thaliana]
  misc_feature (15)..(222): NCBI GI NO: 23505939 NR Description: At1g20880/F9H16_14 [Arabidopsis thaliana]
  misc_feature (15)..(222): NCBI GI NO: 22330665 NR Description: RNA recognition motif (RRM)-containing protein
MSSNNNNNNNNVGEFGDTTLTKVFVGGLAWETPKDALKDHFEKYGEILEAVIISDKHTAKSKGYGFVTFKEAEAAKKACEDSATLVINGRRANCNLACLGARRPRSSSNVSPPPQPQGGSNGGVVKNNASSPPAINHVQPYYYPVRTTAALPFHNHTLPFYGYAPTYIVTDVNYNYNQKLCYGSGGTYMNGQHVYPRQAIVGANTLMPMYPLYQYHHPTETIGVPAHNFYPTASWAPMTIMSKPSSIVPHTGTVGTGECFKRVV

SEQ ID NO: 10588 - DNA, 1413 bp, Glycine max
  misc_feature (1)..(1413): Ceres Seq. ID no. 13581611
aaagtgggaagaaatagttaagtagcacggtaggcgcagtaggccacagtcacacacagcctttgcctttgcctttgctgttcagtgctcccactcccagtccgggccgaggcagaaaatatcggaaactaacctttcacactcacacatccatcgtcatatctgaattggcaactcattattaaatcaattacgaaaacgaagaaacccaacaaaacaatggtagtagcttagctaattgcctaattgaatgaatctcaatggaacctcctctcatcaacgactccacattctcttccgctaacccttccttgtccgagatttggccctctcattttcccacagaccacactcccagtaacaagagacacctctccccctcgactgattgtggcagcaataaacatatcaaatcatcaggatcaggatcccaggatcaaaacggtgccttgaaggcgggtgaagtggacgcgacttcagtagccggtaacaagttacccgaacaaacggcgaaacctagttcttccgagcagccacctaagcaagactatatacacgtgcgagctagaagaggccaagccaccgatagccacagtctcgctgagagagctaggagagaaaagatcagtgagaggatgaaaattcttcaagatatagttcccggctgcaacaaggtaattggtaaagcacttgtgctggatgagataattaattatatccagtcactgcagcatcaggttgagttcctttctatgaagcttgaggcagttaattcgagattgagcatgagccctactattgaatgttttccttcaaaagaagttggcactcagccatttgaccttgccggaataatatttggatcacaaccggccaggggatatgctcaaggatcacagccgggatggctgcatatgcagatagctggtggttttgagaaagcaacataatttgagggaggttcattgggaatgacagaccaatcagtgtggttggttttccattgaaaaggaaaaagtcacttggctggttggttagcatgcgctgctctattaacaacctagtcaattgatgcaaaatgttgtaaggtctgtatgttctttgtcatagtatgatatcaatagtaagaaatgcatctaatttccttgcgcatcatctgactgggaacgtagtgtttcaccatgttagcaattgaaataatcttattgtggtttagttttcgtttcaaaactctggtgtggtaggattcttctctcctgatttgttctatcacaattcatatatgattagcaagatattattcgcgttagggacagtatgaaaattgccccaaggtcgtaattgagtccttgtctgaagttcaaatgtttgattgcgactaaacaagtaatatgttaatgtcaaatgtttgag

SEQ ID NO: 10589 - protein, 229 aa, Glycine max
  peptide (1)..(229): Ceres Seq. ID no. 13581612
  misc_feature (107)..(157): Pfam Name: Pfam Description:  Helix-loop-helix DNA-binding domain
  misc_feature (43)..(229): NCBI GI NO: 33339703 NR Description: MYC1 [Catharanthus roseus]
  misc_feature (46)..(229): NCBI GI NO: 18406408 NR Description: bHLH protein [Arabidopsis thaliana]
  misc_feature (46)..(229): NCBI GI NO: 21592490 NR Description: unknown [Arabidopsis thaliana]
  misc_feature (46)..(188): NCBI GI NO: 25404871 NR Description: protein T30E16.21
  misc_feature (174)..(229): NCBI GI NO: 25404871 NR Description: protein T30E16.21
  misc_feature (48)..(229): NCBI GI NO: 29150361 NR Description: hypothetical protein
  misc_feature (43)..(229): NCBI GI NO: 15241896 NR Description: bHLH protein family [Arabidopsis thaliana]
  misc_feature (46)..(188): NCBI GI NO: 25453562 NR Description: helix-loop-helix protein homolog
  misc_feature (46)..(188): NCBI GI NO: 30696324 NR Description: bHLH protein [Arabidopsis thaliana]
  misc_feature (39)..(177): NCBI GI NO: 34906952 NR Description: DNA-binding protein-like protein
MEPPLINDSTFSSANPSLSEIWPSHFPTDHTPSNKRHLSPSTDCGSNKHIKSSGSGSQDQNGALKAGEVDATSVAGNKLPEQTAKPSSSEQPPKQDYIHVRARRGQATDSHSLAERARREKISERMKILQDIVPGCNKVIGKALVLDEIINYIQSLQHQVEFLSMKLEAVNSRLSMSPTIECFPSKEVGTQPFDLAGIIFGSQPARGYAQGSQPGWLHMQIAGGFEKAT

SEQ ID NO: 10590 - DNA, 1470 bp, Glycine max
  misc_feature (1)..(1470): Ceres Seq. ID no. 14308107
aaaaaagttctattccttcgtctgcaaccctagctttccgttgtttgcaaatctatggctggtgaatctgataaacccgaaaacaccctctcttgtgctaactgtggcaaacctgcgaatcttcagtgtccaaaatgtatggaattgaagcttcctcgagaaggtgctgccttctgctctcaggattgtttcaagtcttcatggagctcgcacaaatcagtgcatctgaaggcaaaactatccccacctggcacacaaaattcagactcacttgatgaaggttggttatattgtttgaagagagggcaggctcgaacgccaaagcttcctcactttgattggacaggaccactgcagccatatcccatttctagtaaacggattgtcccagatcaaattgataaacctgattgggctggtgatggaacacccaaaattgagcccaatagtagtctacagcataccattgaggtcaaaactccagatcaaatagagagaatgagggaaacttgtcggattgcaagggaggtgttggatgcagctgctcggattattcagcctggtgtgacgactgatgagattgacagagttgttcatgaggcaactattgctgcaggaggatatccatcgcctctcaattaccatttcttccctaaatcttgctgcacgtcagttaatgaagtaatctgtcatggaattcctgatgcaaggaagcttgaggatggtgacattgtaaatgttgatgtcactgtgtactataaaggtgttcatggtgatctcaatgaaacatactttgtgggaaatgttgatgaagagtctctccaactagtaaaatgcacatatgagtgcctggagaaggcaatatccattgttaaacctgggatacgattccgtgagattggtgaagtcattaatcgtcatgcttcaatgtctggattctcggtggtaaaatcttattgtggtcatggaattggagagctcttccattgtgcaccaaacattcctcattattcaagaaataaagcagttggtgtgatgaaggctggacagacctttacaattgaaccaatgatcaatgccggtgtctggcgtgatcgaatgtggcctgatggatggactgctgttacagcggatggtaaacgaagtgctcaatttgagcacactcttttggtgacagagactggtgttgaagttttaacagggcggttgcagacatcacccaatgtttttccttggctaggttcataattgggtgaatcatggagacagatgctggcagtgtctaaataccatacaattattagacgacatttctttgatctatttctctgattgcctcctttgggtatcatgtttgtaagttatacaaaaaacagaagcaaattcaattgagtttaggtgaaaagtatgcttaatgatatgtttgtgtaattgaagaaaatttaattttagaattttgtcttgctttcc

SEQ ID NO: 10591 - protein, 397 aa, Glycine max
  peptide (1)..(397): Ceres Seq. ID no. 14308108
  misc_feature (1)..(395): NCBI GI NO: 15225437 NR Description: methionine aminopeptidase -related
  misc_feature (1)..(395): NCBI GI NO: 21593270 NR Description: putative methionine aminopeptidase
  misc_feature (75)..(395): NCBI GI NO: 37535920 NR Description: putative methionine aminopeptidase
  misc_feature (17)..(386): NCBI GI NO: 28436769 NR Description: Unknown (protein for IMAGE:5542221)
  misc_feature (17)..(388): NCBI GI NO: 577315 NR Description: KIAA0094 gene product is related to S
  misc_feature (17)..(388): NCBI GI NO: 33302602 NR Description: Methionine aminopeptidase 1
  misc_feature (92)..(389): NCBI GI NO: 39583678 NR Description: Hypothetical protein CBG08323
  misc_feature (14)..(57): NCBI GI NO: 39583678 NR Description: Hypothetical protein CBG08323
  misc_feature (17)..(388): NCBI GI NO: 28202007 NR Description: methionyl aminopeptidase 1 [Mus musculus]
  misc_feature (17)..(386): NCBI GI NO: 32484310 NR Description: Unknown (protein for MGC:64362) [Xenopus laevis]
MAGESDKPENTLSCANCGKPANLQCPKCMELKLPREGAAFCSQDCFKSSWSSHKSVHLKAKLSPPGTQNSDSLDEGWLYCLKRGQARTPKLPHFDWTGPLQPYPISSKRIVPDQIDKPDWAGDGTPKIEPNSSLQHTIEVKTPDQIERMRETCRIAREVLDAAARIIQPGVTTDEIDRVVHEATIAAGGYPSPLNYHFFPKSCCTSVNEVICHGIPDARKLEDGDIVNVDVTVYYKGVHGDLNETYFVGNVDEESLQLVKCTYECLEKAISIVKPGIRFREIGEVINRHASMSGFSVVKSYCGHGIGELFHCAPNIPHYSRNKAVGVMKAGQTFTIEPMINAGVWRDRMWPDGWTAVTADGKRSAQFEHTLLVTETGVEVLTGRLQTSPNVFPWLGS

SEQ ID NO: 10592 - protein, 369 aa, Glycine max
  peptide (1)..(369): Ceres Seq. ID no. 14308109
  misc_feature (1)..(367): NCBI GI NO: 15225437 NR Description: methionine aminopeptidase -related
  misc_feature (1)..(367): NCBI GI NO: 21593270 NR Description: putative methionine aminopeptidase
  misc_feature (47)..(367): NCBI GI NO: 37535920 NR Description: putative methionine aminopeptidase
  misc_feature (1)..(358): NCBI GI NO: 28436769 NR Description: Unknown (protein for IMAGE:5542221)
  misc_feature (1)..(360): NCBI GI NO: 577315 NR Description: KIAA0094 gene product is related to S
  misc_feature (1)..(360): NCBI GI NO: 33302602 NR Description: Methionine aminopeptidase 1
  misc_feature (64)..(361): NCBI GI NO: 39583678 NR Description: Hypothetical protein CBG08323
  misc_feature (1)..(29): NCBI GI NO: 39583678 NR Description: Hypothetical protein CBG08323
  misc_feature (1)..(360): NCBI GI NO: 28202007 NR Description: methionyl aminopeptidase 1 [Mus musculus]
  misc_feature (1)..(358): NCBI GI NO: 32484310 NR Description: Unknown (protein for MGC:64362) [Xenopus laevis]
MELKLPREGAAFCSQDCFKSSWSSHKSVHLKAKLSPPGTQNSDSLDEGWLYCLKRGQARTPKLPHFDWTGPLQPYPISSKRIVPDQIDKPDWAGDGTPKIEPNSSLQHTIEVKTPDQIERMRETCRIAREVLDAAARIIQPGVTTDEIDRVVHEATIAAGGYPSPLNYHFFPKSCCTSVNEVICHGIPDARKLEDGDIVNVDVTVYYKGVHGDLNETYFVGNVDEESLQLVKCTYECLEKAISIVKPGIRFREIGEVINRHASMSGFSVVKSYCGHGIGELFHCAPNIPHYSRNKAVGVMKAGQTFTIEPMINAGVWRDRMWPDGWTAVTADGKRSAQFEHTLLVTETGVEVLTGRLQTSPNVFPWLGS

SEQ ID NO: 10593 - protein, 249 aa, Glycine max
  peptide (1)..(249): Ceres Seq. ID no. 14308110
  misc_feature (1)..(247): NCBI GI NO: 15225437 NR Description: methionine aminopeptidase -related
  misc_feature (1)..(247): NCBI GI NO: 21593270 NR Description: putative methionine aminopeptidase
  misc_feature (1)..(247): NCBI GI NO: 37535920 NR Description: putative methionine aminopeptidase
  misc_feature (1)..(238): NCBI GI NO: 28436769 NR Description: Unknown (protein for IMAGE:5542221)
  misc_feature (1)..(240): NCBI GI NO: 577315 NR Description: KIAA0094 gene product is related to S
  misc_feature (1)..(240): NCBI GI NO: 33302602 NR Description: Methionine aminopeptidase 1
  misc_feature (1)..(241): NCBI GI NO: 39583678 NR Description: Hypothetical protein CBG08323
  misc_feature (1)..(240): NCBI GI NO: 28202007 NR Description: methionyl aminopeptidase 1 [Mus musculus]
  misc_feature (1)..(238): NCBI GI NO: 32484310 NR Description: Unknown (protein for MGC:64362) [Xenopus laevis]
  misc_feature (1)..(236): NCBI GI NO: 17543082 NR Description: metallopeptidase family M24 (4E448)
MRETCRIAREVLDAAARIIQPGVTTDEIDRVVHEATIAAGGYPSPLNYHFFPKSCCTSVNEVICHGIPDARKLEDGDIVNVDVTVYYKGVHGDLNETYFVGNVDEESLQLVKCTYECLEKAISIVKPGIRFREIGEVINRHASMSGFSVVKSYCGHGIGELFHCAPNIPHYSRNKAVGVMKAGQTFTIEPMINAGVWRDRMWPDGWTAVTADGKRSAQFEHTLLVTETGVEVLTGRLQTSPNVFPWLGS

SEQ ID NO: 10594 - DNA, 1302 bp, Glycine max
  misc_feature (1)..(1302): Ceres Seq. ID no. 15177611
agaatattcttcttcctccaccgcgattagggttttcggattttcactttactctcacttcttccaccctcgtcacctgcaattgatttttttttcttccaatcgataattgaagaacacgacattccaattcctctctcgattcgtttcgctagctcgataatcaaaagtgcctggtgattcggagttgtttgtgaaaatgagaaggcaggggcactatggggatccatctgccaacacttgtgttggtggtggccagatgcatcatatggctggtcaaaggggggaggccaagtcgggtaattttgaaggacggctagaggcctttactccagaaagagagaatccgtatggaaattccaagccggagggtcagtggagatgggagatggatgaatcgaagatgtccaattcaatggcatctcgaatgtttaatgaaggtcaaggggttgatgcttcaaagccctattttcaagggcagagccggaacaatagtgattccagatctcaggctcatgaagaagatatggatgttagatatgaaggagaacatttatcacaatcttttgaaggtcttgagcagaattttcatgatgacatcattaaactcaccaaagaacagaatgatgctgaagatgcagcatatgccagacacagagagaaaataaatgcaatcaatgctcagtatgaagaaaaactagcagcactccgagctcagcatagcagccgcagagctgaatttcttcaaagggaatcacatgctacgcaacagcagtaccagcaaatcataagggatccttacctcggtggtggcatggcaccccgagaccctcatgcaccccgagaccctcatgcaccccgagatcctcatggttacaacaatgtgaatgattcaggtgcaggtggagaagtgcaacgaggctattctgccgatcactttgatccttaccgagagagagctcgatttcttgggggtggtagagatcaaggatttgaacctagaggcccatatcctggtggccgtgtctatgacactggttcacgctactacaattgagttttgacccaaaggtttatctccattttgggtttctactgcaggtgaaaatgcttaaattgacataatttatgctttgtcatcttaccatctttttactaccctgtttatggaaattaacgtttcttagcggctgttatttatatagatcaacattggagttgcacaccgttatattggtgttgtgcattaaaacgtaggatatttgttgtttgtgtttatgaaaaccaataacattcaacacc

SEQ ID NO: 10595 - protein, 285 aa, Glycine max
  peptide (1)..(285): Ceres Seq. ID no. 15177612
  misc_feature (1)..(284): NCBI GI NO: 22326954 NR Description: expressed protein [Arabidopsis thaliana]
  misc_feature (17)..(248): NCBI GI NO: 15228732 NR Description: expressed protein [Arabidopsis thaliana]
  misc_feature (109)..(248): NCBI GI NO: 26449851 NR Description: unknown protein [Arabidopsis thaliana]
MRRQGHYGDPSANTCVGGGQMHHMAGQRGEAKSGNFEGRLEAFTPERENPYGNSKPEGQWRWEMDESKMSNSMASRMFNEGQGVDASKPYFQGQSRNNSDSRSQAHEEDMDVRYEGEHLSQSFEGLEQNFHDDIIKLTKEQNDAEDAAYARHREKINAINAQYEEKLAALRAQHSSRRAEFLQRESHATQQQYQQIIRDPYLGGGMAPRDPHAPRDPHAPRDPHGYNNVNDSGAGGEVQRGYSADHFDPYRERARFLGGGRDQGFEPRGPYPGGRVYDTGSRYYN

SEQ ID NO: 10596 - protein, 265 aa, Glycine max
  peptide (1)..(265): Ceres Seq. ID no. 15177613
  misc_feature (1)..(264): NCBI GI NO: 22326954 NR Description: expressed protein [Arabidopsis thaliana]
  misc_feature (1)..(228): NCBI GI NO: 15228732 NR Description: expressed protein [Arabidopsis thaliana]
  misc_feature (89)..(228): NCBI GI NO: 26449851 NR Description: unknown protein [Arabidopsis thaliana]
MHHMAGQRGEAKSGNFEGRLEAFTPERENPYGNSKPEGQWRWEMDESKMSNSMASRMFNEGQGVDASKPYFQGQSRNNSDSRSQAHEEDMDVRYEGEHLSQSFEGLEQNFHDDIIKLTKEQNDAEDAAYARHREKINAINAQYEEKLAALRAQHSSRRAEFLQRESHATQQQYQQIIRDPYLGGGMAPRDPHAPRDPHAPRDPHGYNNVNDSGAGGEVQRGYSADHFDPYRERARFLGGGRDQGFEPRGPYPGGRVYDTGSRYYN

SEQ ID NO: 10597 - protein, 262 aa, Glycine max
  peptide (1)..(262): Ceres Seq. ID no. 15177614
  misc_feature (1)..(261): NCBI GI NO: 22326954 NR Description: expressed protein [Arabidopsis thaliana]
  misc_feature (1)..(225): NCBI GI NO: 15228732 NR Description: expressed protein [Arabidopsis thaliana]
  misc_feature (86)..(225): NCBI GI NO: 26449851 NR Description: unknown protein [Arabidopsis thaliana]
MAGQRGEAKSGNFEGRLEAFTPERENPYGNSKPEGQWRWEMDESKMSNSMASRMFNEGQGVDASKPYFQGQSRNNSDSRSQAHEEDMDVRYEGEHLSQSFEGLEQNFHDDIIKLTKEQNDAEDAAYARHREKINAINAQYEEKLAALRAQHSSRRAEFLQRESHATQQQYQQIIRDPYLGGGMAPRDPHAPRDPHAPRDPHGYNNVNDSGAGGEVQRGYSADHFDPYRERARFLGGGRDQGFEPRGPYPGGRVYDTGSRYYN

SEQ ID NO: 10598 - DNA, 1051 bp, Glycine max
  misc_feature (1)..(1051): Ceres Seq. ID no. 15227118
aactgggcccatagaattgttaatttctctgatcccattgtgaatttgtggggatctgaattgcggaggaagatgattcagcttctgttcacggtgatattttcggaggcttcgatgatagcgttgctgctgttcaagacccctttgaggaagctcgtgataatgggcttggatcggttgaagcgaggtcgtggacccttgatggtgaagaccgttgcagggaccgttctcgtggtgttgttgtcgagtgtgtatagcatgttgaagattcagaagcgtgggatccaagagggtgctgttgttaaccccaccgatcaggttcttatggccaagcacctcctcgaagcaacgctcatggttgctgtccttttccttgcacttatgatagacagactacatcattacataagagaactgcggattcgaagaaaaggcatggaagctgtgaagaaacaaaccagagggactgaagatgggaaagttgcaaattcagaagaaattaagtctgtggaggaagaaagagccagattgagagctgaacttagccgccttgaatctgaactacagtcaaaaacaaaagacgtagatggtgctgaagccaatatagctgctctgagaaaacaatctgaggggttccttcttgagtatgatcgcttacttgaggaaaaccagaacctccgcaaccaactacaatccttggacaggaaattgtcacattcaggttccaagaagaatatgtaagaaaattgcaggtaagaatggcttcttttgtatactcttaaggaattccatggcagtttgttgataacagcttgtcaatccctgtaagcttgctcctaaaggaatacgattttcacttttgagttgaatttggttcaattttgttctgacaaattgtgaatttttttttagtgataacagaaaatatagtgctgatttgtttttttctgcacataatgtaacttctgcaacttctgttccactatttaagattcgacaactgaagggatgtgcccacgattattgtttgatgtcaaaaaaaaaaaaaaaa

SEQ ID NO: 10599 - protein, 246 aa, Glycine max
  peptide (1)..(246): Ceres Seq. ID no. 15227119
  misc_feature (28)..(217): Pfam Name: Pfam Description:  B-cell receptor-associated protein 31-like
  misc_feature (25)..(246): NCBI GI NO: 18422225 NR Description: expressed protein [Arabidopsis thaliana]
  misc_feature (25)..(244): NCBI GI NO: 9759015 NR Description: gene_id:K16E1.4~unknown protein
  misc_feature (25)..(246): NCBI GI NO: 21553655 NR Description: unknown [Arabidopsis thaliana]
  misc_feature (25)..(245): NCBI GI NO: 22655198 NR Description: unknown protein [Arabidopsis thaliana]
  misc_feature (25)..(173): NCBI GI NO: 30682503 NR Description: expressed protein [Arabidopsis thaliana]
  misc_feature (25)..(230): NCBI GI NO: 34897474 NR Description: unknown protein
  misc_feature (25)..(230): NCBI GI NO: 15239667 NR Description: hypothetical protein [Arabidopsis thaliana]
  misc_feature (25)..(230): NCBI GI NO: 15231412 NR Description: expressed protein [Arabidopsis thaliana]
  misc_feature (24)..(155): NCBI GI NO: 18402620 NR Description: expressed protein [Arabidopsis thaliana]
  misc_feature (25)..(155): NCBI GI NO: 21618114 NR Description: unknown [Arabidopsis thaliana]
NWAHRIVNFSDPIVNLWGSELRRKMIQLLFTVIFSEASMIALLLFKTPLRKLVIMGLDRLKRGRGPLMVKTVAGTVLVVLLSSVYSMLKIQKRGIQEGAVVNPTDQVLMAKHLLEATLMVAVLFLALMIDRLHHYIRELRIRRKGMEAVKKQTRGTEDGKVANSEEIKSVEEERARLRAELSRLESELQSKTKDVDGAEANIAALRKQSEGFLLEYDRLLEENQNLRNQLQSLDRKLSHSGSKKNM

SEQ ID NO: 10600 - protein, 222 aa, Glycine max
  peptide (1)..(222): Ceres Seq. ID no. 15227120
  misc_feature (4)..(193): Pfam Name: Pfam Description:  B-cell receptor-associated protein 31-like
  misc_feature (1)..(222): NCBI GI NO: 18422225 NR Description: expressed protein [Arabidopsis thaliana]
  misc_feature (1)..(220): NCBI GI NO: 9759015 NR Description: gene_id:K16E1.4~unknown protein
  misc_feature (1)..(222): NCBI GI NO: 21553655 NR Description: unknown [Arabidopsis thaliana]
  misc_feature (1)..(221): NCBI GI NO: 22655198 NR Description: unknown protein [Arabidopsis thaliana]
  misc_feature (1)..(149): NCBI GI NO: 30682503 NR Description: expressed protein [Arabidopsis thaliana]
  misc_feature (1)..(206): NCBI GI NO: 34897474 NR Description: unknown protein
  misc_feature (1)..(206): NCBI GI NO: 15239667 NR Description: hypothetical protein [Arabidopsis thaliana]
  misc_feature (1)..(206): NCBI GI NO: 15231412 NR Description: expressed protein [Arabidopsis thaliana]
  misc_feature (1)..(131): NCBI GI NO: 18402620 NR Description: expressed protein [Arabidopsis thaliana]
  misc_feature (1)..(131): NCBI GI NO: 21618114 NR Description: unknown [Arabidopsis thaliana]
MIQLLFTVIFSEASMIALLLFKTPLRKLVIMGLDRLKRGRGPLMVKTVAGTVLVVLLSSVYSMLKIQKRGIQEGAVVNPTDQVLMAKHLLEATLMVAVLFLALMIDRLHHYIRELRIRRKGMEAVKKQTRGTEDGKVANSEEIKSVEEERARLRAELSRLESELQSKTKDVDGAEANIAALRKQSEGFLLEYDRLLEENQNLRNQLQSLDRKLSHSGSKKNM

SEQ ID NO: 10601 - protein, 208 aa, Glycine max
  peptide (1)..(208): Ceres Seq. ID no. 15227121
  misc_feature (1)..(179): Pfam Name: Pfam Description:  B-cell receptor-associated protein 31-like
  misc_feature (1)..(208): NCBI GI NO: 18422225 NR Description: expressed protein [Arabidopsis thaliana]
  misc_feature (1)..(206): NCBI GI NO: 9759015 NR Description: gene_id:K16E1.4~unknown protein
  misc_feature (1)..(208): NCBI GI NO: 21553655 NR Description: unknown [Arabidopsis thaliana]
  misc_feature (1)..(207): NCBI GI NO: 22655198 NR Description: unknown protein [Arabidopsis thaliana]
  misc_feature (1)..(135): NCBI GI NO: 30682503 NR Description: expressed protein [Arabidopsis thaliana]
  misc_feature (1)..(192): NCBI GI NO: 34897474 NR Description: unknown protein
  misc_feature (1)..(192): NCBI GI NO: 15239667 NR Description: hypothetical protein [Arabidopsis thaliana]
  misc_feature (1)..(192): NCBI GI NO: 15231412 NR Description: expressed protein [Arabidopsis thaliana]
  misc_feature (1)..(117): NCBI GI NO: 18402620 NR Description: expressed protein [Arabidopsis thaliana]
  misc_feature (1)..(117): NCBI GI NO: 21618114 NR Description: unknown [Arabidopsis thaliana]
MIALLLFKTPLRKLVIMGLDRLKRGRGPLMVKTVAGTVLVVLLSSVYSMLKIQKRGIQEGAVVNPTDQVLMAKHLLEATLMVAVLFLALMIDRLHHYIRELRIRRKGMEAVKKQTRGTEDGKVANSEEIKSVEEERARLRAELSRLESELQSKTKDVDGAEANIAALRKQSEGFLLEYDRLLEENQNLRNQLQSLDRKLSHSGSKKNM

SEQ ID NO: 10602 - protein, 192 aa, Glycine max
  peptide (1)..(192): Ceres Seq. ID no. 15227122
  misc_feature (1)..(163): Pfam Name: Pfam Description:  B-cell receptor-associated protein 31-like
  misc_feature (1)..(192): NCBI GI NO: 18422225 NR Description: expressed protein [Arabidopsis thaliana]
  misc_feature (1)..(190): NCBI GI NO: 9759015 NR Description: gene_id:K16E1.4~unknown protein
  misc_feature (1)..(192): NCBI GI NO: 21553655 NR Description: unknown [Arabidopsis thaliana]
  misc_feature (1)..(191): NCBI GI NO: 22655198 NR Description: unknown protein [Arabidopsis thaliana]
  misc_feature (1)..(119): NCBI GI NO: 30682503 NR Description: expressed protein [Arabidopsis thaliana]
  misc_feature (1)..(176): NCBI GI NO: 34897474 NR Description: unknown protein
  misc_feature (1)..(176): NCBI GI NO: 15239667 NR Description: hypothetical protein [Arabidopsis thaliana]
  misc_feature (1)..(176): NCBI GI NO: 15231412 NR Description: expressed protein [Arabidopsis thaliana]
  misc_feature (1)..(101): NCBI GI NO: 18402620 NR Description: expressed protein [Arabidopsis thaliana]
  misc_feature (1)..(101): NCBI GI NO: 21618114 NR Description: unknown [Arabidopsis thaliana]
MGLDRLKRGRGPLMVKTVAGTVLVVLLSSVYSMLKIQKRGIQEGAVVNPTDQVLMAKHLLEATLMVAVLFLALMIDRLHHYIRELRIRRKGMEAVKKQTRGTEDGKVANSEEIKSVEEERARLRAELSRLESELQSKTKDVDGAEANIAALRKQSEGFLLEYDRLLEENQNLRNQLQSLDRKLSHSGSKKNM

SEQ ID NO: 10603 - DNA, 1325 bp, Glycine max
  misc_feature (1)..(1325): Ceres Seq. ID no. 13594168
atttttcactacttcacttgactagtccaattatctgatgccatatcaaaaccatgtctgacccttctaccctcttaccctcctcccaccaccaccacaaccaccatgtgccactcatccaaggcggcgccaccgcaccctcctcctcctccaccaccctagcccgagaataccgcaagggcaactggaccatccaagagaccctcattctcaccactgcaaaaaagctcgacgacgagcgcaggctcaaaacccctgctgcatgtagcacctccaccaccaccaccagaaccagcggcgagctccggtggaaatgggtggagaactattgctggagccatggctgcttgcgaagccagaaccaatgcaacgacaaatgggacaacctcctccgcgattacaaaaaggttcgcgactacgagtccaaatcaaacgacaacgacaacaacaacaacaaacacttcccttcttattggaccctcaacaaacaacaacgtaaggaacagaacctcccctccaacatggtcttcgaagtctaccaaaccatcgccgatgtcctccaacgaaaacaaacacaatcccaaagacaacatcaacaacctctggctattccattagttacttcctcaccctcaccacttcaaacacttccaccacctcctctaccaccaccgccgcctccgccacctcctcctccgccagttagctccaccactccggtaggctcagagagatcggaatcatcaggaactgagcacagtgaggatgatgatgatgggtcggaatcaaaacgtaggaaagttaagaaccttggttcaagaataatgcaaagtgcatcggtgttggcacgagctcttaggagttgtgaggagaagaaggagaaacggcaccgtgaaatgattgagctggagcaaaggaggattcagatggaggaagctcggaatgaggttcaccggcaaggcatcgcgacccttgtcgccgccgtcaccaacctttccggtgccattgagtcactcattaataattctgaacgccatggccaaagataattaattaatatggcaccatataataataataatatatgcttcctcgcctagctagcagtttattattattatgtgattgatcagaaaatcatataatatctatcggccattctttccctcttcaaattcaattgttgtctaatatttttgagtcggttttaccaccaattgatttctcatgattatatgtcagcagctgatatgtgatcgatccatatggtatatgtttcattattctttggtggagatcaaaccaagccctaacattgattgttt

SEQ ID NO: 10604 - protein, 331 aa, Glycine max
  peptide (1)..(331): Ceres Seq. ID no. 13594169
  misc_feature (182)..(232): Pfam Name: Pfam Description:  Formin Homology 2 Domain
  misc_feature (157)..(328): NCBI GI NO: 15221676 NR Description: proline-rich protein family [Arabidopsis thaliana]
  misc_feature (28)..(176): NCBI GI NO: 15221676 NR Description: proline-rich protein family [Arabidopsis thaliana]
  misc_feature (28)..(176): NCBI GI NO: 6692131 NR Description: T19E23.10 [Arabidopsis thaliana]
  misc_feature (220)..(328): NCBI GI NO: 6692131 NR Description: T19E23.10 [Arabidopsis thaliana]
  misc_feature (181)..(249): NCBI GI NO: 6692131 NR Description: T19E23.10 [Arabidopsis thaliana]
  misc_feature (29)..(249): NCBI GI NO: 15227458 NR Description: proline-rich protein family [Arabidopsis thaliana]
  misc_feature (26)..(240): NCBI GI NO: 40538915 NR Description: hypothetical protein
  misc_feature (193)..(222): NCBI GI NO: 11068076 NR Description: PxORF73 peptide [Plutella xylostella granulovirus]
  misc_feature (193)..(215): NCBI GI NO: 11068076 NR Description: PxORF73 peptide [Plutella xylostella granulovirus]
  misc_feature (190)..(222): NCBI GI NO: 11068076 NR Description: PxORF73 peptide [Plutella xylostella granulovirus]
MSDPSTLLPSSHHHHNHHVPLIQGGATAPSSSSTTLAREYRKGNWTIQETLILTTAKKLDDERRLKTPAACSTSTTTTRTSGELRWKWVENYCWSHGCLRSQNQCNDKWDNLLRDYKKVRDYESKSNDNDNNNNKHFPSYWTLNKQQRKEQNLPSNMVFEVYQTIADVLQRKQTQSQRQHQQPLAIPLVTSSPSPLQTLPPPPLPPPPPPPPPPPPVSSTTPVGSERSESSGTEHSEDDDDGSESKRRKVKNLGSRIMQSASVLARALRSCEEKKEKRHREMIELEQRRIQMEEARNEVHRQGIATLVAAVTNLSGAIESLINNSERHGQR

SEQ ID NO: 10605 - protein, 175 aa, Glycine max
  peptide (1)..(175): Ceres Seq. ID no. 13594170
  misc_feature (26)..(76): Pfam Name: Pfam Description:  Formin Homology 2 Domain
  misc_feature (1)..(172): NCBI GI NO: 15221676 NR Description: proline-rich protein family [Arabidopsis thaliana]
  misc_feature (1)..(20): NCBI GI NO: 15221676 NR Description: proline-rich protein family [Arabidopsis thaliana]
  misc_feature (1)..(20): NCBI GI NO: 6692131 NR Description: T19E23.10 [Arabidopsis thaliana]
  misc_feature (64)..(172): NCBI GI NO: 6692131 NR Description: T19E23.10 [Arabidopsis thaliana]
  misc_feature (25)..(93): NCBI GI NO: 6692131 NR Description: T19E23.10 [Arabidopsis thaliana]
  misc_feature (1)..(93): NCBI GI NO: 15227458 NR Description: proline-rich protein family [Arabidopsis thaliana]
  misc_feature (1)..(84): NCBI GI NO: 40538915 NR Description: hypothetical protein
  misc_feature (37)..(66): NCBI GI NO: 11068076 NR Description: PxORF73 peptide [Plutella xylostella granulovirus]
  misc_feature (37)..(59): NCBI GI NO: 11068076 NR Description: PxORF73 peptide [Plutella xylostella granulovirus]
  misc_feature (34)..(66): NCBI GI NO: 11068076 NR Description: PxORF73 peptide [Plutella xylostella granulovirus]
MVFEVYQTIADVLQRKQTQSQRQHQQPLAIPLVTSSPSPLQTLPPPPLPPPPPPPPPPPPVSSTTPVGSERSESSGTEHSEDDDDGSESKRRKVKNLGSRIMQSASVLARALRSCEEKKEKRHREMIELEQRRIQMEEARNEVHRQGIATLVAAVTNLSGAIESLINNSERHGQR

SEQ ID NO: 10606 - DNA, 1278 bp, Glycine max
  misc_feature (1)..(1278): Ceres Seq. ID no. 15175857
gtactcaaaccctaatccccaataaaaacacactcaaaaacccttttttttttcttattcatcctctagttcttctttgacattcacaatgccttcaattccagaagagccattgttggcaccgaacccggaccggttctgcatgttcccaatccaatatcctcaaatctgggaaatgtacaagaaagccgaagcctcgttctggacggcggaggaggtggacctctcgcaggacctccgccactgggactccctgaccgacggcgagcgccacttcgtcagtcacgtcctcgccttcttcgccgcctccgacggcatcgtacttgagaacctcgctgggcgcttcacgaaggaaatccaaatccccgaggcccgcgccttctacggcttccagatcgccatcgagaacattcactccgagatgtacagcctcctcctcgaaacctacatcaaggactcctcccagaagagccacctcttccgcgccatcgacaccatcccgtgcgttaccaagaaagcccagtgggccctacgctggatcgattcttccgactccttcgccgagcgtctcgttgccttcgcatgtgtggaaggtatcttcttctccggaagcttctgcgctgtcttctggctcaaaaaacgtggactcatgcccgggctcactttctcaaatgaactaatatcacgcgatgaaggtcttcattgtgatttcgcgtgtcttttatactctctgctgagacagaagctcaccgaggagcgcgtaagggagattgtgaaggacgcggtggacattgaacgggagtttgtgtgcgacgcgcttccctgcgcgttggtggggatgaacggtgatttgatgagccagtacattgaatttgttgcggatcggttgctgggtgcgctagggtgcgggaaggtgtacaatgttcagaatccgttcgattggatggagctgatttctctgcaggggaagaccaacttcttcgagaagcgcgtcggggaatatcagaaggcttctgttatgtccagcttgaacgggaacggtggtgggaaccacgtgttcaagatggatgaggatttctaatttattattatgggaatgagaattaggtttaggggcgaatgctgataatgatagtatttctgtattgttaaatatatttacgtttttttttcttttttacttttttagcatactatttattttttttgtaatggttattgttcatttgttgtttttgatctctctccttcagcaatgggatgctaaattatactttc

SEQ ID NO: 10607 - protein, 330 aa, Glycine max
  peptide (1)..(330): Ceres Seq. ID no. 15175858
  misc_feature (7)..(287): Pfam Name: Pfam Description:  Ribonucleotide reductase, small chain
  misc_feature (1)..(330): NCBI GI NO: 1710401 NR Description: RIBONUCLEOSIDE-DIPHOSPHATE REDUCTASE SMALL CHAIN
  misc_feature (1)..(330): NCBI GI NO: 15232077 NR Description: ribonucleotide reductase small subunit -related
  misc_feature (6)..(330): NCBI GI NO: 34898038 NR Description: putative ribonucleoside-diphosphate reductase
  misc_feature (6)..(330): NCBI GI NO: 4894211 NR Description: ribonucleotide reductase small subunit
  misc_feature (6)..(330): NCBI GI NO: 15229476 NR Description: ribonucleoside-diphosphate reductase small chain
  misc_feature (6)..(330): NCBI GI NO: 7433352 NR Description: ribonucleoside-diphosphate reductase (EC 1
  misc_feature (6)..(330): NCBI GI NO: 929959 NR Description: ribonuleotide reductase small subunit
  misc_feature (7)..(330): NCBI GI NO: 266918 NR Description: RIBONUCLEOSIDE-DIPHOSPHATE REDUCTASE SMALL CHAIN
  misc_feature (3)..(330): NCBI GI NO: 18859327 NR Description: ribonucleotide reductase protein r2 class I
  misc_feature (1)..(330): NCBI GI NO: 27711284 NR Description: similar to ribonucleotide reductase M2
MPSIPEEPLLAPNPDRFCMFPIQYPQIWEMYKKAEASFWTAEEVDLSQDLRHWDSLTDGERHFVSHVLAFFAASDGIVLENLAGRFTKEIQIPEARAFYGFQIAIENIHSEMYSLLLETYIKDSSQKSHLFRAIDTIPCVTKKAQWALRWIDSSDSFAERLVAFACVEGIFFSGSFCAVFWLKKRGLMPGLTFSNELISRDEGLHCDFACLLYSLLRQKLTEERVREIVKDAVDIEREFVCDALPCALVGMNGDLMSQYIEFVADRLLGALGCGKVYNVQNPFDWMELISLQGKTNFFEKRVGEYQKASVMSSLNGNGGGNHVFKMDEDF

SEQ ID NO: 10608 - protein, 312 aa, Glycine max
  peptide (1)..(312): Ceres Seq. ID no. 15175859
  misc_feature (1)..(269): Pfam Name: Pfam Description:  Ribonucleotide reductase, small chain
  misc_feature (1)..(312): NCBI GI NO: 1710401 NR Description: RIBONUCLEOSIDE-DIPHOSPHATE REDUCTASE SMALL CHAIN
  misc_feature (1)..(312): NCBI GI NO: 15232077 NR Description: ribonucleotide reductase small subunit -related
  misc_feature (1)..(312): NCBI GI NO: 34898038 NR Description: putative ribonucleoside-diphosphate reductase
  misc_feature (1)..(312): NCBI GI NO: 4894211 NR Description: ribonucleotide reductase small subunit
  misc_feature (1)..(312): NCBI GI NO: 15229476 NR Description: ribonucleoside-diphosphate reductase small chain
  misc_feature (1)..(312): NCBI GI NO: 7433352 NR Description: ribonucleoside-diphosphate reductase (EC 1
  misc_feature (1)..(312): NCBI GI NO: 929959 NR Description: ribonuleotide reductase small subunit
  misc_feature (1)..(312): NCBI GI NO: 266918 NR Description: RIBONUCLEOSIDE-DIPHOSPHATE REDUCTASE SMALL CHAIN
  misc_feature (1)..(312): NCBI GI NO: 18859327 NR Description: ribonucleotide reductase protein r2 class I
  misc_feature (1)..(312): NCBI GI NO: 27711284 NR Description: similar to ribonucleotide reductase M2
MFPIQYPQIWEMYKKAEASFWTAEEVDLSQDLRHWDSLTDGERHFVSHVLAFFAASDGIVLENLAGRFTKEIQIPEARAFYGFQIAIENIHSEMYSLLLETYIKDSSQKSHLFRAIDTIPCVTKKAQWALRWIDSSDSFAERLVAFACVEGIFFSGSFCAVFWLKKRGLMPGLTFSNELISRDEGLHCDFACLLYSLLRQKLTEERVREIVKDAVDIEREFVCDALPCALVGMNGDLMSQYIEFVADRLLGALGCGKVYNVQNPFDWMELISLQGKTNFFEKRVGEYQKASVMSSLNGNGGGNHVFKMDEDF

SEQ ID NO: 10609 - protein, 301 aa, Glycine max
  peptide (1)..(301): Ceres Seq. ID no. 15175860
  misc_feature (1)..(258): Pfam Name: Pfam Description:  Ribonucleotide reductase, small chain
  misc_feature (1)..(301): NCBI GI NO: 1710401 NR Description: RIBONUCLEOSIDE-DIPHOSPHATE REDUCTASE SMALL CHAIN
  misc_feature (1)..(301): NCBI GI NO: 15232077 NR Description: ribonucleotide reductase small subunit -related
  misc_feature (1)..(301): NCBI GI NO: 34898038 NR Description: putative ribonucleoside-diphosphate reductase
  misc_feature (1)..(301): NCBI GI NO: 4894211 NR Description: ribonucleotide reductase small subunit
  misc_feature (1)..(301): NCBI GI NO: 15229476 NR Description: ribonucleoside-diphosphate reductase small chain
  misc_feature (1)..(301): NCBI GI NO: 7433352 NR Description: ribonucleoside-diphosphate reductase (EC 1
  misc_feature (1)..(301): NCBI GI NO: 929959 NR Description: ribonuleotide reductase small subunit
  misc_feature (1)..(301): NCBI GI NO: 266918 NR Description: RIBONUCLEOSIDE-DIPHOSPHATE REDUCTASE SMALL CHAIN
  misc_feature (1)..(301): NCBI GI NO: 18859327 NR Description: ribonucleotide reductase protein r2 class I
  misc_feature (1)..(301): NCBI GI NO: 27711284 NR Description: similar to ribonucleotide reductase M2
MYKKAEASFWTAEEVDLSQDLRHWDSLTDGERHFVSHVLAFFAASDGIVLENLAGRFTKEIQIPEARAFYGFQIAIENIHSEMYSLLLETYIKDSSQKSHLFRAIDTIPCVTKKAQWALRWIDSSDSFAERLVAFACVEGIFFSGSFCAVFWLKKRGLMPGLTFSNELISRDEGLHCDFACLLYSLLRQKLTEERVREIVKDAVDIEREFVCDALPCALVGMNGDLMSQYIEFVADRLLGALGCGKVYNVQNPFDWMELISLQGKTNFFEKRVGEYQKASVMSSLNGNGGGNHVFKMDEDF

SEQ ID NO: 10610 - DNA, 1111 bp, Glycine max
  misc_feature (1)..(1111): Ceres Seq. ID no. 14311256
ataagaagataattggaagattgaagaaggagtgattgtaatctggaaggatgaggagtactattgttttacgattgggaagacgtgcgcgtattccattccaacgagcattagcaacgcagagtaacaataataacactctggtgtttatccctctccctcgctgcctcagcgcaacgcggtcgtttcactttcagcgcaattcaccgtttggattctccagcgggcatgggcaacgcaggagcatgttcatccaaacgcagcccacgccaaatccctcgtctctcatgttttatcccggcaagcccgtcatggaagttggaagctccgacttcccaaaccctcgttctgcaatgaactctcccctcgccaaatcgctcttcgcaatcgacggcgttactcgcgttttctttggatctgatttcgttaccgttacgaaatcggaagaggctgcgtgggaattcctcaagcctgaagtcttcgccgccattatggatttctactcctccgctcagcctctctttttagattctcaagccgccgcggccatggatacagctattcaccaagatgattctgaaacagttgcaatgatcaaggaattgttagagactcgaattcgacctgcagtgcaagatgatggcggggacattgaatatagaggttttgacctagatactggaatagtaaaacttagaatgcaaggggcatgcagtggctgcccaagttcatcagtgactctgaaatcaggcattgaaaatatgctgatgcattatgttcctgaggtcaaaggtgtggaacaagaattggatgctgaggatgatggagcagcattaagtggagaaattaaatagttgaacttttttttgttttttctcaaaattgctacttgcatttagtctcttcatgcatgcattttcgcactcaacagagacttagaagtacaacagcagtacatgatggaaacaaaaaaaggtgtgagtctacacaaaaaatatattgaataagtcgtgagttggatacattatagtatggcatgaaatcatcgttccatgctagttggatcttcctgacatagatgaaagtaatttatgacacgatgccattacat

SEQ ID NO: 10611 - protein, 267 aa, Glycine max
  peptide (1)..(267): Ceres Seq. ID no. 14311257
  misc_feature (182)..(252): Pfam Name: Pfam Description:  NifU-like domain
  misc_feature (61)..(267): NCBI GI NO: 34897632 NR Description: hypothetical protein [Oryza sativa]
  misc_feature (61)..(267): NCBI GI NO: 18402817 NR Description: expressed protein [Arabidopsis thaliana]
  misc_feature (40)..(267): NCBI GI NO: 25405462 NR Description: unknown protein, 90320-88994
  misc_feature (100)..(267): NCBI GI NO: 15223842 NR Description: expressed protein [Arabidopsis thaliana]
  misc_feature (63)..(257): NCBI GI NO: 31203061 NR Description: ENSANGP00000019230 [Anopheles gambiae]
  misc_feature (63)..(257): NCBI GI NO: 6554171 NR Description: TO42 [Drosophila melanogaster]
  misc_feature (63)..(257): NCBI GI NO: 24643765 NR Description: CG32857-PA [Drosophila melanogaster]
  misc_feature (64)..(256): NCBI GI NO: 37681825 NR Description: HIRA interacting protein 5 [Danio rerio]
  misc_feature (66)..(257): NCBI GI NO: 26324295 NR Description: unnamed protein product [Mus musculus]
  misc_feature (64)..(257): NCBI GI NO: 12834577 NR Description: unnamed protein product [Mus musculus]
MRSTIVLRLGRRARIPFQRALATQSNNNNTLVFIPLPRCLSATRSFHFQRNSPFGFSSGHGQRRSMFIQTQPTPNPSSLMFYPGKPVMEVGSSDFPNPRSAMNSPLAKSLFAIDGVTRVFFGSDFVTVTKSEEAAWEFLKPEVFAAIMDFYSSAQPLFLDSQAAAAMDTAIHQDDSETVAMIKELLETRIRPAVQDDGGDIEYRGFDLDTGIVKLRMQGACSGCPSSSVTLKSGIENMLMHYVPEVKGVEQELDAEDDGAALSGEIK

SEQ ID NO: 10612 - protein, 202 aa, Glycine max
  peptide (1)..(202): Ceres Seq. ID no. 14311258
  misc_feature (117)..(187): Pfam Name: Pfam Description:  NifU-like domain
  misc_feature (1)..(202): NCBI GI NO: 34897632 NR Description: hypothetical protein [Oryza sativa]
  misc_feature (1)..(202): NCBI GI NO: 18402817 NR Description: expressed protein [Arabidopsis thaliana]
  misc_feature (1)..(202): NCBI GI NO: 25405462 NR Description: unknown protein, 90320-88994
  misc_feature (35)..(202): NCBI GI NO: 15223842 NR Description: expressed protein [Arabidopsis thaliana]
  misc_feature (1)..(192): NCBI GI NO: 31203061 NR Description: ENSANGP00000019230 [Anopheles gambiae]
  misc_feature (1)..(192): NCBI GI NO: 6554171 NR Description: TO42 [Drosophila melanogaster]
  misc_feature (1)..(192): NCBI GI NO: 24643765 NR Description: CG32857-PA [Drosophila melanogaster]
  misc_feature (1)..(191): NCBI GI NO: 37681825 NR Description: HIRA interacting protein 5 [Danio rerio]
  misc_feature (1)..(192): NCBI GI NO: 26324295 NR Description: unnamed protein product [Mus musculus]
  misc_feature (1)..(192): NCBI GI NO: 12834577 NR Description: unnamed protein product [Mus musculus]
MFIQTQPTPNPSSLMFYPGKPVMEVGSSDFPNPRSAMNSPLAKSLFAIDGVTRVFFGSDFVTVTKSEEAAWEFLKPEVFAAIMDFYSSAQPLFLDSQAAAAMDTAIHQDDSETVAMIKELLETRIRPAVQDDGGDIEYRGFDLDTGIVKLRMQGACSGCPSSSVTLKSGIENMLMHYVPEVKGVEQELDAEDDGAALSGEIK

SEQ ID NO: 10613 - protein, 188 aa, Glycine max
  peptide (1)..(188): Ceres Seq. ID no. 14311259
  misc_feature (103)..(173): Pfam Name: Pfam Description:  NifU-like domain
  misc_feature (1)..(188): NCBI GI NO: 34897632 NR Description: hypothetical protein [Oryza sativa]
  misc_feature (1)..(188): NCBI GI NO: 18402817 NR Description: expressed protein [Arabidopsis thaliana]
  misc_feature (1)..(188): NCBI GI NO: 25405462 NR Description: unknown protein, 90320-88994
  misc_feature (21)..(188): NCBI GI NO: 15223842 NR Description: expressed protein [Arabidopsis thaliana]
  misc_feature (1)..(178): NCBI GI NO: 31203061 NR Description: ENSANGP00000019230 [Anopheles gambiae]
  misc_feature (1)..(178): NCBI GI NO: 6554171 NR Description: TO42 [Drosophila melanogaster]
  misc_feature (1)..(178): NCBI GI NO: 24643765 NR Description: CG32857-PA [Drosophila melanogaster]
  misc_feature (1)..(177): NCBI GI NO: 37681825 NR Description: HIRA interacting protein 5 [Danio rerio]
  misc_feature (1)..(178): NCBI GI NO: 26324295 NR Description: unnamed protein product [Mus musculus]
  misc_feature (1)..(178): NCBI GI NO: 12834577 NR Description: unnamed protein product [Mus musculus]
MFYPGKPVMEVGSSDFPNPRSAMNSPLAKSLFAIDGVTRVFFGSDFVTVTKSEEAAWEFLKPEVFAAIMDFYSSAQPLFLDSQAAAAMDTAIHQDDSETVAMIKELLETRIRPAVQDDGGDIEYRGFDLDTGIVKLRMQGACSGCPSSSVTLKSGIENMLMHYVPEVKGVEQELDAEDDGAALSGEIK

SEQ ID NO: 10614 - DNA, 1263 bp, Glycine max
  misc_feature (1)..(1263): Ceres Seq. ID no. 14311832
actggattgcaccgtctcttttctttcccctttgttaggaacaacaccacgccacctttgtttacgaactcgtcgacttgatgactcatcacaacgccaccaccaccgcctaacgacctagagcaccttctctctcctctaattggccattgcttaagttgacttgctgcgaaggttgctttgatcatttgaagcgcctgaaaatcgttgtgcgaattttgagggttctgttcttgtaatccgaaaatggccgcgattcggaggcgggtgtggcagttatcttcaatcgcaggtttcggggcttcgagatcggaagtgtcgtcgtcattgtcgtcgtcccaaagagcaattttcgatccattttctgtttcggggaccagacacttttcccaagtggtgaaatccaaccgcaagcacttgttcctcgttgacaccttggcccttgttaggagactggaaggggaaggagtgccctcgaagcaagccgaggcgataaccgctgccataactgaggttttgaatgacagtctcgaaaatgtgtctcagtcgttggtatcaaaggcgcagatgcagaaaattgaaatgatgcaagaatccaacctgtctaagtttaaagcggaggtgcagagctcacagggacaccatttttctctcttacaacacgagactgagaagcttaggaatgatatagagaagatgcgtaatgagttgaggtatgagatagacaaagtcactgctgggcagcgattagatttgaaccttgaaagggggagaataagggaggaattgtctaatcagaatgctgaaactaacaacctgacaaacaaacttgatagagagatccattctttaagagcacaactggaagcagccaaatatgatgtcataaaatattgcataggaacacttgtttcgatttctgctgttggtcttgctgttttacgcatattgatgtaaatggattgtattccgattaacatccacaaagatgaggtgaaaaagaatcaagggtagctccgtagctgcattgaagatttatcttctgtcagagaaacaattgcattacaatactagtacaacttttttttttggtccatactagtggagctgaaaggaacgagctccaatcaggcacgaattgggcctgttttttaagccccattctatattcttttgttaatttatttgacatgccctttgggatatttgtgcaatttatgcgtggctgtatggtatgagtacaatacaagcaccttggattat

SEQ ID NO: 10615 - protein, 236 aa, Glycine max
  peptide (1)..(236): Ceres Seq. ID no. 14311833
  misc_feature (45)..(236): NCBI GI NO: 18398123 NR Description: expressed protein [Arabidopsis thaliana]
  misc_feature (11)..(236): NCBI GI NO: 18409266 NR Description: expressed protein [Arabidopsis thaliana]
  misc_feature (11)..(236): NCBI GI NO: 11357624 NR Description: hypothetical protein F24M12
  misc_feature (45)..(130): NCBI GI NO: 25411710 NR Description: hypothetical protein At2g16460
  misc_feature (79)..(235): NCBI GI NO: 14318473 NR Description: Hypothetical ORF; Yfl046wp
  misc_feature (45)..(236): NCBI GI NO: 40743676 NR Description: hypothetical protein AN5773.2
  misc_feature (36)..(236): NCBI GI NO: 19115424 NR Description: hypothetical conserved protein
  misc_feature (102)..(236): NCBI GI NO: 32422519 NR Description: predicted protein [Neurospora crassa]
  misc_feature (6)..(198): NCBI GI NO: 10197624 NR Description: MDS025 [Homo sapiens]
  misc_feature (6)..(198): NCBI GI NO: 20149663 NR Description: hypothetical protein MDS025 [Homo sapiens]
MAAIRRRVWQLSSIAGFGASRSEVSSSLSSSQRAIFDPFSVSGTRHFSQVVKSNRKHLFLVDTLALVRRLEGEGVPSKQAEAITAAITEVLNDSLENVSQSLVSKAQMQKIEMMQESNLSKFKAEVQSSQGHHFSLLQHETEKLRNDIEKMRNELRYEIDKVTAGQRLDLNLERGRIREELSNQNAETNNLTNKLDREIHSLRAQLEAAKYDVIKYCIGTLVSISAVGLAVLRILM

SEQ ID NO: 10616 - protein, 129 aa, Glycine max
  peptide (1)..(129): Ceres Seq. ID no. 14311834
  misc_feature (1)..(129): NCBI GI NO: 18398123 NR Description: expressed protein [Arabidopsis thaliana]
  misc_feature (1)..(129): NCBI GI NO: 18409266 NR Description: expressed protein [Arabidopsis thaliana]
  misc_feature (1)..(129): NCBI GI NO: 11357624 NR Description: hypothetical protein F24M12
  misc_feature (1)..(23): NCBI GI NO: 25411710 NR Description: hypothetical protein At2g16460
  misc_feature (1)..(128): NCBI GI NO: 14318473 NR Description: Hypothetical ORF; Yfl046wp
  misc_feature (1)..(129): NCBI GI NO: 40743676 NR Description: hypothetical protein AN5773.2
  misc_feature (1)..(129): NCBI GI NO: 19115424 NR Description: hypothetical conserved protein
  misc_feature (1)..(129): NCBI GI NO: 32422519 NR Description: predicted protein [Neurospora crassa]
  misc_feature (1)..(91): NCBI GI NO: 10197624 NR Description: MDS025 [Homo sapiens]
  misc_feature (1)..(91): NCBI GI NO: 20149663 NR Description: hypothetical protein MDS025 [Homo sapiens]
MQKIEMMQESNLSKFKAEVQSSQGHHFSLLQHETEKLRNDIEKMRNELRYEIDKVTAGQRLDLNLERGRIREELSNQNAETNNLTNKLDREIHSLRAQLEAAKYDVIKYCIGTLVSISAVGLAVLRILM

SEQ ID NO: 10617 - protein, 124 aa, Glycine max
  peptide (1)..(124): Ceres Seq. ID no. 14311835
  misc_feature (1)..(124): NCBI GI NO: 18398123 NR Description: expressed protein [Arabidopsis thaliana]
  misc_feature (1)..(124): NCBI GI NO: 18409266 NR Description: expressed protein [Arabidopsis thaliana]
  misc_feature (1)..(124): NCBI GI NO: 11357624 NR Description: hypothetical protein F24M12
  misc_feature (1)..(18): NCBI GI NO: 25411710 NR Description: hypothetical protein At2g16460
  misc_feature (1)..(123): NCBI GI NO: 14318473 NR Description: Hypothetical ORF; Yfl046wp
  misc_feature (1)..(124): NCBI GI NO: 40743676 NR Description: hypothetical protein AN5773.2
  misc_feature (1)..(124): NCBI GI NO: 19115424 NR Description: hypothetical conserved protein
  misc_feature (1)..(124): NCBI GI NO: 32422519 NR Description: predicted protein [Neurospora crassa]
  misc_feature (1)..(86): NCBI GI NO: 10197624 NR Description: MDS025 [Homo sapiens]
  misc_feature (1)..(86): NCBI GI NO: 20149663 NR Description: hypothetical protein MDS025 [Homo sapiens]
MMQESNLSKFKAEVQSSQGHHFSLLQHETEKLRNDIEKMRNELRYEIDKVTAGQRLDLNLERGRIREELSNQNAETNNLTNKLDREIHSLRAQLEAAKYDVIKYCIGTLVSISAVGLAVLRILM

SEQ ID NO: 10618 - DNA, 1576 bp, Glycine max
  misc_feature (1)..(1576): Ceres Seq. ID no. 14311804
aagataaattgggccgatttggacacacaccccgtcatcttcttcttgttctgtgccgcactctcgctcgcagttacagaaaccatgacgacggtggtgcccacctccgaagaagacgctgccctctctgttgtccgattcgcctctgaactcgcctgggccgatgccggtcccgaggttgctgagcctcaagttagtagactctgcatggaggctgaagagtttatcgttatgggaaaatggttggaactagcatcattgatgattacctctgctgaattggttttctcaaaggtttctgaaacagatatagagtccatcttcactatcatctgcaatcttgtgaccaagactgagaatccagatgaagtgatggagattgtaaaagttataactgcaaaaataattcagcagccaaacgaaaagcctgctgtgcgattgaagactttgatcaatctgtacaatcttttggagactccatactgccagttttatgtctacatgaaggcattgaatttagctgttaatgggaaagtcacagaatacattataccttcattcaaaaagatagatagcttcttgaaagagtggaaaattgggatacctgaacagagagagctctttctcactatctctaatattttgaaggaaaataaaagcatgtcaaaggatgcttttaagttcctgagcaattatctgtcgaccttttcgggagaagatgcacatgttttgagtgaagccaaggaggaggccgcacgtgcaattgaggaatttgtcagagctcctgacatatatcagtgtgatttgcttgacttgcctgctgttgggcaactggagaaggatgccaaatatgctctgttatatcagcttcttaagatttttcttacccagaggctagatgcatacttagaatatcaagctgcaaattccaccttgttgaaaaactatggccttgtgcctgaagaatgcatttccaaaatgaggctgatgtcattgatggatcttacctctgatggttctggccaaattccatatgaacttattagggacacacttcagatcaatgatgatgaagtggaactatgggtggttagagcaataactgccaagttaattgactgtaagatggaccaaatgcatcaatcagtagttgttagtcatcctactgatcgtgtgtttggtcagcaccaatggcaagcactgagaacaaagctagcgacatggagaggaaacattgcaaatgttatcagtaccattcaggccaacaaaataacggaggatgggtctcaggcagcccaaggtttggtagttaggtgagaggacgttttcaactgaagcaattctctgaagcatctagattttatcccggtgaagttttttttaatcttaaaacagagaaggaaaaaattttactccccaactttgtgacagaaccattttgttttaagcttttccattttgatgttatgtttgaccagcctcacgatagcgttgagtatattatacctgtggactgttgtcctagtagctcctaggaatcaatatacagctatttaacttttagtgttttctgaac

SEQ ID NO: 10619 - protein, 438 aa, Glycine max
  peptide (1)..(438): Ceres Seq. ID no. 14311805
  misc_feature (285)..(385): Pfam Name: Pfam Description:  PCI domain
  misc_feature (29)..(438): NCBI GI NO: 30685439 NR Description: expressed protein [Arabidopsis thaliana]
  misc_feature (29)..(385): NCBI GI NO: 15242346 NR Description: expressed protein [Arabidopsis thaliana]
  misc_feature (379)..(438): NCBI GI NO: 15242346 NR Description: expressed protein [Arabidopsis thaliana]
  misc_feature (29)..(438): NCBI GI NO: 22330807 NR Description: expressed protein [Arabidopsis thaliana]
  misc_feature (29)..(391): NCBI GI NO: 30678503 NR Description: expressed protein [Arabidopsis thaliana]
  misc_feature (29)..(380): NCBI GI NO: 6041797 NR Description: unknown protein [Arabidopsis thaliana]
  misc_feature (83)..(438): NCBI GI NO: 32489165 NR Description: OSJNBa0094O15.2
  misc_feature (42)..(419): NCBI GI NO: 21703762 NR Description: dendritic cell protein GA17 [Mus musculus]
  misc_feature (42)..(419): NCBI GI NO: 34856621 NR Description: similar to Ga17 protein [Rattus norvegicus]
  misc_feature (42)..(419): NCBI GI NO: 23397429 NR Description: dendritic cell protein [Homo sapiens]
KINWADLDTHPVIFFLFCAALSLAVTETMTTVVPTSEEDAALSVVRFASELAWADAGPEVAEPQVSRLCMEAEEFIVMGKWLELASLMITSAELVFSKVSETDIESIFTIICNLVTKTENPDEVMEIVKVITAKIIQQPNEKPAVRLKTLINLYNLLETPYCQFYVYMKALNLAVNGKVTEYIIPSFKKIDSFLKEWKIGIPEQRELFLTISNILKENKSMSKDAFKFLSNYLSTFSGEDAHVLSEAKEEAARAIEEFVRAPDIYQCDLLDLPAVGQLEKDAKYALLYQLLKIFLTQRLDAYLEYQAANSTLLKNYGLVPEECISKMRLMSLMDLTSDGSGQIPYELIRDTLQINDDEVELWVVRAITAKLIDCKMDQMHQSVVVSHPTDRVFGQHQWQALRTKLATWRGNIANVISTIQANKITEDGSQAAQGLVVR

SEQ ID NO: 10620 - protein, 410 aa, Glycine max
  peptide (1)..(410): Ceres Seq. ID no. 14311806
  misc_feature (257)..(357): Pfam Name: Pfam Description:  PCI domain
  misc_feature (1)..(410): NCBI GI NO: 30685439 NR Description: expressed protein [Arabidopsis thaliana]
  misc_feature (1)..(357): NCBI GI NO: 15242346 NR Description: expressed protein [Arabidopsis thaliana]
  misc_feature (351)..(410): NCBI GI NO: 15242346 NR Description: expressed protein [Arabidopsis thaliana]
  misc_feature (1)..(410): NCBI GI NO: 22330807 NR Description: expressed protein [Arabidopsis thaliana]
  misc_feature (1)..(363): NCBI GI NO: 30678503 NR Description: expressed protein [Arabidopsis thaliana]
  misc_feature (1)..(352): NCBI GI NO: 6041797 NR Description: unknown protein [Arabidopsis thaliana]
  misc_feature (55)..(410): NCBI GI NO: 32489165 NR Description: OSJNBa0094O15.2
  misc_feature (14)..(391): NCBI GI NO: 21703762 NR Description: dendritic cell protein GA17 [Mus musculus]
  misc_feature (14)..(391): NCBI GI NO: 34856621 NR Description: similar to Ga17 protein [Rattus norvegicus]
  misc_feature (14)..(391): NCBI GI NO: 23397429 NR Description: dendritic cell protein [Homo sapiens]
MTTVVPTSEEDAALSVVRFASELAWADAGPEVAEPQVSRLCMEAEEFIVMGKWLELASLMITSAELVFSKVSETDIESIFTIICNLVTKTENPDEVMEIVKVITAKIIQQPNEKPAVRLKTLINLYNLLETPYCQFYVYMKALNLAVNGKVTEYIIPSFKKIDSFLKEWKIGIPEQRELFLTISNILKENKSMSKDAFKFLSNYLSTFSGEDAHVLSEAKEEAARAIEEFVRAPDIYQCDLLDLPAVGQLEKDAKYALLYQLLKIFLTQRLDAYLEYQAANSTLLKNYGLVPEECISKMRLMSLMDLTSDGSGQIPYELIRDTLQINDDEVELWVVRAITAKLIDCKMDQMHQSVVVSHPTDRVFGQHQWQALRTKLATWRGNIANVISTIQANKITEDGSQAAQGLVVR

SEQ ID NO: 10621 - protein, 369 aa, Glycine max
  peptide (1)..(369): Ceres Seq. ID no. 14311807
  misc_feature (216)..(316): Pfam Name: Pfam Description:  PCI domain
  misc_feature (1)..(369): NCBI GI NO: 30685439 NR Description: expressed protein [Arabidopsis thaliana]
  misc_feature (1)..(316): NCBI GI NO: 15242346 NR Description: expressed protein [Arabidopsis thaliana]
  misc_feature (310)..(369): NCBI GI NO: 15242346 NR Description: expressed protein [Arabidopsis thaliana]
  misc_feature (1)..(369): NCBI GI NO: 22330807 NR Description: expressed protein [Arabidopsis thaliana]
  misc_feature (1)..(322): NCBI GI NO: 30678503 NR Description: expressed protein [Arabidopsis thaliana]
  misc_feature (1)..(311): NCBI GI NO: 6041797 NR Description: unknown protein [Arabidopsis thaliana]
  misc_feature (14)..(369): NCBI GI NO: 32489165 NR Description: OSJNBa0094O15.2
  misc_feature (1)..(350): NCBI GI NO: 21703762 NR Description: dendritic cell protein GA17 [Mus musculus]
  misc_feature (1)..(350): NCBI GI NO: 34856621 NR Description: similar to Ga17 protein [Rattus norvegicus]
  misc_feature (1)..(350): NCBI GI NO: 23397429 NR Description: dendritic cell protein [Homo sapiens]
MEAEEFIVMGKWLELASLMITSAELVFSKVSETDIESIFTIICNLVTKTENPDEVMEIVKVITAKIIQQPNEKPAVRLKTLINLYNLLETPYCQFYVYMKALNLAVNGKVTEYIIPSFKKIDSFLKEWKIGIPEQRELFLTISNILKENKSMSKDAFKFLSNYLSTFSGEDAHVLSEAKEEAARAIEEFVRAPDIYQCDLLDLPAVGQLEKDAKYALLYQLLKIFLTQRLDAYLEYQAANSTLLKNYGLVPEECISKMRLMSLMDLTSDGSGQIPYELIRDTLQINDDEVELWVVRAITAKLIDCKMDQMHQSVVVSHPTDRVFGQHQWQALRTKLATWRGNIANVISTIQANKITEDGSQAAQGLVVR

SEQ ID NO: 10622 - DNA, 1187 bp, Glycine max
  misc_feature (1)..(1187): Ceres Seq. ID no. 14308225
aagccagagaaagagaaggaaccaacaacaaagagcagagagaaagagaggaccattccaaccctaatttctctgctaaaccctagttgtttggcatttcctctcttctccctcgtaaatcttctcccattccctccggtagctttccagatccaaataaatcatggttttctgggtttttggctacggttcactggtgtggaaccctggattcgattacgacgagaagattattggtttcatcaaggactacagacgcgtgtttgatttagcgtgcattgatcaccggggaacgcctgaaaacccagcgagaacttgcacattggaggagaaagaaggggctatttgctggggagctgcttattgtgttcgaggaggccctgaaaaggaaaaattggctatgcagtatttggagcgacgggaatgtgaatatgacagaaagactcttgtaaacttcttcaaggaaggagattcactgcatcctactttaactgatgtaatagtattcacatctactccagacaaagtgaacaacaaatactacctgggacctgctccacttgaagacatggctaggcaaatagcaactgcatacggcccttgcggaaacaacagggattacattttccttctagaaaaggccatgcatgatattggccatgaggatgacttggtgatagagcttgccaatgaagtgaagaaagtacttggagtgggaaatgtagtaccaaaggagaagaaacaggttggagcagcacaacttccacaccctcctcatgtgccaatccctacccttcaactgctcccgctgccagaacctattgctttggatagctgacgcggaaactgacgctgagttcggcaactaaactgatttactgcggaccctactaaccctaattcaaattttaaataacatcacatatattcctcttcgcctagttttagcggcttcttcagccattcccttgagatattgcttaaattcagtgaggcgcaatattttgaattggaatgaatgttcgcagatgttataattgaaaaagttcaatttttctatttatttcgtttacggcaatcttacagagttttttttccaccagttctgcatcccaatcttacggagttatttatagcttttaattgctggtacttcgaaatgaataatattacttctgttttgagcg

SEQ ID NO: 10623 - protein, 224 aa, Glycine max
  peptide (1)..(224): Ceres Seq. ID no. 14308226
  misc_feature (4)..(181): Pfam Name: Pfam Description:  ChaC-like protein
  misc_feature (1)..(224): NCBI GI NO: 27525010 NR Description: putative cation transporter [Beta procumbens]
  misc_feature (1)..(221): NCBI GI NO: 18417778 NR Description: expressed protein [Arabidopsis thaliana]
  misc_feature (1)..(221): NCBI GI NO: 21593515 NR Description: unknown [Arabidopsis thaliana]
  misc_feature (1)..(208): NCBI GI NO: 15239626 NR Description: expressed protein [Arabidopsis thaliana]
  misc_feature (100)..(208): NCBI GI NO: 7486723 NR Description: hypothetical protein F9D12
  misc_feature (1)..(81): NCBI GI NO: 7486723 NR Description: hypothetical protein F9D12
  misc_feature (1)..(81): NCBI GI NO: 7486662 NR Description: hypothetical protein F8F16
  misc_feature (100)..(165): NCBI GI NO: 7486662 NR Description: hypothetical protein F8F16
  misc_feature (148)..(221): NCBI GI NO: 7486662 NR Description: hypothetical protein F8F16
  misc_feature (1)..(180): NCBI GI NO: 38344831 NR Description: OSJNBa0064H22.12
MVFWVFGYGSLVWNPGFDYDEKIIGFIKDYRRVFDLACIDHRGTPENPARTCTLEEKEGAICWGAAYCVRGGPEKEKLAMQYLERRECEYDRKTLVNFFKEGDSLHPTLTDVIVFTSTPDKVNNKYYLGPAPLEDMARQIATAYGPCGNNRDYIFLLEKAMHDIGHEDDLVIELANEVKKVLGVGNVVPKEKKQVGAAQLPHPPHVPIPTLQLLPLPEPIALDS

SEQ ID NO: 10624 - protein, 145 aa, Glycine max
  peptide (1)..(145): Ceres Seq. ID no. 14308227
  misc_feature (1)..(102): Pfam Name: Pfam Description:  ChaC-like protein
  misc_feature (1)..(145): NCBI GI NO: 27525010 NR Description: putative cation transporter [Beta procumbens]
  misc_feature (1)..(142): NCBI GI NO: 18417778 NR Description: expressed protein [Arabidopsis thaliana]
  misc_feature (1)..(142): NCBI GI NO: 21593515 NR Description: unknown [Arabidopsis thaliana]
  misc_feature (1)..(129): NCBI GI NO: 15239626 NR Description: expressed protein [Arabidopsis thaliana]
  misc_feature (21)..(129): NCBI GI NO: 7486723 NR Description: hypothetical protein F9D12
  misc_feature (21)..(86): NCBI GI NO: 7486662 NR Description: hypothetical protein F8F16
  misc_feature (69)..(142): NCBI GI NO: 7486662 NR Description: hypothetical protein F8F16
  misc_feature (1)..(101): NCBI GI NO: 38344831 NR Description: OSJNBa0064H22.12
  misc_feature (1)..(103): NCBI GI NO: 18401334 NR Description: expressed protein [Arabidopsis thaliana]
  misc_feature (1)..(103): NCBI GI NO: 12083292 NR Description: unknown protein [Arabidopsis thaliana]
MQYLERRECEYDRKTLVNFFKEGDSLHPTLTDVIVFTSTPDKVNNKYYLGPAPLEDMARQIATAYGPCGNNRDYIFLLEKAMHDIGHEDDLVIELANEVKKVLGVGNVVPKEKKQVGAAQLPHPPHVPIPTLQLLPLPEPIALDS

SEQ ID NO: 10625 - DNA, 1402 bp, Glycine max
  misc_feature (1)..(1402): Ceres Seq. ID no. 14308433
gtcacaagttctttcactggaaggagaacaagaagaaaaaaccgacacaaagatctagtcctagctagaatcaaacaggggcgatctcaccttcaagaacacatcgccatggcaaggaacttgcttcttgtgctttttgcagtagccaccctcctccatggctcagcagcccaaaccagacacatggtcggtgatgccacgggctggatcatccctgctggcggcgctgccacctacaccgcctgggcttccaacaaaaccttcaccgtaaacgacactctcgtgttcaacttcgccaccggccaacacaacgtggccaaggtaacgaaatcggctttcgacgcgtgcaacggcgggagcgccgttttcaccctgacctccggtccagcgaccgtgaccctgaacgaaacaggggagcaatactacatttgctccgttggatcacactgttccgctggccagaaactggcaattaacgttaacagagcttcttctaccggtccttcccctgcacctcaacccagaggaagtggttctccaccaagggctagccctgtccccacacaagcaccacaagccagtagccccactcctccaccaaggtctgcaccagcacctgcttttggtccatcctctgaaccagctactttcattgttggagaaaccgctggctggattgttcctggcaacgcttccttttacacagcttgggcctctggcaaaaacttcagggttggagacgtccttgtgttcaactacgcatcaaatacacacaacgtagaggaggttacaaaggccaacttcgatgcttgcagctcagcctctcctattgccactttcaccactccacctgcgagagtgaccctcaacaaatctggtcaacatttcttcatctgtggaattccagggcactgtttgggaggtcaaaagcttgccatcaacgtcaccggcagcagcaccgccaccccaccttccgccgcggccccccccaccactccttctagcccttctccagccggtgctgtcactcctcccccacagaactctggtgctgcatctcttggagttgttggagtatttgccaccctgctttcagttgccgccacttttttctattagatactccacgagattattctagtcaggagcttccgagtcatcatcatcgctctttgattgtgtttcatgaattcagtttttttcttatttttttgaggatgacaataaagttagctttaatttaatttctcttcatcggctacagttttggttttttgttatgtttttgagtaaaaataaattggtacggtgtgaatatgttaacaagtgtatttctttgatagttaacatcgttgtattacagtgcatatatttggaattggagataaaaaatatttgtgac

SEQ ID NO: 10626 - protein, 372 aa, Glycine max
  peptide (1)..(372): Ceres Seq. ID no. 14308434
  misc_feature (69)..(154): Pfam Name: Pfam Description:  Plastocyanin-like domain
  misc_feature (37)..(367): NCBI GI NO: 7670832 NR Description: dicyanin [Lycopersicon esculentum]
  misc_feature (39)..(203): NCBI GI NO: 10798754 NR Description: elicitor inducible gene Nt-SA1-1
  misc_feature (36)..(223): NCBI GI NO: 8515096 NR Description: phytocyanin homolog [Pinus taeda]
  misc_feature (216)..(355): NCBI GI NO: 8515096 NR Description: phytocyanin homolog [Pinus taeda]
  misc_feature (37)..(203): NCBI GI NO: 9885806 NR Description: stellacyanin-like protein CASLP1 precursor
  misc_feature (218)..(371): NCBI GI NO: 10798754 NR Description: elicitor inducible gene Nt-SA1-1
  misc_feature (212)..(371): NCBI GI NO: 15240310 NR Description: plastocyanin-like domain containing protein
  misc_feature (210)..(371): NCBI GI NO: 7430876 NR Description: blue copper protein stellacyanin precursor -cucumber
  misc_feature (217)..(363): NCBI GI NO: 2493318 NR Description: Blue copper protein precursor
  misc_feature (38)..(205): NCBI GI NO: 7430876 NR Description: blue copper protein stellacyanin precursor -cucumber
VTSSFTGRRTRRKNRHKDLVLARIKQGRSHLQEHIAMARNLLLVLFAVATLLHGSAAQTRHMVGDATGWIIPAGGAATYTAWASNKTFTVNDTLVFNFATGQHNVAKVTKSAFDACNGGSAVFTLTSGPATVTLNETGEQYYICSVGSHCSAGQKLAINVNRASSTGPSPAPQPRGSGSPPRASPVPTQAPQASSPTPPPRSAPAPAFGPSSEPATFIVGETAGWIVPGNASFYTAWASGKNFRVGDVLVFNYASNTHNVEEVTKANFDACSSASPIATFTTPPARVTLNKSGQHFFICGIPGHCLGGQKLAINVTGSSTATPPSAAAPPTTPSSPSPAGAVTPPPQNSGAASLGVVGVFATLLSVAATFFY

SEQ ID NO: 10627 - protein, 336 aa, Glycine max
  peptide (1)..(336): Ceres Seq. ID no. 14308435
  misc_feature (33)..(118): Pfam Name: Pfam Description:  Plastocyanin-like domain
  misc_feature (1)..(331): NCBI GI NO: 7670832 NR Description: dicyanin [Lycopersicon esculentum]
  misc_feature (3)..(167): NCBI GI NO: 10798754 NR Description: elicitor inducible gene Nt-SA1-1
  misc_feature (1)..(187): NCBI GI NO: 8515096 NR Description: phytocyanin homolog [Pinus taeda]
  misc_feature (180)..(319): NCBI GI NO: 8515096 NR Description: phytocyanin homolog [Pinus taeda]
  misc_feature (1)..(167): NCBI GI NO: 9885806 NR Description: stellacyanin-like protein CASLP1 precursor
  misc_feature (182)..(335): NCBI GI NO: 10798754 NR Description: elicitor inducible gene Nt-SA1-1
  misc_feature (176)..(335): NCBI GI NO: 15240310 NR Description: plastocyanin-like domain containing protein
  misc_feature (174)..(335): NCBI GI NO: 7430876 NR Description: blue copper protein stellacyanin precursor -cucumber
  misc_feature (181)..(327): NCBI GI NO: 2493318 NR Description: Blue copper protein precursor
  misc_feature (2)..(169): NCBI GI NO: 7430876 NR Description: blue copper protein stellacyanin precursor -cucumber
MARNLLLVLFAVATLLHGSAAQTRHMVGDATGWIIPAGGAATYTAWASNKTFTVNDTLVFNFATGQHNVAKVTKSAFDACNGGSAVFTLTSGPATVTLNETGEQYYICSVGSHCSAGQKLAINVNRASSTGPSPAPQPRGSGSPPRASPVPTQAPQASSPTPPPRSAPAPAFGPSSEPATFIVGETAGWIVPGNASFYTAWASGKNFRVGDVLVFNYASNTHNVEEVTKANFDACSSASPIATFTTPPARVTLNKSGQHFFICGIPGHCLGGQKLAINVTGSSTATPPSAAAPPTTPSSPSPAGAVTPPPQNSGAASLGVVGVFATLLSVAATFFY

SEQ ID NO: 10628 - protein, 311 aa, Glycine max
  peptide (1)..(311): Ceres Seq. ID no. 14308436
  misc_feature (8)..(93): Pfam Name: Pfam Description:  Plastocyanin-like domain
  misc_feature (1)..(306): NCBI GI NO: 7670832 NR Description: dicyanin [Lycopersicon esculentum]
  misc_feature (1)..(142): NCBI GI NO: 10798754 NR Description: elicitor inducible gene Nt-SA1-1
  misc_feature (1)..(162): NCBI GI NO: 8515096 NR Description: phytocyanin homolog [Pinus taeda]
  misc_feature (155)..(294): NCBI GI NO: 8515096 NR Description: phytocyanin homolog [Pinus taeda]
  misc_feature (1)..(142): NCBI GI NO: 9885806 NR Description: stellacyanin-like protein CASLP1 precursor
  misc_feature (157)..(310): NCBI GI NO: 10798754 NR Description: elicitor inducible gene Nt-SA1-1
  misc_feature (151)..(310): NCBI GI NO: 15240310 NR Description: plastocyanin-like domain containing protein
  misc_feature (149)..(310): NCBI GI NO: 7430876 NR Description: blue copper protein stellacyanin precursor -cucumber
  misc_feature (156)..(302): NCBI GI NO: 2493318 NR Description: Blue copper protein precursor
  misc_feature (1)..(144): NCBI GI NO: 7430876 NR Description: blue copper protein stellacyanin precursor -cucumber
MVGDATGWIIPAGGAATYTAWASNKTFTVNDTLVFNFATGQHNVAKVTKSAFDACNGGSAVFTLTSGPATVTLNETGEQYYICSVGSHCSAGQKLAINVNRASSTGPSPAPQPRGSGSPPRASPVPTQAPQASSPTPPPRSAPAPAFGPSSEPATFIVGETAGWIVPGNASFYTAWASGKNFRVGDVLVFNYASNTHNVEEVTKANFDACSSASPIATFTTPPARVTLNKSGQHFFICGIPGHCLGGQKLAINVTGSSTATPPSAAAPPTTPSSPSPAGAVTPPPQNSGAASLGVVGVFATLLSVAATFFY

SEQ ID NO: 10629 - DNA, 1476 bp, Glycine max
  misc_feature (1)..(1476): Ceres Seq. ID no. 14308168
aaagtagagagaagagaagcaattaccccttttcataaaaccctagcaagtaaaaaccgtcccttttcgtttctgttctctgtgcttcgaaaaccctaactaaactcgcgtggtagctccaatgggaggaaagaggaagaagagcgatgatgatgatgacgtggaagcagaagcagaagcttcaggttggaagaagaaaacgagaacgacgtcggagagagagaaggagaagaaggagccattgcgtccttcgatgataaagaacaaggagaagcgatcggagctgcacgcgaaactgaagcaccagaagaagctcgagaagcgcgccaaggccaaggctcgggacgctgctctcaagaaagctctcgagctcggcgaggagcctccagagaagaaggtccctcgcactatcgagaacacgagggaactcgacgagaccgtttgcaagcccgatgacgaagagttatttgctggaaatgatgctgatgaatttggtccaattttgaatcagcaacaaactcccaagatattaatcaccacttgccgcttccattctactaggggacctgcttttatatcagagttgctttcagttataccaaatgcacattacttcaagagaggaacatatgatctgaaaaagattgtagaatatgcaaagaagaaggacttcacttctattatagttgttcacaccaatcgtagggaaccagatgctcttttaatcataggtgtacctgatgggcctactgctcatttcaagctctcgaaacttgttttgcgcaaggatatcaagaatcatggaaatccaaccggtcacaagcccgagcttgtattgaataacttcacaacacgtctagggcatcgagttggaaggttgatacagtcacttttcccacaagatccagaatttaaaggccggcgagtagtcactttccacaaccagagagacttcatattcttccggcatcatcggtatatttttgaaaccaaagaagttaaaaaagcagagtccaaaggtaaaaaggacaaagatggcgagagtgagaatgttcctgaacagaaaacaattgcccgacttcaggaatgtggtcctcgtttcacattaaaattgattagcctgcagcatggaacatttgacaccaagggtggggaatatgagtgggttcacaagccggaaatggacactagccgaaggaggttcttcctatgacttgtttgggaaggttgcattttggacatcttttttgctggaaataggttttatccggtgaagagggttaattatcttgaggttgttgggatctttcaacttaattctggtgtatcatttttttatttttttttattgggggctaaagtcctatcatctctgtaagccgtgagcaattttgaccttacatctattggtggttgaggaagagataacaaaggtttcttataagcaaatatataagcaattttgtattatggtcc

SEQ ID NO: 10630 - protein, 363 aa, Glycine max
  peptide (1)..(363): Ceres Seq. ID no. 14308169
  misc_feature (1)..(363): NCBI GI NO: 18411672 NR Description: expressed protein [Arabidopsis thaliana]
  misc_feature (1)..(357): NCBI GI NO: 7485389 NR Description: hypothetical protein F11O4
  misc_feature (1)..(292): NCBI GI NO: 27371215 NR Description: Similar to RNA processing factor 1
  misc_feature (320)..(363): NCBI GI NO: 27371215 NR Description: Similar to RNA processing factor 1
  misc_feature (2)..(292): NCBI GI NO: 33440502 NR Description: Unknown (protein for IMAGE:5694049) [Mus musculus]
  misc_feature (320)..(363): NCBI GI NO: 33440502 NR Description: Unknown (protein for IMAGE:5694049) [Mus musculus]
  misc_feature (44)..(292): NCBI GI NO: 13376605 NR Description: RNA processing factor 1 [Homo sapiens]
  misc_feature (44)..(292): NCBI GI NO: 17225079 NR Description: RNA processing factor 1 [Homo sapiens]
  misc_feature (320)..(363): NCBI GI NO: 13376605 NR Description: RNA processing factor 1 [Homo sapiens]
  misc_feature (320)..(363): NCBI GI NO: 17225079 NR Description: RNA processing factor 1 [Homo sapiens]
MGGKRKKSDDDDDVEAEAEASGWKKKTRTTSEREKEKKEPLRPSMIKNKEKRSELHAKLKHQKKLEKRAKAKARDAALKKALELGEEPPEKKVPRTIENTRELDETVCKPDDEELFAGNDADEFGPILNQQQTPKILITTCRFHSTRGPAFISELLSVIPNAHYFKRGTYDLKKIVEYAKKKDFTSIIVVHTNRREPDALLIIGVPDGPTAHFKLSKLVLRKDIKNHGNPTGHKPELVLNNFTTRLGHRVGRLIQSLFPQDPEFKGRRVVTFHNQRDFIFFRHHRYIFETKEVKKAESKGKKDKDGESENVPEQKTIARLQECGPRFTLKLISLQHGTFDTKGGEYEWVHKPEMDTSRRRFFL

SEQ ID NO: 10631 - protein, 319 aa, Glycine max
  peptide (1)..(319): Ceres Seq. ID no. 14308170
  misc_feature (1)..(319): NCBI GI NO: 18411672 NR Description: expressed protein [Arabidopsis thaliana]
  misc_feature (1)..(313): NCBI GI NO: 7485389 NR Description: hypothetical protein F11O4
  misc_feature (1)..(248): NCBI GI NO: 27371215 NR Description: Similar to RNA processing factor 1
  misc_feature (276)..(319): NCBI GI NO: 27371215 NR Description: Similar to RNA processing factor 1
  misc_feature (1)..(248): NCBI GI NO: 33440502 NR Description: Unknown (protein for IMAGE:5694049) [Mus musculus]
  misc_feature (276)..(319): NCBI GI NO: 33440502 NR Description: Unknown (protein for IMAGE:5694049) [Mus musculus]
  misc_feature (1)..(248): NCBI GI NO: 13376605 NR Description: RNA processing factor 1 [Homo sapiens]
  misc_feature (1)..(248): NCBI GI NO: 17225079 NR Description: RNA processing factor 1 [Homo sapiens]
  misc_feature (276)..(319): NCBI GI NO: 13376605 NR Description: RNA processing factor 1 [Homo sapiens]
  misc_feature (276)..(319): NCBI GI NO: 17225079 NR Description: RNA processing factor 1 [Homo sapiens]
MIKNKEKRSELHAKLKHQKKLEKRAKAKARDAALKKALELGEEPPEKKVPRTIENTRELDETVCKPDDEELFAGNDADEFGPILNQQQTPKILITTCRFHSTRGPAFISELLSVIPNAHYFKRGTYDLKKIVEYAKKKDFTSIIVVHTNRREPDALLIIGVPDGPTAHFKLSKLVLRKDIKNHGNPTGHKPELVLNNFTTRLGHRVGRLIQSLFPQDPEFKGRRVVTFHNQRDFIFFRHHRYIFETKEVKKAESKGKKDKDGESENVPEQKTIARLQECGPRFTLKLISLQHGTFDTKGGEYEWVHKPEMDTSRRRFFL

SEQ ID NO: 10632 - DNA, 1150 bp, Glycine max
  misc_feature (1)..(1150): Ceres Seq. ID no. 14308198
ttttcctaaatacacacacaaaaccggttcctctcttaaccctctgaaagccaaaagagaaaaaaaaaatgcagccccaccagaaccctcccgcactggattccgacccgcagctcccgcagatcaaaatccaccaccctgcctccccacgccaccatcacccttcctccgccggcgccgcgacccccacccccaccgccggcgcgcgtcgcaaaatcggcgtggccgtcgacctctccgacgagagcgcctacgcggtccgctgggccgtgcagcactacatccgccccggcgacgccgtgatcctgctccacgtcagcgctaccaacgtcctcttcggcgccgactggggctccatcgacctctccatcaacaccgaccccaactccgacgaggatgccgtcagcgccgtcaacaacagcaacgaccacaacagcaagcgcaagctggaggacgacttcgacgcctttacggcgtccaaggcggcggatctcgcgaaaccgttacgggaattgcagattccgttcaagatccatatcgtgaaggatcatgacatgaaggagaggctttgcttggaggtggagaggcttgggctgagtgctgttattatggggagtagaggctttggcgctgtgaggcgtggcagcgatgggaagcttgggagtgttagtgattactgcgttcatcactgtgtttgtcctgttgtggtggtgcgttatcccgatgataaggatgcggtcgcggcggccaccacggccgagcccgtggtggcggtcaaggacggagacgagggcgaggccgtcgtccagccggtgccgcataagaaagaggattagttggagccaactcatcacttcaaccctatctctgaagagtgtttctgatccgaagagataggtggaaatatggttgtagagtgctctctttctcttcctgtcaggttgtacttagagcatttcctgcatatgaactgtggaaagattatggatgattttgtatggcttgatatgatctcggttccattaggctttggacgattgtttttagttccgaagtggtctatactctttcatttagatgtacaagtttgcctgtgactgtttttggggttattttcttcccatatgatgtgggaaatcggattaaaaag

SEQ ID NO: 10633 - protein, 255 aa, Glycine max
  peptide (1)..(255): Ceres Seq. ID no. 14308199
  misc_feature (48)..(216): Pfam Name: Pfam Description:  Universal stress protein family
  misc_feature (11)..(243): NCBI GI NO: 7486798 NR Description: hypothetical protein M4I22
  misc_feature (11)..(243): NCBI GI NO: 18416966 NR Description: expressed protein [Arabidopsis thaliana]
  misc_feature (8)..(240): NCBI GI NO: 8885586 NR Description: gene_id:F24B18
  misc_feature (8)..(240): NCBI GI NO: 18423628 NR Description: expressed protein [Arabidopsis thaliana]
  misc_feature (5)..(252): NCBI GI NO: 28971968 NR Description: CHP-rich zinc finger protein-like
  misc_feature (5)..(252): NCBI GI NO: 33146953 NR Description: CHP-rich zinc finger protein-like
  misc_feature (7)..(250): NCBI GI NO: 34910112 NR Description: B1100D10.31
  misc_feature (32)..(222): NCBI GI NO: 25402657 NR Description: protein T23J18.3 [imported] - Arabidopsis thaliana
  misc_feature (32)..(222): NCBI GI NO: 30682187 NR Description: expressed protein [Arabidopsis thaliana]
  misc_feature (137)..(241): NCBI GI NO: 15232490 NR Description: CHP-rich zinc finger protein, putative
MQPHQNPPALDSDPQLPQIKIHHPASPRHHHPSSAGAATPTPTAGARRKIGVAVDLSDESAYAVRWAVQHYIRPGDAVILLHVSATNVLFGADWGSIDLSINTDPNSDEDAVSAVNNSNDHNSKRKLEDDFDAFTASKAADLAKPLRELQIPFKIHIVKDHDMKERLCLEVERLGLSAVIMGSRGFGAVRRGSDGKLGSVSDYCVHHCVCPVVVVRYPDDKDAVAAATTAEPVVAVKDGDEGEAVVQPVPHKKED

SEQ ID NO: 10634 - protein, 183 aa, Glycine max
  peptide (1)..(183): Ceres Seq. ID no. 14308200
  misc_feature (25)..(54): NCBI GI NO: 20138131 NR Description: Vegetative cell wall protein gp1 precursor
FPKYTHKTGSSLNPLKAKREKKNAAPPEPSRTGFRPAAPADQNPPPCLPTPPSPFLRRRRDPHPHRRRASQNRRGRRPLRRERLRGPLGRAALHPPRRRRDPAPRQRYQRPLRRRLGLHRPLHQHRPQLRRGCRQRRQQQQRPQQQAQAGGRLRRLYGVQGGGSRETVTGIADSVQDPYREGS

SEQ ID NO: 10635 - DNA, 886 bp, Glycine max
  misc_feature (1)..(886): Ceres Seq. ID no. 13594206
ataagtatttcattttcagcgttccatgggttgggtttggaccaatccatagccgaagaagagaaaaaagagacaaggaccgtcttgagttaatttgattcagtgtagcagccagcagccataagcaacgcaacaattccatttccagtttctgattcgtcacgtcagacaaaggaaggggttagggtgtgacctgagatcaaaatgttgcggaggcttctctcttctcacctcaaaaccctagcctcctccgccgccgccgccgccaccgccactccccgatctgcttccgcctccgccagattcgccgctctctctcgctcctgcctctacttctcaacccaatccgaggatgctactgcgatcaaaaagaaggttgaggacataatgccaatcgctactggccacgagcgcgaggagcttcaggctgagctcgagggaaggaatattcttgaaatagaccatcccgaaggtccattcggcacaaaggaagcacctgctgttgtcaaatcttactatgataaaaggatagtcggatgcccaggaggtgaaggtgaggatgagcatgatgttgtctggttttggctggagaaagacaagccccatgaatgtccagtgtgcgcacagtattttgttcttgaagtggtaggacctggtggaccacccgatggacatggtgatgatgatcaccattgattgcatccttcaattaaatctggaataaattctggaaagatggagagacattgtttagcatacactctggcctttcaaaatcctgtggcctaagtttgattttgatttgtctataccttattgtgtcacaacttttgagatagaaagtttatgcgattatttgaacgcaggatgctcatttgcttgagct

SEQ ID NO: 10636 - protein, 163 aa, Glycine max
  peptide (1)..(163): Ceres Seq. ID no. 13594207
  misc_feature (53)..(151): Pfam Name: Pfam Description:  Cytochrome c oxidase subunit Vb
  misc_feature (1)..(162): NCBI GI NO: 21592567 NR Description: cytochrome c oxidase subunit, putative
  misc_feature (1)..(163): NCBI GI NO: 15232644 NR Description: cytochrome c oxidase subunit Vb -related
  misc_feature (1)..(162): NCBI GI NO: 15220092 NR Description: cytochrome c oxidase subunit -related
  misc_feature (1)..(163): NCBI GI NO: 34912592 NR Description: cytochrome c oxidase subunit Vb precursor
  misc_feature (42)..(163): NCBI GI NO: 5803264 NR Description: ESTs AU057456
  misc_feature (1)..(104): NCBI GI NO: 7484634 NR Description: probable cytochrome-c oxidase (EC 1
  misc_feature (118)..(163): NCBI GI NO: 5903035 NR Description: Similar to gb|D85381 cytochrome c oxidase subunitVb precursor from Oryza sativa
  misc_feature (65)..(145): NCBI GI NO: 223590 NR Description: oxidase IV,cytochrome
  misc_feature (65)..(145): NCBI GI NO: 117102 NR Description: CYTOCHROME C OXIDASE POLYPEPTIDE VB (VI)
  misc_feature (40)..(145): NCBI GI NO: 40644927 NR Description: sperm protein 8 [Vulpes vulpes]
MLRRLLSSHLKTLASSAAAAATATPRSASASARFAALSRSCLYFSTQSEDATAIKKKVEDIMPIATGHEREELQAELEGRNILEIDHPEGPFGTKEAPAVVKSYYDKRIVGCPGGEGEDEHDVVWFWLEKDKPHECPVCAQYFVLEVVGPGGPPDGHGDDDHH

SEQ ID NO: 10637 - protein, 102 aa, Glycine max
  peptide (1)..(102): Ceres Seq. ID no. 13594208
  misc_feature (1)..(90): Pfam Name: Pfam Description:  Cytochrome c oxidase subunit Vb
  misc_feature (1)..(101): NCBI GI NO: 21592567 NR Description: cytochrome c oxidase subunit, putative
  misc_feature (1)..(102): NCBI GI NO: 15232644 NR Description: cytochrome c oxidase subunit Vb -related
  misc_feature (1)..(101): NCBI GI NO: 15220092 NR Description: cytochrome c oxidase subunit -related
  misc_feature (1)..(102): NCBI GI NO: 34912592 NR Description: cytochrome c oxidase subunit Vb precursor
  misc_feature (1)..(102): NCBI GI NO: 5803264 NR Description: ESTs AU057456
  misc_feature (1)..(43): NCBI GI NO: 7484634 NR Description: probable cytochrome-c oxidase (EC 1
  misc_feature (57)..(102): NCBI GI NO: 5903035 NR Description: Similar to gb|D85381 cytochrome c oxidase subunitVb precursor from Oryza sativa
  misc_feature (4)..(84): NCBI GI NO: 223590 NR Description: oxidase IV,cytochrome
  misc_feature (4)..(84): NCBI GI NO: 117102 NR Description: CYTOCHROME C OXIDASE POLYPEPTIDE VB (VI)
  misc_feature (1)..(84): NCBI GI NO: 40644927 NR Description: sperm protein 8 [Vulpes vulpes]
MPIATGHEREELQAELEGRNILEIDHPEGPFGTKEAPAVVKSYYDKRIVGCPGGEGEDEHDVVWFWLEKDKPHECPVCAQYFVLEVVGPGGPPDGHGDDDHH

SEQ ID NO: 10638 - DNA, 1903 bp, Glycine max
  misc_feature (1)..(1903): Ceres Seq. ID no. 15226493
aaactatcaaataataatgtatgtggtgtttagttaactggtaagtaagggaaggtagaaattgaggagattgaattgcaatagcaatgagtgtgtcttcaaattcgaaggaatcgatggaattatgcatatttgatttgcggagaggccaacacgaaggccaagagctcgataagattctcttcttcttccccgccggtttgcccttttcaaagcaactctccgtcattggcctcagcgaaggactcatcactttcactagaatcttctcgccagaggctgcctgcgacgtcatcgaagcagaaagacattctcatgttttctacgaggccgaacccgatatctggatagtcatggttgccgacaaaagcaatgattcagaacctatatggagagttgatgcattaagaaaagttctcaaggaaattcactcactttttgtcatgtttcatggatctattagagcaatgctggagaaagaacccggcggaggactaacaagacggcatttgtatacctttatcatggattatctgagggattttcttgcggggaaaaagctccttttaccttcattccgtgattgcttaaaggaacgtggaactgttcagatgctgacaataggtcgcgaggctgcaattgaggttcagtcccttgtcagggtgcttgaatcttcttctggaaacactccctgctactctttggttttatttcaagacctgctagtgtccacaagtctatctcctgatgacaccataaatttattcacatatgctgtgctaaggttgactccccatgctctatcttctggaacaagttcctggtcctacttacggaaaggaagttctgcatccaatgttgccactgagtctaacatggcccatccaagctctttgtctgaaagtttttatggctcatctgatatgtcctctggtgaagataaccactatcatgttgtgaggcccttacagagtgacaaatggtctaaaggaaaagatggttatcttgtcactgatttatggggtgcagaagttggtacgtgggtgtttgcctctccaacagtttggcttcaacatacaggagagaaaatgtatctttgtgtttatcagcatagaagccttactttgatgcttctgattcctgtatcatccattcctaacggggagcaaggtgtgtcggcagtgaggcagcaagttgttgaaaatgcatcacttaaaatattgaaagttgaagagaaactatcgaaaggatggggtggagataatgcttatcacgttagtgggtaccgctacttacttgtagatggtgatagaaatgtatccagggcttctccagcaacaaaagttacaactttaacaaaggagtccttacttgctatgaataagcttaggcaagaggtggagttagagaagagtagagcaaaactggatagccgtaattgtgaaaaagacttagaggtgtgcattagagcaaaaaataatgcatgggttatttctcgagtcacaagagggaaggagctttacatggttctagagaaagctaatgaaacccttctatatgcttcagatgctgttgagaagtttagcgacaggtattgcaatggaacattttctctggactaaagaaaaccaagcatgtgcgaccgaggaatagcacgttaggtcttctaactgtttacccagtaaagtcgggaagttttccactgttgatttttctcaccgggaaattcaagaatggaagaaagaatgctactctgtgtatatctctctgtatattaagtgtaatttgtttatacttgttaaagggtgctttatcaaatcttgtcaccggtaactttctttttaatccgaaattgggtcagttccgagagaaattgttttccaaaaagtttcatttatttcac

SEQ ID NO: 10639 - protein, 511 aa, Glycine max
  peptide (1)..(511): Ceres Seq. ID no. 15226494
  misc_feature (1)..(511): NCBI GI NO: 30684673 NR Description: expressed protein [Arabidopsis thaliana]
  misc_feature (1)..(511): NCBI GI NO: 25372816 NR Description: F23A5.27 [imported] - Arabidopsis thaliana
  misc_feature (1)..(511): NCBI GI NO: 15220866 NR Description: myrosinase precursor -related
  misc_feature (1)..(511): NCBI GI NO: 18394314 NR Description: expressed protein [Arabidopsis thaliana]
  misc_feature (1)..(511): NCBI GI NO: 21618002 NR Description: unknown [Arabidopsis thaliana]
  misc_feature (1)..(263): NCBI GI NO: 38175489 NR Description: putative myrosinase precursor
  misc_feature (281)..(511): NCBI GI NO: 38175489 NR Description: putative myrosinase precursor
  misc_feature (190)..(511): NCBI GI NO: 18266049 NR Description: myrosinase precursor [Brassica oleracea]
  misc_feature (232)..(502): NCBI GI NO: 14517360 NR Description: At1g80910/F23A5_21 [Arabidopsis thaliana]
  misc_feature (15)..(236): NCBI GI NO: 37674289 NR Description: chromosome 7 open reading frame 28B
MSVSSNSKESMELCIFDLRRGQHEGQELDKILFFFPAGLPFSKQLSVIGLSEGLITFTRIFSPEAACDVIEAERHSHVFYEAEPDIWIVMVADKSNDSEPIWRVDALRKVLKEIHSLFVMFHGSIRAMLEKEPGGGLTRRHLYTFIMDYLRDFLAGKKLLLPSFRDCLKERGTVQMLTIGREAAIEVQSLVRVLESSSGNTPCYSLVLFQDLLVSTSLSPDDTINLFTYAVLRLTPHALSSGTSSWSYLRKGSSASNVATESNMAHPSSLSESFYGSSDMSSGEDNHYHVVRPLQSDKWSKGKDGYLVTDLWGAEVGTWVFASPTVWLQHTGEKMYLCVYQHRSLTLMLLIPVSSIPNGEQGVSAVRQQVVENASLKILKVEEKLSKGWGGDNAYHVSGYRYLLVDGDRNVSRASPATKVTTLTKESLLAMNKLRQEVELEKSRAKLDSRNCEKDLEVCIRAKNNAWVISRVTRGKELYMVLEKANETLLYASDAVEKFSDRYCNGTFSLD

SEQ ID NO: 10640 - protein, 501 aa, Glycine max
  peptide (1)..(501): Ceres Seq. ID no. 15226495
  misc_feature (1)..(501): NCBI GI NO: 30684673 NR Description: expressed protein [Arabidopsis thaliana]
  misc_feature (1)..(501): NCBI GI NO: 25372816 NR Description: F23A5.27 [imported] - Arabidopsis thaliana
  misc_feature (1)..(501): NCBI GI NO: 15220866 NR Description: myrosinase precursor -related
  misc_feature (1)..(501): NCBI GI NO: 18394314 NR Description: expressed protein [Arabidopsis thaliana]
  misc_feature (1)..(501): NCBI GI NO: 21618002 NR Description: unknown [Arabidopsis thaliana]
  misc_feature (1)..(253): NCBI GI NO: 38175489 NR Description: putative myrosinase precursor
  misc_feature (271)..(501): NCBI GI NO: 38175489 NR Description: putative myrosinase precursor
  misc_feature (180)..(501): NCBI GI NO: 18266049 NR Description: myrosinase precursor [Brassica oleracea]
  misc_feature (222)..(492): NCBI GI NO: 14517360 NR Description: At1g80910/F23A5_21 [Arabidopsis thaliana]
  misc_feature (5)..(226): NCBI GI NO: 37674289 NR Description: chromosome 7 open reading frame 28B
MELCIFDLRRGQHEGQELDKILFFFPAGLPFSKQLSVIGLSEGLITFTRIFSPEAACDVIEAERHSHVFYEAEPDIWIVMVADKSNDSEPIWRVDALRKVLKEIHSLFVMFHGSIRAMLEKEPGGGLTRRHLYTFIMDYLRDFLAGKKLLLPSFRDCLKERGTVQMLTIGREAAIEVQSLVRVLESSSGNTPCYSLVLFQDLLVSTSLSPDDTINLFTYAVLRLTPHALSSGTSSWSYLRKGSSASNVATESNMAHPSSLSESFYGSSDMSSGEDNHYHVVRPLQSDKWSKGKDGYLVTDLWGAEVGTWVFASPTVWLQHTGEKMYLCVYQHRSLTLMLLIPVSSIPNGEQGVSAVRQQVVENASLKILKVEEKLSKGWGGDNAYHVSGYRYLLVDGDRNVSRASPATKVTTLTKESLLAMNKLRQEVELEKSRAKLDSRNCEKDLEVCIRAKNNAWVISRVTRGKELYMVLEKANETLLYASDAVEKFSDRYCNGTFSLD

SEQ ID NO: 10641 - protein, 422 aa, Glycine max
  peptide (1)..(422): Ceres Seq. ID no. 15226496
  misc_feature (1)..(422): NCBI GI NO: 30684673 NR Description: expressed protein [Arabidopsis thaliana]
  misc_feature (1)..(422): NCBI GI NO: 25372816 NR Description: F23A5.27 [imported] - Arabidopsis thaliana
  misc_feature (1)..(422): NCBI GI NO: 15220866 NR Description: myrosinase precursor -related
  misc_feature (1)..(422): NCBI GI NO: 18394314 NR Description: expressed protein [Arabidopsis thaliana]
  misc_feature (1)..(422): NCBI GI NO: 21618002 NR Description: unknown [Arabidopsis thaliana]
  misc_feature (1)..(174): NCBI GI NO: 38175489 NR Description: putative myrosinase precursor
  misc_feature (192)..(422): NCBI GI NO: 38175489 NR Description: putative myrosinase precursor
  misc_feature (101)..(422): NCBI GI NO: 18266049 NR Description: myrosinase precursor [Brassica oleracea]
  misc_feature (143)..(413): NCBI GI NO: 14517360 NR Description: At1g80910/F23A5_21 [Arabidopsis thaliana]
  misc_feature (1)..(147): NCBI GI NO: 37674289 NR Description: chromosome 7 open reading frame 28B
MVADKSNDSEPIWRVDALRKVLKEIHSLFVMFHGSIRAMLEKEPGGGLTRRHLYTFIMDYLRDFLAGKKLLLPSFRDCLKERGTVQMLTIGREAAIEVQSLVRVLESSSGNTPCYSLVLFQDLLVSTSLSPDDTINLFTYAVLRLTPHALSSGTSSWSYLRKGSSASNVATESNMAHPSSLSESFYGSSDMSSGEDNHYHVVRPLQSDKWSKGKDGYLVTDLWGAEVGTWVFASPTVWLQHTGEKMYLCVYQHRSLTLMLLIPVSSIPNGEQGVSAVRQQVVENASLKILKVEEKLSKGWGGDNAYHVSGYRYLLVDGDRNVSRASPATKVTTLTKESLLAMNKLRQEVELEKSRAKLDSRNCEKDLEVCIRAKNNAWVISRVTRGKELYMVLEKANETLLYASDAVEKFSDRYCNGTFSLD

SEQ ID NO: 10642 - DNA, 955 bp, Glycine max
  misc_feature (1)..(955): Ceres Seq. ID no. 13594139
acatgccaaaattaacacccctgaatttcacactccctctcccaaactcatcatcctataatacaaagggtttggaatatatatcaaatatcaaaatacatcacaacatcaaaatggcctcaattgttactatggccaccattgtcacattagtcctcgcactagcatgttgtggcatgtctgccccgacctcagtgccgaaaaccactgcagcggccccggccccggagagcaatggctgcttgatggcactagcaaacatgtcagattgtctgacctatgttgaggatgggagtaagttgtcaaagcccgacaaagggtgctgccctgagttggcagggttggttgatagcaaccccatttgcttgtgtgagatgctaggcaaacctgactctattggcatcaaaattgatttgaacaaagccctcaagcttccttctgtttgtggagtgaccactccccctgttagcacctgtttccgctgtgggagtccccgtgtccttgcctccatcaatgagtgaaggtccaagtattgcaccgggagccttcagtccttcaaatgcagatgctgcgaatcctgcttcaagtcctaactctgcttctagtcctgcaggtgggctaggcccttcgtccgaggatgctgctgccagcccttctcaaaacaaaaatgaagtttcagccattcacccttctgctttgactaatttcttttttggccttttcactttatttgtctctgtattcttctgattttacacacatttattctgtgtcattattttagtggatattttatttcctcattatttgtatgttgtgagccactttgattaaagcttttgttgtaattttatgcactgttgcaatattgttactgtcattattagtgagccatacactttaattaggaacttcatgcctgcatttttacgccggagatattcattttttttgg

SEQ ID NO: 10643 - protein, 172 aa, Glycine max
  peptide (1)..(172): Ceres Seq. ID no. 13594140
  misc_feature (80)..(158): Pfam Name: Pfam Description:  Protease inhibitor/seed storage/LTP family
  misc_feature (38)..(168): NCBI GI NO: 34909226 NR Description: P0432B10.23
  misc_feature (38)..(172): NCBI GI NO: 21618293 NR Description: unknown [Arabidopsis thaliana]
  misc_feature (38)..(172): NCBI GI NO: 18401329 NR Description: protease inhibitor/seed storage/lipid transfer
  misc_feature (38)..(164): NCBI GI NO: 15229756 NR Description: protease inhibitor/seed storage/lipid transfer
  misc_feature (38)..(164): NCBI GI NO: 21617892 NR Description: lipid-transfer protein-like protein
  misc_feature (38)..(172): NCBI GI NO: 25407863 NR Description: hypothetical protein At2g27130
  misc_feature (59)..(164): NCBI GI NO: 25553595 NR Description: OJ1656_E11.26
  misc_feature (70)..(164): NCBI GI NO: 25553596 NR Description: OJ1656_E11.27
  misc_feature (40)..(169): NCBI GI NO: 10176956 NR Description: contains similarity to nonspecific lipid-transferprotein~gene_id:MHJ24
  misc_feature (80)..(158): NCBI GI NO: 15225509 NR Description: protease inhibitor/seed storage/lipid transfer
MPKLTPLNFTLPLPNSSSYNTKGLEYISNIKIHHNIKMASIVTMATIVTLVLALACCGMSAPTSVPKTTAAAPAPESNGCLMALANMSDCLTYVEDGSKLSKPDKGCCPELAGLVDSNPICLCEMLGKPDSIGIKIDLNKALKLPSVCGVTTPPVSTCFRCGSPRVLASINE

SEQ ID NO: 10644 - protein, 135 aa, Glycine max
  peptide (1)..(135): Ceres Seq. ID no. 13594141
  misc_feature (43)..(121): Pfam Name: Pfam Description:  Protease inhibitor/seed storage/LTP family
  misc_feature (1)..(131): NCBI GI NO: 34909226 NR Description: P0432B10.23
  misc_feature (1)..(135): NCBI GI NO: 21618293 NR Description: unknown [Arabidopsis thaliana]
  misc_feature (1)..(135): NCBI GI NO: 18401329 NR Description: protease inhibitor/seed storage/lipid transfer
  misc_feature (1)..(127): NCBI GI NO: 15229756 NR Description: protease inhibitor/seed storage/lipid transfer
  misc_feature (1)..(127): NCBI GI NO: 21617892 NR Description: lipid-transfer protein-like protein
  misc_feature (1)..(135): NCBI GI NO: 25407863 NR Description: hypothetical protein At2g27130
  misc_feature (22)..(127): NCBI GI NO: 25553595 NR Description: OJ1656_E11.26
  misc_feature (33)..(127): NCBI GI NO: 25553596 NR Description: OJ1656_E11.27
  misc_feature (3)..(132): NCBI GI NO: 10176956 NR Description: contains similarity to nonspecific lipid-transferprotein~gene_id:MHJ24
  misc_feature (43)..(121): NCBI GI NO: 15225509 NR Description: protease inhibitor/seed storage/lipid transfer
MASIVTMATIVTLVLALACCGMSAPTSVPKTTAAAPAPESNGCLMALANMSDCLTYVEDGSKLSKPDKGCCPELAGLVDSNPICLCEMLGKPDSIGIKIDLNKALKLPSVCGVTTPPVSTCFRCGSPRVLASINE

SEQ ID NO: 10645 - protein, 129 aa, Glycine max
  peptide (1)..(129): Ceres Seq. ID no. 13594142
  misc_feature (37)..(115): Pfam Name: Pfam Description:  Protease inhibitor/seed storage/LTP family
  misc_feature (1)..(125): NCBI GI NO: 34909226 NR Description: P0432B10.23
  misc_feature (1)..(129): NCBI GI NO: 21618293 NR Description: unknown [Arabidopsis thaliana]
  misc_feature (1)..(129): NCBI GI NO: 18401329 NR Description: protease inhibitor/seed storage/lipid transfer
  misc_feature (1)..(121): NCBI GI NO: 15229756 NR Description: protease inhibitor/seed storage/lipid transfer
  misc_feature (1)..(121): NCBI GI NO: 21617892 NR Description: lipid-transfer protein-like protein
  misc_feature (1)..(129): NCBI GI NO: 25407863 NR Description: hypothetical protein At2g27130
  misc_feature (16)..(121): NCBI GI NO: 25553595 NR Description: OJ1656_E11.26
  misc_feature (27)..(121): NCBI GI NO: 25553596 NR Description: OJ1656_E11.27
  misc_feature (1)..(126): NCBI GI NO: 10176956 NR Description: contains similarity to nonspecific lipid-transferprotein~gene_id:MHJ24
  misc_feature (37)..(115): NCBI GI NO: 15225509 NR Description: protease inhibitor/seed storage/lipid transfer
MATIVTLVLALACCGMSAPTSVPKTTAAAPAPESNGCLMALANMSDCLTYVEDGSKLSKPDKGCCPELAGLVDSNPICLCEMLGKPDSIGIKIDLNKALKLPSVCGVTTPPVSTCFRCGSPRVLASINE

SEQ ID NO: 10646 - DNA, 1529 bp, Glycine max
  misc_feature (1)..(1529): Ceres Seq. ID no. 14312270
accataacgtgacaccaaattctcattctggcgcgcgtcctcacatccccacagttaccactattcctcttttcttcatcatcatcttcttcttcttcttcttcttcttcttgcatttacatcaactcttctcccaacccataaaaaaaaaaaaaaaagttcgtattttccctcccatgatcgaccctcatggtcacagactccaagcccatcattccccggcgcggcctcgtcgtcggcaactactgtcatgacgtcctccaccgcgacggcgagaccgtcgccgagaccctcggcggcgccgcctccttcatctccgttatcctcgatgccctctcccttcccttccacaccgtctccaaggtgggccccaacttcgcctacaccgccgacacatcgaatcaccccccgttaataatcccaacctcccaaaccacgctcttccacgctcacttcggttcgggccacccggaccgcctcctgaaccgcgtccgatcctgcgattcaatccaacccaccgacctcccggaccaacaaccccggttcgggttcggactcgcggtcggggtcggcggtgagattctcccggagacagtggaaaaaatgctctcgatctgcgaccacgtgttcgtggacattcaggctctgattcgcaggttcgacaacatcaacggtcgcgtgagccacgtggcgctaagagagagcgggttcttccacctcttgccgcgtgtggcgtttctcaaggcttctgcggatgaggccgtttttattgacgtggaggaggtgaggaagtggtgttgcgtggtcgtcacgcacgggaaggatggttgcgaggtgttttgtgaaaacggtgcgtttaaggtggcgccgttcgaggctgatcaggttgatcccaccggcgccggggactgttttctcggcgggtttgcggcggggattgtgaggggcctggccgtgcctgatgcggctctgttggggaacttctttggatccattgctgtggcgcaagtgggaccgcccaagcttgacttcaacttgattcagatggttaaggatgagatgcacaaaaggaagctgcaggatattcccttcttagaaagaagagatgagtcgccagggtttcagaagccacctgaacaagatcaattctatgcatctcttgttactgccaaagccataattacttgccagattcaagaatctggtcggaatctgctaagctctcctaaagtgtttgagcaaaataatgcaaagacaagactttcactggcttctgtgcacgaggaaccaattccaagcgttgatggtaaaccctaacatgggatggttggagttccaaatctcactgtaactctccagtgcccttccttttcatatcaaaaatagagatttcttagcatccaggaatctgtcaatttatggtgccttttccacacctagtctcacgtgcagcctaatttgtagttctacttgtaccaaattactaataaattattcttaaaaagaaaatcgagattgaaattccattc

SEQ ID NO: 10647 - protein, 375 aa, Glycine max
  peptide (1)..(375): Ceres Seq. ID no. 14312271
  misc_feature (11)..(284): Pfam Name: Pfam Description:  pfkB family carbohydrate kinase
  misc_feature (9)..(297): NCBI GI NO: 15237741 NR Description: pfkB type carbohydrate kinase protein family
  misc_feature (9)..(286): NCBI GI NO: 8843793 NR Description: gene_id:MZN1
  misc_feature (13)..(338): NCBI GI NO: 29788872 NR Description: unknown protein
  misc_feature (13)..(285): NCBI GI NO: 31126792 NR Description: unknown protein
MVTDSKPIIPRRGLVVGNYCHDVLHRDGETVAETLGGAASFISVILDALSLPFHTVSKVGPNFAYTADTSNHPPLIIPTSQTTLFHAHFGSGHPDRLLNRVRSCDSIQPTDLPDQQPRFGFGLAVGVGGEILPETVEKMLSICDHVFVDIQALIRRFDNINGRVSHVALRESGFFHLLPRVAFLKASADEAVFIDVEEVRKWCCVVVTHGKDGCEVFCENGAFKVAPFEADQVDPTGAGDCFLGGFAAGIVRGLAVPDAALLGNFFGSIAVAQVGPPKLDFNLIQMVKDEMHKRKLQDIPFLERRDESPGFQKPPEQDQFYASLVTAKAIITCQIQESGRNLLSSPKVFEQNNAKTRLSLASVHEEPIPSVDGKP

SEQ ID NO: 10648 - protein, 237 aa, Glycine max
  peptide (1)..(237): Ceres Seq. ID no. 14312272
  misc_feature (1)..(146): Pfam Name: Pfam Description:  pfkB family carbohydrate kinase
  misc_feature (1)..(159): NCBI GI NO: 15237741 NR Description: pfkB type carbohydrate kinase protein family
  misc_feature (1)..(148): NCBI GI NO: 8843793 NR Description: gene_id:MZN1
  misc_feature (1)..(200): NCBI GI NO: 29788872 NR Description: unknown protein
  misc_feature (1)..(147): NCBI GI NO: 31126792 NR Description: unknown protein
MLSICDHVFVDIQALIRRFDNINGRVSHVALRESGFFHLLPRVAFLKASADEAVFIDVEEVRKWCCVVVTHGKDGCEVFCENGAFKVAPFEADQVDPTGAGDCFLGGFAAGIVRGLAVPDAALLGNFFGSIAVAQVGPPKLDFNLIQMVKDEMHKRKLQDIPFLERRDESPGFQKPPEQDQFYASLVTAKAIITCQIQESGRNLLSSPKVFEQNNAKTRLSLASVHEEPIPSVDGKP

SEQ ID NO: 10649 - DNA, 1737 bp, Glycine max
  misc_feature (1)..(1737): Ceres Seq. ID no. 13594209
aaaaaattaacattgaattttgacctgttacataagagtttgggatcaagaatcatggtgaatcacctatctttctataaataccacaaaattgaagctgaacgcatgagttctaatatatcattcaaaagtttttgaaatgttgtcaccccttcttctatttctatgcctaactcttcctttgtttttgttgtccttcttcaaataccgtaaaaccttcaagaatccaccacttccaccaggtcctagaggccttcccataatagggaatcttcatcaactagatagtccttctcttcatgagcagctatggcatctctcaaagaaatatggtcctttattttcccttcaatttggattaaggccagccatagttgtttcctctccaaaattggccaaagaggtaatgaaagacaatgaccttgagtgctgtggacgacctaaattactaggccaacagaaactaacctataatgggttagacatgggattttcctcatacgatagttattggagagaaatcagaaaaatttgtgttgtccatgtccttagctccaaacgtgtccaaagctttacctcaataagacattttgaggtcaagcagatgataaaaaaaatatctaggcatgcctcatcttcaaaagttacaaatttaaatgaagtgcttatatcccttattagtactattgtatgtagaattgttttggggagaaggtatgaagaggagggatctgaaggtagcagattccataagttgttcaatgagtgtgaagctatgttgggtaacttctttgtttcagattatattcctttcatgggttggattgataaactcaggggactggatgcacgtcttgaacgcaatttcaaggagatggataagttctaccaagaagccattgatgaacacatgaattctaagaaaaaaactccagaggaagaggatttagttgatgtcttacttcaactgaaagagaacaacacgtttcccatagatctcaccaatgataacatcaaagcagtgctcttgaacttacttgtaggagctacaggtacaactgaagtcacaacaatctgggccatgactgaactaataaaaaatccaagcattatgaagaaagtgcaagaagaaattagaggcttaagtggtaagaaagatttcttggatgaagatgatattcaaaagttttcctacttaagggcagtgataaaagagacacttagattgcacttaccagcaccactacttataccaagagaaacaaataaaaaatgcatgttagatggctacgaaattccagccaagacattattatatgtgaatgcttgggcaattcatagagatcctaaggcttggaaagatccagaagagtttatacctgagaggtttttaaattgcgacatagatctttatggacaagattttgagtttattccattcggtgctggtcgtagattgtgccctggtatgaatatggcatttgctgcattggatcttatacttgctaatcttctttattcctttgactgggaattgccccaaggaatgaaaaaggaagacattgatactgaagtgttgccaggagttacacagcataagaagaatcctctgtgtgttgtggccaagtgctatatgtaaaatccaaaagtcgtaactactgctgaaaaaaataaaataaaataattaatgattgtactcttccaacgaagattattaaataaagatgtaagccctcc

SEQ ID NO: 10650 - protein, 499 aa, Glycine max
  peptide (1)..(499): Ceres Seq. ID no. 13594210
  misc_feature (33)..(494): Pfam Name: Pfam Description:  Cytochrome P450
  misc_feature (6)..(499): NCBI GI NO: 25282608 NR Description: cytochrome P-450LXXIA1 [similarity] - avocado
  misc_feature (1)..(498): NCBI GI NO: 17644125 NR Description: cytochrome P450-1 [Musa acuminata]
  misc_feature (6)..(499): NCBI GI NO: 15231541 NR Description: cytochrome P450 71B36 [Arabidopsis thaliana]
  misc_feature (4)..(499): NCBI GI NO: 15231542 NR Description: cytochrome p450 family [Arabidopsis thaliana]
  misc_feature (7)..(494): NCBI GI NO: 13878390 NR Description: Cytochrome P450 71B10
  misc_feature (7)..(494): NCBI GI NO: 30696845 NR Description: cytochrome P450 71B10 [Arabidopsis thaliana]
  misc_feature (7)..(494): NCBI GI NO: 28393289 NR Description: putative cytochrome p450 [Arabidopsis thaliana]
  misc_feature (19)..(491): NCBI GI NO: 15235968 NR Description: cytochrome P450 83B1 [Arabidopsis thaliana]
  misc_feature (7)..(498): NCBI GI NO: 13516748 NR Description: cytochrome P450 [Asparagus officinalis]
  misc_feature (11)..(499): NCBI GI NO: 16507125 NR Description: cytochrome P450 [Citrus sinensis]
MLSPLLLFLCLTLPLFLLSFFKYRKTFKNPPLPPGPRGLPIIGNLHQLDSPSLHEQLWHLSKKYGPLFSLQFGLRPAIVVSSPKLAKEVMKDNDLECCGRPKLLGQQKLTYNGLDMGFSSYDSYWREIRKICVVHVLSSKRVQSFTSIRHFEVKQMIKKISRHASSSKVTNLNEVLISLISTIVCRIVLGRRYEEEGSEGSRFHKLFNECEAMLGNFFVSDYIPFMGWIDKLRGLDARLERNFKEMDKFYQEAIDEHMNSKKKTPEEEDLVDVLLQLKENNTFPIDLTNDNIKAVLLNLLVGATGTTEVTTIWAMTELIKNPSIMKKVQEEIRGLSGKKDFLDEDDIQKFSYLRAVIKETLRLHLPAPLLIPRETNKKCMLDGYEIPAKTLLYVNAWAIHRDPKAWKDPEEFIPERFLNCDIDLYGQDFEFIPFGAGRRLCPGMNMAFAALDLILANLLYSFDWELPQGMKKEDIDTEVLPGVTQHKKNPLCVVAKCYM

SEQ ID NO: 10651 - protein, 410 aa, Glycine max
  peptide (1)..(410): Ceres Seq. ID no. 13594211
  misc_feature (1)..(405): Pfam Name: Pfam Description:  Cytochrome P450
  misc_feature (1)..(410): NCBI GI NO: 25282608 NR Description: cytochrome P-450LXXIA1 [similarity] - avocado
  misc_feature (1)..(409): NCBI GI NO: 17644125 NR Description: cytochrome P450-1 [Musa acuminata]
  misc_feature (1)..(410): NCBI GI NO: 15231541 NR Description: cytochrome P450 71B36 [Arabidopsis thaliana]
  misc_feature (1)..(410): NCBI GI NO: 15231542 NR Description: cytochrome p450 family [Arabidopsis thaliana]
  misc_feature (1)..(405): NCBI GI NO: 13878390 NR Description: Cytochrome P450 71B10
  misc_feature (1)..(405): NCBI GI NO: 30696845 NR Description: cytochrome P450 71B10 [Arabidopsis thaliana]
  misc_feature (1)..(405): NCBI GI NO: 28393289 NR Description: putative cytochrome p450 [Arabidopsis thaliana]
  misc_feature (1)..(402): NCBI GI NO: 15235968 NR Description: cytochrome P450 83B1 [Arabidopsis thaliana]
  misc_feature (1)..(409): NCBI GI NO: 13516748 NR Description: cytochrome P450 [Asparagus officinalis]
  misc_feature (1)..(410): NCBI GI NO: 16507125 NR Description: cytochrome P450 [Citrus sinensis]
MKDNDLECCGRPKLLGQQKLTYNGLDMGFSSYDSYWREIRKICVVHVLSSKRVQSFTSIRHFEVKQMIKKISRHASSSKVTNLNEVLISLISTIVCRIVLGRRYEEEGSEGSRFHKLFNECEAMLGNFFVSDYIPFMGWIDKLRGLDARLERNFKEMDKFYQEAIDEHMNSKKKTPEEEDLVDVLLQLKENNTFPIDLTNDNIKAVLLNLLVGATGTTEVTTIWAMTELIKNPSIMKKVQEEIRGLSGKKDFLDEDDIQKFSYLRAVIKETLRLHLPAPLLIPRETNKKCMLDGYEIPAKTLLYVNAWAIHRDPKAWKDPEEFIPERFLNCDIDLYGQDFEFIPFGAGRRLCPGMNMAFAALDLILANLLYSFDWELPQGMKKEDIDTEVLPGVTQHKKNPLCVVAKCYM

SEQ ID NO: 10652 - protein, 384 aa, Glycine max
  peptide (1)..(384): Ceres Seq. ID no. 13594212
  misc_feature (1)..(379): Pfam Name: Pfam Description:  Cytochrome P450
  misc_feature (1)..(384): NCBI GI NO: 25282608 NR Description: cytochrome P-450LXXIA1 [similarity] - avocado
  misc_feature (1)..(383): NCBI GI NO: 17644125 NR Description: cytochrome P450-1 [Musa acuminata]
  misc_feature (1)..(384): NCBI GI NO: 15231541 NR Description: cytochrome P450 71B36 [Arabidopsis thaliana]
  misc_feature (1)..(384): NCBI GI NO: 15231542 NR Description: cytochrome p450 family [Arabidopsis thaliana]
  misc_feature (1)..(379): NCBI GI NO: 13878390 NR Description: Cytochrome P450 71B10
  misc_feature (1)..(379): NCBI GI NO: 30696845 NR Description: cytochrome P450 71B10 [Arabidopsis thaliana]
  misc_feature (1)..(379): NCBI GI NO: 28393289 NR Description: putative cytochrome p450 [Arabidopsis thaliana]
  misc_feature (1)..(376): NCBI GI NO: 15235968 NR Description: cytochrome P450 83B1 [Arabidopsis thaliana]
  misc_feature (1)..(383): NCBI GI NO: 13516748 NR Description: cytochrome P450 [Asparagus officinalis]
  misc_feature (1)..(384): NCBI GI NO: 16507125 NR Description: cytochrome P450 [Citrus sinensis]
MGFSSYDSYWREIRKICVVHVLSSKRVQSFTSIRHFEVKQMIKKISRHASSSKVTNLNEVLISLISTIVCRIVLGRRYEEEGSEGSRFHKLFNECEAMLGNFFVSDYIPFMGWIDKLRGLDARLERNFKEMDKFYQEAIDEHMNSKKKTPEEEDLVDVLLQLKENNTFPIDLTNDNIKAVLLNLLVGATGTTEVTTIWAMTELIKNPSIMKKVQEEIRGLSGKKDFLDEDDIQKFSYLRAVIKETLRLHLPAPLLIPRETNKKCMLDGYEIPAKTLLYVNAWAIHRDPKAWKDPEEFIPERFLNCDIDLYGQDFEFIPFGAGRRLCPGMNMAFAALDLILANLLYSFDWELPQGMKKEDIDTEVLPGVTQHKKNPLCVVAKCYM

SEQ ID NO: 10653 - DNA, 940 bp, Glycine max
  misc_feature (1)..(940): Ceres Seq. ID no. 14308320
gtactgcttacattgagaaattagattgaaaatcaaattcatctctatccattaatattcaatactcttttttctttttttctggctcctttggcctctgttctgtgttcagtcttcaaccacctcaacacatagacgacgcgccacttgtttttgctccaaaccgccctctgattcccgaacccaatgacttctccgctggtggcggagggcgccgccgtcacggcgttccgatcggtgatgctccgggtgcagcaggcggcggagagatccgggtccaaacccgaccgggtccgggtcgtggcggtttccaagacgaaacccgtcactctgattcaacaactctacgacgccggtcaccgacacttcggcgaaaactacgtccaagaaatcattgaaaaagctcctcagcttcccccagacgttgagtggcatttcattgggcatttgcaaagcaacaaagtcaaaacacttttgggtggagttccaaatctggccatggttgagagtgtggacaatcagaagatagcaaataatcttgaccgtatggtatcaacccttggaagaaatcctctgaaggttttggtgcaagtaaatacaagtggagaagaatccaaatctggtattgatccttccgattgtgttgagcttgcaaaacatgtgaaattgagctgcccaaacctagtgttctctggcctaatgacgataggaatgccagactatacctcaactccacagaactttcagacactatcaaattgcagaactgaagtatgcaaggcacttgaaatgcccgaggaggaatgtgaactgtcaatgggcatgtctggtgattttgagttagcgattgaaatgggtagtaccaatgtaagaattggatccacaatatttggaccgagggagtatgcaaagaaacagtaatagcaagaagttgtaatcc

SEQ ID NO: 10654 - protein, 244 aa, Glycine max
  peptide (1)..(244): Ceres Seq. ID no. 14308321
  misc_feature (13)..(240): Pfam Name: Pfam Description:  Alanine racemase, N-terminal domain
  misc_feature (1)..(243): NCBI GI NO: 14030629 NR Description: AT4g26860/F10M23_200 [Arabidopsis thaliana]
  misc_feature (1)..(243): NCBI GI NO: 18416879 NR Description: Proline synthetase associated protein -related
  misc_feature (12)..(243): NCBI GI NO: 30682530 NR Description: Proline synthetase associated protein -related
  misc_feature (12)..(243): NCBI GI NO: 18391333 NR Description: Proline synthetase associated protein -related
  misc_feature (1)..(233): NCBI GI NO: 7445224 NR Description: hypothetical protein F10M23
  misc_feature (5)..(244): NCBI GI NO: 11359716 NR Description: conserved hypothetical protein
  misc_feature (7)..(243): NCBI GI NO: 6005842 NR Description: proline synthetase co-transcribed homolog
  misc_feature (5)..(243): NCBI GI NO: 16930823 NR Description: proline synthetase co-transcribed [Mus musculus]
  misc_feature (97)..(221): NCBI GI NO: 19386824 NR Description: B1147A04.19
  misc_feature (37)..(243): NCBI GI NO: 34879017 NR Description: similar to Proline synthetase associated
MTSPLVAEGAAVTAFRSVMLRVQQAAERSGSKPDRVRVVAVSKTKPVTLIQQLYDAGHRHFGENYVQEIIEKAPQLPPDVEWHFIGHLQSNKVKTLLGGVPNLAMVESVDNQKIANNLDRMVSTLGRNPLKVLVQVNTSGEESKSGIDPSDCVELAKHVKLSCPNLVFSGLMTIGMPDYTSTPQNFQTLSNCRTEVCKALEMPEEECELSMGMSGDFELAIEMGSTNVRIGSTIFGPREYAKKQ

SEQ ID NO: 10655 - protein, 226 aa, Glycine max
  peptide (1)..(226): Ceres Seq. ID no. 14308322
  misc_feature (1)..(222): Pfam Name: Pfam Description:  Alanine racemase, N-terminal domain
  misc_feature (1)..(225): NCBI GI NO: 14030629 NR Description: AT4g26860/F10M23_200 [Arabidopsis thaliana]
  misc_feature (1)..(225): NCBI GI NO: 18416879 NR Description: Proline synthetase associated protein -related
  misc_feature (1)..(225): NCBI GI NO: 30682530 NR Description: Proline synthetase associated protein -related
  misc_feature (1)..(225): NCBI GI NO: 18391333 NR Description: Proline synthetase associated protein -related
  misc_feature (1)..(215): NCBI GI NO: 7445224 NR Description: hypothetical protein F10M23
  misc_feature (1)..(226): NCBI GI NO: 11359716 NR Description: conserved hypothetical protein
  misc_feature (1)..(225): NCBI GI NO: 6005842 NR Description: proline synthetase co-transcribed homolog
  misc_feature (1)..(225): NCBI GI NO: 16930823 NR Description: proline synthetase co-transcribed [Mus musculus]
  misc_feature (79)..(203): NCBI GI NO: 19386824 NR Description: B1147A04.19
  misc_feature (19)..(225): NCBI GI NO: 34879017 NR Description: similar to Proline synthetase associated
MLRVQQAAERSGSKPDRVRVVAVSKTKPVTLIQQLYDAGHRHFGENYVQEIIEKAPQLPPDVEWHFIGHLQSNKVKTLLGGVPNLAMVESVDNQKIANNLDRMVSTLGRNPLKVLVQVNTSGEESKSGIDPSDCVELAKHVKLSCPNLVFSGLMTIGMPDYTSTPQNFQTLSNCRTEVCKALEMPEEECELSMGMSGDFELAIEMGSTNVRIGSTIFGPREYAKKQ

SEQ ID NO: 10656 - protein, 140 aa, Glycine max
  peptide (1)..(140): Ceres Seq. ID no. 14308323
  misc_feature (1)..(136): Pfam Name: Pfam Description:  Alanine racemase, N-terminal domain
  misc_feature (1)..(139): NCBI GI NO: 14030629 NR Description: AT4g26860/F10M23_200 [Arabidopsis thaliana]
  misc_feature (1)..(139): NCBI GI NO: 18416879 NR Description: Proline synthetase associated protein -related
  misc_feature (1)..(139): NCBI GI NO: 30682530 NR Description: Proline synthetase associated protein -related
  misc_feature (1)..(139): NCBI GI NO: 18391333 NR Description: Proline synthetase associated protein -related
  misc_feature (1)..(129): NCBI GI NO: 7445224 NR Description: hypothetical protein F10M23
  misc_feature (1)..(140): NCBI GI NO: 11359716 NR Description: conserved hypothetical protein
  misc_feature (1)..(139): NCBI GI NO: 6005842 NR Description: proline synthetase co-transcribed homolog
  misc_feature (1)..(139): NCBI GI NO: 16930823 NR Description: proline synthetase co-transcribed [Mus musculus]
  misc_feature (1)..(117): NCBI GI NO: 19386824 NR Description: B1147A04.19
  misc_feature (1)..(139): NCBI GI NO: 34879017 NR Description: similar to Proline synthetase associated
MVESVDNQKIANNLDRMVSTLGRNPLKVLVQVNTSGEESKSGIDPSDCVELAKHVKLSCPNLVFSGLMTIGMPDYTSTPQNFQTLSNCRTEVCKALEMPEEECELSMGMSGDFELAIEMGSTNVRIGSTIFGPREYAKKQ

SEQ ID NO: 10657 - DNA, 1861 bp, Glycine max
  misc_feature (1)..(1861): Ceres Seq. ID no. 14310527
acaattcctcaaatcacagcgaggaagaaacatcattttctcatgatagcagtatggaactgacagaaaatactagtgatgatccaatgccagaactgcacaatcctactacgctcaaagaaagatgtcttgagtctcttgattttcctggaaccgagacagtcaagaatatgcctgcctttggagctactgaagaacacttgagtggaaagcaaagtttagctggcagttatgataatgaggagaagatatcaagtgacagtgataatatttatcttgtagagatcaaagatactacctcaagttccttaaatgagccagttgaaattataagaagcagtcatgaggaggctccaaccaatgaaacagtcaatgatgttccagaagatttgctatccagtgtgaatacagaaaatccagatatcaaatctgagtcacctggaagagatgttgaaaccaagaatctgaatggtgataatggggaaaaaatttccatgtccaaaagtttagtcctagaaggtttagttagatcactcagatctaatttgattggttcaggagcacctgtaaacgaaccaactgccaacaacagaaaagaaggaattgaaaatgttaaacaggaaactgagactcttgaagagttccctacaaaggaacaatctgaagctcatattagtgctgttgtagaacctgagacccctgtagagaaacagaataacacaggattgtggtacttggtgtataagcacatggtatcaaatatggatgaaaacaattccgagtcactaattgatggggcagatgaaaaagagtcagggtttgatgggagcagaacaagaggagcttccttctctcatgaaagtacacccgtgactgatgaagagatgaaatttaaggaccatgtcgtagctgatccagaagttgcacgccaacagaatgaagccatcaagatggtagaagaagcaattgattcaattcttccagatgatcaggatgacttatcagacaaggaatcactcactgacagcacaatttcagacaactccaaacaatccaacagaactgaaagagtatacagtgaaggcctgaaccaaaaagaagaacagatggaatccgggaacggaatgatccaaaaacaagaagaatcagcaccaaaggagcaaaacaaaacaaaccagaaaatgtctacaagctggagcaatcttaaaaaagtgatcctgcttaggagattcatcaagtcattggaaaaagtaaggaaattcaacccaagagggcctagatatctacctctagagcctgattcagaagctgaaaaagttaacttaaggcatcaagacatggaagaacgaaaaggtacggaagaatggatgcttgattatgcacttcgacaggttgtttccaaattaacccctgctaggaaaagaaaagtggagctgctggtggaagcttttgaaacagtcatgccaactataaaaacttgaaactgggcaaactggcaaagagtggaatagctttgtatgcaaaaaaaattcaagctgaaaggtcaacaaggagatgtatatgatcataatcatttgggatgtcagcagttttttgttttgtggaaactgtgtctggtgtcatatattttttatagtctcttaggaggaaacttagagtatagaatgtttcatgattcagcaacaacaaaattcaatatagggatatttccccctttttttaacctttcatatctctcttggtgttctcaggtggatgttttgtatgaaagatttgcattacaaataccatagacaatctttaaatgtcatgatgtatgtcttttgtgtggaacataatagaatggcctaatccgtattgc

SEQ ID NO: 10658 - protein, 492 aa, Glycine max
  peptide (1)..(492): Ceres Seq. ID no. 14310528
  misc_feature (316)..(491): NCBI GI NO: 24637279 NR Description: pathogen-induced calmodulin-binding protein
  misc_feature (97)..(488): NCBI GI NO: 17933110 NR Description: PNCBP [Solanum tuberosum]
  misc_feature (75)..(488): NCBI GI NO: 17933110 NR Description: PNCBP [Solanum tuberosum]
  misc_feature (316)..(489): NCBI GI NO: 24637243 NR Description: pathogen-induced calmodulin-binding protein
  misc_feature (316)..(489): NCBI GI NO: 15237600 NR Description: Calmodulin-binding protein [Arabidopsis thaliana]
  misc_feature (290)..(488): NCBI GI NO: 15224955 NR Description: Calmodulin-binding protein [Arabidopsis thaliana]
  misc_feature (300)..(486): NCBI GI NO: 24637243 NR Description: pathogen-induced calmodulin-binding protein
  misc_feature (300)..(486): NCBI GI NO: 15237600 NR Description: Calmodulin-binding protein [Arabidopsis thaliana]
  misc_feature (284)..(487): NCBI GI NO: 25956269 NR Description: unnamed protein product
  misc_feature (284)..(485): NCBI GI NO: 33945880 NR Description: hypothetical protein
NSSNHSEEETSFSHDSSMELTENTSDDPMPELHNPTTLKERCLESLDFPGTETVKNMPAFGATEEHLSGKQSLAGSYDNEEKISSDSDNIYLVEIKDTTSSSLNEPVEIIRSSHEEAPTNETVNDVPEDLLSSVNTENPDIKSESPGRDVETKNLNGDNGEKISMSKSLVLEGLVRSLRSNLIGSGAPVNEPTANNRKEGIENVKQETETLEEFPTKEQSEAHISAVVEPETPVEKQNNTGLWYLVYKHMVSNMDENNSESLIDGADEKESGFDGSRTRGASFSHESTPVTDEEMKFKDHVVADPEVARQQNEAIKMVEEAIDSILPDDQDDLSDKESLTDSTISDNSKQSNRTERVYSEGLNQKEEQMESGNGMIQKQEESAPKEQNKTNQKMSTSWSNLKKVILLRRFIKSLEKVRKFNPRGPRYLPLEPDSEAEKVNLRHQDMEERKGTEEWMLDYALRQVVSKLTPARKRKVELLVEAFETVMPTIKT

SEQ ID NO: 10659 - protein, 475 aa, Glycine max
  peptide (1)..(475): Ceres Seq. ID no. 14310529
  misc_feature (299)..(474): NCBI GI NO: 24637279 NR Description: pathogen-induced calmodulin-binding protein
  misc_feature (80)..(471): NCBI GI NO: 17933110 NR Description: PNCBP [Solanum tuberosum]
  misc_feature (58)..(471): NCBI GI NO: 17933110 NR Description: PNCBP [Solanum tuberosum]
  misc_feature (299)..(472): NCBI GI NO: 24637243 NR Description: pathogen-induced calmodulin-binding protein
  misc_feature (299)..(472): NCBI GI NO: 15237600 NR Description: Calmodulin-binding protein [Arabidopsis thaliana]
  misc_feature (273)..(471): NCBI GI NO: 15224955 NR Description: Calmodulin-binding protein [Arabidopsis thaliana]
  misc_feature (283)..(469): NCBI GI NO: 24637243 NR Description: pathogen-induced calmodulin-binding protein
  misc_feature (283)..(469): NCBI GI NO: 15237600 NR Description: Calmodulin-binding protein [Arabidopsis thaliana]
  misc_feature (267)..(470): NCBI GI NO: 25956269 NR Description: unnamed protein product
  misc_feature (267)..(468): NCBI GI NO: 33945880 NR Description: hypothetical protein
MELTENTSDDPMPELHNPTTLKERCLESLDFPGTETVKNMPAFGATEEHLSGKQSLAGSYDNEEKISSDSDNIYLVEIKDTTSSSLNEPVEIIRSSHEEAPTNETVNDVPEDLLSSVNTENPDIKSESPGRDVETKNLNGDNGEKISMSKSLVLEGLVRSLRSNLIGSGAPVNEPTANNRKEGIENVKQETETLEEFPTKEQSEAHISAVVEPETPVEKQNNTGLWYLVYKHMVSNMDENNSESLIDGADEKESGFDGSRTRGASFSHESTPVTDEEMKFKDHVVADPEVARQQNEAIKMVEEAIDSILPDDQDDLSDKESLTDSTISDNSKQSNRTERVYSEGLNQKEEQMESGNGMIQKQEESAPKEQNKTNQKMSTSWSNLKKVILLRRFIKSLEKVRKFNPRGPRYLPLEPDSEAEKVNLRHQDMEERKGTEEWMLDYALRQVVSKLTPARKRKVELLVEAFETVMPTIKT

SEQ ID NO: 10660 - protein, 464 aa, Glycine max
  peptide (1)..(464): Ceres Seq. ID no. 14310530
  misc_feature (288)..(463): NCBI GI NO: 24637279 NR Description: pathogen-induced calmodulin-binding protein
  misc_feature (69)..(460): NCBI GI NO: 17933110 NR Description: PNCBP [Solanum tuberosum]
  misc_feature (47)..(460): NCBI GI NO: 17933110 NR Description: PNCBP [Solanum tuberosum]
  misc_feature (288)..(461): NCBI GI NO: 24637243 NR Description: pathogen-induced calmodulin-binding protein
  misc_feature (288)..(461): NCBI GI NO: 15237600 NR Description: Calmodulin-binding protein [Arabidopsis thaliana]
  misc_feature (262)..(460): NCBI GI NO: 15224955 NR Description: Calmodulin-binding protein [Arabidopsis thaliana]
  misc_feature (272)..(458): NCBI GI NO: 24637243 NR Description: pathogen-induced calmodulin-binding protein
  misc_feature (272)..(458): NCBI GI NO: 15237600 NR Description: Calmodulin-binding protein [Arabidopsis thaliana]
  misc_feature (256)..(459): NCBI GI NO: 25956269 NR Description: unnamed protein product
  misc_feature (256)..(457): NCBI GI NO: 33945880 NR Description: hypothetical protein
MPELHNPTTLKERCLESLDFPGTETVKNMPAFGATEEHLSGKQSLAGSYDNEEKISSDSDNIYLVEIKDTTSSSLNEPVEIIRSSHEEAPTNETVNDVPEDLLSSVNTENPDIKSESPGRDVETKNLNGDNGEKISMSKSLVLEGLVRSLRSNLIGSGAPVNEPTANNRKEGIENVKQETETLEEFPTKEQSEAHISAVVEPETPVEKQNNTGLWYLVYKHMVSNMDENNSESLIDGADEKESGFDGSRTRGASFSHESTPVTDEEMKFKDHVVADPEVARQQNEAIKMVEEAIDSILPDDQDDLSDKESLTDSTISDNSKQSNRTERVYSEGLNQKEEQMESGNGMIQKQEESAPKEQNKTNQKMSTSWSNLKKVILLRRFIKSLEKVRKFNPRGPRYLPLEPDSEAEKVNLRHQDMEERKGTEEWMLDYALRQVVSKLTPARKRKVELLVEAFETVMPTIKT

SEQ ID NO: 10661 - DNA, 1271 bp, Glycine max
  misc_feature (1)..(1271): Ceres Seq. ID no. 14310543
attttttcttcatcatccaccactttatttgtcacttgctttcatgcaattaacacttctaccaccttttttcattttctcactctcttcactaaaatgagtgacacacaccaacctttcatgtccgtacaaccacccatgaagctccacaaccacccatttaacccacaagcctcaagctcaaattttgacggcgacccaccatgcaaaaccgccggaaaaacaaaaccacctcacacgaagctcctccgggtcattctcaccgaccacgacgccaccgattctgactcctccggcgacgacgaagacccaaaaaacacaaaaaaacacaaaaaggtgaaaagacaaattacccacatcaccataaaccttccctttttctcaaaatccccaactccaacatcaacaccttcttcttcttcgcttgacccgacccgttcgacccgacccaagaaacgactcggcgtccctcgccgccggaacaagttccgcggcgtccggcagcgaccatggggacggtggacggcagaaatccgtgacccgactcagagaaaacgggtctggctcggaaccttcgacacggcggaggaagccgccgccgtgtacgacgaggccgcggtgaagctcaagggccctaacgccgtcaccaacttccccctctccgccgccggaaacacggaacatgatacccctccgccggagacggtgttctccggcgaaggtctttcatctccgacgtccgttctcacttactgcgacggagactcgacgccgttcgacggttttcgttacggcgaggtcgacgcgttcgggtttgagtttgacatcgacgcgccgtttagtttaacggccgttaacttaggggtgctgagtcagcggttcgggaaggaagagtttggcgagtttgacccgaacgagttcttgacgtggccgagttaaggggcttctttgtcatttcgcgaaatatccagggactggtttagtaattctactaaagttctttttgtcgtattgttttgtcctacgtggaattccaaaactaccctcgtgactaaagagtttttgtgcagcttagaagagtgttagagtgctagagagcaatagagtgagaacaatttcgtaatggaagtggaagagaattttgtcctatgttaatttgtgtaattaagccttaattgtattgttatggagaaagaggatatgatggaaagtattagaaggattctattgtagtttcttatataattttataaagtaaaaatgttagtatt

SEQ ID NO: 10662 - protein, 312 aa, Glycine max
  peptide (1)..(312): Ceres Seq. ID no. 14310544
  misc_feature (160)..(221): Pfam Name: Pfam Description:  AP2 domain
  misc_feature (93)..(307): NCBI GI NO: 7531181 NR Description: PATHOGENESIS-RELATED GENES TRANSCRIPTIONALACTIVATOR PTI6
  misc_feature (79)..(307): NCBI GI NO: 7489208 NR Description: Tsi1 protein - common tobacco
  misc_feature (81)..(260): NCBI GI NO: 15238705 NR Description: putative protein; protein id: At5g53290.1
  misc_feature (81)..(251): NCBI GI NO: 15234337 NR Description: putative protein; protein id: At4g27950.1
  misc_feature (75)..(236): NCBI GI NO: 22655200 NR Description: putative Ap2 domain protein [Arabidopsis thaliana]
  misc_feature (75)..(236): NCBI GI NO: 15236595 NR Description: AP2 domain transcription factor, putative
  misc_feature (70)..(257): NCBI GI NO: 15237053 NR Description: AP2 domain transcription factor, putative
  misc_feature (78)..(239): NCBI GI NO: 34898320 NR Description: Similar to Nicotiana tabacum mRNA for ERF1
  misc_feature (81)..(257): NCBI GI NO: 15233169 NR Description: AP2 domain transcription factor, putative
  misc_feature (81)..(259): NCBI GI NO: 15225959 NR Description: AP2 domain transcription factor, putative
IFSSSSTTLFVTCFHAINTSTTFFHFLTLFTKMSDTHQPFMSVQPPMKLHNHPFNPQASSSNFDGDPPCKTAGKTKPPHTKLLRVILTDHDATDSDSSGDDEDPKNTKKHKKVKRQITHITINLPFFSKSPTPTSTPSSSSLDPTRSTRPKKRLGVPRRRNKFRGVRQRPWGRWTAEIRDPTQRKRVWLGTFDTAEEAAAVYDEAAVKLKGPNAVTNFPLSAAGNTEHDTPPPETVFSGEGLSSPTSVLTYCDGDSTPFDGFRYGEVDAFGFEFDIDAPFSLTAVNLGVLSQRFGKEEFGEFDPNEFLTWPS

SEQ ID NO: 10663 - protein, 280 aa, Glycine max
  peptide (1)..(280): Ceres Seq. ID no. 14310545
  misc_feature (128)..(189): Pfam Name: Pfam Description:  AP2 domain
  misc_feature (61)..(275): NCBI GI NO: 7531181 NR Description: PATHOGENESIS-RELATED GENES TRANSCRIPTIONALACTIVATOR PTI6
  misc_feature (47)..(275): NCBI GI NO: 7489208 NR Description: Tsi1 protein - common tobacco
  misc_feature (49)..(228): NCBI GI NO: 15238705 NR Description: putative protein; protein id: At5g53290.1
  misc_feature (49)..(219): NCBI GI NO: 15234337 NR Description: putative protein; protein id: At4g27950.1
  misc_feature (43)..(204): NCBI GI NO: 22655200 NR Description: putative Ap2 domain protein [Arabidopsis thaliana]
  misc_feature (43)..(204): NCBI GI NO: 15236595 NR Description: AP2 domain transcription factor, putative
  misc_feature (38)..(225): NCBI GI NO: 15237053 NR Description: AP2 domain transcription factor, putative
  misc_feature (46)..(207): NCBI GI NO: 34898320 NR Description: Similar to Nicotiana tabacum mRNA for ERF1
  misc_feature (49)..(225): NCBI GI NO: 15233169 NR Description: AP2 domain transcription factor, putative
  misc_feature (49)..(227): NCBI GI NO: 15225959 NR Description: AP2 domain transcription factor, putative
MSDTHQPFMSVQPPMKLHNHPFNPQASSSNFDGDPPCKTAGKTKPPHTKLLRVILTDHDATDSDSSGDDEDPKNTKKHKKVKRQITHITINLPFFSKSPTPTSTPSSSSLDPTRSTRPKKRLGVPRRRNKFRGVRQRPWGRWTAEIRDPTQRKRVWLGTFDTAEEAAAVYDEAAVKLKGPNAVTNFPLSAAGNTEHDTPPPETVFSGEGLSSPTSVLTYCDGDSTPFDGFRYGEVDAFGFEFDIDAPFSLTAVNLGVLSQRFGKEEFGEFDPNEFLTWPS

SEQ ID NO: 10664 - protein, 272 aa, Glycine max
  peptide (1)..(272): Ceres Seq. ID no. 14310546
  misc_feature (120)..(181): Pfam Name: Pfam Description:  AP2 domain
  misc_feature (53)..(267): NCBI GI NO: 7531181 NR Description: PATHOGENESIS-RELATED GENES TRANSCRIPTIONALACTIVATOR PTI6
  misc_feature (39)..(267): NCBI GI NO: 7489208 NR Description: Tsi1 protein - common tobacco
  misc_feature (41)..(220): NCBI GI NO: 15238705 NR Description: putative protein; protein id: At5g53290.1
  misc_feature (41)..(211): NCBI GI NO: 15234337 NR Description: putative protein; protein id: At4g27950.1
  misc_feature (35)..(196): NCBI GI NO: 22655200 NR Description: putative Ap2 domain protein [Arabidopsis thaliana]
  misc_feature (35)..(196): NCBI GI NO: 15236595 NR Description: AP2 domain transcription factor, putative
  misc_feature (30)..(217): NCBI GI NO: 15237053 NR Description: AP2 domain transcription factor, putative
  misc_feature (38)..(199): NCBI GI NO: 34898320 NR Description: Similar to Nicotiana tabacum mRNA for ERF1
  misc_feature (41)..(217): NCBI GI NO: 15233169 NR Description: AP2 domain transcription factor, putative
  misc_feature (41)..(219): NCBI GI NO: 15225959 NR Description: AP2 domain transcription factor, putative
MSVQPPMKLHNHPFNPQASSSNFDGDPPCKTAGKTKPPHTKLLRVILTDHDATDSDSSGDDEDPKNTKKHKKVKRQITHITINLPFFSKSPTPTSTPSSSSLDPTRSTRPKKRLGVPRRRNKFRGVRQRPWGRWTAEIRDPTQRKRVWLGTFDTAEEAAAVYDEAAVKLKGPNAVTNFPLSAAGNTEHDTPPPETVFSGEGLSSPTSVLTYCDGDSTPFDGFRYGEVDAFGFEFDIDAPFSLTAVNLGVLSQRFGKEEFGEFDPNEFLTWPS

SEQ ID NO: 10665 - DNA, 1749 bp, Glycine max
  misc_feature (1)..(1749): Ceres Seq. ID no. 15177963
acaataacaactcgataagaacacaataaactccttcctcatttctcatttctcattcaacaccatggcaagaaaaaccaagtccattttcttggccttcttactactatgctctttctcactgggggtagtggtagtagcccaagaggaggcaatagcaaaatccgaaagtgaagcattaggggaaccagagaaaagagaaacacttgaaatcatcattggtggaggtggttcacctgctccttctccctctccccctacatattgcccacctcctccaccaaaaccactgagccggttggagaaagcaaaacgtgttcttctcaaattcaaaaccacaatcgacgaccccaattgttacacgcaaaactggagccaggacacagacgcgtgtaaattcaatggggtacgatgcgccaatttcccagacgatcagcagcgagcagtagctggacttgacctaaacggagcaaaactcgccactaaaaacggtggcaatttgcccctcacgggtctcctcgacagcatacccgagttaacattcttccacgttaactccaacaacttctccttcgtcggtggcttccccaacaacattaccaggttccgtttcttcttcgagcttgatctcagtaacaacaaagtcagtggcaagttcccaacgcaagcaattcagaacaaccagttagtcttcctggacctcaggttcaaccagctcaccgggcccattgacccgaaactcttcgagagggacctggacgtgatttttgtgaacaacaacaagttcacggggtacctcccggagaatttcgggtccacgccggcccggtacctcacgtttgcccacaacagcctctcgggctcgctccctaagagcgtgggctacgcgccgaacctcaccgaggttctcttcttgaagaaccagttcgaagggtgtctgcccttcgaaatcggttacctcaagaaggccgtagtgtttgatataagtgaaaatctcttgaccggtcccatcccgctctccttcggatgcctgaagaaaattcaatttctcaatttggcgcacaacaagctctacggctgtgttcccgacaacctttgccaaattccttctatccgcaacaatgggaatctctctttggcgaacaattatttcaacgaaattggaccttcgtgttggagtttgataaaatccaaggttttggatgtgtcaggaaactgcattccggggcttcctaaccaaaagtctcccaaagaatgctaccagttttacaaaacaaagaaaacatgtccgaacccgaattcattttactacgttccgtgcaaatcgtactgggggaggcagagcaagcccactagtccaccttctgagccagtgacttacaagactctcaaaccacatcgtctcagattgtgatcagatatcataggatagctcatattagtcccttgtgcaggcgggactttgcctttgtgttgggtttcattttttatttttctcacaacaatcctctggtcagatagaaacctctcctctgatgcgttgattcaaatcctgttcactggtttcatattattactgtggttatgtttgtatgtttttctttcatgattagctgttgttattttgtattttgtatgccccgtgaataagcgctgtcgtggagttgggcatcttgactattacaagtttggtgtcactcaaatgtaatttcccaagttgtcgaataaaattggtactatatttggacg

SEQ ID NO: 10666 - protein, 449 aa, Glycine max
  peptide (1)..(449): Ceres Seq. ID no. 15177964
  misc_feature (58)..(448): NCBI GI NO: 15222811 NR Description: leucine rich repeat protein family
  misc_feature (60)..(448): NCBI GI NO: 15230349 NR Description: leucine rich repeat protein family
  misc_feature (53)..(441): NCBI GI NO: 32490271 NR Description: OSJNBb0116K07.13
  misc_feature (78)..(415): NCBI GI NO: 30680322 NR Description: extensin-related protein [Arabidopsis thaliana]
  misc_feature (55)..(419): NCBI GI NO: 32488397 NR Description: OSJNBa0043A12.27
  misc_feature (78)..(436): NCBI GI NO: 15235668 NR Description: leucine-rich repeat extensin family
  misc_feature (78)..(436): NCBI GI NO: 15233976 NR Description: leucine-rich repeat extensin family
  misc_feature (78)..(433): NCBI GI NO: 15230120 NR Description: leucine-rich repeat extensin family
  misc_feature (79)..(436): NCBI GI NO: 7484956 NR Description: extensin homolog F24O1.18 - Arabidopsis thaliana
  misc_feature (79)..(436): NCBI GI NO: 15220780 NR Description: leucine-rich repeat extensin family
MARKTKSIFLAFLLLCSFSLGVVVVAQEEAIAKSESEALGEPEKRETLEIIIGGGGSPAPSPSPPTYCPPPPPKPLSRLEKAKRVLLKFKTTIDDPNCYTQNWSQDTDACKFNGVRCANFPDDQQRAVAGLDLNGAKLATKNGGNLPLTGLLDSIPELTFFHVNSNNFSFVGGFPNNITRFRFFFELDLSNNKVSGKFPTQAIQNNQLVFLDLRFNQLTGPIDPKLFERDLDVIFVNNNKFTGYLPENFGSTPARYLTFAHNSLSGSLPKSVGYAPNLTEVLFLKNQFEGCLPFEIGYLKKAVVFDISENLLTGPIPLSFGCLKKIQFLNLAHNKLYGCVPDNLCQIPSIRNNGNLSLANNYFNEIGPSCWSLIKSKVLDVSGNCIPGLPNQKSPKECYQFYKTKKTCPNPNSFYYVPCKSYWGRQSKPTSPPSEPVTYKTLKPHRLRL

SEQ ID NO: 10667 - DNA, 985 bp, Glycine max
  misc_feature (1)..(985): Ceres Seq. ID no. 12383917
cagctacgtaggccccccccccagtagcatcgacaaccaaatgtttgtaccaaacatctgcttaccagcctgaaaaaaacaaccttgtttgtacctctcaacaagttgtcttacataatactgaagatacgacggcaacaatgctggcaccacctaaactagacagacataaagattctgcagctccagacttccatctccattgtgaaaaccataactgtattgctgacaacatgaagcaccagctgccacctgatcatgatgctgaatctataaagaaaatggccactgctgctccacattgtggatcatcaaatgcggttgaagtgctagttgaaggtaatgttggaaaccacagtatcaatagaagtgcctcaggcagcaacaatggaagcaatggacaaaatgggagcagcacggcggttaatgctggagggacaaacatgaaaagcaacaatggactcactgggaatagtggcagtggtgatgctagcggaagtgtaagtgccaacagagtagatcaaaacaagacttctcaaagggaagcggccttaactaaatttcgccaaaagagaaaagagagaagggagaggtgctttcataaaaaggttcgatatcagagcagaaagagattagctgaacaacgacctcgatttcgtggacaatttgttcgacagtcctctaacgaaaatgcaagtgaggcaacaacagatagctgattcagagcatttgccacaatggcataatgatggggatatgcgagaaaaggtcgaggagtctgcatgtagaatttgggaattgttctgtgtgtttgtgttaaaaaggtataatgactctggttattccaacttgttcatttgaaacctgaatcaatttatgtggtgagagattgttatatgctgattgatgctcggataacttatagcgactcaataatttcaattacttgtcgatcttgtgcttgaagaatcaaatgtgttagttc

SEQ ID NO: 10668 - protein, 192 aa, Glycine max
  peptide (1)..(192): Ceres Seq. ID no. 12383918
  misc_feature (139)..(181): Pfam Name: Pfam Description:  CCT motif
  misc_feature (1)..(181): NCBI GI NO: 11357905 NR Description: hypothetical protein F9G14
  misc_feature (1)..(181): NCBI GI NO: 18414032 NR Description: putative protein; protein id: At5g02810
  misc_feature (34)..(191): NCBI GI NO: 24796813 NR Description: putative pseudo-response regulator
  misc_feature (50)..(187): NCBI GI NO: 34394035 NR Description: putative pseudo-response regulator
  misc_feature (85)..(186): NCBI GI NO: 20466420 NR Description: unknown protein [Arabidopsis thaliana]
  misc_feature (89)..(187): NCBI GI NO: 28193631 NR Description: timing of CAB expression 1-like protein
  misc_feature (85)..(186): NCBI GI NO: 18407171 NR Description: expressed protein; protein id: At2g46790
  misc_feature (69)..(187): NCBI GI NO: 18424319 NR Description: pseudo-response regulator - like
  misc_feature (120)..(185): NCBI GI NO: 9758535 NR Description: contains similarity to two-component responseregulator protein~gene_id:T31K7
  misc_feature (120)..(185): NCBI GI NO: 18420797 NR Description: putative protein; protein id: At5g24470
MLAPPKLDRHKDSAAPDFHLHCENHNCIADNMKHQLPPDHDAESIKKMATAAPHCGSSNAVEVLVEGNVGNHSINRSASGSNNGSNGQNGSSTAVNAGGTNMKSNNGLTGNSGSGDASGSVSANRVDQNKTSQREAALTKFRQKRKERRERCFHKKVRYQSRKRLAEQRPRFRGQFVRQSSNENASEATTDS

SEQ ID NO: 10669 - protein, 161 aa, Glycine max
  peptide (1)..(161): Ceres Seq. ID no. 12383919
  misc_feature (108)..(150): Pfam Name: Pfam Description:  CCT motif
  misc_feature (1)..(150): NCBI GI NO: 11357905 NR Description: hypothetical protein F9G14
  misc_feature (1)..(150): NCBI GI NO: 18414032 NR Description: putative protein; protein id: At5g02810
  misc_feature (3)..(160): NCBI GI NO: 24796813 NR Description: putative pseudo-response regulator
  misc_feature (19)..(156): NCBI GI NO: 34394035 NR Description: putative pseudo-response regulator
  misc_feature (54)..(155): NCBI GI NO: 20466420 NR Description: unknown protein [Arabidopsis thaliana]
  misc_feature (58)..(156): NCBI GI NO: 28193631 NR Description: timing of CAB expression 1-like protein
  misc_feature (54)..(155): NCBI GI NO: 18407171 NR Description: expressed protein; protein id: At2g46790
  misc_feature (38)..(156): NCBI GI NO: 18424319 NR Description: pseudo-response regulator - like
  misc_feature (89)..(154): NCBI GI NO: 9758535 NR Description: contains similarity to two-component responseregulator protein~gene_id:T31K7
  misc_feature (89)..(154): NCBI GI NO: 18420797 NR Description: putative protein; protein id: At5g24470
MKHQLPPDHDAESIKKMATAAPHCGSSNAVEVLVEGNVGNHSINRSASGSNNGSNGQNGSSTAVNAGGTNMKSNNGLTGNSGSGDASGSVSANRVDQNKTSQREAALTKFRQKRKERRERCFHKKVRYQSRKRLAEQRPRFRGQFVRQSSNENASEATTDS

SEQ ID NO: 10670 - protein, 145 aa, Glycine max
  peptide (1)..(145): Ceres Seq. ID no. 12383920
  misc_feature (92)..(134): Pfam Name: Pfam Description:  CCT motif
  misc_feature (1)..(134): NCBI GI NO: 11357905 NR Description: hypothetical protein F9G14
  misc_feature (1)..(134): NCBI GI NO: 18414032 NR Description: putative protein; protein id: At5g02810
  misc_feature (1)..(144): NCBI GI NO: 24796813 NR Description: putative pseudo-response regulator
  misc_feature (3)..(140): NCBI GI NO: 34394035 NR Description: putative pseudo-response regulator
  misc_feature (38)..(139): NCBI GI NO: 20466420 NR Description: unknown protein [Arabidopsis thaliana]
  misc_feature (42)..(140): NCBI GI NO: 28193631 NR Description: timing of CAB expression 1-like protein
  misc_feature (38)..(139): NCBI GI NO: 18407171 NR Description: expressed protein; protein id: At2g46790
  misc_feature (22)..(140): NCBI GI NO: 18424319 NR Description: pseudo-response regulator - like
  misc_feature (73)..(138): NCBI GI NO: 9758535 NR Description: contains similarity to two-component responseregulator protein~gene_id:T31K7
  misc_feature (73)..(138): NCBI GI NO: 18420797 NR Description: putative protein; protein id: At5g24470
MATAAPHCGSSNAVEVLVEGNVGNHSINRSASGSNNGSNGQNGSSTAVNAGGTNMKSNNGLTGNSGSGDASGSVSANRVDQNKTSQREAALTKFRQKRKERRERCFHKKVRYQSRKRLAEQRPRFRGQFVRQSSNENASEATTDS

SEQ ID NO: 10671 - DNA, 1437 bp, Glycine max
  misc_feature (1)..(1437): Ceres Seq. ID no. 15172464
gcaagacgttttaggatatccaagggaaagtgaatcccaactctctcgagagccacgaaaccagaacttcgagtgactcaacctcaaaaaagctaaatcctttgatgaagaaaaagcagcagaaaaagaccgaagaatctacaacagtttcttgatccctcttatagcctttgagcattgaaagggttttcctcaaattgccatgatttgattcctcaacaccccacacacacgtagttaaaatgggttttactaggaaacccatgtttcctgtgttgctggttttgttcatcacaagtcttcttgagccgccccatgttgcagaatctacttcttctgattactccactttggtctacaagggctgctcaaaggagcctttcacagatcccaatggggtgtactctcaggcactttcagcactctttggctcattggtttcacaatccaccaaagccaagttctacaaaaccacttctggctctggccagaacaccataactggcctcttccaatgcagaggggatctcaccaattctgattgctacaactgtgtcagcaggctcccagttctgtgtgacaaactttgtggcaaaaccactgctgccagagtccaacttctaggatgttatattctctatgaggttgcagggttctcccaaatctcaggtatgcagatgttgtacaagacctgtggggcaacaaatgctgctgggagggggtttgaagagaggagggacactgctttctcagtgatggaaaatggggtggttagtggccatggcttctacactaccagctaccagtccttgtatgtcatggggcagtgtgagggagatgttggtgactcagattgtggggagtgtgtgaagaatgctgtgcagagagctcaggttgaatgcggtagctctatttcaggacaagtgtttttgcacaagtgcttcattagttatagctattacccaaatggggttccttctagatcatcttcttcatcatcagcttcatactcttcatcttcttcagggcaaaatccagggaaaacagctgctataatattaggaggtgcagttgcggtggcttttctggttatattgttgctatttgcaaggagtttgaagaagaaacatgatgattattgacagcagaaaatgaattctgagaaggcaaaattattctttgtgatgcattgtttttacaagattagttgatggatgaggggtggaaaatggaagttttgtggtaaatagagtttttgcttgatgcagaaacaatactacaggatggttcactgtaatgattgttgtagctaggtagttaagattttgttgttgggaagagcaatataattagaacctgaaagtgagattttttttctgactagggtgtaactgtaaattacccaacagaatgaatgtttgtcaaaattttgggtcc

SEQ ID NO: 10672 - protein, 299 aa, Glycine max
  peptide (1)..(299): Ceres Seq. ID no. 15172465
  misc_feature (86)..(140): Pfam Name: Pfam Description:  Domain of unknown function DUF26
  misc_feature (12)..(299): NCBI GI NO: 38566686 NR Description: At1g04520 [Arabidopsis thaliana]
  misc_feature (1)..(299): NCBI GI NO: 18403243 NR Description: expressed protein [Arabidopsis thaliana]
  misc_feature (12)..(264): NCBI GI NO: 15219740 NR Description: hypothetical protein [Arabidopsis thaliana]
  misc_feature (1)..(264): NCBI GI NO: 25408259 NR Description: hypothetical protein At2g33330
  misc_feature (24)..(299): NCBI GI NO: 30694417 NR Description: expressed protein [Arabidopsis thaliana]
  misc_feature (24)..(287): NCBI GI NO: 26451089 NR Description: unknown protein [Arabidopsis thaliana]
  misc_feature (24)..(246): NCBI GI NO: 9758557 NR Description: gb|AAB80651
  misc_feature (55)..(297): NCBI GI NO: 15229281 NR Description: hypothetical protein [Arabidopsis thaliana]
  misc_feature (55)..(291): NCBI GI NO: 6721149 NR Description: hypothetical protein, 3' partial
  misc_feature (12)..(292): NCBI GI NO: 30693130 NR Description: expressed protein [Arabidopsis thaliana]
MGFTRKPMFPVLLVLFITSLLEPPHVAESTSSDYSTLVYKGCSKEPFTDPNGVYSQALSALFGSLVSQSTKAKFYKTTSGSGQNTITGLFQCRGDLTNSDCYNCVSRLPVLCDKLCGKTTAARVQLLGCYILYEVAGFSQISGMQMLYKTCGATNAAGRGFEERRDTAFSVMENGVVSGHGFYTTSYQSLYVMGQCEGDVGDSDCGECVKNAVQRAQVECGSSISGQVFLHKCFISYSYYPNGVPSRSSSSSSASYSSSSSGQNPGKTAAIILGGAVAVAFLVILLLFARSLKKKHDDY

SEQ ID NO: 10673 - protein, 292 aa, Glycine max
  peptide (1)..(292): Ceres Seq. ID no. 15172466
  misc_feature (79)..(133): Pfam Name: Pfam Description:  Domain of unknown function DUF26
  misc_feature (5)..(292): NCBI GI NO: 38566686 NR Description: At1g04520 [Arabidopsis thaliana]
  misc_feature (1)..(292): NCBI GI NO: 18403243 NR Description: expressed protein [Arabidopsis thaliana]
  misc_feature (5)..(257): NCBI GI NO: 15219740 NR Description: hypothetical protein [Arabidopsis thaliana]
  misc_feature (1)..(257): NCBI GI NO: 25408259 NR Description: hypothetical protein At2g33330
  misc_feature (17)..(292): NCBI GI NO: 30694417 NR Description: expressed protein [Arabidopsis thaliana]
  misc_feature (17)..(280): NCBI GI NO: 26451089 NR Description: unknown protein [Arabidopsis thaliana]
  misc_feature (17)..(239): NCBI GI NO: 9758557 NR Description: gb|AAB80651
  misc_feature (48)..(290): NCBI GI NO: 15229281 NR Description: hypothetical protein [Arabidopsis thaliana]
  misc_feature (48)..(284): NCBI GI NO: 6721149 NR Description: hypothetical protein, 3' partial
  misc_feature (5)..(285): NCBI GI NO: 30693130 NR Description: expressed protein [Arabidopsis thaliana]
MFPVLLVLFITSLLEPPHVAESTSSDYSTLVYKGCSKEPFTDPNGVYSQALSALFGSLVSQSTKAKFYKTTSGSGQNTITGLFQCRGDLTNSDCYNCVSRLPVLCDKLCGKTTAARVQLLGCYILYEVAGFSQISGMQMLYKTCGATNAAGRGFEERRDTAFSVMENGVVSGHGFYTTSYQSLYVMGQCEGDVGDSDCGECVKNAVQRAQVECGSSISGQVFLHKCFISYSYYPNGVPSRSSSSSSASYSSSSSGQNPGKTAAIILGGAVAVAFLVILLLFARSLKKKHDDY

SEQ ID NO: 10674 - protein, 156 aa, Glycine max
  peptide (1)..(156): Ceres Seq. ID no. 15172467
  misc_feature (1)..(156): NCBI GI NO: 38566686 NR Description: At1g04520 [Arabidopsis thaliana]
  misc_feature (1)..(156): NCBI GI NO: 18403243 NR Description: expressed protein [Arabidopsis thaliana]
  misc_feature (1)..(121): NCBI GI NO: 15219740 NR Description: hypothetical protein [Arabidopsis thaliana]
  misc_feature (1)..(121): NCBI GI NO: 25408259 NR Description: hypothetical protein At2g33330
  misc_feature (1)..(156): NCBI GI NO: 30694417 NR Description: expressed protein [Arabidopsis thaliana]
  misc_feature (1)..(144): NCBI GI NO: 26451089 NR Description: unknown protein [Arabidopsis thaliana]
  misc_feature (1)..(103): NCBI GI NO: 9758557 NR Description: gb|AAB80651
  misc_feature (1)..(154): NCBI GI NO: 15229281 NR Description: hypothetical protein [Arabidopsis thaliana]
  misc_feature (1)..(148): NCBI GI NO: 6721149 NR Description: hypothetical protein, 3' partial
  misc_feature (1)..(149): NCBI GI NO: 30693130 NR Description: expressed protein [Arabidopsis thaliana]
MQMLYKTCGATNAAGRGFEERRDTAFSVMENGVVSGHGFYTTSYQSLYVMGQCEGDVGDSDCGECVKNAVQRAQVECGSSISGQVFLHKCFISYSYYPNGVPSRSSSSSSASYSSSSSGQNPGKTAAIILGGAVAVAFLVILLLFARSLKKKHDDY

SEQ ID NO: 10675 - DNA, 1000 bp, Glycine max
  misc_feature (1)..(1000): Ceres Seq. ID no. 15169084
ggtgttgttgagattctaaaaattgccagttacattcccttcacaagattctcacaaacaactcttgagaaagaaagaatggctgccaacacattgatgagttctgccatctcagccttcccatctctcctttcctcctcaaaatccagatttgccgcagcagttcctctttccagctttgttgtcaccaatgcctcttcttctcgcttttccatgagtgctgactggatgcctggccagcctagacccccctaccttgatggttcagcacctggtgactttggattcgaccctcttcgtcttggtgaagtaccagagaatcttgagaggttcaaagagtcagaactcattcactgcagatgggccatgcttgctgttccagggattttggttccagaggcattgggcttaggcaactgggtaaaggctcaggaatgggctgcagttcctggtggccaagcaacctacctaggcaacccagttccatggggcaccctacccaccattctggccattgaattccttgctatttccttcgtggagcaccaaaggagcatggagaaggaccctaaaaagaagaaataccctggtggtgcttttgatcctttgggatactctaaggaccctaaaacattccacgaatacaaagtcaaagaaattaaaaatggacgtcttgctttgttggcttttgtgggattctgtgttcaacaatcagcttatcccggcactggacctttggagaacttggctgctcacttggctgacccatggcacaacaacattggaaacgtcattattccacaatcgattttgccttgaaaaaaaatatatatttgtttcaatagctacctgtataactccgtgtaacaatttgtaatgaatcggatcgatcttgctacgttggtatcgctgtgctgtaattaaactttgaattcaaactcatagatactctggcaactagttggtatgaaagagaggcttgaagcaaacttccaagtcc

SEQ ID NO: 10676 - protein, 272 aa, Glycine max
  peptide (1)..(272): Ceres Seq. ID no. 15169085
  misc_feature (81)..(238): Pfam Name: Pfam Description:  Chlorophyll A-B binding protein
  misc_feature (27)..(272): NCBI GI NO: 625547 NR Description: chlorophyll a/b-binding protein type I
  misc_feature (27)..(272): NCBI GI NO: 82078 NR Description: chlorophyll a/b-binding protein type I precursor
  misc_feature (27)..(272): NCBI GI NO: 82079 NR Description: chlorophyll a/b-binding protein type I precursor
  misc_feature (27)..(272): NCBI GI NO: 115764 NR Description: Chlorophyll A-B binding protein 6A
  misc_feature (27)..(267): NCBI GI NO: 15233115 NR Description: light-harvesting chlorophyll a/b binding protein
  misc_feature (27)..(267): NCBI GI NO: 13265501 NR Description: AT3g54890 [Arabidopsis thaliana]
  misc_feature (27)..(272): NCBI GI NO: 3789954 NR Description: chlorophyll a/b-binding protein precursor
  misc_feature (27)..(270): NCBI GI NO: 6685157 NR Description: chlorophyll a/b binding protein precursor
  misc_feature (27)..(272): NCBI GI NO: 99485 NR Description: chlorophyll a/b-binding protein type 1 precursor
  misc_feature (68)..(272): NCBI GI NO: 20790 NR Description: Type 1 chlorophyll a /b-binding protein
GVVEILKIASYIPFTRFSQTTLEKERMAANTLMSSAISAFPSLLSSSKSRFAAAVPLSSFVVTNASSSRFSMSADWMPGQPRPPYLDGSAPGDFGFDPLRLGEVPENLERFKESELIHCRWAMLAVPGILVPEALGLGNWVKAQEWAAVPGGQATYLGNPVPWGTLPTILAIEFLAISFVEHQRSMEKDPKKKKYPGGAFDPLGYSKDPKTFHEYKVKEIKNGRLALLAFVGFCVQQSAYPGTGPLENLAAHLADPWHNNIGNVIIPQSILP

SEQ ID NO: 10677 - protein, 246 aa, Glycine max
  peptide (1)..(246): Ceres Seq. ID no. 15169086
  misc_feature (55)..(212): Pfam Name: Pfam Description:  Chlorophyll A-B binding protein
  misc_feature (1)..(246): NCBI GI NO: 625547 NR Description: chlorophyll a/b-binding protein type I
  misc_feature (1)..(246): NCBI GI NO: 82078 NR Description: chlorophyll a/b-binding protein type I precursor
  misc_feature (1)..(246): NCBI GI NO: 82079 NR Description: chlorophyll a/b-binding protein type I precursor
  misc_feature (1)..(246): NCBI GI NO: 115764 NR Description: Chlorophyll A-B binding protein 6A
  misc_feature (1)..(241): NCBI GI NO: 15233115 NR Description: light-harvesting chlorophyll a/b binding protein
  misc_feature (1)..(241): NCBI GI NO: 13265501 NR Description: AT3g54890 [Arabidopsis thaliana]
  misc_feature (1)..(246): NCBI GI NO: 3789954 NR Description: chlorophyll a/b-binding protein precursor
  misc_feature (1)..(244): NCBI GI NO: 6685157 NR Description: chlorophyll a/b binding protein precursor
  misc_feature (1)..(246): NCBI GI NO: 99485 NR Description: chlorophyll a/b-binding protein type 1 precursor
  misc_feature (42)..(246): NCBI GI NO: 20790 NR Description: Type 1 chlorophyll a /b-binding protein
MAANTLMSSAISAFPSLLSSSKSRFAAAVPLSSFVVTNASSSRFSMSADWMPGQPRPPYLDGSAPGDFGFDPLRLGEVPENLERFKESELIHCRWAMLAVPGILVPEALGLGNWVKAQEWAAVPGGQATYLGNPVPWGTLPTILAIEFLAISFVEHQRSMEKDPKKKKYPGGAFDPLGYSKDPKTFHEYKVKEIKNGRLALLAFVGFCVQQSAYPGTGPLENLAAHLADPWHNNIGNVIIPQSILP

SEQ ID NO: 10678 - protein, 240 aa, Glycine max
  peptide (1)..(240): Ceres Seq. ID no. 15169087
  misc_feature (49)..(206): Pfam Name: Pfam Description:  Chlorophyll A-B binding protein
  misc_feature (1)..(240): NCBI GI NO: 625547 NR Description: chlorophyll a/b-binding protein type I
  misc_feature (1)..(240): NCBI GI NO: 82078 NR Description: chlorophyll a/b-binding protein type I precursor
  misc_feature (1)..(240): NCBI GI NO: 82079 NR Description: chlorophyll a/b-binding protein type I precursor
  misc_feature (1)..(240): NCBI GI NO: 115764 NR Description: Chlorophyll A-B binding protein 6A
  misc_feature (1)..(235): NCBI GI NO: 15233115 NR Description: light-harvesting chlorophyll a/b binding protein
  misc_feature (1)..(235): NCBI GI NO: 13265501 NR Description: AT3g54890 [Arabidopsis thaliana]
  misc_feature (1)..(240): NCBI GI NO: 3789954 NR Description: chlorophyll a/b-binding protein precursor
  misc_feature (1)..(238): NCBI GI NO: 6685157 NR Description: chlorophyll a/b binding protein precursor
  misc_feature (1)..(240): NCBI GI NO: 99485 NR Description: chlorophyll a/b-binding protein type 1 precursor
  misc_feature (36)..(240): NCBI GI NO: 20790 NR Description: Type 1 chlorophyll a /b-binding protein
MSSAISAFPSLLSSSKSRFAAAVPLSSFVVTNASSSRFSMSADWMPGQPRPPYLDGSAPGDFGFDPLRLGEVPENLERFKESELIHCRWAMLAVPGILVPEALGLGNWVKAQEWAAVPGGQATYLGNPVPWGTLPTILAIEFLAISFVEHQRSMEKDPKKKKYPGGAFDPLGYSKDPKTFHEYKVKEIKNGRLALLAFVGFCVQQSAYPGTGPLENLAAHLADPWHNNIGNVIIPQSILP

SEQ ID NO: 10679 - DNA, 1539 bp, Glycine max
  misc_feature (1)..(1539): Ceres Seq. ID no. 14312981
aagcgaacacggttagtagcggcagagaaaggagatggaatcggcgggggagtggctggagaaggcgttggtggagttgtgctccaagattgaaactggcttgggtttaggtttggaccaagacatcatcaaaggcctcgtctcttactgtgaccttgccgagccacgagatgccaaagagtaccttgacaatataatcggtcaggatgcagggaaaactgtgattgaagaatatttacgacggagaggttactcagaatccagcatcggctcaaatgttccaactaccaaattacatgcgtatgtcaaaccgccttcagttgagacatctgctagtggaactaagaaatcatttaaaacaccgaaagtggcaggccgcggtaatcatgcagaaccgaacaagaatgcgagtagcagtaatcaggaaaatcagactccaactgtagttagtgaatcaaaaacatcgcaaaaggggaaccaattgaattccaagaagaagaaagccgggaaagttgtctcacttgctgaggctgccaaaggatccattgtgttccagcagggaagaccatgctcctgtcaagcacgtcgtcacgggctggtcagcaactgcttatcttgtggcaaaatagtctgtgaacaagaaggagaggggccttgccatttttgtggtgcacttgtgttaagagagggcagctcgtatgctggtctggaagaaagtttgcctcccttgtcagagtctgaggctgttgctgaagcttatgcaaagagactggttgaatatgaccgaaactctgcagctcgtacaacagttattgatgaccaaagtgactactatgagattgatggaaacagttggttgtcaaaggaggagaaagaactgttgaagaagaaacaagaggagatggaagaagctgagaaagccaaacgtaatagagttgttgtgacttttgatctagttggccgcaaggtccttgtaaataaagatgaagcttcagaattacagtttgaaaatagaatattgcgtcctccggatgcaagggaagtgaaccgtatcaaaccaaatccaactctaacgtttcaacctgtttttgtggacctgggctttggtaggaaatccactaaagataagcaatcacataaaggcataagcaagggcttgtgcttggagattacagggcgagtgcagcatgatagaaatgaccagaagtatgttatgatggaaaaccaattggcaacagcttcaaatgaaaatgtttggcaagtatcttcaggaaatggaatgcacatcatggaagatgatggtcaatgtttactgaactatgataagtaaagtgccttatccagcttttagcgattattgttacattcttcatttgctttctcccattttctttttgatttgcgcgtctaagccatgaaattgatggtcctaattacttttttcagaaagaaagttaagaattttaggcagcgctatttttgtttatacactgctcagatattaaatatcagtcaactactattatctatttgtattag

SEQ ID NO: 10680 - protein, 431 aa, Glycine max
  peptide (1)..(431): Ceres Seq. ID no. 14312982
  misc_feature (175)..(226): Pfam Name: Pfam Description:  Putative zinc finger motif, C2HC5-type
  misc_feature (23)..(430): NCBI GI NO: 15228204 NR Description: expressed protein [Arabidopsis thaliana]
  misc_feature (97)..(330): NCBI GI NO: 31203161 NR Description: ENSANGP00000017311 [Anopheles gambiae]
  misc_feature (49)..(215): NCBI GI NO: 37606133 NR Description: SI:dZ221I3
  misc_feature (192)..(322): NCBI GI NO: 37606133 NR Description: SI:dZ221I3
  misc_feature (3)..(183): NCBI GI NO: 15228204 NR Description: expressed protein [Arabidopsis thaliana]
  misc_feature (128)..(329): NCBI GI NO: 24643521 NR Description: CG11710-PA [Drosophila melanogaster]
  misc_feature (128)..(329): NCBI GI NO: 20129087 NR Description: CG11710-PB [Drosophila melanogaster]
  misc_feature (1)..(348): NCBI GI NO: 32189376 NR Description: thyroid hormone receptor interactor 4
  misc_feature (1)..(348): NCBI GI NO: 19863480 NR Description: Activating signal cointegrator 1
  misc_feature (192)..(328): NCBI GI NO: 703112 NR Description: thyroid receptor interactor
MESAGEWLEKALVELCSKIETGLGLGLDQDIIKGLVSYCDLAEPRDAKEYLDNIIGQDAGKTVIEEYLRRRGYSESSIGSNVPTTKLHAYVKPPSVETSASGTKKSFKTPKVAGRGNHAEPNKNASSSNQENQTPTVVSESKTSQKGNQLNSKKKKAGKVVSLAEAAKGSIVFQQGRPCSCQARRHGLVSNCLSCGKIVCEQEGEGPCHFCGALVLREGSSYAGLEESLPPLSESEAVAEAYAKRLVEYDRNSAARTTVIDDQSDYYEIDGNSWLSKEEKELLKKKQEEMEEAEKAKRNRVVVTFDLVGRKVLVNKDEASELQFENRILRPPDAREVNRIKPNPTLTFQPVFVDLGFGRKSTKDKQSHKGISKGLCLEITGRVQHDRNDQKYVMMENQLATASNENVWQVSSGNGMHIMEDDGQCLLNYDK

SEQ ID NO: 10681 - DNA, 1289 bp, Glycine max
  misc_feature (1)..(1289): Ceres Seq. ID no. 14312989
ggtccacgtgtacttgttgaaggtcgggttgagcaagaactcacatgttactaattcattgttggatctttatgcaaagtgtggggccatcagggaggctcaacgagtgttcagtgagatgagtgaaaggaatgcggtgtcttggacatcgttgattgttggcttggctgttaatgggtttggtgaggaagcacttgagcttttcaaagagatggagggacaaggactggtgcctagtgagatcacttttgttggtgtcttgtatgcgtgcagccattgtgggatgttggacgaagggtttgagtactttagaagaatgaaagaggaatgtggaatcatacctaggatagagcactatggttgcatggtggatttgttgagtagggcgggtttagtgaaacaagcgtatgagtatattcagaacatgccagtgcagccaaatgcagttatttggaggaccttgttaggggcatgtacaatacatggacatttgggtttgggagagatagctagatcccacctattgaacttggagcctaaacatagtggtgattatgtgcttctttcaaatctttatgcctccgaacgtcgttggtctgatgtacaagtgataaggaggtcaatgctgaaggatggtgttaagaaaacccctggctatagtctagttgagttgggcaaccgtgtttatgaatttactatgggtgatagatctcatcctcaaagtcaggatgtatatgcactactagagaagattacagaattgttgaagttagaaggttatgtgcctcatactgctaatgtacttgcagacatagaggaagaggagaaggaacaagctttgtcttatcatagtgaaaaagttgcaattgcttttatgctcttaaatacaccaccagggaccccaatcagggttatgaagaatttaagagtttgtgcagattgtcatatggctatcaaactcatagcaaagatttacgatagagagattgttatcagggatcgcagtaggttccatcattttagaggtggttcatgttcctgtaaagattactggtaatatagtaatcatcaggatttgataatggcatcttgagagtcaagttctgcattgatttccaagtacaatgtggtgctttaaaatagaggcagtgagacatactttaatatgttgtaataattctccgcaatcctctctgctgcaagggtcaaccaattcaattcaagcctcttgatacatggatgagttagtgaacatgcttaagattatggaagtttggtacaaattgcgt

SEQ ID NO: 10682 - protein, 351 aa, Glycine max
  peptide (1)..(351): Ceres Seq. ID no. 14312990
  misc_feature (117)..(151): Pfam Name: Pfam Description:  PPR repeat
  misc_feature (1)..(351): NCBI GI NO: 34393394 NR Description: putative pentatricopeptide
  misc_feature (1)..(336): NCBI GI NO: 7486585 NR Description: hypothetical protein F7J7
  misc_feature (1)..(336): NCBI GI NO: 7486979 NR Description: hypothetical protein T13K14
  misc_feature (5)..(336): NCBI GI NO: 30685297 NR Description: BRCT domain-containing protein
  misc_feature (1)..(351): NCBI GI NO: 29124127 NR Description: hypothetical protein
  misc_feature (1)..(351): NCBI GI NO: 34394298 NR Description: putative pentatricopeptide
  misc_feature (3)..(351): NCBI GI NO: 34910298 NR Description: P0013F10.8
  misc_feature (1)..(351): NCBI GI NO: 15235537 NR Description: pentatricopeptide (PPR) repeat-containing protein
  misc_feature (1)..(351): NCBI GI NO: 15235498 NR Description: pentatricopeptide (PPR) repeat-containing protein
  misc_feature (1)..(351): NCBI GI NO: 21741755 NR Description: OSJNBa0060B20.9
VHVYLLKVGLSKNSHVTNSLLDLYAKCGAIREAQRVFSEMSERNAVSWTSLIVGLAVNGFGEEALELFKEMEGQGLVPSEITFVGVLYACSHCGMLDEGFEYFRRMKEECGIIPRIEHYGCMVDLLSRAGLVKQAYEYIQNMPVQPNAVIWRTLLGACTIHGHLGLGEIARSHLLNLEPKHSGDYVLLSNLYASERRWSDVQVIRRSMLKDGVKKTPGYSLVELGNRVYEFTMGDRSHPQSQDVYALLEKITELLKLEGYVPHTANVLADIEEEEKEQALSYHSEKVAIAFMLLNTPPGTPIRVMKNLRVCADCHMAIKLIAKIYDREIVIRDRSRFHHFRGGSCSCKDYW

SEQ ID NO: 10683 - protein, 312 aa, Glycine max
  peptide (1)..(312): Ceres Seq. ID no. 14312991
  misc_feature (78)..(112): Pfam Name: Pfam Description:  PPR repeat
  misc_feature (1)..(312): NCBI GI NO: 34393394 NR Description: putative pentatricopeptide
  misc_feature (1)..(297): NCBI GI NO: 7486585 NR Description: hypothetical protein F7J7
  misc_feature (1)..(297): NCBI GI NO: 7486979 NR Description: hypothetical protein T13K14
  misc_feature (1)..(297): NCBI GI NO: 30685297 NR Description: BRCT domain-containing protein
  misc_feature (1)..(312): NCBI GI NO: 29124127 NR Description: hypothetical protein
  misc_feature (1)..(312): NCBI GI NO: 34394298 NR Description: putative pentatricopeptide
  misc_feature (1)..(312): NCBI GI NO: 34910298 NR Description: P0013F10.8
  misc_feature (1)..(312): NCBI GI NO: 15235537 NR Description: pentatricopeptide (PPR) repeat-containing protein
  misc_feature (1)..(312): NCBI GI NO: 15235498 NR Description: pentatricopeptide (PPR) repeat-containing protein
  misc_feature (1)..(312): NCBI GI NO: 21741755 NR Description: OSJNBa0060B20.9
MSERNAVSWTSLIVGLAVNGFGEEALELFKEMEGQGLVPSEITFVGVLYACSHCGMLDEGFEYFRRMKEECGIIPRIEHYGCMVDLLSRAGLVKQAYEYIQNMPVQPNAVIWRTLLGACTIHGHLGLGEIARSHLLNLEPKHSGDYVLLSNLYASERRWSDVQVIRRSMLKDGVKKTPGYSLVELGNRVYEFTMGDRSHPQSQDVYALLEKITELLKLEGYVPHTANVLADIEEEEKEQALSYHSEKVAIAFMLLNTPPGTPIRVMKNLRVCADCHMAIKLIAKIYDREIVIRDRSRFHHFRGGSCSCKDYW

SEQ ID NO: 10684 - protein, 281 aa, Glycine max
  peptide (1)..(281): Ceres Seq. ID no. 14312992
  misc_feature (47)..(81): Pfam Name: Pfam Description:  PPR repeat
  misc_feature (1)..(281): NCBI GI NO: 34393394 NR Description: putative pentatricopeptide
  misc_feature (1)..(266): NCBI GI NO: 7486585 NR Description: hypothetical protein F7J7
  misc_feature (1)..(266): NCBI GI NO: 7486979 NR Description: hypothetical protein T13K14
  misc_feature (1)..(266): NCBI GI NO: 30685297 NR Description: BRCT domain-containing protein
  misc_feature (1)..(281): NCBI GI NO: 29124127 NR Description: hypothetical protein
  misc_feature (1)..(281): NCBI GI NO: 34394298 NR Description: putative pentatricopeptide
  misc_feature (1)..(281): NCBI GI NO: 34910298 NR Description: P0013F10.8
  misc_feature (1)..(281): NCBI GI NO: 15235537 NR Description: pentatricopeptide (PPR) repeat-containing protein
  misc_feature (1)..(281): NCBI GI NO: 15235498 NR Description: pentatricopeptide (PPR) repeat-containing protein
  misc_feature (1)..(281): NCBI GI NO: 21741755 NR Description: OSJNBa0060B20.9
MEGQGLVPSEITFVGVLYACSHCGMLDEGFEYFRRMKEECGIIPRIEHYGCMVDLLSRAGLVKQAYEYIQNMPVQPNAVIWRTLLGACTIHGHLGLGEIARSHLLNLEPKHSGDYVLLSNLYASERRWSDVQVIRRSMLKDGVKKTPGYSLVELGNRVYEFTMGDRSHPQSQDVYALLEKITELLKLEGYVPHTANVLADIEEEEKEQALSYHSEKVAIAFMLLNTPPGTPIRVMKNLRVCADCHMAIKLIAKIYDREIVIRDRSRFHHFRGGSCSCKDYW

SEQ ID NO: 10685 - DNA, 1228 bp, Glycine max
  misc_feature (1)..(1228): Ceres Seq. ID no. 14316469
aaaaaaaaaaaagcgtaataagaaataacgagagaaaaattctggggtttagaggagaaaaggggagaaagggtgggtattgcttcacacaaacacaacagtgtctgctgcaccttgcaatggtttcgctatcaacatggtttcgctacattgcccacaagctcgaatactccttctccctcagctggaagaactacaaaggaggtcaaattacagacagagaggtacgtgatgttgtttggaaaaacttctttcaaggaaagctgacgtacttgcactggaataaaggagaggagatggcccctactattgatggaaaagcagtaactcttgttcggaaattaccagttgtagacccaacgcgtgtttttgtaggagatgttgtggttgtgaaggaccctgagaagccagataactacctactcagaagattaactgcagttgaaggctatgaaatggtttctactgatgaaaaggatgaagcctttgttctcgagaaggatcaatgctgggtagtggctgaaaatgaaaaattgaaagccaaggaagcgaaggatagccgaacatttggtccagttcagatgacagacattgtaggcagagtcatatattgcctgcgaagtgctgtagaccatggccgggtacaaaacagttatttcggcatgcgaaaggatacaccagtgctggaagtggaacttgatgttgatgagatggcaaagagtcacaaagcctgaaacatttgtcccgagaaacactaactagtttgctttacgcatgccttagtttcttcttgtggattttccttgaagcacagattgaataataaaaaatatgatttttaaattgttgcaatgggatgatggtgttatgtggatgtcctctgcatgctaggcaattggctagctcttcccaagcagaaattggaagcggtctgtgttaaagcttgagttcgacattattgtatgctaagttctagcaaggactcctctgccctttgttctattcatatttggctgtaaaattgaccgagttttggtcatttttgttaatagtcgaggatgatagaaaaaaaggctgcattgttagaaataatagtttcagatattttcattttatgaagacctagtgcctcgactgagtgttcacttcttgccaatttgtctttctagggaacaatcgttgatatctgttctctttagtcagttgagtgaaaaagaacgtttaagtg

SEQ ID NO: 10686 - protein, 243 aa, Glycine max
  peptide (1)..(243): Ceres Seq. ID no. 14316470
  misc_feature (40)..(242): NCBI GI NO: 38344766 NR Description: OSJNBa0068L06.9
  misc_feature (40)..(243): NCBI GI NO: 30684839 NR Description: expressed protein [Arabidopsis thaliana]
  misc_feature (40)..(243): NCBI GI NO: 15221421 NR Description: expressed protein [Arabidopsis thaliana]
  misc_feature (40)..(243): NCBI GI NO: 25406903 NR Description: hypothetical protein
  misc_feature (40)..(217): NCBI GI NO: 25408133 NR Description: hypothetical protein At2g31140
KKKSVIRNNERKILGFRGEKGRKGGYCFTQTQQCLLHLAMVSLSTWFRYIAHKLEYSFSLSWKNYKGGQITDREVRDVVWKNFFQGKLTYLHWNKGEEMAPTIDGKAVTLVRKLPVVDPTRVFVGDVVVVKDPEKPDNYLLRRLTAVEGYEMVSTDEKDEAFVLEKDQCWVVAENEKLKAKEAKDSRTFGPVQMTDIVGRVIYCLRSAVDHGRVQNSYFGMRKDTPVLEVELDVDEMAKSHKA

SEQ ID NO: 10687 - protein, 204 aa, Glycine max
  peptide (1)..(204): Ceres Seq. ID no. 14316471
  misc_feature (1)..(203): NCBI GI NO: 38344766 NR Description: OSJNBa0068L06.9
  misc_feature (1)..(204): NCBI GI NO: 30684839 NR Description: expressed protein [Arabidopsis thaliana]
  misc_feature (1)..(204): NCBI GI NO: 15221421 NR Description: expressed protein [Arabidopsis thaliana]
  misc_feature (1)..(204): NCBI GI NO: 25406903 NR Description: hypothetical protein
  misc_feature (1)..(178): NCBI GI NO: 25408133 NR Description: hypothetical protein At2g31140
MVSLSTWFRYIAHKLEYSFSLSWKNYKGGQITDREVRDVVWKNFFQGKLTYLHWNKGEEMAPTIDGKAVTLVRKLPVVDPTRVFVGDVVVVKDPEKPDNYLLRRLTAVEGYEMVSTDEKDEAFVLEKDQCWVVAENEKLKAKEAKDSRTFGPVQMTDIVGRVIYCLRSAVDHGRVQNSYFGMRKDTPVLEVELDVDEMAKSHKA

SEQ ID NO: 10688 - protein, 145 aa, Glycine max
  peptide (1)..(145): Ceres Seq. ID no. 14316472
  misc_feature (1)..(144): NCBI GI NO: 38344766 NR Description: OSJNBa0068L06.9
  misc_feature (1)..(145): NCBI GI NO: 30684839 NR Description: expressed protein [Arabidopsis thaliana]
  misc_feature (1)..(145): NCBI GI NO: 15221421 NR Description: expressed protein [Arabidopsis thaliana]
  misc_feature (1)..(145): NCBI GI NO: 25406903 NR Description: hypothetical protein
  misc_feature (1)..(119): NCBI GI NO: 25408133 NR Description: hypothetical protein At2g31140
MAPTIDGKAVTLVRKLPVVDPTRVFVGDVVVVKDPEKPDNYLLRRLTAVEGYEMVSTDEKDEAFVLEKDQCWVVAENEKLKAKEAKDSRTFGPVQMTDIVGRVIYCLRSAVDHGRVQNSYFGMRKDTPVLEVELDVDEMAKSHKA

SEQ ID NO: 10689 - DNA, 1335 bp, Glycine max
  misc_feature (1)..(1335): Ceres Seq. ID no. 15168378
atgatttagaaacacctggcagaaacacagacgtgctagtcattcattagcaacaaattttatatgaacattttaataaatgtaacatttgttgacagaaatttaactatatgcttctaacaatagacaaataagtaaatgttcacaggtttatcggggaactcttcccagtgggcaagtggtagccataaaacgagctcaaagagaatcaaagcagggagggctagaattcaaagctgaaattgaactcctttcaagggtccaccacaagaatctggttagccttgtgggattctgctttgaacgagaagaacaaatgctggtttatgagtttgttccaaatggaactttgaaggatgctctcacaggggaatctggaattgtgttgagctggagtagaagactgaaagtagcccttggtgctgccaggggtttggcttatcttcatgaacatgctgatccccctattatacacagggacatcaaatcaaacaacattttgctgaatgaaaactatactgcaaaagtttctgattttggtctctccaagtctatcttagatgatgaaaaagattacttctccactcaagttaaaggaacaatgggctacttggatccagattattatactagtcagaagttgactgaaaagagtgatgtctatagttttggagtgctaatactggagctgattactgcaagaaagccaatagaacgagggaaatacattgtgaaagtggtcaggagtacaattgataagacaaaagacttgtatggtcttcacaaaattattgacccggccatctgttcaggatcaacactggagggttttgagaagtttgtggaccttgcaatggagtgtgttgaagattcaggagctgacaggcccgcaatgagtgatgtggttaaagaaattgaagacatgttgcagtctgttggtatgcacctaacatctgaatcagtaacatccacaacatctagtcatagatatcaggaggtaagtatagtgagtttccatctggaccaaccttacagcaatgagtcctttggttcaagtgcagaacatattcaaaaattgaacctagttagttaagttagtcttttttctcaagattgaagtcaagagagacttgtttattagtatttcttggccaaaacacagaaaagtagaaattgtggaatttagagtttgtggctgtgagcttcagagtataagtgtggtagcaaggttaacatttccttgactatcatttcttttccttctttctctcccactaaagatgtgaaatgtacaatgaatataggttttgatatggaacatgtagaatataaagt

SEQ ID NO: 10690 - protein, 258 aa, Glycine max
  peptide (1)..(258): Ceres Seq. ID no. 15168379
  misc_feature (1)..(131): Pfam Name: Pfam Description:  Protein kinase domain
  misc_feature (1)..(244): NCBI GI NO: 30695748 NR Description: receptor protein kinase-related
  misc_feature (1)..(219): NCBI GI NO: 8978273 NR Description: receptor protein kinase-like
  misc_feature (1)..(244): NCBI GI NO: 15240547 NR Description: leucine-rich repeat transmembrane protein kinase
  misc_feature (1)..(248): NCBI GI NO: 15240549 NR Description: leucine-rich repeat transmembrane protein kinase
  misc_feature (1)..(218): NCBI GI NO: 34909240 NR Description: putative receptor protein kinase
  misc_feature (1)..(248): NCBI GI NO: 7715608 NR Description: F20B17.5 [Arabidopsis thaliana]
  misc_feature (1)..(248): NCBI GI NO: 30699436 NR Description: leucine-rich repeat transmembrane protein kinase
  misc_feature (1)..(220): NCBI GI NO: 34909276 NR Description: P0454H12.21
  misc_feature (1)..(223): NCBI GI NO: 11346408 NR Description: hypothetical protein T20L15
  misc_feature (1)..(223): NCBI GI NO: 30679474 NR Description: leucine-rich repeat transmembrane protein kinase
MLVYEFVPNGTLKDALTGESGIVLSWSRRLKVALGAARGLAYLHEHADPPIIHRDIKSNNILLNENYTAKVSDFGLSKSILDDEKDYFSTQVKGTMGYLDPDYYTSQKLTEKSDVYSFGVLILELITARKPIERGKYIVKVVRSTIDKTKDLYGLHKIIDPAICSGSTLEGFEKFVDLAMECVEDSGADRPAMSDVVKEIEDMLQSVGMHLTSESVTSTTSSHRYQEVSIVSFHLDQPYSNESFGSSAEHIQKLNLVS

SEQ ID NO: 10691 - protein, 163 aa, Glycine max
  peptide (1)..(163): Ceres Seq. ID no. 15168380
  misc_feature (1)..(149): NCBI GI NO: 30695748 NR Description: receptor protein kinase-related
  misc_feature (1)..(124): NCBI GI NO: 8978273 NR Description: receptor protein kinase-like
  misc_feature (1)..(149): NCBI GI NO: 15240547 NR Description: leucine-rich repeat transmembrane protein kinase
  misc_feature (1)..(153): NCBI GI NO: 15240549 NR Description: leucine-rich repeat transmembrane protein kinase
  misc_feature (1)..(123): NCBI GI NO: 34909240 NR Description: putative receptor protein kinase
  misc_feature (1)..(153): NCBI GI NO: 7715608 NR Description: F20B17.5 [Arabidopsis thaliana]
  misc_feature (1)..(153): NCBI GI NO: 30699436 NR Description: leucine-rich repeat transmembrane protein kinase
  misc_feature (1)..(125): NCBI GI NO: 34909276 NR Description: P0454H12.21
  misc_feature (1)..(128): NCBI GI NO: 11346408 NR Description: hypothetical protein T20L15
  misc_feature (1)..(128): NCBI GI NO: 30679474 NR Description: leucine-rich repeat transmembrane protein kinase
MGYLDPDYYTSQKLTEKSDVYSFGVLILELITARKPIERGKYIVKVVRSTIDKTKDLYGLHKIIDPAICSGSTLEGFEKFVDLAMECVEDSGADRPAMSDVVKEIEDMLQSVGMHLTSESVTSTTSSHRYQEVSIVSFHLDQPYSNESFGSSAEHIQKLNLVS

SEQ ID NO: 10692 - DNA, 579 bp, Glycine max
  misc_feature (1)..(579): Ceres Seq. ID no. 15170567
acaatcacaacttggtaaaggtactccgtgcaagaaagatgaagctcgagttcgcaaatgtgctacttctgtgccttgtccttagctcttctttcttggaaatctcaatggctggttctcctttctgtgactcaaagtgcgcgcagaggtgtgccaaagctggggttcaggacagatgcttgaggttttgcgggatctgctgcgagaagtgcaactgtgtcccatctgggacttacggaaacaaggacgagtgcccttgctacagggacatgaagaactccaagggcaaggacaaatgcccttgaagaatatctaatttcatcatcacactccattccaataaactaccttgtattgtatcttcagccttccttttcagagtattgcattatgccacggatctatgtacctacccttcaacttaagtattccgtctagttaattagcatagctacccttcaacttatgtgttccgacctagttaattaattagcttattaattatttacgagagtaaaacatcgttttagttctgtcatcttagtctttgaagttatataaagaaattcaaattaaaat

SEQ ID NO: 10693 - protein, 100 aa, Glycine max
  peptide (1)..(100): Ceres Seq. ID no. 15170568
  misc_feature (13)..(100): Pfam Name: Pfam Description:  Gibberellin regulated protein
  misc_feature (13)..(100): NCBI GI NO: 14627134 NR Description: snakin-1 [Solanum tuberosum]
  misc_feature (13)..(100): NCBI GI NO: 18424288 NR Description: expressed protein [Arabidopsis thaliana]
  misc_feature (13)..(100): NCBI GI NO: 9757905 NR Description: contains similarity to gibberellin-stimulatedtranscript 1 like protein~gene_id:MMN10
  misc_feature (13)..(100): NCBI GI NO: 15225493 NR Description: gibberellin-regulated proteins -related
  misc_feature (13)..(100): NCBI GI NO: 7447292 NR Description: gibberellin-stimulated transcript 1 like protein -rice
  misc_feature (51)..(100): NCBI GI NO: 4102634 NR Description: Snakin-1 [Solanum tuberosum]
  misc_feature (41)..(100): NCBI GI NO: 15226025 NR Description: gibberellin-regulated proteins -related
  misc_feature (20)..(100): NCBI GI NO: 40538965 NR Description: putative  gibberellin regulated protein
  misc_feature (11)..(100): NCBI GI NO: 2129596 NR Description: gibberellin-regulated protein GASA5 precursor -Arabidopsis thaliana
  misc_feature (42)..(100): NCBI GI NO: 121689 NR Description: GAST1 protein precursor
NHNLVKVLRARKMKLEFANVLLLCLVLSSSFLEISMAGSPFCDSKCAQRCAKAGVQDRCLRFCGICCEKCNCVPSGTYGNKDECPCYRDMKNSKGKDKCP

SEQ ID NO: 10694 - protein, 88 aa, Glycine max
  peptide (1)..(88): Ceres Seq. ID no. 15170569
  misc_feature (1)..(88): Pfam Name: Pfam Description:  Gibberellin regulated protein
  misc_feature (1)..(88): NCBI GI NO: 14627134 NR Description: snakin-1 [Solanum tuberosum]
  misc_feature (1)..(88): NCBI GI NO: 18424288 NR Description: expressed protein [Arabidopsis thaliana]
  misc_feature (1)..(88): NCBI GI NO: 9757905 NR Description: contains similarity to gibberellin-stimulatedtranscript 1 like protein~gene_id:MMN10
  misc_feature (1)..(88): NCBI GI NO: 15225493 NR Description: gibberellin-regulated proteins -related
  misc_feature (1)..(88): NCBI GI NO: 7447292 NR Description: gibberellin-stimulated transcript 1 like protein -rice
  misc_feature (39)..(88): NCBI GI NO: 4102634 NR Description: Snakin-1 [Solanum tuberosum]
  misc_feature (29)..(88): NCBI GI NO: 15226025 NR Description: gibberellin-regulated proteins -related
  misc_feature (8)..(88): NCBI GI NO: 40538965 NR Description: putative  gibberellin regulated protein
  misc_feature (1)..(88): NCBI GI NO: 2129596 NR Description: gibberellin-regulated protein GASA5 precursor -Arabidopsis thaliana
  misc_feature (30)..(88): NCBI GI NO: 121689 NR Description: GAST1 protein precursor
MKLEFANVLLLCLVLSSSFLEISMAGSPFCDSKCAQRCAKAGVQDRCLRFCGICCEKCNCVPSGTYGNKDECPCYRDMKNSKGKDKCP

SEQ ID NO: 10695 - protein, 65 aa, Glycine max
  peptide (1)..(65): Ceres Seq. ID no. 15170570
  misc_feature (1)..(65): Pfam Name: Pfam Description:  Gibberellin regulated protein
  misc_feature (1)..(65): NCBI GI NO: 14627134 NR Description: snakin-1 [Solanum tuberosum]
  misc_feature (1)..(65): NCBI GI NO: 18424288 NR Description: expressed protein [Arabidopsis thaliana]
  misc_feature (1)..(65): NCBI GI NO: 9757905 NR Description: contains similarity to gibberellin-stimulatedtranscript 1 like protein~gene_id:MMN10
  misc_feature (1)..(65): NCBI GI NO: 15225493 NR Description: gibberellin-regulated proteins -related
  misc_feature (1)..(65): NCBI GI NO: 7447292 NR Description: gibberellin-stimulated transcript 1 like protein -rice
  misc_feature (16)..(65): NCBI GI NO: 4102634 NR Description: Snakin-1 [Solanum tuberosum]
  misc_feature (6)..(65): NCBI GI NO: 15226025 NR Description: gibberellin-regulated proteins -related
  misc_feature (1)..(65): NCBI GI NO: 40538965 NR Description: putative  gibberellin regulated protein
  misc_feature (1)..(65): NCBI GI NO: 2129596 NR Description: gibberellin-regulated protein GASA5 precursor -Arabidopsis thaliana
  misc_feature (7)..(65): NCBI GI NO: 121689 NR Description: GAST1 protein precursor
MAGSPFCDSKCAQRCAKAGVQDRCLRFCGICCEKCNCVPSGTYGNKDECPCYRDMKNSKGKDKCP

SEQ ID NO: 10696 - DNA, 1291 bp, Glycine max
  misc_feature (1)..(1291): Ceres Seq. ID no. 15177607
gtgtccttgccggttcgtgcagaaaggtccattgcattgcagtgtaagtatttacaaagcaaagcgaagcaagcattcactgaatgcgctctatctctctctttcgatctgggtactaaccctaacccgcttcgaaccgtggcttcctcaggctcgcagaacctctctcgaagaaaaccttcttcttcttcgtcttcgtcttctcaacaaacacccgggtcgacccggatcgtttaccgagaatctcggatcccatcggaatccgatttcccgatctggcagcagaactggttcatcgcattgctcttcgtcatggctctcggattcttcgccctcgccattttcctcttcctcactctcgactctgacatcgctccttcttccaccgcctccgcctccgcctccgccgcttcctccgaaggcgtcgaggtgcaggttacttacggcacggttctgaagcttatgcacgagaagaccaaatttcggttgcattctcatgacgtgccctacggttctggcagtggacaacaatcggttactggtttcccaaatgtcgacgattccaatagttactggattgtaagacctgagccaggaacttctgctaaacaaggtgaccccattaaaagtggcacaatcattagattgcagcacatgagaacaaggaagtggctgcacagccatttgcatgcatccccgatatcaggcaatcttgaggtcagttgttttggaggagaatccgaatctgacaccggggactattggaagcttataatagaaggaagtggaaagacttggaagcaggatcagaggattcgccttcagcatattgacactggaggctatctacatagtcatgataagaaatacagtcgtattgctgggggtcagcaggaggtttgtggtgttcgtgaaaagcgtgctgacaatgtgtggttggcagccgaaggtgtctaccttcccgttacggaaagcaaatgagttacttagtatcgatacttattctaaacgggtaaaccatggatagtgggagtgggtggctggcaccggttctgataacaaatgcaggtttttctattgaaggataaatatacaggagcatttaggattagataacggtagtaatattttgtcataggtacactttgttatgtagtaagtgcatgccccattttcattttccccgctgaaaatacttggtgtctgttgttttgtgaacgccatataccattcctctaataggactacgaaacgcaatgagtctatttttcaattgaattattatacggat

SEQ ID NO: 10697 - protein, 326 aa, Glycine max
  peptide (1)..(326): Ceres Seq. ID no. 15177608
  misc_feature (263)..(317): Pfam Name: Pfam Description:  MIR domain
  misc_feature (105)..(325): NCBI GI NO: 18400721 NR Description: expressed protein [Arabidopsis thaliana]
  misc_feature (105)..(325): NCBI GI NO: 21593658 NR Description: unknown [Arabidopsis thaliana]
  misc_feature (155)..(325): NCBI GI NO: 25412278 NR Description: hypothetical protein At2g25110
  misc_feature (131)..(320): NCBI GI NO: 24644197 NR Description: CG11999-PA [Drosophila melanogaster]
  misc_feature (146)..(324): NCBI GI NO: 31241809 NR Description: ENSANGP00000013320 [Anopheles gambiae]
  misc_feature (133)..(324): NCBI GI NO: 14141195 NR Description: stromal cell-derived factor 2 precursor
  misc_feature (133)..(324): NCBI GI NO: 30584855 NR Description: Homo sapiens stromal cell-derived factor 2
  misc_feature (137)..(326): NCBI GI NO: 29840881 NR Description: similar to GenBank Accession Number AE003603CG11999 gene product in Drosop hila melanogaster
  misc_feature (135)..(324): NCBI GI NO: 2137796 NR Description: stromal cell-derived factor 2 - mouse
  misc_feature (135)..(324): NCBI GI NO: 38571762 NR Description: Unknown (protein for IMAGE:5693309) [Mus musculus]
VSLPVRAERSIALQCKYLQSKAKQAFTECALSLSFDLGTNPNPLRTVASSGSQNLSRRKPSSSSSSSSQQTPGSTRIVYRESRIPSESDFPIWQQNWFIALLFVMALGFFALAIFLFLTLDSDIAPSSTASASASAASSEGVEVQVTYGTVLKLMHEKTKFRLHSHDVPYGSGSGQQSVTGFPNVDDSNSYWIVRPEPGTSAKQGDPIKSGTIIRLQHMRTRKWLHSHLHASPISGNLEVSCFGGESESDTGDYWKLIIEGSGKTWKQDQRIRLQHIDTGGYLHSHDKKYSRIAGGQQEVCGVREKRADNVWLAAEGVYLPVTESK

SEQ ID NO: 10698 - protein, 222 aa, Glycine max
  peptide (1)..(222): Ceres Seq. ID no. 15177609
  misc_feature (159)..(213): Pfam Name: Pfam Description:  MIR domain
  misc_feature (1)..(221): NCBI GI NO: 18400721 NR Description: expressed protein [Arabidopsis thaliana]
  misc_feature (1)..(221): NCBI GI NO: 21593658 NR Description: unknown [Arabidopsis thaliana]
  misc_feature (51)..(221): NCBI GI NO: 25412278 NR Description: hypothetical protein At2g25110
  misc_feature (27)..(216): NCBI GI NO: 24644197 NR Description: CG11999-PA [Drosophila melanogaster]
  misc_feature (42)..(220): NCBI GI NO: 31241809 NR Description: ENSANGP00000013320 [Anopheles gambiae]
  misc_feature (29)..(220): NCBI GI NO: 14141195 NR Description: stromal cell-derived factor 2 precursor
  misc_feature (29)..(220): NCBI GI NO: 30584855 NR Description: Homo sapiens stromal cell-derived factor 2
  misc_feature (33)..(222): NCBI GI NO: 29840881 NR Description: similar to GenBank Accession Number AE003603CG11999 gene product in Drosop hila melanogaster
  misc_feature (31)..(220): NCBI GI NO: 2137796 NR Description: stromal cell-derived factor 2 - mouse
  misc_feature (31)..(220): NCBI GI NO: 38571762 NR Description: Unknown (protein for IMAGE:5693309) [Mus musculus]
MALGFFALAIFLFLTLDSDIAPSSTASASASAASSEGVEVQVTYGTVLKLMHEKTKFRLHSHDVPYGSGSGQQSVTGFPNVDDSNSYWIVRPEPGTSAKQGDPIKSGTIIRLQHMRTRKWLHSHLHASPISGNLEVSCFGGESESDTGDYWKLIIEGSGKTWKQDQRIRLQHIDTGGYLHSHDKKYSRIAGGQQEVCGVREKRADNVWLAAEGVYLPVTESK

SEQ ID NO: 10699 - protein, 172 aa, Glycine max
  peptide (1)..(172): Ceres Seq. ID no. 15177610
  misc_feature (109)..(163): Pfam Name: Pfam Description:  MIR domain
  misc_feature (1)..(171): NCBI GI NO: 18400721 NR Description: expressed protein [Arabidopsis thaliana]
  misc_feature (1)..(171): NCBI GI NO: 21593658 NR Description: unknown [Arabidopsis thaliana]
  misc_feature (1)..(171): NCBI GI NO: 25412278 NR Description: hypothetical protein At2g25110
  misc_feature (1)..(166): NCBI GI NO: 24644197 NR Description: CG11999-PA [Drosophila melanogaster]
  misc_feature (1)..(170): NCBI GI NO: 31241809 NR Description: ENSANGP00000013320 [Anopheles gambiae]
  misc_feature (1)..(170): NCBI GI NO: 14141195 NR Description: stromal cell-derived factor 2 precursor
  misc_feature (1)..(170): NCBI GI NO: 30584855 NR Description: Homo sapiens stromal cell-derived factor 2
  misc_feature (1)..(172): NCBI GI NO: 29840881 NR Description: similar to GenBank Accession Number AE003603CG11999 gene product in Drosop hila melanogaster
  misc_feature (1)..(170): NCBI GI NO: 2137796 NR Description: stromal cell-derived factor 2 - mouse
  misc_feature (1)..(170): NCBI GI NO: 40254617 NR Description: stromal cell derived factor 2 [Mus musculus]
MHEKTKFRLHSHDVPYGSGSGQQSVTGFPNVDDSNSYWIVRPEPGTSAKQGDPIKSGTIIRLQHMRTRKWLHSHLHASPISGNLEVSCFGGESESDTGDYWKLIIEGSGKTWKQDQRIRLQHIDTGGYLHSHDKKYSRIAGGQQEVCGVREKRADNVWLAAEGVYLPVTESK

SEQ ID NO: 10700 - DNA, 1493 bp, Glycine max
  misc_feature (1)..(1493): Ceres Seq. ID no. 14308795
ggtaaaaggtactctctctcctctcatctttggatccccaaatctagggcttcttcttcttgtctgcgaaaatttcttgaatcactgtcttaattttcgtcatcaatttccgatttcgaatcttcgtctttgtttactttccatcgttgaagctgtgttgtgcttacttcactgtgctggttttgggtttcaagggatggaaaacatgcagagcttctggcaattgggtgatgaactccgtgggcactcaaaagcatcggaggatcacaagtggttaatggttgcctcgaaactggccgaacagacaagattgaagggggagcgtgtgaacaaccttgatctttcaaagggacccattgaaacaaggtcaagggataaatttgggttccaggaagagaacaaatttgattctcttaacttgagcatgttgaacctggactctaaatttactgagaatgtgagcaaaagctcacttcgaaatggtgtttatggtatgaatgcagtgtatcagaaaaacaatgcaaacttggtgagtaatgtgatcagtaacaagtacaatggcagtattcagcataacaaagagatcaacaacaacactggcaacaacatcaacaccaatgaaagcaacaacacaaatgcaactgacaaaaggtttaagaccttgcctgctgcggagacactcccccgcaatgaggtgcttggaggatacatctttgtctgtaacaatgacacaatgcaggaagacttgaaacgtcagctatttggtttgcctccaaggtatcgagattctgttagggcaataacaccagggctacctttatttctttataactatactactcatcagctgcatggtatttttgaggcagcaagttttggtggctctaacatagatccaactgcctgggaggataaaaaatgcaaaggggaatcaaggtttccagctcaggtaagaatccgtgtcaggaagctctgcaaggcattggaagaagattctttcaggccagtattgcatcattatgacgggccaaagtttcgtcttgaactgtcagttccagagactctggatctgttggacctatgtgaacaagctggttcagcagcataagcaagaatcaaacaaagaatgaatgtgcaaaataggtaggttttggtgtgccagctgtgtggttttggcagattttccgtgaagcgtaagcttggaaagtgaatcatcatcatgttttgggggaagtaaagggagcgtgttgttgagagtgagagaccctttgttggtgaataaatggttgttgtggtatctatcccctggaagatgctttgtagctgttacatgacatttaatacctttgtatgattaagtaaagtacagactactgtttgtactgctaaagtatgtatctgttgaaccaagaaaaaaattaaagttaaaaagcttcatgtattactaaactctatgttgagttggttgaagtgatcttttattttaaaaaaag

SEQ ID NO: 10701 - protein, 368 aa, Glycine max
  peptide (1)..(368): Ceres Seq. ID no. 14308796
  misc_feature (66)..(368): NCBI GI NO: 2369766 NR Description: hypothetical protein [Citrus x paradisi]
  misc_feature (69)..(367): NCBI GI NO: 21592623 NR Description: gda-1, putative [Arabidopsis thaliana]
  misc_feature (69)..(367): NCBI GI NO: 15232081 NR Description: gda-1 -related [Arabidopsis thaliana]
  misc_feature (153)..(368): NCBI GI NO: 21665866 NR Description: GDA2 protein [Pisum sativum]
  misc_feature (173)..(363): NCBI GI NO: 584825 NR Description: B2 PROTEIN
  misc_feature (110)..(360): NCBI GI NO: 18422167 NR Description: expressed protein [Arabidopsis thaliana]
  misc_feature (163)..(360): NCBI GI NO: 9757950 NR Description: gene_id:MJC20
  misc_feature (88)..(354): NCBI GI NO: 34913876 NR Description: B1156H12.22
  misc_feature (245)..(356): NCBI GI NO: 7488804 NR Description: gda-1 protein - garden pea
  misc_feature (216)..(360): NCBI GI NO: 34896110 NR Description: P0701D05.9
VKGTLSPLIFGSPNLGLLLLVCENFLNHCLNFRHQFPISNLRLCLLSIVEAVLCLLHCAGFGFQGMENMQSFWQLGDELRGHSKASEDHKWLMVASKLAEQTRLKGERVNNLDLSKGPIETRSRDKFGFQEENKFDSLNLSMLNLDSKFTENVSKSSLRNGVYGMNAVYQKNNANLVSNVISNKYNGSIQHNKEINNNTGNNINTNESNNTNATDKRFKTLPAAETLPRNEVLGGYIFVCNNDTMQEDLKRQLFGLPPRYRDSVRAITPGLPLFLYNYTTHQLHGIFEAASFGGSNIDPTAWEDKKCKGESRFPAQVRIRVRKLCKALEEDSFRPVLHHYDGPKFRLELSVPETLDLLDLCEQAGSAA

SEQ ID NO: 10702 - protein, 303 aa, Glycine max; identical to SEQ ID NO: 10072
  peptide (1)..(303): Ceres Seq. ID no. 14308797
  misc_feature (1)..(303): NCBI GI NO: 2369766 NR Description: hypothetical protein [Citrus x paradisi]
  misc_feature (4)..(302): NCBI GI NO: 21592623 NR Description: gda-1, putative [Arabidopsis thaliana]
  misc_feature (4)..(302): NCBI GI NO: 15232081 NR Description: gda-1 -related [Arabidopsis thaliana]
  misc_feature (88)..(303): NCBI GI NO: 21665866 NR Description: GDA2 protein [Pisum sativum]
  misc_feature (108)..(298): NCBI GI NO: 584825 NR Description: B2 PROTEIN
  misc_feature (45)..(295): NCBI GI NO: 18422167 NR Description: expressed protein [Arabidopsis thaliana]
  misc_feature (98)..(295): NCBI GI NO: 9757950 NR Description: gene_id:MJC20
  misc_feature (23)..(289): NCBI GI NO: 34913876 NR Description: B1156H12.22
  misc_feature (180)..(291): NCBI GI NO: 7488804 NR Description: gda-1 protein - garden pea
  misc_feature (151)..(295): NCBI GI NO: 34896110 NR Description: P0701D05.9

SEQ ID NO: 10703 - protein, 300 aa, Glycine max; identical to SEQ ID NO: 10073
  peptide (1)..(300): Ceres Seq. ID no. 14308798
  misc_feature (1)..(300): NCBI GI NO: 2369766 NR Description: hypothetical protein [Citrus x paradisi]
  misc_feature (1)..(299): NCBI GI NO: 21592623 NR Description: gda-1, putative [Arabidopsis thaliana]
  misc_feature (1)..(299): NCBI GI NO: 15232081 NR Description: gda-1 -related [Arabidopsis thaliana]
  misc_feature (85)..(300): NCBI GI NO: 21665866 NR Description: GDA2 protein [Pisum sativum]
  misc_feature (105)..(295): NCBI GI NO: 584825 NR Description: B2 PROTEIN
  misc_feature (42)..(292): NCBI GI NO: 18422167 NR Description: expressed protein [Arabidopsis thaliana]
  misc_feature (95)..(292): NCBI GI NO: 9757950 NR Description: gene_id:MJC20
  misc_feature (20)..(286): NCBI GI NO: 34913876 NR Description: B1156H12.22
  misc_feature (177)..(288): NCBI GI NO: 7488804 NR Description: gda-1 protein - garden pea
  misc_feature (148)..(292): NCBI GI NO: 34896110 NR Description: P0701D05.9

SEQ ID NO: 10704 - DNA, 1256 bp, Glycine max
  misc_feature (1)..(1256): Ceres Seq. ID no. 13594176
cattacctagaaaatcctaatcgaaaaaattctgttgattcgcaattcaaattattcgtctcgctctcaatagagaagaaaaaaaaaactgcgtttttcaaatcggtaaattggctgacacatagtaaagaatcatattaatgtcgtcaagaacattgaggagaagactctatcatggggatgttgatggcaaaaggcaggagcatttggagacttcgggattggattctttgagtgagcccttgctggcagacgatgattatattgagaataagaagatatgtactcttgaagatctatgggatgatgagaagaagaaggcgcagtttcattggacattcatattctcaaaccttattgtgcaatgggctcagtggttagcaaatttggtattaggatctggatctattcttgggcgtcttttatcttttccttctgctgcactaaatatgcaaaacaataggatgtttcctccatctctaagccctctgcaggaagaaagactaagaaatctacgacaacggcttgaagttccctttgatggttctaaagcagagcaccaagacgcacttaaacaattgtggaaattggcttacccggacagggagcttccttcacttaaatcagacctttggaaggaaatgggatggcaaggttctgacccttcaacagattttaggggtggaggatttatttcattagagaatctcatcttctttgcgatgaagtatcctgattcattccagcgattattgcataaacaagatggaaccagagctgagtgggaatacccatttgcagtagctggaatcaatatttcttttatgttagcacagatgctggatcttcaagcagggcttccatcttctttgtccggaattcgttttctcaaattgcttgaagaagatgaaatggcatttgatatccttttttgtgttgcctttcaaatgatggatgctcagtggctagcaaagcgtgcgtcatatatggaatttaatgatgttttgagatccacaagaacgcagttagagcgtgagcttggtcttgaagacatcttcagcgtgaaagatttacctgcttacaacatgttgagatgattgacaattgcctttcagttcaacatttctcttcctttttttttttgtttcttttggcggagaatgttacatgaaatgtatctaaagcatttgtcattttatctctatatagaaacgtgaaaatcaaatatcagatcaatctttctgctgatttccatc

SEQ ID NO: 10705 - protein, 318 aa, Glycine max
  peptide (1)..(318): Ceres Seq. ID no. 13594177
  misc_feature (139)..(299): Pfam Name: Pfam Description:  Protein of unknown function, DUF609
  misc_feature (1)..(317): NCBI GI NO: 18396599 NR Description: expressed protein [Arabidopsis thaliana]
  misc_feature (1)..(317): NCBI GI NO: 21555509 NR Description: unknown [Arabidopsis thaliana]
  misc_feature (139)..(317): NCBI GI NO: 6091761 NR Description: hypothetical protein [Arabidopsis thaliana]
  misc_feature (84)..(317): NCBI GI NO: 15218859 NR Description: hypothetical protein [Arabidopsis thaliana]
  misc_feature (97)..(317): NCBI GI NO: 38344760 NR Description: OSJNBa0068L06.3
  misc_feature (81)..(317): NCBI GI NO: 18411543 NR Description: expressed protein [Arabidopsis thaliana]
  misc_feature (81)..(317): NCBI GI NO: 14140119 NR Description: putative protein [Oryza sativa]
  misc_feature (113)..(317): NCBI GI NO: 18408759 NR Description: expressed protein [Arabidopsis thaliana]
  misc_feature (81)..(317): NCBI GI NO: 18406626 NR Description: expressed protein [Arabidopsis thaliana]
  misc_feature (81)..(317): NCBI GI NO: 38345956 NR Description: OSJNBb0038F03.14
MSSRTLRRRLYHGDVDGKRQEHLETSGLDSLSEPLLADDDYIENKKICTLEDLWDDEKKKAQFHWTFIFSNLIVQWAQWLANLVLGSGSILGRLLSFPSAALNMQNNRMFPPSLSPLQEERLRNLRQRLEVPFDGSKAEHQDALKQLWKLAYPDRELPSLKSDLWKEMGWQGSDPSTDFRGGGFISLENLIFFAMKYPDSFQRLLHKQDGTRAEWEYPFAVAGINISFMLAQMLDLQAGLPSSLSGIRFLKLLEEDEMAFDILFCVAFQMMDAQWLAKRASYMEFNDVLRSTRTQLERELGLEDIFSVKDLPAYNMLR

SEQ ID NO: 10706 - protein, 215 aa, Glycine max
  peptide (1)..(215): Ceres Seq. ID no. 13594178
  misc_feature (36)..(196): Pfam Name: Pfam Description:  Protein of unknown function, DUF609
  misc_feature (1)..(214): NCBI GI NO: 18396599 NR Description: expressed protein [Arabidopsis thaliana]
  misc_feature (1)..(214): NCBI GI NO: 21555509 NR Description: unknown [Arabidopsis thaliana]
  misc_feature (36)..(214): NCBI GI NO: 6091761 NR Description: hypothetical protein [Arabidopsis thaliana]
  misc_feature (1)..(214): NCBI GI NO: 15218859 NR Description: hypothetical protein [Arabidopsis thaliana]
  misc_feature (1)..(214): NCBI GI NO: 38344760 NR Description: OSJNBa0068L06.3
  misc_feature (1)..(214): NCBI GI NO: 18411543 NR Description: expressed protein [Arabidopsis thaliana]
  misc_feature (1)..(214): NCBI GI NO: 14140119 NR Description: putative protein [Oryza sativa]
  misc_feature (10)..(214): NCBI GI NO: 18408759 NR Description: expressed protein [Arabidopsis thaliana]
  misc_feature (1)..(214): NCBI GI NO: 18406626 NR Description: expressed protein [Arabidopsis thaliana]
  misc_feature (1)..(214): NCBI GI NO: 38345956 NR Description: OSJNBb0038F03.14
MQNNRMFPPSLSPLQEERLRNLRQRLEVPFDGSKAEHQDALKQLWKLAYPDRELPSLKSDLWKEMGWQGSDPSTDFRGGGFISLENLIFFAMKYPDSFQRLLHKQDGTRAEWEYPFAVAGINISFMLAQMLDLQAGLPSSLSGIRFLKLLEEDEMAFDILFCVAFQMMDAQWLAKRASYMEFNDVLRSTRTQLERELGLEDIFSVKDLPAYNMLR

SEQ ID NO: 10707 - protein, 210 aa, Glycine max
  peptide (1)..(210): Ceres Seq. ID no. 13594179
  misc_feature (31)..(191): Pfam Name: Pfam Description:  Protein of unknown function, DUF609
  misc_feature (1)..(209): NCBI GI NO: 18396599 NR Description: expressed protein [Arabidopsis thaliana]
  misc_feature (1)..(209): NCBI GI NO: 21555509 NR Description: unknown [Arabidopsis thaliana]
  misc_feature (31)..(209): NCBI GI NO: 6091761 NR Description: hypothetical protein [Arabidopsis thaliana]
  misc_feature (1)..(209): NCBI GI NO: 15218859 NR Description: hypothetical protein [Arabidopsis thaliana]
  misc_feature (1)..(209): NCBI GI NO: 38344760 NR Description: OSJNBa0068L06.3
  misc_feature (1)..(209): NCBI GI NO: 18411543 NR Description: expressed protein [Arabidopsis thaliana]
  misc_feature (1)..(209): NCBI GI NO: 14140119 NR Description: putative protein [Oryza sativa]
  misc_feature (5)..(209): NCBI GI NO: 18408759 NR Description: expressed protein [Arabidopsis thaliana]
  misc_feature (1)..(209): NCBI GI NO: 18406626 NR Description: expressed protein [Arabidopsis thaliana]
  misc_feature (1)..(209): NCBI GI NO: 38345956 NR Description: OSJNBb0038F03.14
MFPPSLSPLQEERLRNLRQRLEVPFDGSKAEHQDALKQLWKLAYPDRELPSLKSDLWKEMGWQGSDPSTDFRGGGFISLENLIFFAMKYPDSFQRLLHKQDGTRAEWEYPFAVAGINISFMLAQMLDLQAGLPSSLSGIRFLKLLEEDEMAFDILFCVAFQMMDAQWLAKRASYMEFNDVLRSTRTQLERELGLEDIFSVKDLPAYNMLR

SEQ ID NO: 10708 - DNA, 1420 bp, Glycine max
  misc_feature (1)..(1420): Ceres Seq. ID no. 14312254
ctttctctctcgtaatacaatttctctctctagaataaaacagcttctaccgcctccaagtcctacaagaacccattccctctcacaccgcccccaaaatctcactcttctgccttctcttttctcttctcttcttcctccaaaacaagtaaacaaacaacactctcacattcaccacaacacaaacacaaacacaaacaaagacaacaaccttgtttgtctgcaatcaaaacctttcaagctggcgttcgagaaccaagacacccctgtccgagaaatcaagcccaagaaccggagaatcatgggtgctggaggccctgatgacgaggacaataggtggccaccatggctgaaacctcttctcaaagagagcttctttgttcaatgcaagcttcacgctgattcgcacaagagcgagtgcaacatgtattgcttagattgtatgaacggtgctctctgctctctctgcctcgcttaccacaaagatcaccgtgctattcagataagaaggtcttcataccatgatgtgattagggttaatgagattcagaaggtgttggacatcacaggggtccaaacctacattatcaacagcgcaagggttgttttcttgaatgagaggcctcagccaaggcctggtaaaggtgtcaccaacacttgtgaagtctgcgagcgcagccttcttgattccttccgattctgttctcttggttgcaagattgttgggacttcaaggaacttccagaagaagaaaaagtcagcggcaatgggatcagacacagaggattcttcgtacagcagcaacagcagccatgggaagaagaacagcttcacaccgtccacaccgcctccaacttctgttaattacagaacggccaagagaagaaagggaattccacaccgtgccccaatgggtgggctagtcatagaatactagaaattaagttagtagtaactttaggttatttgctataatgccccctgataaattttacctcaaaacgcaactttctccgtgcagtttcacccgtcacaacacactcgagctttttgctgtaaaaggccggtgctggaattgtgttcccttctctgttccttgttaatagcgtttgtctatataggaaaaatccaatagaagtgaaaaaaaggttgagaaagtagaaaaaaaataagacatgtgatctgtgaaatagtttgagagaaaaagaatggtgcagcaaaataagcaaatgttcctttcaaccaaagtacaggaagatgaggaacattataggtttggtttctagagcaattatacgtaagttttggggtgggtgtaaatagtggcttggggaagaagacagtgacaatgtactctttccaaatagatggattgtttatggaatggtgaaaaataataatagtactaatagattttctc

SEQ ID NO: 10709 - protein, 311 aa, Glycine max
  peptide (1)..(311): Ceres Seq. ID no. 14312255
  misc_feature (113)..(298): Pfam Name: Pfam Description:  Protein of unknown function, DUF597
  misc_feature (80)..(311): NCBI GI NO: 6714272 NR Description: F6N18.8 [Arabidopsis thaliana]
  misc_feature (105)..(311): NCBI GI NO: 18398555 NR Description: expressed protein [Arabidopsis thaliana]
  misc_feature (105)..(311): NCBI GI NO: 21554139 NR Description: unknown [Arabidopsis thaliana]
  misc_feature (81)..(287): NCBI GI NO: 15236696 NR Description: expressed protein [Arabidopsis thaliana]
  misc_feature (97)..(285): NCBI GI NO: 38346725 NR Description: OSJNBa0086O06.23
  misc_feature (85)..(311): NCBI GI NO: 37537092 NR Description: unknown protein
  misc_feature (81)..(303): NCBI GI NO: 15237491 NR Description: expressed protein [Arabidopsis thaliana]
  misc_feature (108)..(246): NCBI GI NO: 18411153 NR Description: expressed protein [Arabidopsis thaliana]
  misc_feature (108)..(246): NCBI GI NO: 25337904 NR Description: unknown protein F14G6.19
  misc_feature (108)..(246): NCBI GI NO: 21536890 NR Description: unknown [Arabidopsis thaliana]
FLSRNTISLSRIKQLLPPPSPTRTHSLSHRPQNLTLLPSLFSSLLPPKQVNKQHSHIHHNTNTNTNKDNNLVCLQSKPFKLAFENQDTPVREIKPKNRRIMGAGGPDDEDNRWPPWLKPLLKESFFVQCKLHADSHKSECNMYCLDCMNGALCSLCLAYHKDHRAIQIRRSSYHDVIRVNEIQKVLDITGVQTYIINSARVVFLNERPQPRPGKGVTNTCEVCERSLLDSFRFCSLGCKIVGTSRNFQKKKKSAAMGSDTEDSSYSSNSSHGKKNSFTPSTPPPTSVNYRTAKRRKGIPHRAPMGGLVIEY

SEQ ID NO: 10710 - protein, 211 aa, Glycine max
  peptide (1)..(211): Ceres Seq. ID no. 14312256
  misc_feature (13)..(198): Pfam Name: Pfam Description:  Protein of unknown function, DUF597
  misc_feature (1)..(211): NCBI GI NO: 6714272 NR Description: F6N18.8 [Arabidopsis thaliana]
  misc_feature (5)..(211): NCBI GI NO: 18398555 NR Description: expressed protein [Arabidopsis thaliana]
  misc_feature (5)..(211): NCBI GI NO: 21554139 NR Description: unknown [Arabidopsis thaliana]
  misc_feature (1)..(187): NCBI GI NO: 15236696 NR Description: expressed protein [Arabidopsis thaliana]
  misc_feature (1)..(185): NCBI GI NO: 38346725 NR Description: OSJNBa0086O06.23
  misc_feature (1)..(211): NCBI GI NO: 37537092 NR Description: unknown protein
  misc_feature (1)..(203): NCBI GI NO: 15237491 NR Description: expressed protein [Arabidopsis thaliana]
  misc_feature (8)..(146): NCBI GI NO: 18411153 NR Description: expressed protein [Arabidopsis thaliana]
  misc_feature (8)..(146): NCBI GI NO: 25337904 NR Description: unknown protein F14G6.19
  misc_feature (8)..(146): NCBI GI NO: 21536890 NR Description: unknown [Arabidopsis thaliana]
MGAGGPDDEDNRWPPWLKPLLKESFFVQCKLHADSHKSECNMYCLDCMNGALCSLCLAYHKDHRAIQIRRSSYHDVIRVNEIQKVLDITGVQTYIINSARVVFLNERPQPRPGKGVTNTCEVCERSLLDSFRFCSLGCKIVGTSRNFQKKKKSAAMGSDTEDSSYSSNSSHGKKNSFTPSTPPPTSVNYRTAKRRKGIPHRAPMGGLVIEY

SEQ ID NO: 10711 - protein, 170 aa, Glycine max
  peptide (1)..(170): Ceres Seq. ID no. 14312257
  misc_feature (1)..(157): Pfam Name: Pfam Description:  Protein of unknown function, DUF597
  misc_feature (1)..(170): NCBI GI NO: 6714272 NR Description: F6N18.8 [Arabidopsis thaliana]
  misc_feature (1)..(170): NCBI GI NO: 18398555 NR Description: expressed protein [Arabidopsis thaliana]
  misc_feature (1)..(170): NCBI GI NO: 21554139 NR Description: unknown [Arabidopsis thaliana]
  misc_feature (1)..(146): NCBI GI NO: 15236696 NR Description: expressed protein [Arabidopsis thaliana]
  misc_feature (1)..(144): NCBI GI NO: 38346725 NR Description: OSJNBa0086O06.23
  misc_feature (1)..(170): NCBI GI NO: 37537092 NR Description: unknown protein
  misc_feature (1)..(162): NCBI GI NO: 15237491 NR Description: expressed protein [Arabidopsis thaliana]
  misc_feature (1)..(105): NCBI GI NO: 18411153 NR Description: expressed protein [Arabidopsis thaliana]
  misc_feature (1)..(105): NCBI GI NO: 25337904 NR Description: unknown protein F14G6.19
  misc_feature (1)..(105): NCBI GI NO: 21536890 NR Description: unknown [Arabidopsis thaliana]
MYCLDCMNGALCSLCLAYHKDHRAIQIRRSSYHDVIRVNEIQKVLDITGVQTYIINSARVVFLNERPQPRPGKGVTNTCEVCERSLLDSFRFCSLGCKIVGTSRNFQKKKKSAAMGSDTEDSSYSSNSSHGKKNSFTPSTPPPTSVNYRTAKRRKGIPHRAPMGGLVIEY

SEQ ID NO: 10712 - DNA, 711 bp, Glycine max
  misc_feature (1)..(711): Ceres Seq. ID no. 14304144
acctcttgctcttgcttatactaactaactcttcttgagaaactctttctcacacgccaagagtaacatgggatttccagtggggtacacagagttgatgctgccgaaggtgtttctgcaggtgctatccgtattgggcttgataagaaaactcatcaccgtcctcttgtgctacatgggcttccacgatttcttcgaatccgacattgcgtggccggagagggcgccggaattccagtcggtgtgggcggtgctcataagggaaatcctaccggtggtgaagttctcggagatggagatggagatggcggaggcgccggagagctgcgcggtgtgtctgtacgagttcgagggagaggacgagatcagacggctgacgaactgccgccacatattccacagagggtgtctggaccgttggatgggatacgatcaaagaacgtgtcccctgtgtcggacacccttcataccccaccatatgcaagctgccttcaatgatagactttgggctgcttcagggattcctgatttctattacaatcatgaatgactctagggaaaaaaaatcctagatttggggacgggagtgttctgtttaggttgttgagtatgtgttcagtgttcaatgttcgtgtaaatattatacaaaatggaaagcggagaattgttgttaaaaaaaaaaaaaaaaaaaaaaaaaaaaaaaaaaaaacc

SEQ ID NO: 10713 - protein, 160 aa, Glycine max
  peptide (1)..(160): Ceres Seq. ID no. 14304145
  misc_feature (87)..(129): Pfam Name: RING finger Pfam Description: Zinc finger, C3HC4 type
  misc_feature (1)..(156): NCBI GI NO: 15233117 NR Description: BRH1 RING finger protein [Arabidopsis thaliana]
  misc_feature (1)..(150): NCBI GI NO: 15222553 NR Description: RING-H2 finger protein, putative
  misc_feature (56)..(150): NCBI GI NO: 21554155 NR Description: RING zinc finger protein-like
  misc_feature (1)..(46): NCBI GI NO: 21554155 NR Description: RING zinc finger protein-like
  misc_feature (56)..(150): NCBI GI NO: 15238072 NR Description: RING-H2 zinc finger protein, putative
  misc_feature (1)..(46): NCBI GI NO: 15238072 NR Description: RING-H2 zinc finger protein, putative
  misc_feature (52)..(154): NCBI GI NO: 32488512 NR Description: OSJNBa0011J08.19
  misc_feature (1)..(150): NCBI GI NO: 11358777 NR Description: RING-H2 finger protein RHA1b
  misc_feature (1)..(135): NCBI GI NO: 11358776 NR Description: RING-H2 finger protein RHA1a
  misc_feature (1)..(135): NCBI GI NO: 15233352 NR Description: RING-H2 finger protein, putative
MGFPVGYTELMLPKVFLQVLSVLGLIRKLITVLLCYMGFHDFFESDIAWPERAPEFQSVWAVLIREILPVVKFSEMEMEMAEAPESCAVCLYEFEGEDEIRRLTNCRHIFHRGCLDRWMGYDQRTCPLCRTPFIPHHMQAAFNDRLWAASGIPDFYYNHE

SEQ ID NO: 10714 - protein, 150 aa, Glycine max
  peptide (1)..(150): Ceres Seq. ID no. 14304146
  misc_feature (77)..(119): Pfam Name: RING finger Pfam Description: Zinc finger, C3HC4 type
  misc_feature (1)..(146): NCBI GI NO: 15233117 NR Description: BRH1 RING finger protein [Arabidopsis thaliana]
  misc_feature (1)..(140): NCBI GI NO: 15222553 NR Description: RING-H2 finger protein, putative
  misc_feature (46)..(140): NCBI GI NO: 21554155 NR Description: RING zinc finger protein-like
  misc_feature (1)..(36): NCBI GI NO: 21554155 NR Description: RING zinc finger protein-like
  misc_feature (46)..(140): NCBI GI NO: 15238072 NR Description: RING-H2 zinc finger protein, putative
  misc_feature (1)..(36): NCBI GI NO: 15238072 NR Description: RING-H2 zinc finger protein, putative
  misc_feature (42)..(144): NCBI GI NO: 32488512 NR Description: OSJNBa0011J08.19
  misc_feature (1)..(140): NCBI GI NO: 11358777 NR Description: RING-H2 finger protein RHA1b
  misc_feature (1)..(125): NCBI GI NO: 11358776 NR Description: RING-H2 finger protein RHA1a
  misc_feature (1)..(125): NCBI GI NO: 15233352 NR Description: RING-H2 finger protein, putative
MLPKVFLQVLSVLGLIRKLITVLLCYMGFHDFFESDIAWPERAPEFQSVWAVLIREILPVVKFSEMEMEMAEAPESCAVCLYEFEGEDEIRRLTNCRHIFHRGCLDRWMGYDQRTCPLCRTPFIPHHMQAAFNDRLWAASGIPDFYYNHE

SEQ ID NO: 10715 - protein, 124 aa, Glycine max
  peptide (1)..(124): Ceres Seq. ID no. 14304147
  misc_feature (51)..(93): Pfam Name: RING finger Pfam Description: Zinc finger, C3HC4 type
  misc_feature (1)..(120): NCBI GI NO: 15233117 NR Description: BRH1 RING finger protein [Arabidopsis thaliana]
  misc_feature (1)..(114): NCBI GI NO: 15222553 NR Description: RING-H2 finger protein, putative
  misc_feature (20)..(114): NCBI GI NO: 21554155 NR Description: RING zinc finger protein-like
  misc_feature (20)..(114): NCBI GI NO: 15238072 NR Description: RING-H2 zinc finger protein, putative
  misc_feature (16)..(118): NCBI GI NO: 32488512 NR Description: OSJNBa0011J08.19
  misc_feature (1)..(114): NCBI GI NO: 11358777 NR Description: RING-H2 finger protein RHA1b
  misc_feature (1)..(99): NCBI GI NO: 11358776 NR Description: RING-H2 finger protein RHA1a
  misc_feature (1)..(99): NCBI GI NO: 15233352 NR Description: RING-H2 finger protein, putative
  misc_feature (1)..(114): NCBI GI NO: 15233350 NR Description: RING-H2 finger protein RHA1b
  misc_feature (1)..(99): NCBI GI NO: 15229284 NR Description: zinc finger
MGFHDFFESDIAWPERAPEFQSVWAVLIREILPVVKFSEMEMEMAEAPESCAVCLYEFEGEDEIRRLTNCRHIFHRGCLDRWMGYDQRTCPLCRTPFIPHHMQAAFNDRLWAASGIPDFYYNHE

SEQ ID NO: 10716 - DNA, 1632 bp, Glycine max
  misc_feature (1)..(1632): Ceres Seq. ID no. 15172426
gaagggaagaaccactaccaaacttcaactcactttctctctctcattctccctctctctcaccccctccgatctataaatcattctctctctctctctctctctcttacttacaaagtaaagagtagagtttgttctgtgaagaactgagggaggttcaggtccatgatattttgaaatctctctgtagtaggaagaccatgggacgagcttcatcattacttataatttttttggttcttggttcttcctttgccacctataatgtggtaacgatgataaggcactacggatcttcagaaggtgtggctgttaatgatggtgcattgttttttgaccctattactgagatgcctgatcatgtaaagaatcggaagacatctaaagtgccctttcatgtcgcgttaacggcgacggatgctccatataacaaatggcagtgccgcgtcatgtattactggtataaacaacaaaagaagttacctgggtctgagatgggaggattcacgaggattctacattctggaaatcctgacaacttgatggatgaaattcctactgttgtggttgatccccttccagcaggtttggatcggggatacattgttctgaataggccatgggcctttgttcagtggctggaaaagactaaaatagaggaagaatatgtgttaatggcagagcccgatcacatatttgtgcgtcctctgcccaatctggcctatggaggacatccggctgcttttccatttttttacattagacctgatgagaatgaaaaaatcataaggaagttttatcctgaggagctgggaccagttacaaatgttgatccaattggaaattcgcctgtaattataagaaaggatttgattgcaaagattgcccccacatggatgaatatttctttgaagatgaaagaggatccagagactgataaagcttttggatgggtgctagaaatgtatgcttatgctgttgcatctgctctgcatggtgtgaggcacattctgcggaaagacttcatgctgcagcccccatgggatcttgaaactaacaagaagtacattatacattacacttacggatgtgactacaatatgaagggtgaattgacttatggcaaagttggtgaatggagatttgacaaaaggtcgcatctacgaggacctccaccaaaaaacttgcccctgcccccaccaggggttcctgaaagtgtggtaacccttgtaaagatggtgaacgaggctagtgctaacatcccaaattgggacacatcgtaaatattttccacctcatcatgatgatatcccaagtgcacattttaaaaagaaaaaaaattgacaatgagtctttttttttttttttttatcacgagtttagtcttattagatggatagatgaatgtaagcaataccattttatatgacaattaaatacaggataaatatttatatttttttttcttgttggtgatatttttgaatggtatttgggctcgtaccacaatggctgatactttgttcattaagtattggcttcgaaattgcttatgtatatgttagacaattcttgtattgtatgccatgcatagccctagacaacataataattgtttctcttcatttctac

SEQ ID NO: 10717 - protein, 360 aa, Glycine max
  peptide (1)..(360): Ceres Seq. ID no. 15172427
  misc_feature (1)..(359): NCBI GI NO: 15240642 NR Description: expressed protein [Arabidopsis thaliana]
  misc_feature (1)..(357): NCBI GI NO: 22327055 NR Description: expressed protein [Arabidopsis thaliana]
  misc_feature (2)..(359): NCBI GI NO: 24413996 NR Description: hypothetical protein~similar to Arabidopsisthaliana chromosome 5
  misc_feature (193)..(359): NCBI GI NO: 30682704 NR Description: expressed protein [Arabidopsis thaliana]
  misc_feature (57)..(134): NCBI GI NO: 30682704 NR Description: expressed protein [Arabidopsis thaliana]
  misc_feature (193)..(355): NCBI GI NO: 25371351 NR Description: hypothetical protein At2g25260
  misc_feature (57)..(134): NCBI GI NO: 25371351 NR Description: hypothetical protein At2g25260
  misc_feature (3)..(158): NCBI GI NO: 34903224 NR Description: unnamed protein product
  misc_feature (41)..(317): NCBI GI NO: 22330795 NR Description: expressed protein [Arabidopsis thaliana]
MGRASSLLIIFLVLGSSFATYNVVTMIRHYGSSEGVAVNDGALFFDPITEMPDHVKNRKTSKVPFHVALTATDAPYNKWQCRVMYYWYKQQKKLPGSEMGGFTRILHSGNPDNLMDEIPTVVVDPLPAGLDRGYIVLNRPWAFVQWLEKTKIEEEYVLMAEPDHIFVRPLPNLAYGGHPAAFPFFYIRPDENEKIIRKFYPEELGPVTNVDPIGNSPVIIRKDLIAKIAPTWMNISLKMKEDPETDKAFGWVLEMYAYAVASALHGVRHILRKDFMLQPPWDLETNKKYIIHYTYGCDYNMKGELTYGKVGEWRFDKRSHLRGPPPKNLPLPPPGVPESVVTLVKMVNEASANIPNWDTS

SEQ ID NO: 10718 - protein, 335 aa, Glycine max
  peptide (1)..(335): Ceres Seq. ID no. 15172428
  misc_feature (1)..(334): NCBI GI NO: 15240642 NR Description: expressed protein [Arabidopsis thaliana]
  misc_feature (1)..(332): NCBI GI NO: 22327055 NR Description: expressed protein [Arabidopsis thaliana]
  misc_feature (1)..(334): NCBI GI NO: 24413996 NR Description: hypothetical protein~similar to Arabidopsisthaliana chromosome 5
  misc_feature (168)..(334): NCBI GI NO: 30682704 NR Description: expressed protein [Arabidopsis thaliana]
  misc_feature (32)..(109): NCBI GI NO: 30682704 NR Description: expressed protein [Arabidopsis thaliana]
  misc_feature (168)..(330): NCBI GI NO: 25371351 NR Description: hypothetical protein At2g25260
  misc_feature (32)..(109): NCBI GI NO: 25371351 NR Description: hypothetical protein At2g25260
  misc_feature (1)..(133): NCBI GI NO: 34903224 NR Description: unnamed protein product
  misc_feature (16)..(292): NCBI GI NO: 22330795 NR Description: expressed protein [Arabidopsis thaliana]
MIRHYGSSEGVAVNDGALFFDPITEMPDHVKNRKTSKVPFHVALTATDAPYNKWQCRVMYYWYKQQKKLPGSEMGGFTRILHSGNPDNLMDEIPTVVVDPLPAGLDRGYIVLNRPWAFVQWLEKTKIEEEYVLMAEPDHIFVRPLPNLAYGGHPAAFPFFYIRPDENEKIIRKFYPEELGPVTNVDPIGNSPVIIRKDLIAKIAPTWMNISLKMKEDPETDKAFGWVLEMYAYAVASALHGVRHILRKDFMLQPPWDLETNKKYIIHYTYGCDYNMKGELTYGKVGEWRFDKRSHLRGPPPKNLPLPPPGVPESVVTLVKMVNEASANIPNWDTS

SEQ ID NO: 10719 - protein, 310 aa, Glycine max
  peptide (1)..(310): Ceres Seq. ID no. 15172429
  misc_feature (1)..(309): NCBI GI NO: 15240642 NR Description: expressed protein [Arabidopsis thaliana]
  misc_feature (1)..(307): NCBI GI NO: 22327055 NR Description: expressed protein [Arabidopsis thaliana]
  misc_feature (1)..(309): NCBI GI NO: 24413996 NR Description: hypothetical protein~similar to Arabidopsisthaliana chromosome 5
  misc_feature (143)..(309): NCBI GI NO: 30682704 NR Description: expressed protein [Arabidopsis thaliana]
  misc_feature (7)..(84): NCBI GI NO: 30682704 NR Description: expressed protein [Arabidopsis thaliana]
  misc_feature (143)..(305): NCBI GI NO: 25371351 NR Description: hypothetical protein At2g25260
  misc_feature (7)..(84): NCBI GI NO: 25371351 NR Description: hypothetical protein At2g25260
  misc_feature (1)..(108): NCBI GI NO: 34903224 NR Description: unnamed protein product
  misc_feature (1)..(267): NCBI GI NO: 22330795 NR Description: expressed protein [Arabidopsis thaliana]
MPDHVKNRKTSKVPFHVALTATDAPYNKWQCRVMYYWYKQQKKLPGSEMGGFTRILHSGNPDNLMDEIPTVVVDPLPAGLDRGYIVLNRPWAFVQWLEKTKIEEEYVLMAEPDHIFVRPLPNLAYGGHPAAFPFFYIRPDENEKIIRKFYPEELGPVTNVDPIGNSPVIIRKDLIAKIAPTWMNISLKMKEDPETDKAFGWVLEMYAYAVASALHGVRHILRKDFMLQPPWDLETNKKYIIHYTYGCDYNMKGELTYGKVGEWRFDKRSHLRGPPPKNLPLPPPGVPESVVTLVKMVNEASANIPNWDTS

SEQ ID NO: 10720 - DNA, 1016 bp, Glycine max
  misc_feature (1)..(1016): Ceres Seq. ID no. 15172402
aaaacctcacatattttcgtccattaccacttccacttttcctctctctcgttttggtcactccaaagtccaaatcgatcactcttcactctcattattcccaacctaacaacaacaatgatcccagaacactactccgactcatctctcttccacagctccctccttaccctcttcctaatcgcaccccccaccttcctctccctcaccttcctccaggccccctacggcaagcaccacaggcccggctgggggcccaacctccctccccccttagcctggctcctcatggaaagcccaaccctctggctcaccctcctgctcttcccactgggcctccactcccacaaccccaaagcccaggccctcatcacccccttcctaatccactacttcaaccgcaccatcctctaccctctccacctcctcctcactccttcaaagaaaaccacaccgggcttccccctcagcgtagccctaatggcattcgccttcaacgttctcaattcctacctccaggcccgaacggtctctcactacaacaatcaccatgatgactcgggctttttctggttccggtttttgtgtgggcttttggtgtttttattggggatggggattaatgtatgggctgatagggttttgttgcggctcaagagcgagggaaagggctacgtggtgccgcgcggtgggttgttcgagctcgtggcgtgtccgaattactttggggagattgtcgagtggctcggctgggccgtgatgacttggtcatgggccgggctgggcttttttgtttacacttttgcgaatttgggtccaagggcccgggccaaccgtaggtggtatttggagaagtttggggaggattatccaaaggagagaaaggctgttattccttacttgtattgagtttttttttaatgattttcttttattggatttggaattgggaatgtgggtaaaatgatgaataattgaatgtggtgatgaatgatgcaatgcagctcaacttgctc

SEQ ID NO: 10721 - protein, 302 aa, Glycine max
  peptide (1)..(302): Ceres Seq. ID no. 15172403
  misc_feature (152)..(302): Pfam Name: Pfam Description:  3-oxo-5-alpha-steroid 4-dehydrogenase
  misc_feature (40)..(302): NCBI GI NO: 11493760 NR Description: putative steroid reductase [Glycine max]
  misc_feature (46)..(302): NCBI GI NO: 23476464 NR Description: steroid 5-alpha-reductase [Gossypium hirsutum]
  misc_feature (46)..(302): NCBI GI NO: 34850849 NR Description: steroid 5alpha-reductase [Ipomoea nil]
  misc_feature (43)..(302): NCBI GI NO: 15224430 NR Description: 3-oxo-5-alpha-steroid 4-dehydrogenase
  misc_feature (43)..(302): NCBI GI NO: 1280611 NR Description: steroid reductase DET2 [Arabidopsis thaliana]
  misc_feature (47)..(302): NCBI GI NO: 34908346 NR Description: putative steroid reductase DET2
  misc_feature (66)..(302): NCBI GI NO: 17567677 NR Description: steroid 5 alpha-reductase (XM969)
  misc_feature (76)..(302): NCBI GI NO: 2498887 NR Description: 3-oxo-5-alpha-steroid 4-dehydrogenase 1
  misc_feature (50)..(301): NCBI GI NO: 39588030 NR Description: Hypothetical protein CBG00143
  misc_feature (76)..(302): NCBI GI NO: 401056 NR Description: 3-oxo-5-alpha-steroid 4-dehydrogenase 2
KTSHIFVHYHFHFSSLSFWSLQSPNRSLFTLIIPNLTTTMIPEHYSDSSLFHSSLLTLFLIAPPTFLSLTFLQAPYGKHHRPGWGPNLPPPLAWLLMESPTLWLTLLLFPLGLHSHNPKAQALITPFLIHYFNRTILYPLHLLLTPSKKTTPGFPLSVALMAFAFNVLNSYLQARTVSHYNNHHDDSGFFWFRFLCGLLVFLLGMGINVWADRVLLRLKSEGKGYVVPRGGLFELVACPNYFGEIVEWLGWAVMTWSWAGLGFFVYTFANLGPRARANRRWYLEKFGEDYPKERKAVIPYLY

SEQ ID NO: 10722 - protein, 263 aa, Glycine max
  peptide (1)..(263): Ceres Seq. ID no. 15172404
  misc_feature (113)..(263): Pfam Name: Pfam Description:  3-oxo-5-alpha-steroid 4-dehydrogenase
  misc_feature (1)..(263): NCBI GI NO: 11493760 NR Description: putative steroid reductase [Glycine max]
  misc_feature (7)..(263): NCBI GI NO: 23476464 NR Description: steroid 5-alpha-reductase [Gossypium hirsutum]
  misc_feature (7)..(263): NCBI GI NO: 34850849 NR Description: steroid 5alpha-reductase [Ipomoea nil]
  misc_feature (4)..(263): NCBI GI NO: 15224430 NR Description: 3-oxo-5-alpha-steroid 4-dehydrogenase
  misc_feature (4)..(263): NCBI GI NO: 1280611 NR Description: steroid reductase DET2 [Arabidopsis thaliana]
  misc_feature (8)..(263): NCBI GI NO: 34908346 NR Description: putative steroid reductase DET2
  misc_feature (27)..(263): NCBI GI NO: 17567677 NR Description: steroid 5 alpha-reductase (XM969)
  misc_feature (37)..(263): NCBI GI NO: 2498887 NR Description: 3-oxo-5-alpha-steroid 4-dehydrogenase 1
  misc_feature (11)..(262): NCBI GI NO: 39588030 NR Description: Hypothetical protein CBG00143
  misc_feature (37)..(263): NCBI GI NO: 401056 NR Description: 3-oxo-5-alpha-steroid 4-dehydrogenase 2
MIPEHYSDSSLFHSSLLTLFLIAPPTFLSLTFLQAPYGKHHRPGWGPNLPPPLAWLLMESPTLWLTLLLFPLGLHSHNPKAQALITPFLIHYFNRTILYPLHLLLTPSKKTTPGFPLSVALMAFAFNVLNSYLQARTVSHYNNHHDDSGFFWFRFLCGLLVFLLGMGINVWADRVLLRLKSEGKGYVVPRGGLFELVACPNYFGEIVEWLGWAVMTWSWAGLGFFVYTFANLGPRARANRRWYLEKFGEDYPKERKAVIPYLY

SEQ ID NO: 10723 - protein, 206 aa, Glycine max
  peptide (1)..(206): Ceres Seq. ID no. 15172405
  misc_feature (56)..(206): Pfam Name: Pfam Description:  3-oxo-5-alpha-steroid 4-dehydrogenase
  misc_feature (1)..(206): NCBI GI NO: 11493760 NR Description: putative steroid reductase [Glycine max]
  misc_feature (1)..(206): NCBI GI NO: 23476464 NR Description: steroid 5-alpha-reductase [Gossypium hirsutum]
  misc_feature (1)..(206): NCBI GI NO: 34850849 NR Description: steroid 5alpha-reductase [Ipomoea nil]
  misc_feature (1)..(206): NCBI GI NO: 15224430 NR Description: 3-oxo-5-alpha-steroid 4-dehydrogenase
  misc_feature (1)..(206): NCBI GI NO: 1280611 NR Description: steroid reductase DET2 [Arabidopsis thaliana]
  misc_feature (1)..(206): NCBI GI NO: 34908346 NR Description: putative steroid reductase DET2
  misc_feature (1)..(206): NCBI GI NO: 17567677 NR Description: steroid 5 alpha-reductase (XM969)
  misc_feature (1)..(206): NCBI GI NO: 2498887 NR Description: 3-oxo-5-alpha-steroid 4-dehydrogenase 1
  misc_feature (1)..(205): NCBI GI NO: 39588030 NR Description: Hypothetical protein CBG00143
  misc_feature (1)..(206): NCBI GI NO: 401056 NR Description: 3-oxo-5-alpha-steroid 4-dehydrogenase 2
MESPTLWLTLLLFPLGLHSHNPKAQALITPFLIHYFNRTILYPLHLLLTPSKKTTPGFPLSVALMAFAFNVLNSYLQARTVSHYNNHHDDSGFFWFRFLCGLLVFLLGMGINVWADRVLLRLKSEGKGYVVPRGGLFELVACPNYFGEIVEWLGWAVMTWSWAGLGFFVYTFANLGPRARANRRWYLEKFGEDYPKERKAVIPYLY

SEQ ID NO: 10724 - DNA, 1175 bp, Glycine max
  misc_feature (1)..(1175): Ceres Seq. ID no. 13581621
gacagtaccgaagagtttaacctattgttgggattgcttgttcctttgatatgaaggtcacaagtctcaagctttcaattgatcatttgacttcaactgagtccctgtttctgatctcttaagattcacttatttaattgttattgtacttcctgatgtttcatttcttcagattgagtctcttcaccattttttgcaactgagattttgggttttgttgatcgtgcctaggtgaaaagctgagatctttattttgagaatagcaattattcatctatttggacgctgggttttatcaaaatgaggaagcgtcaagtcttgaagcattcaattgctattgtaagcatgctggtgtgtgtttgctgcttttttattgtgtctgtgactgttttcaagctcccagaggccccaagaaaagataggcaaatggggttttacccaacaatcagatccagaaaagtttcccttcaagatttcaacttgggtaagtttggggaaatgatgattgacatgttgcctcaagatcttgcttttaccgtatttgttccgtccgaggatgctttcaagcgagatctgcgtctgtcggtgagtgatagtttgaaaccagacgagttcaatgatacttacgcgattgtgactcgtattttggggttttcagctgttcctaggatactttcttcggctaatgtgcaatcgggtgagcttgtgaactatgattcgttatctgggtttcccttgtatgtctcaaaagacatcgatggaatgcttgttgttaataggattcgatcagaaatagtagatgttaggaagaaggagattgttgtccatgtcatggatggggttattatggatgctgaatttgagcaatcggttttagctgaggatgatacagaggaggattgacttgacggtattcgggttttgccctttgattttggcttcatattttgttgtattcaacggtggcataacagaattaaaaaaaaaaaacaaacagtgccattgtcttttcacttgtacatgttacaatgtatctcttttcctgtacacggccctactgttggctagtcctacaaatcctggaacttgcccccatttcaaaataattgttaaaaaggtatcacgaattacttgtaacgatatatttaatggggatagtctcctcctttgctgtc

SEQ ID NO: 10725 - protein, 200 aa, Glycine max
  peptide (1)..(200): Ceres Seq. ID no. 13581622
  misc_feature (68)..(183): Pfam Name: Pfam Description:  Fasciclin domain
  misc_feature (1)..(200): NCBI GI NO: 15228748 NR Description: hypothetical protein [Arabidopsis thaliana]
  misc_feature (60)..(196): NCBI GI NO: 27357986 NR Description: Unknown protein
MRKRQVLKHSIAIVSMLVCVCCFFIVSVTVFKLPEAPRKDRQMGFYPTIRSRKVSLQDFNLGKFGEMMIDMLPQDLAFTVFVPSEDAFKRDLRLSVSDSLKPDEFNDTYAIVTRILGFSAVPRILSSANVQSGELVNYDSLSGFPLYVSKDIDGMLVVNRIRSEIVDVRKKEIVVHVMDGVIMDAEFEQSVLAEDDTEED

SEQ ID NO: 10726 - protein, 185 aa, Glycine max
  peptide (1)..(185): Ceres Seq. ID no. 13581623
  misc_feature (53)..(168): Pfam Name: Pfam Description:  Fasciclin domain
  misc_feature (1)..(185): NCBI GI NO: 15228748 NR Description: hypothetical protein [Arabidopsis thaliana]
  misc_feature (45)..(181): NCBI GI NO: 27357986 NR Description: Unknown protein
MLVCVCCFFIVSVTVFKLPEAPRKDRQMGFYPTIRSRKVSLQDFNLGKFGEMMIDMLPQDLAFTVFVPSEDAFKRDLRLSVSDSLKPDEFNDTYAIVTRILGFSAVPRILSSANVQSGELVNYDSLSGFPLYVSKDIDGMLVVNRIRSEIVDVRKKEIVVHVMDGVIMDAEFEQSVLAEDDTEED

SEQ ID NO: 10727 - protein, 158 aa, Glycine max
  peptide (1)..(158): Ceres Seq. ID no. 13581624
  misc_feature (26)..(141): Pfam Name: Pfam Description:  Fasciclin domain
  misc_feature (1)..(158): NCBI GI NO: 15228748 NR Description: hypothetical protein [Arabidopsis thaliana]
  misc_feature (18)..(154): NCBI GI NO: 27357986 NR Description: Unknown protein
MGFYPTIRSRKVSLQDFNLGKFGEMMIDMLPQDLAFTVFVPSEDAFKRDLRLSVSDSLKPDEFNDTYAIVTRILGFSAVPRILSSANVQSGELVNYDSLSGFPLYVSKDIDGMLVVNRIRSEIVDVRKKEIVVHVMDGVIMDAEFEQSVLAEDDTEED

SEQ ID NO: 10728 - DNA, 1424 bp, Glycine max
  misc_feature (1)..(1424): Ceres Seq. ID no. 14312250
ataacatatagggagcgagatcccaaaaccaaaaggtggagggcgtgggcgagggatatctatcttcattttcgtcgtcgttcatttttttattttttttttttctgttttccattcgcttcttctctcagaaaagctcgccaatcgatcttgctctcttctacgcttttcgaattccttccattccattatggacgcagattagattcacgttcacattcacttctcttcgtttgcttcaaccactctgctctgctctgctctactctgagatccgatcgcattttcattcagaaaggaaactcgtgtgactgatttatgcgctaattgcaattgcactgcgagcgtccctgtgccgaatcggaagatgggattagtgtttaccaaattgttttcctctcttttcggtaacaaggaagctcgaatcctcgttctcggcctcgacaatgccggcaaaaccactattctctatcggcttcagatgggcgaagttgtctccaccattccaacaattgggtttaatgtcgaaacagtgcagtataacaacattaaatttcaagtctgggatttaggtgggcaaacaagtatcaggccatattggaggtgttactttccaaatactcaagcaataatctatgttgttgattcaagtgacgttgataggcttgtgatagctaaggaggagttccatgcaattttggaggaggaagaactaaaaggtgcagttgttctcattttcgcaaacaagcaggaccttcctggtgcacttgatgatgctgcagtgaccgaggctctagagttacacaagatcaaaaatcgccaatgggctatttttaaaacttctgccataaaaggagaaggactttttgagggccttgactggttgagcaatacactcaaatctggaggtggctaaaggtgtcagtttcaacgaattaaatggacgattgaattcagaaggaaggtggaaatgcgtattttggtatctctttcactgtgaatgatgctataataatatgattattaaagctcgtacacatgttttattccgttttgtgtttacagttaaaaaggtatgaacaatggtcattggttgtctttttcttggttcctttttatatttttaagttagtctcttggctcctctaatagcagtagctgaatggtttctaagaaaaaatttctagtctaatcttgtgtaattgagatacatgggtttactcttaatgtgcttgacgtatcgatgattacatgaggtagttttgtcaatgacataacggctgatgagggcaaaccttcaaagctctttggtgacatgatgaggactgagcagccattgttgttgacaatgtaaatcaaggtagcaaatttttcattaatgtaaaatgtatcgaagacaatatatgatattctttttggatttg

SEQ ID NO: 10729 - protein, 182 aa, Glycine max
  peptide (1)..(182): Ceres Seq. ID no. 14312251
  misc_feature (4)..(177): Pfam Name: Pfam Description:  ADP-ribosylation factor family
  misc_feature (1)..(182): NCBI GI NO: 3182922 NR Description: ADP-ribosylation factor 1
  misc_feature (1)..(182): NCBI GI NO: 30682545 NR Description: ADP-ribosylation factor 3 (ARF3)
  misc_feature (1)..(179): NCBI GI NO: 40253742 NR Description: putative ADP-ribosylation factor 3
  misc_feature (1)..(179): NCBI GI NO: 13385340 NR Description: ADP-ribosylation-like 1 [Mus musculus]
  misc_feature (1)..(179): NCBI GI NO: 11693150 NR Description: ADP-ribosylation factor-like 1 [Rattus norvegicus]
  misc_feature (1)..(179): NCBI GI NO: 4502227 NR Description: ADP-ribosylation factor-like 1 [Homo sapiens]
  misc_feature (1)..(179): NCBI GI NO: 39653273 NR Description: ADP-ribosylation factor [Medicago sativa]
  misc_feature (1)..(177): NCBI GI NO: 29841386 NR Description: similar to GenBank Accession Number M61127 GTP-binding protein in Drosophila melanogaster
  misc_feature (1)..(179): NCBI GI NO: 34909214 NR Description: putative ADP-ribosylation factor
  misc_feature (1)..(178): NCBI GI NO: 23508140 NR Description: ADP-ribosylation factor-like protein
MGLVFTKLFSSLFGNKEARILVLGLDNAGKTTILYRLQMGEVVSTIPTIGFNVETVQYNNIKFQVWDLGGQTSIRPYWRCYFPNTQAIIYVVDSSDVDRLVIAKEEFHAILEEEELKGAVVLIFANKQDLPGALDDAAVTEALELHKIKNRQWAIFKTSAIKGEGLFEGLDWLSNTLKSGGG

SEQ ID NO: 10730 - protein, 144 aa, Glycine max
  peptide (1)..(144): Ceres Seq. ID no. 14312252
  misc_feature (1)..(139): Pfam Name: Pfam Description:  ADP-ribosylation factor family
  misc_feature (1)..(144): NCBI GI NO: 3182922 NR Description: ADP-ribosylation factor 1
  misc_feature (1)..(144): NCBI GI NO: 30682545 NR Description: ADP-ribosylation factor 3 (ARF3)
  misc_feature (1)..(141): NCBI GI NO: 40253742 NR Description: putative ADP-ribosylation factor 3
  misc_feature (1)..(141): NCBI GI NO: 13385340 NR Description: ADP-ribosylation-like 1 [Mus musculus]
  misc_feature (1)..(141): NCBI GI NO: 11693150 NR Description: ADP-ribosylation factor-like 1 [Rattus norvegicus]
  misc_feature (1)..(141): NCBI GI NO: 4502227 NR Description: ADP-ribosylation factor-like 1 [Homo sapiens]
  misc_feature (1)..(141): NCBI GI NO: 39653273 NR Description: ADP-ribosylation factor [Medicago sativa]
  misc_feature (1)..(139): NCBI GI NO: 29841386 NR Description: similar to GenBank Accession Number M61127 GTP-binding protein in Drosophila melanogaster
  misc_feature (1)..(141): NCBI GI NO: 34909214 NR Description: putative ADP-ribosylation factor
  misc_feature (1)..(140): NCBI GI NO: 23508140 NR Description: ADP-ribosylation factor-like protein
MGEVVSTIPTIGFNVETVQYNNIKFQVWDLGGQTSIRPYWRCYFPNTQAIIYVVDSSDVDRLVIAKEEFHAILEEEELKGAVVLIFANKQDLPGALDDAAVTEALELHKIKNRQWAIFKTSAIKGEGLFEGLDWLSNTLKSGGG

SEQ ID NO: 10731 - protein, 104 aa, Glycine max
  peptide (1)..(104): Ceres Seq. ID no. 14312253
ITYRERDPKTKRWRAWARDIYLHFRRRSFFYFFFFCFPFASSLRKARQSILLSSTLFEFLPFHYGRRLDSRSHSLLFVCFNHSALLCSTLRSDRIFIQKGNSCD

SEQ ID NO: 10732 - DNA, 1328 bp, Glycine max
  misc_feature (1)..(1328): Ceres Seq. ID no. 14312281
aactgcgtcccccacaatccagtacctgaaaaatccactgcctctctctctctctcctaaccccccccccccagcaaatatatacccttccttcccacaattctatgatcacaatcttctctttctctcctacttctccgcctccttcaaaatcgtcatcaatttcgcgtctttctttctcaattctcttagattctcaattgggtcttcaaaaatgcggatgagttgcaatggatgtcgagttctgagaaaaggttgcagtgaaaattgcagcatcagaccctgtttacaatggatcaaaagcccagaatcccaagccaatgctactgtgtttctcgctaagttttatggtcgtgctggtctcatgaacctcgttaacgcaggccccgaacatcttcgtccagcgatctttcgctcgttgttgtacgaggcatgcggtcggatagtgaacccgatttacgggtctgtcgggctattatggtccgggagctggcagctgtgtcaagccgccgtggaaaacgtcttgaaaggcgcgccgattacgccgatcacgtctgaagccgcggctagcgggcggtgcccaccgctcaaggcttacgacatacgccacgtgttcaaagacgagaactccgccgccgcgtccaacgaaactcagcaccaacgagtcaagacccgctctcgagtgaagcgacccctcgccaagcccaaatccaccgccaaccaaaacaacaacattaacactaagaatacgggaaccgaattcggatcggatgaaccgggtttggtggcatgcgattggaccgaggaggcgttgaaccggtctggaagtcacgattcgacgctgagccaccagtcggaggcggcgaatgcggtggaaagtgagagcattttgtctgctgagacttcgatcctcttccgagatgaaccggaatccaacccgaagcgcttggaccggaccgatgatgttggtttagagcttacgctagggttcgagccggtatcaggtgcgcagcacgtggttccggtgaagaagagaaggattgatttgaaggattttagtggctcgtcgtgcaagatggagctggggcttgaatgctcggcttgaggactagtggctcggctcagttttgactcatcggctttctgtgtttgatataagagaacagaagtacagaaccgttttagtgttgttgttgttgttgttttttttttgtaatttgggttattgttaacccctttgtgaatgcggtgctgtacaacagtacaaactcaaacatgaatgctagtaagtagatgaacaggtgcatttcaaaattgttaccttgggc

SEQ ID NO: 10733 - protein, 367 aa, Glycine max
  peptide (1)..(367): Ceres Seq. ID no. 14312282
  misc_feature (75)..(180): Pfam Name: Pfam Description:  Protein of unknown function DUF260
  misc_feature (72)..(230): NCBI GI NO: 21554191 NR Description: unknown [Arabidopsis thaliana]
  misc_feature (262)..(363): NCBI GI NO: 21554191 NR Description: unknown [Arabidopsis thaliana]
  misc_feature (72)..(230): NCBI GI NO: 18396229 NR Description: lateral organ boundaries
  misc_feature (262)..(363): NCBI GI NO: 18396229 NR Description: lateral organ boundaries
  misc_feature (72)..(235): NCBI GI NO: 32395577 NR Description: seed specific protein Bn15D17A [Brassica napus]
  misc_feature (276)..(360): NCBI GI NO: 32395577 NR Description: seed specific protein Bn15D17A [Brassica napus]
  misc_feature (72)..(295): NCBI GI NO: 34914608 NR Description: P0520B06.17
  misc_feature (72)..(253): NCBI GI NO: 15219829 NR Description: lateral organ boundaries (LOB) domain family
  misc_feature (72)..(332): NCBI GI NO: 34895540 NR Description: unnamed protein product
  misc_feature (72)..(241): NCBI GI NO: 15221429 NR Description: lateral organ boundaries
TASPTIQYLKNPLPLSLSPNPPPPANIYPSFPQFYDHNLLFLSYFSASFKIVINFASFFLNSLRFSIGSSKMRMSCNGCRVLRKGCSENCSIRPCLQWIKSPESQANATVFLAKFYGRAGLMNLVNAGPEHLRPAIFRSLLYEACGRIVNPIYGSVGLLWSGSWQLCQAAVENVLKGAPITPITSEAAASGRCPPLKAYDIRHVFKDENSAAASNETQHQRVKTRSRVKRPLAKPKSTANQNNNINTKNTGTEFGSDEPGLVACDWTEEALNRSGSHDSTLSHQSEAANAVESESILSAETSILFRDEPESNPKRLDRTDDVGLELTLGFEPVSGAQHVVPVKKRRIDLKDFSGSSCKMELGLECSA

SEQ ID NO: 10734 - protein, 296 aa, Glycine max
  peptide (1)..(296): Ceres Seq. ID no. 14312283
  misc_feature (4)..(109): Pfam Name: Pfam Description:  Protein of unknown function DUF260
  misc_feature (1)..(159): NCBI GI NO: 21554191 NR Description: unknown [Arabidopsis thaliana]
  misc_feature (191)..(292): NCBI GI NO: 21554191 NR Description: unknown [Arabidopsis thaliana]
  misc_feature (1)..(159): NCBI GI NO: 18396229 NR Description: lateral organ boundaries
  misc_feature (191)..(292): NCBI GI NO: 18396229 NR Description: lateral organ boundaries
  misc_feature (1)..(164): NCBI GI NO: 32395577 NR Description: seed specific protein Bn15D17A [Brassica napus]
  misc_feature (205)..(289): NCBI GI NO: 32395577 NR Description: seed specific protein Bn15D17A [Brassica napus]
  misc_feature (1)..(224): NCBI GI NO: 34914608 NR Description: P0520B06.17
  misc_feature (1)..(182): NCBI GI NO: 15219829 NR Description: lateral organ boundaries (LOB) domain family
  misc_feature (1)..(261): NCBI GI NO: 34895540 NR Description: unnamed protein product
  misc_feature (1)..(170): NCBI GI NO: 15221429 NR Description: lateral organ boundaries
MRMSCNGCRVLRKGCSENCSIRPCLQWIKSPESQANATVFLAKFYGRAGLMNLVNAGPEHLRPAIFRSLLYEACGRIVNPIYGSVGLLWSGSWQLCQAAVENVLKGAPITPITSEAAASGRCPPLKAYDIRHVFKDENSAAASNETQHQRVKTRSRVKRPLAKPKSTANQNNNINTKNTGTEFGSDEPGLVACDWTEEALNRSGSHDSTLSHQSEAANAVESESILSAETSILFRDEPESNPKRLDRTDDVGLELTLGFEPVSGAQHVVPVKKRRIDLKDFSGSSCKMELGLECSA

SEQ ID NO: 10735 - protein, 294 aa, Glycine max
  peptide (1)..(294): Ceres Seq. ID no. 14312284
  misc_feature (2)..(107): Pfam Name: Pfam Description:  Protein of unknown function DUF260
  misc_feature (1)..(157): NCBI GI NO: 21554191 NR Description: unknown [Arabidopsis thaliana]
  misc_feature (189)..(290): NCBI GI NO: 21554191 NR Description: unknown [Arabidopsis thaliana]
  misc_feature (1)..(157): NCBI GI NO: 18396229 NR Description: lateral organ boundaries
  misc_feature (189)..(290): NCBI GI NO: 18396229 NR Description: lateral organ boundaries
  misc_feature (1)..(162): NCBI GI NO: 32395577 NR Description: seed specific protein Bn15D17A [Brassica napus]
  misc_feature (203)..(287): NCBI GI NO: 32395577 NR Description: seed specific protein Bn15D17A [Brassica napus]
  misc_feature (1)..(222): NCBI GI NO: 34914608 NR Description: P0520B06.17
  misc_feature (1)..(180): NCBI GI NO: 15219829 NR Description: lateral organ boundaries (LOB) domain family
  misc_feature (1)..(259): NCBI GI NO: 34895540 NR Description: unnamed protein product
  misc_feature (1)..(168): NCBI GI NO: 15221429 NR Description: lateral organ boundaries
MSCNGCRVLRKGCSENCSIRPCLQWIKSPESQANATVFLAKFYGRAGLMNLVNAGPEHLRPAIFRSLLYEACGRIVNPIYGSVGLLWSGSWQLCQAAVENVLKGAPITPITSEAAASGRCPPLKAYDIRHVFKDENSAAASNETQHQRVKTRSRVKRPLAKPKSTANQNNNINTKNTGTEFGSDEPGLVACDWTEEALNRSGSHDSTLSHQSEAANAVESESILSAETSILFRDEPESNPKRLDRTDDVGLELTLGFEPVSGAQHVVPVKKRRIDLKDFSGSSCKMELGLECSA

SEQ ID NO: 10736 - DNA, 1767 bp, Glycine max
  misc_feature (1)..(1767): Ceres Seq. ID no. 14312239
attttttctcttcttttcttttctcccttgcacaccttccatgccttctattaattctctagagatcttcttccttctccttaacctcacaactcttgaaaatcctccttatcgatccaacaagcagcaaactcactgaacaaatccacaaacagaaacaaagatcctactcgtgtagatctaataacatcaccttcttcttctcctacagatcatgaattcctttcaagaatttgactcatcaaacacaaacagtaccaaagccaccaatttcccatcatcatcatcagcagcaccagcagcaacagcaccaccatgttcttcttcttcttcttcgaccactctgagccgctacgagaaccaaaagcggcgcgactggaacacgttcgggcagtacctccgcaaccacaggcccccactctcgctctcacggtgcagcggcgcgcacgtgctggagttcctgcggtacctcgaccagttcgggaaaaccaaggttcacacgcagctttgtcccttcttcgggcacccgaaccctccagcaccgtgcccttgtcctctacgccaagcatgggggagcctcgacgcactcatagggcgcctcagagctgcttttgaagagaatggaggaaaacctgaagctaacccttttggcgctcgcgctgtgagactctaccttcgtgaagtgcgtgattcgcaagccaaggctaggggtattagctacgagaaaaagaagcgcaagcgtccccaacaaccttcattgcctccctctaataatgcaaaagttgtgatttgacaataggctgggggcatgtggacaccctttgcaattgcattagaaaaatattgtgtaaacctaaacagcagtactacttttggtagatgcagcagtaatttaagtagtggcagtaaaaaacactgtggagggcctgtgctgctggtgctgctgatgatgatgatgggaaattggtggctttggtactgtttgtgtttgatgagtcaaattcttgaaaggaattcatgatctgtaggagaagaagaaggtgatgttattagatctacacgagtaggatctttgtttctggcgagggatctggtgttattgttgagggatccctggttgcggagcctgttgcaactcccccagctgctgacactaaggctgctgttgctgaggatgacgatgatgatgatgttgatttgtttggtgaagagactgaggaagagaagaaggcagctgaggaacgggcagctgcagtgaaggcatctgcaaaaaagaaagagtctgggaaatcatctgttctgttggatgtaaaaccatgggatgatgaaactgacatgaagaagcttgaagaatcagtgagatctgttcagatggaagggttgctttggggtgcatccaaacttgttcctgttggatacggtattaagaaactgcaaattatgcttactattgtggatgacctagtttctgttgatactcttattgaggaacatctcacagttgagcccatcaatgaatatgtccagagttgtgacattgtggccttcaataaaatataaactacaatcggtgggatttggagatcatggcaactgggagaattgcaagttttagaaactatgttctagggggaactaccctgaattgagaatttttgtctttagaaacccgcttatattatttgtttctatatatctttgttttgtcatcggattatttggatagtaataatttcacctttaatgtgtcaacggattatttggatg

SEQ ID NO: 10737 - protein, 192 aa, Glycine max
  peptide (1)..(192): Ceres Seq. ID no. 14312240
  misc_feature (30)..(159): Pfam Name: DUF640 Pfam Description: Protein of unknown function
  misc_feature (1)..(188): NCBI GI NO: 18402578 NR Description: expressed protein [Arabidopsis thaliana]
  misc_feature (9)..(182): NCBI GI NO: 38344650 NR Description: OSJNBb0072M01.12
  misc_feature (36)..(181): NCBI GI NO: 37535384 NR Description: hypothetical protein
  misc_feature (21)..(192): NCBI GI NO: 34907938 NR Description: B1088C09.17
  misc_feature (22)..(150): NCBI GI NO: 27260935 NR Description: hypothetical protein
  misc_feature (99)..(181): NCBI GI NO: 34909440 NR Description: OSJNBa0014K08.14
  misc_feature (12)..(94): NCBI GI NO: 38566542 NR Description: At3g23290 [Arabidopsis thaliana]
  misc_feature (118)..(186): NCBI GI NO: 37536084 NR Description: hypothetical protein
MNSFQEFDSSNTNSTKATNFPSSSSAAPAATAPPCSSSSSSTTLSRYENQKRRDWNTFGQYLRNHRPPLSLSRCSGAHVLEFLRYLDQFGKTKVHTQLCPFFGHPNPPAPCPCPLRQAWGSLDALIGRLRAAFEENGGKPEANPFGARAVRLYLREVRDSQAKARGISYEKKKRKRPQQPSLPPSNNAKVVI

SEQ ID NO: 10738 - protein, 99 aa, Glycine max
  peptide (1)..(99): Ceres Seq. ID no. 14312241
MFFFFFFDHSEPLREPKAARLEHVRAVPPQPQAPTLALTVQRRARAGVPAVPRPVRENQGSHAALSLLRAPEPSSTVPLSSTPSMGEPRRTHRAPQSCF

SEQ ID NO: 10739 - DNA, 987 bp, Glycine max
  misc_feature (1)..(987): Ceres Seq. ID no. 15168488
atacgtcgtcgttttgccccccagaacctctgaagaagaagaaatggcgagtagcagcagcaacactccgaaggaaagcgttgttgtcgattgcggaaggcgtcgaacctcttgcggctattgcagatcctctcgtcacaatagcatctctcatggcatgtgggcacatagccttactgtggatgactaccaagatcttcttgatcgtggctggagaaggtctggatgttttctttataaaccagagatggaaaggacatgctgcccttcttatacaattcgcttgaaagcaagtgactttgttccttctaaggagcaacttcgtgtatctagacgaatgcaaaggtgggttccatttgacattgcaaggcctctgcttgacagaaaaccttatgttgtcttatcagattcttccattttacaaaatggagagtcatccctacctcaaactacggaagatgtaatgagaaggggttttgatgatgttggccaagaagatgcaaatgatgttccaatgcttgatgatgaagaaatggttgagtctgaatcagaatgctctgatgatgaacctgacctagaaaccacttcagatgatgatccagaaattgctgatgtcagcaaggttttgctagggataaagggatctcatgtgaaatacaaggatctgcgggttgtctttggtcctgagcagcagagttacttggagtcacaattgcggagatacaggaaggttgtgggtccattgctatccgagcgaatcgtctattcgctcggataatataaatattagtacttgagtagttgagtttaataagatgctactgctaatcttcccagaaaaaaaaaaaaaaaaaccctgcaaataagattcatgtattcttctgttggatggtctgatgttggcaatagcaattgtgtgaaccttgaagtttttttataatcaactttcccatgcatttgcatatatggaattcagtgttgtattcc

SEQ ID NO: 10740 - protein, 258 aa, Glycine max
  peptide (1)..(258): Ceres Seq. ID no. 15168489
  misc_feature (26)..(116): Pfam Name: Pfam Description:  Arginine-tRNA-protein transferase, N terminus
  misc_feature (93)..(257): NCBI GI NO: 11357175 NR Description: arginine-tRNA-protein transferase 1
  misc_feature (16)..(117): NCBI GI NO: 11357175 NR Description: arginine-tRNA-protein transferase 1
  misc_feature (93)..(257): NCBI GI NO: 15239222 NR Description: arginine-tRNA-protein transferase 1 homolog
  misc_feature (16)..(117): NCBI GI NO: 15239222 NR Description: arginine-tRNA-protein transferase 1 homolog
  misc_feature (8)..(185): NCBI GI NO: 15229703 NR Description: arginine-tRNA-protein transferase -related
  misc_feature (13)..(117): NCBI GI NO: 34859415 NR Description: similar to Arginine-tRNA-protein transferase 1
  misc_feature (15)..(117): NCBI GI NO: 3806092 NR Description: arginine-tRNA-protein transferase 1-2p; ATE1-2p
  misc_feature (15)..(117): NCBI GI NO: 13123998 NR Description: Arginyl-tRNA--protein transferase 1
  misc_feature (15)..(117): NCBI GI NO: 29747928 NR Description: Ate1 protein [Mus musculus]
  misc_feature (15)..(117): NCBI GI NO: 31542151 NR Description: arginine-tRNA-protein transferase 1 [Mus musculus]
YVVVLPPRTSEEEEMASSSSNTPKESVVVDCGRRRTSCGYCRSSRHNSISHGMWAHSLTVDDYQDLLDRGWRRSGCFLYKPEMERTCCPSYTIRLKASDFVPSKEQLRVSRRMQRWVPFDIARPLLDRKPYVVLSDSSILQNGESSLPQTTEDVMRRGFDDVGQEDANDVPMLDDEEMVESESECSDDEPDLETTSDDDPEIADVSKVLLGIKGSHVKYKDLRVVFGPEQQSYLESQLRRYRKVVGPLLSERIVYSLG

SEQ ID NO: 10741 - protein, 244 aa, Glycine max
  peptide (1)..(244): Ceres Seq. ID no. 15168490
  misc_feature (12)..(102): Pfam Name: Pfam Description:  Arginine-tRNA-protein transferase, N terminus
  misc_feature (79)..(243): NCBI GI NO: 11357175 NR Description: arginine-tRNA-protein transferase 1
  misc_feature (2)..(103): NCBI GI NO: 11357175 NR Description: arginine-tRNA-protein transferase 1
  misc_feature (79)..(243): NCBI GI NO: 15239222 NR Description: arginine-tRNA-protein transferase 1 homolog
  misc_feature (2)..(103): NCBI GI NO: 15239222 NR Description: arginine-tRNA-protein transferase 1 homolog
  misc_feature (1)..(171): NCBI GI NO: 15229703 NR Description: arginine-tRNA-protein transferase -related
  misc_feature (1)..(103): NCBI GI NO: 34859415 NR Description: similar to Arginine-tRNA-protein transferase 1
  misc_feature (1)..(103): NCBI GI NO: 3806092 NR Description: arginine-tRNA-protein transferase 1-2p; ATE1-2p
  misc_feature (1)..(103): NCBI GI NO: 13123998 NR Description: Arginyl-tRNA--protein transferase 1
  misc_feature (1)..(103): NCBI GI NO: 29747928 NR Description: Ate1 protein [Mus musculus]
  misc_feature (1)..(103): NCBI GI NO: 31542151 NR Description: arginine-tRNA-protein transferase 1 [Mus musculus]
MASSSSNTPKESVVVDCGRRRTSCGYCRSSRHNSISHGMWAHSLTVDDYQDLLDRGWRRSGCFLYKPEMERTCCPSYTIRLKASDFVPSKEQLRVSRRMQRWVPFDIARPLLDRKPYVVLSDSSILQNGESSLPQTTEDVMRRGFDDVGQEDANDVPMLDDEEMVESESECSDDEPDLETTSDDDPEIADVSKVLLGIKGSHVKYKDLRVVFGPEQQSYLESQLRRYRKVVGPLLSERIVYSLG

SEQ ID NO: 10742 - protein, 206 aa, Glycine max
  peptide (1)..(206): Ceres Seq. ID no. 15168491
  misc_feature (1)..(64): Pfam Name: Pfam Description:  Arginine-tRNA-protein transferase, N terminus
  misc_feature (41)..(205): NCBI GI NO: 11357175 NR Description: arginine-tRNA-protein transferase 1
  misc_feature (1)..(65): NCBI GI NO: 11357175 NR Description: arginine-tRNA-protein transferase 1
  misc_feature (41)..(205): NCBI GI NO: 15239222 NR Description: arginine-tRNA-protein transferase 1 homolog
  misc_feature (1)..(65): NCBI GI NO: 15239222 NR Description: arginine-tRNA-protein transferase 1 homolog
  misc_feature (1)..(133): NCBI GI NO: 15229703 NR Description: arginine-tRNA-protein transferase -related
  misc_feature (1)..(65): NCBI GI NO: 34859415 NR Description: similar to Arginine-tRNA-protein transferase 1
  misc_feature (1)..(65): NCBI GI NO: 3806092 NR Description: arginine-tRNA-protein transferase 1-2p; ATE1-2p
  misc_feature (1)..(65): NCBI GI NO: 13123998 NR Description: Arginyl-tRNA--protein transferase 1
  misc_feature (1)..(65): NCBI GI NO: 31542151 NR Description: arginine-tRNA-protein transferase 1 [Mus musculus]
  misc_feature (1)..(65): NCBI GI NO: 29747928 NR Description: Ate1 protein [Mus musculus]
MWAHSLTVDDYQDLLDRGWRRSGCFLYKPEMERTCCPSYTIRLKASDFVPSKEQLRVSRRMQRWVPFDIARPLLDRKPYVVLSDSSILQNGESSLPQTTEDVMRRGFDDVGQEDANDVPMLDDEEMVESESECSDDEPDLETTSDDDPEIADVSKVLLGIKGSHVKYKDLRVVFGPEQQSYLESQLRRYRKVVGPLLSERIVYSLG

SEQ ID NO: 10743 - DNA, 1751 bp, Glycine max
  misc_feature (1)..(1751): Ceres Seq. ID no. 14313084
acaaacaccagagttgagtgctccaataataccatggaagctcaagcgtcgttcttgtttattagcttgtttttctctctggtgttgcatttgcttgcaaagcattattacaagccaaaaaccaccctttctcacaaactacccccgggaccaaagaagctacctctgatagggaacctgcatcaactagcaatggctggttcacttccacatcgtactctccgagaccttgcccttaaatacggacctctcatgcatctccaacttggtgaaatttcttccgtggttgtatcctcccccaacatggccaaggagataatgaaaacccatgatcttgcttttgtgcagaggccacaatttcttcctgctcaaattttgacctatgggcaaaatgatattgtttttgctccatatggggattattggagacaaatgaagaaaatatgtgtctcggagcttctaagtgccaagagagttcagtctttctctcatattagagaagacgagacatccaaatttatagaatcaattcgaatatcagaaggttcaccaatcaatcttactagtaaaatttactccttggtaagttcttctgtttccagggtagcatttggcgacaaatctaaggaccaggaagagtttttgtgtgtgcttgaaaaaatgatattagcggggggaggatttgaacctgacgatttgtttccttcgatgaaacttcatctcataaatggaaggaaggccaaattggagaagatgcatgagcaggttgacaagatcgcagacaacattctcagagagcatcaagaaaagcgccaaagggcactacgagaaggcaaggttgacctagaggaggaggatcttgttgatgttcttttgagaatccaacaaagtgacaacctcgagatcaaaattagtaccacaaacatcaaagctgttatattggacgtatttactgctggaacggatacttcagcatcaacacttgaatgggctatggcagaaatgatgagaaacccaagagtgaggaagaaagcacaggctgaagtaagacaagcatttagggaattgaaaataatccatgaaacagatgtagggaaacttacatacttaaagttggtgatcaaagagacattaaggttacacgctccttctcctttattggtccctagagaatgctctgaactaaccatcattgatggatatgaaatacctgtcaagactaaagtcatgataaacgtgtgggcaattggaagagatccccaatattggactgatgctgagaggtttgtcccagagagattcgatggtagttctatcgatttcaaagggaataactttgagtatcttccttttggggcaggaaggagaatgtgcccaggaatgacatttggtttagccaacattatgcttccactcgctctattactctatcacttcaattgggaacttccaaatgagatgaaacctgaggatatggatatgtctgaaaactttggattgacagttacaaggaaaagcgagttgtgtttgattcccattgttaatgatctttgacactgcacgattgatatggttggaggaatcaagtttcttttactaaggaaataaatgtgttttaaaatcgcgtctagcaatatgcatgtctttattgttttaaaagctaggttatctaactagccatccgagctatatttttatactagtgtataataatctttgctgaattttatggtttactctttccaatcttt

SEQ ID NO: 10744 - protein, 517 aa, Glycine max
  peptide (1)..(517): Ceres Seq. ID no. 14313085
  misc_feature (48)..(511): Pfam Name: Pfam Description:  Cytochrome P450
  misc_feature (12)..(514): NCBI GI NO: 5915837 NR Description: Cytochrome P450 71D8 (P450 CP7)
  misc_feature (18)..(511): NCBI GI NO: 12331298 NR Description: cytochrome P450 [Solanum tuberosum]
  misc_feature (12)..(511): NCBI GI NO: 5915836 NR Description: Cytochrome P450 71D7
  misc_feature (21)..(511): NCBI GI NO: 5915835 NR Description: Cytochrome P450 71D6
  misc_feature (12)..(511): NCBI GI NO: 6739506 NR Description: cytochrome P450 [Capsicum annuum]
  misc_feature (17)..(513): NCBI GI NO: 5915839 NR Description: Cytochrome P450 71D10
  misc_feature (18)..(517): NCBI GI NO: 5713172 NR Description: cytochrome P450 [Nicotiana tabacum]
  misc_feature (12)..(511): NCBI GI NO: 27529812 NR Description: cytochrome P450 [Petunia x hybrida]
  misc_feature (18)..(287): NCBI GI NO: 14423319 NR Description: elicitor-inducible cytochrome P450
  misc_feature (315)..(510): NCBI GI NO: 14423319 NR Description: elicitor-inducible cytochrome P450
TNTRVECSNNTMEAQASFLFISLFFSLVLHLLAKHYYKPKTTLSHKLPPGPKKLPLIGNLHQLAMAGSLPHRTLRDLALKYGPLMHLQLGEISSVVVSSPNMAKEIMKTHDLAFVQRPQFLPAQILTYGQNDIVFAPYGDYWRQMKKICVSELLSAKRVQSFSHIREDETSKFIESIRISEGSPINLTSKIYSLVSSSVSRVAFGDKSKDQEEFLCVLEKMILAGGGFEPDDLFPSMKLHLINGRKAKLEKMHEQVDKIADNILREHQEKRQRALREGKVDLEEEDLVDVLLRIQQSDNLEIKISTTNIKAVILDVFTAGTDTSASTLEWAMAEMMRNPRVRKKAQAEVRQAFRELKIIHETDVGKLTYLKLVIKETLRLHAPSPLLVPRECSELTIIDGYEIPVKTKVMINVWAIGRDPQYWTDAERFVPERFDGSSIDFKGNNFEYLPFGAGRRMCPGMTFGLANIMLPLALLLYHFNWELPNEMKPEDMDMSENFGLTVTRKSELCLIPIVNDL

SEQ ID NO: 10745 - protein, 506 aa, Glycine max
  peptide (1)..(506): Ceres Seq. ID no. 14313086
  misc_feature (37)..(500): Pfam Name: Pfam Description:  Cytochrome P450
  misc_feature (1)..(503): NCBI GI NO: 5915837 NR Description: Cytochrome P450 71D8 (P450 CP7)
  misc_feature (7)..(500): NCBI GI NO: 12331298 NR Description: cytochrome P450 [Solanum tuberosum]
  misc_feature (1)..(500): NCBI GI NO: 5915836 NR Description: Cytochrome P450 71D7
  misc_feature (10)..(500): NCBI GI NO: 5915835 NR Description: Cytochrome P450 71D6
  misc_feature (1)..(500): NCBI GI NO: 6739506 NR Description: cytochrome P450 [Capsicum annuum]
  misc_feature (6)..(502): NCBI GI NO: 5915839 NR Description: Cytochrome P450 71D10
  misc_feature (7)..(506): NCBI GI NO: 5713172 NR Description: cytochrome P450 [Nicotiana tabacum]
  misc_feature (1)..(500): NCBI GI NO: 27529812 NR Description: cytochrome P450 [Petunia x hybrida]
  misc_feature (7)..(276): NCBI GI NO: 14423319 NR Description: elicitor-inducible cytochrome P450
  misc_feature (304)..(499): NCBI GI NO: 14423319 NR Description: elicitor-inducible cytochrome P450
MEAQASFLFISLFFSLVLHLLAKHYYKPKTTLSHKLPPGPKKLPLIGNLHQLAMAGSLPHRTLRDLALKYGPLMHLQLGEISSVVVSSPNMAKEIMKTHDLAFVQRPQFLPAQILTYGQNDIVFAPYGDYWRQMKKICVSELLSAKRVQSFSHIREDETSKFIESIRISEGSPINLTSKIYSLVSSSVSRVAFGDKSKDQEEFLCVLEKMILAGGGFEPDDLFPSMKLHLINGRKAKLEKMHEQVDKIADNILREHQEKRQRALREGKVDLEEEDLVDVLLRIQQSDNLEIKISTTNIKAVILDVFTAGTDTSASTLEWAMAEMMRNPRVRKKAQAEVRQAFRELKIIHETDVGKLTYLKLVIKETLRLHAPSPLLVPRECSELTIIDGYEIPVKTKVMINVWAIGRDPQYWTDAERFVPERFDGSSIDFKGNNFEYLPFGAGRRMCPGMTFGLANIMLPLALLLYHFNWELPNEMKPEDMDMSENFGLTVTRKSELCLIPIVNDL

SEQ ID NO: 10746 - protein, 453 aa, Glycine max
  peptide (1)..(453): Ceres Seq. ID no. 14313087
  misc_feature (1)..(447): Pfam Name: Pfam Description:  Cytochrome P450
  misc_feature (1)..(450): NCBI GI NO: 5915837 NR Description: Cytochrome P450 71D8 (P450 CP7)
  misc_feature (1)..(447): NCBI GI NO: 12331298 NR Description: cytochrome P450 [Solanum tuberosum]
  misc_feature (1)..(447): NCBI GI NO: 5915836 NR Description: Cytochrome P450 71D7
  misc_feature (1)..(447): NCBI GI NO: 5915835 NR Description: Cytochrome P450 71D6
  misc_feature (1)..(447): NCBI GI NO: 6739506 NR Description: cytochrome P450 [Capsicum annuum]
  misc_feature (1)..(449): NCBI GI NO: 5915839 NR Description: Cytochrome P450 71D10
  misc_feature (1)..(453): NCBI GI NO: 5713172 NR Description: cytochrome P450 [Nicotiana tabacum]
  misc_feature (1)..(447): NCBI GI NO: 27529812 NR Description: cytochrome P450 [Petunia x hybrida]
  misc_feature (1)..(223): NCBI GI NO: 14423319 NR Description: elicitor-inducible cytochrome P450
  misc_feature (251)..(446): NCBI GI NO: 14423319 NR Description: elicitor-inducible cytochrome P450
MAGSLPHRTLRDLALKYGPLMHLQLGEISSVVVSSPNMAKEIMKTHDLAFVQRPQFLPAQILTYGQNDIVFAPYGDYWRQMKKICVSELLSAKRVQSFSHIREDETSKFIESIRISEGSPINLTSKIYSLVSSSVSRVAFGDKSKDQEEFLCVLEKMILAGGGFEPDDLFPSMKLHLINGRKAKLEKMHEQVDKIADNILREHQEKRQRALREGKVDLEEEDLVDVLLRIQQSDNLEIKISTTNIKAVILDVFTAGTDTSASTLEWAMAEMMRNPRVRKKAQAEVRQAFRELKIIHETDVGKLTYLKLVIKETLRLHAPSPLLVPRECSELTIIDGYEIPVKTKVMINVWAIGRDPQYWTDAERFVPERFDGSSIDFKGNNFEYLPFGAGRRMCPGMTFGLANIMLPLALLLYHFNWELPNEMKPEDMDMSENFGLTVTRKSELCLIPIVNDL

SEQ ID NO: 10747 - DNA, 1478 bp, Glycine max
  misc_feature (1)..(1478): Ceres Seq. ID no. 15168464
aatgccagcagcggggaaggtaagtaggtgtctctcactctcccaccgaatccacattctaaagtaatacgccggagaatgacgtcacactcccactacccacccgacttagacgccgactccgtcacctcctccccacgctccgatcacttccacgacgcgccgccccgcatccgcttcatgtgcagcttcggcggcaagatcctcccccgcccccacgacaaccagctccgctacgtcggcggcgacacccgcatcgtcgccgtcaaccgctccatcactttctccgccctcattctcaaactctccaaactctcaggcatgagcaacataacagccaagtaccagctcccgaacgaggatctggacgcgttgatctcggtcaccacggacgaggacgtggagaacatgatggacgagtacgaccgcgtcgcacacaatcagaacccgcgatcggcgcggctccggctcttcctcttccccgaaggagaagactcccgcgccagcagcatcagctcgctcctaaacggctcagccaagcgcgaaaactggttcctcgacgctttaaacggcggcgtttcgggcctcgaacgaggccgctccgaagcctcttctatggtctctgaagtacccgattacctcttcgggttagacaactccgaagaaataacaaatcaccaacgcgacccgagacccaaacccggacccattattcaagataacgtttccgtttcagatccgggttcgcccgccccggttgtctcgtccccttattgttccacgtcatcagcgccgcccgtgccctctctcccgaaccttccctatgttaaaaccaaacctttaaacttaaatccggttcctgatactgactccaaggaaaatcaaaccgaacctgaaacggaacctcacccgaacctgaacctgaaccaaaacccgaacatgtattcaaataaccctgttgttcactaccctccagaagctgcttattcggcgcattcagtaaacccggttccggtttactatgtttccggtccggttcgaccgggatccgtgccggttcctatgcaaaccccttatcactacgttcaacaatcgtatcatgctgtggtgccacctcaggttcctatcgggtaccatcctttggttccgggttcgggtcaagtatatggagcgggcgtgaggcacatgaccccactgcaaccttacagcccctccaccacggcggtggttcatgacggtttgaaacagcacgtgtatcatgccgtgccaaattcgggtccggttccggttcacccagttattccgatgacgggtttggatgaaccgcagagaggtggagcgtaatttgtgacgggtcggggccccaattcacttaataactgatcccatttttatttagtggatgggtgctgaatttttactaccataccatcatgcaaatggtaatttatgtctatatatatacaagtgccttcact

SEQ ID NO: 10748 - protein, 421 aa, Glycine max
  peptide (1)..(421): Ceres Seq. ID no. 15168465
  misc_feature (46)..(134): Pfam Name: Pfam Description:  PB1 domain
  misc_feature (8)..(405): NCBI GI NO: 18412822 NR Description: octicosapeptide/Phox/Bem1p
  misc_feature (8)..(405): NCBI GI NO: 25407315 NR Description: hypothetical protein AT4g05150
  misc_feature (31)..(332): NCBI GI NO: 34895646 NR Description: P0480E02.2
  misc_feature (31)..(262): NCBI GI NO: 18379168 NR Description: octicosapeptide/Phox/Bem1p
  misc_feature (31)..(262): NCBI GI NO: 21553908 NR Description: unknown [Arabidopsis thaliana]
  misc_feature (31)..(312): NCBI GI NO: 15229599 NR Description: octicosapeptide/Phox/Bem1p
  misc_feature (35)..(184): NCBI GI NO: 25410886 NR Description: hypothetical protein At2g01190
  misc_feature (3)..(212): NCBI GI NO: 15242462 NR Description: octicosapeptide/Phox/Bem1p
  misc_feature (3)..(231): NCBI GI NO: 15237703 NR Description: octicosapeptide/Phox/Bem1p
  misc_feature (11)..(171): NCBI GI NO: 15242791 NR Description: protein kinase family [Arabidopsis thaliana]
MTSHSHYPPDLDADSVTSSPRSDHFHDAPPRIRFMCSFGGKILPRPHDNQLRYVGGDTRIVAVNRSITFSALILKLSKLSGMSNITAKYQLPNEDLDALISVTTDEDVENMMDEYDRVAHNQNPRSARLRLFLFPEGEDSRASSISSLLNGSAKRENWFLDALNGGVSGLERGRSEASSMVSEVPDYLFGLDNSEEITNHQRDPRPKPGPIIQDNVSVSDPGSPAPVVSSPYCSTSSAPPVPSLPNLPYVKTKPLNLNPVPDTDSKENQTEPETEPHPNLNLNQNPNMYSNNPVVHYPPEAAYSAHSVNPVPVYYVSGPVRPGSVPVPMQTPYHYVQQSYHAVVPPQVPIGYHPLVPGSGQVYGAGVRHMTPLQPYSPSTTAVVHDGLKQHVYHAVPNSGPVPVHPVIPMTGLDEPQRGGA

SEQ ID NO: 10749 - protein, 387 aa, Glycine max
  peptide (1)..(387): Ceres Seq. ID no. 15168466
  misc_feature (12)..(100): Pfam Name: Pfam Description:  PB1 domain
  misc_feature (1)..(371): NCBI GI NO: 18412822 NR Description: octicosapeptide/Phox/Bem1p
  misc_feature (1)..(371): NCBI GI NO: 25407315 NR Description: hypothetical protein AT4g05150
  misc_feature (1)..(298): NCBI GI NO: 34895646 NR Description: P0480E02.2
  misc_feature (1)..(228): NCBI GI NO: 18379168 NR Description: octicosapeptide/Phox/Bem1p
  misc_feature (1)..(228): NCBI GI NO: 21553908 NR Description: unknown [Arabidopsis thaliana]
  misc_feature (1)..(278): NCBI GI NO: 15229599 NR Description: octicosapeptide/Phox/Bem1p
  misc_feature (1)..(150): NCBI GI NO: 25410886 NR Description: hypothetical protein At2g01190
  misc_feature (1)..(178): NCBI GI NO: 15242462 NR Description: octicosapeptide/Phox/Bem1p
  misc_feature (1)..(197): NCBI GI NO: 15237703 NR Description: octicosapeptide/Phox/Bem1p
  misc_feature (1)..(137): NCBI GI NO: 15242791 NR Description: protein kinase family [Arabidopsis thaliana]
MCSFGGKILPRPHDNQLRYVGGDTRIVAVNRSITFSALILKLSKLSGMSNITAKYQLPNEDLDALISVTTDEDVENMMDEYDRVAHNQNPRSARLRLFLFPEGEDSRASSISSLLNGSAKRENWFLDALNGGVSGLERGRSEASSMVSEVPDYLFGLDNSEEITNHQRDPRPKPGPIIQDNVSVSDPGSPAPVVSSPYCSTSSAPPVPSLPNLPYVKTKPLNLNPVPDTDSKENQTEPETEPHPNLNLNQNPNMYSNNPVVHYPPEAAYSAHSVNPVPVYYVSGPVRPGSVPVPMQTPYHYVQQSYHAVVPPQVPIGYHPLVPGSGQVYGAGVRHMTPLQPYSPSTTAVVHDGLKQHVYHAVPNSGPVPVHPVIPMTGLDEPQRGGA

SEQ ID NO: 10750 - protein, 340 aa, Glycine max
  peptide (1)..(340): Ceres Seq. ID no. 15168467
  misc_feature (1)..(53): Pfam Name: Pfam Description:  PB1 domain
  misc_feature (1)..(324): NCBI GI NO: 18412822 NR Description: octicosapeptide/Phox/Bem1p
  misc_feature (1)..(324): NCBI GI NO: 25407315 NR Description: hypothetical protein AT4g05150
  misc_feature (1)..(251): NCBI GI NO: 34895646 NR Description: P0480E02.2
  misc_feature (1)..(181): NCBI GI NO: 18379168 NR Description: octicosapeptide/Phox/Bem1p
  misc_feature (1)..(181): NCBI GI NO: 21553908 NR Description: unknown [Arabidopsis thaliana]
  misc_feature (1)..(231): NCBI GI NO: 15229599 NR Description: octicosapeptide/Phox/Bem1p
  misc_feature (1)..(103): NCBI GI NO: 25410886 NR Description: hypothetical protein At2g01190
  misc_feature (1)..(131): NCBI GI NO: 15242462 NR Description: octicosapeptide/Phox/Bem1p
  misc_feature (1)..(150): NCBI GI NO: 15237703 NR Description: octicosapeptide/Phox/Bem1p
  misc_feature (1)..(90): NCBI GI NO: 15242791 NR Description: protein kinase family [Arabidopsis thaliana]
MSNITAKYQLPNEDLDALISVTTDEDVENMMDEYDRVAHNQNPRSARLRLFLFPEGEDSRASSISSLLNGSAKRENWFLDALNGGVSGLERGRSEASSMVSEVPDYLFGLDNSEEITNHQRDPRPKPGPIIQDNVSVSDPGSPAPVVSSPYCSTSSAPPVPSLPNLPYVKTKPLNLNPVPDTDSKENQTEPETEPHPNLNLNQNPNMYSNNPVVHYPPEAAYSAHSVNPVPVYYVSGPVRPGSVPVPMQTPYHYVQQSYHAVVPPQVPIGYHPLVPGSGQVYGAGVRHMTPLQPYSPSTTAVVHDGLKQHVYHAVPNSGPVPVHPVIPMTGLDEPQRGGA

SEQ ID NO: 10751 - DNA, 1774 bp, Glycine max
  misc_feature (1)..(1774): Ceres Seq. ID no. 14312069
aaaaccatcactgcattctctctgaagcctctaattctgtgtgtcagttaaagaaagaagcgcacatgccaaaagggatggcttcagtcaccacattttcactaatgttacagtttctgttctttatactattttcttcgtttggtcagctaagcttagctttcacgtcgcaagagtaccatgaggctcttgagaaatccattctcttcttcgagggacaacgatctgggaaattgccttccaaccagcaacaaacatggaggggagattctggattgtccgatggctcttcctaccatgtggacttagtaggcggttattatgatgctggagacaacgtcaagtttgggttgccaatggcctttaccactacattgttagcatggagtgtgattgaatttggaagctcaatgcaggaccaacttgaaaatgccagagctgctattcgttggagcacggattaccttcttaaggcagccaccaccacccctgacacattatatgtccaagtaggagagccgaacatggatcataggtgctgggaaagggctgaagatatggacactccacgcaacgtgtataaagtatcagctacaaacccaggttcggatgtagcagcagagacggcaactgcattggctgcttcttcaatagtattcagagattctgatccaagctattcctccaaattgcttcaagcagccatcaaagtattcaattttgcagaccgttacaggggttcttatagtgattctcttaattcggttgtctgtccattctactgctcttactctggataccatgatgagcttctctggggtgcatcatggatttataaagcatcaggaattaacacttatatacaatatatacaatccaatggccacatattaggggctgatgatgatggttacacattcagttgggatgacaagcgacctggaacaaaaatcctgctttccaaggaattcctagaggaaaattctgaagagttccaactatataaggcacatgcagacaattacatttgttcgctaatgtcgggaacacccggtttccaggctcagtacacccgaggggggcttctgtacaaagggagcgagagcaatttgcagtacgtaacatcaactagcttccttctcttgacatacgccaaatatctgaacacaaacggcggtaatgtagttcgatgtgggacttcagcagtcacgggcgaaaacctagtaacactagctaaagcacaagtggactacattctgggcaacaatccaacaaagatgtcttatatggtgggttttggagagaggtatccaaagcatatccaccacaggggttcctctctgccttccatccacgcacacactcaacacatttcatgcaacgacggctttcagtttttccattcttcctcgcccaaccctaatatccttgttggagccatcgtaggtggtcctgataacaatgacaacttctctgatgatcgacataactatcagcagtctgagccagcaacatacatcaatgcgccgtttgtaggtgctcttgcctatttctctgccaacccaccaacaacctattaggattaggaattaataatacacctataatcaagttttcaatatcgaccaatgccgttccaaatgtggttgcagacacttaaaaaacctgttgcctatcattaatgcttgtatgcttggtgttaggctgtttgttagttccttcatccttgatgaatgtttatgtttccatcaaaagtgatgtttaattattagtg

SEQ ID NO: 10752 - protein, 525 aa, Glycine max
  peptide (1)..(525): Ceres Seq. ID no. 14312070
  misc_feature (58)..(517): Pfam Name: Pfam Description:  Glycosyl hydrolase family 9
  misc_feature (26)..(519): NCBI GI NO: 13383303 NR Description: endo-1,4-beta glucanase [Populus alba]
  misc_feature (26)..(519): NCBI GI NO: 1125032 NR Description: cellulase precursor [Populus alba]
  misc_feature (26)..(519): NCBI GI NO: 4691450 NR Description: endo-1,4-beta glucanase [Populus alba]
  misc_feature (26)..(523): NCBI GI NO: 7488904 NR Description: cellulase (EC 3.2.1.4) - sweet orange
  misc_feature (26)..(520): NCBI GI NO: 1657374 NR Description: endo-beta-1,4-glucanase [Prunus persica]
  misc_feature (33)..(519): NCBI GI NO: 3687887 NR Description: endo-1,4-beta-glucanase [Lycopersicon esculentum]
  misc_feature (34)..(519): NCBI GI NO: 1655545 NR Description: endo-beta-1,4-glucanase [Capsicum annuum]
  misc_feature (34)..(519): NCBI GI NO: 6179388 NR Description: endo-beta-1,4-glucanase [Capsicum annuum]
  misc_feature (59)..(523): NCBI GI NO: 121784 NR Description: Endoglucanase 1 precursor
  misc_feature (36)..(519): NCBI GI NO: 12957206 NR Description: beta-1,4-glucanase [Atriplex lentiformis]
NHHCILSEASNSVCQLKKEAHMPKGMASVTTFSLMLQFLFFILFSSFGQLSLAFTSQEYHEALEKSILFFEGQRSGKLPSNQQQTWRGDSGLSDGSSYHVDLVGGYYDAGDNVKFGLPMAFTTTLLAWSVIEFGSSMQDQLENARAAIRWSTDYLLKAATTTPDTLYVQVGEPNMDHRCWERAEDMDTPRNVYKVSATNPGSDVAAETATALAASSIVFRDSDPSYSSKLLQAAIKVFNFADRYRGSYSDSLNSVVCPFYCSYSGYHDELLWGASWIYKASGINTYIQYIQSNGHILGADDDGYTFSWDDKRPGTKILLSKEFLEENSEEFQLYKAHADNYICSLMSGTPGFQAQYTRGGLLYKGSESNLQYVTSTSFLLLTYAKYLNTNGGNVVRCGTSAVTGENLVTLAKAQVDYILGNNPTKMSYMVGFGERYPKHIHHRGSSLPSIHAHTQHISCNDGFQFFHSSSPNPNILVGAIVGGPDNNDNFSDDRHNYQQSEPATYINAPFVGALAYFSANPPTTY

SEQ ID NO: 10753 - protein, 504 aa, Glycine max
  peptide (1)..(504): Ceres Seq. ID no. 14312071
  misc_feature (37)..(496): Pfam Name: Pfam Description:  Glycosyl hydrolase family 9
  misc_feature (5)..(498): NCBI GI NO: 13383303 NR Description: endo-1,4-beta glucanase [Populus alba]
  misc_feature (5)..(498): NCBI GI NO: 1125032 NR Description: cellulase precursor [Populus alba]
  misc_feature (5)..(498): NCBI GI NO: 4691450 NR Description: endo-1,4-beta glucanase [Populus alba]
  misc_feature (5)..(502): NCBI GI NO: 7488904 NR Description: cellulase (EC 3.2.1.4) - sweet orange
  misc_feature (5)..(499): NCBI GI NO: 1657374 NR Description: endo-beta-1,4-glucanase [Prunus persica]
  misc_feature (12)..(498): NCBI GI NO: 3687887 NR Description: endo-1,4-beta-glucanase [Lycopersicon esculentum]
  misc_feature (13)..(498): NCBI GI NO: 1655545 NR Description: endo-beta-1,4-glucanase [Capsicum annuum]
  misc_feature (13)..(498): NCBI GI NO: 6179388 NR Description: endo-beta-1,4-glucanase [Capsicum annuum]
  misc_feature (38)..(502): NCBI GI NO: 121784 NR Description: Endoglucanase 1 precursor
  misc_feature (15)..(498): NCBI GI NO: 12957206 NR Description: beta-1,4-glucanase [Atriplex lentiformis]
MPKGMASVTTFSLMLQFLFFILFSSFGQLSLAFTSQEYHEALEKSILFFEGQRSGKLPSNQQQTWRGDSGLSDGSSYHVDLVGGYYDAGDNVKFGLPMAFTTTLLAWSVIEFGSSMQDQLENARAAIRWSTDYLLKAATTTPDTLYVQVGEPNMDHRCWERAEDMDTPRNVYKVSATNPGSDVAAETATALAASSIVFRDSDPSYSSKLLQAAIKVFNFADRYRGSYSDSLNSVVCPFYCSYSGYHDELLWGASWIYKASGINTYIQYIQSNGHILGADDDGYTFSWDDKRPGTKILLSKEFLEENSEEFQLYKAHADNYICSLMSGTPGFQAQYTRGGLLYKGSESNLQYVTSTSFLLLTYAKYLNTNGGNVVRCGTSAVTGENLVTLAKAQVDYILGNNPTKMSYMVGFGERYPKHIHHRGSSLPSIHAHTQHISCNDGFQFFHSSSPNPNILVGAIVGGPDNNDNFSDDRHNYQQSEPATYINAPFVGALAYFSANPPTTY

SEQ ID NO: 10754 - protein, 500 aa, Glycine max
  peptide (1)..(500): Ceres Seq. ID no. 14312072
  misc_feature (33)..(492): Pfam Name: Pfam Description:  Glycosyl hydrolase family 9
  misc_feature (1)..(494): NCBI GI NO: 13383303 NR Description: endo-1,4-beta glucanase [Populus alba]
  misc_feature (1)..(494): NCBI GI NO: 1125032 NR Description: cellulase precursor [Populus alba]
  misc_feature (1)..(494): NCBI GI NO: 4691450 NR Description: endo-1,4-beta glucanase [Populus alba]
  misc_feature (1)..(498): NCBI GI NO: 7488904 NR Description: cellulase (EC 3.2.1.4) - sweet orange
  misc_feature (1)..(495): NCBI GI NO: 1657374 NR Description: endo-beta-1,4-glucanase [Prunus persica]
  misc_feature (8)..(494): NCBI GI NO: 3687887 NR Description: endo-1,4-beta-glucanase [Lycopersicon esculentum]
  misc_feature (9)..(494): NCBI GI NO: 1655545 NR Description: endo-beta-1,4-glucanase [Capsicum annuum]
  misc_feature (9)..(494): NCBI GI NO: 6179388 NR Description: endo-beta-1,4-glucanase [Capsicum annuum]
  misc_feature (34)..(498): NCBI GI NO: 121784 NR Description: Endoglucanase 1 precursor
  misc_feature (11)..(494): NCBI GI NO: 12957206 NR Description: beta-1,4-glucanase [Atriplex lentiformis]
MASVTTFSLMLQFLFFILFSSFGQLSLAFTSQEYHEALEKSILFFEGQRSGKLPSNQQQTWRGDSGLSDGSSYHVDLVGGYYDAGDNVKFGLPMAFTTTLLAWSVIEFGSSMQDQLENARAAIRWSTDYLLKAATTTPDTLYVQVGEPNMDHRCWERAEDMDTPRNVYKVSATNPGSDVAAETATALAASSIVFRDSDPSYSSKLLQAAIKVFNFADRYRGSYSDSLNSVVCPFYCSYSGYHDELLWGASWIYKASGINTYIQYIQSNGHILGADDDGYTFSWDDKRPGTKILLSKEFLEENSEEFQLYKAHADNYICSLMSGTPGFQAQYTRGGLLYKGSESNLQYVTSTSFLLLTYAKYLNTNGGNVVRCGTSAVTGENLVTLAKAQVDYILGNNPTKMSYMVGFGERYPKHIHHRGSSLPSIHAHTQHISCNDGFQFFHSSSPNPNILVGAIVGGPDNNDNFSDDRHNYQQSEPATYINAPFVGALAYFSANPPTTY

SEQ ID NO: 10755 - DNA, 1363 bp, Glycine max
  misc_feature (1)..(1363): Ceres Seq. ID no. 15176843
aatttcgcgcgaagaagaagaaacaaagaaaggtggtgctgggtattctatggcgacacccaacaacagcaacattaacaacgcgacggcgaaaccaggaaccctaggcgttggcgtaggtgcagctcctactccgcccaagtcccagcgcggccacaacaagcccaagtgcaaacagtgtggcaatgtcgctcgttcaaggtgcccctatgaatgttgcaagagttgctgttctagaaatcaaaacccctgtcatatccacgtgttaaaagctaattcaacttttcctgacaaggcatcctcttctggtgcgtctccccttgaccagcaatccttagatccacatccacctcaatcaactgcaggtagagttgcatcacttcgacaactttccaatagttttgctcagttcaataatttacacctttcccttcgttcaaagaagccactaactagaaaggatgctgcatctatcaacgaatggagatttgccaagataaaggaatacaaggagcggaatgttgaagtggaaaatgaagcttttgaccgatacatgcagaatgtagatttactagaagaagtattagctgtgaagtcgttggatgccaatgtgccctctgcattagagtctaatgctactccaatggagagcaatgaggcaatgatccctgggataaaattgcagctaagatcaaattcaatgagaagtgatggtttgagaatgagaatacaacaaattgtaaacgagggattaaagaagctcgagaaaagtgctgtagatggtgacataaatgaatcaattgatggtgaatctaatgaagcttcaaaaaggggaaaggggattgaaaggttatcagctataagtgatcttatggataaaattaataaagcccgaactgaggaggatttgaagccgtgcttagagatgaagacccaactcttcaatttagacgaaggctctagcgcgaaagaccttcaagacaatgaaatgcatgcgaatgaaactgctgaaagtgatgtggtacaaacagaaggattggattattctttaccgaaatttgttaccatcactgagattgatctagaagttctccacaccatagacaaacacttttctacccaggatatagagcagttatgaggctagatttcttaaacgttgtgatttaccttgaaagaaacagaaatataaatgttgtgctgttctaggaaaatgctctctaattagaattaggtagtcaaatgcaagccaaaaatgttttagaaattaatctggatacttgaaccggttgaagtgtgaacagattatattcagtttgagcattatgcaattcaattacggttcaactttagtccattaatc

SEQ ID NO: 10756 - protein, 379 aa, Glycine max
  peptide (1)..(379): Ceres Seq. ID no. 15176844
  misc_feature (57)..(110): Pfam Name: DUF702 Pfam Description: Domain of unknown function
  misc_feature (28)..(313): NCBI GI NO: 18398564 NR Description: expressed protein [Arabidopsis thaliana]
  misc_feature (116)..(378): NCBI GI NO: 29467525 NR Description: P0582D05.15
  misc_feature (11)..(87): NCBI GI NO: 29467526 NR Description: P0582D05.16
ISREEEETKKGGAGYSMATPNNSNINNATAKPGTLGVGVGAAPTPPKSQRGHNKPKCKQCGNVARSRCPYECCKSCCSRNQNPCHIHVLKANSTFPDKASSSGASPLDQQSLDPHPPQSTAGRVASLRQLSNSFAQFNNLHLSLRSKKPLTRKDAASINEWRFAKIKEYKERNVEVENEAFDRYMQNVDLLEEVLAVKSLDANVPSALESNATPMESNEAMIPGIKLQLRSNSMRSDGLRMRIQQIVNEGLKKLEKSAVDGDINESIDGESNEASKRGKGIERLSAISDLMDKINKARTEEDLKPCLEMKTQLFNLDEGSSAKDLQDNEMHANETAESDVVQTEGLDYSLPKFVTITEIDLEVLHTIDKHFSTQDIEQL

SEQ ID NO: 10757 - protein, 363 aa, Glycine max
  peptide (1)..(363): Ceres Seq. ID no. 15176845
  misc_feature (41)..(94): Pfam Name: DUF702 Pfam Description: Domain of unknown function
  misc_feature (12)..(297): NCBI GI NO: 18398564 NR Description: expressed protein [Arabidopsis thaliana]
  misc_feature (100)..(362): NCBI GI NO: 29467525 NR Description: P0582D05.15
  misc_feature (1)..(71): NCBI GI NO: 29467526 NR Description: P0582D05.16
MATPNNSNINNATAKPGTLGVGVGAAPTPPKSQRGHNKPKCKQCGNVARSRCPYECCKSCCSRNQNPCHIHVLKANSTFPDKASSSGASPLDQQSLDPHPPQSTAGRVASLRQLSNSFAQFNNLHLSLRSKKPLTRKDAASINEWRFAKIKEYKERNVEVENEAFDRYMQNVDLLEEVLAVKSLDANVPSALESNATPMESNEAMIPGIKLQLRSNSMRSDGLRMRIQQIVNEGLKKLEKSAVDGDINESIDGESNEASKRGKGIERLSAISDLMDKINKARTEEDLKPCLEMKTQLFNLDEGSSAKDLQDNEMHANETAESDVVQTEGLDYSLPKFVTITEIDLEVLHTIDKHFSTQDIEQL

SEQ ID NO: 10758 - protein, 195 aa, Glycine max
  peptide (1)..(195): Ceres Seq. ID no. 15176846
  misc_feature (1)..(129): NCBI GI NO: 18398564 NR Description: expressed protein [Arabidopsis thaliana]
  misc_feature (1)..(194): NCBI GI NO: 29467525 NR Description: P0582D05.15
MQNVDLLEEVLAVKSLDANVPSALESNATPMESNEAMIPGIKLQLRSNSMRSDGLRMRIQQIVNEGLKKLEKSAVDGDINESIDGESNEASKRGKGIERLSAISDLMDKINKARTEEDLKPCLEMKTQLFNLDEGSSAKDLQDNEMHANETAESDVVQTEGLDYSLPKFVTITEIDLEVLHTIDKHFSTQDIEQL

SEQ ID NO: 10759 - DNA, 1520 bp, Glycine max
  misc_feature (1)..(1520): Ceres Seq. ID no. 14313074
acatgtcagtgacgaaatatcttttccacctcgttgtccccactggtccatttcacaattgagattttgcattcagcttcctcccatgcttatcaccattcaccattcaccaccatgttgccatgcgattactgccattccaaacccgccatactcttctgcagaccagattccgctaaactatgcttgctatgcgaccagcacgtgcacgccgccaacgccctctccctcaagcacgtgcgcttccagatttgcgactcctgcaagaccgacaccgctgtcctccgctgctccaccgacaacctcgtcctctgccaccactgcgatgtggaaacccacggtgctgccgcttcctcccaccaccaacgtcaccgcctccacggcctctccggctgcccctccgtcacggagatcgcctccgcgctgtgcctcgatttccgggcccaggatcccgtggtccccaccgccgcctccggcggtcgcgatgaggtgtacgagcaggtgctggaaatcgcgcggcagaggaacgacgacctcggcgccgaacaactcaagttcgacgaatcccccataaacgacgtcgttgttgttgacgagatgctgatgcagcaaacgccgttcacgtctttgcttatgttgccgaattccgaatctgaattcgactcccgaaaaagtaacgataacaacggttacggaaccgaggcaggggatcttctctggaattataaccccgcgtatcagcctcctcaggtgtgggattttcagttacaaaaatcaagagattgccatgaaccaagagttgtaacatttgatggtctagaagttccaaaattatttcaggatgagcacaatatgaagtactcaacaattggtgatgacattgatattctatcaagaaataatcaatcggatcagtcatcatcaagccatgcaaagaagaaagaagagaacaacaaaaaagctaaaggtgggttatcatcagagtccaaactgtttgaatccataccgtacaatggcaccaacaatgtcgtagtcatggagcatcttgttggtgggaatgaaaatgttggcaccttaacagccagggttagtttggaagagttggctaagaatagaggggatgccatgttgcgttacaaggagaagaagaaaactcgaaggtacgataagcacattcgctatgaatcaaggaaggccagggctgatactagaaaaagggtgagagggagatttgtgaaggcaagtgatgttcaagcgtgatgatgagtaccttttcagaaatctcatccgagttcaatgctcgtgtgtgtgtacataagttacactataagagaaatatggatatattatagttttcatgaactccctgagcattgattgatttgaatcttttttggtagttgatttatttgaatttttgtttgttacattatatgggaagaggtttttttgtgtgagattctctcataagagggtgatatataagagagacactgacaataaattggtgagtttgtgtt

SEQ ID NO: 10760 - protein, 381 aa, Glycine max
  peptide (1)..(381): Ceres Seq. ID no. 14313075
  misc_feature (340)..(378): Pfam Name: Pfam Description:  CCT motif
  misc_feature (173)..(378): NCBI GI NO: 15217814 NR Description: CONSTANS B-box zinc finger family protein
  misc_feature (2)..(107): NCBI GI NO: 15217814 NR Description: CONSTANS B-box zinc finger family protein
  misc_feature (202)..(378): NCBI GI NO: 30685731 NR Description: CONSTANS B-box zinc finger family protein
  misc_feature (1)..(111): NCBI GI NO: 30685731 NR Description: CONSTANS B-box zinc finger family protein
  misc_feature (202)..(349): NCBI GI NO: 17432968 NR Description: Zinc finger protein constans-like 9
  misc_feature (1)..(111): NCBI GI NO: 17432968 NR Description: Zinc finger protein constans-like 9
  misc_feature (261)..(378): NCBI GI NO: 15227152 NR Description: CONSTANS B-box zinc finger family protein
  misc_feature (4)..(107): NCBI GI NO: 15227152 NR Description: CONSTANS B-box zinc finger family protein
  misc_feature (4)..(378): NCBI GI NO: 7489605 NR Description: zinc-finger protein S3574 [imported] - rice
  misc_feature (4)..(107): NCBI GI NO: 15238918 NR Description: CONSTANS B-box zinc finger family protein
MLPCDYCHSKPAILFCRPDSAKLCLLCDQHVHAANALSLKHVRFQICDSCKTDTAVLRCSTDNLVLCHHCDVETHGAAASSHHQRHRLHGLSGCPSVTEIASALCLDFRAQDPVVPTAASGGRDEVYEQVLEIARQRNDDLGAEQLKFDESPINDVVVVDEMLMQQTPFTSLLMLPNSESEFDSRKSNDNNGYGTEAGDLLWNYNPAYQPPQVWDFQLQKSRDCHEPRVVTFDGLEVPKLFQDEHNMKYSTIGDDIDILSRNNQSDQSSSSHAKKKEENNKKAKGGLSSESKLFESIPYNGTNNVVVMEHLVGGNENVGTLTARVSLEELAKNRGDAMLRYKEKKKTRRYDKHIRYESRKARADTRKRVRGRFVKASDVQA

SEQ ID NO: 10761 - protein, 220 aa, Glycine max
  peptide (1)..(220): Ceres Seq. ID no. 14313076
  misc_feature (179)..(217): Pfam Name: Pfam Description:  CCT motif
  misc_feature (12)..(217): NCBI GI NO: 15217814 NR Description: CONSTANS B-box zinc finger family protein
  misc_feature (41)..(217): NCBI GI NO: 30685731 NR Description: CONSTANS B-box zinc finger family protein
  misc_feature (41)..(188): NCBI GI NO: 17432968 NR Description: Zinc finger protein constans-like 9
  misc_feature (100)..(217): NCBI GI NO: 15227152 NR Description: CONSTANS B-box zinc finger family protein
  misc_feature (1)..(217): NCBI GI NO: 7489605 NR Description: zinc-finger protein S3574 [imported] - rice
  misc_feature (170)..(217): NCBI GI NO: 15238918 NR Description: CONSTANS B-box zinc finger family protein
  misc_feature (161)..(216): NCBI GI NO: 38175538 NR Description: zinc-finger protein C60910-like
  misc_feature (173)..(217): NCBI GI NO: 15231491 NR Description: CONSTANS B-box zinc finger family protein
  misc_feature (122)..(218): NCBI GI NO: 7522220 NR Description: zinc-finger protein C60910 [imported] - rice
  misc_feature (173)..(217): NCBI GI NO: 17433065 NR Description: Zinc finger protein constans-like 12
MLMQQTPFTSLLMLPNSESEFDSRKSNDNNGYGTEAGDLLWNYNPAYQPPQVWDFQLQKSRDCHEPRVVTFDGLEVPKLFQDEHNMKYSTIGDDIDILSRNNQSDQSSSSHAKKKEENNKKAKGGLSSESKLFESIPYNGTNNVVVMEHLVGGNENVGTLTARVSLEELAKNRGDAMLRYKEKKKTRRYDKHIRYESRKARADTRKRVRGRFVKASDVQA

SEQ ID NO: 10762 - protein, 218 aa, Glycine max
  peptide (1)..(218): Ceres Seq. ID no. 14313077
  misc_feature (177)..(215): Pfam Name: Pfam Description:  CCT motif
  misc_feature (10)..(215): NCBI GI NO: 15217814 NR Description: CONSTANS B-box zinc finger family protein
  misc_feature (39)..(215): NCBI GI NO: 30685731 NR Description: CONSTANS B-box zinc finger family protein
  misc_feature (39)..(186): NCBI GI NO: 17432968 NR Description: Zinc finger protein constans-like 9
  misc_feature (98)..(215): NCBI GI NO: 15227152 NR Description: CONSTANS B-box zinc finger family protein
  misc_feature (1)..(215): NCBI GI NO: 7489605 NR Description: zinc-finger protein S3574 [imported] - rice
  misc_feature (168)..(215): NCBI GI NO: 15238918 NR Description: CONSTANS B-box zinc finger family protein
  misc_feature (159)..(214): NCBI GI NO: 38175538 NR Description: zinc-finger protein C60910-like
  misc_feature (171)..(215): NCBI GI NO: 15231491 NR Description: CONSTANS B-box zinc finger family protein
  misc_feature (120)..(216): NCBI GI NO: 7522220 NR Description: zinc-finger protein C60910 [imported] - rice
  misc_feature (171)..(215): NCBI GI NO: 17433065 NR Description: Zinc finger protein constans-like 12
MQQTPFTSLLMLPNSESEFDSRKSNDNNGYGTEAGDLLWNYNPAYQPPQVWDFQLQKSRDCHEPRVVTFDGLEVPKLFQDEHNMKYSTIGDDIDILSRNNQSDQSSSSHAKKKEENNKKAKGGLSSESKLFESIPYNGTNNVVVMEHLVGGNENVGTLTARVSLEELAKNRGDAMLRYKEKKKTRRYDKHIRYESRKARADTRKRVRGRFVKASDVQA

SEQ ID NO: 10763 - DNA, 1502 bp, Glycine max
  misc_feature (1)..(1502): Ceres Seq. ID no. 14312176
atccctctcggtgctgtgtttagcttccttcttcttcttcctctttcttcttcttctgctgcacccacaaatcaaaaccccccttttccaacccaatttttctccataaaccctagattcaacgaacccgccgaccaagctcgaacctcacgtcgcaaaaaaacacttcttttcccctctccgaggttgtcgtgtcggagcatagccatgttgttccctcgaggaaattgatgatttttcataacattggggtctcgttttgcttgtggggtcaccttgaaggagggaaaagtaacgagctttggggctgaatcgtggtgggtctgttgagtatgcatagatctggagctacgatggcgtggaacgtgttcaagttctgcactgctctgcgtggattgggctcgatcatgatcctgttggttcttggcgttgttggtgccacttactatgctgttgttttgaccaattatggccctgctttgtatgctggaggacttgattctcttgttgccttggcagtgttgatcttgtttcatagcttgttggttatgctgttgtggagttacttttctgttgtttttaccgatccggggagtgtccctccaaactggaagcctacaattgatgaggaaaggggagaggctgatccgttggttgggacagagtttagtaatctgccgtctgatcccaatccacgggttcggtactgtcggaagtgcaatcagctcaagccgcctcgatgccatcattgttcagtttgtgggcgctgtgttttgaagatggaccaccattgtgtgtgggtagtcaactgtgtcggggctctaaattacaaatatttccttcttttcttgttctacacttttcttgagacgactctagtgactgcatccttgctgcctcatttcatagcattctttagtgatggagaaattcctggaacacctggctctcttgctacaacttttcttgctttcgttttaaacctggcctttgcactgagcgtcttaggatttctcatcatgcacatatctttggtggctgctaatacgaccactattgaggcatatgagaagaaaactactccaaaatggcgttatgaccttggtcgtcgaaaaaattttgagcaggtttttgggatggacaagaagtactggttcatccctgcttattcagacgaagatatacgaaagatgccagctctacaaggtcttgactatccttcaaaacctgacttcgattcccaatagttctaaaagctaatatatatccacatcatgtaacaaaagtcatggagactctccacaaccctctacttcactctctaacacaatgtagcgtggagcaatggggggcagggtggtgtgatgctggtttgaggggctaatgtgtttatgttcccataatgataggaactgttttttgtcaagcaatgcaattttctcacctttccttttattcaaattgagtgaaatagcaatttttagtgctggaatttattctct

SEQ ID NO: 10764 - protein, 304 aa, Glycine max
  peptide (1)..(304): Ceres Seq. ID no. 14312177
  misc_feature (117)..(179): Pfam Name: Pfam Description:  DHHC zinc finger domain
  misc_feature (1)..(304): NCBI GI NO: 22331887 NR Description: DHHC-type zinc finger domain-containing protein
  misc_feature (149)..(304): NCBI GI NO: 11358343 NR Description: hypothetical protein T4C21
  misc_feature (8)..(126): NCBI GI NO: 11358343 NR Description: hypothetical protein T4C21
  misc_feature (8)..(304): NCBI GI NO: 21593364 NR Description: unknown [Arabidopsis thaliana]
  misc_feature (8)..(304): NCBI GI NO: 18416000 NR Description: DHHC-type zinc finger domain-containing protein
  misc_feature (7)..(304): NCBI GI NO: 7486880 NR Description: hypothetical protein T12H17
  misc_feature (73)..(229): NCBI GI NO: 18411456 NR Description: DHHC-type zinc finger domain-containing protein
  misc_feature (215)..(266): NCBI GI NO: 18411456 NR Description: DHHC-type zinc finger domain-containing protein
  misc_feature (1)..(304): NCBI GI NO: 29791459 NR Description: Similar to RIKEN cDNA 5033406L14 gene
  misc_feature (10)..(304): NCBI GI NO: 31560054 NR Description: RIKEN cDNA 5033406L14 [Mus musculus]
MHRSGATMAWNVFKFCTALRGLGSIMILLVLGVVGATYYAVVLTNYGPALYAGGLDSLVALAVLILFHSLLVMLLWSYFSVVFTDPGSVPPNWKPTIDEERGEADPLVGTEFSNLPSDPNPRVRYCRKCNQLKPPRCHHCSVCGRCVLKMDHHCVWVVNCVGALNYKYFLLFLFYTFLETTLVTASLLPHFIAFFSDGEIPGTPGSLATTFLAFVLNLAFALSVLGFLIMHISLVAANTTTIEAYEKKTTPKWRYDLGRRKNFEQVFGMDKKYWFIPAYSDEDIRKMPALQGLDYPSKPDFDSQ

SEQ ID NO: 10765 - protein, 297 aa, Glycine max
  peptide (1)..(297): Ceres Seq. ID no. 14312178
  misc_feature (110)..(172): Pfam Name: Pfam Description:  DHHC zinc finger domain
  misc_feature (1)..(297): NCBI GI NO: 22331887 NR Description: DHHC-type zinc finger domain-containing protein
  misc_feature (142)..(297): NCBI GI NO: 11358343 NR Description: hypothetical protein T4C21
  misc_feature (1)..(119): NCBI GI NO: 11358343 NR Description: hypothetical protein T4C21
  misc_feature (1)..(297): NCBI GI NO: 21593364 NR Description: unknown [Arabidopsis thaliana]
  misc_feature (1)..(297): NCBI GI NO: 18416000 NR Description: DHHC-type zinc finger domain-containing protein
  misc_feature (1)..(297): NCBI GI NO: 7486880 NR Description: hypothetical protein T12H17
  misc_feature (66)..(222): NCBI GI NO: 18411456 NR Description: DHHC-type zinc finger domain-containing protein
  misc_feature (208)..(259): NCBI GI NO: 18411456 NR Description: DHHC-type zinc finger domain-containing protein
  misc_feature (1)..(297): NCBI GI NO: 29791459 NR Description: Similar to RIKEN cDNA 5033406L14 gene
  misc_feature (3)..(297): NCBI GI NO: 31560054 NR Description: RIKEN cDNA 5033406L14 [Mus musculus]
MAWNVFKFCTALRGLGSIMILLVLGVVGATYYAVVLTNYGPALYAGGLDSLVALAVLILFHSLLVMLLWSYFSVVFTDPGSVPPNWKPTIDEERGEADPLVGTEFSNLPSDPNPRVRYCRKCNQLKPPRCHHCSVCGRCVLKMDHHCVWVVNCVGALNYKYFLLFLFYTFLETTLVTASLLPHFIAFFSDGEIPGTPGSLATTFLAFVLNLAFALSVLGFLIMHISLVAANTTTIEAYEKKTTPKWRYDLGRRKNFEQVFGMDKKYWFIPAYSDEDIRKMPALQGLDYPSKPDFDSQ

SEQ ID NO: 10766 - protein, 279 aa, Glycine max
  peptide (1)..(279): Ceres Seq. ID no. 14312179
  misc_feature (92)..(154): Pfam Name: Pfam Description:  DHHC zinc finger domain
  misc_feature (1)..(279): NCBI GI NO: 22331887 NR Description: DHHC-type zinc finger domain-containing protein
  misc_feature (124)..(279): NCBI GI NO: 11358343 NR Description: hypothetical protein T4C21
  misc_feature (1)..(101): NCBI GI NO: 11358343 NR Description: hypothetical protein T4C21
  misc_feature (1)..(279): NCBI GI NO: 21593364 NR Description: unknown [Arabidopsis thaliana]
  misc_feature (1)..(279): NCBI GI NO: 18416000 NR Description: DHHC-type zinc finger domain-containing protein
  misc_feature (1)..(279): NCBI GI NO: 7486880 NR Description: hypothetical protein T12H17
  misc_feature (48)..(204): NCBI GI NO: 18411456 NR Description: DHHC-type zinc finger domain-containing protein
  misc_feature (190)..(241): NCBI GI NO: 18411456 NR Description: DHHC-type zinc finger domain-containing protein
  misc_feature (1)..(279): NCBI GI NO: 29791459 NR Description: Similar to RIKEN cDNA 5033406L14 gene
  misc_feature (1)..(279): NCBI GI NO: 31560054 NR Description: RIKEN cDNA 5033406L14 [Mus musculus]
MILLVLGVVGATYYAVVLTNYGPALYAGGLDSLVALAVLILFHSLLVMLLWSYFSVVFTDPGSVPPNWKPTIDEERGEADPLVGTEFSNLPSDPNPRVRYCRKCNQLKPPRCHHCSVCGRCVLKMDHHCVWVVNCVGALNYKYFLLFLFYTFLETTLVTASLLPHFIAFFSDGEIPGTPGSLATTFLAFVLNLAFALSVLGFLIMHISLVAANTTTIEAYEKKTTPKWRYDLGRRKNFEQVFGMDKKYWFIPAYSDEDIRKMPALQGLDYPSKPDFDSQ

SEQ ID NO: 10767 - DNA, 1338 bp, Glycine max
  misc_feature (1)..(1338): Ceres Seq. ID no. 15172430
gacacttcccagtttcaacttcatgcctcagtgaatttctctgcaattttgctcccaaaaatttcatctctcgccattgccgtaggagagcacttcaattttctctccaataagacaattcgttctttcccttctcaatttccggcgagttctcccaatctgtaatttgcccccactctctctattcatcttactgttaccagaaagttggaatatcctccctcttcaatttctcgtaagattcatcgatcacgaacttatattgatttcgctattcttacactgatcttatttttcagtcgattttgttctgcaacatttatcgcttccagaatccagatctggatggacatgaaccatcgtttgcatttggggcaaccttgatttgggttttgaagtgctttatggaaactggggtctctaaatttttaaatttttgtctaatgacgagtggcgtgcctagatttgagtaactgggtcgctgctacagttgtggaagtttgagaattgggcttcgatttgtttgaggaagtttgtcgggtcggcgtcatgttctatggttcggtggtatgggacccttggcttattgttgctcagattgtgtgtcttcaatgtttgtactatatcaccctggggttgttcttgtcgatacttgttggcacacgtgtgtctcggttgagtctcgtgtatttctttgactatgttgcgattactacctctaccgttactggttggtgtgttattgcttcgtttctgctcagctcagttgcaggggcggtatatgtgttttgtttgattgaaagatcaaagaagtgcttggatttttcagccacagtctacattgtccatctttttatatgcattgtgtatgggggttggccctcatctataacatggtggattgtgaatggtactggaattgcagtgatggctttgctcggtgaacgtctgtgcatgaagcgtgaactccaggagatatcattgacacgatttcggtcaaatgtttgattggtagaaggtacttttgaatacaagaaacaagtgctgcaggatggcaactacttttacttctatatattggatgatcatgatcttcaagatgaatcccacgaagtgaatagttctattctgccattgaaagacctgcatttattttctattctttagttggaatagaattgaaacatatataaccagacgagactaagtatataattttacaggaatttccggaagtcttattgtaattttattctttttacccttttgtgagttttcggatctgtttacaatctcatatgttacctctttctatcccattacttttaatgaggttgt

SEQ ID NO: 10768 - protein, 152 aa, Glycine max
  peptide (1)..(152): Ceres Seq. ID no. 15172431
  misc_feature (1)..(152): NCBI GI NO: 18412584 NR Description: expressed protein [Arabidopsis thaliana]
  misc_feature (1)..(151): NCBI GI NO: 12324600 NR Description: unknown protein; 19658-19089
  misc_feature (3)..(152): NCBI GI NO: 11561813 NR Description: dJ453C12
  misc_feature (3)..(152): NCBI GI NO: 23618848 NR Description: chromosome 20 open reading frame 169
  misc_feature (3)..(152): NCBI GI NO: 14270398 NR Description: hypothetical protein [Homo sapiens]
  misc_feature (1)..(75): NCBI GI NO: 34912286 NR Description: P0451D05.3
  misc_feature (3)..(152): NCBI GI NO: 12833500 NR Description: unnamed protein product [Mus musculus]
  misc_feature (3)..(152): NCBI GI NO: 34860687 NR Description: similar to chromosome 20 open reading frame 169
  misc_feature (69)..(145): NCBI GI NO: 39586230 NR Description: Hypothetical protein CBG11978
MFYGSVVWDPWLIVAQIVCLQCLYYITLGLFLSILVGTRVSRLSLVYFFDYVAITTSTVTGWCVIASFLLSSVAGAVYVFCLIERSKKCLDFSATVYIVHLFICIVYGGWPSSITWWIVNGTGIAVMALLGERLCMKRELQEISLTRFRSNV

SEQ ID NO: 10769 - DNA, 1220 bp, Glycine max
  misc_feature (1)..(1220): Ceres Seq. ID no. 14316412
agacgcgtcttttatcacattgaattcatccttctgtgttctgtttctttccttttcttcttgggcgaaaccctaatctccccccttcacccttcgtacaccgcgtcgcatctacttccatcttctctcagatccaatctccgattcttgcttcactatcacaagcaaacatgtctgcggctttggatatgaccctcgaagatataattaagaacaacaagaaatcttccctcgccaacaccaggggccgaggccgagcctcgggacccggacccgctcgccgcctccccaaccgtgccgccaatcgcgccgcaccgtatgccgctgccaaggcgccggagacagcttggaaacacgatatgtacgcgaaccagccagtggccgcggcgtatccaggtggtcgagcgtcttccatcgaaacagggactaagctctacatttccaatttggattatggcgtttccaatgatgatattaaggagttgtttcttgaagttggcgacgtgaaacggcatactgttcattatgacaggagtgggagatccaagggtacggcagaagtagtcttctcgcgccgagctgatgctgtagctgcagtgaagaggtacaacaatgttcagctggatgggaaaccaatgaaggtagagattgtggggacgaacatcgctacacatgctgcaccacccgctgtgaatggaacttttggaaacccaactggagttcctagaagtggacaagggagaagtgggtcattaggaaggccacgtggtgggagtagaggtcgtggcagcattcaacggggccggggacgtggaagaggaggtcgtgatgaaaaggtatctgctgaagatcttgatgctgatttggagaagtatcatgctgaggctatgcaattaaactgaaggaaacaacgatgttctgttttattgctattacatttgcggttgttagggccatgttgatggaacaccgccgaattatgtatctttatcacagtcgtgcttttcggaaaggaaaaggataacttagagtgaaaacttttacagttgatatatgtagtttgggattctgttatgaaatatttgttttcgttgggtatgactatgaaatgtggctgaagaaaccgaagtctgcttgtattatgcactccggcttcctttcattggatttaatcatttgtttattcaagtattcaacaagtgggtttggaagtgggaacc

SEQ ID NO: 10770 - protein, 243 aa, Glycine max
  peptide (1)..(243): Ceres Seq. ID no. 14316413
  misc_feature (88)..(158): Pfam Name: a.k.a. RRM, RBD, or RNP domain Pfam Description: RNA recognition motif.
  misc_feature (1)..(243): NCBI GI NO: 21555029 NR Description: transcriptional coactivator-like protein
  misc_feature (1)..(243): NCBI GI NO: 30697310 NR Description: RNA and export factor binding protein, putative
  misc_feature (1)..(243): NCBI GI NO: 9757916 NR Description: RNA and export factor binding protein 2-I-likeprotein
  misc_feature (1)..(243): NCBI GI NO: 30697313 NR Description: RNA and export factor binding protein, putative
  misc_feature (23)..(218): NCBI GI NO: 11358209 NR Description: hypothetical protein T22P11
  misc_feature (23)..(218): NCBI GI NO: 30679669 NR Description: RNA and export factor binding protein, putative
  misc_feature (1)..(218): NCBI GI NO: 33146678 NR Description: putative RNA and export factor binding protein
  misc_feature (1)..(237): NCBI GI NO: 7159945 NR Description: RNA and export factor binding protein 2-I
  misc_feature (1)..(237): NCBI GI NO: 30524924 NR Description: RNA and export factor binding protein 2
  misc_feature (27)..(219): NCBI GI NO: 38175495 NR Description: putative transcriptional coactivator(DIP2)
MSAALDMTLEDIIKNNKKSSLANTRGRGRASGPGPARRLPNRAANRAAPYAAAKAPETAWKHDMYANQPVAAAYPGGRASSIETGTKLYISNLDYGVSNDDIKELFLEVGDVKRHTVHYDRSGRSKGTAEVVFSRRADAVAAVKRYNNVQLDGKPMKVEIVGTNIATHAAPPAVNGTFGNPTGVPRSGQGRSGSLGRPRGGSRGRGSIQRGRGRGRGGRDEKVSAEDLDADLEKYHAEAMQLN

SEQ ID NO: 10771 - protein, 237 aa, Glycine max
  peptide (1)..(237): Ceres Seq. ID no. 14316414
  misc_feature (82)..(152): Pfam Name: a.k.a. RRM, RBD, or RNP domain Pfam Description: RNA recognition motif.
  misc_feature (1)..(237): NCBI GI NO: 21555029 NR Description: transcriptional coactivator-like protein
  misc_feature (1)..(237): NCBI GI NO: 30697310 NR Description: RNA and export factor binding protein, putative
  misc_feature (1)..(237): NCBI GI NO: 9757916 NR Description: RNA and export factor binding protein 2-I-likeprotein
  misc_feature (1)..(237): NCBI GI NO: 30697313 NR Description: RNA and export factor binding protein, putative
  misc_feature (17)..(212): NCBI GI NO: 11358209 NR Description: hypothetical protein T22P11
  misc_feature (17)..(212): NCBI GI NO: 30679669 NR Description: RNA and export factor binding protein, putative
  misc_feature (1)..(212): NCBI GI NO: 33146678 NR Description: putative RNA and export factor binding protein
  misc_feature (1)..(231): NCBI GI NO: 7159945 NR Description: RNA and export factor binding protein 2-I
  misc_feature (1)..(231): NCBI GI NO: 30524924 NR Description: RNA and export factor binding protein 2
  misc_feature (21)..(213): NCBI GI NO: 38175495 NR Description: putative transcriptional coactivator(DIP2)
MTLEDIIKNNKKSSLANTRGRGRASGPGPARRLPNRAANRAAPYAAAKAPETAWKHDMYANQPVAAAYPGGRASSIETGTKLYISNLDYGVSNDDIKELFLEVGDVKRHTVHYDRSGRSKGTAEVVFSRRADAVAAVKRYNNVQLDGKPMKVEIVGTNIATHAAPPAVNGTFGNPTGVPRSGQGRSGSLGRPRGGSRGRGSIQRGRGRGRGGRDEKVSAEDLDADLEKYHAEAMQLN

SEQ ID NO: 10772 - protein, 180 aa, Glycine max
  peptide (1)..(180): Ceres Seq. ID no. 14316415
  misc_feature (25)..(95): Pfam Name: a.k.a. RRM, RBD, or RNP domain Pfam Description: RNA recognition motif.
  misc_feature (1)..(180): NCBI GI NO: 21555029 NR Description: transcriptional coactivator-like protein
  misc_feature (1)..(180): NCBI GI NO: 30697310 NR Description: RNA and export factor binding protein, putative
  misc_feature (1)..(180): NCBI GI NO: 9757916 NR Description: RNA and export factor binding protein 2-I-likeprotein
  misc_feature (1)..(180): NCBI GI NO: 30697313 NR Description: RNA and export factor binding protein, putative
  misc_feature (1)..(155): NCBI GI NO: 11358209 NR Description: hypothetical protein T22P11
  misc_feature (1)..(155): NCBI GI NO: 30679669 NR Description: RNA and export factor binding protein, putative
  misc_feature (1)..(155): NCBI GI NO: 33146678 NR Description: putative RNA and export factor binding protein
  misc_feature (1)..(174): NCBI GI NO: 7159945 NR Description: RNA and export factor binding protein 2-I
  misc_feature (1)..(174): NCBI GI NO: 30524924 NR Description: RNA and export factor binding protein 2
  misc_feature (1)..(156): NCBI GI NO: 38175495 NR Description: putative transcriptional coactivator(DIP2)
MYANQPVAAAYPGGRASSIETGTKLYISNLDYGVSNDDIKELFLEVGDVKRHTVHYDRSGRSKGTAEVVFSRRADAVAAVKRYNNVQLDGKPMKVEIVGTNIATHAAPPAVNGTFGNPTGVPRSGQGRSGSLGRPRGGSRGRGSIQRGRGRGRGGRDEKVSAEDLDADLEKYHAEAMQLN

SEQ ID NO: 10773 - DNA, 1312 bp, Glycine max
  misc_feature (1)..(1312): Ceres Seq. ID no. 14316436
acttcatttcactcacccctttaactgccatccattctttctctcttgaggggcaggggtaccacctcaaagaatatcctctttgatccctttctctatttccttttctttattattattatataataacaccctctaaatacttcctttacccctctttctctctctcatcttaaacacaaacaaatatactactacttcaaactttgatatgcaactggcggcagaactccaacgcacccatcaccgccaccaaaggcaaaggcaacaacaggacaccacccccatgtgccgccaaatccagctcactatctccgatcacaccgtcgccggagacgccgtcgctgacgacggcgaggatctcttcattccgcccctcaacttcgccatggttgataatggcattttccgctccggcttccccgaacccgccaacttctccttcctccaaaccctcggccttcgttccatcatatatctgtgtcctgagccgtatccggaggccaacatggagttcctcaagtcaaatgggatcaagctttttcagtttgggattgagggccataaggagccttttgtgaacatcccagaggacacaatccgtgaagcactagaagttgttcttgatgtcaggaaccacccagttataattcactgtaagcggggaaagcaccgaacaggttgcttggtaggatgctatagaaaattgcaaaaatggtgcttgtcatccgtctttgatgaataccaacgctttgcagccgccaaagcaagagtttcagatcagaggttcgtagagttgtttgatatttccagcatgaaacatttgcccatacccttttcatgtttgaagaggtaacatataccaagctatgctgagttgggtttactttctttagtttgtgaaagtgaagccaaggttcttcctttgaataaataggaaaaggtgatgaactccttcaatgcattgcagcggcaaaggaataattcttctcccattttcaaaataagacaagaaaattctaggaatagtagagcattacctgtatttgtatgtgttaaaattctgccctatatttcccttctctccctacaattggcccttagtgtacctcaccaccttttgtcctattttctttctctttatttttatgtttttctttgctgctccccattcatcaacaatgagtgtagatatatcttgattttttctcgaggctcagagaaattcaagaaggctacaaaaatgacttgtttgtctacccaaaatcttggtgggtagtaaagcagaggaacttataaaattttatttgct

SEQ ID NO: 10774 - protein, 214 aa, Glycine max
  peptide (1)..(214): Ceres Seq. ID no. 14316437
  misc_feature (53)..(211): Pfam Name: Pfam Description:  Tyrosine phosphatase family
  misc_feature (48)..(211): NCBI GI NO: 15220383 NR Description: unkown protein [Arabidopsis thaliana]
  misc_feature (48)..(214): NCBI GI NO: 18412419 NR Description: expressed protein [Arabidopsis thaliana]
  misc_feature (48)..(214): NCBI GI NO: 15225761 NR Description: expressed protein [Arabidopsis thaliana]
  misc_feature (120)..(214): NCBI GI NO: 30102538 NR Description: At2g32960 [Arabidopsis thaliana]
  misc_feature (48)..(119): NCBI GI NO: 30102538 NR Description: At2g32960 [Arabidopsis thaliana]
  misc_feature (48)..(214): NCBI GI NO: 7487406 NR Description: hypothetical protein T24M8
  misc_feature (46)..(203): NCBI GI NO: 15232985 NR Description: expressed protein [Arabidopsis thaliana]
  misc_feature (41)..(203): NCBI GI NO: 21553927 NR Description: unknown [Arabidopsis thaliana]
  misc_feature (41)..(203): NCBI GI NO: 15237359 NR Description: expressed protein [Arabidopsis thaliana]
  misc_feature (53)..(205): NCBI GI NO: 6324296 NR Description: Synthetic interaction with Whi2; Siw14p
MQLAAELQRTHHRHQRQRQQQDTTPMCRQIQLTISDHTVAGDAVADDGEDLFIPPLNFAMVDNGIFRSGFPEPANFSFLQTLGLRSIIYLCPEPYPEANMEFLKSNGIKLFQFGIEGHKEPFVNIPEDTIREALEVVLDVRNHPVIIHCKRGKHRTGCLVGCYRKLQKWCLSSVFDEYQRFAAAKARVSDQRFVELFDISSMKHLPIPFSCLKR

SEQ ID NO: 10775 - protein, 189 aa, Glycine max
  peptide (1)..(189): Ceres Seq. ID no. 14316438
  misc_feature (28)..(186): Pfam Name: Pfam Description:  Tyrosine phosphatase family
  misc_feature (23)..(186): NCBI GI NO: 15220383 NR Description: unkown protein [Arabidopsis thaliana]
  misc_feature (23)..(189): NCBI GI NO: 18412419 NR Description: expressed protein [Arabidopsis thaliana]
  misc_feature (23)..(189): NCBI GI NO: 15225761 NR Description: expressed protein [Arabidopsis thaliana]
  misc_feature (95)..(189): NCBI GI NO: 30102538 NR Description: At2g32960 [Arabidopsis thaliana]
  misc_feature (23)..(94): NCBI GI NO: 30102538 NR Description: At2g32960 [Arabidopsis thaliana]
  misc_feature (23)..(189): NCBI GI NO: 7487406 NR Description: hypothetical protein T24M8
  misc_feature (21)..(178): NCBI GI NO: 15232985 NR Description: expressed protein [Arabidopsis thaliana]
  misc_feature (16)..(178): NCBI GI NO: 21553927 NR Description: unknown [Arabidopsis thaliana]
  misc_feature (16)..(178): NCBI GI NO: 15237359 NR Description: expressed protein [Arabidopsis thaliana]
  misc_feature (28)..(180): NCBI GI NO: 6324296 NR Description: Synthetic interaction with Whi2; Siw14p
MCRQIQLTISDHTVAGDAVADDGEDLFIPPLNFAMVDNGIFRSGFPEPANFSFLQTLGLRSIIYLCPEPYPEANMEFLKSNGIKLFQFGIEGHKEPFVNIPEDTIREALEVVLDVRNHPVIIHCKRGKHRTGCLVGCYRKLQKWCLSSVFDEYQRFAAAKARVSDQRFVELFDISSMKHLPIPFSCLKR

SEQ ID NO: 10776 - protein, 155 aa, Glycine max
  peptide (1)..(155): Ceres Seq. ID no. 14316439
  misc_feature (1)..(152): Pfam Name: Pfam Description:  Tyrosine phosphatase family
  misc_feature (1)..(152): NCBI GI NO: 15220383 NR Description: unkown protein [Arabidopsis thaliana]
  misc_feature (1)..(155): NCBI GI NO: 18412419 NR Description: expressed protein [Arabidopsis thaliana]
  misc_feature (1)..(155): NCBI GI NO: 15225761 NR Description: expressed protein [Arabidopsis thaliana]
  misc_feature (61)..(155): NCBI GI NO: 30102538 NR Description: At2g32960 [Arabidopsis thaliana]
  misc_feature (1)..(60): NCBI GI NO: 30102538 NR Description: At2g32960 [Arabidopsis thaliana]
  misc_feature (1)..(155): NCBI GI NO: 7487406 NR Description: hypothetical protein T24M8
  misc_feature (1)..(144): NCBI GI NO: 15232985 NR Description: expressed protein [Arabidopsis thaliana]
  misc_feature (1)..(144): NCBI GI NO: 21553927 NR Description: unknown [Arabidopsis thaliana]
  misc_feature (1)..(144): NCBI GI NO: 15237359 NR Description: expressed protein [Arabidopsis thaliana]
  misc_feature (1)..(146): NCBI GI NO: 6324296 NR Description: Synthetic interaction with Whi2; Siw14p
MVDNGIFRSGFPEPANFSFLQTLGLRSIIYLCPEPYPEANMEFLKSNGIKLFQFGIEGHKEPFVNIPEDTIREALEVVLDVRNHPVIIHCKRGKHRTGCLVGCYRKLQKWCLSSVFDEYQRFAAAKARVSDQRFVELFDISSMKHLPIPFSCLKR

SEQ ID NO: 10777 - DNA, 1265 bp, Glycine max
  misc_feature (1)..(1265): Ceres Seq. ID no. 15177710
gtattatacgtccccttgtcctgcccctgcccctataccatagaacattagtacccccacacacacccctcctctatctttcactattattgccacacaaatcaattaactgaatgcttagagagagaaagaggagaaggagtagtgataaggtgatcatagagcatattataagagagtgaaaactaatggaggttggcctcaagaaggagaacatggggtttgaggaaactgagttaaggcttggactgcctggaaacggaggcactgaagaagtgctcatcaggaagaggggtttctctgagactgaaactggtcatgaagatgagtctgccaccactgtggatttgatgcttaatctttcttctaaggaggccgcaaccactgctgctgctgctgcagatccaactgataagcacaagactttgcctaaggagaagacccttctgccagcagatcctgctaagcctccagccaagacgcaggtggtgggttggccacctgtgcggtccttccggaagaacatgttggctgtgcaaaagagcgttggagaagagagcgagaagaacagcagccctaatgcaagctttgtcaaagttagcatggatggagcaccttaccttcgcaaagtggacttgaagatgtacaagagttaccgagagctctctgattctttaggcaaaatgttcagctccttcacctttggcaattgtgaatcccaaggaatgaaggatttcatgaatgagagcaagctgaatgatctcttgaacagctctgattatgtcccaacctatgaggacaaggatggtgactggatgcttgtcggtgatgtcccatgggagatgtttgttgaatcatgcaagcgtttacgcatcatgaaaggaaaggaggctattggtcttggtcttgcaccaagagccatggcaaaatgcaagaacaggagctagactagtcgcacaattcatgacctgccccatcctttgtaattgtggtgcccagttggcttagtaactaaagtaaggataagctgcagcagacacggatggacattgcagggtgttgaattatagttaatttgtgtatcattatggtttgttataatatttcaaacaaaacaatgagatgcatgtctaattaagtactaattatgaacaggaacataatgactctcaatcatgttgttagacttggctttcttatatatctttgcttgttctgtgtgagtgcttgcttaataataattttaagatgtgtttgtctgttgt

SEQ ID NO: 10778 - protein, 252 aa, Glycine max
  peptide (1)..(252): Ceres Seq. ID no. 15177711
  misc_feature (10)..(242): Pfam Name: Pfam Description:  AUX/IAA family
  misc_feature (10)..(252): NCBI GI NO: 114734 NR Description: AUXIN-INDUCED PROTEIN AUX28
  misc_feature (10)..(252): NCBI GI NO: 20385508 NR Description: auxin-regulated protein
  misc_feature (1)..(239): NCBI GI NO: 20269061 NR Description: aux/IAA protein
  misc_feature (7)..(252): NCBI GI NO: 4887020 NR Description: Nt-iaa28 deduced protein [Nicotiana tabacum]
  misc_feature (5)..(252): NCBI GI NO: 5139697 NR Description: expressed in cucumber hypocotyls [Cucumis sativus]
  misc_feature (10)..(252): NCBI GI NO: 21593352 NR Description: indoleacetic acid (IAA)-inducible gene (IAA7)
  misc_feature (10)..(252): NCBI GI NO: 15228943 NR Description: auxin-responsive protein IAA7
  misc_feature (10)..(252): NCBI GI NO: 22328628 NR Description: auxin-responsive protein, putative
  misc_feature (89)..(251): NCBI GI NO: 22725714 NR Description: auxin-responsive protein IAA1; MjAux/IAA1
  misc_feature (10)..(252): NCBI GI NO: 15229343 NR Description: auxin-responsive protein IAA16
MEVGLKKENMGFEETELRLGLPGNGGTEEVLIRKRGFSETETGHEDESATTVDLMLNLSSKEAATTAAAAADPTDKHKTLPKEKTLLPADPAKPPAKTQVVGWPPVRSFRKNMLAVQKSVGEESEKNSSPNASFVKVSMDGAPYLRKVDLKMYKSYRELSDSLGKMFSSFTFGNCESQGMKDFMNESKLNDLLNSSDYVPTYEDKDGDWMLVGDVPWEMFVESCKRLRIMKGKEAIGLGLAPRAMAKCKNRS

SEQ ID NO: 10779 - protein, 243 aa, Glycine max
  peptide (1)..(243): Ceres Seq. ID no. 15177712
  misc_feature (1)..(233): Pfam Name: Pfam Description:  AUX/IAA family
  misc_feature (1)..(243): NCBI GI NO: 114734 NR Description: AUXIN-INDUCED PROTEIN AUX28
  misc_feature (1)..(243): NCBI GI NO: 20385508 NR Description: auxin-regulated protein
  misc_feature (1)..(230): NCBI GI NO: 20269061 NR Description: aux/IAA protein
  misc_feature (1)..(243): NCBI GI NO: 4887020 NR Description: Nt-iaa28 deduced protein [Nicotiana tabacum]
  misc_feature (1)..(243): NCBI GI NO: 5139697 NR Description: expressed in cucumber hypocotyls [Cucumis sativus]
  misc_feature (1)..(243): NCBI GI NO: 21593352 NR Description: indoleacetic acid (IAA)-inducible gene (IAA7)
  misc_feature (1)..(243): NCBI GI NO: 15228943 NR Description: auxin-responsive protein IAA7
  misc_feature (1)..(243): NCBI GI NO: 22328628 NR Description: auxin-responsive protein, putative
  misc_feature (80)..(242): NCBI GI NO: 22725714 NR Description: auxin-responsive protein IAA1; MjAux/IAA1
  misc_feature (1)..(243): NCBI GI NO: 15229343 NR Description: auxin-responsive protein IAA16
MGFEETELRLGLPGNGGTEEVLIRKRGFSETETGHEDESATTVDLMLNLSSKEAATTAAAAADPTDKHKTLPKEKTLLPADPAKPPAKTQVVGWPPVRSFRKNMLAVQKSVGEESEKNSSPNASFVKVSMDGAPYLRKVDLKMYKSYRELSDSLGKMFSSFTFGNCESQGMKDFMNESKLNDLLNSSDYVPTYEDKDGDWMLVGDVPWEMFVESCKRLRIMKGKEAIGLGLAPRAMAKCKNRS

SEQ ID NO: 10780 - protein, 198 aa, Glycine max
  peptide (1)..(198): Ceres Seq. ID no. 15177713
  misc_feature (1)..(188): Pfam Name: Pfam Description:  AUX/IAA family
  misc_feature (1)..(198): NCBI GI NO: 114734 NR Description: AUXIN-INDUCED PROTEIN AUX28
  misc_feature (1)..(198): NCBI GI NO: 20385508 NR Description: auxin-regulated protein
  misc_feature (1)..(185): NCBI GI NO: 20269061 NR Description: aux/IAA protein
  misc_feature (1)..(198): NCBI GI NO: 4887020 NR Description: Nt-iaa28 deduced protein [Nicotiana tabacum]
  misc_feature (1)..(198): NCBI GI NO: 5139697 NR Description: expressed in cucumber hypocotyls [Cucumis sativus]
  misc_feature (1)..(198): NCBI GI NO: 21593352 NR Description: indoleacetic acid (IAA)-inducible gene (IAA7)
  misc_feature (1)..(198): NCBI GI NO: 15228943 NR Description: auxin-responsive protein IAA7
  misc_feature (1)..(198): NCBI GI NO: 22328628 NR Description: auxin-responsive protein, putative
  misc_feature (35)..(197): NCBI GI NO: 22725714 NR Description: auxin-responsive protein IAA1; MjAux/IAA1
  misc_feature (1)..(198): NCBI GI NO: 15229343 NR Description: auxin-responsive protein IAA16
MLNLSSKEAATTAAAAADPTDKHKTLPKEKTLLPADPAKPPAKTQVVGWPPVRSFRKNMLAVQKSVGEESEKNSSPNASFVKVSMDGAPYLRKVDLKMYKSYRELSDSLGKMFSSFTFGNCESQGMKDFMNESKLNDLLNSSDYVPTYEDKDGDWMLVGDVPWEMFVESCKRLRIMKGKEAIGLGLAPRAMAKCKNRS

SEQ ID NO: 10781 - DNA, 1424 bp, Glycine max
  misc_feature (1)..(1424): Ceres Seq. ID no. 15177799
ccctctcagcatctgtgtatttttccgttgcaattgcaacctccctcttcacactttccctcctccgtcttcttcctctgcacgcattttccgctgcagcaactccaaagccgccagctcagcatcctcgaaatcaggtgttgcaatctggcatggatttcctctggagcgagaatgcgacgacgccgcgcgcctcgcatttctccgtcgcgatctgcttcgccttcgccagtttcgcggccaggttcttccttgacagattcgtctttcgcagtttggccattaggatgttgacaaagggcagagctccttcacgtattactaaggaaatgcaagtaaagattggaaaatgctcagagtcaatgtggaagctaacatattatgctgcagttgaagcatttgttcttaaaattacctaccatgaaccctggttcactaatacgaagttatacttcaatgactggccaaatcatgagttgaagagtcccctagtgttgtactacatgtgccagtgtgggttctacatatatagcattgctgctattctcacatgggagactcgaaggaaggatttttcagtgatgtttactcaccatgtaattactgttttactgattgggatttcatatctaacaagtttttttagggttggctccataatcctcgcccttcatgatgcaagtgacgtattcatggaagctgccaaggttttcaagtattctggaagggagtttggtgcaagtgtgtgttttggattctttgctgtttcgtggctcatactgcggctaattttctttccattttgggttattaaagcaacgagcattgatcttcagcaagtcttaagcctgtcagagggttttcatatgtttctttactatgtttttaatacaatgctcataatgctgctcatcttccatatatattggtggaagctcatttgtgcgatgatcttgaggcagctgaaaaataggggaaaagttggcgaggatataagatcagattcagatgatgactgaatagacgaagaagggttttgttgagttttctttgctcccgctagttggtggtggtagctctgatggatactgtttttgacttgtctatagatttctaggagttcagttggttaatacaaccagtggaggagatctgaattttcgttagtttcaaaattttcattgattaccaagtaaaaagggagtaggaaaccgtccaaagcatattttgattcttatatttttgctgtataaatgataggcattcctgtataattgtttttccaaacgaacccgtttaggttaactaggggttgaatgacaagtggcttataacaaatatgaaggagaaagaaaaacttacagtcattctacttttgtagttgcgcttttgaggaataagccgcagactggtgcattgtactg

SEQ ID NO: 10782 - protein, 338 aa, Glycine max
  peptide (1)..(338): Ceres Seq. ID no. 15177800
  misc_feature (135)..(338): Pfam Name: LAG1 Pfam Description: Longevity-assurance protein
  misc_feature (66)..(338): NCBI GI NO: 15230323 NR Description: longevity factor-related protein
  misc_feature (66)..(338): NCBI GI NO: 7658241 NR Description: LAG1 homolog 2 [Arabidopsis thaliana]
  misc_feature (62)..(338): NCBI GI NO: 34901974 NR Description: unknown protein
  misc_feature (46)..(338): NCBI GI NO: 25518747 NR Description: hypothetical protein F13B4
  misc_feature (53)..(338): NCBI GI NO: 16974114 NR Description: putative resistance protein
  misc_feature (75)..(338): NCBI GI NO: 18404559 NR Description: LAG1 homolog 1 [Arabidopsis thaliana]
  misc_feature (55)..(338): NCBI GI NO: 7688742 NR Description: ASC1 [Lycopersicon esculentum]
  misc_feature (46)..(273): NCBI GI NO: 30683361 NR Description: longevity assurance protein -related
  misc_feature (116)..(338): NCBI GI NO: 21358551 NR Description: Longevity assurance gene 1 CG3576-PB
  misc_feature (105)..(338): NCBI GI NO: 31241781 NR Description: ENSANGP00000012836 [Anopheles gambiae]
LSASVYFSVAIATSLFTLSLLRLLPLHAFSAAATPKPPAQHPRNQVLQSGMDFLWSENATTPRASHFSVAICFAFASFAARFFLDRFVFRSLAIRMLTKGRAPSRITKEMQVKIGKCSESMWKLTYYAAVEAFVLKITYHEPWFTNTKLYFNDWPNHELKSPLVLYYMCQCGFYIYSIAAILTWETRRKDFSVMFTHHVITVLLIGISYLTSFFRVGSIILALHDASDVFMEAAKVFKYSGREFGASVCFGFFAVSWLILRLIFFPFWVIKATSIDLQQVLSLSEGFHMFLYYVFNTMLIMLLIFHIYWWKLICAMILRQLKNRGKVGEDIRSDSDDD

SEQ ID NO: 10783 - protein, 288 aa, Glycine max
  peptide (1)..(288): Ceres Seq. ID no. 15177801
  misc_feature (85)..(288): Pfam Name: LAG1 Pfam Description: Longevity-assurance protein
  misc_feature (16)..(288): NCBI GI NO: 15230323 NR Description: longevity factor-related protein
  misc_feature (16)..(288): NCBI GI NO: 7658241 NR Description: LAG1 homolog 2 [Arabidopsis thaliana]
  misc_feature (12)..(288): NCBI GI NO: 34901974 NR Description: unknown protein
  misc_feature (1)..(288): NCBI GI NO: 25518747 NR Description: hypothetical protein F13B4
  misc_feature (3)..(288): NCBI GI NO: 16974114 NR Description: putative resistance protein
  misc_feature (25)..(288): NCBI GI NO: 18404559 NR Description: LAG1 homolog 1 [Arabidopsis thaliana]
  misc_feature (5)..(288): NCBI GI NO: 7688742 NR Description: ASC1 [Lycopersicon esculentum]
  misc_feature (1)..(223): NCBI GI NO: 30683361 NR Description: longevity assurance protein -related
  misc_feature (66)..(288): NCBI GI NO: 21358551 NR Description: Longevity assurance gene 1 CG3576-PB
  misc_feature (55)..(288): NCBI GI NO: 31241781 NR Description: ENSANGP00000012836 [Anopheles gambiae]
MDFLWSENATTPRASHFSVAICFAFASFAARFFLDRFVFRSLAIRMLTKGRAPSRITKEMQVKIGKCSESMWKLTYYAAVEAFVLKITYHEPWFTNTKLYFNDWPNHELKSPLVLYYMCQCGFYIYSIAAILTWETRRKDFSVMFTHHVITVLLIGISYLTSFFRVGSIILALHDASDVFMEAAKVFKYSGREFGASVCFGFFAVSWLILRLIFFPFWVIKATSIDLQQVLSLSEGFHMFLYYVFNTMLIMLLIFHIYWWKLICAMILRQLKNRGKVGEDIRSDSDDD

SEQ ID NO: 10784 - protein, 243 aa, Glycine max
  peptide (1)..(243): Ceres Seq. ID no. 15177802
  misc_feature (40)..(243): Pfam Name: LAG1 Pfam Description: Longevity-assurance protein
  misc_feature (1)..(243): NCBI GI NO: 15230323 NR Description: longevity factor-related protein
  misc_feature (1)..(243): NCBI GI NO: 7658241 NR Description: LAG1 homolog 2 [Arabidopsis thaliana]
  misc_feature (1)..(243): NCBI GI NO: 34901974 NR Description: unknown protein
  misc_feature (1)..(243): NCBI GI NO: 25518747 NR Description: hypothetical protein F13B4
  misc_feature (1)..(243): NCBI GI NO: 16974114 NR Description: putative resistance protein
  misc_feature (1)..(243): NCBI GI NO: 18404559 NR Description: LAG1 homolog 1 [Arabidopsis thaliana]
  misc_feature (1)..(243): NCBI GI NO: 7688742 NR Description: ASC1 [Lycopersicon esculentum]
  misc_feature (1)..(178): NCBI GI NO: 30683361 NR Description: longevity assurance protein -related
  misc_feature (21)..(243): NCBI GI NO: 21358551 NR Description: Longevity assurance gene 1 CG3576-PB
  misc_feature (10)..(243): NCBI GI NO: 31241781 NR Description: ENSANGP00000012836 [Anopheles gambiae]
MLTKGRAPSRITKEMQVKIGKCSESMWKLTYYAAVEAFVLKITYHEPWFTNTKLYFNDWPNHELKSPLVLYYMCQCGFYIYSIAAILTWETRRKDFSVMFTHHVITVLLIGISYLTSFFRVGSIILALHDASDVFMEAAKVFKYSGREFGASVCFGFFAVSWLILRLIFFPFWVIKATSIDLQQVLSLSEGFHMFLYYVFNTMLIMLLIFHIYWWKLICAMILRQLKNRGKVGEDIRSDSDDD

SEQ ID NO: 10785 - DNA, 1323 bp, Glycine max
  misc_feature (1)..(1323): Ceres Seq. ID no. 14312266
ctgatcgagagacgaaggcagaggaaagatcgcgttatgtggcctcttgtctccttacttgcaaagccggaacagaaatcgcatataaaatgcgaaaagaaatgaattcaatgttcggagatctgcacaggatctctctccgtgtccgttgaactttctttacgccctcctcgtaacataaaaattcagatcccgccaactctgaagacctctattctctttccctcccctttccactttcccgagaaaataaacttttccgtcaattttctctccacggtttccttcttcctcacaatggctccgaacttcgacaatcgaagattcgttctcgctcttcgcattttccttctcctctccttattcttcaacctctcaccgaccttcgctcaggattctctcgtgcagaacgcgaaggaagattccgacgaatctgtggatctcggtcgccgcgccaaaattgcattgaatggtatagagaatgattcgatcctttctcttggcttggactccaccggtcctggactcttcgacgcatttttcgcgagtttttcgatgatccttattggggatgagacgtttataatagcagctctcatggctatgcgtcaccctaagtcaattgtcttgtctggtgcgctcagtgctctgattataatgacagtactttctacagggcttggcaggattgtgcctaatttgatttctaggaagcatacaaatagtgctgctacagttctttatgctttctttgggttaaggttactgtacattgcatggagatcatcagattcaaaatcctcacagaagaaagaaatggaagaagttgaagaaaaactggatggtggacaagggaaaacttcagttaggcgcttcttttcaagattttgtacaccaatatttttggagtcttttattttaacattccttgctgagtggggtgaccgtagccagatagcgacaattgcactggcaacccacaaaaatgcaattggagtagcagttggggccactataggacacaccatctgtacctctctggctgtagtgggaggaagcatgctggcatctaagatttcccaacgctcagtagccactgttggtggcttgctcttcctcggattttctgtatcttcatatttctacccgcctctatgatgaatacaagtgcagagtaatctgattcgtaaaggcttgtggcctttctatcctgctttttccccccctacataattgtctttattgtagattttgttgtacttgttccctaggaaagctcgatactaactggaacatgagattttgaatcccatttttttttgc

SEQ ID NO: 10786 - protein, 286 aa, Glycine max
  peptide (1)..(286): Ceres Seq. ID no. 14312267
  misc_feature (202)..(277): Pfam Name: Pfam Description:  Uncharacterized protein family UPF0016
  misc_feature (15)..(286): NCBI GI NO: 18421551 NR Description: transmembrane protein FT27/PFT27-related
  misc_feature (15)..(266): NCBI GI NO: 9759042 NR Description: transmembrane protein FT27/PFT27-like
  misc_feature (76)..(181): NCBI GI NO: 31240317 NR Description: ENSANGP00000008699 [Anopheles gambiae]
  misc_feature (201)..(285): NCBI GI NO: 31240317 NR Description: ENSANGP00000008699 [Anopheles gambiae]
  misc_feature (171)..(285): NCBI GI NO: 20385488 NR Description: transmembrane protein HTP-1 [Danio rerio]
  misc_feature (76)..(181): NCBI GI NO: 20385488 NR Description: transmembrane protein HTP-1 [Danio rerio]
  misc_feature (90)..(281): NCBI GI NO: 15222613 NR Description: transmembrane protein -related
  misc_feature (90)..(281): NCBI GI NO: 21593636 NR Description: transmembrane protein, putative
  misc_feature (77)..(284): NCBI GI NO: 15221462 NR Description: transmembrane protein -related
  misc_feature (78)..(285): NCBI GI NO: 21357589 NR Description: CG4196-PC [Drosophila melanogaster]
MAPNFDNRRFVLALRIFLLLSLFFNLSPTFAQDSLVQNAKEDSDESVDLGRRAKIALNGIENDSILSLGLDSTGPGLFDAFFASFSMILIGDETFIIAALMAMRHPKSIVLSGALSALIIMTVLSTGLGRIVPNLISRKHTNSAATVLYAFFGLRLLYIAWRSSDSKSSQKKEMEEVEEKLDGGQGKTSVRRFFSRFCTPIFLESFILTFLAEWGDRSQIATIALATHKNAIGVAVGATIGHTICTSLAVVGGSMLASKISQRSVATVGGLLFLGFSVSSYFYPPL

SEQ ID NO: 10787 - protein, 200 aa, Glycine max
  peptide (1)..(200): Ceres Seq. ID no. 14312268
  misc_feature (116)..(191): Pfam Name: Pfam Description:  Uncharacterized protein family UPF0016
  misc_feature (1)..(200): NCBI GI NO: 18421551 NR Description: transmembrane protein FT27/PFT27-related
  misc_feature (1)..(180): NCBI GI NO: 9759042 NR Description: transmembrane protein FT27/PFT27-like
  misc_feature (1)..(95): NCBI GI NO: 31240317 NR Description: ENSANGP00000008699 [Anopheles gambiae]
  misc_feature (115)..(199): NCBI GI NO: 31240317 NR Description: ENSANGP00000008699 [Anopheles gambiae]
  misc_feature (85)..(199): NCBI GI NO: 20385488 NR Description: transmembrane protein HTP-1 [Danio rerio]
  misc_feature (1)..(95): NCBI GI NO: 20385488 NR Description: transmembrane protein HTP-1 [Danio rerio]
  misc_feature (4)..(195): NCBI GI NO: 15222613 NR Description: transmembrane protein -related
  misc_feature (4)..(195): NCBI GI NO: 21593636 NR Description: transmembrane protein, putative
  misc_feature (1)..(198): NCBI GI NO: 15221462 NR Description: transmembrane protein -related
  misc_feature (1)..(199): NCBI GI NO: 21357589 NR Description: CG4196-PC [Drosophila melanogaster]
MILIGDETFIIAALMAMRHPKSIVLSGALSALIIMTVLSTGLGRIVPNLISRKHTNSAATVLYAFFGLRLLYIAWRSSDSKSSQKKEMEEVEEKLDGGQGKTSVRRFFSRFCTPIFLESFILTFLAEWGDRSQIATIALATHKNAIGVAVGATIGHTICTSLAVVGGSMLASKISQRSVATVGGLLFLGFSVSSYFYPPL

SEQ ID NO: 10788 - protein, 186 aa, Glycine max
  peptide (1)..(186): Ceres Seq. ID no. 14312269
  misc_feature (102)..(177): Pfam Name: Pfam Description:  Uncharacterized protein family UPF0016
  misc_feature (1)..(186): NCBI GI NO: 18421551 NR Description: transmembrane protein FT27/PFT27-related
  misc_feature (1)..(166): NCBI GI NO: 9759042 NR Description: transmembrane protein FT27/PFT27-like
  misc_feature (1)..(81): NCBI GI NO: 31240317 NR Description: ENSANGP00000008699 [Anopheles gambiae]
  misc_feature (101)..(185): NCBI GI NO: 31240317 NR Description: ENSANGP00000008699 [Anopheles gambiae]
  misc_feature (71)..(185): NCBI GI NO: 20385488 NR Description: transmembrane protein HTP-1 [Danio rerio]
  misc_feature (1)..(81): NCBI GI NO: 20385488 NR Description: transmembrane protein HTP-1 [Danio rerio]
  misc_feature (1)..(181): NCBI GI NO: 15222613 NR Description: transmembrane protein -related
  misc_feature (1)..(181): NCBI GI NO: 21593636 NR Description: transmembrane protein, putative
  misc_feature (1)..(184): NCBI GI NO: 15221462 NR Description: transmembrane protein -related
  misc_feature (1)..(185): NCBI GI NO: 21357589 NR Description: CG4196-PC [Drosophila melanogaster]
MAMRHPKSIVLSGALSALIIMTVLSTGLGRIVPNLISRKHTNSAATVLYAFFGLRLLYIAWRSSDSKSSQKKEMEEVEEKLDGGQGKTSVRRFFSRFCTPIFLESFILTFLAEWGDRSQIATIALATHKNAIGVAVGATIGHTICTSLAVVGGSMLASKISQRSVATVGGLLFLGFSVSSYFYPPL

SEQ ID NO: 10789 - DNA, 966 bp, Glycine max
  misc_feature (1)..(966): Ceres Seq. ID no. 13594228
gggtacactcaccacacactacacactagtttgtgtttttcgcgccactcagttattcatttagaaagctactgctgagttcacaagtttctcaagcttgatggggacacaaaagtctaatatgtttgatgcacctttcaaatacatggtgcctgaagataaggaaattcccgacagacctttgccatcacattggactccttctatgcaggcatataacacttctgggtctactccaactccctttttaaatcaacaggcagctggttctcacatgcctctctacatgtgggtaaatcaggtaaacaacacactacttcaatccgatgctttgcatgatccaaggatgctctccagtaaacccacagtagctggggattttccttcaactaagaagcagcactgtaatttgatgcttgaaaatgcaagttcaaccaaactgaatcaggatttggagacaggcctagatgcatctgacgctaatgctcaacttgtaaatttggaaaaggatgaaataagaagagaaagaaaaagacagtcaaacagggaatcggcgaggagatcaaggatgcggaaagagaaagaatgtgaagagctacataaacaaatggaaatgcttaaggatgaaaactccgtgctcacacagaggctcaagagtctttctgaggagtgcctggagatctgcaatgaaaacgatgccatcgaggaagagctgattaaaatgtatggaccagaatcaatagcagatctattgctcttcaagcctacctgaccctgttgctggttaaggaagaaagcatcttacaactaatcagaatatattgtttcattttttattagggccagttgaattctgaacttgcttatgtcggcttaggttaaggaaggaaatgtaaggttacaaaaaatagggattattataataaaggatttatgaatgaaaattgtagctaaaaaaaaaaaaaa

SEQ ID NO: 10790 - protein, 223 aa, Glycine max
  peptide (1)..(223): Ceres Seq. ID no. 13594229
  misc_feature (138)..(200): Pfam Name: Pfam Description:  bZIP transcription factor
  misc_feature (117)..(217): NCBI GI NO: 7488453 NR Description: G-box binding factor 1A - rape
  misc_feature (1)..(64): NCBI GI NO: 7488453 NR Description: G-box binding factor 1A - rape
  misc_feature (130)..(217): NCBI GI NO: 9650824 NR Description: common plant regulatory factor 5
  misc_feature (84)..(217): NCBI GI NO: 7488787 NR Description: transcription repressor ROM1 - kidney bean
  misc_feature (117)..(217): NCBI GI NO: 1076447 NR Description: G-box binding factor 1B - rape (fragment)
  misc_feature (1)..(98): NCBI GI NO: 7488675 NR Description: G-box binding factor - soybean
  misc_feature (135)..(202): NCBI GI NO: 7488675 NR Description: G-box binding factor - soybean
  misc_feature (128)..(217): NCBI GI NO: 13236840 NR Description: G-box binding factor bZIP transcription factor
  misc_feature (128)..(217): NCBI GI NO: 629666 NR Description: G-box-binding protein - tomato
  misc_feature (130)..(217): NCBI GI NO: 1169084 NR Description: Light-inducible protein CPRF-3
MGTQKSNMFDAPFKYMVPEDKEIPDRPLPSHWTPSMQAYNTSGSTPTPFLNQQAAGSHMPLYMWVNQVNNTLLQSDALHDPRMLSSKPTVAGDFPSTKKQHCNLMLENASSTKLNQDLETGLDASDANAQLVNLEKDEIRRERKRQSNRESARRSRMRKEKECEELHKQMEMLKDENSVLTQRLKSLSEECLEICNENDAIEEELIKMYGPESIADLLLFKPT

SEQ ID NO: 10791 - protein, 216 aa, Glycine max
  peptide (1)..(216): Ceres Seq. ID no. 13594230
  misc_feature (131)..(193): Pfam Name: Pfam Description:  bZIP transcription factor
  misc_feature (110)..(210): NCBI GI NO: 7488453 NR Description: G-box binding factor 1A - rape
  misc_feature (1)..(57): NCBI GI NO: 7488453 NR Description: G-box binding factor 1A - rape
  misc_feature (123)..(210): NCBI GI NO: 9650824 NR Description: common plant regulatory factor 5
  misc_feature (77)..(210): NCBI GI NO: 7488787 NR Description: transcription repressor ROM1 - kidney bean
  misc_feature (110)..(210): NCBI GI NO: 1076447 NR Description: G-box binding factor 1B - rape (fragment)
  misc_feature (1)..(91): NCBI GI NO: 7488675 NR Description: G-box binding factor - soybean
  misc_feature (128)..(195): NCBI GI NO: 7488675 NR Description: G-box binding factor - soybean
  misc_feature (121)..(210): NCBI GI NO: 13236840 NR Description: G-box binding factor bZIP transcription factor
  misc_feature (121)..(210): NCBI GI NO: 629666 NR Description: G-box-binding protein - tomato
  misc_feature (123)..(210): NCBI GI NO: 1169084 NR Description: Light-inducible protein CPRF-3
MFDAPFKYMVPEDKEIPDRPLPSHWTPSMQAYNTSGSTPTPFLNQQAAGSHMPLYMWVNQVNNTLLQSDALHDPRMLSSKPTVAGDFPSTKKQHCNLMLENASSTKLNQDLETGLDASDANAQLVNLEKDEIRRERKRQSNRESARRSRMRKEKECEELHKQMEMLKDENSVLTQRLKSLSEECLEICNENDAIEEELIKMYGPESIADLLLFKPT

SEQ ID NO: 10792 - protein, 208 aa, Glycine max
  peptide (1)..(208): Ceres Seq. ID no. 13594231
  misc_feature (123)..(185): Pfam Name: Pfam Description:  bZIP transcription factor
  misc_feature (102)..(202): NCBI GI NO: 7488453 NR Description: G-box binding factor 1A - rape
  misc_feature (1)..(49): NCBI GI NO: 7488453 NR Description: G-box binding factor 1A - rape
  misc_feature (115)..(202): NCBI GI NO: 9650824 NR Description: common plant regulatory factor 5
  misc_feature (69)..(202): NCBI GI NO: 7488787 NR Description: transcription repressor ROM1 - kidney bean
  misc_feature (102)..(202): NCBI GI NO: 1076447 NR Description: G-box binding factor 1B - rape (fragment)
  misc_feature (1)..(83): NCBI GI NO: 7488675 NR Description: G-box binding factor - soybean
  misc_feature (120)..(187): NCBI GI NO: 7488675 NR Description: G-box binding factor - soybean
  misc_feature (113)..(202): NCBI GI NO: 13236840 NR Description: G-box binding factor bZIP transcription factor
  misc_feature (113)..(202): NCBI GI NO: 629666 NR Description: G-box-binding protein - tomato
  misc_feature (115)..(202): NCBI GI NO: 1169084 NR Description: Light-inducible protein CPRF-3
MVPEDKEIPDRPLPSHWTPSMQAYNTSGSTPTPFLNQQAAGSHMPLYMWVNQVNNTLLQSDALHDPRMLSSKPTVAGDFPSTKKQHCNLMLENASSTKLNQDLETGLDASDANAQLVNLEKDEIRRERKRQSNRESARRSRMRKEKECEELHKQMEMLKDENSVLTQRLKSLSEECLEICNENDAIEEELIKMYGPESIADLLLFKPT

SEQ ID NO: 10793 - DNA, 1070 bp, Glycine max
  misc_feature (1)..(1070): Ceres Seq. ID no. 14316444
attaaataacccatgtccctgcattagttaaatccttctgctctgcgtcttcttgttcctctcgcccagaatccgagatcaaccctgacccctaaggccaggggtttttctcggcttcttcagattcctgaaatggcgtctgtttcagctttagccaagtacaagctcgtcttcttgggtgaccaatccgtgggcaaaaccagcatcatcactcgcttcatgtacgataaattcgataacacctatcaggctacaattggtattgattttctatcaaaaactatgtatctcgaagatcgaactgttcgactgcagttgtgggatacagctggccaggaaagatttagaagtcttattccaagctacattagggactcatctgtagctgttattgtatatgatgttgcaagccggcagactttcctaaatactgcaaagtggattgaagaggtgcgaacagagagaggcagtgatgtcattattgttcttgttgggaacaaaactgatcttgtcgagaaaagacaagtctctatagaggaaggggaagcaaaagcacgtgagctcaatgtcatgttcattgaaactagtgctaaggctgggtttaatataaaggccctatttcgaaaaattgctgcagcactacctggaatggaaacactatcttctgcaaaacaagaagacatggttgatgtaaacttaaagtctacaaatggcagtgctcagtctcaacctcagtcaagtggatgtgcttgttaagtatactttatcatgtgcggtccacctttttgtgtcatgctttttgttttatgcgggtttttctatagtcttctacagcattatatgaaaagatgaaagaatatataagcggatcagggtaggggttgataaaagttctgtctagacaatttctgttgttagttggttttttgcctataatgtgtactaatgaatttttttttttgaacggcataatgtagtaaaggtacccaacccaaaattgaattgtgttcattgtaccctgtaaaacgtgtgatatgtttaaaatttaacttgttcatctggattgacgt

SEQ ID NO: 10794 - protein, 207 aa, Glycine max
  peptide (1)..(207): Ceres Seq. ID no. 14316445
  misc_feature (11)..(172): Pfam Name: Pfam Description:  Ras family
  misc_feature (1)..(207): NCBI GI NO: 7438385 NR Description: GTP-binding protein Rab6 - common tobacco
  misc_feature (1)..(207): NCBI GI NO: 15224916 NR Description: GTP-binding protein, putative
  misc_feature (1)..(207): NCBI GI NO: 34901804 NR Description: putative ras-related protein Rab-6A
  misc_feature (1)..(207): NCBI GI NO: 15238112 NR Description: GTP binding protein, putative
  misc_feature (1)..(207): NCBI GI NO: 15227173 NR Description: GTP-binding protein, putative
  misc_feature (1)..(207): NCBI GI NO: 15236081 NR Description: Ras family GTP-binding protein
  misc_feature (7)..(207): NCBI GI NO: 38679888 NR Description: RAB6A, member RAS oncogene family isoform b
  misc_feature (7)..(207): NCBI GI NO: 13195674 NR Description: RAB6, member RAS oncogene family [Mus musculus]
  misc_feature (7)..(207): NCBI GI NO: 19923231 NR Description: RAB6A, member RAS oncogene family
  misc_feature (7)..(207): NCBI GI NO: 17512290 NR Description: Rab6 protein [Mus musculus]
MASVSALAKYKLVFLGDQSVGKTSIITRFMYDKFDNTYQATIGIDFLSKTMYLEDRTVRLQLWDTAGQERFRSLIPSYIRDSSVAVIVYDVASRQTFLNTAKWIEEVRTERGSDVIIVLVGNKTDLVEKRQVSIEEGEAKARELNVMFIETSAKAGFNIKALFRKIAAALPGMETLSSAKQEDMVDVNLKSTNGSAQSQPQSSGCAC

SEQ ID NO: 10795 - protein, 178 aa, Glycine max
  peptide (1)..(178): Ceres Seq. ID no. 14316446
  misc_feature (1)..(143): Pfam Name: Pfam Description:  Ras family
  misc_feature (1)..(178): NCBI GI NO: 7438385 NR Description: GTP-binding protein Rab6 - common tobacco
  misc_feature (1)..(178): NCBI GI NO: 15224916 NR Description: GTP-binding protein, putative
  misc_feature (1)..(178): NCBI GI NO: 34901804 NR Description: putative ras-related protein Rab-6A
  misc_feature (1)..(178): NCBI GI NO: 15238112 NR Description: GTP binding protein, putative
  misc_feature (1)..(178): NCBI GI NO: 15227173 NR Description: GTP-binding protein, putative
  misc_feature (1)..(178): NCBI GI NO: 15236081 NR Description: Ras family GTP-binding protein
  misc_feature (1)..(178): NCBI GI NO: 38679888 NR Description: RAB6A, member RAS oncogene family isoform b
  misc_feature (1)..(178): NCBI GI NO: 13195674 NR Description: RAB6, member RAS oncogene family [Mus musculus]
  misc_feature (1)..(178): NCBI GI NO: 19923231 NR Description: RAB6A, member RAS oncogene family
  misc_feature (1)..(178): NCBI GI NO: 17512290 NR Description: Rab6 protein [Mus musculus]
MYDKFDNTYQATIGIDFLSKTMYLEDRTVRLQLWDTAGQERFRSLIPSYIRDSSVAVIVYDVASRQTFLNTAKWIEEVRTERGSDVIIVLVGNKTDLVEKRQVSIEEGEAKARELNVMFIETSAKAGFNIKALFRKIAAALPGMETLSSAKQEDMVDVNLKSTNGSAQSQPQSSGCAC

SEQ ID NO: 10796 - protein, 157 aa, Glycine max
  peptide (1)..(157): Ceres Seq. ID no. 14316447
  misc_feature (1)..(122): Pfam Name: Pfam Description:  Ras family
  misc_feature (1)..(157): NCBI GI NO: 7438385 NR Description: GTP-binding protein Rab6 - common tobacco
  misc_feature (1)..(157): NCBI GI NO: 15224916 NR Description: GTP-binding protein, putative
  misc_feature (1)..(157): NCBI GI NO: 34901804 NR Description: putative ras-related protein Rab-6A
  misc_feature (1)..(157): NCBI GI NO: 15238112 NR Description: GTP binding protein, putative
  misc_feature (1)..(157): NCBI GI NO: 15227173 NR Description: GTP-binding protein, putative
  misc_feature (1)..(157): NCBI GI NO: 15236081 NR Description: Ras family GTP-binding protein
  misc_feature (1)..(157): NCBI GI NO: 38679888 NR Description: RAB6A, member RAS oncogene family isoform b
  misc_feature (1)..(157): NCBI GI NO: 13195674 NR Description: RAB6, member RAS oncogene family [Mus musculus]
  misc_feature (1)..(157): NCBI GI NO: 19923231 NR Description: RAB6A, member RAS oncogene family
  misc_feature (1)..(157): NCBI GI NO: 17512290 NR Description: Rab6 protein [Mus musculus]
MYLEDRTVRLQLWDTAGQERFRSLIPSYIRDSSVAVIVYDVASRQTFLNTAKWIEEVRTERGSDVIIVLVGNKTDLVEKRQVSIEEGEAKARELNVMFIETSAKAGFNIKALFRKIAAALPGMETLSSAKQEDMVDVNLKSTNGSAQSQPQSSGCAC

SEQ ID NO: 10797 - DNA, 1128 bp, Glycine max
  misc_feature (1)..(1128): Ceres Seq. ID no. 14312228
aaattgatacggataaggaagagtattcagtgtctcgtgtagaataatcaatggaagtaggaatgtctctgaacgcgctggttcgtcttcctctctcgaattcacgcttccacgacgatgctgctccgatgattattaggcactctctgttttcgagccgaaagcaacagcagcagcagcagagttataaggttccacagcgtcatcaagtgttcgtggttgaagccaagggcaaaaagggaatgatgtctcgtcaatttcagcgcaatgctcctcctcctttacccaagattgaagacgatggcaatcccaaattcgtcatcttcattcgcatggccaatgtatacctttggtaccctcttagtatcgtatcaggcggcaccactgctaaaataatggttgcagctaaagataattttctcggcaagtatatctacaaagacactcttgatagaaatctcgctgctgttatctacagagatgagaaggaggtacagaaatctgcattcaaacagtaccgtgtattgcgaacagctactgatttcagatacggctacaaacttgttgagaatggcaatataagagctgcactttctaccactgatgttattgagcttccaacacaagataaactaaaaaccgtgcttgacaaagtgaaagacttttttggagatgcaaaggaatcttttggaaagataacatcattgggcactactgaaacagaggagtcagaggaagacacaaaagaaaaagccaaggttaaaggatgaaactatagctggaaatgatttgcttgaattgttatgagtagcctgtggccctatgagatcagaaagctcaattatgtttatggattggttaatggggaaacttctgtgcacaacaatgctactccaggttttgttcttagatctgtaaccatcaaaattgttttatattctgcagagtgaacaccatctttacgatactgattgatcactcgtgtatgttgtaatccatgatgctttggaatggatagcatgtaggatgacatgtaatggcaccgttatcagttcaagagattcctggaattgttgtgtaaattacgggttgtaatatctatgcattttatttgacaggaatttactt

SEQ ID NO: 10798 - protein, 239 aa, Glycine max
  peptide (1)..(239): Ceres Seq. ID no. 14312229
  misc_feature (1)..(236): NCBI GI NO: 30697554 NR Description: auxin-regulated protein [Arabidopsis thaliana]
  misc_feature (1)..(236): NCBI GI NO: 30697556 NR Description: auxin-regulated protein [Arabidopsis thaliana]
  misc_feature (7)..(143): NCBI GI NO: 11072026 NR Description: F12A21.16 [Arabidopsis thaliana]
  misc_feature (141)..(237): NCBI GI NO: 11072026 NR Description: F12A21.16 [Arabidopsis thaliana]
MEVGMSLNALVRLPLSNSRFHDDAAPMIIRHSLFSSRKQQQQQQSYKVPQRHQVFVVEAKGKKGMMSRQFQRNAPPPLPKIEDDGNPKFVIFIRMANVYLWYPLSIVSGGTTAKIMVAAKDNFLGKYIYKDTLDRNLAAVIYRDEKEVQKSAFKQYRVLRTATDFRYGYKLVENGNIRAALSTTDVIELPTQDKLKTVLDKVKDFFGDAKESFGKITSLGTTETEESEEDTKEKAKVKG

SEQ ID NO: 10799 - protein, 235 aa, Glycine max
  peptide (1)..(235): Ceres Seq. ID no. 14312230
  misc_feature (1)..(232): NCBI GI NO: 30697554 NR Description: auxin-regulated protein [Arabidopsis thaliana]
  misc_feature (1)..(232): NCBI GI NO: 30697556 NR Description: auxin-regulated protein [Arabidopsis thaliana]
  misc_feature (3)..(139): NCBI GI NO: 11072026 NR Description: F12A21.16 [Arabidopsis thaliana]
  misc_feature (137)..(233): NCBI GI NO: 11072026 NR Description: F12A21.16 [Arabidopsis thaliana]
MSLNALVRLPLSNSRFHDDAAPMIIRHSLFSSRKQQQQQQSYKVPQRHQVFVVEAKGKKGMMSRQFQRNAPPPLPKIEDDGNPKFVIFIRMANVYLWYPLSIVSGGTTAKIMVAAKDNFLGKYIYKDTLDRNLAAVIYRDEKEVQKSAFKQYRVLRTATDFRYGYKLVENGNIRAALSTTDVIELPTQDKLKTVLDKVKDFFGDAKESFGKITSLGTTETEESEEDTKEKAKVKG

SEQ ID NO: 10800 - protein, 213 aa, Glycine max
  peptide (1)..(213): Ceres Seq. ID no. 14312231
  misc_feature (1)..(210): NCBI GI NO: 30697554 NR Description: auxin-regulated protein [Arabidopsis thaliana]
  misc_feature (1)..(210): NCBI GI NO: 30697556 NR Description: auxin-regulated protein [Arabidopsis thaliana]
  misc_feature (1)..(117): NCBI GI NO: 11072026 NR Description: F12A21.16 [Arabidopsis thaliana]
  misc_feature (115)..(211): NCBI GI NO: 11072026 NR Description: F12A21.16 [Arabidopsis thaliana]
MIIRHSLFSSRKQQQQQQSYKVPQRHQVFVVEAKGKKGMMSRQFQRNAPPPLPKIEDDGNPKFVIFIRMANVYLWYPLSIVSGGTTAKIMVAAKDNFLGKYIYKDTLDRNLAAVIYRDEKEVQKSAFKQYRVLRTATDFRYGYKLVENGNIRAALSTTDVIELPTQDKLKTVLDKVKDFFGDAKESFGKITSLGTTETEESEEDTKEKAKVKG

SEQ ID NO: 10801 - DNA, 1186 bp, Glycine max
  misc_feature (1)..(1186): Ceres Seq. ID no. 14311780
gtgaccagtagctattttctcttttttctaaaaaaaaaaaacggacggctcctggaaaataacggaccaacccatccgtggggttgtaagttttgtcttttatttgcagaaacggaccaacgcttagggtttggtgttttccgaattagggtttgtgattggatcttcatcttcaccaatcaatcaccataaccataacttgttcttctctctcgccatgacggacggctcctggaatcggcagcagcagccgtttctcccttcttccgccatacttaaacgacctcgtactgaatacgatatttcaccttctggtctgacttcagggggcaatgagatgcataattatattggtcgaaatgatgaccatactggtcaccgaattctaaaggacactaaaacacttggatctgcttttgaccgctaccttcaaagcgctgggcttacttcgtttaactcgggggaagccagcgcaattggcagtgttggtttggaaaggggtgttggtggattgccacgccattcactaactgatcctgctgtcatggggcatcctggtggtggtcatgatcttgcacgaggtggacggaatgtcaattatggtgaccagttaccagtagatgcagcttccatgcctggacctgagactgtacctctacccccagatgcttcaagtactttatatgttgaaggtcttccatctgacagtacgagacgggaagtggctcatatttttcgcccttttgttggatatagagaagtaagacttgtgagcaaagaatccaaacatcgtggtggagatcctctaatcctttgttttgtggattttgcaaatccggcctgtgcagcaactgctctgagtgcattgcaaggttataaagttgatgaactcaatcctgagtctagtcacttgcggcttcagttttctcggtttcctggtcccagatctggacctggacctcgtggcaagaggtgaagtcgttcacccaagacatttaggttttatgcttgtcacaatgacttgaattcctttatccataccattctgggatgagaatattcacgaatcaatgttctccacaagcaaatataagtcaatttattgtgttgtataaatattgatatttttttaatgatcctagttagcatttgttttttgttggccaaataaaggtataattattac

SEQ ID NO: 10802 - protein, 252 aa, Glycine max
  peptide (1)..(252): Ceres Seq. ID no. 14311781
  misc_feature (155)..(223): Pfam Name: a.k.a. RRM, RBD, or RNP domain Pfam Description: RNA recognition motif.
  misc_feature (1)..(249): NCBI GI NO: 23304837 NR Description: RNA-binding protein [Medicago truncatula]
  misc_feature (59)..(252): NCBI GI NO: 30699215 NR Description: expressed protein [Arabidopsis thaliana]
  misc_feature (1)..(252): NCBI GI NO: 25553563 NR Description: OSJNBa0038F22.13
  misc_feature (111)..(252): NCBI GI NO: 26450151 NR Description: unknown protein [Arabidopsis thaliana]
  misc_feature (1)..(155): NCBI GI NO: 15218968 NR Description: hypothetical protein [Arabidopsis thaliana]
  misc_feature (192)..(252): NCBI GI NO: 15218968 NR Description: hypothetical protein [Arabidopsis thaliana]
  misc_feature (1)..(252): NCBI GI NO: 25513502 NR Description: F16F4.3 protein - Arabidopsis thaliana
  misc_feature (1)..(140): NCBI GI NO: 30699215 NR Description: expressed protein [Arabidopsis thaliana]
MTDGSWNRQQQPFLPSSAILKRPRTEYDISPSGLTSGGNEMHNYIGRNDDHTGHRILKDTKTLGSAFDRYLQSAGLTSFNSGEASAIGSVGLERGVGGLPRHSLTDPAVMGHPGGGHDLARGGRNVNYGDQLPVDAASMPGPETVPLPPDASSTLYVEGLPSDSTRREVAHIFRPFVGYREVRLVSKESKHRGGDPLILCFVDFANPACAATALSALQGYKVDELNPESSHLRLQFSRFPGPRSGPGPRGKR

SEQ ID NO: 10803 - protein, 212 aa, Glycine max
  peptide (1)..(212): Ceres Seq. ID no. 14311782
  misc_feature (115)..(183): Pfam Name: a.k.a. RRM, RBD, or RNP domain Pfam Description: RNA recognition motif.
  misc_feature (1)..(209): NCBI GI NO: 23304837 NR Description: RNA-binding protein [Medicago truncatula]
  misc_feature (19)..(212): NCBI GI NO: 30699215 NR Description: expressed protein [Arabidopsis thaliana]
  misc_feature (1)..(212): NCBI GI NO: 25553563 NR Description: OSJNBa0038F22.13
  misc_feature (71)..(212): NCBI GI NO: 26450151 NR Description: unknown protein [Arabidopsis thaliana]
  misc_feature (1)..(115): NCBI GI NO: 15218968 NR Description: hypothetical protein [Arabidopsis thaliana]
  misc_feature (152)..(212): NCBI GI NO: 15218968 NR Description: hypothetical protein [Arabidopsis thaliana]
  misc_feature (1)..(212): NCBI GI NO: 25513502 NR Description: F16F4.3 protein - Arabidopsis thaliana
  misc_feature (1)..(100): NCBI GI NO: 30699215 NR Description: expressed protein [Arabidopsis thaliana]
MHNYIGRNDDHTGHRILKDTKTLGSAFDRYLQSAGLTSFNSGEASAIGSVGLERGVGGLPRHSLTDPAVMGHPGGGHDLARGGRNVNYGDQLPVDAASMPGPETVPLPPDASSTLYVEGLPSDSTRREVAHIFRPFVGYREVRLVSKESKHRGGDPLILCFVDFANPACAATALSALQGYKVDELNPESSHLRLQFSRFPGPRSGPGPRGKR

SEQ ID NO: 10804 - protein, 143 aa, Glycine max
  peptide (1)..(143): Ceres Seq. ID no. 14311783
  misc_feature (46)..(114): Pfam Name: a.k.a. RRM, RBD, or RNP domain Pfam Description: RNA recognition motif.
  misc_feature (1)..(140): NCBI GI NO: 23304837 NR Description: RNA-binding protein [Medicago truncatula]
  misc_feature (1)..(143): NCBI GI NO: 30699215 NR Description: expressed protein [Arabidopsis thaliana]
  misc_feature (1)..(143): NCBI GI NO: 25553563 NR Description: OSJNBa0038F22.13
  misc_feature (2)..(143): NCBI GI NO: 26450151 NR Description: unknown protein [Arabidopsis thaliana]
  misc_feature (1)..(46): NCBI GI NO: 15218968 NR Description: hypothetical protein [Arabidopsis thaliana]
  misc_feature (83)..(143): NCBI GI NO: 15218968 NR Description: hypothetical protein [Arabidopsis thaliana]
  misc_feature (1)..(143): NCBI GI NO: 25513502 NR Description: F16F4.3 protein - Arabidopsis thaliana
  misc_feature (1)..(31): NCBI GI NO: 30699215 NR Description: expressed protein [Arabidopsis thaliana]
MGHPGGGHDLARGGRNVNYGDQLPVDAASMPGPETVPLPPDASSTLYVEGLPSDSTRREVAHIFRPFVGYREVRLVSKESKHRGGDPLILCFVDFANPACAATALSALQGYKVDELNPESSHLRLQFSRFPGPRSGPGPRGKR

SEQ ID NO: 10805 - DNA, 1311 bp, Glycine max
  misc_feature (1)..(1311): Ceres Seq. ID no. 14311773
ctaaaatcaaatgcaaaaagaagctagatggttttcaaatgagcatgacacgttccccttctaccactgatactttgccaagtgtaacgtttggccacgtagtctctcttcccacctccattaaaagttccagctcttcatcgagcgagctacacccaacttccattacaaaaccaaaacactcaagttaacttcaacacctttaattttctgaacgaaattcagccacagaatatcaaagggagcgaagatgagtcaggagcagccaaggcgcccccaaggccaagaccccatcaaatacggcgacgtttttgacgtctacggtgaccttgcacagatgcccattgcaccggaagatgctgccatgatgcaaagcgcggaagctcgagtactcggaaaaacccaacccggcggagcttcttccgtcatgcaatccgccgccacaaggaatgaacaggctggtcttgtcggtcaccaggacgtcaccgacatcaccggcgaccatggcgtcacagtcacagaaactacattccatggaagacgcataataaccgaggctgttggtggccaggtagtggaacagtatgtggagccaaatccagttgaggctggacgaaccagtgcaattaaggagagtgctataacaataggagaggcattggaggccacggcacagacggtgggtcacaagccggtggatcagagtgatgcctcagcgattcaggcggcggaggttagagcaacgggaagtaacgttataacgccgggaggacttgcggctatggctcaatcagctgctgcttataatgctgactgcaagcatgaccaggacaaggtcaagcttgccgacgttctgaccggagcaaccgccaaattgcccgcggacaaggccgcgacgctgcaagatgctgaaggggtggcgagtgctgaggccaggaacaaccccgatgccaccgccactcccggtggggtagccgcttctgttgcggctgctgctaggctcaatgaaaatgttaagtaaaaagtagtgttatgtatgttgataatcatacctgtgtttcatgatgtgtgaggagtggcctgttgatatatgtgttgtataactgtaagtggtgctgcaacatgttgtttctttcttttaagcttgtgagatatgttactacttttctggtatcttttaaggactctacttaaaggtgatgtatactatgctatggatgatgtctgtgccaccttatcagttagttgttaataatgtgtgttctagctaatcttgtaatttcttatttgcaatcattccagttagaaccc

SEQ ID NO: 10806 - protein, 256 aa, Glycine max
  peptide (1)..(256): Ceres Seq. ID no. 14311774
  misc_feature (194)..(256): Pfam Name: Pfam Description:  Seed maturation protein
  misc_feature (1)..(256): NCBI GI NO: 6648964 NR Description: seed maturation protein PM24 [Glycine max]
  misc_feature (1)..(256): NCBI GI NO: 6648966 NR Description: seed maturation protein PM25 [Glycine max]
  misc_feature (1)..(256): NCBI GI NO: 6648968 NR Description: seed maturation protein PM26 [Glycine max]
  misc_feature (1)..(255): NCBI GI NO: 126078 NR Description: LATE EMBRYOGENESIS ABUNDANT PROTEIN D-34
  misc_feature (1)..(253): NCBI GI NO: 15228768 NR Description: LEA protein -related [Arabidopsis thaliana]
  misc_feature (1)..(255): NCBI GI NO: 15228770 NR Description: LEA protein -related [Arabidopsis thaliana]
  misc_feature (1)..(253): NCBI GI NO: 1526422 NR Description: LEA protein in group 5 [Arabidopsis thaliana]
  misc_feature (1)..(254): NCBI GI NO: 82045 NR Description: embryonic protein ecp31 - carrot
  misc_feature (1)..(204): NCBI GI NO: 2129632 NR Description: embryonic protein LEA
  misc_feature (11)..(252): NCBI GI NO: 22773242 NR Description: Putative abscisic acid-induced protein
MSQEQPRRPQGQDPIKYGDVFDVYGDLAQMPIAPEDAAMMQSAEARVLGKTQPGGASSVMQSAATRNEQAGLVGHQDVTDITGDHGVTVTETTFHGRRIITEAVGGQVVEQYVEPNPVEAGRTSAIKESAITIGEALEATAQTVGHKPVDQSDASAIQAAEVRATGSNVITPGGLAAMAQSAAAYNADCKHDQDKVKLADVLTGATAKLPADKAATLQDAEGVASAEARNNPDATATPGGVAASVAAAARLNENVK

SEQ ID NO: 10807 - protein, 227 aa, Glycine max
  peptide (1)..(227): Ceres Seq. ID no. 14311775
  misc_feature (165)..(227): Pfam Name: Pfam Description:  Seed maturation protein
  misc_feature (1)..(227): NCBI GI NO: 6648964 NR Description: seed maturation protein PM24 [Glycine max]
  misc_feature (1)..(227): NCBI GI NO: 6648966 NR Description: seed maturation protein PM25 [Glycine max]
  misc_feature (1)..(227): NCBI GI NO: 6648968 NR Description: seed maturation protein PM26 [Glycine max]
  misc_feature (1)..(226): NCBI GI NO: 126078 NR Description: LATE EMBRYOGENESIS ABUNDANT PROTEIN D-34
  misc_feature (1)..(224): NCBI GI NO: 15228768 NR Description: LEA protein -related [Arabidopsis thaliana]
  misc_feature (1)..(226): NCBI GI NO: 15228770 NR Description: LEA protein -related [Arabidopsis thaliana]
  misc_feature (1)..(224): NCBI GI NO: 1526422 NR Description: LEA protein in group 5 [Arabidopsis thaliana]
  misc_feature (1)..(225): NCBI GI NO: 82045 NR Description: embryonic protein ecp31 - carrot
  misc_feature (1)..(175): NCBI GI NO: 2129632 NR Description: embryonic protein LEA
  misc_feature (1)..(223): NCBI GI NO: 22773242 NR Description: Putative abscisic acid-induced protein
MPIAPEDAAMMQSAEARVLGKTQPGGASSVMQSAATRNEQAGLVGHQDVTDITGDHGVTVTETTFHGRRIITEAVGGQVVEQYVEPNPVEAGRTSAIKESAITIGEALEATAQTVGHKPVDQSDASAIQAAEVRATGSNVITPGGLAAMAQSAAAYNADCKHDQDKVKLADVLTGATAKLPADKAATLQDAEGVASAEARNNPDATATPGGVAASVAAAARLNENVK

SEQ ID NO: 10808 - protein, 218 aa, Glycine max
  peptide (1)..(218): Ceres Seq. ID no. 14311776
  misc_feature (156)..(218): Pfam Name: Pfam Description:  Seed maturation protein
  misc_feature (1)..(218): NCBI GI NO: 6648964 NR Description: seed maturation protein PM24 [Glycine max]
  misc_feature (1)..(218): NCBI GI NO: 6648966 NR Description: seed maturation protein PM25 [Glycine max]
  misc_feature (1)..(218): NCBI GI NO: 6648968 NR Description: seed maturation protein PM26 [Glycine max]
  misc_feature (1)..(217): NCBI GI NO: 126078 NR Description: LATE EMBRYOGENESIS ABUNDANT PROTEIN D-34
  misc_feature (1)..(215): NCBI GI NO: 15228768 NR Description: LEA protein -related [Arabidopsis thaliana]
  misc_feature (1)..(217): NCBI GI NO: 15228770 NR Description: LEA protein -related [Arabidopsis thaliana]
  misc_feature (1)..(215): NCBI GI NO: 1526422 NR Description: LEA protein in group 5 [Arabidopsis thaliana]
  misc_feature (1)..(216): NCBI GI NO: 82045 NR Description: embryonic protein ecp31 - carrot
  misc_feature (1)..(166): NCBI GI NO: 2129632 NR Description: embryonic protein LEA
  misc_feature (1)..(214): NCBI GI NO: 22773242 NR Description: Putative abscisic acid-induced protein
MMQSAEARVLGKTQPGGASSVMQSAATRNEQAGLVGHQDVTDITGDHGVTVTETTFHGRRIITEAVGGQVVEQYVEPNPVEAGRTSAIKESAITIGEALEATAQTVGHKPVDQSDASAIQAAEVRATGSNVITPGGLAAMAQSAAAYNADCKHDQDKVKLADVLTGATAKLPADKAATLQDAEGVASAEARNNPDATATPGGVAASVAAAARLNENVK

SEQ ID NO: 10809 - DNA, 1353 bp, Glycine max
  misc_feature (1)..(1353): Ceres Seq. ID no. 14312192
aacataacccagtgagtctacccttatctctgaccatttctttctctgaagccaactccaaaactaacagacagaaagaaagagaaaaagaaacccaattcctgtttcaactgaaacacagcacacacaacaatcatcaatttctctacaaaaaataaccccacaaagaaaacaaactgaaacaacagcaaaaaagaaatcttcacctcagcttcctctgttccgtccttcctcgtcgccgcgccggagcatctcgccgccttcatccaccgcatcattcgcgagggaactcggaggtcatcgaattcgcgaagatgtcgcggttcccgttcttcaaccgttcgaacacgattcactcgacgaaatcggaatcctcgcagaaaccctacctcgtccaccaccatctccacaatcttgaccggtccggttcggtgaaccgcttctacggttcagtggactccatgaaatcctcaatccgcggaaaaatggtgaagaagctctgcaccttattcgaatcctccaaaaaacccttgccagaaccagaatccgaatctgaatcgttttcttcttcaaaatcacgttcaaaaacagattcagattcgtgcattactatattgtttcgattacccggcacagaggacagaatagttgtgtatttaacgagccttcgcgggattcggagaactttcgaggattgcaacgcggtccgcatgatcctgaaggggttcagggtttgggtggacgagagggatgtgtctatggacttgagctacagggaggagctgcagcatgtgctgggggagcaccatgtggcgctcccccaagtttttatacgagggaagtacattggtggtgctgatgtgatcaagcatttgtttgagagtggtgacttggcgaagatgattctggaagggctccccaagctgaaacccgggttcgtgtgtgacaattgtggggacgcgaggttcgtgccgtgcgagaattgcagtgggagcaggaaggtgtttgatgaggatgaaggggaattgaagaggtgcttggaatgcaatgagaatggactcctcaggtgtccgtattgctgttcttgattttgattaatgatgattttcatgggggttaattgggttgttgctcgttgaacatgtgttttgttttgttcaagactgggtgttttactttcttatcttggattgagatggaaaactggggtgagtgggggatgtgtatattatattctaatggagggtgtaaatatttagtggtgtacaagaatttgctaaatattggttgttgatggatgatagctttctaatgggaattatgggatgttttaatatatccctttattagtcc

SEQ ID NO: 10810 - protein, 257 aa, Glycine max
  peptide (1)..(257): Ceres Seq. ID no. 14312193
  misc_feature (110)..(197): Pfam Name: Pfam Description:  Glutaredoxin
  misc_feature (6)..(257): NCBI GI NO: 15240723 NR Description: expressed protein [Arabidopsis thaliana]
  misc_feature (39)..(256): NCBI GI NO: 15451042 NR Description: putative protein [Arabidopsis thaliana]
  misc_feature (39)..(256): NCBI GI NO: 30694571 NR Description: expressed protein [Arabidopsis thaliana]
  misc_feature (47)..(256): NCBI GI NO: 15227326 NR Description: expressed protein [Arabidopsis thaliana]
  misc_feature (111)..(257): NCBI GI NO: 34899098 NR Description: hypothetical protein~similar to Arabidopsisthaliana chromosome 5
  misc_feature (65)..(255): NCBI GI NO: 15237686 NR Description: expressed protein [Arabidopsis thaliana]
  misc_feature (90)..(256): NCBI GI NO: 32490043 NR Description: OSJNBa0063C18.3
  misc_feature (90)..(253): NCBI GI NO: 10241626 NR Description: Contains similarity to F1N 19.7
  misc_feature (105)..(255): NCBI GI NO: 38346321 NR Description: OJ000126_13.3
  misc_feature (105)..(255): NCBI GI NO: 15237554 NR Description: expressed protein [Arabidopsis thaliana]
MSRFPFFNRSNTIHSTKSESSQKPYLVHHHLHNLDRSGSVNRFYGSVDSMKSSIRGKMVKKLCTLFESSKKPLPEPESESESFSSSKSRSKTDSDSCITILFRLPGTEDRIVVYLTSLRGIRRTFEDCNAVRMILKGFRVWVDERDVSMDLSYREELQHVLGEHHVALPQVFIRGKYIGGADVIKHLFESGDLAKMILEGLPKLKPGFVCDNCGDARFVPCENCSGSRKVFDEDEGELKRCLECNENGLLRCPYCCS

SEQ ID NO: 10811 - protein, 208 aa, Glycine max
  peptide (1)..(208): Ceres Seq. ID no. 14312194
  misc_feature (61)..(148): Pfam Name: Pfam Description:  Glutaredoxin
  misc_feature (1)..(208): NCBI GI NO: 15240723 NR Description: expressed protein [Arabidopsis thaliana]
  misc_feature (1)..(207): NCBI GI NO: 15451042 NR Description: putative protein [Arabidopsis thaliana]
  misc_feature (1)..(207): NCBI GI NO: 30694571 NR Description: expressed protein [Arabidopsis thaliana]
  misc_feature (1)..(207): NCBI GI NO: 15227326 NR Description: expressed protein [Arabidopsis thaliana]
  misc_feature (62)..(208): NCBI GI NO: 34899098 NR Description: hypothetical protein~similar to Arabidopsisthaliana chromosome 5
  misc_feature (16)..(206): NCBI GI NO: 15237686 NR Description: expressed protein [Arabidopsis thaliana]
  misc_feature (41)..(207): NCBI GI NO: 32490043 NR Description: OSJNBa0063C18.3
  misc_feature (41)..(204): NCBI GI NO: 10241626 NR Description: Contains similarity to F1N 19.7
  misc_feature (56)..(206): NCBI GI NO: 38346321 NR Description: OJ000126_13.3
  misc_feature (56)..(206): NCBI GI NO: 15237554 NR Description: expressed protein [Arabidopsis thaliana]
MKSSIRGKMVKKLCTLFESSKKPLPEPESESESFSSSKSRSKTDSDSCITILFRLPGTEDRIVVYLTSLRGIRRTFEDCNAVRMILKGFRVWVDERDVSMDLSYREELQHVLGEHHVALPQVFIRGKYIGGADVIKHLFESGDLAKMILEGLPKLKPGFVCDNCGDARFVPCENCSGSRKVFDEDEGELKRCLECNENGLLRCPYCCS

SEQ ID NO: 10812 - protein, 200 aa, Glycine max
  peptide (1)..(200): Ceres Seq. ID no. 14312195
  misc_feature (53)..(140): Pfam Name: Pfam Description:  Glutaredoxin
  misc_feature (1)..(200): NCBI GI NO: 15240723 NR Description: expressed protein [Arabidopsis thaliana]
  misc_feature (1)..(199): NCBI GI NO: 15451042 NR Description: putative protein [Arabidopsis thaliana]
  misc_feature (1)..(199): NCBI GI NO: 30694571 NR Description: expressed protein [Arabidopsis thaliana]
  misc_feature (1)..(199): NCBI GI NO: 15227326 NR Description: expressed protein [Arabidopsis thaliana]
  misc_feature (54)..(200): NCBI GI NO: 34899098 NR Description: hypothetical protein~similar to Arabidopsisthaliana chromosome 5
  misc_feature (8)..(198): NCBI GI NO: 15237686 NR Description: expressed protein [Arabidopsis thaliana]
  misc_feature (33)..(199): NCBI GI NO: 32490043 NR Description: OSJNBa0063C18.3
  misc_feature (33)..(196): NCBI GI NO: 10241626 NR Description: Contains similarity to F1N 19.7
  misc_feature (48)..(198): NCBI GI NO: 38346321 NR Description: OJ000126_13.3
  misc_feature (48)..(198): NCBI GI NO: 15237554 NR Description: expressed protein [Arabidopsis thaliana]
MVKKLCTLFESSKKPLPEPESESESFSSSKSRSKTDSDSCITILFRLPGTEDRIVVYLTSLRGIRRTFEDCNAVRMILKGFRVWVDERDVSMDLSYREELQHVLGEHHVALPQVFIRGKYIGGADVIKHLFESGDLAKMILEGLPKLKPGFVCDNCGDARFVPCENCSGSRKVFDEDEGELKRCLECNENGLLRCPYCCS

SEQ ID NO: 10813 - DNA, 1322 bp, Glycine max
  misc_feature (1)..(1322): Ceres Seq. ID no. 14312166
aaaaaagaaaagggaatgttttcttttgcacactgtgatctgcaattggtggccatttcgaaaaattgccaattttctgaaacgtgacgtcttctttgcagttttgcatttaccttacagccactcagaagcgcagagaagataggaacccacccttgaagatggctctgcctccacaaaacccacctgttcagcgacacagagtcataatacccaacaagcacggtgaaaagcttgtgggcacattgcatgaatctggaaccagggacattgtaatcttgtgccatggttttcgatgcacaaaggataccaatctcatattgaaccttgctgttgcattggaaaatgcaaaaattagttctttccgttttgacttttctggaaatggggaaagtgaaggtttgtttcagtttggtaactattggaccgaggttgatgatttacatgctgtagctcaacatttccatgaatctaaccgtgtaatcagtgcaattgttggtcatagtaaaggaggtggcgtagtgcttctatatgcttcaaaatatagtgacattaaaacagttgtcaacctctctgggcgttatgatatgaaggcaggcattgaagaacaccttggaaaagattatttggaaagaatcaggagggatggtttcattgatgtgaagaagaggaggtcaggaagttttgatttccgtgtaactgaagaaagtttgatggatcgcttgggtataaatatacatgaagcatgccttaagattgacaaagaatgcagggtctttacaattcatggttcttccgatgaaattattcctgttgaagatgcatttgagtttgccaagatcatacaaaaccataagttacatgtcattggaggagctaatcatatgttcagtaatcatcaaggagagttgtcctcagttagttgtgaactttatagaagaaaccttgcaccaggtcaagggtactgctagctaggtatctgttcttgcttgcatatgtgtcaaacacccgtgaactctttgttgtgtttttctaatgatatacttatggtatatctcgaagtttcaagccaattgaattttggaaccacaacaaaaatttaccctgaagggtccccaactgatcctgtcttgtgtatacaattacgataatgaaatttgaatttaagaccttgtgtaactactcaaacttactaggccaaccctaatagggttgatgttccatgccatttgagatcaccagctttgtgtttgtcaaagttgaaaatctggcttcattaggttgaatggaagaaaaataaatggtaaagaggactcatggac

SEQ ID NO: 10814 - protein, 269 aa, Glycine max
  peptide (1)..(269): Ceres Seq. ID no. 14312167
  misc_feature (69)..(247): Pfam Name: Pfam Description:  alpha/beta hydrolase fold
  misc_feature (10)..(259): NCBI GI NO: 15228202 NR Description: esterase/lipase/thioesterase family
  misc_feature (12)..(250): NCBI GI NO: 15220578 NR Description: esterase/lipase/thioesterase family
  misc_feature (12)..(250): NCBI GI NO: 15232826 NR Description: esterase/lipase/thioesterase family
  misc_feature (12)..(259): NCBI GI NO: 21554728 NR Description: putative esterase [Arabidopsis thaliana]
  misc_feature (12)..(250): NCBI GI NO: 22135864 NR Description: putative protein [Arabidopsis thaliana]
  misc_feature (10)..(259): NCBI GI NO: 11358640 NR Description: probable esterase-like protein - Arabidopsisthaliana
  misc_feature (10)..(259): NCBI GI NO: 18416707 NR Description: esterase/lipase/thioesterase family
  misc_feature (10)..(259): NCBI GI NO: 21595418 NR Description: putative esterase-like protein
  misc_feature (8)..(251): NCBI GI NO: 34913064 NR Description: P0013G02.24
  misc_feature (1)..(261): NCBI GI NO: 34913068 NR Description: P0013G02.26
MALPPQNPPVQRHRVIIPNKHGEKLVGTLHESGTRDIVILCHGFRCTKDTNLILNLAVALENAKISSFRFDFSGNGESEGLFQFGNYWTEVDDLHAVAQHFHESNRVISAIVGHSKGGGVVLLYASKYSDIKTVVNLSGRYDMKAGIEEHLGKDYLERIRRDGFIDVKKRRSGSFDFRVTEESLMDRLGINIHEACLKIDKECRVFTIHGSSDEIIPVEDAFEFAKIIQNHKLHVIGGANHMFSNHQGELSSVSCELYRRNLAPGQGYC

SEQ ID NO: 10815 - DNA, 1500 bp, Glycine max
  misc_feature (1)..(1500): Ceres Seq. ID no. 14315422
atcgaagccacatacagagtgagagagaaagagcttagcttaggaatggaagcagagaagcatgaagcagcattggcagtggcctcagtctccctctctctccccagagttttgcccttcttccaacccaccacccctcagccaaccaagctcaaagtcccaacccaggcctcatccctcacacacctttctctctccactccttccaaaacctccttcaaatccaccatctcctccaccccccttcacgcccctctctccctcggcccccaccgcccccgcgacccctccaacgccgccgccctccgccgcgccgcagtagtctggttccgcaacgacctccgcctcctcgacaacgagtgcctcaccgccgccaacaacgagtccctctccgtcctccccgtctactgcttcgaccccgccgactacggtaagtcggcctccggcttcgacaagaccggcccctaccgcgccgccttcctcatcgactctgtctccgacctccgccgtaacctccaggctcgcggctccgatctcgtcgttcgcgttgggaagcccgaggcggtgctggtggagctcgccaaggccgtcggggccgacgccgtgtacgcgcaccgagaggtctcgcacgacgaggcgaaggcggaggagagggtggaggcggccatgaaggaggagaatgtggaggtgaagtacttctggggaagcacgttgtatcacgtggacgatttgccttttcaattggaggacatgccttccaattacggagggtttagggatagggttcagaaattggaggtaaggaagacaattgaggcattagatcagcttaagggaatgccttctcgcggtgatgttgagcctggggagattccttctttaatggacctaggccttaatccatctgcaacaatgtcacagaatggaaagtgcgttgctaatgcttctatggtaggaggggagactgaggcactgcagaagcttaaaaaatttgcagctgagtgtgcagctcagccacacaaggggtttaaggatggaacacagagtatatatggtgccaacttctcctgcaagatttctccgtggttggcaatgggatgcctttcccctcgcacaatgtatgaagaactgaagaagactgccggcagagtcatttctgcttcgtccaaccggaatgatggtggtaatggctcgtccagaactggaacaaattggttgatgtttgagttgctatggagggacttctttaggtttataacaaaaaaatacagtactgcaaagaaacagctggaagctgctccagccactgcatgtgctggtgcatttgcttaaactagaagttctagtgggcataaggaagtttgtttcagggtatgggttggttccctacgcagtcatggcagtagggtgctggatgaacaagatttggttccccttctgaagttctgttgtaactgacagatacattatttcaatatggaagctttacattattttctc

SEQ ID NO: 10816 - protein, 443 aa, Glycine max
  peptide (1)..(443): Ceres Seq. ID no. 14315423
  misc_feature (104)..(281): Pfam Name: Pfam Description:  DNA photolyase
  misc_feature (23)..(443): NCBI GI NO: 15226633 NR Description: photolyase/blue-light receptor (PHR2)
  misc_feature (23)..(443): NCBI GI NO: 21592984 NR Description: photolyase/blue-light receptor PHR2
  misc_feature (107)..(379): NCBI GI NO: 23040111 NR Description: hypothetical protein
  misc_feature (104)..(378): NCBI GI NO: 37520404 NR Description: probable bacterial cryptochrome
  misc_feature (96)..(379): NCBI GI NO: 22327046 NR Description: DNA photolyase - like protein
  misc_feature (96)..(379): NCBI GI NO: 28971609 NR Description: cryptochrome dash [Arabidopsis thaliana]
  misc_feature (104)..(390): NCBI GI NO: 23135973 NR Description: hypothetical protein [Cytophaga hutchinsonii]
  misc_feature (107)..(389): NCBI GI NO: 28374085 NR Description: Chain A
  misc_feature (106)..(379): NCBI GI NO: 32477278 NR Description: DNA photolyase [Pirellula sp.]
  misc_feature (135)..(389): NCBI GI NO: 16330358 NR Description: DNA photolyase [Synechocystis sp. PCC 6803]
IEATYRVREKELSLGMEAEKHEAALAVASVSLSLPRVLPFFQPTTPQPTKLKVPTQASSLTHLSLSTPSKTSFKSTISSTPLHAPLSLGPHRPRDPSNAAALRRAAVVWFRNDLRLLDNECLTAANNESLSVLPVYCFDPADYGKSASGFDKTGPYRAAFLIDSVSDLRRNLQARGSDLVVRVGKPEAVLVELAKAVGADAVYAHREVSHDEAKAEERVEAAMKEENVEVKYFWGSTLYHVDDLPFQLEDMPSNYGGFRDRVQKLEVRKTIEALDQLKGMPSRGDVEPGEIPSLMDLGLNPSATMSQNGKCVANASMVGGETEALQKLKKFAAECAAQPHKGFKDGTQSIYGANFSCKISPWLAMGCLSPRTMYEELKKTAGRVISASSNRNDGGNGSSRTGTNWLMFELLWRDFFRFITKKYSTAKKQLEAAPATACAGAFA

SEQ ID NO: 10817 - protein, 428 aa, Glycine max
  peptide (1)..(428): Ceres Seq. ID no. 14315424
  misc_feature (89)..(266): Pfam Name: Pfam Description:  DNA photolyase
  misc_feature (8)..(428): NCBI GI NO: 15226633 NR Description: photolyase/blue-light receptor (PHR2)
  misc_feature (8)..(428): NCBI GI NO: 21592984 NR Description: photolyase/blue-light receptor PHR2
  misc_feature (92)..(364): NCBI GI NO: 23040111 NR Description: hypothetical protein
  misc_feature (89)..(363): NCBI GI NO: 37520404 NR Description: probable bacterial cryptochrome
  misc_feature (81)..(364): NCBI GI NO: 22327046 NR Description: DNA photolyase - like protein
  misc_feature (81)..(364): NCBI GI NO: 28971609 NR Description: cryptochrome dash [Arabidopsis thaliana]
  misc_feature (89)..(375): NCBI GI NO: 23135973 NR Description: hypothetical protein [Cytophaga hutchinsonii]
  misc_feature (92)..(374): NCBI GI NO: 28374085 NR Description: Chain A
  misc_feature (91)..(364): NCBI GI NO: 32477278 NR Description: DNA photolyase [Pirellula sp.]
  misc_feature (120)..(374): NCBI GI NO: 16330358 NR Description: DNA photolyase [Synechocystis sp. PCC 6803]
MEAEKHEAALAVASVSLSLPRVLPFFQPTTPQPTKLKVPTQASSLTHLSLSTPSKTSFKSTISSTPLHAPLSLGPHRPRDPSNAAALRRAAVVWFRNDLRLLDNECLTAANNESLSVLPVYCFDPADYGKSASGFDKTGPYRAAFLIDSVSDLRRNLQARGSDLVVRVGKPEAVLVELAKAVGADAVYAHREVSHDEAKAEERVEAAMKEENVEVKYFWGSTLYHVDDLPFQLEDMPSNYGGFRDRVQKLEVRKTIEALDQLKGMPSRGDVEPGEIPSLMDLGLNPSATMSQNGKCVANASMVGGETEALQKLKKFAAECAAQPHKGFKDGTQSIYGANFSCKISPWLAMGCLSPRTMYEELKKTAGRVISASSNRNDGGNGSSRTGTNWLMFELLWRDFFRFITKKYSTAKKQLEAAPATACAGAFA

SEQ ID NO: 10818 - protein, 221 aa, Glycine max
  peptide (1)..(221): Ceres Seq. ID no. 14315425
  misc_feature (1)..(59): Pfam Name: Pfam Description:  DNA photolyase
  misc_feature (1)..(221): NCBI GI NO: 15226633 NR Description: photolyase/blue-light receptor (PHR2)
  misc_feature (1)..(221): NCBI GI NO: 21592984 NR Description: photolyase/blue-light receptor PHR2
  misc_feature (1)..(157): NCBI GI NO: 23040111 NR Description: hypothetical protein
  misc_feature (1)..(156): NCBI GI NO: 37520404 NR Description: probable bacterial cryptochrome
  misc_feature (1)..(157): NCBI GI NO: 22327046 NR Description: DNA photolyase - like protein
  misc_feature (1)..(157): NCBI GI NO: 28971609 NR Description: cryptochrome dash [Arabidopsis thaliana]
  misc_feature (1)..(168): NCBI GI NO: 23135973 NR Description: hypothetical protein [Cytophaga hutchinsonii]
  misc_feature (1)..(167): NCBI GI NO: 28374085 NR Description: Chain A
  misc_feature (1)..(157): NCBI GI NO: 32477278 NR Description: DNA photolyase [Pirellula sp.]
  misc_feature (1)..(167): NCBI GI NO: 16330358 NR Description: DNA photolyase [Synechocystis sp. PCC 6803]
MKEENVEVKYFWGSTLYHVDDLPFQLEDMPSNYGGFRDRVQKLEVRKTIEALDQLKGMPSRGDVEPGEIPSLMDLGLNPSATMSQNGKCVANASMVGGETEALQKLKKFAAECAAQPHKGFKDGTQSIYGANFSCKISPWLAMGCLSPRTMYEELKKTAGRVISASSNRNDGGNGSSRTGTNWLMFELLWRDFFRFITKKYSTAKKQLEAAPATACAGAFA

SEQ ID NO: 10819 - DNA, 1507 bp, Glycine max
  misc_feature (1)..(1507): Ceres Seq. ID no. 14315403
acaacgtggcctccttcttccacagcaaaatcccattttccaaaacccctctctctctctctgacacacactaccatggcggcactgaagcttctcctctcccaagctcgccgccattccctccccaaatgcgctttctctatgacctctcacagatccctctgtgcttcttcggaatcaaactcaaaccctccccgaagacccttcgaacccatccccatccaacccgtctcctaccccgtcaagcccaaacccgcaccacccgaacctcaaccttcacccgaacctcaatcacaatccctccccccttcctcgccggactcgcaacgcgcttggacgcgcgaggacatccgctacgtgaaggacgtgccgtcgatcgcgccggtggcgtacgcctcgcgcggcggcgtggcgcctctccccgatgacagagctcccgtggaggacgcggcagagagcgagaggaggatgatcgaggcggagaatgaaatgaggttgcgaatggccaaggccgtcgaagaggaaagaatgaaggtgccgtttccgctgctgattaagcccaagaagaacgagaagcctcctccgcttgatttgaacgaagccattcgccaagttaaggccaatgccaaggcaaagtttgatgaaactgttgaagcacatataagattgggtgttgattcaaagcgaacagaaatggcagttcgtggtactgtgattctgcctcatggtgctccaaaggctgtcagtgtggctgtttttgcagaaggggctgaggcagaggaagcgaaagctgcaggagctgatatagttggtggtaaagagcttattgaggagattgctagcggtaaaaataagctcaaagttgacaaatgcttctcaactcctggaatggcacctaatcttggaaagatagcacaatatcttagaaagcgaagactgatgccagataagaaactaggtactcttactagtgatattgctgggcagttgaaagagctaagacaaggccgtgtagagtttaaaatggaaagtaaatcaattttgcatgtgggacttggaaaggtaagctacaaagaagaggctttacgggagaatattagtgcatttatgaatgctgtattgcttgcaaagcctgctggcttaaaaaagacttccaaatatgctgggtatgtgttgtctgtccatataagcagcacgatgggcccaggattacctgtatctatacaatcaatatccaaagcagcagataactacaagaaaatgcatatggtttgaatcatgtggacgtggccaatgtgggcatttttctacatgaatccaagtttagatgaacatatgttgtcgtaggtttttgttcattaccattgattatgtaaactttgtttagtcatatatgtggcaataagtgaaaattttgacaattttttgtgagcttgttgaattttctggtcacctaatggtgtatcatgttcctcattgcaacacagaaaattatgccttagtttac

SEQ ID NO: 10820 - protein, 424 aa, Glycine max
  peptide (1)..(424): Ceres Seq. ID no. 14315404
  misc_feature (192)..(403): Pfam Name: Pfam Description:  Ribosomal protein L1p/L10e family
  misc_feature (26)..(423): NCBI GI NO: 30689119 NR Description: ribosomal protein L1p family
  misc_feature (41)..(283): NCBI GI NO: 25408807 NR Description: hypothetical protein At2g42710
  misc_feature (186)..(414): NCBI GI NO: 15965098 NR Description: PROBABLE 50S RIBOSOMAL PROTEIN L1
  misc_feature (198)..(406): NCBI GI NO: 27380525 NR Description: 50S ribosomal protein L1
  misc_feature (195)..(412): NCBI GI NO: 9957210 NR Description: L1 [EDTA-degrading bacterium BNC1]
  misc_feature (198)..(412): NCBI GI NO: 15889253 NR Description: AGR_C_3573p [Agrobacterium tumefaciens]
  misc_feature (198)..(412): NCBI GI NO: 17935849 NR Description: 50S ribosomal protein L1
  misc_feature (197)..(415): NCBI GI NO: 22966133 NR Description: hypothetical protein [Rhodospirillum rubrum]
  misc_feature (196)..(410): NCBI GI NO: 22957081 NR Description: hypothetical protein [Rhodobacter sphaeroides]
  misc_feature (198)..(412): NCBI GI NO: 13470539 NR Description: 50S ribosomal protein L1 [Mesorhizobium loti]
TTWPPSSTAKSHFPKPLSLSLTHTTMAALKLLLSQARRHSLPKCAFSMTSHRSLCASSESNSNPPRRPFEPIPIQPVSYPVKPKPAPPEPQPSPEPQSQSLPPSSPDSQRAWTREDIRYVKDVPSIAPVAYASRGGVAPLPDDRAPVEDAAESERRMIEAENEMRLRMAKAVEEERMKVPFPLLIKPKKNEKPPPLDLNEAIRQVKANAKAKFDETVEAHIRLGVDSKRTEMAVRGTVILPHGAPKAVSVAVFAEGAEAEEAKAAGADIVGGKELIEEIASGKNKLKVDKCFSTPGMAPNLGKIAQYLRKRRLMPDKKLGTLTSDIAGQLKELRQGRVEFKMESKSILHVGLGKVSYKEEALRENISAFMNAVLLAKPAGLKKTSKYAGYVLSVHISSTMGPGLPVSIQSISKAADNYKKMHMV

SEQ ID NO: 10821 - protein, 399 aa, Glycine max
  peptide (1)..(399): Ceres Seq. ID no. 14315405
  misc_feature (167)..(378): Pfam Name: Pfam Description:  Ribosomal protein L1p/L10e family
  misc_feature (1)..(398): NCBI GI NO: 30689119 NR Description: ribosomal protein L1p family
  misc_feature (16)..(258): NCBI GI NO: 25408807 NR Description: hypothetical protein At2g42710
  misc_feature (161)..(389): NCBI GI NO: 15965098 NR Description: PROBABLE 50S RIBOSOMAL PROTEIN L1
  misc_feature (173)..(381): NCBI GI NO: 27380525 NR Description: 50S ribosomal protein L1
  misc_feature (170)..(387): NCBI GI NO: 9957210 NR Description: L1 [EDTA-degrading bacterium BNC1]
  misc_feature (173)..(387): NCBI GI NO: 15889253 NR Description: AGR_C_3573p [Agrobacterium tumefaciens]
  misc_feature (173)..(387): NCBI GI NO: 17935849 NR Description: 50S ribosomal protein L1
  misc_feature (172)..(390): NCBI GI NO: 22966133 NR Description: hypothetical protein [Rhodospirillum rubrum]
  misc_feature (171)..(385): NCBI GI NO: 22957081 NR Description: hypothetical protein [Rhodobacter sphaeroides]
  misc_feature (173)..(387): NCBI GI NO: 13470539 NR Description: 50S ribosomal protein L1 [Mesorhizobium loti]
MAALKLLLSQARRHSLPKCAFSMTSHRSLCASSESNSNPPRRPFEPIPIQPVSYPVKPKPAPPEPQPSPEPQSQSLPPSSPDSQRAWTREDIRYVKDVPSIAPVAYASRGGVAPLPDDRAPVEDAAESERRMIEAENEMRLRMAKAVEEERMKVPFPLLIKPKKNEKPPPLDLNEAIRQVKANAKAKFDETVEAHIRLGVDSKRTEMAVRGTVILPHGAPKAVSVAVFAEGAEAEEAKAAGADIVGGKELIEEIASGKNKLKVDKCFSTPGMAPNLGKIAQYLRKRRLMPDKKLGTLTSDIAGQLKELRQGRVEFKMESKSILHVGLGKVSYKEEALRENISAFMNAVLLAKPAGLKKTSKYAGYVLSVHISSTMGPGLPVSIQSISKAADNYKKMHMV

SEQ ID NO: 10822 - protein, 377 aa, Glycine max
  peptide (1)..(377): Ceres Seq. ID no. 14315406
  misc_feature (145)..(356): Pfam Name: Pfam Description:  Ribosomal protein L1p/L10e family
  misc_feature (1)..(376): NCBI GI NO: 30689119 NR Description: ribosomal protein L1p family
  misc_feature (1)..(236): NCBI GI NO: 25408807 NR Description: hypothetical protein At2g42710
  misc_feature (139)..(367): NCBI GI NO: 15965098 NR Description: PROBABLE 50S RIBOSOMAL PROTEIN L1
  misc_feature (151)..(359): NCBI GI NO: 27380525 NR Description: 50S ribosomal protein L1
  misc_feature (148)..(365): NCBI GI NO: 9957210 NR Description: L1 [EDTA-degrading bacterium BNC1]
  misc_feature (151)..(365): NCBI GI NO: 15889253 NR Description: AGR_C_3573p [Agrobacterium tumefaciens]
  misc_feature (151)..(365): NCBI GI NO: 17935849 NR Description: 50S ribosomal protein L1
  misc_feature (150)..(368): NCBI GI NO: 22966133 NR Description: hypothetical protein [Rhodospirillum rubrum]
  misc_feature (149)..(363): NCBI GI NO: 22957081 NR Description: hypothetical protein [Rhodobacter sphaeroides]
  misc_feature (151)..(365): NCBI GI NO: 13470539 NR Description: 50S ribosomal protein L1 [Mesorhizobium loti]
MTSHRSLCASSESNSNPPRRPFEPIPIQPVSYPVKPKPAPPEPQPSPEPQSQSLPPSSPDSQRAWTREDIRYVKDVPSIAPVAYASRGGVAPLPDDRAPVEDAAESERRMIEAENEMRLRMAKAVEEERMKVPFPLLIKPKKNEKPPPLDLNEAIRQVKANAKAKFDETVEAHIRLGVDSKRTEMAVRGTVILPHGAPKAVSVAVFAEGAEAEEAKAAGADIVGGKELIEEIASGKNKLKVDKCFSTPGMAPNLGKIAQYLRKRRLMPDKKLGTLTSDIAGQLKELRQGRVEFKMESKSILHVGLGKVSYKEEALRENISAFMNAVLLAKPAGLKKTSKYAGYVLSVHISSTMGPGLPVSIQSISKAADNYKKMHMV

SEQ ID NO: 10823 - DNA, 1691 bp, Glycine max
  misc_feature (1)..(1691): Ceres Seq. ID no. 12608060
accagaacatcctaatcgaaaaagtatagggtgaaagtcctttgggacttgggcgctgggatgatgtatgtaatatatagggtaacataaaaatagcgagcgcaaccctctctcccagtctcggaagaagaaatgaagcagctgccaacgctgctgacgaagtccctctcactctcagtgtgttctttgccagcagcagcttccacaaccacccttcaacaaattgctctccatcaacccaaagtttgtgtttggtaggtgttgcaaaggttgtacttaaaaaggggaagacacaactctttaaggatggcaacccaatggtgtacagtggagctgttgatagaataattgggaggccacctcccaagaccggggatgttgttctggtagcagatgggactgagaaaccaattggatggggcatgtacaactcagtttctatgttctgtgttcggctcatgcagcttgaagatgaagctactagcgattcatcttgtgcattgaatatggagaaactgattgaaacaagaattgatgcagctgttgaaatgcgtagaaggttgggtcttccatcagtccacaccaatgcataccgtctaatcaatagtgagggtgacagactatcaggattgataattgacgtctttggaggtgttgctgtagtagcgtcatctgctgcttgggttgagaaatacaaatcagagatagaggcatgcatcaagaaaatcaactatatcaatcatgtaaattggaggccatctgttgatattttaaaggaagatggagttaatgaatctgatttaaacaaaatgcattcatctacatgtcctgaaagaacaaagattgtggaaaatgaaattgtatacacaatttcattgaagggccagaagacgggattctatgcagatcagcgtgagaaccgccagtttatatcaagaatttcagatggtcaaaaggttcttgatatttgctgctatagtggcggttttgctctaaatgctgtgcgtggaggtgctctaaatgtcaccggtattgacacatcaccgctagctttggagcttgctaaagaaaatgttgtactcaacaacattgatcctggaagaatatcctttttgagggaagatgctactgaatttatgaagggtgctctcttgagaaatgaatcctgggatattgtcatcattgatcctcctaaactggcaccaacaaaaaaggttctacatagtgcttctggtatgtacaggaatttgaattcacttgctatgcaacttacaaaaagaggtggtcttctgatgacatgttcctgttctggagctgtgacccaaagtgggatattcatgcgcatccttcagggtgcagcatctatggcgggtaggagaatcactgtcctcagacaggctggagcagcttgtgatcaccctatcgatccatcatacccagaaggagcatatctaaccaacattctattgcgagtttcatgagtattgtatttgggggattttcattcatttaagttttttcccatgtaattatatattttaatggaactttggaaagtgccctttcaccgaattagtgaagaaaatgtcttacacatcagttgaaagaaaaaaatgggcataggtttgcttatttaattaataattattgtcaaactgaaaaaaaaaaaaaaaaaagcttatcgataccgt

SEQ ID NO: 10824 - protein, 387 aa, Glycine max
  peptide (1)..(387): Ceres Seq. ID no. 12608061
  misc_feature (1)..(176): NCBI GI NO: 18404875 NR Description: expressed protein; protein id: At1g54310
  misc_feature (1)..(176): NCBI GI NO: 25405715 NR Description: hypothetical protein F20D21.13
  misc_feature (1)..(387): NCBI GI NO: 22985051 NR Description: hypothetical protein [Burkholderia fungorum]
  misc_feature (1)..(386): NCBI GI NO: 17544770 NR Description: CONSERVED HYPOTHETICAL PROTEIN
  misc_feature (1)..(386): NCBI GI NO: 33347501 NR Description: putative oxidoreductase [Escherichia coli K12]
  misc_feature (1)..(386): NCBI GI NO: 38703907 NR Description: putative oxidoreductase [Escherichia coli O157:H7]
  misc_feature (1)..(386): NCBI GI NO: 26246990 NR Description: Hypothetical protein yccW
  misc_feature (1)..(386): NCBI GI NO: 29349739 NR Description: conserved hypothetical protein
  misc_feature (1)..(386): NCBI GI NO: 21245076 NR Description: oxidoreductase
  misc_feature (1)..(386): NCBI GI NO: 24112380 NR Description: orf, conserved hypothetical protein
MVYSGAVDRIIGRPPPKTGDVVLVADGTEKPIGWGMYNSVSMFCVRLMQLEDEATSDSSCALNMEKLIETRIDAAVEMRRRLGLPSVHTNAYRLINSEGDRLSGLIIDVFGGVAVVASSAAWVEKYKSEIEACIKKINYINHVNWRPSVDILKEDGVNESDLNKMHSSTCPERTKIVENEIVYTISLKGQKTGFYADQRENRQFISRISDGQKVLDICCYSGGFALNAVRGGALNVTGIDTSPLALELAKENVVLNNIDPGRISFLREDATEFMKGALLRNESWDIVIIDPPKLAPTKKVLHSASGMYRNLNSLAMQLTKRGGLLMTCSCSGAVTQSGIFMRILQGAASMAGRRITVLRQAGAACDHPIDPSYPEGAYLTNILLRVS

SEQ ID NO: 10825 - protein, 352 aa, Glycine max
  peptide (1)..(352): Ceres Seq. ID no. 12608062
  misc_feature (1)..(141): NCBI GI NO: 18404875 NR Description: expressed protein; protein id: At1g54310
  misc_feature (1)..(141): NCBI GI NO: 25405715 NR Description: hypothetical protein F20D21.13
  misc_feature (1)..(352): NCBI GI NO: 22985051 NR Description: hypothetical protein [Burkholderia fungorum]
  misc_feature (1)..(351): NCBI GI NO: 17544770 NR Description: CONSERVED HYPOTHETICAL PROTEIN
  misc_feature (1)..(351): NCBI GI NO: 33347501 NR Description: putative oxidoreductase [Escherichia coli K12]
  misc_feature (1)..(351): NCBI GI NO: 38703907 NR Description: putative oxidoreductase [Escherichia coli O157:H7]
  misc_feature (1)..(351): NCBI GI NO: 26246990 NR Description: Hypothetical protein yccW
  misc_feature (1)..(351): NCBI GI NO: 29349739 NR Description: conserved hypothetical protein
  misc_feature (1)..(351): NCBI GI NO: 21245076 NR Description: oxidoreductase
  misc_feature (1)..(351): NCBI GI NO: 24112380 NR Description: orf, conserved hypothetical protein
MYNSVSMFCVRLMQLEDEATSDSSCALNMEKLIETRIDAAVEMRRRLGLPSVHTNAYRLINSEGDRLSGLIIDVFGGVAVVASSAAWVEKYKSEIEACIKKINYINHVNWRPSVDILKEDGVNESDLNKMHSSTCPERTKIVENEIVYTISLKGQKTGFYADQRENRQFISRISDGQKVLDICCYSGGFALNAVRGGALNVTGIDTSPLALELAKENVVLNNIDPGRISFLREDATEFMKGALLRNESWDIVIIDPPKLAPTKKVLHSASGMYRNLNSLAMQLTKRGGLLMTCSCSGAVTQSGIFMRILQGAASMAGRRITVLRQAGAACDHPIDPSYPEGAYLTNILLRVS

SEQ ID NO: 10826 - protein, 346 aa, Glycine max
  peptide (1)..(346): Ceres Seq. ID no. 12608063
  misc_feature (1)..(135): NCBI GI NO: 18404875 NR Description: expressed protein; protein id: At1g54310
  misc_feature (1)..(135): NCBI GI NO: 25405715 NR Description: hypothetical protein F20D21.13
  misc_feature (1)..(346): NCBI GI NO: 22985051 NR Description: hypothetical protein [Burkholderia fungorum]
  misc_feature (1)..(345): NCBI GI NO: 17544770 NR Description: CONSERVED HYPOTHETICAL PROTEIN
  misc_feature (1)..(345): NCBI GI NO: 33347501 NR Description: putative oxidoreductase [Escherichia coli K12]
  misc_feature (1)..(345): NCBI GI NO: 38703907 NR Description: putative oxidoreductase [Escherichia coli O157:H7]
  misc_feature (1)..(345): NCBI GI NO: 26246990 NR Description: Hypothetical protein yccW
  misc_feature (1)..(345): NCBI GI NO: 29349739 NR Description: conserved hypothetical protein
  misc_feature (1)..(345): NCBI GI NO: 21245076 NR Description: oxidoreductase
  misc_feature (1)..(345): NCBI GI NO: 24112380 NR Description: orf, conserved hypothetical protein
MFCVRLMQLEDEATSDSSCALNMEKLIETRIDAAVEMRRRLGLPSVHTNAYRLINSEGDRLSGLIIDVFGGVAVVASSAAWVEKYKSEIEACIKKINYINHVNWRPSVDILKEDGVNESDLNKMHSSTCPERTKIVENEIVYTISLKGQKTGFYADQRENRQFISRISDGQKVLDICCYSGGFALNAVRGGALNVTGIDTSPLALELAKENVVLNNIDPGRISFLREDATEFMKGALLRNESWDIVIIDPPKLAPTKKVLHSASGMYRNLNSLAMQLTKRGGLLMTCSCSGAVTQSGIFMRILQGAASMAGRRITVLRQAGAACDHPIDPSYPEGAYLTNILLRVS

SEQ ID NO: 10827 - DNA, 1127 bp, Glycine max
  misc_feature (1)..(1127): Ceres Seq. ID no. 14305682
acaacgcgcgctttacgagagcagggaaccagaggggaactcgtgcttagctttcctgtagcttcgtttgcaccatccatggccgatccagccgaggagaccgtcgccgcgcccccgccgaccccggcagctcccgccgagggcgccccgccgctgtcggcggagccgccggctagcaccgacgcctcgccggagaaggcggccccgcctgcgcctgcgccggacacgacggtgaggtcccgggggttcaggctgctcggcgaggacacctccgtgcacaaggtgctcggtggcggtaaaactgctgatgtactgttatggaaggacaagaaaacaactgctgtagtgatcggtggcacaactgtcatatgggttttatttgaagtgcttgattaccatctcttaactctgctatcccatgtgatgattggtgtcctggccatcttgttcgtgtggtcgaaagctatgaccttcatcaagaagagtccgccagatattcctgtagtcgagatacctgaagacctcgctgtgaatgtatcacgggcactacgcagcgatgtcaacagatcacttcacttgttgcgcgagattgcaatggggcatgatctgaagaaattccttggtgtgattgctggtctctgggttctgtcagaagttggaagctgctgtgatttcctcaccttgatatatattgctgtcctgatgatccacacggtgccgatcttgtacgacaagtaccaggacaaggtggatcacttcgccggaaaggcccataccgaggcgtgcaagcactacgaggtgctggaccagaaggttctgagcaagataccccgaggaccggcgaaaaccaagaagacctagaatgctgggtgtctcgtgagtgcatgctgggtcgcttgtggttccgtgatcatatgcgtaatgcgacgagacgtcactcgtcttacggtcttgccttctgctcagcattgtattagctatttgtatatgcaactctgaaaacttcgaactgctacctttctactatcgcagtcgcttgtagatacctgtcctgttacttgtgtgtacgtgcggcagatgtgttctcgtgtggatgttcttagtgaaaacctgaatggatgttcttg

SEQ ID NO: 10828 - protein, 286 aa, Glycine max
  peptide (1)..(286): Ceres Seq. ID no. 14305683
  misc_feature (47)..(285): NCBI GI NO: 34904202 NR Description: P0492F05.25
  misc_feature (58)..(285): NCBI GI NO: 34909318 NR Description: OSJNBb0021A09.5
  misc_feature (84)..(286): NCBI GI NO: 34897094 NR Description: unknown protein
  misc_feature (75)..(286): NCBI GI NO: 34899590 NR Description: hypothetical protein~similar to Oryza sativachromosome3
  misc_feature (91)..(286): NCBI GI NO: 38345298 NR Description: OSJNBa0043A12.26
  misc_feature (19)..(277): NCBI GI NO: 4838513 NR Description: foocen-m2 [Rattus norvegicus]
  misc_feature (21)..(277): NCBI GI NO: 16740576 NR Description: RTN4 protein [Homo sapiens]
  misc_feature (11)..(277): NCBI GI NO: 24431933 NR Description: reticulon 4
  misc_feature (11)..(277): NCBI GI NO: 5821140 NR Description: ASY [Homo sapiens]
  misc_feature (24)..(277): NCBI GI NO: 34610241 NR Description: reticulon 4 isoform B2 [Mus musculus]
TTRALREQGTRGELVLSFPVASFAPSMADPAEETVAAPPPTPAAPAEGAPPLSAEPPASTDASPEKAAPPAPAPDTTVRSRGFRLLGEDTSVHKVLGGGKTADVLLWKDKKTTAVVIGGTTVIWVLFEVLDYHLLTLLSHVMIGVLAILFVWSKAMTFIKKSPPDIPVVEIPEDLAVNVSRALRSDVNRSLHLLREIAMGHDLKKFLGVIAGLWVLSEVGSCCDFLTLIYIAVLMIHTVPILYDKYQDKVDHFAGKAHTEACKHYEVLDQKVLSKIPRGPAKTKKT

SEQ ID NO: 10829 - protein, 260 aa, Glycine max
  peptide (1)..(260): Ceres Seq. ID no. 14305684
  misc_feature (21)..(259): NCBI GI NO: 34904202 NR Description: P0492F05.25
  misc_feature (32)..(259): NCBI GI NO: 34909318 NR Description: OSJNBb0021A09.5
  misc_feature (58)..(260): NCBI GI NO: 34897094 NR Description: unknown protein
  misc_feature (49)..(260): NCBI GI NO: 34899590 NR Description: hypothetical protein~similar to Oryza sativachromosome3
  misc_feature (65)..(260): NCBI GI NO: 38345298 NR Description: OSJNBa0043A12.26
  misc_feature (1)..(251): NCBI GI NO: 4838513 NR Description: foocen-m2 [Rattus norvegicus]
  misc_feature (1)..(251): NCBI GI NO: 16740576 NR Description: RTN4 protein [Homo sapiens]
  misc_feature (1)..(251): NCBI GI NO: 24431933 NR Description: reticulon 4
  misc_feature (1)..(251): NCBI GI NO: 5821140 NR Description: ASY [Homo sapiens]
  misc_feature (1)..(251): NCBI GI NO: 34610241 NR Description: reticulon 4 isoform B2 [Mus musculus]
MADPAEETVAAPPPTPAAPAEGAPPLSAEPPASTDASPEKAAPPAPAPDTTVRSRGFRLLGEDTSVHKVLGGGKTADVLLWKDKKTTAVVIGGTTVIWVLFEVLDYHLLTLLSHVMIGVLAILFVWSKAMTFIKKSPPDIPVVEIPEDLAVNVSRALRSDVNRSLHLLREIAMGHDLKKFLGVIAGLWVLSEVGSCCDFLTLIYIAVLMIHTVPILYDKYQDKVDHFAGKAHTEACKHYEVLDQKVLSKIPRGPAKTKKT

SEQ ID NO: 10830 - protein, 145 aa, Glycine max
  peptide (1)..(145): Ceres Seq. ID no. 14305685
  misc_feature (1)..(144): NCBI GI NO: 34904202 NR Description: P0492F05.25
  misc_feature (1)..(144): NCBI GI NO: 34909318 NR Description: OSJNBb0021A09.5
  misc_feature (1)..(145): NCBI GI NO: 34897094 NR Description: unknown protein
  misc_feature (1)..(145): NCBI GI NO: 34899590 NR Description: hypothetical protein~similar to Oryza sativachromosome3
  misc_feature (1)..(145): NCBI GI NO: 38345298 NR Description: OSJNBa0043A12.26
  misc_feature (1)..(136): NCBI GI NO: 4838513 NR Description: foocen-m2 [Rattus norvegicus]
  misc_feature (1)..(136): NCBI GI NO: 16740576 NR Description: RTN4 protein [Homo sapiens]
  misc_feature (1)..(136): NCBI GI NO: 24431933 NR Description: reticulon 4
  misc_feature (1)..(136): NCBI GI NO: 5821140 NR Description: ASY [Homo sapiens]
  misc_feature (1)..(136): NCBI GI NO: 34610241 NR Description: reticulon 4 isoform B2 [Mus musculus]
MIGVLAILFVWSKAMTFIKKSPPDIPVVEIPEDLAVNVSRALRSDVNRSLHLLREIAMGHDLKKFLGVIAGLWVLSEVGSCCDFLTLIYIAVLMIHTVPILYDKYQDKVDHFAGKAHTEACKHYEVLDQKVLSKIPRGPAKTKKT

SEQ ID NO: 10831 - DNA, 1655 bp, Glycine max
  misc_feature (1)..(1655): Ceres Seq. ID no. 13594232
atttcctgcttctctctcatctattgactcatccattacctgaacaaacacctagaattttgtcctgttcccttcatttcattttcattggatttatatagcattgcaacgatcggatagctatttgctacttgattgattctttgccagcgtgggatttgagaaagaaaaaaaaaacagtaacaggaaaggagggtagcattaagggaagaactcaggttgcgggaagaggtaaaaaaaatggagcatggggatggagaagcggtgataattgggggtatggtattggacattcatgctacaccttcaatgctagcaaatcctggaaccactacccctggcaaggtctattatgtccaaggaggtgtggcaaggaatgtagccgagtgcatgtcaaaactaggagcaaagccatacatgattagtgctcttgggtttgacatggcaggaaatctgctgttgaatcagtggaaatctgctggcctatctatagaaggtattttgaaggataaagatattgagactccagtagtatgcaatatatttgatgttaatggtgaggtagcagctggtgttgctagtgtggaagcttttgaaaaatatctgacacctgactggatctttcgcttcaaaaacactttactatctgctccagtgttaatggttgatgcaaatctgagtcatccttctcttgaagctgcttgtaaaatggcgattgacatggagtgtcctgtatggtttgagccagtatcagttactaaatcccgaagaatcagttctattgtcgagtatgtaacttttgcttctccaaatgaagatgaacttattgcgatggcgaatgctttatctggcagtgatgagtttcatccacttaaagaaagtcagaagaaaaatatttcagtattatctttgtttcaaatgctgaaaccagcaatatgggttttgctagaaaaaggcattaaagtggtcctagtgacctttggctctaatggagtgtttttatgcaataaaggatggcctagacaatttaaaatgcctgcagagaaaacaaatcagtgtggcttcagaggacaattattcaagactgttatgcaaaaatgtccacctagtcgttattctggtttttcagaacttgatagaagctctcatctctttgctgtgcattttccctctcttcctgcatcagttgtgaggcttactggcgctggtgattgcttagttggtggaacactcacatcaatttgtgcaggattagatattatgcaaagtgtgtctgttggcattgcagtggctaaagctgtagtggaggttgaggctaatgtcccatctactttcagtttatctgctatcacaggtgctaaagttctcttcccccaatcgatgttgtaaattttgaatgaggatgactggtagataaacagcttgagttgcgatacaaccaccacctttgcccagaaaaaatgataacatcttacaaaggcttgtggcattgaaatatgaattaataactatatttttttagtttttatttcatatttttctataagagtttaattgatacacttttttttaaacattgatatgcacttttgcactaacatgttatacttgatcatgtcatgatgtcggtctttgtagtgaatatttttccccct

SEQ ID NO: 10832 - protein, 382 aa, Glycine max
  peptide (1)..(382): Ceres Seq. ID no. 15221325
  misc_feature (7)..(362): Pfam Name: Pfam Description:  pfkB family carbohydrate kinase
  misc_feature (7)..(377): NCBI GI NO: 21536998 NR Description: unknown [Arabidopsis thaliana]
  misc_feature (7)..(377): NCBI GI NO: 18402606 NR Description: pfkB type carbohydrate kinase protein family
  misc_feature (29)..(370): NCBI GI NO: 13699076 NR Description: TMV response-related gene product
  misc_feature (178)..(372): NCBI GI NO: 25405294 NR Description: hypothetical protein F13F21.22
  misc_feature (7)..(198): NCBI GI NO: 15807303 NR Description: carbohydrate kinase, PfkB family
  misc_feature (310)..(370): NCBI GI NO: 15807303 NR Description: carbohydrate kinase, PfkB family
  misc_feature (7)..(159): NCBI GI NO: 25405294 NR Description: hypothetical protein F13F21.22
  misc_feature (10)..(242): NCBI GI NO: 20806843 NR Description: Sugar kinases, ribokinase family
  misc_feature (9)..(204): NCBI GI NO: 37528180 NR Description: hypothetical protein
  misc_feature (9)..(207): NCBI GI NO: 15802722 NR Description: putative kinase [Escherichia coli O157:H7 EDL933]
MEHGDGEAVIIGGMVLDIHATPSMLANPGTTTPGKVYYVQGGVARNVAECMSKLGAKPYMISALGFDMAGNLLLNQWKSAGLSIEGILKDKDIETPVVCNIFDVNGEVAAGVASVEAFEKYLTPDWIFRFKNTLLSAPVLMVDANLSHPSLEAACKMAIDMECPVWFEPVSVTKSRRISSIVEYVTFASPNEDELIAMANALSGSDEFHPLKESQKKNISVLSLFQMLKPAIWVLLEKGIKVVLVTFGSNGVFLCNKGWPRQFKMPAEKTNQCGFRGQLFKTVMQKCPPSRYSGFSELDRSSHLFAVHFPSLPASVVRLTGAGDCLVGGTLTSICAGLDIMQSVSVGIAVAKAVVEVEANVPSTFSLSAITGAKVLFPQSML

SEQ ID NO: 10833 - protein, 369 aa, Glycine max
  peptide (1)..(369): Ceres Seq. ID no. 15221326
  misc_feature (1)..(349): Pfam Name: Pfam Description:  pfkB family carbohydrate kinase
  misc_feature (1)..(364): NCBI GI NO: 21536998 NR Description: unknown [Arabidopsis thaliana]
  misc_feature (1)..(364): NCBI GI NO: 18402606 NR Description: pfkB type carbohydrate kinase protein family
  misc_feature (16)..(357): NCBI GI NO: 13699076 NR Description: TMV response-related gene product
  misc_feature (165)..(359): NCBI GI NO: 25405294 NR Description: hypothetical protein F13F21.22
  misc_feature (1)..(185): NCBI GI NO: 15807303 NR Description: carbohydrate kinase, PfkB family
  misc_feature (297)..(357): NCBI GI NO: 15807303 NR Description: carbohydrate kinase, PfkB family
  misc_feature (1)..(146): NCBI GI NO: 25405294 NR Description: hypothetical protein F13F21.22
  misc_feature (1)..(229): NCBI GI NO: 20806843 NR Description: Sugar kinases, ribokinase family
  misc_feature (1)..(191): NCBI GI NO: 37528180 NR Description: hypothetical protein
  misc_feature (1)..(194): NCBI GI NO: 15802722 NR Description: putative kinase [Escherichia coli O157:H7 EDL933]
MVLDIHATPSMLANPGTTTPGKVYYVQGGVARNVAECMSKLGAKPYMISALGFDMAGNLLLNQWKSAGLSIEGILKDKDIETPVVCNIFDVNGEVAAGVASVEAFEKYLTPDWIFRFKNTLLSAPVLMVDANLSHPSLEAACKMAIDMECPVWFEPVSVTKSRRISSIVEYVTFASPNEDELIAMANALSGSDEFHPLKESQKKNISVLSLFQMLKPAIWVLLEKGIKVVLVTFGSNGVFLCNKGWPRQFKMPAEKTNQCGFRGQLFKTVMQKCPPSRYSGFSELDRSSHLFAVHFPSLPASVVRLTGAGDCLVGGTLTSICAGLDIMQSVSVGIAVAKAVVEVEANVPSTFSLSAITGAKVLFPQSML

SEQ ID NO: 10834 - protein, 359 aa, Glycine max
  peptide (1)..(359): Ceres Seq. ID no. 15221327
  misc_feature (1)..(339): Pfam Name: Pfam Description:  pfkB family carbohydrate kinase
  misc_feature (1)..(354): NCBI GI NO: 21536998 NR Description: unknown [Arabidopsis thaliana]
  misc_feature (1)..(354): NCBI GI NO: 18402606 NR Description: pfkB type carbohydrate kinase protein family
  misc_feature (6)..(347): NCBI GI NO: 13699076 NR Description: TMV response-related gene product
  misc_feature (155)..(349): NCBI GI NO: 25405294 NR Description: hypothetical protein F13F21.22
  misc_feature (1)..(175): NCBI GI NO: 15807303 NR Description: carbohydrate kinase, PfkB family
  misc_feature (287)..(347): NCBI GI NO: 15807303 NR Description: carbohydrate kinase, PfkB family
  misc_feature (1)..(136): NCBI GI NO: 25405294 NR Description: hypothetical protein F13F21.22
  misc_feature (1)..(219): NCBI GI NO: 20806843 NR Description: Sugar kinases, ribokinase family
  misc_feature (1)..(181): NCBI GI NO: 37528180 NR Description: hypothetical protein
  misc_feature (1)..(184): NCBI GI NO: 15802722 NR Description: putative kinase [Escherichia coli O157:H7 EDL933]
MLANPGTTTPGKVYYVQGGVARNVAECMSKLGAKPYMISALGFDMAGNLLLNQWKSAGLSIEGILKDKDIETPVVCNIFDVNGEVAAGVASVEAFEKYLTPDWIFRFKNTLLSAPVLMVDANLSHPSLEAACKMAIDMECPVWFEPVSVTKSRRISSIVEYVTFASPNEDELIAMANALSGSDEFHPLKESQKKNISVLSLFQMLKPAIWVLLEKGIKVVLVTFGSNGVFLCNKGWPRQFKMPAEKTNQCGFRGQLFKTVMQKCPPSRYSGFSELDRSSHLFAVHFPSLPASVVRLTGAGDCLVGGTLTSICAGLDIMQSVSVGIAVAKAVVEVEANVPSTFSLSAITGAKVLFPQSML

SEQ ID NO: 10835 - DNA, 1245 bp, Glycine max
  misc_feature (1)..(1245): Ceres Seq. ID no. 14311777
tcccgagcaacgaaagctaggtcacgggttcgaaaccatttttcgtgaaaataggtgtttttttgagttcgtcgttttgctcttcgtgttgttgaagtgcaacgccatggacccagatcagggcacttcaaaagcctggaagcccaagttcaaacccaggaatctcaaagcagtccgagctcccaaaaccgaagcggatgataagcgaaacgaagatagcgaagtgcctcgagctctctcgcgtcgacgacatgaaaatcctgcaaaacgcgagcctaaagtcgaaagaaaatctagcgtggaagttgcatttagtcttggaagttcatcatcacattccctcaggacatatggcacaagcaaatctatagatagtggcacaagcagtggttcaccatctaaatattttgccaatgaacaaattcgttcaattgctactgaggatcaaaatgatgcttctaatgcatctgccaggaaaatcaaaagagagtacaaggaaccatgggattatgaaaactcttactatccgactactcttcctttgaggaagccaaattctggagatccagaaattcttgatgagaaagaatttggtgaagctgctactagtgtggagtatgatgagaatactgttaattctgctgcagaactcgagatcttggagagtgaggaacaaaggatgtttttctttcagattcctactcctctgcctatggacaagcagagtaataaggggaaggagaaaattggtacatcaacagtatcgggagaggccacaaagtcaaagaatgccttggaagagttgccgaggggatatatgggcaaaatgctggtgtacaagagtggagcaattttatcttagagtgtattcccctgcaaattcatggagagatgagtacccaattccaagcaatgctattcggtgtggcaaggctgtgggacactactaatgccaccaccaaaccaacattgggatttttatttgaacagtgtcattcatttccattcatggcttaactcaagcctcttctcttgttctcttgtaccattattcatgttatgatgccatagattattatagagttattgatttctcctgtcctcttcctcctctcatcttcgtgttatgtccaaattcagctatatataagatcatctgtgtttggattatgatattcttcttatttaaactatttatttatttaaataggttcaagggacctgatgttaatgtgccatggaaac

SEQ ID NO: 10836 - protein, 286 aa, Glycine max
  peptide (1)..(286): Ceres Seq. ID no. 14311778
  misc_feature (224)..(284): Pfam Name: Pfam Description:  RNA polymerase III RPC4
  misc_feature (79)..(284): NCBI GI NO: 15234965 NR Description: hypothetical protein [Arabidopsis thaliana]
  misc_feature (98)..(284): NCBI GI NO: 7486060 NR Description: hypothetical protein F24A6
  misc_feature (90)..(284): NCBI GI NO: 21740741 NR Description: OSJNBa0072K14.6
  misc_feature (87)..(284): NCBI GI NO: 15242400 NR Description: hypothetical protein [Arabidopsis thaliana]
PEQRKLGHGFETIFRENRCFFEFVVLLFVLLKCNAMDPDQGTSKAWKPKFKPRNLKAVRAPKTEADDKRNEDSEVPRALSRRRHENPAKREPKVERKSSVEVAFSLGSSSSHSLRTYGTSKSIDSGTSSGSPSKYFANEQIRSIATEDQNDASNASARKIKREYKEPWDYENSYYPTTLPLRKPNSGDPEILDEKEFGEAATSVEYDENTVNSAAELEILESEEQRMFFFQIPTPLPMDKQSNKGKEKIGTSTVSGEATKSKNALEELPRGYMGKMLVYKSGAILS

SEQ ID NO: 10837 - protein, 251 aa, Glycine max
  peptide (1)..(251): Ceres Seq. ID no. 14311779
  misc_feature (189)..(249): Pfam Name: Pfam Description:  RNA polymerase III RPC4
  misc_feature (44)..(249): NCBI GI NO: 15234965 NR Description: hypothetical protein [Arabidopsis thaliana]
  misc_feature (63)..(249): NCBI GI NO: 7486060 NR Description: hypothetical protein F24A6
  misc_feature (55)..(249): NCBI GI NO: 21740741 NR Description: OSJNBa0072K14.6
  misc_feature (52)..(249): NCBI GI NO: 15242400 NR Description: hypothetical protein [Arabidopsis thaliana]
MDPDQGTSKAWKPKFKPRNLKAVRAPKTEADDKRNEDSEVPRALSRRRHENPAKREPKVERKSSVEVAFSLGSSSSHSLRTYGTSKSIDSGTSSGSPSKYFANEQIRSIATEDQNDASNASARKIKREYKEPWDYENSYYPTTLPLRKPNSGDPEILDEKEFGEAATSVEYDENTVNSAAELEILESEEQRMFFFQIPTPLPMDKQSNKGKEKIGTSTVSGEATKSKNALEELPRGYMGKMLVYKSGAILS

SEQ ID NO: 10838 - DNA, 859 bp, Glycine max
  misc_feature (1)..(859): Ceres Seq. ID no. 15226220
aataacctaagaaaacctaaacccctcgttggtggtagcggctgtgacagactcagaggcggagcaaggagaatgggaaggtcgagaagaaagtacaagcaatcgagaaccaaggtccgtgtgggactccctaagaagaaccctaggcttttcaaaccctctttctccgttccacccaagctcttgcgaaccctcgccgaagagccccaatgggacgaccaaggcaccgttaacagcaactactcctccttcggcgttctctccgaccctaactccctcaccgagccttctcccgatcctcaaaccttcgattccggcagcgatctcgaagaagacgacttgaaatcagccctaggaaagaagcgaagggatgggagaagcgcgccgcctcagcctctgactgcaatgcaacggattcatattagtcgccttgtcgataaatacggaaatgattatcagagtatgttgatggatataaagctgaatccgatgcagcattcaattgcaactttgcagaagctatgcatgaggtatcatatataccaaaacaagaaccctctccttaaggccaaatgaagtgggagcttaattaattaatccattgacggaacagttgcacgtggaggcccaaatttttgtcacagtgaggatgtgtttctctaccatgtgtcatcgttgagaaattttgttaatgcttttgaatctatgaattatattatgtggatttttggttgtggtagatgaggcattctggacttctggtcttcctacacctgctgccaccaagattatgtagcatttttacatgcatgcacttttggaattctaaagtaattattataaaattgacaaatttatt

SEQ ID NO: 10839 - protein, 191 aa, Glycine max
  peptide (1)..(191): Ceres Seq. ID no. 15226221
  misc_feature (87)..(188): NCBI GI NO: 18379024 NR Description: expressed protein [Arabidopsis thaliana]
  misc_feature (25)..(93): NCBI GI NO: 18379024 NR Description: expressed protein [Arabidopsis thaliana]
  misc_feature (25)..(93): NCBI GI NO: 25372996 NR Description: hypothetical protein F22D16
NNLRKPKPLVGGSGCDRLRGGARRMGRSRRKYKQSRTKVRVGLPKKNPRLFKPSFSVPPKLLRTLAEEPQWDDQGTVNSNYSSFGVLSDPNSLTEPSPDPQTFDSGSDLEEDDLKSALGKKRRDGRSAPPQPLTAMQRIHISRLVDKYGNDYQSMLMDIKLNPMQHSIATLQKLCMRYHIYQNKNPLLKAK

SEQ ID NO: 10840 - protein, 167 aa, Glycine max
  peptide (1)..(167): Ceres Seq. ID no. 15226222
  misc_feature (63)..(164): NCBI GI NO: 18379024 NR Description: expressed protein [Arabidopsis thaliana]
  misc_feature (1)..(69): NCBI GI NO: 18379024 NR Description: expressed protein [Arabidopsis thaliana]
  misc_feature (1)..(69): NCBI GI NO: 25372996 NR Description: hypothetical protein F22D16
MGRSRRKYKQSRTKVRVGLPKKNPRLFKPSFSVPPKLLRTLAEEPQWDDQGTVNSNYSSFGVLSDPNSLTEPSPDPQTFDSGSDLEEDDLKSALGKKRRDGRSAPPQPLTAMQRIHISRLVDKYGNDYQSMLMDIKLNPMQHSIATLQKLCMRYHIYQNKNPLLKAK

SEQ ID NO: 10841 - DNA, 1224 bp, Glycine max
  misc_feature (1)..(1224): Ceres Seq. ID no. 15168413
aatgcccaagcctatgtgaagccaccaccatggcgatgaccaccacaacgacgtcgtctccaccatttctcttttcattcctttctccaaaaccctttcccccaaacccttcgctccctcttccccaattgcaaaaccgaacaccgctcagttccacccatcgcttcttctctgccatccccaaagcgaaacgcggcgtttcagggacccatttgtgcctcgcttctcgcgccaaagccaaacccaccccgtcttcggtggaacaagagagcgacgacaattttagaaaaagagtgcttcaaattgcgctgtgggttgcagaaggtgtctacattctatggctcttccttcttccttatgcccctggagatcctgtatgggccatcagttctgacacattgaactctcttgtgggtctttctctcaatttctttttaatattgcctttcatgaactttgttggaattcgtctgattgatgcgccagttcttcatcctatgtccgaaggactattcaattttgtgattggctggacgttcatgtttgcccctttgctgttcacagatcgcaacaatgatagatataaagggtctctagatgtactctggggcctgcaaatgttcctgacaaatacgtttctgatcccatacatggctatccgattgaatgatgctgatgatgagagtgttacaagaaaactttcacagtttggctcagtgatgacaaatggtgctccaattgttggagtgattggtgggagtgcatgcattgtatctctattgtgggctctttttggtcgaatggatgcaaattttgggggcatagcagatagatgggactacttggtgggttatcttggatcagaaaggctggcttatgctttcatatgggatatatgtctttacataattttccagccttggttgattggagacaacctccagaatgtccaggaaaacaaggttgttgtagtgaagtatcttagatatgtacccgtgattggcttaattgcgtatctattttgcttggaccctaaagaggtctgattattgtgtttggatgattagtttactttacacctttcagttaaaagttactatctcttgaacattttgaagttgaatttcacgttttgttggggggtaggggctcaaattacttgttggcctcaagtttaaacttttggtatgtaagtttgttaaatatttggagggatattttgtc

SEQ ID NO: 10842 - protein, 347 aa, Glycine max
  peptide (1)..(347): Ceres Seq. ID no. 15168414
  misc_feature (48)..(340): NCBI GI NO: 18404669 NR Description: expressed protein [Arabidopsis thaliana]
  misc_feature (10)..(346): NCBI GI NO: 38344973 NR Description: OSJNBa0072F16.18
  misc_feature (208)..(340): NCBI GI NO: 7939567 NR Description: gene_id:K13N2.15~unknown protein
  misc_feature (177)..(346): NCBI GI NO: 38567712 NR Description: B1358B12.10
  misc_feature (158)..(339): NCBI GI NO: 23043330 NR Description: hypothetical protein
  misc_feature (10)..(159): NCBI GI NO: 38567712 NR Description: B1358B12.10
  misc_feature (48)..(121): NCBI GI NO: 7939568 NR Description: gene_id:K13N2.16~unknown protein
CPSLCEATTMAMTTTTTSSPPFLFSFLSPKPFPPNPSLPLPQLQNRTPLSSTHRFFSAIPKAKRGVSGTHLCLASRAKAKPTPSSVEQESDDNFRKRVLQIALWVAEGVYILWLFLLPYAPGDPVWAISSDTLNSLVGLSLNFFLILPFMNFVGIRLIDAPVLHPMSEGLFNFVIGWTFMFAPLLFTDRNNDRYKGSLDVLWGLQMFLTNTFLIPYMAIRLNDADDESVTRKLSQFGSVMTNGAPIVGVIGGSACIVSLLWALFGRMDANFGGIADRWDYLVGYLGSERLAYAFIWDICLYIIFQPWLIGDNLQNVQENKVVVVKYLRYVPVIGLIAYLFCLDPKEV

SEQ ID NO: 10843 - protein, 338 aa, Glycine max
  peptide (1)..(338): Ceres Seq. ID no. 15168415
  misc_feature (39)..(331): NCBI GI NO: 18404669 NR Description: expressed protein [Arabidopsis thaliana]
  misc_feature (1)..(337): NCBI GI NO: 38344973 NR Description: OSJNBa0072F16.18
  misc_feature (199)..(331): NCBI GI NO: 7939567 NR Description: gene_id:K13N2.15~unknown protein
  misc_feature (168)..(337): NCBI GI NO: 38567712 NR Description: B1358B12.10
  misc_feature (149)..(330): NCBI GI NO: 23043330 NR Description: hypothetical protein
  misc_feature (1)..(150): NCBI GI NO: 38567712 NR Description: B1358B12.10
  misc_feature (39)..(112): NCBI GI NO: 7939568 NR Description: gene_id:K13N2.16~unknown protein
MAMTTTTTSSPPFLFSFLSPKPFPPNPSLPLPQLQNRTPLSSTHRFFSAIPKAKRGVSGTHLCLASRAKAKPTPSSVEQESDDNFRKRVLQIALWVAEGVYILWLFLLPYAPGDPVWAISSDTLNSLVGLSLNFFLILPFMNFVGIRLIDAPVLHPMSEGLFNFVIGWTFMFAPLLFTDRNNDRYKGSLDVLWGLQMFLTNTFLIPYMAIRLNDADDESVTRKLSQFGSVMTNGAPIVGVIGGSACIVSLLWALFGRMDANFGGIADRWDYLVGYLGSERLAYAFIWDICLYIIFQPWLIGDNLQNVQENKVVVVKYLRYVPVIGLIAYLFCLDPKEV

SEQ ID NO: 10844 - protein, 336 aa, Glycine max
  peptide (1)..(336): Ceres Seq. ID no. 15168416
  misc_feature (37)..(329): NCBI GI NO: 18404669 NR Description: expressed protein [Arabidopsis thaliana]
  misc_feature (1)..(335): NCBI GI NO: 38344973 NR Description: OSJNBa0072F16.18
  misc_feature (197)..(329): NCBI GI NO: 7939567 NR Description: gene_id:K13N2.15~unknown protein
  misc_feature (166)..(335): NCBI GI NO: 38567712 NR Description: B1358B12.10
  misc_feature (147)..(328): NCBI GI NO: 23043330 NR Description: hypothetical protein
  misc_feature (1)..(148): NCBI GI NO: 38567712 NR Description: B1358B12.10
  misc_feature (37)..(110): NCBI GI NO: 7939568 NR Description: gene_id:K13N2.16~unknown protein
MTTTTTSSPPFLFSFLSPKPFPPNPSLPLPQLQNRTPLSSTHRFFSAIPKAKRGVSGTHLCLASRAKAKPTPSSVEQESDDNFRKRVLQIALWVAEGVYILWLFLLPYAPGDPVWAISSDTLNSLVGLSLNFFLILPFMNFVGIRLIDAPVLHPMSEGLFNFVIGWTFMFAPLLFTDRNNDRYKGSLDVLWGLQMFLTNTFLIPYMAIRLNDADDESVTRKLSQFGSVMTNGAPIVGVIGGSACIVSLLWALFGRMDANFGGIADRWDYLVGYLGSERLAYAFIWDICLYIIFQPWLIGDNLQNVQENKVVVVKYLRYVPVIGLIAYLFCLDPKEV

SEQ ID NO: 10845 - DNA, 2068 bp, Glycine max
  misc_feature (1)..(2068): Ceres Seq. ID no. 15225519
cgggccccccctcgagtcagctacgtaggcccccccccgagtagaatagaatggaaatggaaattactattcacgaaattaccactctcaaacaccaaaccaaatcaaaccttccctctccttctgttctaaaacattgtccctattctctctctgcaacattcattttccatcgccatcagtgccatgcaggaggctttggctatacaatgcatgtaggaggtttgaagaagtccaagtaacctggaagaagctttgacatacattcaggtaaaatgagagacagcacagtgcaaaattgtcaccaaaataatagcggagcagtagaagcaggtgcaccttcagtcgagaaagatcttgcttcttcagtaaaagcagctactgaagttcctccatcctcttttcagttctatgtctggtcagatgtgggaattaatcttcatgttgatttaaatctgtcctcatcagattggattaacaggtttagaaatgaggtttgcataagtgagaatatgcatcgaaacaaatcccgaagcctttggcaggatctgagcagcttaggagagaattatatgcaaggtaaatcttcctttttatggagtaaaaattcttgtcaaattgaggatcatgatggacaggccagatcttcctcaagctctaaacttacaaaagatggtgctacagagtcaggtcaacagaataaagatggcattcctttgagatgtgattcttttactccatgcaacatgactatagaagtgaaagataatatactggaaaatcattcaactgtctcagctgaactaaatgtaaatgtggtagacaatttaatgcaagagcaatcaactgtctcagctgaggttagttgtgctatagacacatctaagaaaattattgattcagatgctaccaatatgccattcatcaagtcactttgtgattctgttgtcaactcactgtcagatcctggcacactggaacttcaaaattcaaagcctgataatgaatgttctgagtattgtgctctgctaaatggttcttgctttgtgaaccctggtgtggtgtgtgctggagcttcattaagtagttctgtgggactacaaaattcagaagttataagttgtcataaatatgaatcagtttcactctgtgacaatgatggttccctggatttaagtgatccaaagagtacttctgacatggaacaggatagactagtcaaaactcggattatttttgaaactgacagtaacaatttcacatcagtaactgatgaatgggaggtggacaagattgttgatggaagggagagttcagaatgctcccagtttgatgatccacttaagaaatccagcctagactataataatcaggattctaaactggagctctgcaaaaagagaaaaaaccgagactctgagattcaatgttcaaatggtgaacctactactacaagagttttgcggagcatgaagaatactgctacaagagttttacgaagcatgaagaatgtgaagcttcctagataatccatgaggctaatctccaaggtgctttgacactttcttatggaattaaagtaaaactgtatacaatgaatataaaacctgaaaagtaaaagttattcaatttaattgcggcattcagtgtctcaaattggaagttacagtatttacctgatatttgaataggatgtacatttttwaaaaaaaaaaaaaaaaaaaaaaaaaaaaaaaaaaaaaaaaaaaaaaaaaaaaaaaaaaaaaaaaaaaaaaaaaaaaaaaaaaaaaaaaaaaaaaaaaaaaaaaaaattcccggccccccgggaaaccaaaaatttaaaaagggcccccccccggggggaacccccactttttttccccttaaagaagggaaaattccaagttggggaaaaaaagggaaaaaatttttcccggggaaaaattgtaaccccccaaaaatcccaaaaaaaaaaaaacccaaaaaaaaaaaggaaaaacccggggggcccaaaggagggaccaaaccccaataaatggggtggccccaacggcccctttccaagggg

SEQ ID NO: 10846 - protein, 417 aa, Glycine max
  peptide (1)..(417): Ceres Seq. ID no. 15225520
  misc_feature (41)..(272): NCBI GI NO: 15231683 NR Description: expressed protein [Arabidopsis thaliana]
MRDSTVQNCHQNNSGAVEAGAPSVEKDLASSVKAATEVPPSSFQFYVWSDVGINLHVDLNLSSSDWINRFRNEVCISENMHRNKSRSLWQDLSSLGENYMQGKSSFLWSKNSCQIEDHDGQARSSSSSKLTKDGATESGQQNKDGIPLRCDSFTPCNMTIEVKDNILENHSTVSAELNVNVVDNLMQEQSTVSAEVSCAIDTSKKIIDSDATNMPFIKSLCDSVVNSLSDPGTLELQNSKPDNECSEYCALLNGSCFVNPGVVCAGASLSSSVGLQNSEVISCHKYESVSLCDNDGSLDLSDPKSTSDMEQDRLVKTRIIFETDSNNFTSVTDEWEVDKIVDGRESSECSQFDDPLKKSSLDYNNQDSKLELCKKRKNRDSEIQCSNGEPTTTRVLRSMKNTATRVLRSMKNVKLPR

SEQ ID NO: 10847 - protein, 338 aa, Glycine max
  peptide (1)..(338): Ceres Seq. ID no. 15225521
  misc_feature (1)..(193): NCBI GI NO: 15231683 NR Description: expressed protein [Arabidopsis thaliana]
MHRNKSRSLWQDLSSLGENYMQGKSSFLWSKNSCQIEDHDGQARSSSSSKLTKDGATESGQQNKDGIPLRCDSFTPCNMTIEVKDNILENHSTVSAELNVNVVDNLMQEQSTVSAEVSCAIDTSKKIIDSDATNMPFIKSLCDSVVNSLSDPGTLELQNSKPDNECSEYCALLNGSCFVNPGVVCAGASLSSSVGLQNSEVISCHKYESVSLCDNDGSLDLSDPKSTSDMEQDRLVKTRIIFETDSNNFTSVTDEWEVDKIVDGRESSECSQFDDPLKKSSLDYNNQDSKLELCKKRKNRDSEIQCSNGEPTTTRVLRSMKNTATRVLRSMKNVKLPR

SEQ ID NO: 10848 - protein, 318 aa, Glycine max
  peptide (1)..(318): Ceres Seq. ID no. 15225522
  misc_feature (1)..(173): NCBI GI NO: 15231683 NR Description: expressed protein [Arabidopsis thaliana]
MQGKSSFLWSKNSCQIEDHDGQARSSSSSKLTKDGATESGQQNKDGIPLRCDSFTPCNMTIEVKDNILENHSTVSAELNVNVVDNLMQEQSTVSAEVSCAIDTSKKIIDSDATNMPFIKSLCDSVVNSLSDPGTLELQNSKPDNECSEYCALLNGSCFVNPGVVCAGASLSSSVGLQNSEVISCHKYESVSLCDNDGSLDLSDPKSTSDMEQDRLVKTRIIFETDSNNFTSVTDEWEVDKIVDGRESSECSQFDDPLKKSSLDYNNQDSKLELCKKRKNRDSEIQCSNGEPTTTRVLRSMKNTATRVLRSMKNVKLPR

SEQ ID NO: 10849 - DNA, 1302 bp, Glycine max
  misc_feature (1)..(1302): Ceres Seq. ID no. 14315451
aagacagagactttggatgtttcttcgttgcagaagcagaggcacaccaatcccatttaatttatcgttcctcttctcctcttcactttccaaccacccattcattccttttcttcttgcactctgccctttgggtaagcatattctcattttgcttctctgctttcataacttgaggagtacccaatagttttattagacttctttgtttggttttaactttaatctttgtggtatgatttcattccttcttagttacactacggatcatcatcatcatttttaagatagttaccacaaaagtcgacaaatttagcatatagtatgatttgtgattaaataatgagtcctagtatagacatagactatttgctcatatatgaagagaggttaaataaaaaatgaaagtgtggagttgaagagtattttagttcaagaaaacatgtaaatcaaaatgaacatggacataaaactttggattgtctatttattgtcatagattttagataaaattatcttcttttttttttgtagttctaaactgatgagatgttatgatttgtgttctacaacctttaaagcagttaacttcttcaggcagttggtaatggggaagtccaaattatgcttggttgaattccattatttctcacaaagtataggtctatgtgggtgcaggaggagtttgtaacatggctgctctacctactgcggagcttagtgatgcaaatgcaacacatgtagcaagtggtgatgtgagggtgctgcatccagtgttcaaggtttatggccaggccacggcattctccggccccattgtcaccgtgaaggtgtttgaagacaacgtgttggtgagggagcttgttgagacgaaaggcgaaggaagagtattggttgttgatggaggaggaagcttgaggtgtgcattgatgggagggaatttggtacagattgcatataacatggggtgggctgggattgtggtgaatggttgcgttagagatgtggatgatatcaatgcgtgtaatattggcgtcagagccttggcttctcatccactcagatccaacaaaaagcgcactggtgaaaagaatgtccctgtttatgttggtggaacatttattcgtgaaggagaatggttgtatgcagataatgatggcatcctcgtatcaaaatttgagttgtcaaactaaaatagtttaccttcagttcaatattattgcaactttagacttttaagtcatgctttttctggtttagtttgtggggaagtgaataaaattttaagaatttcttgtgtgc

SEQ ID NO: 10850 - protein, 166 aa, Glycine max
  peptide (1)..(166): Ceres Seq. ID no. 14315452
  misc_feature (11)..(159): Pfam Name: Pfam Description:  Demethylmenaquinone methyltransferase
  misc_feature (1)..(165): NCBI GI NO: 15241161 NR Description: dimethylmenaquinone methyltransferase family
  misc_feature (1)..(165): NCBI GI NO: 34910724 NR Description: S-adenosylmethionine: 2-demethylmenaquinonemethyltransferase-like
  misc_feature (1)..(165): NCBI GI NO: 15237348 NR Description: dimethylmenaquinone methyltransferase family
  misc_feature (1)..(165): NCBI GI NO: 21537415 NR Description: S-adenosylmethionine: 2-demethylmenaquinonemethyltransferase-like
  misc_feature (1)..(165): NCBI GI NO: 15232963 NR Description: dimethylmenaquinone methyltransferase family
  misc_feature (4)..(164): NCBI GI NO: 17546073 NR Description: PROBABLE S-ADENOSYLMETHIONINE: 2-DEMETHYLMENAQUINONEMETHYLTRANSFERASE PROTEIN
  misc_feature (1)..(164): NCBI GI NO: 22982141 NR Description: hypothetical protein [Burkholderia fungorum]
  misc_feature (6)..(164): NCBI GI NO: 22978085 NR Description: hypothetical protein [Ralstonia metallidurans]
  misc_feature (22)..(160): NCBI GI NO: 23103535 NR Description: hypothetical protein [Azotobacter vinelandii]
  misc_feature (6)..(161): NCBI GI NO: 37528580 NR Description: S-adenosylmethionine: 2-demethylmenaquinonemethyltransferase
MAALPTAELSDANATHVASGDVRVLHPVFKVYGQATAFSGPIVTVKVFEDNVLVRELVETKGEGRVLVVDGGGSLRCALMGGNLVQIAYNMGWAGIVVNGCVRDVDDINACNIGVRALASHPLRSNKKRTGEKNVPVYVGGTFIREGEWLYADNDGILVSKFELSN

SEQ ID NO: 10851 - protein, 87 aa, Glycine max
  peptide (1)..(87): Ceres Seq. ID no. 14315453
  misc_feature (1)..(80): Pfam Name: Pfam Description:  Demethylmenaquinone methyltransferase
  misc_feature (1)..(86): NCBI GI NO: 15241161 NR Description: dimethylmenaquinone methyltransferase family
  misc_feature (1)..(86): NCBI GI NO: 34910724 NR Description: S-adenosylmethionine: 2-demethylmenaquinonemethyltransferase-like
  misc_feature (1)..(86): NCBI GI NO: 15237348 NR Description: dimethylmenaquinone methyltransferase family
  misc_feature (1)..(86): NCBI GI NO: 21537415 NR Description: S-adenosylmethionine: 2-demethylmenaquinonemethyltransferase-like
  misc_feature (1)..(86): NCBI GI NO: 15232963 NR Description: dimethylmenaquinone methyltransferase family
  misc_feature (1)..(85): NCBI GI NO: 17546073 NR Description: PROBABLE S-ADENOSYLMETHIONINE: 2-DEMETHYLMENAQUINONEMETHYLTRANSFERASE PROTEIN
  misc_feature (1)..(85): NCBI GI NO: 22982141 NR Description: hypothetical protein [Burkholderia fungorum]
  misc_feature (1)..(85): NCBI GI NO: 22978085 NR Description: hypothetical protein [Ralstonia metallidurans]
  misc_feature (1)..(81): NCBI GI NO: 23103535 NR Description: hypothetical protein [Azotobacter vinelandii]
  misc_feature (1)..(82): NCBI GI NO: 37528580 NR Description: S-adenosylmethionine: 2-demethylmenaquinonemethyltransferase
MGGNLVQIAYNMGWAGIVVNGCVRDVDDINACNIGVRALASHPLRSNKKRTGEKNVPVYVGGTFIREGEWLYADNDGILVSKFELSN

SEQ ID NO: 10852 - protein, 83 aa, Glycine max
  peptide (1)..(83): Ceres Seq. ID no. 14315454
MVALEMWMISMRVILASEPWLLIHSDPTKSALVKRMSLFMLVEHLFVKENGCMQIMMASSYQNLSCQTKIVYLQFNIIATLDF

SEQ ID NO: 10853 - DNA, 937 bp, Glycine max
  misc_feature (1)..(937): Ceres Seq. ID no. 15170313
caattctcacaagctattacatatatcagaatcattaaagataagattatattgctaagaagaaaaaatatgaaggttgtctacttgcttgttgccctcttggctttgacatcaactgttgtctctgcctatgaccctagtcctctgcaagatttttgtgtggcagccaaagaaaaagatggtgtatttgtgaacgggaaattctgcaaggaccccaagcttgtcaaagcagaagatttcttcagacatgtggaacctgggaaaactgacaacccactaggttcaaacgtgactcaggtgtttgttgatcaactaccgggactaaacacgctcggcataggtttggctcgcatagattttgctccaaagggtttgaacgctccccacactcaccctcgcggcactgagatccttatagtccttgagggtactctttatgttggatttgtgacttccaatcaagatggaaatcgtctcttcaccaaagtgctgaacaagggtgatgtgtttgtgttcccaattggtctcattcatttccaattgaatgtgggatatggcaatgctgttgccattgctggtcttagcagtcaaaatccaggagctatcactattgcaaatgctttgtttaaagctaatccacctatttcttctgaggttctcaccaaagctttccaggtggacaagagcataattgattatcttcaaaagcaatcttggtacgacaacaataactaatttgggagaatggacgatcatttcgcactagctagttattggatataattgaccactttatggtttcaatcaccccatacaatagacctaataaataaaatgtatgtgggttatttttatatttcatatttgttcttttggagtttgattaatttggtttaatacactgtttgagtttaataaaagaacctgttcttctttg

SEQ ID NO: 10854 - protein, 244 aa, Glycine max
  peptide (1)..(244): Ceres Seq. ID no. 15170314
  misc_feature (81)..(232): Pfam Name: Pfam Description:  Cupin
  misc_feature (50)..(243): NCBI GI NO: 6689036 NR Description: germin-like protein [Pisum sativum]
  misc_feature (50)..(243): NCBI GI NO: 6689038 NR Description: germin-like protein [Pisum sativum]
  misc_feature (33)..(243): NCBI GI NO: 15230587 NR Description: germin-like protein, putative
  misc_feature (24)..(235): NCBI GI NO: 15241662 NR Description: germin-like protein (AtGER2)
  misc_feature (24)..(235): NCBI GI NO: 22327459 NR Description: germin-like protein (GLP2a) (GLP5A)
  misc_feature (24)..(235): NCBI GI NO: 15241640 NR Description: germin-like protein (AtGER2)
  misc_feature (24)..(235): NCBI GI NO: 2129594 NR Description: germin type 2 - Arabidopsis thaliana
  misc_feature (29)..(235): NCBI GI NO: 15241653 NR Description: germin-like protein, putative
  misc_feature (29)..(235): NCBI GI NO: 15241660 NR Description: germin-like protein, putative
  misc_feature (29)..(235): NCBI GI NO: 15241638 NR Description: germin-like protein, putative
QFSQAITYIRIIKDKIILLRRKNMKVVYLLVALLALTSTVVSAYDPSPLQDFCVAAKEKDGVFVNGKFCKDPKLVKAEDFFRHVEPGKTDNPLGSNVTQVFVDQLPGLNTLGIGLARIDFAPKGLNAPHTHPRGTEILIVLEGTLYVGFVTSNQDGNRLFTKVLNKGDVFVFPIGLIHFQLNVGYGNAVAIAGLSSQNPGAITIANALFKANPPISSEVLTKAFQVDKSIIDYLQKQSWYDNNN

SEQ ID NO: 10855 - protein, 221 aa, Glycine max
  peptide (1)..(221): Ceres Seq. ID no. 15170315
  misc_feature (58)..(209): Pfam Name: Pfam Description:  Cupin
  misc_feature (27)..(220): NCBI GI NO: 6689036 NR Description: germin-like protein [Pisum sativum]
  misc_feature (27)..(220): NCBI GI NO: 6689038 NR Description: germin-like protein [Pisum sativum]
  misc_feature (10)..(220): NCBI GI NO: 15230587 NR Description: germin-like protein, putative
  misc_feature (1)..(212): NCBI GI NO: 15241662 NR Description: germin-like protein (AtGER2)
  misc_feature (1)..(212): NCBI GI NO: 22327459 NR Description: germin-like protein (GLP2a) (GLP5A)
  misc_feature (1)..(212): NCBI GI NO: 15241640 NR Description: germin-like protein (AtGER2)
  misc_feature (1)..(212): NCBI GI NO: 2129594 NR Description: germin type 2 - Arabidopsis thaliana
  misc_feature (6)..(212): NCBI GI NO: 15241653 NR Description: germin-like protein, putative
  misc_feature (6)..(212): NCBI GI NO: 15241660 NR Description: germin-like protein, putative
  misc_feature (6)..(212): NCBI GI NO: 15241638 NR Description: germin-like protein, putative
MKVVYLLVALLALTSTVVSAYDPSPLQDFCVAAKEKDGVFVNGKFCKDPKLVKAEDFFRHVEPGKTDNPLGSNVTQVFVDQLPGLNTLGIGLARIDFAPKGLNAPHTHPRGTEILIVLEGTLYVGFVTSNQDGNRLFTKVLNKGDVFVFPIGLIHFQLNVGYGNAVAIAGLSSQNPGAITIANALFKANPPISSEVLTKAFQVDKSIIDYLQKQSWYDNNN

SEQ ID NO: 10856 - DNA, 1159 bp, Glycine max
  misc_feature (1)..(1159): Ceres Seq. ID no. 12392187
atatatatccctcactcactctatctcttttctccagcagcaccaaaaccacccaacactcgaactcaatatccattattaccaaaaaaaaagaaaaaaggatatcaaacacccttttcatcattaaaactctcagttccctctttccctatcaaaaccctttcccacaacactactcactccagtacaagaaaccctttttcaatttggtttcaacagcacacacacacacacatatatatatatatagcatgtttaccttgaatcattcttctgatttgtaccatgtttcccctgagctctcatcttccttggacacatcctcgccggcttcggagggctctcgtggcgtggcattttccgacgaggaggtgcggctggcggtgaggcacccgaagaagcgggcaggtcggaagaagttccgggagacgcgccacccggtgtaccggggggtgaggaggaggaactcggataagtgggtgtgtgaggtgagggagcccaacaagaagaccaggatttggctggggactttccccacgccggagatggcggctcgggcgcacgacgtggcggcaatggccctgaggggccggtatgcctgtctaaactttgctgactcggcctggcggttacctgttcccgccacggccgaggcaaaggatatacagaaggcagcagcagaagctgcccaggctttcagaccagatcaaaccttaaaaaatgctaatacaaggcaggagtgtgtggaggcggtggcggtggcggtggcggagacaacaacggcgacggcacaaggggtgttttatatggaggaagaagagcaggtgttggatatgcctgagttgcttaggaatatggtgctcatgtccccaacacattgcttagggtatgagtatgaagatgctgacttggatgcccaagatgctgaggtgtcactatggaatttctcaatttaataatgtgttttggtttggtttttgttgttagttttttggagtgaacagtgtctgtactggttttttattagtagtacggatactagttataggtggaaagattgcgagggaccaaaaggaattttcttttgaacccttttttgtcaatgtaatcaatatcacgtatatcatgaagtgaatcccttcaagtttatgtataaatt

SEQ ID NO: 10857 - protein, 317 aa, Glycine max
  peptide (1)..(317): Ceres Seq. ID no. 12392188
  misc_feature (145)..(209): Pfam Name: Pfam Description:  AP2 domain
  misc_feature (94)..(317): NCBI GI NO: 37147896 NR Description: CaCBF1B [Capsicum annuum]
  misc_feature (94)..(317): NCBI GI NO: 40647095 NR Description: DREB-like protein 1 [Capsicum annuum]
  misc_feature (94)..(317): NCBI GI NO: 12003384 NR Description: Avr9/Cf-9 rapidly elicited protein 111B
  misc_feature (99)..(317): NCBI GI NO: 23495460 NR Description: dehydration responsive element binding protein 1like protein
  misc_feature (96)..(315): NCBI GI NO: 15242244 NR Description: DRE binding protein; protein id: At5g51990.1
  misc_feature (101)..(317): NCBI GI NO: 18535580 NR Description: putative transcriptional activator CBF1
  misc_feature (93)..(317): NCBI GI NO: 23495458 NR Description: dehydratiion responsive element binding protein 1like protein
  misc_feature (126)..(314): NCBI GI NO: 7488378 NR Description: transcription activator CBF1 homolog M7J2
  misc_feature (108)..(315): NCBI GI NO: 38683266 NR Description: Cbcbf [Capsella bursa-pastoris]
  misc_feature (126)..(315): NCBI GI NO: 7484941 NR Description: DRE/CRT-binding protein DREB1A
IYPSLTLSLFSSSTKTTQHSNSISIITKKKEKRISNTLFIIKTLSSLFPYQNPFPQHYSLQYKKPFFNLVSTAHTHTHIYIYSMFTLNHSSDLYHVSPELSSSLDTSSPASEGSRGVAFSDEEVRLAVRHPKKRAGRKKFRETRHPVYRGVRRRNSDKWVCEVREPNKKTRIWLGTFPTPEMAARAHDVAAMALRGRYACLNFADSAWRLPVPATAEAKDIQKAAAEAAQAFRPDQTLKNANTRQECVEAVAVAVAETTTATAQGVFYMEEEEQVLDMPELLRNMVLMSPTHCLGYEYEDADLDAQDAEVSLWNFSI

SEQ ID NO: 10858 - protein, 234 aa, Glycine max
  peptide (1)..(234): Ceres Seq. ID no. 12392189
  misc_feature (62)..(126): Pfam Name: Pfam Description:  AP2 domain
  misc_feature (11)..(234): NCBI GI NO: 37147896 NR Description: CaCBF1B [Capsicum annuum]
  misc_feature (11)..(234): NCBI GI NO: 40647095 NR Description: DREB-like protein 1 [Capsicum annuum]
  misc_feature (11)..(234): NCBI GI NO: 12003384 NR Description: Avr9/Cf-9 rapidly elicited protein 111B
  misc_feature (16)..(234): NCBI GI NO: 23495460 NR Description: dehydration responsive element binding protein 1like protein
  misc_feature (13)..(232): NCBI GI NO: 15242244 NR Description: DRE binding protein; protein id: At5g51990.1
  misc_feature (18)..(234): NCBI GI NO: 18535580 NR Description: putative transcriptional activator CBF1
  misc_feature (10)..(234): NCBI GI NO: 23495458 NR Description: dehydratiion responsive element binding protein 1like protein
  misc_feature (43)..(231): NCBI GI NO: 7488378 NR Description: transcription activator CBF1 homolog M7J2
  misc_feature (25)..(232): NCBI GI NO: 38683266 NR Description: Cbcbf [Capsella bursa-pastoris]
  misc_feature (43)..(232): NCBI GI NO: 7484941 NR Description: DRE/CRT-binding protein DREB1A
MFTLNHSSDLYHVSPELSSSLDTSSPASEGSRGVAFSDEEVRLAVRHPKKRAGRKKFRETRHPVYRGVRRRNSDKWVCEVREPNKKTRIWLGTFPTPEMAARAHDVAAMALRGRYACLNFADSAWRLPVPATAEAKDIQKAAAEAAQAFRPDQTLKNANTRQECVEAVAVAVAETTTATAQGVFYMEEEEQVLDMPELLRNMVLMSPTHCLGYEYEDADLDAQDAEVSLWNFSI

SEQ ID NO: 10859 - DNA, 1050 bp, Glycine max
  misc_feature (1)..(1050): Ceres Seq. ID no. 12389450
aactctcactccacaactcaactaagcgcaaaccaaaccaacacaaacaaaaacatctctcagcaaatgaatattctcggacaatcactccaccaatcaaacaacggcagctactcttgttcgtcgccggagactgcaaactcctctaaccttccgaccactccgaaagccgttcactccgacgaggaagtgaacacattagcatcggctcatcctaagaaacgtgcggggcgtcgaatttttaaggagacaaggcatcccgtgtacagaggagtgcggcggaggaacaacaacaagtgggtctgcgaggttcgtgttcccaacgacaagtccacgaggatttggctcggaacgtatccaacgcctgagatggccgcacgtgcgcacgacgtcgccgcgctctcgcttcgaggtaagtcggcgtgtctcaacttcgccgactcgggcgtggcggttgcccttgccggcgtcgaccaatgcgaaggagattcggcgcgtggcggcggcggctgctgtagcgattgcggcggaagacagccgcggcaagcagttgcggactaatgcgattgatgccgttgctgattgcgaagttagcagcagtgacataggcgtcgatgaaaattgcaataacaataaagcttcgcagaggttttgtgatttggatgaaattacaatgccagatgcaccggtttttgaggacatgcatgagtggcttcagactatggctgctgaaccattaagatcacctacttttgtaacatatgttaatgttagggatgtctggaactttgtggaggatgatgctgaggtttccttgtggagcttcaccgtctgaagagcatgcaatttaggctttaggtgtatttagtgtgtttagctttctttctcttcttttggtttttgtacataattaggaacggaggactacgaaaatgtacaaagaccgaaacgatataaggagatagctatctaggtaggaacataaaagtgtgaaacattgtaacttttctcattcggttgtttttgtaaaataaaaattctattttcatc

SEQ ID NO: 10860 - protein, 186 aa, Glycine max
  peptide (1)..(186): Ceres Seq. ID no. 12389451
  misc_feature (86)..(148): Pfam Name: Pfam Description:  AP2 domain
  misc_feature (39)..(161): NCBI GI NO: 23495458 NR Description: dehydratiion responsive element binding protein 1like protein
  misc_feature (23)..(148): NCBI GI NO: 12003384 NR Description: Avr9/Cf-9 rapidly elicited protein 111B
  misc_feature (42)..(148): NCBI GI NO: 40647095 NR Description: DREB-like protein 1 [Capsicum annuum]
  misc_feature (42)..(148): NCBI GI NO: 37147896 NR Description: CaCBF1B [Capsicum annuum]
  misc_feature (38)..(148): NCBI GI NO: 18535580 NR Description: putative transcriptional activator CBF1
  misc_feature (34)..(148): NCBI GI NO: 39983638 NR Description: CBF25 [Capsella bursa-pastoris]
  misc_feature (35)..(148): NCBI GI NO: 38683266 NR Description: Cbcbf [Capsella bursa-pastoris]
  misc_feature (64)..(148): NCBI GI NO: 7488378 NR Description: transcription activator CBF1 homolog M7J2
  misc_feature (64)..(148): NCBI GI NO: 18416559 NR Description: DRE binding protein (DREB1A); protein id:At4g25480
  misc_feature (64)..(148): NCBI GI NO: 25407593 NR Description: transcription activator CBF1-like protein
NSHSTTQLSANQTNTNKNISQQMNILGQSLHQSNNGSYSCSSPETANSSNLPTTPKAVHSDEEVNTLASAHPKKRAGRRIFKETRHPVYRGVRRRNNNKWVCEVRVPNDKSTRIWLGTYPTPEMAARAHDVAALSLRGKSACLNFADSGVAVALAGVDQCEGDSARGGGGCCSDCGGRQPRQAVAD

SEQ ID NO: 10861 - protein, 164 aa, Glycine max
  peptide (1)..(164): Ceres Seq. ID no. 12389452
  misc_feature (64)..(126): Pfam Name: Pfam Description:  AP2 domain
  misc_feature (17)..(139): NCBI GI NO: 23495458 NR Description: dehydratiion responsive element binding protein 1like protein
  misc_feature (1)..(126): NCBI GI NO: 12003384 NR Description: Avr9/Cf-9 rapidly elicited protein 111B
  misc_feature (20)..(126): NCBI GI NO: 40647095 NR Description: DREB-like protein 1 [Capsicum annuum]
  misc_feature (20)..(126): NCBI GI NO: 37147896 NR Description: CaCBF1B [Capsicum annuum]
  misc_feature (16)..(126): NCBI GI NO: 18535580 NR Description: putative transcriptional activator CBF1
  misc_feature (12)..(126): NCBI GI NO: 39983638 NR Description: CBF25 [Capsella bursa-pastoris]
  misc_feature (13)..(126): NCBI GI NO: 38683266 NR Description: Cbcbf [Capsella bursa-pastoris]
  misc_feature (42)..(126): NCBI GI NO: 7488378 NR Description: transcription activator CBF1 homolog M7J2
  misc_feature (42)..(126): NCBI GI NO: 25407593 NR Description: transcription activator CBF1-like protein
  misc_feature (42)..(126): NCBI GI NO: 18416559 NR Description: DRE binding protein (DREB1A); protein id:At4g25480
MNILGQSLHQSNNGSYSCSSPETANSSNLPTTPKAVHSDEEVNTLASAHPKKRAGRRIFKETRHPVYRGVRRRNNNKWVCEVRVPNDKSTRIWLGTYPTPEMAARAHDVAALSLRGKSACLNFADSGVAVALAGVDQCEGDSARGGGGCCSDCGGRQPRQAVAD

SEQ ID NO: 10862 - DNA, 680 bp, Glycine max
  misc_feature (1)..(680): Ceres Seq. ID no. 12398609
  misc_feature (634)..(634): n is a, c, t, g, unknown, or other
aagtgtgagtgatatttgagcttaaaccctagccgctcttctcttcattcttcactttggaaacaatcataatggcgttctgtaataaggttggaaatgtcttgaggcagggtgctgctcgcagcacacatgcccctgttgcgtccatgcttaattacatccgctgcatgtcttcaagcaagcttttcattggaggcctttcatatggagttgatgaccagtctcttaaggatgcattttctggctttggagatgtggttgatgcaaaagttataactgatagagacagtggaagatcaaggggatttggatttgtcaacttctccaatgatgagtctgcaagttcggcactctctgcaatggacgggaaggatctaaatgggcgaagcattcgggtatcctatgcaaatgataaaccatctgcacctcgacctggtggcggtggcggttatcgtggcggggattatgatggtgattttgcttctcgtagtggtggttggtgatcaaatttttgtttgttgcgccttctgcttagttgagattttatgtttatgcctagcacttcgattaaggtggtcactcaagtggtaaagtagtaattattggaattttatgtttttccccgttacatttnttggttatgttattctgtgattttaatggagcatttgtttccatcc

SEQ ID NO: 10863 - protein, 143 aa, Glycine max
  peptide (1)..(143): Ceres Seq. ID no. 12398610
  misc_feature (38)..(109): Pfam Name: a.k.a. RRM, RBD, or RNP domain Pfam Description: RNA recognition motif.
  misc_feature (1)..(142): NCBI GI NO: 7439994 NR Description: glycine-rich RNA-binding protein - garden pea
  misc_feature (1)..(142): NCBI GI NO: 2826811 NR Description: AtGRP2 [Arabidopsis thaliana]
  misc_feature (1)..(143): NCBI GI NO: 15236359 NR Description: glycine-rich RNA-binding protein AtGRP2
  misc_feature (1)..(143): NCBI GI NO: 30682622 NR Description: glycine-rich RNA-binding protein (AtGRP2)
  misc_feature (1)..(134): NCBI GI NO: 15229525 NR Description: glycine-rich RNA-binding protein
  misc_feature (1)..(134): NCBI GI NO: 21553972 NR Description: glycine-rich RNA binding protein, putative
  misc_feature (1)..(136): NCBI GI NO: 7439995 NR Description: RNA binding protein 3 - wood tobacco
  misc_feature (1)..(142): NCBI GI NO: 15822705 NR Description: RNA-binding protein precursor [Solanum tuberosum]
  misc_feature (1)..(126): NCBI GI NO: 7489099 NR Description: RNA-binding protein RGP-3 - wood tobacco
  misc_feature (20)..(143): NCBI GI NO: 322514 NR Description: glycine-rich RNA-binding protein
MAFCNKVGNVLRQGAARSTHAPVASMLNYIRCMSSSKLFIGGLSYGVDDQSLKDAFSGFGDVVDAKVITDRDSGRSRGFGFVNFSNDESASSALSAMDGKDLNGRSIRVSYANDKPSAPRPGGGGGYRGGDYDGDFASRSGGW

SEQ ID NO: 10864 - protein, 118 aa, Glycine max
  peptide (1)..(118): Ceres Seq. ID no. 12398611
  misc_feature (13)..(84): Pfam Name: a.k.a. RRM, RBD, or RNP domain Pfam Description: RNA recognition motif.
  misc_feature (1)..(117): NCBI GI NO: 7439994 NR Description: glycine-rich RNA-binding protein - garden pea
  misc_feature (1)..(117): NCBI GI NO: 2826811 NR Description: AtGRP2 [Arabidopsis thaliana]
  misc_feature (1)..(118): NCBI GI NO: 15236359 NR Description: glycine-rich RNA-binding protein AtGRP2
  misc_feature (1)..(118): NCBI GI NO: 30682622 NR Description: glycine-rich RNA-binding protein (AtGRP2)
  misc_feature (1)..(109): NCBI GI NO: 15229525 NR Description: glycine-rich RNA-binding protein
  misc_feature (1)..(109): NCBI GI NO: 21553972 NR Description: glycine-rich RNA binding protein, putative
  misc_feature (1)..(111): NCBI GI NO: 7439995 NR Description: RNA binding protein 3 - wood tobacco
  misc_feature (1)..(117): NCBI GI NO: 15822705 NR Description: RNA-binding protein precursor [Solanum tuberosum]
  misc_feature (1)..(101): NCBI GI NO: 7489099 NR Description: RNA-binding protein RGP-3 - wood tobacco
  misc_feature (1)..(118): NCBI GI NO: 322514 NR Description: glycine-rich RNA-binding protein
MLNYIRCMSSSKLFIGGLSYGVDDQSLKDAFSGFGDVVDAKVITDRDSGRSRGFGFVNFSNDESASSALSAMDGKDLNGRSIRVSYANDKPSAPRPGGGGGYRGGDYDGDFASRSGGW

SEQ ID NO: 10865 - protein, 111 aa, Glycine max
  peptide (1)..(111): Ceres Seq. ID no. 12398612
  misc_feature (6)..(77): Pfam Name: a.k.a. RRM, RBD, or RNP domain Pfam Description: RNA recognition motif.
  misc_feature (1)..(110): NCBI GI NO: 7439994 NR Description: glycine-rich RNA-binding protein - garden pea
  misc_feature (1)..(110): NCBI GI NO: 2826811 NR Description: AtGRP2 [Arabidopsis thaliana]
  misc_feature (1)..(111): NCBI GI NO: 15236359 NR Description: glycine-rich RNA-binding protein AtGRP2
  misc_feature (1)..(111): NCBI GI NO: 30682622 NR Description: glycine-rich RNA-binding protein (AtGRP2)
  misc_feature (1)..(102): NCBI GI NO: 15229525 NR Description: glycine-rich RNA-binding protein
  misc_feature (1)..(102): NCBI GI NO: 21553972 NR Description: glycine-rich RNA binding protein, putative
  misc_feature (1)..(104): NCBI GI NO: 7439995 NR Description: RNA binding protein 3 - wood tobacco
  misc_feature (1)..(110): NCBI GI NO: 15822705 NR Description: RNA-binding protein precursor [Solanum tuberosum]
  misc_feature (1)..(94): NCBI GI NO: 7489099 NR Description: RNA-binding protein RGP-3 - wood tobacco
  misc_feature (1)..(111): NCBI GI NO: 322514 NR Description: glycine-rich RNA-binding protein
MSSSKLFIGGLSYGVDDQSLKDAFSGFGDVVDAKVITDRDSGRSRGFGFVNFSNDESASSALSAMDGKDLNGRSIRVSYANDKPSAPRPGGGGGYRGGDYDGDFASRSGGW

SEQ ID NO: 10866 - DNA, 594 bp, Glycine max
  misc_feature (1)..(594): Ceres Seq. ID no. 3265003
tcacaaataaataaaaaaaattgttttcgtgtggaaacaaaaaaacaattcaaaaacaaacatatgatggtgaagccgagtagcgaaaagccagaggagcatagggattccaagtactacaaaggggtccgaaagagaaaatggggcaaatgggtatccgaaataagactacccaacagccgtcagaggatttggttgggatccttcgacacccccgagaaggccgcgcgtgccttcgacgccgcaatgttctgcttacgtggccgcaacgccaagttcaatttccccgacaacccacccgacatcgccggcggggaatccatgacgccgtcacagattcaggtcgccgccgcacaattcgccaacgctgggccccacgagggacattcgggtcgacccgaacattctcccatgcaatctctatcgccttctgtttcagaagggaccgttctaacggacagtgacgtcaccacacttaacggttcgctaacggatttgttcactcccgttgggtcgagtggttacgcatccgattacgggattttccccggtgttgatgatttcagtggcggtttttatgtgccggaaatgctg

SEQ ID NO: 10867 - protein, 198 aa, Glycine max
  peptide (1)..(198): Ceres Seq. ID no. 3265004
  misc_feature (40)..(100): Pfam Name: Pfam Description:  AP2 domain
  misc_feature (40)..(189): NCBI GI NO: 22329667 NR Description: AP2 domain transcription factor, putative
  misc_feature (40)..(189): NCBI GI NO: 29893536 NR Description: putative AP2 domain transcription factor
  misc_feature (23)..(189): NCBI GI NO: 15222040 NR Description: AP2 domain containing protein, putative
  misc_feature (37)..(179): NCBI GI NO: 22326940 NR Description: similar to AP2 domain transcription factor
  misc_feature (20)..(153): NCBI GI NO: 18417729 NR Description: AP2-domain transcription factor, putative
  misc_feature (40)..(123): NCBI GI NO: 18378818 NR Description: transcription factor TINY, putative
  misc_feature (40)..(123): NCBI GI NO: 21554403 NR Description: transcription factor TINY, putative
  misc_feature (40)..(123): NCBI GI NO: 25406719 NR Description: protein Similar to transcription factor TINY
  misc_feature (42)..(153): NCBI GI NO: 25407707 NR Description: hypothetical protein AT4g31060
  misc_feature (40)..(191): NCBI GI NO: 38605844 NR Description: OSJNBb0034G17.2
SQINKKNCFRVETKKQFKNKHMMVKPSSEKPEEHRDSKYYKGVRKRKWGKWVSEIRLPNSRQRIWLGSFDTPEKAARAFDAAMFCLRGRNAKFNFPDNPPDIAGGESMTPSQIQVAAAQFANAGPHEGHSGRPEHSPMQSLSPSVSEGTVLTDSDVTTLNGSLTDLFTPVGSSGYASDYGIFPGVDDFSGGFYVPEML

SEQ ID NO: 10868 - protein, 177 aa, Glycine max
  peptide (1)..(177): Ceres Seq. ID no. 3265005
  misc_feature (19)..(79): Pfam Name: Pfam Description:  AP2 domain
  misc_feature (19)..(168): NCBI GI NO: 22329667 NR Description: AP2 domain transcription factor, putative
  misc_feature (19)..(168): NCBI GI NO: 29893536 NR Description: putative AP2 domain transcription factor
  misc_feature (2)..(168): NCBI GI NO: 15222040 NR Description: AP2 domain containing protein, putative
  misc_feature (16)..(158): NCBI GI NO: 22326940 NR Description: similar to AP2 domain transcription factor
  misc_feature (1)..(132): NCBI GI NO: 18417729 NR Description: AP2-domain transcription factor, putative
  misc_feature (19)..(102): NCBI GI NO: 18378818 NR Description: transcription factor TINY, putative
  misc_feature (19)..(102): NCBI GI NO: 25406719 NR Description: protein Similar to transcription factor TINY
  misc_feature (19)..(102): NCBI GI NO: 21554403 NR Description: transcription factor TINY, putative
  misc_feature (21)..(132): NCBI GI NO: 25407707 NR Description: hypothetical protein AT4g31060
  misc_feature (19)..(170): NCBI GI NO: 38605844 NR Description: OSJNBb0034G17.2
MMVKPSSEKPEEHRDSKYYKGVRKRKWGKWVSEIRLPNSRQRIWLGSFDTPEKAARAFDAAMFCLRGRNAKFNFPDNPPDIAGGESMTPSQIQVAAAQFANAGPHEGHSGRPEHSPMQSLSPSVSEGTVLTDSDVTTLNGSLTDLFTPVGSSGYASDYGIFPGVDDFSGGFYVPEML

SEQ ID NO: 10869 - protein, 176 aa, Glycine max
  peptide (1)..(176): Ceres Seq. ID no. 3265006
  misc_feature (18)..(78): Pfam Name: Pfam Description:  AP2 domain
  misc_feature (18)..(167): NCBI GI NO: 22329667 NR Description: AP2 domain transcription factor, putative
  misc_feature (18)..(167): NCBI GI NO: 29893536 NR Description: putative AP2 domain transcription factor
  misc_feature (1)..(167): NCBI GI NO: 15222040 NR Description: AP2 domain containing protein, putative
  misc_feature (15)..(157): NCBI GI NO: 22326940 NR Description: similar to AP2 domain transcription factor
  misc_feature (1)..(131): NCBI GI NO: 18417729 NR Description: AP2-domain transcription factor, putative
  misc_feature (18)..(101): NCBI GI NO: 18378818 NR Description: transcription factor TINY, putative
  misc_feature (18)..(101): NCBI GI NO: 21554403 NR Description: transcription factor TINY, putative
  misc_feature (18)..(101): NCBI GI NO: 25406719 NR Description: protein Similar to transcription factor TINY
  misc_feature (20)..(131): NCBI GI NO: 25407707 NR Description: hypothetical protein AT4g31060
  misc_feature (18)..(169): NCBI GI NO: 38605844 NR Description: OSJNBb0034G17.2
MVKPSSEKPEEHRDSKYYKGVRKRKWGKWVSEIRLPNSRQRIWLGSFDTPEKAARAFDAAMFCLRGRNAKFNFPDNPPDIAGGESMTPSQIQVAAAQFANAGPHEGHSGRPEHSPMQSLSPSVSEGTVLTDSDVTTLNGSLTDLFTPVGSSGYASDYGIFPGVDDFSGGFYVPEML

SEQ ID NO: 10870 - DNA, 1334 bp, Glycine max
  misc_feature (1)..(1334): Ceres Seq. ID no. 12430842
tcttctaaccagtatcacctacacggtgtgtgtgtcccttcatcctggaaattagagccacaaacataacacattccgctttgactttggaggcaggtttttgtgctttgtctggttcccaatcaccgtgatatcatggaatccccacaatctgttgtgtcaccattcaagaggtctgtcttgggtgatgcagagaagtataggtctgatgttctgtctaaggacattgaagtcaatggaaaggaaggtgccgtgtgtaatgtggaggaattcattggtgttgttgatgtttacattcatcaggccagggacattcataacatctgcatataccacaagcaagatgtttatgctaagatttgtttgactagtaatcctgagaatactgtctctaccaagaccatcaatggaggaggaaggaaccccgtgtttaatgagaatcttagtctaagcgttaggactgttgattctgtagtcaaatgtgaaatttggatgctgagcagggtgaagaattatcttgaagatcagttgcttggttttgctttggtgcctttgtctgaagtactggtgaagaaggatggcaaactagagaaagagttctctctttcttcaactgatctattccattctccagccggttatgttcaattgtctcttgcttacactggtgcttcgcctgatgttatggcaatttcttcaatgcctaccaccgagaaggactccgaatcatgcgagtcactggtcagagatttggacaaaatcgaattcccggatccaaaaattgtaaatgaagaccacttgatggtttcggaatacttcggcattccatgtgaggagagccagtgttctgatagcttgaccactactgatactgaaaatcttagttctgaagcaggtgttcagcttgtggagagcttctcagcatgcagtgttagcagtgtgtcaacaaatggggtttcatctccttcagtggctgcaagctcagactcgtctcccaatgaggaaaccaaagagaaaaatgtggatgtcaaagatggtgagactgattcctcgttccctaaacctcttgtgactgttaacatcgagccggagccgaatgtggtgcagcaggattttgtagacatgtacatgaaaagcatgcagcaattcaccgagtcattggcaaaaatgaagcttcctgtggactttgaaagtggaccaactagttcaggaaactctagctctgaacacaagctacagacaccaaagagcactaactcccgtgtgttttatggcagcagggctttcttctgaactttttgatcaagggaatactttcaggtgacttagatttt

SEQ ID NO: 10871 - protein, 385 aa, Glycine max
  peptide (1)..(385): Ceres Seq. ID no. 12430843
  misc_feature (50)..(137): Pfam Name: Pfam Description:  C2 domain
  misc_feature (1)..(385): NCBI GI NO: 9758185 NR Description: gene_id:MTE17
  misc_feature (1)..(385): NCBI GI NO: 30696612 NR Description: C2 domain-containing protein
  misc_feature (1)..(385): NCBI GI NO: 28393796 NR Description: unknown protein [Arabidopsis thaliana]
  misc_feature (1)..(385): NCBI GI NO: 25405379 NR Description: unknown protein [imported] - Arabidopsis thaliana
  misc_feature (1)..(385): NCBI GI NO: 18403117 NR Description: Expressed protein; protein id: At1g50570
  misc_feature (1)..(385): NCBI GI NO: 21593485 NR Description: unknown [Arabidopsis thaliana]
  misc_feature (32)..(289): NCBI GI NO: 24414275 NR Description: Unknown protein
  misc_feature (265)..(385): NCBI GI NO: 24414275 NR Description: Unknown protein
  misc_feature (41)..(385): NCBI GI NO: 18416832 NR Description: putative protein; protein id: At5g12300.1
  misc_feature (34)..(287): NCBI GI NO: 34901084 NR Description: contains ESTsAU183957
MESPQSVVSPFKRSVLGDAEKYRSDVLSKDIEVNGKEGAVCNVEEFIGVVDVYIHQARDIHNICIYHKQDVYAKICLTSNPENTVSTKTINGGGRNPVFNENLSLSVRTVDSVVKCEIWMLSRVKNYLEDQLLGFALVPLSEVLVKKDGKLEKEFSLSSTDLFHSPAGYVQLSLAYTGASPDVMAISSMPTTEKDSESCESLVRDLDKIEFPDPKIVNEDHLMVSEYFGIPCEESQCSDSLTTTDTENLSSEAGVQLVESFSACSVSSVSTNGVSSPSVAASSDSSPNEETKEKNVDVKDGETDSSFPKPLVTVNIEPEPNVVQQDFVDMYMKSMQQFTESLAKMKLPVDFESGPTSSGNSSSEHKLQTPKSTNSRVFYGSRAFF

SEQ ID NO: 10872 - protein, 266 aa, Glycine max
  peptide (1)..(266): Ceres Seq. ID no. 12430844
  misc_feature (1)..(266): NCBI GI NO: 9758185 NR Description: gene_id:MTE17
  misc_feature (1)..(266): NCBI GI NO: 30696612 NR Description: C2 domain-containing protein
  misc_feature (1)..(266): NCBI GI NO: 28393796 NR Description: unknown protein [Arabidopsis thaliana]
  misc_feature (1)..(266): NCBI GI NO: 25405379 NR Description: unknown protein [imported] - Arabidopsis thaliana
  misc_feature (1)..(266): NCBI GI NO: 18403117 NR Description: Expressed protein; protein id: At1g50570
  misc_feature (1)..(266): NCBI GI NO: 21593485 NR Description: unknown [Arabidopsis thaliana]
  misc_feature (1)..(170): NCBI GI NO: 24414275 NR Description: Unknown protein
  misc_feature (146)..(266): NCBI GI NO: 24414275 NR Description: Unknown protein
  misc_feature (1)..(266): NCBI GI NO: 18416832 NR Description: putative protein; protein id: At5g12300.1
  misc_feature (1)..(168): NCBI GI NO: 34901084 NR Description: contains ESTsAU183957
MLSRVKNYLEDQLLGFALVPLSEVLVKKDGKLEKEFSLSSTDLFHSPAGYVQLSLAYTGASPDVMAISSMPTTEKDSESCESLVRDLDKIEFPDPKIVNEDHLMVSEYFGIPCEESQCSDSLTTTDTENLSSEAGVQLVESFSACSVSSVSTNGVSSPSVAASSDSSPNEETKEKNVDVKDGETDSSFPKPLVTVNIEPEPNVVQQDFVDMYMKSMQQFTESLAKMKLPVDFESGPTSSGNSSSEHKLQTPKSTNSRVFYGSRAFF

SEQ ID NO: 10873 - protein, 202 aa, Glycine max
  peptide (1)..(202): Ceres Seq. ID no. 12430845
  misc_feature (1)..(202): NCBI GI NO: 9758185 NR Description: gene_id:MTE17
  misc_feature (1)..(202): NCBI GI NO: 30696612 NR Description: C2 domain-containing protein
  misc_feature (1)..(202): NCBI GI NO: 28393796 NR Description: unknown protein [Arabidopsis thaliana]
  misc_feature (1)..(202): NCBI GI NO: 25405379 NR Description: unknown protein [imported] - Arabidopsis thaliana
  misc_feature (1)..(202): NCBI GI NO: 18403117 NR Description: Expressed protein; protein id: At1g50570
  misc_feature (1)..(202): NCBI GI NO: 21593485 NR Description: unknown [Arabidopsis thaliana]
  misc_feature (1)..(106): NCBI GI NO: 24414275 NR Description: Unknown protein
  misc_feature (82)..(202): NCBI GI NO: 24414275 NR Description: Unknown protein
  misc_feature (1)..(202): NCBI GI NO: 18416832 NR Description: putative protein; protein id: At5g12300.1
  misc_feature (1)..(104): NCBI GI NO: 34901084 NR Description: contains ESTsAU183957
MAISSMPTTEKDSESCESLVRDLDKIEFPDPKIVNEDHLMVSEYFGIPCEESQCSDSLTTTDTENLSSEAGVQLVESFSACSVSSVSTNGVSSPSVAASSDSSPNEETKEKNVDVKDGETDSSFPKPLVTVNIEPEPNVVQQDFVDMYMKSMQQFTESLAKMKLPVDFESGPTSSGNSSSEHKLQTPKSTNSRVFYGSRAFF

SEQ ID NO: 10874 - DNA, 837 bp, Glycine max
  misc_feature (1)..(837): Ceres Seq. ID no. 12451835
gaaagaaaagaactaagaagctgaaaaacaagagagagaaaaagaatagcacactcaaccatagttatctagaaccaaatcatgtctcacatagccgtcgagaggaacaggagaagacagatgaatgaacatctcaaagttttaagatctttgaccccatgtttctatatcaaaaggggagatcaagcatctataatagggggtgttatagaattcatcaaggagctacaccaagttcttcaagctttggagtcccagaaaagaagaaagagtttgagccctagccctggcccgagcccacgaacacttcagccaatgtttcatcaacttgatagcccctccatgattgggaccaattctttcaaggaactaggagcaagctgcaactctcctgttgcggatgttgaagtgaaaatctcgggttcatatgtgatcttgaaagtcatttgccacagaattccaggtcaagttgcaaagatcataactgttttggagagtctttcgtttgaagttcttcatctgaatatcagcagcatggaggagactgtcctttaccaatttgttgtcaagatagagctgggatgccaactaagtctggaggaactagcaatggaagtgcaacaaagcttctgcttagatgctataattgcgctgtgaagatgtagtatttctaaagagacccaatttcgaatcgtttgttaataaaagaatggcatgtgatagacatgcataaaaactatttcttcagtaattacttgctacaaactaggcttattatatcattactgttgtcataaacttgatgacaaggaaaatatgctgttgcttaatatttgg

SEQ ID NO: 10875 - protein, 191 aa, Glycine max
  peptide (1)..(191): Ceres Seq. ID no. 12451836
  misc_feature (1)..(49): Pfam Name: Pfam Description:  Helix-loop-helix DNA-binding domain
  misc_feature (1)..(189): NCBI GI NO: 15230639 NR Description: putative helix-loop-helix DNA-binding protein
  misc_feature (1)..(184): NCBI GI NO: 15238680 NR Description: bHLH protein; protein id: At5g53210.1
  misc_feature (1)..(183): NCBI GI NO: 30687365 NR Description: bHLH protein family [Arabidopsis thaliana]
  misc_feature (1)..(166): NCBI GI NO: 11994233 NR Description: contains similarity to helix-loop-helix DNA-bindingprotein~gene_id:MUJ8
  misc_feature (1)..(183): NCBI GI NO: 15234187 NR Description: bHLH protein; protein id: At4g01460
  misc_feature (1)..(182): NCBI GI NO: 18395124 NR Description: expressed protein; protein id: At1g22490
  misc_feature (1)..(182): NCBI GI NO: 21593808 NR Description: unknown [Arabidopsis thaliana]
  misc_feature (1)..(87): NCBI GI NO: 38346722 NR Description: OSJNBa0086O06.20
  misc_feature (105)..(163): NCBI GI NO: 38346722 NR Description: OSJNBa0086O06.20
  misc_feature (1)..(80): NCBI GI NO: 37533680 NR Description: putative helix-loop-helix DNA-binding protein
MSHIAVERNRRRQMNEHLKVLRSLTPCFYIKRGDQASIIGGVIEFIKELHQVLQALESQKRRKSLSPSPGPSPRTLQPMFHQLDSPSMIGTNSFKELGASCNSPVADVEVKISGSYVILKVICHRIPGQVAKIITVLESLSFEVLHLNISSMEETVLYQFVVKIELGCQLSLEELAMEVQQSFCLDAIIAL

SEQ ID NO: 10876 - protein, 178 aa, Glycine max
  peptide (1)..(178): Ceres Seq. ID no. 12451837
  misc_feature (1)..(36): Pfam Name: Pfam Description:  Helix-loop-helix DNA-binding domain
  misc_feature (1)..(176): NCBI GI NO: 15230639 NR Description: putative helix-loop-helix DNA-binding protein
  misc_feature (1)..(171): NCBI GI NO: 15238680 NR Description: bHLH protein; protein id: At5g53210.1
  misc_feature (1)..(170): NCBI GI NO: 30687365 NR Description: bHLH protein family [Arabidopsis thaliana]
  misc_feature (1)..(153): NCBI GI NO: 11994233 NR Description: contains similarity to helix-loop-helix DNA-bindingprotein~gene_id:MUJ8
  misc_feature (1)..(170): NCBI GI NO: 15234187 NR Description: bHLH protein; protein id: At4g01460
  misc_feature (1)..(169): NCBI GI NO: 18395124 NR Description: expressed protein; protein id: At1g22490
  misc_feature (1)..(169): NCBI GI NO: 21593808 NR Description: unknown [Arabidopsis thaliana]
  misc_feature (1)..(74): NCBI GI NO: 38346722 NR Description: OSJNBa0086O06.20
  misc_feature (92)..(150): NCBI GI NO: 38346722 NR Description: OSJNBa0086O06.20
  misc_feature (1)..(67): NCBI GI NO: 37533680 NR Description: putative helix-loop-helix DNA-binding protein
MNEHLKVLRSLTPCFYIKRGDQASIIGGVIEFIKELHQVLQALESQKRRKSLSPSPGPSPRTLQPMFHQLDSPSMIGTNSFKELGASCNSPVADVEVKISGSYVILKVICHRIPGQVAKIITVLESLSFEVLHLNISSMEETVLYQFVVKIELGCQLSLEELAMEVQQSFCLDAIIAL

SEQ ID NO: 10877 - protein, 113 aa, Glycine max
  peptide (1)..(113): Ceres Seq. ID no. 12451838
  misc_feature (1)..(111): NCBI GI NO: 15230639 NR Description: putative helix-loop-helix DNA-binding protein
  misc_feature (1)..(106): NCBI GI NO: 15238680 NR Description: bHLH protein; protein id: At5g53210.1
  misc_feature (1)..(105): NCBI GI NO: 30687365 NR Description: bHLH protein family [Arabidopsis thaliana]
  misc_feature (1)..(88): NCBI GI NO: 11994233 NR Description: contains similarity to helix-loop-helix DNA-bindingprotein~gene_id:MUJ8
  misc_feature (1)..(105): NCBI GI NO: 15234187 NR Description: bHLH protein; protein id: At4g01460
  misc_feature (1)..(104): NCBI GI NO: 18395124 NR Description: expressed protein; protein id: At1g22490
  misc_feature (1)..(104): NCBI GI NO: 21593808 NR Description: unknown [Arabidopsis thaliana]
  misc_feature (27)..(85): NCBI GI NO: 38346722 NR Description: OSJNBa0086O06.20
  misc_feature (20)..(103): NCBI GI NO: 37533680 NR Description: putative helix-loop-helix DNA-binding protein
  misc_feature (1)..(105): NCBI GI NO: 15226442 NR Description: unknown protein; protein id: At2g46810.1
MFHQLDSPSMIGTNSFKELGASCNSPVADVEVKISGSYVILKVICHRIPGQVAKIITVLESLSFEVLHLNISSMEETVLYQFVVKIELGCQLSLEELAMEVQQSFCLDAIIAL

SEQ ID NO: 10878 - DNA, 1133 bp, Glycine max
  misc_feature (1)..(1133): Ceres Seq. ID no. 12431307
aaagaaacaattaaaataataaacctaaaagccctaacatatctatccccaacagtaaaagaaagcagattcatactctctccctctctctttagtctttaccaccacctggcctgcttttaaaacttgttcttcctctctcacatgaagacactagtcatggacacaacctcatcaacccctcaagactcatcatcctccaagaggcacttccactggacgaacaaggttggaaatgaagacccccaactcgccacctcagaaacgatgtcaaaaatcatagaagaagaagacacaaacacaaaggaaaaagaacaagaagaagatgacaaggctgttccacttccaggccctgccacaaagagaaagattcaggcagtggcaatctcaaggctccgatctgttctgactgtgttcagcaaaaaccaccgttccaacctccccttcggcctcggctccagagtcgttggcaccctcttcggctaccgccgcggccacgtgcatttcgccttccagagggaccccacttcgcaacccgccttcctcatcgagctcgcgaccccaatcagcggacttgtccgcgaaatggcgtctgggctggtgagaattgctttggagtgtgacaaggacaaagactcagaggagaagaagacgacgaagaagaacaagaccctgaggctgcttcaggagtccgtgtggaggacctactgcaacggtaaaaagtgcggctttgccacgagaagagaatgtggagccaaagactgggacatactgaaggcagtggagccaatttctatgggtgcaggtgttttgcctaacagtgatgggtctgatggtgaagtcatgtacatgagggctaggtttgagagaattgttggttccagagactctgaagctttctacatgatgaatcctgacagcaatggagcacctgagctcagtatttacttgcttagagtctagtactgctgctgccactaccagcccccccccagtcatctgtttagttatttatactttaactttctttcccttttttagtttcttctttgtggatgatgttaaacactaggctattcctatactacttgtttagctccttaatcatgaacaatggtgacctagttttcttc

SEQ ID NO: 10879 - protein, 272 aa, Glycine max
  peptide (1)..(272): Ceres Seq. ID no. 12431308
  misc_feature (106)..(272): Pfam Name: Pfam Description:  Protein of unknown function, DUF617
  misc_feature (1)..(272): NCBI GI NO: 11994755 NR Description: gb|AAB84348
  misc_feature (1)..(272): NCBI GI NO: 15230862 NR Description: hypothetical protein; protein id: At3g25640.1
  misc_feature (12)..(262): NCBI GI NO: 34911646 NR Description: P0039G05.26
  misc_feature (18)..(231): NCBI GI NO: 15237221 NR Description: putative protein; protein id: At5g23100.1
  misc_feature (103)..(272): NCBI GI NO: 21593037 NR Description: unknown [Arabidopsis thaliana]
  misc_feature (103)..(272): NCBI GI NO: 18405770 NR Description: expressed protein; protein id: At2g41660
  misc_feature (105)..(272): NCBI GI NO: 15235158 NR Description: putative protein; protein id: At4g39610
  misc_feature (105)..(272): NCBI GI NO: 21618123 NR Description: unknown [Arabidopsis thaliana]
  misc_feature (104)..(272): NCBI GI NO: 15240220 NR Description: putative protein; protein id: At5g06990.1
  misc_feature (95)..(272): NCBI GI NO: 15227126 NR Description: hypothetical protein; protein id: At2g21990.1
MKTLVMDTTSSTPQDSSSSKRHFHWTNKVGNEDPQLATSETMSKIIEEEDTNTKEKEQEEDDKAVPLPGPATKRKIQAVAISRLRSVLTVFSKNHRSNLPFGLGSRVVGTLFGYRRGHVHFAFQRDPTSQPAFLIELATPISGLVREMASGLVRIALECDKDKDSEEKKTTKKNKTLRLLQESVWRTYCNGKKCGFATRRECGAKDWDILKAVEPISMGAGVLPNSDGSDGEVMYMRARFERIVGSRDSEAFYMMNPDSNGAPELSIYLLRV

SEQ ID NO: 10880 - protein, 267 aa, Glycine max
  peptide (1)..(267): Ceres Seq. ID no. 12431309
  misc_feature (101)..(267): Pfam Name: Pfam Description:  Protein of unknown function, DUF617
  misc_feature (1)..(267): NCBI GI NO: 11994755 NR Description: gb|AAB84348
  misc_feature (1)..(267): NCBI GI NO: 15230862 NR Description: hypothetical protein; protein id: At3g25640.1
  misc_feature (7)..(257): NCBI GI NO: 34911646 NR Description: P0039G05.26
  misc_feature (13)..(226): NCBI GI NO: 15237221 NR Description: putative protein; protein id: At5g23100.1
  misc_feature (98)..(267): NCBI GI NO: 21593037 NR Description: unknown [Arabidopsis thaliana]
  misc_feature (98)..(267): NCBI GI NO: 18405770 NR Description: expressed protein; protein id: At2g41660
  misc_feature (100)..(267): NCBI GI NO: 15235158 NR Description: putative protein; protein id: At4g39610
  misc_feature (100)..(267): NCBI GI NO: 21618123 NR Description: unknown [Arabidopsis thaliana]
  misc_feature (99)..(267): NCBI GI NO: 15240220 NR Description: putative protein; protein id: At5g06990.1
  misc_feature (90)..(267): NCBI GI NO: 15227126 NR Description: hypothetical protein; protein id: At2g21990.1
MDTTSSTPQDSSSSKRHFHWTNKVGNEDPQLATSETMSKIIEEEDTNTKEKEQEEDDKAVPLPGPATKRKIQAVAISRLRSVLTVFSKNHRSNLPFGLGSRVVGTLFGYRRGHVHFAFQRDPTSQPAFLIELATPISGLVREMASGLVRIALECDKDKDSEEKKTTKKNKTLRLLQESVWRTYCNGKKCGFATRRECGAKDWDILKAVEPISMGAGVLPNSDGSDGEVMYMRARFERIVGSRDSEAFYMMNPDSNGAPELSIYLLRV

SEQ ID NO: 10881 - protein, 231 aa, Glycine max
  peptide (1)..(231): Ceres Seq. ID no. 12431310
  misc_feature (65)..(231): Pfam Name: Pfam Description:  Protein of unknown function, DUF617
  misc_feature (1)..(231): NCBI GI NO: 11994755 NR Description: gb|AAB84348
  misc_feature (1)..(231): NCBI GI NO: 15230862 NR Description: hypothetical protein; protein id: At3g25640.1
  misc_feature (1)..(221): NCBI GI NO: 34911646 NR Description: P0039G05.26
  misc_feature (1)..(190): NCBI GI NO: 15237221 NR Description: putative protein; protein id: At5g23100.1
  misc_feature (62)..(231): NCBI GI NO: 21593037 NR Description: unknown [Arabidopsis thaliana]
  misc_feature (62)..(231): NCBI GI NO: 18405770 NR Description: expressed protein; protein id: At2g41660
  misc_feature (64)..(231): NCBI GI NO: 15235158 NR Description: putative protein; protein id: At4g39610
  misc_feature (64)..(231): NCBI GI NO: 21618123 NR Description: unknown [Arabidopsis thaliana]
  misc_feature (63)..(231): NCBI GI NO: 15240220 NR Description: putative protein; protein id: At5g06990.1
  misc_feature (54)..(231): NCBI GI NO: 15227126 NR Description: hypothetical protein; protein id: At2g21990.1
MSKIIEEEDTNTKEKEQEEDDKAVPLPGPATKRKIQAVAISRLRSVLTVFSKNHRSNLPFGLGSRVVGTLFGYRRGHVHFAFQRDPTSQPAFLIELATPISGLVREMASGLVRIALECDKDKDSEEKKTTKKNKTLRLLQESVWRTYCNGKKCGFATRRECGAKDWDILKAVEPISMGAGVLPNSDGSDGEVMYMRARFERIVGSRDSEAFYMMNPDSNGAPELSIYLLRV

SEQ ID NO: 10882 - DNA, 919 bp, Glycine max
  misc_feature (1)..(919): Ceres Seq. ID no. 12438838
aaacataagagaaggtttcgtggcagtggcgagtgaagaagctatgcctgatgagtgagtcatttttttctctctggtgggtcccatcctcttctgctctgagaacctttataagtgttatatgagtcattgagaagtgaccccaggaaaaagaaaagaaaagaaaaacttcacttcacttgcatgccaaatgagaacaacctcttcttagaataatttcctcggtgtttaagccttgtcgatttccgaacaccaatccgagttaattaaacaatgagagtttcgacagaaaagttagagacagagccggagagcaaaaagataaaacgcattcgtggcggcggcggcggggactcgagcaataagcaccctttgtaccgcggcgtgcggatgcggaactgggggaaatgggtgtcggaaatccgcgagccgcggaagaagtcgcggatatggctaggcacattcccgacgccggaaatggcggcgagggcgcacgacgtggcggctctcagcatcaaaggctccgccgccattctcaacttccctcactttgccaactcgctccctcgcccggcttctctcgcgccgcgcgacgttcaagccgcggcggccaaagcggcgcacatggacccttcttccctctcctcccttgtctccgcaatggacttgtcctctgcctctgacgagttgagccaaatcatagagcttccttctttggaaagcaccgatgatggctccgtcgtcttagagaaagagtttgtttttgttgactcccttgatgcttggatgtatcagccaccctttggttttgacaccgaacaagacactggtttcgagggtttgatgtggaattactagtttcgatccatgtttctgttctattctatgtcttatgttgtataaattaatattgatcgtc

SEQ ID NO: 10883 - protein, 194 aa, Glycine max
  peptide (1)..(194): Ceres Seq. ID no. 12438839
  misc_feature (32)..(96): Pfam Name: Pfam Description:  AP2 domain
  misc_feature (11)..(175): NCBI GI NO: 15239501 NR Description: transcription factor TINY; protein id: At5g25810.1
  misc_feature (5)..(157): NCBI GI NO: 15239113 NR Description: transcription factor TINY, putative
  misc_feature (14)..(194): NCBI GI NO: 15228171 NR Description: transcription factor TINY, putative
  misc_feature (14)..(194): NCBI GI NO: 9279711 NR Description: transcription factor TINY-like protein
  misc_feature (29)..(187): NCBI GI NO: 15233928 NR Description: transcription factor TINY, putative
  misc_feature (16)..(128): NCBI GI NO: 34903650 NR Description: B1015E06.8
  misc_feature (12)..(153): NCBI GI NO: 25992102 NR Description: dehydration responsive element binding protein
  misc_feature (33)..(128): NCBI GI NO: 15223860 NR Description: transcription factor TINY, putative
  misc_feature (4)..(140): NCBI GI NO: 14140163 NR Description: putative AP2 domain containing protein
  misc_feature (28)..(133): NCBI GI NO: 37536842 NR Description: putative DNA binding protein
MRVSTEKLETEPESKKIKRIRGGGGGDSSNKHPLYRGVRMRNWGKWVSEIREPRKKSRIWLGTFPTPEMAARAHDVAALSIKGSAAILNFPHFANSLPRPASLAPRDVQAAAAKAAHMDPSSLSSLVSAMDLSSASDELSQIIELPSLESTDDGSVVLEKEFVFVDSLDAWMYQPPFGFDTEQDTGFEGLMWNY

SEQ ID NO: 10884 - protein, 155 aa, Glycine max
  peptide (1)..(155): Ceres Seq. ID no. 12438840
  misc_feature (1)..(57): Pfam Name: Pfam Description:  AP2 domain
  misc_feature (1)..(136): NCBI GI NO: 15239501 NR Description: transcription factor TINY; protein id: At5g25810.1
  misc_feature (1)..(118): NCBI GI NO: 15239113 NR Description: transcription factor TINY, putative
  misc_feature (1)..(155): NCBI GI NO: 15228171 NR Description: transcription factor TINY, putative
  misc_feature (1)..(155): NCBI GI NO: 9279711 NR Description: transcription factor TINY-like protein
  misc_feature (1)..(148): NCBI GI NO: 15233928 NR Description: transcription factor TINY, putative
  misc_feature (1)..(89): NCBI GI NO: 34903650 NR Description: B1015E06.8
  misc_feature (1)..(114): NCBI GI NO: 25992102 NR Description: dehydration responsive element binding protein
  misc_feature (1)..(89): NCBI GI NO: 15223860 NR Description: transcription factor TINY, putative
  misc_feature (1)..(101): NCBI GI NO: 14140163 NR Description: putative AP2 domain containing protein
  misc_feature (1)..(94): NCBI GI NO: 37536842 NR Description: putative DNA binding protein
MRNWGKWVSEIREPRKKSRIWLGTFPTPEMAARAHDVAALSIKGSAAILNFPHFANSLPRPASLAPRDVQAAAAKAAHMDPSSLSSLVSAMDLSSASDELSQIIELPSLESTDDGSVVLEKEFVFVDSLDAWMYQPPFGFDTEQDTGFEGLMWNY

SEQ ID NO: 10885 - protein, 126 aa, Glycine max
  peptide (1)..(126): Ceres Seq. ID no. 12438841
  misc_feature (1)..(107): NCBI GI NO: 15239501 NR Description: transcription factor TINY; protein id: At5g25810.1
  misc_feature (1)..(89): NCBI GI NO: 15239113 NR Description: transcription factor TINY, putative
  misc_feature (1)..(126): NCBI GI NO: 15228171 NR Description: transcription factor TINY, putative
  misc_feature (1)..(126): NCBI GI NO: 9279711 NR Description: transcription factor TINY-like protein
  misc_feature (1)..(119): NCBI GI NO: 15233928 NR Description: transcription factor TINY, putative
  misc_feature (1)..(60): NCBI GI NO: 34903650 NR Description: B1015E06.8
  misc_feature (1)..(85): NCBI GI NO: 25992102 NR Description: dehydration responsive element binding protein
  misc_feature (1)..(60): NCBI GI NO: 15223860 NR Description: transcription factor TINY, putative
  misc_feature (1)..(72): NCBI GI NO: 14140163 NR Description: putative AP2 domain containing protein
  misc_feature (1)..(65): NCBI GI NO: 37536842 NR Description: putative DNA binding protein
MAARAHDVAALSIKGSAAILNFPHFANSLPRPASLAPRDVQAAAAKAAHMDPSSLSSLVSAMDLSSASDELSQIIELPSLESTDDGSVVLEKEFVFVDSLDAWMYQPPFGFDTEQDTGFEGLMWNY

SEQ ID NO: 10886 - DNA, 1121 bp, Glycine max
  misc_feature (1)..(1121): Ceres Seq. ID no. 12442501
  misc_feature (820)..(820): n is a, c, t, g, unknown, or other
  misc_feature (1110)..(1110): n is a, c, t, g, unknown, or other
  misc_feature (1101)..(1101): n is a, c, t, g, unknown, or other
cttaacatttccctaaacataactcacacacccctcttctctagggtttcaatttcaccatgtttccctttctcaaattagggttccggcgagcatggccgacggtccggcgagtccaggcggcggtagccacgagagcggcgagcacagccctcgctctaacgtgcgcgagcaggacaggtacctccccatcgctaacataagccgcatcatgaagaaggcactacctgcgaacggtaaaatcgccaaggacgccaaagagaccgttcaggaatgcgtatccgagttcatcagtttcatcaccagcgaggcctctgataagtgtcagagggaaaagagaaagactattaacggtgatgatttgctctgggccatggccactcttggttttgaggattatatcgatcctcttaaaatttacctcactagatacagagagatggagggtgatacgaagggttcagccaagggcggagactcatcttctaagaaagatgttcagccaagtcctaatgctcagcttgctcatcaaggttctttctcacaaggtgttagttacacaatttctcagggtcaacatatgatggttccaatgcaaggcccggagtaggtatcaagtttattaaccctcctgttgtaacgtatgttttccacgccagttaccaagtgctcacggcatattgaatgtctttttatgttatgtgaatactgacataggagatggttcttgtgtcctttttttttaaaaaaaaaagtaaggtttgtatattatctttggagtcgaattattatttgaaagttattatattgtaaatcctanagccctgttgtctgaatccatcaggcggcttggcaaagaccgagattttaggactgattgtaagcataaacccgaatattcttttcctaatttctttgtgcaataatgtatgaaaaaggctcgagcttcttttcaaaaaaaaaaaaaaaaaaaaaaaaaaaaaaaaaaaaaaaaaaaaaaaaaaaaaaaaaaaaaaaaaaaaaaaaaaaaaaaaaaaaaaaaaaaaaaaaaaaaaaaaaaaaaaaaaaaaaaaaaaaaaaaaaaaaaaaaaaaaaaaaaanttttttttnccccccccccc

SEQ ID NO: 10887 - protein, 171 aa, Glycine max
  peptide (1)..(171): Ceres Seq. ID no. 12442502
  misc_feature (1)..(171): NCBI GI NO: 17979253 NR Description: At2g37060/T2N18.18 [Arabidopsis thaliana]
  misc_feature (9)..(159): NCBI GI NO: 15231796 NR Description: transcription factor NF-Y
  misc_feature (1)..(149): NCBI GI NO: 25408527 NR Description: probable CCAAT-box binding trancription factor
  misc_feature (1)..(155): NCBI GI NO: 22380 NR Description: CAAT-box DNA binding protein subunit B (NF-YB)
  misc_feature (1)..(155): NCBI GI NO: 115840 NR Description: CCAAT-BINDING TRANSCRIPTION FACTOR SUBUNIT A
  misc_feature (8)..(155): NCBI GI NO: 30409461 NR Description: NF-YB [Oryza sativa (japonica cultivar-group)]
  misc_feature (1)..(132): NCBI GI NO: 18404885 NR Description: putative CCAAT-binding transcription factorsubunit
  misc_feature (11)..(168): NCBI GI NO: 34908028 NR Description: putative CAAT-box DNA binding protein
  misc_feature (3)..(166): NCBI GI NO: 30409459 NR Description: NF-YB [Oryza sativa (japonica cultivar-group)]
  misc_feature (1)..(132): NCBI GI NO: 25299604 NR Description: hypothetical protein At2g38880
MADGPASPGGGSHESGEHSPRSNVREQDRYLPIANISRIMKKALPANGKIAKDAKETVQECVSEFISFITSEASDKCQREKRKTINGDDLLWAMATLGFEDYIDPLKIYLTRYREMEGDTKGSAKGGDSSSKKDVQPSPNAQLAHQGSFSQGVSYTISQGQHMMVPMQGPE

SEQ ID NO: 10888 - protein, 132 aa, Glycine max
  peptide (1)..(132): Ceres Seq. ID no. 12442503
  misc_feature (1)..(132): NCBI GI NO: 17979253 NR Description: At2g37060/T2N18.18 [Arabidopsis thaliana]
  misc_feature (1)..(120): NCBI GI NO: 15231796 NR Description: transcription factor NF-Y
  misc_feature (1)..(110): NCBI GI NO: 25408527 NR Description: probable CCAAT-box binding trancription factor
  misc_feature (1)..(116): NCBI GI NO: 22380 NR Description: CAAT-box DNA binding protein subunit B (NF-YB)
  misc_feature (1)..(116): NCBI GI NO: 115840 NR Description: CCAAT-BINDING TRANSCRIPTION FACTOR SUBUNIT A
  misc_feature (1)..(116): NCBI GI NO: 30409461 NR Description: NF-YB [Oryza sativa (japonica cultivar-group)]
  misc_feature (1)..(93): NCBI GI NO: 18404885 NR Description: putative CCAAT-binding transcription factorsubunit
  misc_feature (1)..(129): NCBI GI NO: 34908028 NR Description: putative CAAT-box DNA binding protein
  misc_feature (1)..(127): NCBI GI NO: 30409459 NR Description: NF-YB [Oryza sativa (japonica cultivar-group)]
  misc_feature (1)..(93): NCBI GI NO: 25299604 NR Description: hypothetical protein At2g38880
MKKALPANGKIAKDAKETVQECVSEFISFITSEASDKCQREKRKTINGDDLLWAMATLGFEDYIDPLKIYLTRYREMEGDTKGSAKGGDSSSKKDVQPSPNAQLAHQGSFSQGVSYTISQGQHMMVPMQGPE

SEQ ID NO: 10889 - DNA, 1524 bp, Glycine max
  misc_feature (1)..(1524): Ceres Seq. ID no. 12453502
atggagactggtggtggacgcgattctggcatgagttctgagactatcaattcctccactcaaagaacttcaatgagcaacgagagcgtttgcagcaccagcttcagccgtctctccttcgatctccctcctccttcttcttcccctgagaccctcttcgtcaaaccccaccgctcctccgacttcgcctactccgccatcctccgccgcaagtccgccctcaccttccgcgacttccacctcctccgccgcatcggcgccggcgacatcggcaccgtctacctctgccgtctccgccacgacgccggcgacgaggacgacgacgaggacccctgtttctacgcgatgaaggtggtggacaaggaggcggtggcgctgaagaagaaggcgcagagagcggagatggagaggaagattctgaagatggtggaccatccgttcctccctacgctctacgcggagttcgaggcttcgaatttctcatgcattgtgatggagtattgctccggtggggacttgcactcccttcaacacaaccaccccaataaccgattctctctctcctctgccaggttttacgcggctgaagtactggttgcgttggagtatctccacatgctgggaatcatctacagggatctgaagcccgaaaacgtgttggtcagatcagacggtcacatcatgctttccgacttcgatctctctctatgctccgatgctatcccagccgttgaatcccctgactgttcactggaccccgcattcgcacccgcgttacgctacactcgccagtactccacccccttctcctgcctctcgaaccgcgtattccggtccaggaaggtccagaccctccaacccaaccgcctcttcgtggccgaaccggtcggggcccgctcgtgctccttcgttgggacccacgagtacgtgtcgccggaagtggcctccgggaactcacacggcaatgccgtcgactggtggtccttcgggatattcatctacgagatggtgtacggtcgaacacccttcgcgggatcatcgaacgaggctacgctgcgaagcatcatcaaaaagcccctcgcatttcccacctccacgccctccagtacgcttgaaatgcacgcgcgggacctcatatcagggttgctcaacaaggacccgaaccgcaggctcgggtccaaacgaggctctgcggacgtcaaaaaacaccccttcttcgcggggctcaatctcgcgctcatccggacggtcacgccgccggaggttccatcactcagaaggcataaaacgacgccgttttactaccccgccaacgtaaataacagtagacagcagctaacggcgtttgattacttttgattaaaatccgacgatggtcgccccctgcgccacgccacgtgttcagtcggtgccccccagttttataattggcggatgggtgacttatgtgtatattttttagttgtcctttcttttttgtaacccttttttttaatataaaataacatagtttgatacttacgt

SEQ ID NO: 10890 - protein, 452 aa, Glycine max
  peptide (1)..(452): Ceres Seq. ID no. 12453503
  misc_feature (79)..(406): Pfam Name: Pfam Description:  Protein kinase domain
  misc_feature (8)..(452): NCBI GI NO: 1935918 NR Description: putative serine/threonine protein kinase
  misc_feature (8)..(452): NCBI GI NO: 15226800 NR Description: putative protein kinase; protein id: At2g34650
  misc_feature (8)..(259): NCBI GI NO: 34910268 NR Description: putative protein kinase
  misc_feature (281)..(424): NCBI GI NO: 34910268 NR Description: putative protein kinase
  misc_feature (8)..(242): NCBI GI NO: 15225776 NR Description: putative second messenger-dependent protein kinase
  misc_feature (293)..(445): NCBI GI NO: 15225776 NR Description: putative second messenger-dependent protein kinase
  misc_feature (8)..(280): NCBI GI NO: 15236802 NR Description: putative protein kinase; protein id: At4g26610
  misc_feature (240)..(452): NCBI GI NO: 15236802 NR Description: putative protein kinase; protein id: At4g26610
  misc_feature (9)..(252): NCBI GI NO: 7446383 NR Description: probable protein kinase PK1 - potato
  misc_feature (220)..(423): NCBI GI NO: 7446383 NR Description: probable protein kinase PK1 - potato
METGGGRDSGMSSETINSSTQRTSMSNESVCSTSFSRLSFDLPPPSSSPETLFVKPHRSSDFAYSAILRRKSALTFRDFHLLRRIGAGDIGTVYLCRLRHDAGDEDDDEDPCFYAMKVVDKEAVALKKKAQRAEMERKILKMVDHPFLPTLYAEFEASNFSCIVMEYCSGGDLHSLQHNHPNNRFSLSSARFYAAEVLVALEYLHMLGIIYRDLKPENVLVRSDGHIMLSDFDLSLCSDAIPAVESPDCSLDPAFAPALRYTRQYSTPFSCLSNRVFRSRKVQTLQPNRLFVAEPVGARSCSFVGTHEYVSPEVASGNSHGNAVDWWSFGIFIYEMVYGRTPFAGSSNEATLRSIIKKPLAFPTSTPSSTLEMHARDLISGLLNKDPNRRLGSKRGSADVKKHPFFAGLNLALIRTVTPPEVPSLRRHKTTPFYYPANVNNSRQQLTAFDYF

SEQ ID NO: 10891 - protein, 442 aa, Glycine max
  peptide (1)..(442): Ceres Seq. ID no. 12453504
  misc_feature (69)..(396): Pfam Name: Pfam Description:  Protein kinase domain
  misc_feature (1)..(442): NCBI GI NO: 1935918 NR Description: putative serine/threonine protein kinase
  misc_feature (1)..(442): NCBI GI NO: 15226800 NR Description: putative protein kinase; protein id: At2g34650
  misc_feature (1)..(249): NCBI GI NO: 34910268 NR Description: putative protein kinase
  misc_feature (271)..(414): NCBI GI NO: 34910268 NR Description: putative protein kinase
  misc_feature (1)..(232): NCBI GI NO: 15225776 NR Description: putative second messenger-dependent protein kinase
  misc_feature (283)..(435): NCBI GI NO: 15225776 NR Description: putative second messenger-dependent protein kinase
  misc_feature (1)..(270): NCBI GI NO: 15236802 NR Description: putative protein kinase; protein id: At4g26610
  misc_feature (230)..(442): NCBI GI NO: 15236802 NR Description: putative protein kinase; protein id: At4g26610
  misc_feature (1)..(242): NCBI GI NO: 7446383 NR Description: probable protein kinase PK1 - potato
  misc_feature (210)..(413): NCBI GI NO: 7446383 NR Description: probable protein kinase PK1 - potato
MSSETINSSTQRTSMSNESVCSTSFSRLSFDLPPPSSSPETLFVKPHRSSDFAYSAILRRKSALTFRDFHLLRRIGAGDIGTVYLCRLRHDAGDEDDDEDPCFYAMKVVDKEAVALKKKAQRAEMERKILKMVDHPFLPTLYAEFEASNFSCIVMEYCSGGDLHSLQHNHPNNRFSLSSARFYAAEVLVALEYLHMLGIIYRDLKPENVLVRSDGHIMLSDFDLSLCSDAIPAVESPDCSLDPAFAPALRYTRQYSTPFSCLSNRVFRSRKVQTLQPNRLFVAEPVGARSCSFVGTHEYVSPEVASGNSHGNAVDWWSFGIFIYEMVYGRTPFAGSSNEATLRSIIKKPLAFPTSTPSSTLEMHARDLISGLLNKDPNRRLGSKRGSADVKKHPFFAGLNLALIRTVTPPEVPSLRRHKTTPFYYPANVNNSRQQLTAFDYF

SEQ ID NO: 10892 - protein, 428 aa, Glycine max
  peptide (1)..(428): Ceres Seq. ID no. 12453505
  misc_feature (55)..(382): Pfam Name: Pfam Description:  Protein kinase domain
  misc_feature (1)..(428): NCBI GI NO: 1935918 NR Description: putative serine/threonine protein kinase
  misc_feature (1)..(428): NCBI GI NO: 15226800 NR Description: putative protein kinase; protein id: At2g34650
  misc_feature (1)..(235): NCBI GI NO: 34910268 NR Description: putative protein kinase
  misc_feature (257)..(400): NCBI GI NO: 34910268 NR Description: putative protein kinase
  misc_feature (1)..(218): NCBI GI NO: 15225776 NR Description: putative second messenger-dependent protein kinase
  misc_feature (269)..(421): NCBI GI NO: 15225776 NR Description: putative second messenger-dependent protein kinase
  misc_feature (1)..(256): NCBI GI NO: 15236802 NR Description: putative protein kinase; protein id: At4g26610
  misc_feature (216)..(428): NCBI GI NO: 15236802 NR Description: putative protein kinase; protein id: At4g26610
  misc_feature (1)..(228): NCBI GI NO: 7446383 NR Description: probable protein kinase PK1 - potato
  misc_feature (196)..(399): NCBI GI NO: 7446383 NR Description: probable protein kinase PK1 - potato
MSNESVCSTSFSRLSFDLPPPSSSPETLFVKPHRSSDFAYSAILRRKSALTFRDFHLLRRIGAGDIGTVYLCRLRHDAGDEDDDEDPCFYAMKVVDKEAVALKKKAQRAEMERKILKMVDHPFLPTLYAEFEASNFSCIVMEYCSGGDLHSLQHNHPNNRFSLSSARFYAAEVLVALEYLHMLGIIYRDLKPENVLVRSDGHIMLSDFDLSLCSDAIPAVESPDCSLDPAFAPALRYTRQYSTPFSCLSNRVFRSRKVQTLQPNRLFVAEPVGARSCSFVGTHEYVSPEVASGNSHGNAVDWWSFGIFIYEMVYGRTPFAGSSNEATLRSIIKKPLAFPTSTPSSTLEMHARDLISGLLNKDPNRRLGSKRGSADVKKHPFFAGLNLALIRTVTPPEVPSLRRHKTTPFYYPANVNNSRQQLTAFDYF

SEQ ID NO: 10893 - DNA, 1816 bp, Glycine max
  misc_feature (1)..(1816): Ceres Seq. ID no. 12452690
cacagcccttctaaaacgcccttctaaaacgccttacttacttactctgtgccttctttcatcatccaaaaaagaaaaccgttggcattcacacaaagaaaacctttgggtttcccaaaatgtcatcatcggaactctcctctttctttcttctccgtctatcagacatactcagtttcgatgttttgctcggagttatgtttctagttgccgtgttcggctactggctggttcccggcggttttgcttgggctttttccaagttcaagcccgcgattcccgggccttccggttacccggtggtgggtctggtttgggctttcatagggcctcttactcacagggtccttgctaagttggctgaaacctttgatgcaaagcccttgatggcgttctctgtggggttcactcgtttcatcatctcttctcaccccgacaccgccaaagagatcttgaacagttccgctttcgcggatcgtcccgttaaggaatctgcttatgaacttctctttcaccgtgcgatggggtttgcaccctacggtgagtactggaggaacctgaggaggatctccgcaactcacatgttctctccgaggagaatcgcagcccaaggagtgtttcgggcccggattggagcccaaatggtgagagacatcgtgggcctgatggggagggacggtgtggtggaggtgaggaaggtgttgcattttgggtcgttgaataacgtgatgaagagcgtgtttgggaggagttatgtgtttggtgaggggggtgatgggtgtgagctcgaggggttggtgagcgaggggtatcatttgcttggggtgtttaactggagtgaccactttccactcttgggttggttggatttgcaaggtgtgaggaagagctgtaggagtttggttgatagagtgaatgtttatgttgggaaaatcattttggagcatagagtgaagagggttgctcaaggtgaggataataaggccattgatactgatagttctggtgactttgttgatgtgctgctggatttggagaaagagaataggctaaaccactctgatatggttgctgttttgtgggaaatgatatttagagggactgatacggtagctatccttctagagtggattctagcaagaatggttcttcatccagaaatacaagcaaaggcacaatctgaaatagactctgtggttgggtctgggcgtagtgtgagtgatgatgaccttccaaaccttccttacgttcgagccatagtgaaggaaaccttaaggatgcacccaccaggccctcttctttcatgggccagactttctattcatgacacacaaattggcaatcactttgttccagctggcaccactgctatggtaaacatgtgggccataactcacgaccaagaagtgtggtatgagccaaaacagttcaagccggagcgttttttgaaggacgaggacgtgccaatcatgggatctgatcttaggttggcaccttttggctctgggaggagagtgtgccctggaaaagccatgggcttggccactgttgagctttggcttgctatgttcttacaaaaattcaaatggatgccctgtgatgattctggtgttgacttgtctgagtgtttgaagctctccatggagatgaaacactctctcaaaaccaaagttgttgcaaggcctgtagtttctcttgcaatgtaatgggttggagtatcccatccttttactcccattaataataatattcctttccgttgtaaaaaaaaaaaaaaaaaacggcacgagaagccggcacgagaagccggcacgag

SEQ ID NO: 10894 - protein, 528 aa, Glycine max
  peptide (1)..(528): Ceres Seq. ID no. 12452691
  misc_feature (53)..(495): Pfam Name: Pfam Description:  Cytochrome P450
  misc_feature (19)..(521): NCBI GI NO: 15221132 NR Description: cytochrome p450 family; protein id: At1g74110.1
  misc_feature (16)..(523): NCBI GI NO: 15222937 NR Description: cytochrome p450 family; protein id: At1g13710.1
  misc_feature (90)..(521): NCBI GI NO: 1173624 NR Description: cytochrome P-450
  misc_feature (1)..(521): NCBI GI NO: 34394563 NR Description: putative cytochrome P-450
  misc_feature (11)..(521): NCBI GI NO: 31126705 NR Description: putative cytochrome P-450
  misc_feature (22)..(521): NCBI GI NO: 5921926 NR Description: Cytochrome P450 78A3
  misc_feature (18)..(521): NCBI GI NO: 15226422 NR Description: putative cytochrome P450; protein id: At2g46660.1
  misc_feature (22)..(521): NCBI GI NO: 5921925 NR Description: Cytochrome P450 78A4
  misc_feature (6)..(521): NCBI GI NO: 15228624 NR Description: cytochrome p450 (CYP78A9); protein id: At3g61880
  misc_feature (6)..(521): NCBI GI NO: 21592543 NR Description: cytochrome p450 (CYP78A9) [Arabidopsis thaliana]
MSSSELSSFFLLRLSDILSFDVLLGVMFLVAVFGYWLVPGGFAWAFSKFKPAIPGPSGYPVVGLVWAFIGPLTHRVLAKLAETFDAKPLMAFSVGFTRFIISSHPDTAKEILNSSAFADRPVKESAYELLFHRAMGFAPYGEYWRNLRRISATHMFSPRRIAAQGVFRARIGAQMVRDIVGLMGRDGVVEVRKVLHFGSLNNVMKSVFGRSYVFGEGGDGCELEGLVSEGYHLLGVFNWSDHFPLLGWLDLQGVRKSCRSLVDRVNVYVGKIILEHRVKRVAQGEDNKAIDTDSSGDFVDVLLDLEKENRLNHSDMVAVLWEMIFRGTDTVAILLEWILARMVLHPEIQAKAQSEIDSVVGSGRSVSDDDLPNLPYVRAIVKETLRMHPPGPLLSWARLSIHDTQIGNHFVPAGTTAMVNMWAITHDQEVWYEPKQFKPERFLKDEDVPIMGSDLRLAPFGSGRRVCPGKAMGLATVELWLAMFLQKFKWMPCDDSGVDLSECLKLSMEMKHSLKTKVVARPVVSLAM

SEQ ID NO: 10895 - protein, 502 aa, Glycine max
  peptide (1)..(502): Ceres Seq. ID no. 12452692
  misc_feature (27)..(469): Pfam Name: Pfam Description:  Cytochrome P450
  misc_feature (1)..(495): NCBI GI NO: 15221132 NR Description: cytochrome p450 family; protein id: At1g74110.1
  misc_feature (1)..(497): NCBI GI NO: 15222937 NR Description: cytochrome p450 family; protein id: At1g13710.1
  misc_feature (64)..(495): NCBI GI NO: 1173624 NR Description: cytochrome P-450
  misc_feature (1)..(495): NCBI GI NO: 34394563 NR Description: putative cytochrome P-450
  misc_feature (1)..(495): NCBI GI NO: 31126705 NR Description: putative cytochrome P-450
  misc_feature (1)..(495): NCBI GI NO: 5921926 NR Description: Cytochrome P450 78A3
  misc_feature (1)..(495): NCBI GI NO: 15226422 NR Description: putative cytochrome P450; protein id: At2g46660.1
  misc_feature (1)..(495): NCBI GI NO: 5921925 NR Description: Cytochrome P450 78A4
  misc_feature (1)..(495): NCBI GI NO: 15228624 NR Description: cytochrome p450 (CYP78A9); protein id: At3g61880
  misc_feature (1)..(495): NCBI GI NO: 21592543 NR Description: cytochrome p450 (CYP78A9) [Arabidopsis thaliana]
MFLVAVFGYWLVPGGFAWAFSKFKPAIPGPSGYPVVGLVWAFIGPLTHRVLAKLAETFDAKPLMAFSVGFTRFIISSHPDTAKEILNSSAFADRPVKESAYELLFHRAMGFAPYGEYWRNLRRISATHMFSPRRIAAQGVFRARIGAQMVRDIVGLMGRDGVVEVRKVLHFGSLNNVMKSVFGRSYVFGEGGDGCELEGLVSEGYHLLGVFNWSDHFPLLGWLDLQGVRKSCRSLVDRVNVYVGKIILEHRVKRVAQGEDNKAIDTDSSGDFVDVLLDLEKENRLNHSDMVAVLWEMIFRGTDTVAILLEWILARMVLHPEIQAKAQSEIDSVVGSGRSVSDDDLPNLPYVRAIVKETLRMHPPGPLLSWARLSIHDTQIGNHFVPAGTTAMVNMWAITHDQEVWYEPKQFKPERFLKDEDVPIMGSDLRLAPFGSGRRVCPGKAMGLATVELWLAMFLQKFKWMPCDDSGVDLSECLKLSMEMKHSLKTKVVARPVVSLAM

SEQ ID NO: 10896 - protein, 439 aa, Glycine max
  peptide (1)..(439): Ceres Seq. ID no. 12452693
  misc_feature (1)..(406): Pfam Name: Pfam Description:  Cytochrome P450
  misc_feature (1)..(432): NCBI GI NO: 15221132 NR Description: cytochrome p450 family; protein id: At1g74110.1
  misc_feature (1)..(434): NCBI GI NO: 15222937 NR Description: cytochrome p450 family; protein id: At1g13710.1
  misc_feature (1)..(432): NCBI GI NO: 1173624 NR Description: cytochrome P-450
  misc_feature (1)..(432): NCBI GI NO: 34394563 NR Description: putative cytochrome P-450
  misc_feature (1)..(432): NCBI GI NO: 31126705 NR Description: putative cytochrome P-450
  misc_feature (1)..(432): NCBI GI NO: 5921926 NR Description: Cytochrome P450 78A3
  misc_feature (1)..(432): NCBI GI NO: 15226422 NR Description: putative cytochrome P450; protein id: At2g46660.1
  misc_feature (1)..(432): NCBI GI NO: 5921925 NR Description: Cytochrome P450 78A4
  misc_feature (1)..(432): NCBI GI NO: 15228624 NR Description: cytochrome p450 (CYP78A9); protein id: At3g61880
  misc_feature (1)..(432): NCBI GI NO: 21592543 NR Description: cytochrome p450 (CYP78A9) [Arabidopsis thaliana]
MAFSVGFTRFIISSHPDTAKEILNSSAFADRPVKESAYELLFHRAMGFAPYGEYWRNLRRISATHMFSPRRIAAQGVFRARIGAQMVRDIVGLMGRDGVVEVRKVLHFGSLNNVMKSVFGRSYVFGEGGDGCELEGLVSEGYHLLGVFNWSDHFPLLGWLDLQGVRKSCRSLVDRVNVYVGKIILEHRVKRVAQGEDNKAIDTDSSGDFVDVLLDLEKENRLNHSDMVAVLWEMIFRGTDTVAILLEWILARMVLHPEIQAKAQSEIDSVVGSGRSVSDDDLPNLPYVRAIVKETLRMHPPGPLLSWARLSIHDTQIGNHFVPAGTTAMVNMWAITHDQEVWYEPKQFKPERFLKDEDVPIMGSDLRLAPFGSGRRVCPGKAMGLATVELWLAMFLQKFKWMPCDDSGVDLSECLKLSMEMKHSLKTKVVARPVVSLAM

SEQ ID NO: 10897 - DNA, 1338 bp, Glycine max
  misc_feature (1)..(1338): Ceres Seq. ID no. 12456365
gtcataactttgctagatccatcaaagaagcagtgattcccccagcttccacatcaaatgaagccataatcatcatcatcatcaccacgcctcttctttctctttctccctaccattcacaatgtcatcgatacaccactactcaccggaaacaacactatactggaccagcgaccaccagcaacaacaacaacaacaacaacaacaacaacaacaagctgccacgtggcttagtaattcccacactccccgtttcaacctgaacgaagacgacgacgaggaagacgacgttgtcgtttcggacaaggctactaataatttggcgcaagaacaggagaaagaagcgatgttcgagaagccgttgacgccgagcgacgtcgggaagctgaaccggctcgtgatcccgaaacagcacgcggagaagtacttccctcttgactcgtccggcggtgactcggcggcggcgaaagggctcttgctgagtttcgaggacgagtcggggaagtgctggcgcttccgttactcttattggaacagtagccagagttacgttttgaccaaaggctggagccgttacgtcaaagacaaacgcctccacgcaggcgacgtcgttttgttccacagacaccgcgcccaccctcaacgcttcttcatctcctgcacccgccaccaacccaaccccaaccctcccgcgcacgttagcatcagatcctcctcctactctgcgctcccagcttatcctacgcaccatcatcatcacctccccttcccataccaacctcactctcttcacgcaccaggtggagggtcccaaggacagaacgaaacgacaccaggagggaacagttcaagtggcagggtgctgaggctgtttggggtgaacatggaatgccaacctgataatgataatgattcccaaaactccacacatgaatgctcctacacccacttataccaccatcaaacctcttcttatccttcttcaaaccctcaccatcacatgctacctcaacaaccataatagaaattagatatatatgcccccctctttattagattctcccccgttttttttttttcatttccagcttcagggttgaagtatgcccttaaattaattttagtcaatgaccgtgtcgttaacatgaacccgtgaaaggaacccttcttttattattagtatatttaggttgacgttgaagattatagaggatctttcttgtcttgaattagggagatgcatgcaaatggaaatgccttgtttattcgttttatcggatcttcttgttccctgtcactcgagcatattaattatcgactaagctgtgaatgcatgcc

SEQ ID NO: 10898 - protein, 299 aa, Glycine max
  peptide (1)..(299): Ceres Seq. ID no. 12456366
  misc_feature (76)..(182): Pfam Name: Pfam Description:  B3 DNA binding domain
  misc_feature (73)..(295): NCBI GI NO: 15239984 NR Description: putative protein; protein id: At5g06250.1
  misc_feature (65)..(260): NCBI GI NO: 30681787 NR Description: DNA-binding protein, putative
  misc_feature (71)..(207): NCBI GI NO: 25408446 NR Description: probable RAV2-like DNA binding protein
  misc_feature (71)..(207): NCBI GI NO: 30686669 NR Description: DNA-binding protein, putative
  misc_feature (71)..(207): NCBI GI NO: 30686674 NR Description: DNA-binding protein, putative
  misc_feature (65)..(222): NCBI GI NO: 30681791 NR Description: DNA-binding protein, putative
  misc_feature (61)..(224): NCBI GI NO: 15228649 NR Description: RAV-like protein; protein id: At3g61970
  misc_feature (61)..(224): NCBI GI NO: 26450371 NR Description: putative RAV [Arabidopsis thaliana]
  misc_feature (72)..(224): NCBI GI NO: 21618252 NR Description: RAV-like protein [Arabidopsis thaliana]
  misc_feature (46)..(229): NCBI GI NO: 18407193 NR Description: putative RAV-like B3 domain DNA binding protein
MSSIHHYSPETTLYWTSDHQQQQQQQQQQQQQAATWLSNSHTPRFNLNEDDDEEDDVVVSDKATNNLAQEQEKEAMFEKPLTPSDVGKLNRLVIPKQHAEKYFPLDSSGGDSAAAKGLLLSFEDESGKCWRFRYSYWNSSQSYVLTKGWSRYVKDKRLHAGDVVLFHRHRAHPQRFFISCTRHQPNPNPPAHVSIRSSSYSALPAYPTHHHHHLPFPYQPHSLHAPGGGSQGQNETTPGGNSSSGRVLRLFGVNMECQPDNDNDSQNSTHECSYTHLYHHQTSSYPSSNPHHHMLPQQP

SEQ ID NO: 10899 - protein, 224 aa, Glycine max
  peptide (1)..(224): Ceres Seq. ID no. 12456367
  misc_feature (1)..(107): Pfam Name: Pfam Description:  B3 DNA binding domain
  misc_feature (1)..(220): NCBI GI NO: 15239984 NR Description: putative protein; protein id: At5g06250.1
  misc_feature (1)..(185): NCBI GI NO: 30681787 NR Description: DNA-binding protein, putative
  misc_feature (1)..(132): NCBI GI NO: 25408446 NR Description: probable RAV2-like DNA binding protein
  misc_feature (1)..(132): NCBI GI NO: 30686669 NR Description: DNA-binding protein, putative
  misc_feature (1)..(132): NCBI GI NO: 30686674 NR Description: DNA-binding protein, putative
  misc_feature (1)..(147): NCBI GI NO: 30681791 NR Description: DNA-binding protein, putative
  misc_feature (1)..(149): NCBI GI NO: 15228649 NR Description: RAV-like protein; protein id: At3g61970
  misc_feature (1)..(149): NCBI GI NO: 26450371 NR Description: putative RAV [Arabidopsis thaliana]
  misc_feature (1)..(149): NCBI GI NO: 21618252 NR Description: RAV-like protein [Arabidopsis thaliana]
  misc_feature (1)..(154): NCBI GI NO: 18407193 NR Description: putative RAV-like B3 domain DNA binding protein
MFEKPLTPSDVGKLNRLVIPKQHAEKYFPLDSSGGDSAAAKGLLLSFEDESGKCWRFRYSYWNSSQSYVLTKGWSRYVKDKRLHAGDVVLFHRHRAHPQRFFISCTRHQPNPNPPAHVSIRSSSYSALPAYPTHHHHHLPFPYQPHSLHAPGGGSQGQNETTPGGNSSSGRVLRLFGVNMECQPDNDNDSQNSTHECSYTHLYHHQTSSYPSSNPHHHMLPQQP

SEQ ID NO: 10900 - DNA, 1681 bp, Glycine max
  misc_feature (1)..(1681): Ceres Seq. ID no. 12452925
aaaagggtgtccaaagaaggaatcacacaagagaaattttgggtggatcttggtaatttaaatttggtccaaaaatagtaagaaaaaaaaaccatagttcatttaattttcatgtccttgctaacggtggcgcaccaaagggggtcaggtgagtttatccggttcacggaaagtcatggcggtggtggcgatgacgtcagtggtgacggtgaacatggttgtggacatgatgatggaagtggtgctggaggttcactagggttgaattttaaccaagtgatgcaacaaggtgaggtgacaatgcaaggtggttcattggtttcagggtataacaggggtgatccagagttgagagaaatagtttcagctttgacacacgtggtgtcttcagggtctggccagaggagcaccgaattgacccagcaaagtggttttcctatgatgtctgcttcttctctttcacgtttgtctgctttctcttcttcttctccttctccttcttctggagcctcttgggttggccacaaaagaggcagagaagaagaagagaatagtacttcacataacttgatgcaacaacaacaacaaagtgctccaagactcttcagaaacattggtgacttcatggtgccttctcaaggagactcatcatcagtgacagaagaagcccccacctccacaactacaactgtaaccgccgtcactgaaaacccaccaggaggtggggaaaggaggagaaagtacagaggagtgaggcagaggccatggggaaaatgggcagcagaaatccgtgatccacacaaagcagcaagagtttggctaggcacatttgacacagaagaagcagcagcaagagcctatgatgaagctgcattgaggttcagaggcaacagagcaaagcttaacttccctgaaaatgtaagagcagttccacccattcaaccttttcaagccaccactaggctaaccgtttctgattccaccacctctcaattccggccactctccgcggtggcgccacccttcattcagcagccacagattcagggctcctctgacttgatcagagactacttgcaatactctcagcttctacagagtgattttcaacagcaacaaatacaacaacaacagcagcagcagcggcagcagcagcagcggcagcggcagcagcggcagcagcagcagcaacaacaacaacaaccatctagtttgcttcagcagttgtactataatgcacaatttgcttcacttcaatcaccttcaatgctatcatcatctccttcattttcttcttctgtgtctccagcaccattcccattattcacaacctctgcttctttccccttgttttcaagtcaacaaatgggctatttccagccaccggaaagccgcaatcccgctggcggcgtgccggagtttccaacgtccacatggtcggataccagtagccagccaccaccttctggttgatacagtgttttagtttccttcatattttcctttttcttttttctttctttcattcttagcataaaaaaaaaagacttgttatacttatttcttttttcaagggtgaaactatgatatagttttttttaagtatttttggtactattctcgtatcagaattagagtttcagtaatttatgttgatattcaatacaaatctttattatgt

SEQ ID NO: 10901 - protein, 453 aa, Glycine max
  peptide (1)..(453): Ceres Seq. ID no. 12452926
  misc_feature (208)..(271): Pfam Name: Pfam Description:  AP2 domain
  misc_feature (125)..(343): NCBI GI NO: 15238232 NR Description: putative protein; protein id: At5g64750.1
  misc_feature (125)..(329): NCBI GI NO: 34908616 NR Description: P0677H08.8
  misc_feature (184)..(289): NCBI GI NO: 15240610 NR Description: putative protein; protein id: At5g50080.1
  misc_feature (201)..(289): NCBI GI NO: 34221731 NR Description: putative AP2 domain transcription factor
  misc_feature (207)..(375): NCBI GI NO: 15240604 NR Description: putative protein; protein id: At5g13330.1
  misc_feature (174)..(329): NCBI GI NO: 38347164 NR Description: OSJNBa0039C07.10
  misc_feature (187)..(270): NCBI GI NO: 2281637 NR Description: AP2 domain containing protein RAP2.6
  misc_feature (187)..(270): NCBI GI NO: 15218275 NR Description: AP2 domain protein RAP2
  misc_feature (142)..(271): NCBI GI NO: 15240379 NR Description: putative protein; protein id: At5g61890.1
  misc_feature (180)..(316): NCBI GI NO: 15226153 NR Description: putative AP2 domain transcription factor
MSLLTVAHQRGSGEFIRFTESHGGGGDDVSGDGEHGCGHDDGSGAGGSLGLNFNQVMQQGEVTMQGGSLVSGYNRGDPELREIVSALTHVVSSGSGQRSTELTQQSGFPMMSASSLSRLSAFSSSSPSPSSGASWVGHKRGREEEENSTSHNLMQQQQQSAPRLFRNIGDFMVPSQGDSSSVTEEAPTSTTTTVTAVTENPPGGGERRRKYRGVRQRPWGKWAAEIRDPHKAARVWLGTFDTEEAAARAYDEAALRFRGNRAKLNFPENVRAVPPIQPFQATTRLTVSDSTTSQFRPLSAVAPPFIQQPQIQGSSDLIRDYLQYSQLLQSDFQQQQIQQQQQQQRQQQQRQRQQRQQQQQQQQQPSSLLQQLYYNAQFASLQSPSMLSSSPSFSSSVSPAPFPLFTTSASFPLFSSQQMGYFQPPESRNPAGGVPEFPTSTWSDTSSQPPPSG

SEQ ID NO: 10902 - protein, 397 aa, Glycine max
  peptide (1)..(397): Ceres Seq. ID no. 12452927
  misc_feature (152)..(215): Pfam Name: Pfam Description:  AP2 domain
  misc_feature (69)..(287): NCBI GI NO: 15238232 NR Description: putative protein; protein id: At5g64750.1
  misc_feature (69)..(273): NCBI GI NO: 34908616 NR Description: P0677H08.8
  misc_feature (128)..(233): NCBI GI NO: 15240610 NR Description: putative protein; protein id: At5g50080.1
  misc_feature (145)..(233): NCBI GI NO: 34221731 NR Description: putative AP2 domain transcription factor
  misc_feature (151)..(319): NCBI GI NO: 15240604 NR Description: putative protein; protein id: At5g13330.1
  misc_feature (118)..(273): NCBI GI NO: 38347164 NR Description: OSJNBa0039C07.10
  misc_feature (131)..(214): NCBI GI NO: 2281637 NR Description: AP2 domain containing protein RAP2.6
  misc_feature (131)..(214): NCBI GI NO: 15218275 NR Description: AP2 domain protein RAP2
  misc_feature (86)..(215): NCBI GI NO: 15240379 NR Description: putative protein; protein id: At5g61890.1
  misc_feature (124)..(260): NCBI GI NO: 15226153 NR Description: putative AP2 domain transcription factor
MQQGEVTMQGGSLVSGYNRGDPELREIVSALTHVVSSGSGQRSTELTQQSGFPMMSASSLSRLSAFSSSSPSPSSGASWVGHKRGREEEENSTSHNLMQQQQQSAPRLFRNIGDFMVPSQGDSSSVTEEAPTSTTTTVTAVTENPPGGGERRRKYRGVRQRPWGKWAAEIRDPHKAARVWLGTFDTEEAAARAYDEAALRFRGNRAKLNFPENVRAVPPIQPFQATTRLTVSDSTTSQFRPLSAVAPPFIQQPQIQGSSDLIRDYLQYSQLLQSDFQQQQIQQQQQQQRQQQQRQRQQRQQQQQQQQQPSSLLQQLYYNAQFASLQSPSMLSSSPSFSSSVSPAPFPLFTTSASFPLFSSQQMGYFQPPESRNPAGGVPEFPTSTWSDTSSQPPPSG

SEQ ID NO: 10903 - protein, 390 aa, Glycine max
  peptide (1)..(390): Ceres Seq. ID no. 12452928
  misc_feature (145)..(208): Pfam Name: Pfam Description:  AP2 domain
  misc_feature (62)..(280): NCBI GI NO: 15238232 NR Description: putative protein; protein id: At5g64750.1
  misc_feature (62)..(266): NCBI GI NO: 34908616 NR Description: P0677H08.8
  misc_feature (121)..(226): NCBI GI NO: 15240610 NR Description: putative protein; protein id: At5g50080.1
  misc_feature (138)..(226): NCBI GI NO: 34221731 NR Description: putative AP2 domain transcription factor
  misc_feature (144)..(312): NCBI GI NO: 15240604 NR Description: putative protein; protein id: At5g13330.1
  misc_feature (111)..(266): NCBI GI NO: 38347164 NR Description: OSJNBa0039C07.10
  misc_feature (124)..(207): NCBI GI NO: 2281637 NR Description: AP2 domain containing protein RAP2.6
  misc_feature (124)..(207): NCBI GI NO: 15218275 NR Description: AP2 domain protein RAP2
  misc_feature (79)..(208): NCBI GI NO: 15240379 NR Description: putative protein; protein id: At5g61890.1
  misc_feature (117)..(253): NCBI GI NO: 15226153 NR Description: putative AP2 domain transcription factor
MQGGSLVSGYNRGDPELREIVSALTHVVSSGSGQRSTELTQQSGFPMMSASSLSRLSAFSSSSPSPSSGASWVGHKRGREEEENSTSHNLMQQQQQSAPRLFRNIGDFMVPSQGDSSSVTEEAPTSTTTTVTAVTENPPGGGERRRKYRGVRQRPWGKWAAEIRDPHKAARVWLGTFDTEEAAARAYDEAALRFRGNRAKLNFPENVRAVPPIQPFQATTRLTVSDSTTSQFRPLSAVAPPFIQQPQIQGSSDLIRDYLQYSQLLQSDFQQQQIQQQQQQQRQQQQRQRQQRQQQQQQQQQPSSLLQQLYYNAQFASLQSPSMLSSSPSFSSSVSPAPFPLFTTSASFPLFSSQQMGYFQPPESRNPAGGVPEFPTSTWSDTSSQPPPSG

SEQ ID NO: 10904 - DNA, 438 bp, Glycine max
  misc_feature (1)..(438): Ceres Seq. ID no. 4620132
acaaattctatacaccactctatcccccgttctctctcgcccgctttggtaaggcaagatagttctggccaacatggtgcaatcaaggaaattcagaggtgtgaggcaacgcaattggggctcttgggtttctgagattcgtcacccattattgaaaaggagggtgtggcttgggacattcgagacagctgatgaagcagctagagcatatgatgaggccgccattttgatgagtggaagaaatgccaaaacaaacttcccagttggtgaaaaccaaatgggaaatcatagttcaagtacttcatcttcctccaccactacattgtctgcagttctgagtgcaaaacttaggaagygttgcaagyccccttcaccttccctcacttgcctgaggcttgacactgagaattcccatattggtgtgtggcagaagcgagc

SEQ ID NO: 10905 - protein, 121 aa, Glycine max
  peptide (1)..(121): Ceres Seq. ID no. 4620133
  misc_feature (4)..(67): Pfam Name: Pfam Description:  AP2 domain
  misc_feature (1)..(120): NCBI GI NO: 15218134 NR Description: putative ethylene responsive element
  misc_feature (1)..(120): NCBI GI NO: 21553845 NR Description: putative ethylene responsive element
  misc_feature (1)..(120): NCBI GI NO: 15238976 NR Description: putative protein; protein id: At5g11190.1
  misc_feature (1)..(120): NCBI GI NO: 15239413 NR Description: AP2 domain containing protein
  misc_feature (1)..(120): NCBI GI NO: 30689846 NR Description: AP2 domain transcription factor, putative
  misc_feature (5)..(104): NCBI GI NO: 15238727 NR Description: ethylene-responsive element - like protein
  misc_feature (5)..(104): NCBI GI NO: 18650662 NR Description: ethylene response factor 1
  misc_feature (6)..(96): NCBI GI NO: 38343976 NR Description: OSJNBb0022F16.15
  misc_feature (5)..(104): NCBI GI NO: 131754 NR Description: PPLZ02 PROTEIN
  misc_feature (1)..(83): NCBI GI NO: 8809573 NR Description: ethylene-responsive element binding factor
  misc_feature (95)..(95): Xaa is any aa, unknown or other
  misc_feature (98)..(98): Xaa is any aa, unknown or other
MVQSRKFRGVRQRNWGSWVSEIRHPLLKRRVWLGTFETADEAARAYDEAAILMSGRNAKTNFPVGENQMGNHSSSTSSSSTTTLSAVLSAKLRKXCKXPSPSLTCLRLDTENSHIGVWQKR

SEQ ID NO: 10906 - protein, 69 aa, Glycine max
  peptide (1)..(69): Ceres Seq. ID no. 4620134
  misc_feature (1)..(68): NCBI GI NO: 15218134 NR Description: putative ethylene responsive element
  misc_feature (1)..(68): NCBI GI NO: 21553845 NR Description: putative ethylene responsive element
  misc_feature (1)..(68): NCBI GI NO: 15238976 NR Description: putative protein; protein id: At5g11190.1
  misc_feature (1)..(68): NCBI GI NO: 15239413 NR Description: AP2 domain containing protein
  misc_feature (1)..(68): NCBI GI NO: 30689846 NR Description: AP2 domain transcription factor, putative
  misc_feature (1)..(52): NCBI GI NO: 15238727 NR Description: ethylene-responsive element - like protein
  misc_feature (1)..(52): NCBI GI NO: 18650662 NR Description: ethylene response factor 1
  misc_feature (1)..(44): NCBI GI NO: 38343976 NR Description: OSJNBb0022F16.15
  misc_feature (1)..(52): NCBI GI NO: 131754 NR Description: PPLZ02 PROTEIN
  misc_feature (1)..(31): NCBI GI NO: 8809573 NR Description: ethylene-responsive element binding factor
  misc_feature (43)..(43): Xaa is any aa, unknown or other
  misc_feature (46)..(46): Xaa is any aa, unknown or other
MSGRNAKTNFPVGENQMGNHSSSTSSSSTTTLSAVLSAKLRKXCKXPSPSLTCLRLDTENSHIGVWQKR

SEQ ID NO: 10907 - DNA, 467 bp, Glycine max
  misc_feature (1)..(467): Ceres Seq. ID no. 4865327
aaaaacaaaatagtctctcttctctcaaacgattacaaaaaaatgacgtcatccaaccgttcttcatcaccaacatcatcgtcttcggaccaatctgatgtaactacaacaacaagcacccacttgtccgaaacttcaccgagaaacaacaaaagaaagagaagcaaggattcttcttcttcttcttcttcctcttcttcaaagcttaagcatcctgtttacagaggtgtacggatgagaagctggggcaaatgggtctccgagatccgacagcctcgcaaaaagactcgaatctggctcggtacattcgccaccgcagacatggcggcgcgtgctcacgacgtcgctgctctcgccatcaaaggctcctccgccgtcatcaacttyyccggagcttgcctctatcctccctcgtccggcgtcatcctcgccgcatgatatccaagcagcagctgcggaagccgccg

SEQ ID NO: 10908 - protein, 145 aa, Glycine max
  peptide (1)..(145): Ceres Seq. ID no. 4865328
  misc_feature (71)..(129): Pfam Name: Pfam Description:  AP2 domain
  misc_feature (13)..(139): NCBI GI NO: 9279711 NR Description: transcription factor TINY-like protein
  misc_feature (15)..(139): NCBI GI NO: 15228171 NR Description: transcription factor TINY, putative
  misc_feature (13)..(129): NCBI GI NO: 38605845 NR Description: OSJNBb0034G17.3
  misc_feature (5)..(129): NCBI GI NO: 15225381 NR Description: putative AP2 domain transcription factor
  misc_feature (5)..(129): NCBI GI NO: 21592664 NR Description: putative AP2 domain transcription factor
  misc_feature (15)..(129): NCBI GI NO: 14140163 NR Description: putative AP2 domain containing protein
  misc_feature (43)..(129): NCBI GI NO: 38605848 NR Description: OSJNBb0034G17.6
  misc_feature (15)..(129): NCBI GI NO: 15232340 NR Description: transcription factor - like protein
  misc_feature (56)..(129): NCBI GI NO: 37536842 NR Description: putative DNA binding protein
  misc_feature (51)..(129): NCBI GI NO: 15227471 NR Description: putative AP2 domain transcription factor
  misc_feature (129)..(129): Xaa is any aa, unknown or other
  misc_feature (130)..(130): Xaa is any aa, unknown or other
KNKIVSLLSNDYKKMTSSNRSSSPTSSSSDQSDVTTTTSTHLSETSPRNNKRKRSKDSSSSSSSSSSKLKHPVYRGVRMRSWGKWVSEIRQPRKKTRIWLGTFATADMAARAHDVAALAIKGSSAVINXXGACLYPPSSGVILAA

SEQ ID NO: 10909 - protein, 131 aa, Glycine max
  peptide (1)..(131): Ceres Seq. ID no. 4865329
  misc_feature (57)..(115): Pfam Name: Pfam Description:  AP2 domain
  misc_feature (1)..(125): NCBI GI NO: 9279711 NR Description: transcription factor TINY-like protein
  misc_feature (1)..(125): NCBI GI NO: 15228171 NR Description: transcription factor TINY, putative
  misc_feature (1)..(115): NCBI GI NO: 38605845 NR Description: OSJNBb0034G17.3
  misc_feature (1)..(115): NCBI GI NO: 15225381 NR Description: putative AP2 domain transcription factor
  misc_feature (1)..(115): NCBI GI NO: 21592664 NR Description: putative AP2 domain transcription factor
  misc_feature (1)..(115): NCBI GI NO: 14140163 NR Description: putative AP2 domain containing protein
  misc_feature (29)..(115): NCBI GI NO: 38605848 NR Description: OSJNBb0034G17.6
  misc_feature (1)..(115): NCBI GI NO: 15232340 NR Description: transcription factor - like protein
  misc_feature (42)..(115): NCBI GI NO: 37536842 NR Description: putative DNA binding protein
  misc_feature (37)..(115): NCBI GI NO: 15227471 NR Description: putative AP2 domain transcription factor
  misc_feature (115)..(115): Xaa is any aa, unknown or other
  misc_feature (116)..(116): Xaa is any aa, unknown or other
MTSSNRSSSPTSSSSDQSDVTTTTSTHLSETSPRNNKRKRSKDSSSSSSSSSSKLKHPVYRGVRMRSWGKWVSEIRQPRKKTRIWLGTFATADMAARAHDVAALAIKGSSAVINXXGACLYPPSSGVILAA

SEQ ID NO: 10910 - DNA, 1393 bp, Triticum aestivum
  misc_feature (1)..(1393): Ceres Seq. ID no. 13661015
aaaaataggctcgtggcaaatctggtctaccagtcgccccctcacccacccaacccgcccacggagaaaaatcccccaggaagaagaaattccacgctgctgccattccgacgatgcgccgcgccgccgtcgccgtcaccgccgcgctcctcctcctcctcgtcgccggcgcagctgcgggctcccccggcgcggagcccacctgcccgcggggcgccggcccgccgttcctcgacgcgctcggatcgcggtgcccccgcggcgcccggatcgtgccctccccgcccctcgaggtcagaggagatgctgttgataaagaattgaaccttcgctgtaccggtgcctcatgctccattctcttctatgccgcatggtgtcctttctcgagcaaatttcgaccaatatttgaagctctcagcaccatgttccctcagatacatcactttgctgtcgaagaatcttctgcgacgcctagtttgttttcaagatatggtgtccgtggcttcccagccattcttctggcaagtgagactacaatggttcgttacaggggcacaaaagatctgaagtctctggttcagttctatcaagagactacaggcctcgacccaattacatatattgatgttgatcagcaagagagcactggaagtttaggatcagccatgccaggaggccgctctctgcgcaaaatggcgaaagacgagccctttctgtttcttggagccctttttataatcatgaagatcgcggcacacttcgtccccactgtcatctcccaactgagagccttcttgattgtgcgtgttcagaacttgaacttaagaatctgtaggggatcaagccaacttatggaacgggcattgactgtgcttgatgttcagaggctctggagcaagcttagactgagcagtaagacaagggacctaagtaaaggggcgagtaatgctcgagcttgggcttcgtcgtttgcgtccgtctcactgggtgaaccatcctccttacggcatgcctagcctcttcctcatgatgctggtcgatagtctagctgctgatatatggcccaaaattgtttggtcttgcttccccatcctgctatgtacgtgcatccgcgcatgtggggacccaggaatgtaaattttcaggatctcatcttgttgtatataggaacgcgttttcgctttgctgacgcgatagctgatctctgacctttgtttcagttaactctttgatgtatggtgaagatctgagtatttcttcgatctctttcggttgctgttagaatttggctttgctatgtcgcccttgcctgcgccagcttaaatcctgggccgccgactcctgctctgaattgtaaaactgtcttgatttttattcacaccatgctgtttgg

SEQ ID NO: 10911 - protein, 300 aa, Triticum aestivum
  peptide (1)..(300): Ceres Seq. ID no. 13661016
  misc_feature (1)..(300): NCBI GI NO: 30103009 NR Description: unknown protein
  misc_feature (3)..(296): NCBI GI NO: 18396691 NR Description: expressed protein [Arabidopsis thaliana]
  misc_feature (39)..(296): NCBI GI NO: 21536613 NR Description: contains similarity to protein disulfide isomerase-related protein
  misc_feature (39)..(296): NCBI GI NO: 18418521 NR Description: expressed protein [Arabidopsis thaliana]
  misc_feature (164)..(296): NCBI GI NO: 9758894 NR Description: contains similarity to protein disulfide isomerase-related protein~gene_id:MRG7
  misc_feature (39)..(163): NCBI GI NO: 9758894 NR Description: contains similarity to protein disulfide isomerase-related protein~gene_id:MRG7
  misc_feature (11)..(297): NCBI GI NO: 29367467 NR Description: disulfide isomerase-like protein
  misc_feature (80)..(296): NCBI GI NO: 18399435 NR Description: expressed protein [Arabidopsis thaliana]
  misc_feature (3)..(199): NCBI GI NO: 6006856 NR Description: unknown protein [Arabidopsis thaliana]
  misc_feature (59)..(164): NCBI GI NO: 15236643 NR Description: protein disulfide isomerase -related
MRRAAVAVTAALLLLLVAGAAAGSPGAEPTCPRGAGPPFLDALGSRCPRGARIVPSPPLEVRGDAVDKELNLRCTGASCSILFYAAWCPFSSKFRPIFEALSTMFPQIHHFAVEESSATPSLFSRYGVRGFPAILLASETTMVRYRGTKDLKSLVQFYQETTGLDPITYIDVDQQESTGSLGSAMPGGRSLRKMAKDEPFLFLGALFIIMKIAAHFVPTVISQLRAFLIVRVQNLNLRICRGSSQLMERALTVLDVQRLWSKLRLSSKTRDLSKGASNARAWASSFASVSLGEPSSLRHA

SEQ ID NO: 10912 - protein, 197 aa, Triticum aestivum
  peptide (1)..(197): Ceres Seq. ID no. 13661017
  misc_feature (1)..(197): NCBI GI NO: 30103009 NR Description: unknown protein
  misc_feature (1)..(193): NCBI GI NO: 18396691 NR Description: expressed protein [Arabidopsis thaliana]
  misc_feature (1)..(193): NCBI GI NO: 21536613 NR Description: contains similarity to protein disulfide isomerase-related protein
  misc_feature (1)..(193): NCBI GI NO: 18418521 NR Description: expressed protein [Arabidopsis thaliana]
  misc_feature (61)..(193): NCBI GI NO: 9758894 NR Description: contains similarity to protein disulfide isomerase-related protein~gene_id:MRG7
  misc_feature (1)..(60): NCBI GI NO: 9758894 NR Description: contains similarity to protein disulfide isomerase-related protein~gene_id:MRG7
  misc_feature (1)..(194): NCBI GI NO: 29367467 NR Description: disulfide isomerase-like protein
  misc_feature (1)..(193): NCBI GI NO: 18399435 NR Description: expressed protein [Arabidopsis thaliana]
  misc_feature (1)..(96): NCBI GI NO: 6006856 NR Description: unknown protein [Arabidopsis thaliana]
  misc_feature (1)..(61): NCBI GI NO: 15236643 NR Description: protein disulfide isomerase -related
MFPQIHHFAVEESSATPSLFSRYGVRGFPAILLASETTMVRYRGTKDLKSLVQFYQETTGLDPITYIDVDQQESTGSLGSAMPGGRSLRKMAKDEPFLFLGALFIIMKIAAHFVPTVISQLRAFLIVRVQNLNLRICRGSSQLMERALTVLDVQRLWSKLRLSSKTRDLSKGASNARAWASSFASVSLGEPSSLRHA

SEQ ID NO: 10913 - protein, 159 aa, Triticum aestivum
  peptide (1)..(159): Ceres Seq. ID no. 13661018
  misc_feature (1)..(159): NCBI GI NO: 30103009 NR Description: unknown protein
  misc_feature (1)..(155): NCBI GI NO: 18396691 NR Description: expressed protein [Arabidopsis thaliana]
  misc_feature (1)..(155): NCBI GI NO: 21536613 NR Description: contains similarity to protein disulfide isomerase-related protein
  misc_feature (1)..(155): NCBI GI NO: 18418521 NR Description: expressed protein [Arabidopsis thaliana]
  misc_feature (23)..(155): NCBI GI NO: 9758894 NR Description: contains similarity to protein disulfide isomerase-related protein~gene_id:MRG7
  misc_feature (1)..(22): NCBI GI NO: 9758894 NR Description: contains similarity to protein disulfide isomerase-related protein~gene_id:MRG7
  misc_feature (1)..(156): NCBI GI NO: 29367467 NR Description: disulfide isomerase-like protein
  misc_feature (1)..(155): NCBI GI NO: 18399435 NR Description: expressed protein [Arabidopsis thaliana]
  misc_feature (1)..(58): NCBI GI NO: 6006856 NR Description: unknown protein [Arabidopsis thaliana]
  misc_feature (1)..(23): NCBI GI NO: 15236643 NR Description: protein disulfide isomerase -related
MVRYRGTKDLKSLVQFYQETTGLDPITYIDVDQQESTGSLGSAMPGGRSLRKMAKDEPFLFLGALFIIMKIAAHFVPTVISQLRAFLIVRVQNLNLRICRGSSQLMERALTVLDVQRLWSKLRLSSKTRDLSKGASNARAWASSFASVSLGEPSSLRHA

SEQ ID NO: 10914 - DNA, 1535 bp, Triticum aestivum
  misc_feature (1)..(1535): Ceres Seq. ID no. 12781104
tagtttctttataaaatactgctactccctctgatccatattagttgtcactcaaatggatgtatctagcactaaaatacatctagatacatccgtttcagctacaactaatatggatcggagggagtagtatatttttggtttacctgttttgctagaaatgttgcctcagatcgaatgaacttaaatatgagcaatatatgtgcacctatttctatcatatggtcttattaactttatctagtaaactagggcgtggtccttaagaagtcctttacttgttctattctaatttttgtttttccctgctaagcaggaagttctcttctgaacttcggatttagcttgtggatgggcggacctttggtagactgcagtgctgaaggtgtgagcagcagctcatgtctcagccgcagcacctgtggaaaagcaggttttgagcacagctcttgtgctctccctgaagatgaaaagtttgaagctggaatagcatgtgtgaaagatgatttggttgtcaaggaaatcagtttggctcttgctgaggtgatgcgtgtctataatgacaatgatgatgaagagacagatctgagtgaagactctgacgaaaatggggattcactttctgtagaatcagattcggctgatgatttggttgatattgacactgaagtggtcacatcgtcagccttcactgctgggaatgcgtctgaatcatcaactggaaattcagagaatggaaattcctcaaccactgggactcaactgttggtttccgcaatgaaaggaagccgtgcaaagcggggaattgtgacaaagttgagtgtttcatgggcccctgacgtatatgatcctcctgttacttctgactcacacacagtgaagccgcaccagagaagttcaaggaagagccactacaaatacaagcccccaaagggcggcagcggcagcagcagccgcagcagcagtggcagcataaaggaaaagaagcattctcaccacagcagcagcagcagcagcaagagagataagaaaccttcctaccgcagtagcaatggcggcagcagcagaaccgacactagtgatcctcaacatcggaaggcatatggcagcagcattaccagcagaactgacactagtgttcctgaatatcacaagttatcgccgtggcagccactggctagtgccgccgtggaagaagctatgccccccgtacctgtactgaaggccatggaacagatcaaacgcagttccagctgctgcaaggagccgccgataagcatgaaggccatggaacagatcaagcgtagctccagctgctgcaaggagccgccgataagcatgctatcacgccaattcgtggctgccaagtacaaagggatgttttccttcttgagtcagaaccaacttgcttcttgagcatatcgcggagactcctgcgctattcactgccgtgcttttggttatcagcaaggctttcatgttggatggtgtttgatctatgaacttttgtttggacatcagtgggcatggtttcg

SEQ ID NO: 10915 - protein, 354 aa, Triticum aestivum
  peptide (1)..(354): Ceres Seq. ID no. 12781105
  misc_feature (80)..(226): NCBI GI NO: 30687157 NR Description: expressed protein [Arabidopsis thaliana]
  misc_feature (131)..(226): NCBI GI NO: 15231857 NR Description: putative protein; protein id: At3g53670
  misc_feature (60)..(262): NCBI GI NO: 28828184 NR Description: similar to Leishmania major. Ppg3
MGGPLVDCSAEGVSSSSCLSRSTCGKAGFEHSSCALPEDEKFEAGIACVKDDLVVKEISLALAEVMRVYNDNDDEETDLSEDSDENGDSLSVESDSADDLVDIDTEVVTSSAFTAGNASESSTGNSENGNSSTTGTQLLVSAMKGSRAKRGIVTKLSVSWAPDVYDPPVTSDSHTVKPHQRSSRKSHYKYKPPKGGSGSSSRSSSGSIKEKKHSHHSSSSSSKRDKKPSYRSSNGGSSRTDTSDPQHRKAYGSSITSRTDTSVPEYHKLSPWQPLASAAVEEAMPPVPVLKAMEQIKRSSSCCKEPPISMKAMEQIKRSSSCCKEPPISMLSRQFVAAKYKGMFSFLSQNQLAS

SEQ ID NO: 10916 - protein, 289 aa, Triticum aestivum
  peptide (1)..(289): Ceres Seq. ID no. 12781106
  misc_feature (15)..(161): NCBI GI NO: 30687157 NR Description: expressed protein [Arabidopsis thaliana]
  misc_feature (66)..(161): NCBI GI NO: 15231857 NR Description: putative protein; protein id: At3g53670
  misc_feature (1)..(197): NCBI GI NO: 28828184 NR Description: similar to Leishmania major. Ppg3
MRVYNDNDDEETDLSEDSDENGDSLSVESDSADDLVDIDTEVVTSSAFTAGNASESSTGNSENGNSSTTGTQLLVSAMKGSRAKRGIVTKLSVSWAPDVYDPPVTSDSHTVKPHQRSSRKSHYKYKPPKGGSGSSSRSSSGSIKEKKHSHHSSSSSSKRDKKPSYRSSNGGSSRTDTSDPQHRKAYGSSITSRTDTSVPEYHKLSPWQPLASAAVEEAMPPVPVLKAMEQIKRSSSCCKEPPISMKAMEQIKRSSSCCKEPPISMLSRQFVAAKYKGMFSFLSQNQLAS

SEQ ID NO: 10917 - protein, 212 aa, Triticum aestivum
  peptide (1)..(212): Ceres Seq. ID no. 12781107
  misc_feature (1)..(84): NCBI GI NO: 30687157 NR Description: expressed protein [Arabidopsis thaliana]
  misc_feature (1)..(84): NCBI GI NO: 15231857 NR Description: putative protein; protein id: At3g53670
  misc_feature (1)..(120): NCBI GI NO: 28828184 NR Description: similar to Leishmania major. Ppg3
MKGSRAKRGIVTKLSVSWAPDVYDPPVTSDSHTVKPHQRSSRKSHYKYKPPKGGSGSSSRSSSGSIKEKKHSHHSSSSSSKRDKKPSYRSSNGGSSRTDTSDPQHRKAYGSSITSRTDTSVPEYHKLSPWQPLASAAVEEAMPPVPVLKAMEQIKRSSSCCKEPPISMKAMEQIKRSSSCCKEPPISMLSRQFVAAKYKGMFSFLSQNQLAS

SEQ ID NO: 10918 - DNA, 382 bp, Triticum aestivum
  misc_feature (1)..(382): Ceres Seq. ID no. 13662823
tcttcgtttcgtgctttcctctccttcttcctagcgcgcgcagacttgtccgccacttcacggaaattcccccaggaatacttctacatatatatacgccgcccgcctccattccggtgttcctagtttccactcatccgccgccgcacccgaatccccgccccacgaagcttcgtcgcgcaaggtgatgcttttagcaacaacaggcatcaaacaatgtcgatgagttacgatgggtctcaaagtgaggatcggcaaagtgaggaggttcagtcagcatacaaaaagttcagtgcaggggatgaggacgtggtaaggggttttgtaaatttggatgaaaccgaagagcaaaatgaagaaaatgagtggagttgggtgcccc

SEQ ID NO: 10919 - protein, 61 aa, Triticum aestivum
  peptide (1)..(61): Ceres Seq. ID no. 13662824
FVSCFPLLLPSARRLVRHFTEIPPGILLHIYTPPASIPVFLVSTHPPPHPNPRPTKLRRAR

SEQ ID NO: 10920 - protein, 55 aa, Triticum aestivum
  peptide (1)..(55): Ceres Seq. ID no. 13662825
  misc_feature (1)..(54): NCBI GI NO: 38344752 NR Description: OSJNBa0089K21.10
MSMSYDGSQSEDRQSEEVQSAYKKFSAGDEDVVRGFVNLDETEEQNEENEWSWVP

SEQ ID NO: 10921 - protein, 53 aa, Triticum aestivum
  peptide (1)..(53): Ceres Seq. ID no. 13662826
  misc_feature (1)..(52): NCBI GI NO: 38344752 NR Description: OSJNBa0089K21.10
MSYDGSQSEDRQSEEVQSAYKKFSAGDEDVVRGFVNLDETEEQNEENEWSWVP

SEQ ID NO: 10922 - DNA, 983 bp, Triticum aestivum
  misc_feature (1)..(983): Ceres Seq. ID no. 12623128
aatgcctcacaaaatagaaattcaaattccagcaacatagacagcatcaacattagagggcgggtgcagcagcaggagttgagggttctcttctccgaaggcgccgaagttcttcagcttggcaagtaagtgataatcaatggcttataagcttccactggcaggagttaggacttccaatttcgagcgtagagagcttccatcaaacagctacctggatctgggagggccttatggaaaatttgtgcctttcgtaatcgcgggagaagggggctttggggagcataagcagctcaactggacaaacttgtttttactaaacaagcttggcagtgacatacacagcgatcatgtagaggtgatcaatcagatcaaagtagagagagatgttgaaaaggtaaaagagttgataaggctactgcctcgtgaaatttctgagcaattggaaggccacgagacccatgagcaggttgaaatcctgagatatctgagcaggaacatggatcagaggatgtcctatctcagcacagagatccggcgtctaaggagtgacctgggagaggtgatgaaggtatcggagagatacgcggagcattggataggatggagcgacaaaatccttgctaccgtccatgaacaaacgcaacaaaccctggagttagtgctcctagctgctacgtatttgcatttcatacttttctatattgtactgtaatgaataaaattatgcgctgctagcagcgtataatgttgtacgagtcttggtcggccgagttattgtagcaacaggtgcatgtctgtccgcagtttgttgatcttgtcaagtgtttgtaatgaataaaattatgtgcttcttgctacacgtcatgttgtccgagtcctcgtcgatcgagatattgtaggaaactggtacgtgtctgtctgaaattacctgtaacgtgtcatttatgtaaagtgtttgcattgaagagttatggatattt

SEQ ID NO: 10923 - protein, 191 aa, Triticum aestivum
  peptide (1)..(191): Ceres Seq. ID no. 12623129
  misc_feature (1)..(144): NCBI GI NO: 7460221 NR Description: abscisic acid-induced protein ABA7 - barley
  misc_feature (17)..(150): NCBI GI NO: 9627995 NR Description: coat protein/movement protein
  misc_feature (18)..(150): NCBI GI NO: 665932 NR Description: ORF I
MAYKLPLAGVRTSNFERRELPSNSYLDLGGPYGKFVPFVIAGEGGFGEHKQLNWTNLFLLNKLGSDIHSDHVEVINQIKVERDVEKVKELIRLLPREISEQLEGHETHEQVEILRYLSRNMDQRMSYLSTEIRRLRSDLGEVMKVSERYAEHWIGWSDKILATVHEQTQQTLELVLLAATYLHFILFYIVL

SEQ ID NO: 10924 - DNA, 815 bp, Triticum aestivum
  misc_feature (1)..(815): Ceres Seq. ID no. 13663373
aatcgaaaaaaaattcgaaccccccaaaccgctcgcgaaatccccaaatcaacgcctcctcacggcaatcaatcaagcaatcatccattcacgacgcgagcggggatcctcctccactccgatggcgtcggaggccaggtccgggggcgcgcggcgggtcccgctgcagccgcgggacggcaacgcggccgcctccccgtccttgggcggcggcggtgccgccaaatcgaaggcgaaggcgaaggcgcgggcggctgctgcgtcgccgccgtcggtgaggtcgtatgcgagccgggacgaggccgagaggagggcggcagcggcggtggtgagggagaaggaggtgtcgctggcggaggagctggagaaggcgcgggagcggcggggccgcctgcgggccgcgcggcaggtcacggagagggcgctggcggaggccgacgaggcgctgcggcgggagatgcgggagtgggagcgccgcgcggacgagcagcgccgggtcgtcgcggagctgatgcgcctcatcgggatgcccgaggtgtacgttccggtggaatcgctgagatccagggaggagaggaagaggaaacaggggacttcgtcttcagatcctccgggtccggtcacagtggcttcaacattactagaggaagaatctggaccatgcctctccgatcaggaactgctggcgacgccggcaagggaaacgaccgccgccgcagcagcgacggaaagcagcagcgcttgatccctttctttgcctgttccaaactgtttctgcacaaggcctcccaatgaaatcaaatggcttgtttggc

SEQ ID NO: 10925 - protein, 264 aa, Triticum aestivum
  peptide (1)..(264): Ceres Seq. ID no. 13663374
  misc_feature (101)..(198): Pfam Name: Pfam Description:  Dehydrin
  misc_feature (42)..(241): NCBI GI NO: 13561976 NR Description: major ampullate spidroin 1 [Argiope aurantia]
  misc_feature (42)..(234): NCBI GI NO: 13561976 NR Description: major ampullate spidroin 1 [Argiope aurantia]
  misc_feature (40)..(232): NCBI GI NO: 31792021 NR Description: PE-PGRS FAMILY PROTEIN
  misc_feature (78)..(247): NCBI GI NO: 17221671 NR Description: circumsporozoite protein
  misc_feature (39)..(210): NCBI GI NO: 121632 NR Description: GLYCINE-RICH CELL WALL STRUCTURAL PROTEIN 1
  misc_feature (42)..(234): NCBI GI NO: 2914731 NR Description: dragline silk protein spidroin 1
  misc_feature (42)..(234): NCBI GI NO: 2605798 NR Description: minor ampullate silk protein MiSp1
  misc_feature (42)..(246): NCBI GI NO: 9625624 NR Description: nuclear antigen EBNA1 [Human herpesvirus 4]
  misc_feature (42)..(234): NCBI GI NO: 2911274 NR Description: spidroin 1 [Nephila clavipes]
  misc_feature (42)..(234): NCBI GI NO: 17063211 NR Description: dragline silk protein [Nephila clavipes]
NRKKIRTPQTAREIPKSTPPHGNQSSNHPFTTRAGILLHSDGVGGQVRGRAAGPAAAAGRQRGRLPVLGRRRCRQIEGEGEGAGGCCVAAVGEVVCEPGRGREEGGSGGGEGEGGVAGGGAGEGAGAAGPPAGRAAGHGEGAGGGRRGAAAGDAGVGAPRGRAAPGRRGADAPHRDARGVRSGGIAEIQGGEEEETGDFVFRSSGSGHSGFNITRGRIWTMPLRSGTAGDAGKGNDRRRSSDGKQQRLIPFFACSKLFLHKASQ

SEQ ID NO: 10926 - protein, 247 aa, Triticum aestivum
  peptide (1)..(247): Ceres Seq. ID no. 13663375
  misc_feature (71)..(169): Pfam Name: Pfam Description:  Caldesmon
IEKKFEPPKPLAKSPNQRLLTAINQAIIHSRRERGSSSTPMASEARSGGARRVPLQPRDGNAAASPSLGGGGAAKSKAKAKARAAAASPPSVRSYASRDEAERRAAAAVVREKEVSLAEELEKARERRGRLRAARQVTERALAEADEALRREMREWERRADEQRRVVAELMRLIGMPEVYVPVESLRSREERKRKQGTSSSDPPGPVTVASTLLEEESGPCLSDQELLATPARETTAAAAATESSSA

SEQ ID NO: 10927 - protein, 207 aa, Triticum aestivum
  peptide (1)..(207): Ceres Seq. ID no. 13663376
  misc_feature (31)..(129): Pfam Name: Pfam Description:  Caldesmon
MASEARSGGARRVPLQPRDGNAAASPSLGGGGAAKSKAKAKARAAAASPPSVRSYASRDEAERRAAAAVVREKEVSLAEELEKARERRGRLRAARQVTERALAEADEALRREMREWERRADEQRRVVAELMRLIGMPEVYVPVESLRSREERKRKQGTSSSDPPGPVTVASTLLEEESGPCLSDQELLATPARETTAAAAATESSSA

SEQ ID NO: 10928 - DNA, 1259 bp, Triticum aestivum
  misc_feature (1)..(1259): Ceres Seq. ID no. 15169515
aaaaaaaagcagaagccatccccgttccccattccctcgccgccgccggccgccgccaaatctccccggcctttccgccgcggcgccatgctcctccggctccggtgctacatcctcacccagctcctatcgtctccctccgcctctcccgcctcccagctgcaccgcctcttctccgccgcagcgcccggcgcctccccgaaccctagcttcgccgtggaggagtacctcgtcgccacctgcggcctcacccgaccccaggccctcaaggcctccgccaagctctcccacctcaggtcccccgccaatcccgaagccgtgctcgccttcctcgccggcctcggtctctccgacgccgatgtcgccgccctcgtcgccagggacccgcagttcctctgcgccagcgtggagagaaccctgacgcccgtagccgcagggctctctggtctcggcttatcgcgttccgacatcgcgcgcctcgcatcgctcgccgcccacaaattccgccaaaaatctgtcctctccaagctgcagtactacctgcgcctcttcggcacctcccacaacttcctccgggtgatgaagttctccaatatcctctcacacagcatcgagagggtggtcaagcccaatgtcgcgtacctgcgagagtgtgggttgcaggattgtgatatcgccaagttttgcatccaaagaccgaggatgatcatcagcaacccggagcatgttcaggcaatggtggcgtgcgctgaaaacattggtgtgccccgtgcctctgggatgttcaggcacgcacttcaggctgttgcattcctcggtgaggaggagatcacagtcagggtggggtacttgaagagcacgttcaggtggacggatgctgaggtaggcatggctgtttctaagtttccaccgttgctgagggggtccgagaaatcgctgcagcgcagatttgagttcctcatctccgaggtgggtttggaatcggcgtacattgctcagcgacccgtaatgctaggtctcagcctagagggccggctcaggccccggcactacgctgtaaagtttatcaaggaaaatggattgctcaagtgtgacccaagctactatactgttttcaaggagtccgacatgacattcaagaagaagttcatacaccctcataaggaagctgcaccgcaccttgaaaaagactacgatgctgcttgtaaaggggaagtgcccactaatttcagattcacataagccaataacgggctctg

SEQ ID NO: 10929 - protein, 413 aa, Triticum aestivum
  peptide (1)..(413): Ceres Seq. ID no. 15169516
  misc_feature (108)..(379): Pfam Name: Pfam Description:  mTERF
  misc_feature (47)..(384): NCBI GI NO: 39545750 NR Description: OSJNBb0034I13.16
  misc_feature (39)..(407): NCBI GI NO: 34394750 NR Description: unknown protein
  misc_feature (70)..(398): NCBI GI NO: 18415647 NR Description: expressed protein [Arabidopsis thaliana]
  misc_feature (70)..(398): NCBI GI NO: 15218140 NR Description: hypothetical protein [Arabidopsis thaliana]
  misc_feature (51)..(402): NCBI GI NO: 15238313 NR Description: expressed protein [Arabidopsis thaliana]
  misc_feature (51)..(402): NCBI GI NO: 21553423 NR Description: unknown [Arabidopsis thaliana]
  misc_feature (70)..(398): NCBI GI NO: 25511650 NR Description: T22I11.2 protein - Arabidopsis thaliana
  misc_feature (59)..(326): NCBI GI NO: 15232683 NR Description: expressed protein [Arabidopsis thaliana]
  misc_feature (297)..(394): NCBI GI NO: 15232683 NR Description: expressed protein [Arabidopsis thaliana]
  misc_feature (108)..(399): NCBI GI NO: 18412304 NR Description: expressed protein [Arabidopsis thaliana]
KKKQKPSPFPIPSPPPAAAKSPRPFRRGAMLLRLRCYILTQLLSSPSASPASQLHRLFSAAAPGASPNPSFAVEEYLVATCGLTRPQALKASAKLSHLRSPANPEAVLAFLAGLGLSDADVAALVARDPQFLCASVERTLTPVAAGLSGLGLSRSDIARLASLAAHKFRQKSVLSKLQYYLRLFGTSHNFLRVMKFSNILSHSIERVVKPNVAYLRECGLQDCDIAKFCIQRPRMIISNPEHVQAMVACAENIGVPRASGMFRHALQAVAFLGEEEITVRVGYLKSTFRWTDAEVGMAVSKFPPLLRGSEKSLQRRFEFLISEVGLESAYIAQRPVMLGLSLEGRLRPRHYAVKFIKENGLLKCDPSYYTVFKESDMTFKKKFIHPHKEAAPHLEKDYDAACKGEVPTNFRFT

SEQ ID NO: 10930 - protein, 384 aa, Triticum aestivum
  peptide (1)..(384): Ceres Seq. ID no. 15169517
  misc_feature (79)..(350): Pfam Name: Pfam Description:  mTERF
  misc_feature (18)..(355): NCBI GI NO: 39545750 NR Description: OSJNBb0034I13.16
  misc_feature (10)..(378): NCBI GI NO: 34394750 NR Description: unknown protein
  misc_feature (41)..(369): NCBI GI NO: 18415647 NR Description: expressed protein [Arabidopsis thaliana]
  misc_feature (41)..(369): NCBI GI NO: 15218140 NR Description: hypothetical protein [Arabidopsis thaliana]
  misc_feature (22)..(373): NCBI GI NO: 15238313 NR Description: expressed protein [Arabidopsis thaliana]
  misc_feature (22)..(373): NCBI GI NO: 21553423 NR Description: unknown [Arabidopsis thaliana]
  misc_feature (41)..(369): NCBI GI NO: 25511650 NR Description: T22I11.2 protein - Arabidopsis thaliana
  misc_feature (30)..(297): NCBI GI NO: 15232683 NR Description: expressed protein [Arabidopsis thaliana]
  misc_feature (268)..(365): NCBI GI NO: 15232683 NR Description: expressed protein [Arabidopsis thaliana]
  misc_feature (79)..(370): NCBI GI NO: 18412304 NR Description: expressed protein [Arabidopsis thaliana]
MLLRLRCYILTQLLSSPSASPASQLHRLFSAAAPGASPNPSFAVEEYLVATCGLTRPQALKASAKLSHLRSPANPEAVLAFLAGLGLSDADVAALVARDPQFLCASVERTLTPVAAGLSGLGLSRSDIARLASLAAHKFRQKSVLSKLQYYLRLFGTSHNFLRVMKFSNILSHSIERVVKPNVAYLRECGLQDCDIAKFCIQRPRMIISNPEHVQAMVACAENIGVPRASGMFRHALQAVAFLGEEEITVRVGYLKSTFRWTDAEVGMAVSKFPPLLRGSEKSLQRRFEFLISEVGLESAYIAQRPVMLGLSLEGRLRPRHYAVKFIKENGLLKCDPSYYTVFKESDMTFKKKFIHPHKEAAPHLEKDYDAACKGEVPTNFRFT

SEQ ID NO: 10931 - protein, 220 aa, Triticum aestivum
  peptide (1)..(220): Ceres Seq. ID no. 15169518
  misc_feature (1)..(186): Pfam Name: Pfam Description:  mTERF
  misc_feature (1)..(191): NCBI GI NO: 39545750 NR Description: OSJNBb0034I13.16
  misc_feature (1)..(214): NCBI GI NO: 34394750 NR Description: unknown protein
  misc_feature (1)..(205): NCBI GI NO: 18415647 NR Description: expressed protein [Arabidopsis thaliana]
  misc_feature (1)..(205): NCBI GI NO: 15218140 NR Description: hypothetical protein [Arabidopsis thaliana]
  misc_feature (1)..(209): NCBI GI NO: 15238313 NR Description: expressed protein [Arabidopsis thaliana]
  misc_feature (1)..(209): NCBI GI NO: 21553423 NR Description: unknown [Arabidopsis thaliana]
  misc_feature (1)..(205): NCBI GI NO: 25511650 NR Description: T22I11.2 protein - Arabidopsis thaliana
  misc_feature (1)..(133): NCBI GI NO: 15232683 NR Description: expressed protein [Arabidopsis thaliana]
  misc_feature (104)..(201): NCBI GI NO: 15232683 NR Description: expressed protein [Arabidopsis thaliana]
  misc_feature (1)..(206): NCBI GI NO: 18412304 NR Description: expressed protein [Arabidopsis thaliana]
MKFSNILSHSIERVVKPNVAYLRECGLQDCDIAKFCIQRPRMIISNPEHVQAMVACAENIGVPRASGMFRHALQAVAFLGEEEITVRVGYLKSTFRWTDAEVGMAVSKFPPLLRGSEKSLQRRFEFLISEVGLESAYIAQRPVMLGLSLEGRLRPRHYAVKFIKENGLLKCDPSYYTVFKESDMTFKKKFIHPHKEAAPHLEKDYDAACKGEVPTNFRFT

SEQ ID NO: 10932 - DNA, 740 bp, Triticum aestivum
  misc_feature (1)..(740): Ceres Seq. ID no. 13664150
agagatgcagtattgcagttgagtgattgacctttctccgaggagcagtgaggactggttcgttctacttggcaacttgcgtcttggatcatctgcccagttgtgtacagcctttgctttaaactctactctcagcgaagatcagtttgcgcgtctgcatggcgcgaatggcggtctccgtgctcttcctcatcgccggcgtcgtgctcatgctcgcgctgcacgtcctcgtcatcgtctgggcggtccggcggggcgccgtgctgcggctgcggggtgcggcgcgggagcgggaccaggagcagggggaagcgacgggtctgacggccgacgagctgggcgagctgccgttccaggacttcaaggccgccgccgcggtcgggacgggcgccgccgagtgcgcggtgtgcctggaggcgttccaggggggcgaccggtgccgcgtgctgccggggtgccaccatgggttccacgcgcagtgcgtggactcgtggctgcgccagagccgccggtgcccggtgtgccgcgccgaggtggcctgccgcggcaaggcggccggcgcggcggttgtcgatgaggccgccacatcggagatcgtcgctgaaagactgggaggtgcagatcgctagcggattttgtttgaccgagactcgtgtgccgtcgttgattagcttgtgattttttttagtacgattagcttgtgattgtacataaagtaatccatctagcatttggagtcg

SEQ ID NO: 10933 - protein, 156 aa, Triticum aestivum
  peptide (1)..(156): Ceres Seq. ID no. 13664151
  misc_feature (81)..(122): Pfam Name: RING finger Pfam Description: Zinc finger, C3HC4 type
  misc_feature (1)..(143): NCBI GI NO: 34903920 NR Description: OSJNBa0038J17.5
  misc_feature (29)..(156): NCBI GI NO: 40539017 NR Description: putative RING-H2 zinc finger protein
  misc_feature (1)..(127): NCBI GI NO: 15238323 NR Description: zinc finger
  misc_feature (1)..(127): NCBI GI NO: 21593762 NR Description: unknown [Arabidopsis thaliana]
  misc_feature (1)..(145): NCBI GI NO: 8698835 NR Description: RING finger 1
  misc_feature (31)..(154): NCBI GI NO: 34894514 NR Description: P0551A11.21
  misc_feature (54)..(154): NCBI GI NO: 37537088 NR Description: putative zinc finger protein
  misc_feature (1)..(126): NCBI GI NO: 34909640 NR Description: P0503C12.20
  misc_feature (9)..(126): NCBI GI NO: 15224210 NR Description: zinc finger
  misc_feature (9)..(126): NCBI GI NO: 21617980 NR Description: putative RING zinc finger protein
MARMAVSVLFLIAGVVLMLALHVLVIVWAVRRGAVLRLRGAARERDQEQGEATGLTADELGELPFQDFKAAAAVGTGAAECAVCLEAFQGGDRCRVLPGCHHGFHAQCVDSWLRQSRRCPVCRAEVACRGKAAGAAVVDEAATSEIVAERLGGADR

SEQ ID NO: 10934 - protein, 153 aa, Triticum aestivum
  peptide (1)..(153): Ceres Seq. ID no. 13664152
  misc_feature (78)..(119): Pfam Name: RING finger Pfam Description: Zinc finger, C3HC4 type
  misc_feature (1)..(140): NCBI GI NO: 34903920 NR Description: OSJNBa0038J17.5
  misc_feature (26)..(153): NCBI GI NO: 40539017 NR Description: putative RING-H2 zinc finger protein
  misc_feature (1)..(124): NCBI GI NO: 15238323 NR Description: zinc finger
  misc_feature (1)..(124): NCBI GI NO: 21593762 NR Description: unknown [Arabidopsis thaliana]
  misc_feature (1)..(142): NCBI GI NO: 8698835 NR Description: RING finger 1
  misc_feature (28)..(151): NCBI GI NO: 34894514 NR Description: P0551A11.21
  misc_feature (51)..(151): NCBI GI NO: 37537088 NR Description: putative zinc finger protein
  misc_feature (1)..(123): NCBI GI NO: 34909640 NR Description: P0503C12.20
  misc_feature (6)..(123): NCBI GI NO: 15224210 NR Description: zinc finger
  misc_feature (6)..(123): NCBI GI NO: 21617980 NR Description: putative RING zinc finger protein
MAVSVLFLIAGVVLMLALHVLVIVWAVRRGAVLRLRGAARERDQEQGEATGLTADELGELPFQDFKAAAAVGTGAAECAVCLEAFQGGDRCRVLPGCHHGFHAQCVDSWLRQSRRCPVCRAEVACRGKAAGAAVVDEAATSEIVAERLGGADR

SEQ ID NO: 10935 - protein, 139 aa, Triticum aestivum
  peptide (1)..(139): Ceres Seq. ID no. 13664153
  misc_feature (64)..(105): Pfam Name: RING finger Pfam Description: Zinc finger, C3HC4 type
  misc_feature (1)..(126): NCBI GI NO: 34903920 NR Description: OSJNBa0038J17.5
  misc_feature (12)..(139): NCBI GI NO: 40539017 NR Description: putative RING-H2 zinc finger protein
  misc_feature (1)..(110): NCBI GI NO: 15238323 NR Description: zinc finger
  misc_feature (1)..(110): NCBI GI NO: 21593762 NR Description: unknown [Arabidopsis thaliana]
  misc_feature (1)..(128): NCBI GI NO: 8698835 NR Description: RING finger 1
  misc_feature (14)..(137): NCBI GI NO: 34894514 NR Description: P0551A11.21
  misc_feature (37)..(137): NCBI GI NO: 37537088 NR Description: putative zinc finger protein
  misc_feature (1)..(109): NCBI GI NO: 34909640 NR Description: P0503C12.20
  misc_feature (1)..(109): NCBI GI NO: 15224210 NR Description: zinc finger
  misc_feature (1)..(109): NCBI GI NO: 21617980 NR Description: putative RING zinc finger protein
MLALHVLVIVWAVRRGAVLRLRGAARERDQEQGEATGLTADELGELPFQDFKAAAAVGTGAAECAVCLEAFQGGDRCRVLPGCHHGFHAQCVDSWLRQSRRCPVCRAEVACRGKAAGAAVVDEAATSEIVAERLGGADR

SEQ ID NO: 10936 - DNA, 914 bp, Triticum aestivum
  misc_feature (1)..(914): Ceres Seq. ID no. 13661065
cctcaattattgctaagcgtctccccatccgcccctcatctcctccccatccgcccccatctcccttcctccacccctccacggcggctctccattggtaatggcgatggcggcgtcgtggtgggcgctgctggcggcggcggcggttgtggcggcggcggggtgcggcgaggcggcgcccacggcggcggcggaggcggcgcacgacgtgctgcagacccacggcctcccgcgcgggctgctccctgcggggatcgcggcgttctcgcacgacccggccaccggccggttcgaggcggtcctggagtccccctgcacgtcgcgcaccgaggtcggcctgcggtacaacatcaccgtggcggggcagatcagctatggccggatcgccgagctctccggggtggacgctcaggacctatttctctggttcgccgtgcgcagcatccgcgtggacgtgccctcctccggcgtcatctacttcgatgtgggcgtggtctacaagcacttcccgctgtcgttcttcgaggcgccgccgccgtgcgtgcccaccccgctcatcctcctgcaaccacatcagattaggggcgacggatcggtggtggaagacggcgccgcgttgcaacaatgatgggacggattccatgatttcatcgtggagacgcaaaccagaaatcgcagttttgagaggtgatcggccggccggcgggcggacggccggctagtgtgcagatagatagacgtggtcattcattgtgtttgctactcgtcacctcatcactctgttcctgtcgtcgttcttgtcctctgcggccaaagtcaatcggcggccggcgggagctgcctgcgtgtactcctccggcgtccggccgactgtcatatttttcacggtaatggatgatgtgtagtgtatatgc

SEQ ID NO: 10937 - protein, 193 aa, Triticum aestivum
  peptide (1)..(193): Ceres Seq. ID no. 13661066
  misc_feature (16)..(106): Pfam Name: Pfam Description:  Protein of unknown function, DUF584
PQLLLSVSPSAPHLLPIRPHLPSSTPPRRLSIGNGDGGVVVGAAGGGGGCGGGGVRRGGAHGGGGGGARRAADPRPPARAAPCGDRGVLARPGHRPVRGGPGVPLHVAHRGRPAVQHHRGGADQLWPDRRALRGGRSGPISLVRRAQHPRGRALLRRHLLRCGRGLQALPAVVLRGAAAVRAHPAHPPATTSD

SEQ ID NO: 10938 - protein, 175 aa, Triticum aestivum
  peptide (1)..(175): Ceres Seq. ID no. 13661067
  misc_feature (16)..(152): Pfam Name: Pfam Description:  Protein of unknown function, DUF538
  misc_feature (16)..(174): NCBI GI NO: 34906900 NR Description: P0470A12.30
  misc_feature (11)..(149): NCBI GI NO: 6041854 NR Description: unknown protein [Arabidopsis thaliana]
  misc_feature (11)..(149): NCBI GI NO: 18397959 NR Description: expressed protein [Arabidopsis thaliana]
  misc_feature (17)..(148): NCBI GI NO: 6041844 NR Description: unknown protein [Arabidopsis thaliana]
  misc_feature (17)..(148): NCBI GI NO: 22330911 NR Description: expressed protein [Arabidopsis thaliana]
  misc_feature (17)..(148): NCBI GI NO: 21592465 NR Description: unknown [Arabidopsis thaliana]
  misc_feature (1)..(150): NCBI GI NO: 34898576 NR Description: P0534A03.14
  misc_feature (35)..(147): NCBI GI NO: 9759120 NR Description: gb|AAF02163
  misc_feature (35)..(147): NCBI GI NO: 18417957 NR Description: expressed protein [Arabidopsis thaliana]
  misc_feature (35)..(147): NCBI GI NO: 21536941 NR Description: unknown [Arabidopsis thaliana]
MAMAASWWALLAAAAVVAAAGCGEAAPTAAAEAAHDVLQTHGLPRGLLPAGIAAFSHDPATGRFEAVLESPCTSRTEVGLRYNITVAGQISYGRIAELSGVDAQDLFLWFAVRSIRVDVPSSGVIYFDVGVVYKHFPLSFFEAPPPCVPTPLILLQPHQIRGDGSVVEDGAALQQ

SEQ ID NO: 10939 - protein, 173 aa, Triticum aestivum
  peptide (1)..(173): Ceres Seq. ID no. 13661068
  misc_feature (14)..(150): Pfam Name: Pfam Description:  Protein of unknown function, DUF538
  misc_feature (14)..(172): NCBI GI NO: 34906900 NR Description: P0470A12.30
  misc_feature (9)..(147): NCBI GI NO: 6041854 NR Description: unknown protein [Arabidopsis thaliana]
  misc_feature (9)..(147): NCBI GI NO: 18397959 NR Description: expressed protein [Arabidopsis thaliana]
  misc_feature (15)..(146): NCBI GI NO: 6041844 NR Description: unknown protein [Arabidopsis thaliana]
  misc_feature (15)..(146): NCBI GI NO: 22330911 NR Description: expressed protein [Arabidopsis thaliana]
  misc_feature (15)..(146): NCBI GI NO: 21592465 NR Description: unknown [Arabidopsis thaliana]
  misc_feature (1)..(148): NCBI GI NO: 34898576 NR Description: P0534A03.14
  misc_feature (33)..(145): NCBI GI NO: 9759120 NR Description: gb|AAF02163
  misc_feature (33)..(145): NCBI GI NO: 21536941 NR Description: unknown [Arabidopsis thaliana]
  misc_feature (33)..(145): NCBI GI NO: 18417957 NR Description: expressed protein [Arabidopsis thaliana]
MAASWWALLAAAAVVAAAGCGEAAPTAAAEAAHDVLQTHGLPRGLLPAGIAAFSHDPATGRFEAVLESPCTSRTEVGLRYNITVAGQISYGRIAELSGVDAQDLFLWFAVRSIRVDVPSSGVIYFDVGVVYKHFPLSFFEAPPPCVPTPLILLQPHQIRGDGSVVEDGAALQQ

SEQ ID NO: 10940 - DNA, 683 bp, Triticum aestivum
  misc_feature (1)..(683): Ceres Seq. ID no. 12623467
ctttgatggatgtttcttgaaaagaagagcagccaagtaaaatttggaaatgtttttgtccttcttcttcaaaattccaggttgtgaaagcaattgagaaggcaatacccataccgcgaggaccatctattgctgagaatcaccctgcaagggaggagctgaaggccatggagtcccagaaggtagacatcgaccgcatggcgacgctccaggtgcggcgggagctgtggggagggctggctgccctagccctccaaacggccggcttcatgaggctcacattctgggagctctcctgggacgtcatggagcccatctgcttcttcgtgacgtcgacatacttcatggcgggctacgccttcttcctccggaccaagagggagccctcgttcgagggcttcttccagagccgttttgcggtgaagcagaagcgccttatgcaggcccgggaatttgatgtccgccggtacagtgagctccggcaagcctgtggcctcccggcgctacatcctcagagcccctgtgcgtcctcgcaggagaaccaccattgccattgtcattgatgtgttgcttggaattttttatgcccatttgatgcggctgctgctgctgcttcatgtaccgttgtggaatgtggatgcgaagcatactcattgacgtgatcagattcagattttaaactc

SEQ ID NO: 10941 - protein, 131 aa, Triticum aestivum
  peptide (1)..(131): Ceres Seq. ID no. 12623468
  misc_feature (1)..(111): Pfam Name: Pfam Description:  Protein of unknown function, DUF607
  misc_feature (1)..(131): NCBI GI NO: 37535778 NR Description: unknown protein
  misc_feature (1)..(114): NCBI GI NO: 15224063 NR Description: hypothetical protein; protein id: At2g23790.1
  misc_feature (1)..(114): NCBI GI NO: 24496456 NR Description: hypothetical protein [Arabidopsis thaliana]
  misc_feature (1)..(106): NCBI GI NO: 15234535 NR Description: putative protein; protein id: At4g36820.1
  misc_feature (1)..(109): NCBI GI NO: 20330769 NR Description: Hypothetical protein
  misc_feature (1)..(119): NCBI GI NO: 14596231 NR Description: Unknown protein [Arabidopsis thaliana]
  misc_feature (1)..(119): NCBI GI NO: 15240047 NR Description: putative protein; protein id: At5g66650
  misc_feature (1)..(104): NCBI GI NO: 15239011 NR Description: unknown protein; protein id: At5g42610.1
  misc_feature (1)..(123): NCBI GI NO: 34909244 NR Description: B1148D12.10
  misc_feature (1)..(104): NCBI GI NO: 22330290 NR Description: hypothetical protein; protein id: At1g57610
MESQKVDIDRMATLQVRRELWGGLAALALQTAGFMRLTFWELSWDVMEPICFFVTSTYFMAGYAFFLRTKREPSFEGFFQSRFAVKQKRLMQAREFDVRRYSELRQACGLPALHPQSPCASSQENHHCHCH

SEQ ID NO: 10942 - protein, 121 aa, Triticum aestivum
  peptide (1)..(121): Ceres Seq. ID no. 12623469
  misc_feature (1)..(101): Pfam Name: Pfam Description:  Protein of unknown function, DUF607
  misc_feature (1)..(121): NCBI GI NO: 37535778 NR Description: unknown protein
  misc_feature (1)..(104): NCBI GI NO: 15224063 NR Description: hypothetical protein; protein id: At2g23790.1
  misc_feature (1)..(104): NCBI GI NO: 24496456 NR Description: hypothetical protein [Arabidopsis thaliana]
  misc_feature (1)..(96): NCBI GI NO: 15234535 NR Description: putative protein; protein id: At4g36820.1
  misc_feature (1)..(99): NCBI GI NO: 20330769 NR Description: Hypothetical protein
  misc_feature (1)..(109): NCBI GI NO: 14596231 NR Description: Unknown protein [Arabidopsis thaliana]
  misc_feature (1)..(109): NCBI GI NO: 15240047 NR Description: putative protein; protein id: At5g66650
  misc_feature (1)..(94): NCBI GI NO: 15239011 NR Description: unknown protein; protein id: At5g42610.1
  misc_feature (1)..(113): NCBI GI NO: 34909244 NR Description: B1148D12.10
  misc_feature (1)..(94): NCBI GI NO: 22330290 NR Description: hypothetical protein; protein id: At1g57610
MATLQVRRELWGGLAALALQTAGFMRLTFWELSWDVMEPICFFVTSTYFMAGYAFFLRTKREPSFEGFFQSRFAVKQKRLMQAREFDVRRYSELRQACGLPALHPQSPCASSQENHHCHCH

SEQ ID NO: 10943 - protein, 97 aa, Triticum aestivum
  peptide (1)..(97): Ceres Seq. ID no. 12623470
  misc_feature (1)..(77): Pfam Name: Pfam Description:  Protein of unknown function, DUF607
  misc_feature (1)..(97): NCBI GI NO: 37535778 NR Description: unknown protein
  misc_feature (1)..(80): NCBI GI NO: 15224063 NR Description: hypothetical protein; protein id: At2g23790.1
  misc_feature (1)..(80): NCBI GI NO: 24496456 NR Description: hypothetical protein [Arabidopsis thaliana]
  misc_feature (1)..(72): NCBI GI NO: 15234535 NR Description: putative protein; protein id: At4g36820.1
  misc_feature (1)..(75): NCBI GI NO: 20330769 NR Description: Hypothetical protein
  misc_feature (1)..(85): NCBI GI NO: 14596231 NR Description: Unknown protein [Arabidopsis thaliana]
  misc_feature (1)..(85): NCBI GI NO: 15240047 NR Description: putative protein; protein id: At5g66650
  misc_feature (1)..(70): NCBI GI NO: 15239011 NR Description: unknown protein; protein id: At5g42610.1
  misc_feature (1)..(89): NCBI GI NO: 34909244 NR Description: B1148D12.10
  misc_feature (1)..(70): NCBI GI NO: 22330290 NR Description: hypothetical protein; protein id: At1g57610
MRLTFWELSWDVMEPICFFVTSTYFMAGYAFFLRTKREPSFEGFFQSRFAVKQKRLMQAREFDVRRYSELRQACGLPALHPQSPCASSQENHHCHCH

SEQ ID NO: 10944 - DNA, 1976 bp, Triticum aestivum
  misc_feature (1)..(1976): Ceres Seq. ID no. 14301866
ctctctccacaccacaagccgccgccgaccgctcgctgggaggggaatagaaatcgtgtatcgtagggttgcgcaaaccgccgccaagaggggagccaagtccagcgccgctgcctcgtcctcgtcggcgtcgtcggcggccgataaggccgccaatggcatagcggcccttaacttatccgatcggacatgtaccggggtcctggcttcgcatccgctctcccgtgatatccacattgagtccctttcattaacatttcatggacatgaccttattgtggattcagaattggagcttaactacgggaggcggtatggtttgctcggcttaaatggttgtgggaaatctacccttctcaccgcaataggctgcagggaactccccattcctgaacacatggacatacatcatcttacgcgtgagattgaggcttctgacatgtctgcgctgcaagctgttatctgttgtgatgaagaaagagtgaagttggaaaaggaagctgaaattctggctgcacaggatgatggtggcggtgaagctttggatcttgtatatgagcggttagaagcaatggatgcatcaactgctgaaaagcgtgctgctgagatattgtttggtctaggttttgacaagcaaatgcaagcaaagccaacacgagatttttctgggggttggcgtatgaggattgcattggcaagggcgctgttcatgaacccgaccatccttttgcttgatgagccaaccaaccatcttgatctcgaggcttgtgtctggctggaagagaaattaaagaattttgagcgtatacttgttgttatctcgcattcccaagattttctaaatggagtgtgcactaacatcatccacatgcagaacaagaccctcaagttatatactggaaattatgaccagtatgttcaaactcgctctgagcttgaagagaatcaaatgaagcagtacaaatgggaacaggaacagatagctaatatgaaggagtacattgcccgatttggtcatggatctgcgaagcttgctcgtcaggctcagagcaaagagaagactcttgcaaagatggagcgtggtggtcttgctgagaaggttgtcaatgacaggattcttgttttccgctttacagatgttggcaaactcccaccaccagtgctgcagtttgctgatgtgacatttggttacactccggataatctcatctacaagaaccttgacttcggtgttgaccttgactcgagagttgcactggtcggtcccaatggggcaggtaagagcacacttctgaagctcatgacaggtgacctatctccgttggatggcatggtcagacgccacaaccacctacgcattgcacaattccatcaacatctcactgagaagctggacctggacatgccggccctgcagtacatgatgagggagtaccctgggaatgaagaggagaagatgagagctgcgattggcaagtttggcctgtcaggaaaggcacaggtgatgccaatgaaaaacctgtctgatgggcagaaggcccgtgtcatttttgcttggctagcatttaggcagccacagatgctgttgcttgatgagccgacaaatcatcttgacattgagaccattgactcacttgctgaggcactgaaggaatgggacggggggttggtcctggtgagccatgacttcaggctgatcaatcaggttgctcaagagatctgggtctgtgagaaccaggcggtgactaggtgggaaggcgatatcatggatttcaagcaacacttgaagaaaagggctggtctctagatttcctgtcttttccttctcggctctttggagatctagacaacccaaagtttttgcctgtatcagaaaagtttccatcatttagcgtgacaagtatgagtattattgtatcacttaaaacatatcttctccacactattttataaccagacgatccgtgtttaattcc

SEQ ID NO: 10945 - protein, 601 aa, Triticum aestivum
  peptide (1)..(601): Ceres Seq. ID no. 14301867
  misc_feature (102)..(293): Pfam Name: Pfam Description:  ABC transporter
  misc_feature (21)..(601): NCBI GI NO: 28071305 NR Description: putative ABC transporter
  misc_feature (21)..(601): NCBI GI NO: 15239436 NR Description: ABC transporter family protein
  misc_feature (21)..(554): NCBI GI NO: 7573600 NR Description: ABC transporter homolog [Populus nigra]
  misc_feature (26)..(600): NCBI GI NO: 28436765 NR Description: Similar to ATP-binding cassette, sub-family F
  misc_feature (27)..(598): NCBI GI NO: 28502799 NR Description: Similar to ATP-binding cassette, sub-family F
  misc_feature (26)..(598): NCBI GI NO: 10179834 NR Description: iron inhibited ABC transporter 2 [Homo sapiens]
  misc_feature (62)..(598): NCBI GI NO: 27707592 NR Description: similar to ATP-binding cassette
  misc_feature (62)..(598): NCBI GI NO: 10947137 NR Description: ATP-binding cassette
  misc_feature (62)..(598): NCBI GI NO: 27881506 NR Description: ATP-binding cassette
  misc_feature (62)..(598): NCBI GI NO: 23956078 NR Description: ATP-binding cassette, sub-family F
SLHTTSRRRPLAGRGIEIVYRRVAQTAAKRGAKSSAAASSSSASSAADKAANGIAALNLSDRTCTGVLASHPLSRDIHIESLSLTFHGHDLIVDSELELNYGRRYGLLGLNGCGKSTLLTAIGCRELPIPEHMDIHHLTREIEASDMSALQAVICCDEERVKLEKEAEILAAQDDGGGEALDLVYERLEAMDASTAEKRAAEILFGLGFDKQMQAKPTRDFSGGWRMRIALARALFMNPTILLLDEPTNHLDLEACVWLEEKLKNFERILVVISHSQDFLNGVCTNIIHMQNKTLKLYTGNYDQYVQTRSELEENQMKQYKWEQEQIANMKEYIARFGHGSAKLARQAQSKEKTLAKMERGGLAEKVVNDRILVFRFTDVGKLPPPVLQFADVTFGYTPDNLIYKNLDFGVDLDSRVALVGPNGAGKSTLLKLMTGDLSPLDGMVRRHNHLRIAQFHQHLTEKLDLDMPALQYMMREYPGNEEEKMRAAIGKFGLSGKAQVMPMKNLSDGQKARVIFAWLAFRQPQMLLLDEPTNHLDIETIDSLAEALKEWDGGLVLVSHDFRLINQVAQEIWVCENQAVTRWEGDIMDFKQHLKKRAGL

SEQ ID NO: 10946 - protein, 469 aa, Triticum aestivum
  peptide (1)..(469): Ceres Seq. ID no. 14301868
  misc_feature (1)..(161): Pfam Name: Pfam Description:  ABC transporter
  misc_feature (1)..(469): NCBI GI NO: 28071305 NR Description: putative ABC transporter
  misc_feature (1)..(469): NCBI GI NO: 15239436 NR Description: ABC transporter family protein
  misc_feature (1)..(422): NCBI GI NO: 7573600 NR Description: ABC transporter homolog [Populus nigra]
  misc_feature (1)..(468): NCBI GI NO: 28436765 NR Description: Similar to ATP-binding cassette, sub-family F
  misc_feature (1)..(466): NCBI GI NO: 28502799 NR Description: Similar to ATP-binding cassette, sub-family F
  misc_feature (1)..(466): NCBI GI NO: 10179834 NR Description: iron inhibited ABC transporter 2 [Homo sapiens]
  misc_feature (1)..(466): NCBI GI NO: 27707592 NR Description: similar to ATP-binding cassette
  misc_feature (1)..(466): NCBI GI NO: 10947137 NR Description: ATP-binding cassette
  misc_feature (1)..(466): NCBI GI NO: 27881506 NR Description: ATP-binding cassette
  misc_feature (1)..(466): NCBI GI NO: 23956078 NR Description: ATP-binding cassette, sub-family F
MDIHHLTREIEASDMSALQAVICCDEERVKLEKEAEILAAQDDGGGEALDLVYERLEAMDASTAEKRAAEILFGLGFDKQMQAKPTRDFSGGWRMRIALARALFMNPTILLLDEPTNHLDLEACVWLEEKLKNFERILVVISHSQDFLNGVCTNIIHMQNKTLKLYTGNYDQYVQTRSELEENQMKQYKWEQEQIANMKEYIARFGHGSAKLARQAQSKEKTLAKMERGGLAEKVVNDRILVFRFTDVGKLPPPVLQFADVTFGYTPDNLIYKNLDFGVDLDSRVALVGPNGAGKSTLLKLMTGDLSPLDGMVRRHNHLRIAQFHQHLTEKLDLDMPALQYMMREYPGNEEEKMRAAIGKFGLSGKAQVMPMKNLSDGQKARVIFAWLAFRQPQMLLLDEPTNHLDIETIDSLAEALKEWDGGLVLVSHDFRLINQVAQEIWVCENQAVTRWEGDIMDFKQHLKKRAGL

SEQ ID NO: 10947 - protein, 455 aa, Triticum aestivum
  peptide (1)..(455): Ceres Seq. ID no. 14301869
  misc_feature (1)..(147): Pfam Name: Pfam Description:  ABC transporter
  misc_feature (1)..(455): NCBI GI NO: 28071305 NR Description: putative ABC transporter
  misc_feature (1)..(455): NCBI GI NO: 15239436 NR Description: ABC transporter family protein
  misc_feature (1)..(408): NCBI GI NO: 7573600 NR Description: ABC transporter homolog [Populus nigra]
  misc_feature (1)..(454): NCBI GI NO: 28436765 NR Description: Similar to ATP-binding cassette, sub-family F
  misc_feature (1)..(452): NCBI GI NO: 28502799 NR Description: Similar to ATP-binding cassette, sub-family F
  misc_feature (1)..(452): NCBI GI NO: 10179834 NR Description: iron inhibited ABC transporter 2 [Homo sapiens]
  misc_feature (1)..(452): NCBI GI NO: 27707592 NR Description: similar to ATP-binding cassette
  misc_feature (1)..(452): NCBI GI NO: 10947137 NR Description: ATP-binding cassette
  misc_feature (1)..(452): NCBI GI NO: 27881506 NR Description: ATP-binding cassette
  misc_feature (1)..(452): NCBI GI NO: 23956078 NR Description: ATP-binding cassette, sub-family F
MSALQAVICCDEERVKLEKEAEILAAQDDGGGEALDLVYERLEAMDASTAEKRAAEILFGLGFDKQMQAKPTRDFSGGWRMRIALARALFMNPTILLLDEPTNHLDLEACVWLEEKLKNFERILVVISHSQDFLNGVCTNIIHMQNKTLKLYTGNYDQYVQTRSELEENQMKQYKWEQEQIANMKEYIARFGHGSAKLARQAQSKEKTLAKMERGGLAEKVVNDRILVFRFTDVGKLPPPVLQFADVTFGYTPDNLIYKNLDFGVDLDSRVALVGPNGAGKSTLLKLMTGDLSPLDGMVRRHNHLRIAQFHQHLTEKLDLDMPALQYMMREYPGNEEEKMRAAIGKFGLSGKAQVMPMKNLSDGQKARVIFAWLAFRQPQMLLLDEPTNHLDIETIDSLAEALKEWDGGLVLVSHDFRLINQVAQEIWVCENQAVTRWEGDIMDFKQHLKKRAGL

SEQ ID NO: 10948 - DNA, 1747 bp, Triticum aestivum
  misc_feature (1)..(1747): Ceres Seq. ID no. 13661082
ttttttctacactaggactagactgatcgccctcctcctgaagtctaaaccctcactccccttcaccactgctccsgcagccktcgttcrgccttgcccctcycgccgaaccaaggagtaccgggcgcggcggcggcggctrccgcccgcagggccagcatggcgtttctcttcaacaaattccaggaggcaatcaaaacacttgctaagagtccaagctttgctcgagacccacggcatcttcagtttgaygctgacgtgaatcgtttatttctctataccagctataatcgtttgggaragcattctgaagaaaaggacgccgaggagattattgamytggctagcaaagcatctgttactgaccagcagaarcaagtkcagsraaatgttcattatcaacttaagcatatatgcaaatcaatggataacattcttcgtcctgatacaaaagatccatcacaatcttcttctgatgcttataataattctcgacgaagtggcttgagtttggccgttggcacaggagttgcagctgcaaacaagccagctgttcctgctacgcgacctttaactcaagctgaattgtcaaacaaattcagggatcagtttggctacacccttgacatcaagccgtcactaatacctcacaaagatgcagggcaaggtctgttcttatctggagaagctaatattggtgctgtcctagccatctaccctggagttatatactcacctgcgtattatcgatatatccctggatacccaagaatcgatgcgtgcaacagctatcttatcacaagatatgacggaacaataatcaacgcgaaaccatggcatttaggtggtgaaacaagagaaatatgggatggttcagatccagtggattacaatacaacgccacccaaaagcccagagagcaactctgaccgggcgtggaggatgcttaacaagcccctgcagaagagtggcactgaaaacttcggggatgtgcttgaacggcgaaatccactagcctttggtcatttcgcgaaccacccaccgggagggtcgactcctaatgtcatgatctgcccatatgattttccactgacagagaaggacatgagagtatacatcccgaacattgcatttggtggtgaagagcccgttacaatgaagaggtttggctccttctggttcaagtccagagcccctggtaaagagactggggagtcaccggttctgaggacgctagtaagtacgaggtccgtatgtgacgaagagctctacctgaactaccggtacagctcaaaggggcggccagactggtataccccagtggatgaagaagaggataagaggagatggagctaggtctgaaccgacctgcctgtaatgttttgttccaatgtttctttcatcagtaactggtgaactccagaagccgattcggccattctttctatgtttcagtcaaccgcataggtagtgtctctgctgaactcttctcgcaggtcttttgtggcaataaaaagaacaccagttacgtctcatgttatttgaggtagtatctgtattatccatcccgttgttgtaaggggatatttacgagcttatcactcaatctgtgtcagcagtgccatacttatttgctttcggaatagtaacaagctatgccatattgccagcgaactgcttctcatctaaataaatactacctcagtaacttaatataagacatttttttgacactattacagtgtcc

SEQ ID NO: 10949 - protein, 398 aa, Triticum aestivum
  peptide (1)..(398): Ceres Seq. ID no. 15220069
  misc_feature (1)..(398): NCBI GI NO: 10177809 NR Description: gene_id:MKD15.6~unknown protein
  misc_feature (1)..(398): NCBI GI NO: 22327005 NR Description: expressed protein [Arabidopsis thaliana]
  misc_feature (1)..(390): NCBI GI NO: 15241572 NR Description: hypothetical protein (fragment at BAC end)
  misc_feature (1)..(390): NCBI GI NO: 26453064 NR Description: unknown protein [Arabidopsis thaliana]
  misc_feature (1)..(326): NCBI GI NO: 11358190 NR Description: hypothetical protein T22D6
  misc_feature (31)..(31): Xaa is any aa, unknown or other
  misc_feature (48)..(48): Xaa is any aa, unknown or other
  misc_feature (60)..(60): Xaa is any aa, unknown or other
  misc_feature (61)..(61): Xaa is any aa, unknown or other
  misc_feature (72)..(72): Xaa is any aa, unknown or other
  misc_feature (74)..(74): Xaa is any aa, unknown or other
  misc_feature (76)..(76): Xaa is any aa, unknown or other
MAFLFNKFQEAIKTLAKSPSFARDPRHLQFXADVNRLFLYTSYNRLGXHSEEKDAEEIIXXASKASVTDQQXQXQXNVHYQLKHICKSMDNILRPDTKDPSQSSSDAYNNSRRSGLSLAVGTGVAAANKPAVPATRPLTQAELSNKFRDQFGYTLDIKPSLIPHKDAGQGLFLSGEANIGAVLAIYPGVIYSPAYYRYIPGYPRIDACNSYLITRYDGTIINAKPWHLGGETREIWDGSDPVDYNTTPPKSPESNSDRAWRMLNKPLQKSGTENFGDVLERRNPLAFGHFANHPPGGSTPNVMICPYDFPLTEKDMRVYIPNIAFGGEEPVTMKRFGSFWFKSRAPGKETGESPVLRTLVSTRSVCDEELYLNYRYSSKGRPDWYTPVDEEEDKRRWS

SEQ ID NO: 10950 - protein, 310 aa, Triticum aestivum
  peptide (1)..(310): Ceres Seq. ID no. 15220070
  misc_feature (1)..(310): NCBI GI NO: 10177809 NR Description: gene_id:MKD15.6~unknown protein
  misc_feature (1)..(310): NCBI GI NO: 22327005 NR Description: expressed protein [Arabidopsis thaliana]
  misc_feature (1)..(302): NCBI GI NO: 15241572 NR Description: hypothetical protein (fragment at BAC end)
  misc_feature (1)..(302): NCBI GI NO: 26453064 NR Description: unknown protein [Arabidopsis thaliana]
  misc_feature (1)..(238): NCBI GI NO: 11358190 NR Description: hypothetical protein T22D6
MDNILRPDTKDPSQSSSDAYNNSRRSGLSLAVGTGVAAANKPAVPATRPLTQAELSNKFRDQFGYTLDIKPSLIPHKDAGQGLFLSGEANIGAVLAIYPGVIYSPAYYRYIPGYPRIDACNSYLITRYDGTIINAKPWHLGGETREIWDGSDPVDYNTTPPKSPESNSDRAWRMLNKPLQKSGTENFGDVLERRNPLAFGHFANHPPGGSTPNVMICPYDFPLTEKDMRVYIPNIAFGGEEPVTMKRFGSFWFKSRAPGKETGESPVLRTLVSTRSVCDEELYLNYRYSSKGRPDWYTPVDEEEDKRRWS

SEQ ID NO: 10951 - DNA, 1246 bp, Triticum aestivum
  misc_feature (1)..(1246): Ceres Seq. ID no. 15178266
agtcccacgcactcgagagtcgagggggtctgtcccatccttatctccgctagctagctcgctataggcccctggtctttactcttcaggccaaacagaagcagctactaggcgaaggacacatccgcattatccatcgatcggccttgtcctgtccgcgggtggcgccggacgccggtgacaaccgacagggcagcaagcgtggatcatccgagcggaagcggaagcgctcctcctccggctccggggcaccgtcgcgacagcagaggcccgccgccatcacctcgtccgccgccgccgccgccgccgccgccggcgcaacaacgaggtgaccaccatgggcatggagagccggaggtcgtcggggaggaggctgctggcgttggcgttgcgacgacgagctaccagcaccagcagtacgagctcgccgtcatggtggcggcgctcacccacgtcatcagctccactcgaccgggaccggcggccgccgccggtgcaaccgcgcccgggcagcaagctgtgacccgccaacacagcgctcctctggccgtggcggcgacgtcgtcgtcatcaacggcgtcggagcagcagcagcagcgtccgcggtaccgtggcgtacggcagcggccgtggggcaagtgggcggcggagatccgcgaccccgtgaaggcggcgcgcgtatggctgggcaccttcgacacggccgaggacgccgcacgcgcctacgacgccgccgcgctccgcttcaagggcgccaaggccaagctcaacttccctggcgccggcggtgcgcctgcgccaccccgccatgccgtcggccagctcctggcgcccggaggcggggcatcgccgtcgatgcggcagcagcagcgacccgtggtggtggccttccgtccgcagattaactccctggcagccgttgctcgggaggagttcccggacctccaccggtatgcgcacatactgcagagcggtgacgtggacctgcgggctgttgcagccggcgggaacacaccggggcagtcgtcttcgtcgacgccggcgcacgactcgaggtcgccgccccggccggatgatcgcggatatggcgagagaagtgcaggccctggctgctaactgagtagtactcttactgaatacgtactgatcgacgtgtacatgagaaaaacaagttctgtttcttttcatctttttgtttgcgtatttccttatttatttttggtaaaatgaatagacacaacactac

SEQ ID NO: 10952 - protein, 227 aa, Triticum aestivum
  peptide (1)..(227): Ceres Seq. ID no. 15178267
  misc_feature (56)..(115): Pfam Name: Pfam Description:  AP2 domain
  misc_feature (1)..(214): NCBI GI NO: 33519168 NR Description: AP2 domain-containing protein AP29
  misc_feature (1)..(203): NCBI GI NO: 38347164 NR Description: OSJNBa0039C07.10
  misc_feature (1)..(127): NCBI GI NO: 15218275 NR Description: AP2 domain transcription factor RAP2.6
  misc_feature (1)..(152): NCBI GI NO: 34897546 NR Description: OSJNBa0042L16.10
  misc_feature (10)..(115): NCBI GI NO: 15238232 NR Description: AP2 domain transcription factor, putative
  misc_feature (1)..(124): NCBI GI NO: 15240610 NR Description: putative protein; protein id: At5g50080.1
  misc_feature (1)..(124): NCBI GI NO: 34221731 NR Description: putative AP2 domain transcription factor
  misc_feature (1)..(115): NCBI GI NO: 15240379 NR Description: AP2 domain transcription factor family
  misc_feature (37)..(127): NCBI GI NO: 2281637 NR Description: AP2 domain containing protein RAP2.6
  misc_feature (37)..(115): NCBI GI NO: 15226153 NR Description: AP2 domain transcription factor family
MVAALTHVISSTRPGPAAAAGATAPGQQAVTRQHSAPLAVAATSSSSTASEQQQQRPRYRGVRQRPWGKWAAEIRDPVKAARVWLGTFDTAEDAARAYDAAALRFKGAKAKLNFPGAGGAPAPPRHAVGQLLAPGGGASPSMRQQQRPVVVAFRPQINSLAAVAREEFPDLHRYAHILQSGDVDLRAVAAGGNTPGQSSSSTPAHDSRSPPRPDDRGYGERSAGPGC

SEQ ID NO: 10953 - DNA, 1687 bp, Triticum aestivum
  misc_feature (1)..(1687): Ceres Seq. ID no. 13663060
agaacatcataatcgaaaatcgcctccgctcgctcccatcctcattccccagtcgccgcccaagtcaaaaagagggggaagcttctccaccagagtccccaagcccatgaacgactagtcgctgcgaagcaccaaccctagaacccaaccctactctctcccctcctcggctcctcccctcgcgagcggcgacgaagaggccatggatacctccggcggcggcaccgccgcgggcggggccgcgcagatccaggggatggcgacacacggcggccgctacgtgctctacaacgtctacggcaacctcttcgaggtcgcctccaagtacgcccctcccatccgccccatcggccgaggcgcctacggcattgtctgcgcggcggttagttcggatacaggagaggaggttgcgatcaagaagattggaaatgcgtttgacaaccacatcgatgccaagcggacgctgagagaaataaagcttcttcgccacatggaccatgagaatattcttgccataaaggatttaatacgccccccaagaagagatgattttaaggatgtgtacattgttactgagttgatggacaccgacctccatcagatcattcgctcaaatcaatcattgactgatgaccattgccagtacttcttgtatcagttgcttcgagggctaaaatatgtgcactcagcaaatgtcttgcaccgtgatctgaagccaagcaatttgttcctaaacgcaaattgcgatctcaagattgcagactttgggcttgcaaggaccacttcagaaaccgatctcatgacagagtatgtggtcactcgttggtaccgagcaccagagttgctgttgaactgttcacaatatactgctgctattgatgtctggtcagttgggtgtatacttggtgaaattattactcgtcaacccctatttcctggaagagattacatccaacagttaaaattgatcactgagctgataggatcaccagatgattcgagcctgggatttcttcggagtgacaatgcacgaagatacatgaagcaattaccacagtacccaaggcaggacttccgcctgcgcttccgcaacatgtctgatggtgcagttgatctgttagaaagaatgctggtgtttgacccaagcagacgcatcactgttgacgaggctctgcaccacccatacttggcttctcttcatgacatcaatgaagaacccacttgcccggcacctttcagctttgattttgagcaaccatcttttacagaagaacatatgaaagagctcatctggagggaaactttagcatttaaccctgatcctccctactaagagccaagaccaaattaccagctgagggcattgaagatctacctctagctctagtgaagccgatatttccatgtcttgtgcatctatttattttatgctcgcttattgggcgaatgggcatggattatttgttgctgtaactatttcttttggggcctttctgaagaaacgacatttgtatgagatggcttgcgcctgggcttgtattataccggttgattgaataaattcttcttgtgtatctaaggcttgtaattttgtgtacacttatttaaacatccaaaaaaaaaaaaaaaaaagcttatcgataccgtcgacctgtttaaacacaataaagttggaactggagggggg

SEQ ID NO: 10954 - protein, 376 aa, Triticum aestivum
  peptide (1)..(376): Ceres Seq. ID no. 13663061
  misc_feature (44)..(329): Pfam Name: Pfam Description:  Protein kinase domain
  misc_feature (1)..(374): NCBI GI NO: 25052804 NR Description: mitogen-activated protein kinase 4
  misc_feature (16)..(375): NCBI GI NO: 2129855 NR Description: mitogen-activated protein kinase MMK2 (EC 2
  misc_feature (16)..(375): NCBI GI NO: 2499613 NR Description: MITOGEN-ACTIVATED PROTEIN KINASE HOMOLOG MMK2
  misc_feature (9)..(372): NCBI GI NO: 15234152 NR Description: mitogen-activated protein kinase
  misc_feature (1)..(373): NCBI GI NO: 27312014 NR Description: mitogen-activated protein kinase
  misc_feature (9)..(372): NCBI GI NO: 2129645 NR Description: mitogen-activated protein kinase 4 (EC 2
  misc_feature (1)..(373): NCBI GI NO: 21165527 NR Description: mitogen-activated protein kinase
  misc_feature (17)..(372): NCBI GI NO: 18378855 NR Description: mitogen-activated protein kinase
  misc_feature (12)..(374): NCBI GI NO: 21431796 NR Description: Mitogen-activated protein kinase homolog 5
  misc_feature (1)..(373): NCBI GI NO: 29500879 NR Description: mitogen-activated protein kinase
MDTSGGGTAAGGAAQIQGMATHGGRYVLYNVYGNLFEVASKYAPPIRPIGRGAYGIVCAAVSSDTGEEVAIKKIGNAFDNHIDAKRTLREIKLLRHMDHENILAIKDLIRPPRRDDFKDVYIVTELMDTDLHQIIRSNQSLTDDHCQYFLYQLLRGLKYVHSANVLHRDLKPSNLFLNANCDLKIADFGLARTTSETDLMTEYVVTRWYRAPELLLNCSQYTAAIDVWSVGCILGEIITRQPLFPGRDYIQQLKLITELIGSPDDSSLGFLRSDNARRYMKQLPQYPRQDFRLRFRNMSDGAVDLLERMLVFDPSRRITVDEALHHPYLASLHDINEEPTCPAPFSFDFEQPSFTEEHMKELIWRETLAFNPDPPY

SEQ ID NO: 10955 - protein, 358 aa, Triticum aestivum
  peptide (1)..(358): Ceres Seq. ID no. 13663062
  misc_feature (26)..(311): Pfam Name: Pfam Description:  Protein kinase domain
  misc_feature (1)..(356): NCBI GI NO: 25052804 NR Description: mitogen-activated protein kinase 4
  misc_feature (1)..(357): NCBI GI NO: 2129855 NR Description: mitogen-activated protein kinase MMK2 (EC 2
  misc_feature (1)..(357): NCBI GI NO: 2499613 NR Description: MITOGEN-ACTIVATED PROTEIN KINASE HOMOLOG MMK2
  misc_feature (1)..(354): NCBI GI NO: 15234152 NR Description: mitogen-activated protein kinase
  misc_feature (1)..(355): NCBI GI NO: 27312014 NR Description: mitogen-activated protein kinase
  misc_feature (1)..(354): NCBI GI NO: 2129645 NR Description: mitogen-activated protein kinase 4 (EC 2
  misc_feature (1)..(355): NCBI GI NO: 21165527 NR Description: mitogen-activated protein kinase
  misc_feature (1)..(354): NCBI GI NO: 18378855 NR Description: mitogen-activated protein kinase
  misc_feature (1)..(356): NCBI GI NO: 21431796 NR Description: Mitogen-activated protein kinase homolog 5
  misc_feature (1)..(355): NCBI GI NO: 29500879 NR Description: mitogen-activated protein kinase
MATHGGRYVLYNVYGNLFEVASKYAPPIRPIGRGAYGIVCAAVSSDTGEEVAIKKIGNAFDNHIDAKRTLREIKLLRHMDHENILAIKDLIRPPRRDDFKDVYIVTELMDTDLHQIIRSNQSLTDDHCQYFLYQLLRGLKYVHSANVLHRDLKPSNLFLNANCDLKIADFGLARTTSETDLMTEYVVTRWYRAPELLLNCSQYTAAIDVWSVGCILGEIITRQPLFPGRDYIQQLKLITELIGSPDDSSLGFLRSDNARRYMKQLPQYPRQDFRLRFRNMSDGAVDLLERMLVFDPSRRITVDEALHHPYLASLHDINEEPTCPAPFSFDFEQPSFTEEHMKELIWRETLAFNPDPPY

SEQ ID NO: 10956 - protein, 280 aa, Triticum aestivum
  peptide (1)..(280): Ceres Seq. ID no. 13663063
  misc_feature (1)..(233): Pfam Name: Pfam Description:  Protein kinase domain
  misc_feature (1)..(278): NCBI GI NO: 25052804 NR Description: mitogen-activated protein kinase 4
  misc_feature (1)..(279): NCBI GI NO: 2129855 NR Description: mitogen-activated protein kinase MMK2 (EC 2
  misc_feature (1)..(279): NCBI GI NO: 2499613 NR Description: MITOGEN-ACTIVATED PROTEIN KINASE HOMOLOG MMK2
  misc_feature (1)..(276): NCBI GI NO: 15234152 NR Description: mitogen-activated protein kinase
  misc_feature (1)..(277): NCBI GI NO: 27312014 NR Description: mitogen-activated protein kinase
  misc_feature (1)..(276): NCBI GI NO: 2129645 NR Description: mitogen-activated protein kinase 4 (EC 2
  misc_feature (1)..(277): NCBI GI NO: 21165527 NR Description: mitogen-activated protein kinase
  misc_feature (1)..(276): NCBI GI NO: 18378855 NR Description: mitogen-activated protein kinase
  misc_feature (1)..(278): NCBI GI NO: 21431796 NR Description: Mitogen-activated protein kinase homolog 5
  misc_feature (1)..(277): NCBI GI NO: 29500879 NR Description: mitogen-activated protein kinase
MDHENILAIKDLIRPPRRDDFKDVYIVTELMDTDLHQIIRSNQSLTDDHCQYFLYQLLRGLKYVHSANVLHRDLKPSNLFLNANCDLKIADFGLARTTSETDLMTEYVVTRWYRAPELLLNCSQYTAAIDVWSVGCILGEIITRQPLFPGRDYIQQLKLITELIGSPDDSSLGFLRSDNARRYMKQLPQYPRQDFRLRFRNMSDGAVDLLERMLVFDPSRRITVDEALHHPYLASLHDINEEPTCPAPFSFDFEQPSFTEEHMKELIWRETLAFNPDPPY

SEQ ID NO: 10957 - DNA, 1121 bp, Triticum aestivum
  misc_feature (1)..(1121): Ceres Seq. ID no. 12784351
aacagacggccggccggaacatgcccgctcgtcgggactcgggagtaccgaccaatgctcgccgcctgccgatcagaagtcgcgacgagctcacctaatattccacctctccctgaccgccacccaacaacctaaccacatggccgtataatactccactgcagaagcgaggtgctcgtgaagtcggcgtgatatccggagtagccagcaagcccagcccagtggccgatccgtgatccgtgttggagagagcgagggagagaagatgcggccgcggctggtgctcttcggcgactcaatcaccgagcagtcctttgcccccggcggctggggcgccgccctcgcggagcacttcgcgaggcaggcggatgtggtgctgcgcgggctcagcgggtacaacacgcgctgggcgctgaaggtgctggatagagccatggagggggcggccgacggcggcgcggacccggcggcagtgacggtgttcttcggcgccaacgacgccaccctgcccgacgagatgcaggcgcaccagcacgtgccgctcggggagtacaaggacaacctgcgcgcgatctgtgcctacttcaagaataagtggccctccgctgccatcatactcatcacccctccaccgatccacgagccggcgaggattcgagacatatatggagataatgacccttcaagacagcctgaaagaacaaatgaagctgctggcacttatgcacaagcatgcataactgttgctaaagaattgggtcatccagttatagacatctggacacagatgcagcaatgtcctgattggcaaacatctgcattaagtgacgggctacatttcaccccgtccgggaacaaaattttgttcgacgaggtgctgaagacactggaaagtgttggtttcagccagcacagtctccggtccgatctccctctcttccatgaaattgaccccaaggacccactgaaagcctttgagatttgaagaaggtatctgccgcatggttggattcccagaaggaaggcactatgactcagctttatgttctgaaaacaaactatgttggtttggtgactgatgtgttctgtaacatggatatattgtgcctatgttctatgtc

SEQ ID NO: 10958 - protein, 239 aa, Triticum aestivum
  peptide (1)..(239): Ceres Seq. ID no. 12784352
  misc_feature (5)..(202): Pfam Name: Pfam Description:  GDSL-like Lipase/Acylhydrolase
  misc_feature (1)..(239): NCBI GI NO: 34903948 NR Description: OSJNBa0038J17.19
  misc_feature (1)..(238): NCBI GI NO: 15242539 NR Description: putative protein; protein id: At5g45920.1
  misc_feature (1)..(238): NCBI GI NO: 38454102 NR Description: At5g45920 [Arabidopsis thaliana]
  misc_feature (1)..(238): NCBI GI NO: 37535366 NR Description: putative esterase
  misc_feature (1)..(238): NCBI GI NO: 15242002 NR Description: putative protein; protein id: At5g62930
  misc_feature (3)..(233): NCBI GI NO: 27754071 NR Description: hypothetical protein 4833421E05Rik
  misc_feature (3)..(233): NCBI GI NO: 27478045 NR Description: hypothetical protein XP_209490 [Homo sapiens]
  misc_feature (2)..(236): NCBI GI NO: 21554235 NR Description: CPRD49 [Arabidopsis thaliana]
  misc_feature (1)..(229): NCBI GI NO: 16974631 NR Description: At2g38180/F16M14.11 [Arabidopsis thaliana]
  misc_feature (1)..(229): NCBI GI NO: 18404664 NR Description: expressed protein; protein id: At2g38180
MRPRLVLFGDSITEQSFAPGGWGAALAEHFARQADVVLRGLSGYNTRWALKVLDRAMEGAADGGADPAAVTVFFGANDATLPDEMQAHQHVPLGEYKDNLRAICAYFKNKWPSAAIILITPPPIHEPARIRDIYGDNDPSRQPERTNEAAGTYAQACITVAKELGHPVIDIWTQMQQCPDWQTSALSDGLHFTPSGNKILFDEVLKTLESVGFSQHSLRSDLPLFHEIDPKDPLKAFEI

SEQ ID NO: 10959 - protein, 183 aa, Triticum aestivum
  peptide (1)..(183): Ceres Seq. ID no. 12784353
  misc_feature (1)..(146): Pfam Name: Pfam Description:  GDSL-like Lipase/Acylhydrolase
  misc_feature (1)..(183): NCBI GI NO: 34903948 NR Description: OSJNBa0038J17.19
  misc_feature (1)..(182): NCBI GI NO: 15242539 NR Description: putative protein; protein id: At5g45920.1
  misc_feature (1)..(182): NCBI GI NO: 38454102 NR Description: At5g45920 [Arabidopsis thaliana]
  misc_feature (1)..(182): NCBI GI NO: 37535366 NR Description: putative esterase
  misc_feature (1)..(182): NCBI GI NO: 15242002 NR Description: putative protein; protein id: At5g62930
  misc_feature (1)..(177): NCBI GI NO: 27754071 NR Description: hypothetical protein 4833421E05Rik
  misc_feature (1)..(177): NCBI GI NO: 27478045 NR Description: hypothetical protein XP_209490 [Homo sapiens]
  misc_feature (1)..(180): NCBI GI NO: 21554235 NR Description: CPRD49 [Arabidopsis thaliana]
  misc_feature (1)..(173): NCBI GI NO: 16974631 NR Description: At2g38180/F16M14.11 [Arabidopsis thaliana]
  misc_feature (1)..(173): NCBI GI NO: 18404664 NR Description: expressed protein; protein id: At2g38180
MEGAADGGADPAAVTVFFGANDATLPDEMQAHQHVPLGEYKDNLRAICAYFKNKWPSAAIILITPPPIHEPARIRDIYGDNDPSRQPERTNEAAGTYAQACITVAKELGHPVIDIWTQMQQCPDWQTSALSDGLHFTPSGNKILFDEVLKTLESVGFSQHSLRSDLPLFHEIDPKDPLKAFEI

SEQ ID NO: 10960 - protein, 155 aa, Triticum aestivum
  peptide (1)..(155): Ceres Seq. ID no. 12784354
  misc_feature (1)..(118): Pfam Name: Pfam Description:  GDSL-like Lipase/Acylhydrolase
  misc_feature (1)..(155): NCBI GI NO: 34903948 NR Description: OSJNBa0038J17.19
  misc_feature (1)..(154): NCBI GI NO: 15242539 NR Description: putative protein; protein id: At5g45920.1
  misc_feature (1)..(154): NCBI GI NO: 38454102 NR Description: At5g45920 [Arabidopsis thaliana]
  misc_feature (1)..(154): NCBI GI NO: 37535366 NR Description: putative esterase
  misc_feature (1)..(154): NCBI GI NO: 15242002 NR Description: putative protein; protein id: At5g62930
  misc_feature (1)..(149): NCBI GI NO: 27754071 NR Description: hypothetical protein 4833421E05Rik
  misc_feature (1)..(149): NCBI GI NO: 27478045 NR Description: hypothetical protein XP_209490 [Homo sapiens]
  misc_feature (1)..(152): NCBI GI NO: 21554235 NR Description: CPRD49 [Arabidopsis thaliana]
  misc_feature (1)..(145): NCBI GI NO: 16974631 NR Description: At2g38180/F16M14.11 [Arabidopsis thaliana]
  misc_feature (1)..(145): NCBI GI NO: 18404664 NR Description: expressed protein; protein id: At2g38180
MQAHQHVPLGEYKDNLRAICAYFKNKWPSAAIILITPPPIHEPARIRDIYGDNDPSRQPERTNEAAGTYAQACITVAKELGHPVIDIWTQMQQCPDWQTSALSDGLHFTPSGNKILFDEVLKTLESVGFSQHSLRSDLPLFHEIDPKDPLKAFEI

SEQ ID NO: 10961 - DNA, 1275 bp, Triticum aestivum
  misc_feature (1)..(1275): Ceres Seq. ID no. 15225252
attcaaacatttttgtctcagacaaaagcatctgaacacactcaagaacatatatacatccccaccaaacaaacaaaaataaccatggaagtaaatcaagaagcttcatcaatgccagtagttcccatagatagtttctcttacagttgggtagttaactgtccttctttagaagattccattgatgattatcatcaaacctacgaagattcttcttcttccttcatagagatggatccaagattgcctccttcgagaagattcttcatcaacaaatcccatgaaagtagcttcaagttcgataacttcgtctctttctccgacgaagatcactctttagttcacgccgacgagcttttccgcgacggctacgtcatgccttatctatcaaaagccacgtcagcagctacggaagaagaatatgagccgttggacaagaaaacggagaagaagatggagacacgtgacattaagagcaagtctccttcttcttgtagaaagttgagaagagtttcgaaatgggttttgttgttattgacgccactgtgtaagagattaaggagatgtagaaccgctggatcatccggaggtatcggtatcgactctaggatccgtgtaacgacgttgtctagaagcagagttcattctgatgaaatgacttcgtcgccaagaataagtgttgcagatgattattattggagaaggtcttgtgactcagagagctccatttacgaagccgttcttcattgcaagaaatctttcgagaaatgagacttaagaatccatggaaaaggagcgggtagagtagagatggagaatattaagaagaataagcaaattacattacacgttactcatggagtgggaaagagagagcaacttgtgttgtgtctttttgttgtttctctctcttgaattaaagagattgatgtgatgattccatgtgaatgtgtcatctgatttgaatctagaacttttttttacatgagtgggcacatatatagggcagctagcagaatcaagaaaatattttcagattttcttggctattatggtttcttttcatatatgtaatcctatatgtatcttatatgtgcctacccatgttttactttctggtccaattgtgttttgaatattcttactttttgtgaaaattttgtcttttattgtctttataaatcatatgtggatgtcatcatatatatgcatatgattgaactccttttcttatcataattgtaattcaaatcaattaaatctaacaaagagaag

SEQ ID NO: 10962 - protein, 256 aa, Triticum aestivum
  peptide (1)..(256): Ceres Seq. ID no. 15225253
  misc_feature (29)..(256): NCBI GI NO: 18423445 NR Description: expressed protein [Arabidopsis thaliana]
  misc_feature (29)..(256): NCBI GI NO: 21553508 NR Description: unknown [Arabidopsis thaliana]
  misc_feature (29)..(254): NCBI GI NO: 10177104 NR Description: gene_id:MXC20.13~unknown protein
IQTFLSQTKASEHTQEHIYIPTKQTKITMEVNQEASSMPVVPIDSFSYSWVVNCPSLEDSIDDYHQTYEDSSSSFIEMDPRLPPSRRFFINKSHESSFKFDNFVSFSDEDHSLVHADELFRDGYVMPYLSKATSAATEEEYEPLDKKTEKKMETRDIKSKSPSSCRKLRRVSKWVLLLLTPLCKRLRRCRTAGSSGGIGIDSRIRVTTLSRSRVHSDEMTSSPRISVADDYYWRRSCDSESSIYEAVLHCKKSFEK

SEQ ID NO: 10963 - protein, 228 aa, Triticum aestivum
  peptide (1)..(228): Ceres Seq. ID no. 15225254
  misc_feature (1)..(228): NCBI GI NO: 18423445 NR Description: expressed protein [Arabidopsis thaliana]
  misc_feature (1)..(228): NCBI GI NO: 21553508 NR Description: unknown [Arabidopsis thaliana]
  misc_feature (1)..(226): NCBI GI NO: 10177104 NR Description: gene_id:MXC20.13~unknown protein
MEVNQEASSMPVVPIDSFSYSWVVNCPSLEDSIDDYHQTYEDSSSSFIEMDPRLPPSRRFFINKSHESSFKFDNFVSFSDEDHSLVHADELFRDGYVMPYLSKATSAATEEEYEPLDKKTEKKMETRDIKSKSPSSCRKLRRVSKWVLLLLTPLCKRLRRCRTAGSSGGIGIDSRIRVTTLSRSRVHSDEMTSSPRISVADDYYWRRSCDSESSIYEAVLHCKKSFEK

SEQ ID NO: 10964 - protein, 219 aa, Triticum aestivum
  peptide (1)..(219): Ceres Seq. ID no. 15225255
  misc_feature (1)..(219): NCBI GI NO: 18423445 NR Description: expressed protein [Arabidopsis thaliana]
  misc_feature (1)..(219): NCBI GI NO: 21553508 NR Description: unknown [Arabidopsis thaliana]
  misc_feature (1)..(217): NCBI GI NO: 10177104 NR Description: gene_id:MXC20.13~unknown protein
MPVVPIDSFSYSWVVNCPSLEDSIDDYHQTYEDSSSSFIEMDPRLPPSRRFFINKSHESSFKFDNFVSFSDEDHSLVHADELFRDGYVMPYLSKATSAATEEEYEPLDKKTEKKMETRDIKSKSPSSCRKLRRVSKWVLLLLTPLCKRLRRCRTAGSSGGIGIDSRIRVTTLSRSRVHSDEMTSSPRISVADDYYWRRSCDSESSIYEAVLHCKKSFEK

SEQ ID NO: 10965 - DNA, 955 bp, Triticum aestivum
  misc_feature (1)..(955): Ceres Seq. ID no. 12627215
  misc_feature (148)..(148): n is a, c, t, g, unknown, or other
gtcaaagcaaaagctaaatcatcttcctctcgtcaccaatcaaatggcgtctttgtcttcaatgcagatggttcacacttctcagattggtgttaagtcgcagttagtttcttctgcaaaccgaacatctccatcagtttcctctggntctgcattgtcttcgagactacactatgcagcaagtttccctctcaagaagcaattctcaggagcttatgcgaccatcaagaaccagagaacagcttgtgttaaatcaatggcagctgaggaagaggaagtgatagaacctcaggctaaagtgacgaacaaggtttactttgatgttgagattggtggtgaagtcgctggaaggattgtgatgggtctgttcggtgacgtcgtgcccaaaaccgttgagaacttccgtgtcttgtgtactggtgagaagaagtatggttacaaaggttcttccttccatcgtattattaaagatttcatgatccaaggaggtgacttcaccgagggaaatggtactggaggtattagtatctacggtgccaagtttgaagatgaaaacttcaccttgaagcatactggacctggaatcttgagtatggccaacgctggtcccaatactaatggaagccagttcttcatttgcactgtcaagactccatggttagacaacaagcatgttgtgtttggacaagtcattgaaggtatgaagcttgttaggacacttgaatctcaggagacacgcgccttcgatgttcccaagaaaggttgcagaatctatgcctgtggagagctccctctggatgcttgataaccacactattgagatcagtccatggtcattgccatctttgttttgttattatgagagtttcaagttatggtctttatgtttatttctttatgattacatgagttgaaagtacaatgtaagagtcttattaaagtttatttatctttt

SEQ ID NO: 10966 - protein, 267 aa, Triticum aestivum
  peptide (1)..(267): Ceres Seq. ID no. 12627216
  misc_feature (15)..(267): NCBI GI NO: 15228674 NR Description: peptidylprolyl isomerase ROC4
  misc_feature (15)..(267): NCBI GI NO: 11762200 NR Description: AT3g62030 [Arabidopsis thaliana]
  misc_feature (15)..(267): NCBI GI NO: 21555831 NR Description: peptidylprolyl isomerase ROC4
  misc_feature (15)..(266): NCBI GI NO: 6014889 NR Description: Peptidyl-prolyl cis-trans isomerase
  misc_feature (44)..(266): NCBI GI NO: 34902534 NR Description: putative peptidyl-prolyl cis-trans isomerase
  misc_feature (15)..(265): NCBI GI NO: 15240008 NR Description: peptidyl-prolyl isomerase protein
  misc_feature (15)..(265): NCBI GI NO: 21593963 NR Description: peptidylprolyl isomerase-like protein
  misc_feature (74)..(265): NCBI GI NO: 37788308 NR Description: cyclophilin-like protein [Triticum aestivum]
  misc_feature (69)..(265): NCBI GI NO: 37788312 NR Description: cyclophilin-like protein [Triticum aestivum]
  misc_feature (93)..(265): NCBI GI NO: 9955556 NR Description: peptidylprolyl isomerase-like protein
  misc_feature (49)..(49): Xaa is any aa, unknown or other
SKQKLNHLPLVTNQMASLSSMQMVHTSQIGVKSQLVSSANRTSPSVSSXSALSSRLHYAASFPLKKQFSGAYATIKNQRTACVKSMAAEEEEVIEPQAKVTNKVYFDVEIGGEVAGRIVMGLFGDVVPKTVENFRVLCTGEKKYGYKGSSFHRIIKDFMIQGGDFTEGNGTGGISIYGAKFEDENFTLKHTGPGILSMANAGPNTNGSQFFICTVKTPWLDNKHVVFGQVIEGMKLVRTLESQETRAFDVPKKGCRIYACGELPLDA

SEQ ID NO: 10967 - protein, 253 aa, Triticum aestivum
  peptide (1)..(253): Ceres Seq. ID no. 12627217
  misc_feature (1)..(253): NCBI GI NO: 15228674 NR Description: peptidylprolyl isomerase ROC4
  misc_feature (1)..(253): NCBI GI NO: 11762200 NR Description: AT3g62030 [Arabidopsis thaliana]
  misc_feature (1)..(253): NCBI GI NO: 21555831 NR Description: peptidylprolyl isomerase ROC4
  misc_feature (1)..(252): NCBI GI NO: 6014889 NR Description: Peptidyl-prolyl cis-trans isomerase
  misc_feature (30)..(252): NCBI GI NO: 34902534 NR Description: putative peptidyl-prolyl cis-trans isomerase
  misc_feature (1)..(251): NCBI GI NO: 15240008 NR Description: peptidyl-prolyl isomerase protein
  misc_feature (1)..(251): NCBI GI NO: 21593963 NR Description: peptidylprolyl isomerase-like protein
  misc_feature (60)..(251): NCBI GI NO: 37788308 NR Description: cyclophilin-like protein [Triticum aestivum]
  misc_feature (55)..(251): NCBI GI NO: 37788312 NR Description: cyclophilin-like protein [Triticum aestivum]
  misc_feature (79)..(251): NCBI GI NO: 9955556 NR Description: peptidylprolyl isomerase-like protein
  misc_feature (35)..(35): Xaa is any aa, unknown or other
MASLSSMQMVHTSQIGVKSQLVSSANRTSPSVSSXSALSSRLHYAASFPLKKQFSGAYATIKNQRTACVKSMAAEEEEVIEPQAKVTNKVYFDVEIGGEVAGRIVMGLFGDVVPKTVENFRVLCTGEKKYGYKGSSFHRIIKDFMIQGGDFTEGNGTGGISIYGAKFEDENFTLKHTGPGILSMANAGPNTNGSQFFICTVKTPWLDNKHVVFGQVIEGMKLVRTLESQETRAFDVPKKGCRIYACGELPLDA

SEQ ID NO: 10968 - protein, 247 aa, Triticum aestivum
  peptide (1)..(247): Ceres Seq. ID no. 12627218
  misc_feature (1)..(247): NCBI GI NO: 15228674 NR Description: peptidylprolyl isomerase ROC4
  misc_feature (1)..(247): NCBI GI NO: 11762200 NR Description: AT3g62030 [Arabidopsis thaliana]
  misc_feature (1)..(247): NCBI GI NO: 21555831 NR Description: peptidylprolyl isomerase ROC4
  misc_feature (1)..(246): NCBI GI NO: 6014889 NR Description: Peptidyl-prolyl cis-trans isomerase
  misc_feature (24)..(246): NCBI GI NO: 34902534 NR Description: putative peptidyl-prolyl cis-trans isomerase
  misc_feature (1)..(245): NCBI GI NO: 15240008 NR Description: peptidyl-prolyl isomerase protein
  misc_feature (1)..(245): NCBI GI NO: 21593963 NR Description: peptidylprolyl isomerase-like protein
  misc_feature (54)..(245): NCBI GI NO: 37788308 NR Description: cyclophilin-like protein [Triticum aestivum]
  misc_feature (49)..(245): NCBI GI NO: 37788312 NR Description: cyclophilin-like protein [Triticum aestivum]
  misc_feature (73)..(245): NCBI GI NO: 9955556 NR Description: peptidylprolyl isomerase-like protein
  misc_feature (29)..(29): Xaa is any aa, unknown or other
MQMVHTSQIGVKSQLVSSANRTSPSVSSXSALSSRLHYAASFPLKKQFSGAYATIKNQRTACVKSMAAEEEEVIEPQAKVTNKVYFDVEIGGEVAGRIVMGLFGDVVPKTVENFRVLCTGEKKYGYKGSSFHRIIKDFMIQGGDFTEGNGTGGISIYGAKFEDENFTLKHTGPGILSMANAGPNTNGSQFFICTVKTPWLDNKHVVFGQVIEGMKLVRTLESQETRAFDVPKKGCRIYACGELPLDA

SEQ ID NO: 10969 - DNA, 776 bp, Triticum aestivum
  misc_feature (1)..(776): Ceres Seq. ID no. 13661280
acaagaagcaagtgaaaagaaagaagaaacaacacaacaagccaccacgtacgtaagctttatcaccttcaaaaatgtcgggttggttcggggggaagacggacgccaaggacgaggaggccgccaagacggggccgtccgtccaggaccgcgccatcgaggcgaaggaccagaccatcagcttcatcggcgagaaaagcgaggccgtcaccaaggcggcctcggacaccgccgacgcggccatgaagatgggcggcgacgccatggggaaggcctccgagacggggcaggccatcacggaccgcgccatcgagagcaaggaccagacgttcggcttcttcggagagaagacggaggctgccaagaagatggccgtcgacaccggcgacgctgccaagcagaagtccgccgaggccgcaaagtgtgtcgaggagaccgcggcgaagttcaccggggaacccgccgcccccaaggagcccaccggcaacatgttccagcaggccggcgggcaggtgatgggtgccgctactggcgccagggacgccgtcatgaacacgctcgggatgggaggagacaaagccgacaccggcaccgccaaatgaagaccgcaaagcgcaaaggacggctagcccacttttcgtttcgttattccctccgtgttgctttattttccgttccaagaaactgatttctacgcatgcgtcggttgtttaaacttcgtccggtgtattcaaagatgctttgaatatacagatttgctwaaaaaaaaaaaaaaa

SEQ ID NO: 10970 - protein, 228 aa, Triticum aestivum
  peptide (1)..(228): Ceres Seq. ID no. 15220097
  misc_feature (46)..(143): Pfam Name: Pfam Description:  Sperm histone P2
  misc_feature (2)..(197): NCBI GI NO: 17542802 NR Description: Putative nuclear protein, nematode specific
QEASEKKEETTQQATTYVSFITFKNVGLVRGEDGRQGRGGRQDGAVRPGPRHRGEGPDHQLHRREKRGRHQGGLGHRRRGHEDGRRRHGEGLRDGAGHHGPRHREQGPDVRLLRREDGGCQEDGRRHRRRCQAEVRRGRKVCRGDRGEVHRGTRRPQGAHRQHVPAGRRAGDGCRYWRQGRRHEHARDGRRQSRHRHRQMKTAKRKGRLAHFSFRYSLRVALFSVPRN

SEQ ID NO: 10971 - protein, 175 aa, Triticum aestivum
  peptide (1)..(175): Ceres Seq. ID no. 15220098
  misc_feature (87)..(156): Pfam Name: Pfam Description:  Late embryogenesis abundant protein
  misc_feature (1)..(175): NCBI GI NO: 7445545 NR Description: cold acclimation protein WCOR615 - wheat
  misc_feature (1)..(168): NCBI GI NO: 7716956 NR Description: cold-responsive LEA/RAB-related COR protein
  misc_feature (16)..(168): NCBI GI NO: 1362163 NR Description: hypothetical protein (clone ES2A) - barley
  misc_feature (46)..(168): NCBI GI NO: 2370234 NR Description: cold-regulated protein
  misc_feature (1)..(171): NCBI GI NO: 4929080 NR Description: ABA-inducible protein WRAB1 [Triticum aestivum]
  misc_feature (1)..(175): NCBI GI NO: 25989709 NR Description: LEA2 protein [Triticum aestivum]
  misc_feature (22)..(175): NCBI GI NO: 33342178 NR Description: ABA inducible protein [Triticum aestivum]
  misc_feature (6)..(171): NCBI GI NO: 25989705 NR Description: LEA1 protein [Triticum aestivum]
  misc_feature (6)..(173): NCBI GI NO: 25989707 NR Description: LEA3 protein [Triticum aestivum]
  misc_feature (6)..(167): NCBI GI NO: 126081 NR Description: ABA-inducible protein PHV A1
MSGWFGGKTDAKDEEAAKTGPSVQDRAIEAKDQTISFIGEKSEAVTKAASDTADAAMKMGGDAMGKASETGQAITDRAIESKDQTFGFFGEKTEAAKKMAVDTGDAAKQKSAEAAKCVEETAAKFTGEPAAPKEPTGNMFQQAGGQVMGAATGARDAVMNTLGMGGDKADTGTAK

SEQ ID NO: 10972 - protein, 119 aa, Triticum aestivum
  peptide (1)..(119): Ceres Seq. ID no. 15220099
  misc_feature (31)..(100): Pfam Name: Pfam Description:  Late embryogenesis abundant protein
  misc_feature (1)..(119): NCBI GI NO: 7445545 NR Description: cold acclimation protein WCOR615 - wheat
  misc_feature (1)..(112): NCBI GI NO: 7716956 NR Description: cold-responsive LEA/RAB-related COR protein
  misc_feature (1)..(112): NCBI GI NO: 1362163 NR Description: hypothetical protein (clone ES2A) - barley
  misc_feature (1)..(112): NCBI GI NO: 2370234 NR Description: cold-regulated protein
  misc_feature (1)..(115): NCBI GI NO: 4929080 NR Description: ABA-inducible protein WRAB1 [Triticum aestivum]
  misc_feature (1)..(119): NCBI GI NO: 25989709 NR Description: LEA2 protein [Triticum aestivum]
  misc_feature (1)..(119): NCBI GI NO: 33342178 NR Description: ABA inducible protein [Triticum aestivum]
  misc_feature (1)..(115): NCBI GI NO: 25989705 NR Description: LEA1 protein [Triticum aestivum]
  misc_feature (1)..(117): NCBI GI NO: 25989707 NR Description: LEA3 protein [Triticum aestivum]
  misc_feature (1)..(111): NCBI GI NO: 126081 NR Description: ABA-inducible protein PHV A1
MKMGGDAMGKASETGQAITDRAIESKDQTFGFFGEKTEAAKKMAVDTGDAAKQKSAEAAKCVEETAAKFTGEPAAPKEPTGNMFQQAGGQVMGAATGARDAVMNTLGMGGDKADTGTAK

SEQ ID NO: 10973 - DNA, 959 bp, Triticum aestivum
  misc_feature (1)..(959): Ceres Seq. ID no. 14301452
ataggtaatcataccacaacccgagcattctacaaccactttcatcaacgccatacacgtctcctaccctcacagttcgttgctccgcacatcagcaggacttgcaatggcgggagacggcgagctgaagctgctgggcgtgtggacgggcccgttcgtcatcagggtgcgcgtggtgctcaacctcaagtctctgccgtacgagtacgtggaggagaacctgggcagcaagagcgcgctcctcctgggctccaacccggtgcaccagagcgtgcccgtcctcctccacggcggccgccccgtgaacgagtcccaggtcatcgtgcagtacatcgacgaggtctgggcgggggccggcccgtccgtgctcccggccgacccctacgagcgcgccacggcgcgcttctgggcggcgtacgtcgacgacaaggtcgggtcggcgtggacggggatgctcttctcgtgcaagacggaggaggagagggcggaggccgtgtcccgggccgtggcggcgctggagacgctggagggcgcgttcgcggagtgctccaaggggaaggcgttcttcggcggcgacgccatcgggttcgttgacgtcgtgctcggcggctacctcgggtggttcggggcgatcgacaagatcatcgggcgccggctgatcgacccggcgaggacgccgctgctggccaggtgggaggagcagttccgcgcggcggacgcggccaagggcgtcgtgccggacgacgccgacaagatgctcgagttcttcccaccgtgctcgcttgggtcgccgccaaagcgaagtgaactgtgagcccgtgacatcgccagctcgtgacatgtgtgtttgtgtgtgtgcgtgtctgagtccgtccagtgtgtgctgaataaatgcaccgcatgtcgtgtgttgtaccaagggcaaacgatgctgaataattttgatgtttgttgatttc

SEQ ID NO: 10974 - protein, 235 aa, Triticum aestivum
  peptide (1)..(235): Ceres Seq. ID no. 14301453
  misc_feature (88)..(204): Pfam Name: Pfam Description:  Glutathione S-transferase, C-terminal domain
  misc_feature (1)..(222): NCBI GI NO: 20067421 NR Description: glutathione transferase [Triticum aestivum]
  misc_feature (1)..(220): NCBI GI NO: 37536360 NR Description: putative glutathione S-transferase
  misc_feature (1)..(220): NCBI GI NO: 11385511 NR Description: glutathione S-transferase GST 30 [Zea mays]
  misc_feature (1)..(231): NCBI GI NO: 37536368 NR Description: putative glutathione S-transferase
  misc_feature (3)..(220): NCBI GI NO: 11385501 NR Description: glutathione S-transferase GST 25 [Zea mays]
  misc_feature (1)..(220): NCBI GI NO: 11385527 NR Description: glutathione S-transferase GST 38 [Zea mays]
  misc_feature (2)..(220): NCBI GI NO: 37536358 NR Description: putative glutathione S-transferase
  misc_feature (1)..(220): NCBI GI NO: 11385535 NR Description: glutathione S-transferase GST 42 [Zea mays]
  misc_feature (6)..(232): NCBI GI NO: 11385495 NR Description: glutathione S-transferase GST 22 [Zea mays]
  misc_feature (1)..(212): NCBI GI NO: 37536280 NR Description: putative glutathione S-transferase
MAGDGELKLLGVWTGPFVIRVRVVLNLKSLPYEYVEENLGSKSALLLGSNPVHQSVPVLLHGGRPVNESQVIVQYIDEVWAGAGPSVLPADPYERATARFWAAYVDDKVGSAWTGMLFSCKTEEERAEAVSRAVAALETLEGAFAECSKGKAFFGGDAIGFVDVVLGGYLGWFGAIDKIIGRRLIDPARTPLLARWEEQFRAADAAKGVVPDDADKMLEFFPPCSLGSPPKRSEL

SEQ ID NO: 10975 - protein, 197 aa, Triticum aestivum
  peptide (1)..(197): Ceres Seq. ID no. 14301454
  misc_feature (26)..(160): Pfam Name: DUF810 Pfam Description: Protein of unknown function
  misc_feature (101)..(197): NCBI GI NO: 729206 NR Description: PROBABLE GLUTATHIONE S-TRANSFERASE
  misc_feature (37)..(181): NCBI GI NO: 2388805 NR Description: attachment region binding protein [Gallus gallus]
IGNHTTTRAFYNHFHQRHTRLLPSQFVAPHISRTCNGGRRRAEAAGRVDGPVRHQGARGAQPQVSAVRVRGGEPGQQERAPPGLQPGAPERARPPPRRPPRERVPGHRAVHRRGLGGGRPVRAPGRPLRARHGALLGGVRRRQGRVGVDGDALLVQDGGGEGGGRVPGRGGAGDAGGRVRGVLQGEGVLRRRRHRVR

SEQ ID NO: 10976 - protein, 120 aa, Triticum aestivum
  peptide (1)..(120): Ceres Seq. ID no. 14301455
  misc_feature (1)..(89): Pfam Name: Pfam Description:  Glutathione S-transferase, C-terminal domain
  misc_feature (1)..(107): NCBI GI NO: 20067421 NR Description: glutathione transferase [Triticum aestivum]
  misc_feature (1)..(105): NCBI GI NO: 37536360 NR Description: putative glutathione S-transferase
  misc_feature (1)..(105): NCBI GI NO: 11385511 NR Description: glutathione S-transferase GST 30 [Zea mays]
  misc_feature (1)..(116): NCBI GI NO: 37536368 NR Description: putative glutathione S-transferase
  misc_feature (1)..(105): NCBI GI NO: 11385501 NR Description: glutathione S-transferase GST 25 [Zea mays]
  misc_feature (1)..(105): NCBI GI NO: 11385527 NR Description: glutathione S-transferase GST 38 [Zea mays]
  misc_feature (1)..(105): NCBI GI NO: 37536358 NR Description: putative glutathione S-transferase
  misc_feature (1)..(105): NCBI GI NO: 11385535 NR Description: glutathione S-transferase GST 42 [Zea mays]
  misc_feature (1)..(117): NCBI GI NO: 11385495 NR Description: glutathione S-transferase GST 22 [Zea mays]
  misc_feature (1)..(97): NCBI GI NO: 37536280 NR Description: putative glutathione S-transferase
MLFSCKTEEERAEAVSRAVAALETLEGAFAECSKGKAFFGGDAIGFVDVVLGGYLGWFGAIDKIIGRRLIDPARTPLLARWEEQFRAADAAKGVVPDDADKMLEFFPPCSLGSPPKRSEL

SEQ ID NO: 10977 - DNA, 662 bp, Triticum aestivum
  misc_feature (1)..(662): Ceres Seq. ID no. 12623263
ataacccacagagaacccaagaaaccttctcaaatcctctaaagaaaagaaatggcctccacagctatctcaagcgtcatcgtcggaacatccttcctccgccgtcaaacatctcccatcagcctccgttccctccccttagccaacactcagaccctcttcggcctcaagtcaggaaccgcacgtggtggacgcgtcacagccatggctacatacaaggtcaagttcatcactcccgaaggagagcaagaggttgagtgcgacgacgacgtttacgtcctcgacgctgctgaggaagccgggatcgacttgccttactcttgccgtgccggttcttgctcgagctgtgcaggtaaagttgtgtctggttttgttgaccagtctgaccagagtttcctcgatgatgaccagattgctgcagggtttgttctcacctgtgcggcttatcctacttctgatgttaccattgagacccacagagaagatgacattgtttaagacaaaagctccattaacatgctgcttttgatggtttcataatcattcatgtctttacattttgggttgagtttgttgttactttagtataatctatattgttgtctgttgtaattgttcttggtttggaccatcttttggttagatcaatggataactgtttc

SEQ ID NO: 10978 - protein, 148 aa, Triticum aestivum
  peptide (1)..(148): Ceres Seq. ID no. 12623264
  misc_feature (60)..(135): Pfam Name: Pfam Description:  2Fe-2S iron-sulfur cluster binding domain
  misc_feature (1)..(148): NCBI GI NO: 15219837 NR Description: ferrodoxin precursor; protein id: At1g60950
  misc_feature (1)..(148): NCBI GI NO: 15220256 NR Description: ferredoxin precusor isolog; protein id:At1g10960
  misc_feature (1)..(118): NCBI GI NO: 16604416 NR Description: At1g10960/T19D16_12 [Arabidopsis thaliana]
  misc_feature (53)..(148): NCBI GI NO: 81707 NR Description: ferredoxin [2Fe-2S] A, leaf - radish
  misc_feature (53)..(148): NCBI GI NO: 947124 NR Description: ferredoxin component a1
  misc_feature (53)..(148): NCBI GI NO: 119959 NR Description: FERREDOXIN, LEAF L-A
  misc_feature (53)..(148): NCBI GI NO: 119980 NR Description: FERREDOXIN
  misc_feature (1)..(147): NCBI GI NO: 3023743 NR Description: Ferredoxin I, chloroplast precursor
  misc_feature (53)..(147): NCBI GI NO: 364015 NR Description: ferredoxin LFdA
  misc_feature (1)..(147): NCBI GI NO: 119931 NR Description: Ferredoxin I, chloroplast precursor
MASTAISSVIVGTSFLRRQTSPISLRSLPLANTQTLFGLKSGTARGGRVTAMATYKVKFITPEGEQEVECDDDVYVLDAAEEAGIDLPYSCRAGSCSSCAGKVVSGFVDQSDQSFLDDDQIAAGFVLTCAAYPTSDVTIETHREDDIV

SEQ ID NO: 10979 - protein, 97 aa, Triticum aestivum
  peptide (1)..(97): Ceres Seq. ID no. 12623265
  misc_feature (9)..(84): Pfam Name: Pfam Description:  2Fe-2S iron-sulfur cluster binding domain
  misc_feature (1)..(97): NCBI GI NO: 15219837 NR Description: ferrodoxin precursor; protein id: At1g60950
  misc_feature (1)..(97): NCBI GI NO: 15220256 NR Description: ferredoxin precusor isolog; protein id:At1g10960
  misc_feature (1)..(67): NCBI GI NO: 16604416 NR Description: At1g10960/T19D16_12 [Arabidopsis thaliana]
  misc_feature (2)..(97): NCBI GI NO: 81707 NR Description: ferredoxin [2Fe-2S] A, leaf - radish
  misc_feature (2)..(97): NCBI GI NO: 947124 NR Description: ferredoxin component a1
  misc_feature (2)..(97): NCBI GI NO: 119959 NR Description: FERREDOXIN, LEAF L-A
  misc_feature (2)..(97): NCBI GI NO: 119980 NR Description: FERREDOXIN
  misc_feature (1)..(96): NCBI GI NO: 3023743 NR Description: Ferredoxin I, chloroplast precursor
  misc_feature (2)..(96): NCBI GI NO: 364015 NR Description: ferredoxin LFdA
  misc_feature (1)..(96): NCBI GI NO: 119931 NR Description: Ferredoxin I, chloroplast precursor
MATYKVKFITPEGEQEVECDDDVYVLDAAEEAGIDLPYSCRAGSCSSCAGKVVSGFVDQSDQSFLDDDQIAAGFVLTCAAYPTSDVTIETHREDDIV

SEQ ID NO: 10980 - protein, 84 aa, Triticum aestivum
  peptide (1)..(84): Ceres Seq. ID no. 12623266
NPQRTQETFSNPLKKRNGLHSYLKRHRRNILPPPSNISHQPPFPPLSQHSDPLRPQVRNRTWWTRHSHGYIQGQVHHSRRRARG

SEQ ID NO: 10981 - DNA, 665 bp, Triticum aestivum
  misc_feature (1)..(665): Ceres Seq. ID no. 12623585
aaccttgtcttgttcttcctctcactctctgcgccgcggttcgtcttagatcttttcctcccccaagcaaaagcttcttcgatcttcctcgtgtctctaaaaaagcaatggcgagcttgagagaaccgccgaacgagcaagccatcctcaacatctacgagtccatgagatcagagctgagccaaatctactccaacataaccgacctcgagatgcaagtcagcgagcactccctcgtcgtcaacgccatccagcctctcgaccagtcaagaaaatgcttccgcatgatcggaggcgttcttgtcgagagaaccatcaaagaggtgctcccagctgttcaccgcaacaaggaagggctagaagaggtcgtcaggaagctgtacgagacgttggagaagaagaagaaggatatgacggagtttgaaggtaagtataagatcaggctaaggaaacaggacgagtccaaggaagaaggtggtagtaataataaaaaggaaggtaatgctcaaggtgttctcgttggagctgctagtacgagccagtaaacactctttcttctcctatcgttgtgctttgcatctttttttttgctggtgatggtgtttacaatattagtagattggagaaccaaaacgttatctttatattcaacatgagagtcttac

SEQ ID NO: 10982 - protein, 180 aa, Triticum aestivum
  peptide (1)..(180): Ceres Seq. ID no. 12623586
  misc_feature (45)..(152): Pfam Name: Pfam Description:  KE2 family protein
  misc_feature (32)..(180): NCBI GI NO: 15228766 NR Description: prefoldin-like protein; protein id: At3g22480
  misc_feature (43)..(173): NCBI GI NO: 5690431 NR Description: prefoldin subunit 2 [Homo sapiens]
  misc_feature (45)..(173): NCBI GI NO: 12408675 NR Description: prefoldin 2 [Homo sapiens]
  misc_feature (45)..(173): NCBI GI NO: 28189659 NR Description: similar to prefoldin subunit 2 [Bos taurus]
  misc_feature (71)..(173): NCBI GI NO: 7106852 NR Description: HSPC231 [Homo sapiens]
  misc_feature (44)..(173): NCBI GI NO: 24662461 NR Description: CG6302-PA [Drosophila melanogaster]
  misc_feature (37)..(156): NCBI GI NO: 39595088 NR Description: Hypothetical protein CBG03668
PCLVLPLTLCAAVRLRSFPPPSKSFFDLPRVSKKAMASLREPPNEQAILNIYESMRSELSQIYSNITDLEMQVSEHSLVVNAIQPLDQSRKCFRMIGGVLVERTIKEVLPAVHRNKEGLEEVVRKLYETLEKKKKDMTEFEGKYKIRLRKQDESKEEGGSNNKKEGNAQGVLVGAASTSQ

SEQ ID NO: 10983 - protein, 145 aa, Triticum aestivum
  peptide (1)..(145): Ceres Seq. ID no. 12623587
  misc_feature (10)..(117): Pfam Name: Pfam Description:  KE2 family protein
  misc_feature (1)..(145): NCBI GI NO: 15228766 NR Description: prefoldin-like protein; protein id: At3g22480
  misc_feature (8)..(138): NCBI GI NO: 5690431 NR Description: prefoldin subunit 2 [Homo sapiens]
  misc_feature (10)..(138): NCBI GI NO: 12408675 NR Description: prefoldin 2 [Homo sapiens]
  misc_feature (10)..(138): NCBI GI NO: 28189659 NR Description: similar to prefoldin subunit 2 [Bos taurus]
  misc_feature (36)..(138): NCBI GI NO: 7106852 NR Description: HSPC231 [Homo sapiens]
  misc_feature (9)..(138): NCBI GI NO: 24662461 NR Description: CG6302-PA [Drosophila melanogaster]
  misc_feature (2)..(121): NCBI GI NO: 39595088 NR Description: Hypothetical protein CBG03668
MASLREPPNEQAILNIYESMRSELSQIYSNITDLEMQVSEHSLVVNAIQPLDQSRKCFRMIGGVLVERTIKEVLPAVHRNKEGLEEVVRKLYETLEKKKKDMTEFEGKYKIRLRKQDESKEEGGSNNKKEGNAQGVLVGAASTSQ

SEQ ID NO: 10984 - protein, 126 aa, Triticum aestivum
  peptide (1)..(126): Ceres Seq. ID no. 12623588
  misc_feature (1)..(98): Pfam Name: Pfam Description:  KE2 family protein
  misc_feature (1)..(126): NCBI GI NO: 15228766 NR Description: prefoldin-like protein; protein id: At3g22480
  misc_feature (1)..(119): NCBI GI NO: 5690431 NR Description: prefoldin subunit 2 [Homo sapiens]
  misc_feature (1)..(119): NCBI GI NO: 12408675 NR Description: prefoldin 2 [Homo sapiens]
  misc_feature (1)..(119): NCBI GI NO: 28189659 NR Description: similar to prefoldin subunit 2 [Bos taurus]
  misc_feature (17)..(119): NCBI GI NO: 7106852 NR Description: HSPC231 [Homo sapiens]
  misc_feature (1)..(119): NCBI GI NO: 24662461 NR Description: CG6302-PA [Drosophila melanogaster]
  misc_feature (1)..(102): NCBI GI NO: 39595088 NR Description: Hypothetical protein CBG03668
MRSELSQIYSNITDLEMQVSEHSLVVNAIQPLDQSRKCFRMIGGVLVERTIKEVLPAVHRNKEGLEEVVRKLYETLEKKKKDMTEFEGKYKIRLRKQDESKEEGGSNNKKEGNAQGVLVGAASTSQ

SEQ ID NO: 10985 - DNA, 448 bp, Triticum aestivum
  misc_feature (1)..(448): Ceres Seq. ID no. 13661162
  misc_feature (389)..(389): n is a, c, t, g, unknown, or other
  misc_feature (58)..(58): n is a, c, t, g, unknown, or other
aagaaaaccctacattacgtagagcttcgtctctccatcgaatccagcaacgacgacnatgatgatctctcgtcgattagcttccagattccttaaaccctcgtcttcctcatccctaagcatctcccttcaccatctccactcttcttcttccataagaaaccatttgatccacagatcagaacagcttcaagagctgggtctctttagatccttctctgctttcatcaccaatcccaacaccgagaagcttcgatctcagacacgatcaacgaggtacttctcaacaccgagccaagaggtcwatccgaatccagaggaggagccaaagatgaagcaccaggagatcgaaggcccgacggtggagcgcgacgtgtcagctttaggtnacgagacgagaaaagtgtkcgaagggatgatgaagaacatgtacagtctaagtggagcc

SEQ ID NO: 10986 - protein, 130 aa, Triticum aestivum
  peptide (1)..(130): Ceres Seq. ID no. 13661163
  misc_feature (1)..(129): NCBI GI NO: 18399699 NR Description: expressed protein [Arabidopsis thaliana]
  misc_feature (83)..(83): Xaa is any aa, unknown or other
  misc_feature (111)..(111): Xaa is any aa, unknown or other
  misc_feature (117)..(117): Xaa is any aa, unknown or other
MMISRRLASRFLKPSSSSSLSISLHHLHSSSSIRNHLIHRSEQLQELGLFRSFSAFITNPNTEKLRSQTRSTRYFSTPSQEVXPNPEEEPKMKHQEIEGPTVERDVSALGXETRKVXEGMMKNMYSLSGA

SEQ ID NO: 10987 - protein, 129 aa, Triticum aestivum
  peptide (1)..(129): Ceres Seq. ID no. 13661164
  misc_feature (1)..(128): NCBI GI NO: 18399699 NR Description: expressed protein [Arabidopsis thaliana]
  misc_feature (82)..(82): Xaa is any aa, unknown or other
  misc_feature (110)..(110): Xaa is any aa, unknown or other
  misc_feature (116)..(116): Xaa is any aa, unknown or other
MISRRLASRFLKPSSSSSLSISLHHLHSSSSIRNHLIHRSEQLQELGLFRSFSAFITNPNTEKLRSQTRSTRYFSTPSQEVXPNPEEEPKMKHQEIEGPTVERDVSALGXETRKVXEGMMKNMYSLSGA

SEQ ID NO: 10988 - DNA, 611 bp, Triticum aestivum
  misc_feature (1)..(611): Ceres Seq. ID no. 13661557
aggtcttttagatcgatcggatctgaatcatggacgaggaggcagcaaaacctagagacaccaccataaaccagcaacaacaatactattacggaacgtttcaaggcgttgcaaattatcctcctcccgctccgccaccgcttccgcatcaacctattgtcacgagtcccttgcttcctcctgtacatggttatcagactctccaagaatatacagtggttgaggtgagaccggtgagagagcatgacgttccttgctgtggctttggcatgggctggttcttgtttattatgggcttcttgttcggtgggatcccttggtatctcggtgctgttattattcttttcacctcagttgatcatcgcgagaaggctggttacgttgcttgttctgtcgcatccgttgtctatttgattgccgtcatgctcgggatggctgggaatattaacatcatctggtgacagatactcccttacatatcacatttcaataacgtatatgcatcatcataaccatagtgatttacaaaagcaaatgttgttattctgtgttgtatttatttgtttacaacaatgatcaatatgttcttgattcctttgatggcatcttcc

SEQ ID NO: 10989 - protein, 143 aa, Triticum aestivum
  peptide (1)..(143): Ceres Seq. ID no. 13661558
  misc_feature (1)..(143): NCBI GI NO: 21593837 NR Description: 60S ribosomal protein L18A, putative
  misc_feature (1)..(143): NCBI GI NO: 18397305 NR Description: expressed protein [Arabidopsis thaliana]
  misc_feature (1)..(129): NCBI GI NO: 25518134 NR Description: probable 60S ribosomal protein L18A - Arabidopsisthaliana
  misc_feature (21)..(143): NCBI GI NO: 21554011 NR Description: unknown [Arabidopsis thaliana]
  misc_feature (17)..(136): NCBI GI NO: 18394436 NR Description: expressed protein [Arabidopsis thaliana]
  misc_feature (21)..(143): NCBI GI NO: 18404524 NR Description: expressed protein [Arabidopsis thaliana]
  misc_feature (12)..(134): NCBI GI NO: 18400450 NR Description: expressed protein [Arabidopsis thaliana]
  misc_feature (12)..(134): NCBI GI NO: 21554784 NR Description: unknown [Arabidopsis thaliana]
MDEEAAKPRDTTINQQQQYYYGTFQGVANYPPPAPPPLPHQPIVTSPLLPPVHGYQTLQEYTVVEVRPVREHDVPCCGFGMGWFLFIMGFLFGGIPWYLGAVIILFTSVDHREKAGYVACSVASVVYLIAVMLGMAGNINIIW

SEQ ID NO: 10990 - DNA, 907 bp, Triticum aestivum
  misc_feature (1)..(907): Ceres Seq. ID no. 13598102
aacctctctgcttcacttaatctgtgtgttgcctcttgaaaaaacccatcataaacccttctttacctttgtgctcatcttccttcctcgttatcaacagtctcaatcgaaaccgattcattgagaatgacggagatggtaacgcctggagacgtgctcggtaatgcggctgagttaaaacccgggaaaggagcttacgtcaacgacaacaccatctacgcttccctcacaggatctcgccggattgtttctcctcttcccgaatctcttgaccagagagctactgtggaagttactggtcacaaggcgcatggacttatccccgagcctggctctcttgtcttagctagggttactaaagttatggctcgtatggcttctgttgatatcttgtgtgttggttcaaaggccgttcgtgaaaaatttgctggcgtaatcaggcaacaagatgttagagaaacagagattgacaaagttgagattcatcagtctttccgtcctggtgacattgttagagctgtggttctgtctcttggtgactcacgggcttactatctgtcaactgctaagaatgagcttggtgtggtctctgctgagagcgctgcaggtgaaacaatggttccgattagttggacagagatgcaatgtcctttgtctggccaaaccgagcagaggaaagttgccaaggtggcctaatttgaatgacactacagataatctggcttctatcatagatgtgtgtctctacaacaagaaaagacatgtttgattattacagttttgagctcttttgacatgctttaacttaaaagaccatgttttgtcaagtgcaaaagcaacttgcctttattcctaaactcagaagacatttcaatgaaagggttaagagagaatgaatttgaatgtg

SEQ ID NO: 10991 - protein, 189 aa, Triticum aestivum
  peptide (1)..(189): Ceres Seq. ID no. 13598103
  misc_feature (2)..(188): NCBI GI NO: 18421805 NR Description: expressed protein [Arabidopsis thaliana]
  misc_feature (2)..(136): NCBI GI NO: 9758066 NR Description: gene_id:K15E6
  misc_feature (7)..(188): NCBI GI NO: 7705612 NR Description: exosomal core protein CSL4
  misc_feature (7)..(188): NCBI GI NO: 22267446 NR Description: RIKEN cDNA 2610104C07 [Mus musculus]
  misc_feature (4)..(187): NCBI GI NO: 7491999 NR Description: hypothetical protein SPCC965
  misc_feature (4)..(187): NCBI GI NO: 19076010 NR Description: hypothetical protein [Schizosaccharomyces pombe]
  misc_feature (39)..(187): NCBI GI NO: 38104559 NR Description: hypothetical protein MG08628.4
  misc_feature (93)..(187): NCBI GI NO: 6324097 NR Description: Represses the replication of double-strand ed RNAviruses
  misc_feature (40)..(94): NCBI GI NO: 6324097 NR Description: Represses the replication of double-strand ed RNAviruses
  misc_feature (2)..(188): NCBI GI NO: 24583644 NR Description: CG6249-PA [Drosophila melanogaster]
MTEMVTPGDVLGNAAELKPGKGAYVNDNTIYASLTGSRRIVSPLPESLDQRATVEVTGHKAHGLIPEPGSLVLARVTKVMARMASVDILCVGSKAVREKFAGVIRQQDVRETEIDKVEIHQSFRPGDIVRAVVLSLGDSRAYYLSTAKNELGVVSAESAAGETMVPISWTEMQCPLSGQTEQRKVAKVA

SEQ ID NO: 10992 - protein, 186 aa, Triticum aestivum
  peptide (1)..(186): Ceres Seq. ID no. 13598104
  misc_feature (1)..(185): NCBI GI NO: 18421805 NR Description: expressed protein [Arabidopsis thaliana]
  misc_feature (1)..(133): NCBI GI NO: 9758066 NR Description: gene_id:K15E6
  misc_feature (4)..(185): NCBI GI NO: 7705612 NR Description: exosomal core protein CSL4
  misc_feature (4)..(185): NCBI GI NO: 22267446 NR Description: RIKEN cDNA 2610104C07 [Mus musculus]
  misc_feature (1)..(184): NCBI GI NO: 7491999 NR Description: hypothetical protein SPCC965
  misc_feature (1)..(184): NCBI GI NO: 19076010 NR Description: hypothetical protein [Schizosaccharomyces pombe]
  misc_feature (36)..(184): NCBI GI NO: 38104559 NR Description: hypothetical protein MG08628.4
  misc_feature (90)..(184): NCBI GI NO: 6324097 NR Description: Represses the replication of double-strand ed RNAviruses
  misc_feature (37)..(91): NCBI GI NO: 6324097 NR Description: Represses the replication of double-strand ed RNAviruses
  misc_feature (1)..(185): NCBI GI NO: 24583644 NR Description: CG6249-PA [Drosophila melanogaster]
MVTPGDVLGNAAELKPGKGAYVNDNTIYASLTGSRRIVSPLPESLDQRATVEVTGHKAHGLIPEPGSLVLARVTKVMARMASVDILCVGSKAVREKFAGVIRQQDVRETEIDKVEIHQSFRPGDIVRAVVLSLGDSRAYYLSTAKNELGVVSAESAAGETMVPISWTEMQCPLSGQTEQRKVAKVA

SEQ ID NO: 10993 - protein, 110 aa, Triticum aestivum
  peptide (1)..(110): Ceres Seq. ID no. 13598105
  misc_feature (1)..(109): NCBI GI NO: 18421805 NR Description: expressed protein [Arabidopsis thaliana]
  misc_feature (1)..(57): NCBI GI NO: 9758066 NR Description: gene_id:K15E6
  misc_feature (1)..(109): NCBI GI NO: 7705612 NR Description: exosomal core protein CSL4
  misc_feature (1)..(109): NCBI GI NO: 22267446 NR Description: RIKEN cDNA 2610104C07 [Mus musculus]
  misc_feature (1)..(108): NCBI GI NO: 7491999 NR Description: hypothetical protein SPCC965
  misc_feature (1)..(108): NCBI GI NO: 19076010 NR Description: hypothetical protein [Schizosaccharomyces pombe]
  misc_feature (1)..(108): NCBI GI NO: 38104559 NR Description: hypothetical protein MG08628.4
  misc_feature (14)..(108): NCBI GI NO: 6324097 NR Description: Represses the replication of double-strand ed RNAviruses
  misc_feature (1)..(15): NCBI GI NO: 6324097 NR Description: Represses the replication of double-strand ed RNAviruses
  misc_feature (1)..(109): NCBI GI NO: 24583644 NR Description: CG6249-PA [Drosophila melanogaster]
MARMASVDILCVGSKAVREKFAGVIRQQDVRETEIDKVEIHQSFRPGDIVRAVVLSLGDSRAYYLSTAKNELGVVSAESAAGETMVPISWTEMQCPLSGQTEQRKVAKVA

SEQ ID NO: 10994 - DNA, 730 bp, Triticum aestivum
  misc_feature (1)..(730): Ceres Seq. ID no. 13664090
ataccgtctcctctcaacgaaagcttacaaaaaattcaccctaaatactttagtttataaataaagctcccaaaatctaagagaggagaagacaaagacttacaagaaaaaaggcatcataatggccaaattcttcatcgtgttcccttgcctctgcccctatgttttcaccaccctccttcacttggtggccgctgatgccgacgactttgacccgtttcaacatcacgggcttccgtctactgcgacacaatgccgcgtccaattcgttacccgcctcagtaaattcctcgaaggggcaaaggtaaagcttgagtgcaagagtcgtgtgaaccagacagtgacactgaccaaagaagctgtgactgacaaagacggaaaataccagatggaagttatgggagaccacgaagaggaactgtgcgagatcatcctcgtccaatcaccggacgcagagtgtggcgaagtgaacaacgaagagttcctaagaaacgcagcaaggatcagtctcacggctaacgatggcattgtctctaatgagattcgaaccattaacccacttgggttcatgaggaagactcctctcgccgattgtcctcaagttttcaaggagcttggaatcgtccctgacgtcatcttctaagcttaataccgatatacatcgatctctgaacaattttaatttttgttgtaactctttacatttcgtatataacaacatttatatttg

SEQ ID NO: 10995 - protein, 173 aa, Triticum aestivum
  peptide (1)..(173): Ceres Seq. ID no. 13664091
  misc_feature (45)..(160): Pfam Name: Pfam Description:  Pollen proteins Ole e I family
  misc_feature (1)..(173): NCBI GI NO: 15218844 NR Description: expressed protein [Arabidopsis thaliana]
  misc_feature (1)..(173): NCBI GI NO: 18422603 NR Description: Ole e I (main olive allergen)-related protein
  misc_feature (1)..(173): NCBI GI NO: 21593871 NR Description: Ole e I (main olive allergen)-like protein
  misc_feature (17)..(173): NCBI GI NO: 9758935 NR Description: Ole e I (main olive allergen)-like protein
  misc_feature (2)..(173): NCBI GI NO: 18415132 NR Description: Ole e I (main olive allergen)-related protein
  misc_feature (1)..(170): NCBI GI NO: 7486300 NR Description: hypothetical protein F28J12
  misc_feature (59)..(173): NCBI GI NO: 28393099 NR Description: unknown protein [Arabidopsis thaliana]
  misc_feature (1)..(170): NCBI GI NO: 28380096 NR Description: Olee1-like protein precursor
  misc_feature (33)..(167): NCBI GI NO: 22074346 NR Description: Che a 1 allergen precursor [Chenopodium album]
  misc_feature (1)..(169): NCBI GI NO: 125887 NR Description: Anther specific LAT52 protein precursor
MAKFFIVFPCLCPYVFTTLLHLVAADADDFDPFQHHGLPSTATQCRVQFVTRLSKFLEGAKVKLECKSRVNQTVTLTKEAVTDKDGKYQMEVMGDHEEELCEIILVQSPDAECGEVNNEEFLRNAARISLTANDGIVSNEIRTINPLGFMRKTPLADCPQVFKELGIVPDVIF

SEQ ID NO: 10996 - DNA, 1310 bp, Triticum aestivum
  misc_feature (1)..(1310): Ceres Seq. ID no. 13661195
asaacatcctaatcgaaaacatcaacgaggggatgcttcattgcgcgaaaagcttttgggacatagggacgaggcgttcaaaaataatattcagtcaggtccgattattcctatcccgagctcacctatccaggtgaacacagaagtattccggcaacttcatggttcagtcagccccggctcagattactactatgcgtcagcaagatctctatcgaggagcccagtgcctacaggtacatggttggggaataatcgccaggcaacaaaagttcctccacaaatgaacgacgaaggtgcatctttatttggcgagtttgttccagcacagtctgcaccagctgctattacaaaagattccctctcagtggtaccatggatttctgttgtcttgggcatgtgtgtgttgcatattttggttggaaccgcgcatagggacgcttccaatgaaattatcatccctgtcggcagaaagctcttagttgtagcggatgaccatgcaggttcatctctgaaccatggcagtggaagtggaattggaagctttcttggttgggccatggcagttatctatatgggcggacgacttccccagatcttcttaaatatgcaaagaggccatgccgaggggctcagtccgctaatgtttacctttgctttagtggggaatacgacatatgttgggagtatccttgtgaatagtttggactgggcacgacttagaccaaatctgccgtggcttgtagatgctggaggatgcgttttgcttgattctttcattattcttcagttcctttattttcattaccggaagcaaagtgggcgtgatgaacttgacaatttggataaagcctaatgcacagcaaacaaagtatttcatttcttttcttcaatggaaaagacatggagctaccacctgcgtggggattgtgcatttttcttggaaagctgcgcaatagccactccccgtgcagaactgcagagacaaggttcacacgcttaatttgcggtgaatgagctgcggcgccgcatggttaagggatgaaatctgttaagggatagatgcagcagtctgccgtgttagaataccaaaaatgtatgtgtcatgtactcagggtcatgctatatctgtacatcgtatggtgatttgcagttcttcatgctatctctatttttgtagtggtgtcgtcttgtgtaggccattgttgtcggatgctcagattcaaatacgcgtcgaggccccatcctttgactctaaatatggttatgcattacaaaaaaaaaaaaaaaaaagcttatcgataccgtcg

SEQ ID NO: 10997 - protein, 284 aa, Triticum aestivum
  peptide (1)..(284): Ceres Seq. ID no. 15220083
  misc_feature (60)..(277): NCBI GI NO: 30688510 NR Description: expressed protein [Arabidopsis thaliana]
  misc_feature (110)..(271): NCBI GI NO: 15235292 NR Description: hypothetical protein [Arabidopsis thaliana]
  misc_feature (153)..(269): NCBI GI NO: 15028159 NR Description: unknown protein [Arabidopsis thaliana]
  misc_feature (153)..(269): NCBI GI NO: 25407768 NR Description: hypothetical protein AT4g36850
  misc_feature (179)..(272): NCBI GI NO: 6324480 NR Description: Hypothetical ORF; Yol092wp
  misc_feature (67)..(209): NCBI GI NO: 7487622 NR Description: hypothetical protein At2g41050
  misc_feature (117)..(281): NCBI GI NO: 8923301 NR Description: hypothetical protein FLJ20320 [Homo sapiens]
  misc_feature (179)..(276): NCBI GI NO: 39586914 NR Description: Hypothetical protein CBG07028
  misc_feature (179)..(273): NCBI GI NO: 32564589 NR Description: Cystinosin/ERS1p repeat (35.0 kD) (2A514C)
  misc_feature (117)..(281): NCBI GI NO: 34526924 NR Description: unnamed protein product [Homo sapiens]
  misc_feature (1)..(1): Xaa is any aa, unknown or other
XHPNRKHQRGDASLREKLLGHRDEAFKNNIQSGPIIPIPSSPIQVNTEVFRQLHGSVSPGSDYYYASARSLSRSPVPTGTWLGNNRQATKVPPQMNDEGASLFGEFVPAQSAPAAITKDSLSVVPWISVVLGMCVLHILVGTAHRDASNEIIIPVGRKLLVVADDHAGSSLNHGSGSGIGSFLGWAMAVIYMGGRLPQIFLNMQRGHAEGLSPLMFTFALVGNTTYVGSILVNSLDWARLRPNLPWLVDAGGCVLLDSFIILQFLYFHYRKQSGRDELDNLDKA

SEQ ID NO: 10998 - protein, 190 aa, Triticum aestivum
  peptide (1)..(190): Ceres Seq. ID no. 15220084
  misc_feature (1)..(183): NCBI GI NO: 30688510 NR Description: expressed protein [Arabidopsis thaliana]
  misc_feature (16)..(177): NCBI GI NO: 15235292 NR Description: hypothetical protein [Arabidopsis thaliana]
  misc_feature (59)..(175): NCBI GI NO: 15028159 NR Description: unknown protein [Arabidopsis thaliana]
  misc_feature (59)..(175): NCBI GI NO: 25407768 NR Description: hypothetical protein AT4g36850
  misc_feature (85)..(178): NCBI GI NO: 6324480 NR Description: Hypothetical ORF; Yol092wp
  misc_feature (1)..(115): NCBI GI NO: 7487622 NR Description: hypothetical protein At2g41050
  misc_feature (23)..(187): NCBI GI NO: 8923301 NR Description: hypothetical protein FLJ20320 [Homo sapiens]
  misc_feature (85)..(182): NCBI GI NO: 39586914 NR Description: Hypothetical protein CBG07028
  misc_feature (85)..(179): NCBI GI NO: 32564589 NR Description: Cystinosin/ERS1p repeat (35.0 kD) (2A514C)
  misc_feature (23)..(187): NCBI GI NO: 34526924 NR Description: unnamed protein product [Homo sapiens]
MNDEGASLFGEFVPAQSAPAAITKDSLSVVPWISVVLGMCVLHILVGTAHRDASNEIIIPVGRKLLVVADDHAGSSLNHGSGSGIGSFLGWAMAVIYMGGRLPQIFLNMQRGHAEGLSPLMFTFALVGNTTYVGSILVNSLDWARLRPNLPWLVDAGGCVLLDSFIILQFLYFHYRKQSGRDELDNLDKA

SEQ ID NO: 10999 - protein, 152 aa, Triticum aestivum
  peptide (1)..(152): Ceres Seq. ID no. 15220085
  misc_feature (1)..(145): NCBI GI NO: 30688510 NR Description: expressed protein [Arabidopsis thaliana]
  misc_feature (1)..(139): NCBI GI NO: 15235292 NR Description: hypothetical protein [Arabidopsis thaliana]
  misc_feature (21)..(137): NCBI GI NO: 15028159 NR Description: unknown protein [Arabidopsis thaliana]
  misc_feature (21)..(137): NCBI GI NO: 25407768 NR Description: hypothetical protein AT4g36850
  misc_feature (47)..(140): NCBI GI NO: 6324480 NR Description: Hypothetical ORF; Yol092wp
  misc_feature (1)..(77): NCBI GI NO: 7487622 NR Description: hypothetical protein At2g41050
  misc_feature (1)..(149): NCBI GI NO: 8923301 NR Description: hypothetical protein FLJ20320 [Homo sapiens]
  misc_feature (47)..(144): NCBI GI NO: 39586914 NR Description: Hypothetical protein CBG07028
  misc_feature (47)..(141): NCBI GI NO: 32564589 NR Description: Cystinosin/ERS1p repeat (35.0 kD) (2A514C)
  misc_feature (1)..(149): NCBI GI NO: 34526924 NR Description: unnamed protein product [Homo sapiens]
MCVLHILVGTAHRDASNEIIIPVGRKLLVVADDHAGSSLNHGSGSGIGSFLGWAMAVIYMGGRLPQIFLNMQRGHAEGLSPLMFTFALVGNTTYVGSILVNSLDWARLRPNLPWLVDAGGCVLLDSFIILQFLYFHYRKQSGRDELDNLDKA

SEQ ID NO: 11000 - DNA, 1328 bp, Triticum aestivum
  misc_feature (1)..(1328): Ceres Seq. ID no. 15169505
accatcacaaacagatgatgaagctgctgctctcccagcatcttcccaatcaccagatggacctatgagagccagcacaagcaactgttggctgttgctggctaccaccaccaccgaactctcaagccaacctccatcaccatttggctttgccctgtaattccaagagcgccaaaccaagatctcagctgccaacaccaccaaagctgatccatggacctgtcggcgaacccggacagccctctgtctggagggggcaacggtggcggctcctcgagcagcatcacctcctcgctttccgtggcctcagggggcactccgcagtcgccgagcaggtacgaggcgcagaagcggcgcgactggaacacgttcgggcagtacctgcggaaccaccggccgccgctgagcctggctcagtgcagcggggcgcacgtcctggagttcctgcgctaccttgaccagttcggcaagaccaaggtgcacgcctcggcctgccccttcttcggccacccgagcccgccggcaccctgcccgtgcccgctccgtcaggcctggggcagcctggacgccctcgtcggccgcctccgcgccgcctacgaggagaacggcggcagccccgagtccaaccccttcgctgcgcgcgccgtccgcctctaccttcgcgaggtccgcgagcaccaggcccgcgcccgcggcgtcagctacgagaagaagaagcgcaagaagccgcagcagctggccggcgacagcagcagcggcagcttccatggcaaccagcaccagccccctcccggcccgcctcccgccgccggttgctgagctgatcgaggcgacgacgacgacccgcccccagccggtggtcgatcgaacgatctcctatttggccggtatgccagatatattttatgtgcgctcgcgtatgcatgcatgcgcacgcatggttatggctttgcacttctcatttgtgcgtgtgtgtatcagctagtactgtcagttgtcgtcgtcgaacactgctgcattgctcgtgtttcgacctagttggctttgattagcttgggttaagttctagtcgagtttatcactagtttaatttccttccatgtaggatcgagtcaagtaaaatgatttgctgtagtgtgaagtgaagtgagggggacatgcatgcagggagagagagagataaatgtatggagatctctcttgctacagctagctgcatgtgtgtgtgtgtgtgtgtggttcgtgcaagattgtaagtctgtagtgcagtgtccgttctgcggtctgcgcatcatgtgtcaactcgatctagcatcgcttattgtttc

SEQ ID NO: 11001 - protein, 201 aa, Triticum aestivum
  peptide (1)..(201): Ceres Seq. ID no. 15169506
  misc_feature (18)..(155): Pfam Name: DUF640 Pfam Description: Protein of unknown function
  misc_feature (1)..(201): NCBI GI NO: 38344650 NR Description: OSJNBb0072M01.12
  misc_feature (4)..(199): NCBI GI NO: 37535384 NR Description: hypothetical protein
  misc_feature (1)..(194): NCBI GI NO: 18402578 NR Description: expressed protein [Arabidopsis thaliana]
  misc_feature (16)..(183): NCBI GI NO: 34907938 NR Description: B1088C09.17
  misc_feature (36)..(172): NCBI GI NO: 18390725 NR Description: expressed protein [Arabidopsis thaliana]
  misc_feature (35)..(194): NCBI GI NO: 15241821 NR Description: expressed protein [Arabidopsis thaliana]
  misc_feature (31)..(186): NCBI GI NO: 15237680 NR Description: hypothetical protein [Arabidopsis thaliana]
  misc_feature (93)..(201): NCBI GI NO: 34909440 NR Description: OSJNBa0014K08.14
  misc_feature (99)..(195): NCBI GI NO: 38637158 NR Description: hypothetical protein
  misc_feature (113)..(149): NCBI GI NO: 37536084 NR Description: hypothetical protein
MDLSANPDSPLSGGGNGGGSSSSITSSLSVASGGTPQSPSRYEAQKRRDWNTFGQYLRNHRPPLSLAQCSGAHVLEFLRYLDQFGKTKVHASACPFFGHPSPPAPCPCPLRQAWGSLDALVGRLRAAYEENGGSPESNPFAARAVRLYLREVREHQARARGVSYEKKKRKKPQQLAGDSSSGSFHGNQHQPPPGPPPAAGC

SEQ ID NO: 11002 - DNA, 984 bp, Triticum aestivum
  misc_feature (1)..(984): Ceres Seq. ID no. 12623915
aatcaaaaaaaaaactttcaaatccctagaaagatgtcgacggaggaagaaaccaaggtggttgtcgagtcaggagacgccgaagcgacggtgacggagaagaagcctgctgcgaaaggcggcgctaaagctaagaagacgccggcgaagaagaagcctgctgctgctccgaggaagagaaccacttcgtctcaccctccttacgaagagatgatcaaagacgcgatcgtgacgctgaaggagagaaccggatctagccaatacgcgattcagaagttcatcgaggagaagcagaagtcgcttcctccaactttcaggaagcttctcctcgtcaatctcaggagactcgtcgcttccgggaagctagtcaaagtcaaagcctctttcaagattccgtctgcggctaaaccggcggctacgactaaaccggttaacaagaaaccagctgctgctgttactaaaccgaagggtaaagctcctgctaaggccaaaccggctgctaaaggagccaagaaacctgctgctgctgctaagcctaaggcaaagacaacagcaacaactaaagccgctgcgaagcccaaacctaagacgaagagtgtagctgctgtttcgaagaccaaggcggttgctgcgaagcctaaggcgaaggagagacctgctaaagcgtcgaggacttcgactaggacgtctccagggaagaaggcagcagctccggctaagaaagctgctgctgctgcgactaagaaggctccggctaagagtgtgaaggttaaatctccagcgaagagggcttcgacgaggaagaagtgattggttttagcttctcttagggttaaagtctttgtataattgaatcgtctatgaagggggcttgttttttcttcttccaaagtttatctttgtcttggtttcttctcgaaacccttttatcttgtaatttttggtttgtttgaaaattcaatagctatatgtgatggggtttgc

SEQ ID NO: 11003 - protein, 269 aa, Triticum aestivum
  peptide (1)..(269): Ceres Seq. ID no. 12623916
  misc_feature (64)..(133): Pfam Name: Pfam Description:  linker histone H1 and H5 family
  misc_feature (12)..(268): NCBI GI NO: 15224536 NR Description: histone H1; protein id: At2g30620
  misc_feature (15)..(269): NCBI GI NO: 15222199 NR Description: histone H1, putative; protein id: At1g06760
  misc_feature (38)..(269): NCBI GI NO: 16314 NR Description: histone H1-1 [Arabidopsis thaliana]
  misc_feature (12)..(268): NCBI GI NO: 585241 NR Description: HISTONE H1
  misc_feature (12)..(268): NCBI GI NO: 6681423 NR Description: histone H1 [Nicotiana tabacum]
  misc_feature (12)..(268): NCBI GI NO: 1084419 NR Description: histone H1 - common tobacco
  misc_feature (12)..(269): NCBI GI NO: 29469895 NR Description: histone H1 subtype 5 [Pisum sativum]
  misc_feature (12)..(269): NCBI GI NO: 28301619 NR Description: histone H1 [Pisum sativum]
  misc_feature (14)..(269): NCBI GI NO: 13540401 NR Description: histone H1 [Lens culinaris]
  misc_feature (12)..(268): NCBI GI NO: 121953 NR Description: HISTONE H1
NQKKNFQIPRKMSTEEETKVVVESGDAEATVTEKKPAAKGGAKAKKTPAKKKPAAAPRKRTTSSHPPYEEMIKDAIVTLKERTGSSQYAIQKFIEEKQKSLPPTFRKLLLVNLRRLVASGKLVKVKASFKIPSAAKPAATTKPVNKKPAAAVTKPKGKAPAKAKPAAKGAKKPAAAAKPKAKTTATTKAAAKPKPKTKSVAAVSKTKAVAAKPKAKERPAKASRTSTRTSPGKKAAAPAKKAAAAATKKAPAKSVKVKSPAKRASTRKK

SEQ ID NO: 11004 - protein, 258 aa, Triticum aestivum
  peptide (1)..(258): Ceres Seq. ID no. 12623917
  misc_feature (53)..(122): Pfam Name: Pfam Description:  linker histone H1 and H5 family
  misc_feature (1)..(257): NCBI GI NO: 15224536 NR Description: histone H1; protein id: At2g30620
  misc_feature (4)..(258): NCBI GI NO: 15222199 NR Description: histone H1, putative; protein id: At1g06760
  misc_feature (27)..(258): NCBI GI NO: 16314 NR Description: histone H1-1 [Arabidopsis thaliana]
  misc_feature (1)..(257): NCBI GI NO: 585241 NR Description: HISTONE H1
  misc_feature (1)..(257): NCBI GI NO: 6681423 NR Description: histone H1 [Nicotiana tabacum]
  misc_feature (1)..(257): NCBI GI NO: 1084419 NR Description: histone H1 - common tobacco
  misc_feature (1)..(258): NCBI GI NO: 29469895 NR Description: histone H1 subtype 5 [Pisum sativum]
  misc_feature (1)..(258): NCBI GI NO: 28301619 NR Description: histone H1 [Pisum sativum]
  misc_feature (3)..(258): NCBI GI NO: 13540401 NR Description: histone H1 [Lens culinaris]
  misc_feature (1)..(257): NCBI GI NO: 121953 NR Description: HISTONE H1
MSTEEETKVVVESGDAEATVTEKKPAAKGGAKAKKTPAKKKPAAAPRKRTTSSHPPYEEMIKDAIVTLKERTGSSQYAIQKFIEEKQKSLPPTFRKLLLVNLRRLVASGKLVKVKASFKIPSAAKPAATTKPVNKKPAAAVTKPKGKAPAKAKPAAKGAKKPAAAAKPKAKTTATTKAAAKPKPKTKSVAAVSKTKAVAAKPKAKERPAKASRTSTRTSPGKKAAAPAKKAAAAATKKAPAKSVKVKSPAKRASTRKK

SEQ ID NO: 11005 - protein, 199 aa, Triticum aestivum
  peptide (1)..(199): Ceres Seq. ID no. 12623918
  misc_feature (1)..(63): Pfam Name: Pfam Description:  linker histone H1 and H5 family
  misc_feature (1)..(198): NCBI GI NO: 15224536 NR Description: histone H1; protein id: At2g30620
  misc_feature (1)..(199): NCBI GI NO: 15222199 NR Description: histone H1, putative; protein id: At1g06760
  misc_feature (1)..(199): NCBI GI NO: 16314 NR Description: histone H1-1 [Arabidopsis thaliana]
  misc_feature (1)..(198): NCBI GI NO: 585241 NR Description: HISTONE H1
  misc_feature (1)..(198): NCBI GI NO: 6681423 NR Description: histone H1 [Nicotiana tabacum]
  misc_feature (1)..(198): NCBI GI NO: 1084419 NR Description: histone H1 - common tobacco
  misc_feature (1)..(199): NCBI GI NO: 29469895 NR Description: histone H1 subtype 5 [Pisum sativum]
  misc_feature (1)..(199): NCBI GI NO: 28301619 NR Description: histone H1 [Pisum sativum]
  misc_feature (1)..(199): NCBI GI NO: 13540401 NR Description: histone H1 [Lens culinaris]
  misc_feature (1)..(198): NCBI GI NO: 121953 NR Description: HISTONE H1
MIKDAIVTLKERTGSSQYAIQKFIEEKQKSLPPTFRKLLLVNLRRLVASGKLVKVKASFKIPSAAKPAATTKPVNKKPAAAVTKPKGKAPAKAKPAAKGAKKPAAAAKPKAKTTATTKAAAKPKPKTKSVAAVSKTKAVAAKPKAKERPAKASRTSTRTSPGKKAAAPAKKAAAAATKKAPAKSVKVKSPAKRASTRKK

SEQ ID NO: 11006 - DNA, 1192 bp, Triticum aestivum
  misc_feature (1)..(1192): Ceres Seq. ID no. 15225038
cttcgctttccctctggccgccctctcccccgcggaagaaacccaaccctagcctccgccgtgcgtctccggcgacccttcagcagcaccgccgggcggcctcgcgggctctcctggagcggttccgctgcaaatctgaagcgcgagcgttgaggaggaggaggtgttggtcggcgatttactgatttggggggcggaggaggatggggtcgtcgtcgaaggtggtgcggccggaggaggtgctggagtcgctgaagaacgacggcaccgtcgacgcgctccgcatgaagatcatggcccagctcaaggccgacgaggacatgaagaaaaatactatgatgatggtggaacaaagcaaagttctgaagactcctggagctgagaaaaagaccaagagggagctgtttgatgctcttagacaagaattggaaactccggttcttgagaaagtctcaaaggcagtttgggagctgatactcgacaatggtggactagggaaagagatcaccgagacagttgagaaagtcttctgccggctcagcggaattgatgtgatgccacctccagcttcaacatccggtgctcctcaagagaaacagacaaacatggctgtagaggaggatcagaaggatatggaaatggatgcctctgaaccatcgtcttcctcaaggaagaggcctttcagtgacatcagtgtgaaaggagcaggtgctataccaaacggtggcgctacataccagcatgacgatcatgaggacgggaactaggagatctgggcgtgtcgtggacaagcattcgggtgatcctggggagagcgtgtgctcaattgcatcagtggaaaaccttatgcgtcggggatcaatcagtgctactgcggcgctgtctcctgcacattgcatgggaggaggcaccaaggctggtgcgaataagggactagatggactcatgctcaaggcgcacactggatgatctctccctcctgcgtgaggatgtcattctgtaataggatagaccttacttagatcccttgctgcgcgctggatgtgttgccgaaccaattgctcttagtagttgtagtttgcatatagtctggcctgctactttggtgaggctcgagtgctaccattatatttcggtttgctgttctccgttttatgcaataaaatggagagggggaaaccccttttgttac

SEQ ID NO: 11007 - protein, 187 aa, Triticum aestivum
  peptide (1)..(187): Ceres Seq. ID no. 15225039
  misc_feature (3)..(164): NCBI GI NO: 15223534 NR Description: hypothetical protein [Arabidopsis thaliana]
  misc_feature (1)..(185): NCBI GI NO: 15222011 NR Description: hypothetical protein [Arabidopsis thaliana]
  misc_feature (25)..(185): NCBI GI NO: 9502392 NR Description: T12C24.7 [Arabidopsis thaliana]
  misc_feature (5)..(35): NCBI GI NO: 9502392 NR Description: T12C24.7 [Arabidopsis thaliana]
MGSSSKVVRPEEVLESLKNDGTVDALRMKIMAQLKADEDMKKNTMMMVEQSKVLKTPGAEKKTKRELFDALRQELETPVLEKVSKAVWELILDNGGLGKEITETVEKVFCRLSGIDVMPPPASTSGAPQEKQTNMAVEEDQKDMEMDASEPSSSSRKRPFSDISVKGAGAIPNGGATYQHDDHEDGN

SEQ ID NO: 11008 - protein, 160 aa, Triticum aestivum
  peptide (1)..(160): Ceres Seq. ID no. 15225040
  misc_feature (1)..(137): NCBI GI NO: 15223534 NR Description: hypothetical protein [Arabidopsis thaliana]
  misc_feature (1)..(158): NCBI GI NO: 15222011 NR Description: hypothetical protein [Arabidopsis thaliana]
  misc_feature (1)..(158): NCBI GI NO: 9502392 NR Description: T12C24.7 [Arabidopsis thaliana]
MKIMAQLKADEDMKKNTMMMVEQSKVLKTPGAEKKTKRELFDALRQELETPVLEKVSKAVWELILDNGGLGKEITETVEKVFCRLSGIDVMPPPASTSGAPQEKQTNMAVEEDQKDMEMDASEPSSSSRKRPFSDISVKGAGAIPNGGATYQHDDHEDGN

SEQ ID NO: 11009 - protein, 157 aa, Triticum aestivum
  peptide (1)..(157): Ceres Seq. ID no. 15225041
  misc_feature (1)..(134): NCBI GI NO: 15223534 NR Description: hypothetical protein [Arabidopsis thaliana]
  misc_feature (1)..(155): NCBI GI NO: 15222011 NR Description: hypothetical protein [Arabidopsis thaliana]
  misc_feature (1)..(155): NCBI GI NO: 9502392 NR Description: T12C24.7 [Arabidopsis thaliana]
MAQLKADEDMKKNTMMMVEQSKVLKTPGAEKKTKRELFDALRQELETPVLEKVSKAVWELILDNGGLGKEITETVEKVFCRLSGIDVMPPPASTSGAPQEKQTNMAVEEDQKDMEMDASEPSSSSRKRPFSDISVKGAGAIPNGGATYQHDDHEDGN

SEQ ID NO: 11010 - DNA, 765 bp, Triticum aestivum
  misc_feature (1)..(765): Ceres Seq. ID no. 13661569
caacgccacatacgtgacttgactcaagttgagcacactttgtgatggaggcatggagccaaccagatcaccactagttttgctcgtggcgcaagccgtactcgctgcggcgatgctgcaacaaccatcagaagggagggtgcaggcagtggcgccatcagcgccacatctcgccggaggcaaagaagctgaagtagcagccgctacctcctcgccggcttcaccattcaccggcgacacgccattagttttgctcgtggcgtacgccgtactcgcggaggcgatgctgcaaccatcagagacgagggtacaggcggctacctcctcgccttcttcacagttcaccggtgacccgccacggccctccctcccgggcttgccgcctctacctggcttgcccgcgttaccgccgtcgccgggcttcccgggcatggcaggcgcgcagtcgtctccttcgccttcgcagcagccggccaaaacatgcttggagccgctgatacttgcggaaccgtgcgtcagttacctgacgaactccagcgtgccggcgccgccgagaacgtgctgcgacggcttcaggtcgctcgtcggcggcggcgacaggatttgcctgtgccacgccatcatgggcgacctgggtacatttgcaggcgggacgatagaccagcacgtcgccggagcttcttctgatgtgcatcggcaagtctgaatcgttgtttgttttgttttattaactgtatgaacttacgagatgaactgtcatgtgtt

SEQ ID NO: 11011 - protein, 217 aa, Triticum aestivum
  peptide (1)..(217): Ceres Seq. ID no. 13661570
  misc_feature (144)..(203): Pfam Name: Pfam Description:  Protease inhibitor/seed storage/LTP family
  misc_feature (83)..(203): NCBI GI NO: 34901090 NR Description: hypothetical protein~predicted by GlimmerM etc.
  misc_feature (104)..(203): NCBI GI NO: 34901578 NR Description: P0571D04.3
  misc_feature (93)..(203): NCBI GI NO: 38347146 NR Description: OSJNBa0039G19.6
  misc_feature (19)..(169): NCBI GI NO: 29245305 NR Description: GLP_333_15386_14190 [Giardia lamblia ATCC 50803]
  misc_feature (16)..(168): NCBI GI NO: 34899598 NR Description: early nodulin 75 precursor-like protein
MEPTRSPLVLLVAQAVLAAAMLQQPSEGRVQAVAPSAPHLAGGKEAEVAAATSSPASPFTGDTPLVLLVAYAVLAEAMLQPSETRVQAATSSPSSQFTGDPPRPSLPGLPPLPGLPALPPSPGFPGMAGAQSSPSPSQQPAKTCLEPLILAEPCVSYLTNSSVPAPPRTCCDGFRSLVGGGDRICLCHAIMGDLGTFAGGTIDQHVAGASSDVHRQV

SEQ ID NO: 11012 - protein, 197 aa, Triticum aestivum
  peptide (1)..(197): Ceres Seq. ID no. 13661571
  misc_feature (124)..(183): Pfam Name: Pfam Description:  Protease inhibitor/seed storage/LTP family
  misc_feature (63)..(183): NCBI GI NO: 34901090 NR Description: hypothetical protein~predicted by GlimmerM etc.
  misc_feature (84)..(183): NCBI GI NO: 34901578 NR Description: P0571D04.3
  misc_feature (73)..(183): NCBI GI NO: 38347146 NR Description: OSJNBa0039G19.6
  misc_feature (1)..(149): NCBI GI NO: 29245305 NR Description: GLP_333_15386_14190 [Giardia lamblia ATCC 50803]
  misc_feature (1)..(148): NCBI GI NO: 34899598 NR Description: early nodulin 75 precursor-like protein
MLQQPSEGRVQAVAPSAPHLAGGKEAEVAAATSSPASPFTGDTPLVLLVAYAVLAEAMLQPSETRVQAATSSPSSQFTGDPPRPSLPGLPPLPGLPALPPSPGFPGMAGAQSSPSPSQQPAKTCLEPLILAEPCVSYLTNSSVPAPPRTCCDGFRSLVGGGDRICLCHAIMGDLGTFAGGTIDQHVAGASSDVHRQV

SEQ ID NO: 11013 - protein, 140 aa, Triticum aestivum
  peptide (1)..(140): Ceres Seq. ID no. 13661572
  misc_feature (67)..(126): Pfam Name: Pfam Description:  Protease inhibitor/seed storage/LTP family
  misc_feature (6)..(126): NCBI GI NO: 34901090 NR Description: hypothetical protein~predicted by GlimmerM etc.
  misc_feature (27)..(126): NCBI GI NO: 34901578 NR Description: P0571D04.3
  misc_feature (16)..(126): NCBI GI NO: 38347146 NR Description: OSJNBa0039G19.6
  misc_feature (1)..(92): NCBI GI NO: 29245305 NR Description: GLP_333_15386_14190 [Giardia lamblia ATCC 50803]
  misc_feature (1)..(91): NCBI GI NO: 34899598 NR Description: early nodulin 75 precursor-like protein
MLQPSETRVQAATSSPSSQFTGDPPRPSLPGLPPLPGLPALPPSPGFPGMAGAQSSPSPSQQPAKTCLEPLILAEPCVSYLTNSSVPAPPRTCCDGFRSLVGGGDRICLCHAIMGDLGTFAGGTIDQHVAGASSDVHRQV

SEQ ID NO: 11014 - DNA, 677 bp, Triticum aestivum
  misc_feature (1)..(677): Ceres Seq. ID no. 12598241
  misc_feature (505)..(505): n is a, c, t, g, unknown, or other
  misc_feature (445)..(445): n is a, c, t, g, unknown, or other
  misc_feature (670)..(670): n is a, c, t, g, unknown, or other
  misc_feature (672)..(672): n is a, c, t, g, unknown, or other
atatacaaaaacccactacagaatactaccagcagttcttcgttgcagcatcatcacacagatttaaggttcaatctccagacagaaaatggcgaacgcggtgtcgggcgtggcggtgagcgaggagtgcgtgagggcgttccaggagctgcgcgcggggcgcgcgcaccggttcgtggtgtacaagatggacgacgccgtgcagcaggtggtggtggacaaggtgggcggccgcgacgccggcttcgacgacctggccgcggcactccccgccgacgactgccgctacgccgtctacgacctcgacttcaccgtcggcgacgccaccgccaaaggcgcggacggggaggcgccgcgcagcaagatcttcttcatctcctggtcgccggcgagtgcggaggtgaagagcaagatgatctacgccagctccaacgaggggttcaanaaggagctggacggcacgcagatcgacgtgcaggccaccgaccccagcgagctcacgctngacatcctcacgaccacgccacctaaccaatcaatcaagcccctatgtatgattgacggttcacgcgtgcacgttacgtgcgtgtgctagctttgtgctgtgcatgtatctttgccctcttcgattgtgttgtgtgcttccaattggatcgtgtcgtcgaccccnanagaat

SEQ ID NO: 11015 - protein, 176 aa, Triticum aestivum
  peptide (1)..(176): Ceres Seq. ID no. 12598242
  misc_feature (149)..(149): Xaa is any aa, unknown or other
  misc_feature (169)..(169): Xaa is any aa, unknown or other
IYKNPLQNTTSSSSLQHHHTDLRFNLQTENGERGVGRGGERGVREGVPGAARGARAPVRGVQDGRRRAAGGGGQGGRPRRRLRRPGRGTPRRRLPLRRLRPRLHRRRRHRQRRGRGGAAQQDLLHLLVAGECGGEEQDDLRQLQRGVQXGAGRHADRRAGHRPQRAHAXHPHDHAT

SEQ ID NO: 11016 - protein, 168 aa, Triticum aestivum
  peptide (1)..(168): Ceres Seq. ID no. 12598243
  misc_feature (12)..(142): Pfam Name: Pfam Description:  Cofilin/tropomyosin-type actin-binding protein
  misc_feature (1)..(142): NCBI GI NO: 29124120 NR Description: putative actin-binding protein
  misc_feature (1)..(142): NCBI GI NO: 1381154 NR Description: WCOR719
  misc_feature (1)..(142): NCBI GI NO: 11066101 NR Description: actin depolymerization factor-like protein
  misc_feature (1)..(142): NCBI GI NO: 7441447 NR Description: actin-binding protein WCOR719 - wheat
  misc_feature (1)..(141): NCBI GI NO: 30697295 NR Description: actin depolymerizing factor 3 - like protein
  misc_feature (1)..(142): NCBI GI NO: 22831338 NR Description: putative actin-depolymerizing factor 2
  misc_feature (1)..(142): NCBI GI NO: 30697300 NR Description: actin depolymerizing factor 4 - like protein
  misc_feature (1)..(141): NCBI GI NO: 4185511 NR Description: actin depolymerizing factor 4
  misc_feature (1)..(142): NCBI GI NO: 38345587 NR Description: OSJNBb0012E24.5
  misc_feature (1)..(140): NCBI GI NO: 17366520 NR Description: Actin-depolymerizing factor 3
  misc_feature (119)..(119): Xaa is any aa, unknown or other
  misc_feature (139)..(139): Xaa is any aa, unknown or other
MANAVSGVAVSEECVRAFQELRAGRAHRFVVYKMDDAVQQVVVDKVGGRDAGFDDLAAALPADDCRYAVYDLDFTVGDATAKGADGEAPRSKIFFISWSPASAEVKSKMIYASSNEGFXKELDGTQIDVQATDPSELTXDILTTTPPNQSIKPLCMIDGSRVHVTCVC

SEQ ID NO: 11017 - protein, 135 aa, Triticum aestivum
  peptide (1)..(135): Ceres Seq. ID no. 12598244
  misc_feature (1)..(109): Pfam Name: Pfam Description:  Cofilin/tropomyosin-type actin-binding protein
  misc_feature (1)..(109): NCBI GI NO: 29124120 NR Description: putative actin-binding protein
  misc_feature (1)..(109): NCBI GI NO: 1381154 NR Description: WCOR719
  misc_feature (1)..(109): NCBI GI NO: 11066101 NR Description: actin depolymerization factor-like protein
  misc_feature (1)..(109): NCBI GI NO: 7441447 NR Description: actin-binding protein WCOR719 - wheat
  misc_feature (1)..(108): NCBI GI NO: 30697295 NR Description: actin depolymerizing factor 3 - like protein
  misc_feature (1)..(109): NCBI GI NO: 22831338 NR Description: putative actin-depolymerizing factor 2
  misc_feature (1)..(109): NCBI GI NO: 30697300 NR Description: actin depolymerizing factor 4 - like protein
  misc_feature (1)..(108): NCBI GI NO: 4185511 NR Description: actin depolymerizing factor 4
  misc_feature (1)..(109): NCBI GI NO: 38345587 NR Description: OSJNBb0012E24.5
  misc_feature (1)..(107): NCBI GI NO: 17366520 NR Description: Actin-depolymerizing factor 3
  misc_feature (86)..(86): Xaa is any aa, unknown or other
  misc_feature (106)..(106): Xaa is any aa, unknown or other
MDDAVQQVVVDKVGGRDAGFDDLAAALPADDCRYAVYDLDFTVGDATAKGADGEAPRSKIFFISWSPASAEVKSKMIYASSNEGFXKELDGTQIDVQATDPSELTXDILTTTPPNQSIKPLCMIDGSRVHVTCVC

SEQ ID NO: 11018 - DNA, 935 bp, Triticum aestivum
  misc_feature (1)..(935): Ceres Seq. ID no. 12598102
  misc_feature (680)..(680): n is a, c, t, g, unknown, or other
cgctgctctgctctgctctgctcatcttccttgtaggctaggctagggtttatcttcggattacgagcgaaatcctcgggcaatggcgtcggtgcagctctgcggtgccgcggccgttggcgcggcggggttctccgggaaggtagcggccaacgcgccggcggcggtcggggtacgcccggcccggcggggggcgctccgcgggctcgtcgccagggccgccaccgtcgtcgcccccatgtacacgacggtcaagcccttggctgacagagtgcttctgaagaccaagactgccgagcagaagacgaccggtgggattctgctcccttcaactgcgcagtctaaacctcagagtggtgaggtggttgctgttggagagggaagaaccattggggatagcaaagtagaagtcggcattaaggttggggctcaggttgtatattcgaagtatgctggaatggaggtggagttgaatgattccaaccatctgatcctaaaagaggacgatatcataggtattctggagacagaggatgtgaaagacatgaagcctcttagcgaccgtgttcttatcaaggtagctgtagctgaagataaaactgcgggggggctgctgctgactaacagtgtccaggagaagccatctgttggaacggtggtcgctgtcggcccgggccatntggacgaggaaggcaagaggatcccgttgccggtatccacaggcaattccgttctgtactccaagtatgctggcgccgagttcaagggtgccgatggcacaaactacatcgtgctgagggtatctgacctgatggctatcctctcttgagctggattgtagcgcaaggcgcggttttcctgatcctaaatgttccaaaggcagcttaaactagatgaagagaaatgagaatccccttcaatgtttgtggctctgc

SEQ ID NO: 11019 - protein, 248 aa, Triticum aestivum
  peptide (1)..(248): Ceres Seq. ID no. 12598103
  misc_feature (153)..(248): Pfam Name: Pfam Description:  Chaperonin 10 Kd subunit
  misc_feature (1)..(248): NCBI GI NO: 15242045 NR Description: chloroplast Cpn21 protein; protein id: At5g20720
  misc_feature (1)..(248): NCBI GI NO: 7331143 NR Description: chaperonin 21 precursor [Lycopersicon esculentum]
  misc_feature (1)..(248): NCBI GI NO: 25453528 NR Description: chaperonin 10 [imported] - Arabidopsis thaliana
  misc_feature (1)..(248): NCBI GI NO: 21780187 NR Description: cp10-like protein [Gossypium hirsutum]
  misc_feature (38)..(248): NCBI GI NO: 399241 NR Description: 20 kDa chaperonin, chloroplast precursor
  misc_feature (152)..(247): NCBI GI NO: 22297730 NR Description: 10kD chaperonin
  misc_feature (57)..(148): NCBI GI NO: 2493659 NR Description: 10 kDa chaperonin (Protein Cpn10) (groES protein)
  misc_feature (57)..(150): NCBI GI NO: 22973795 NR Description: hypothetical protein [Chloroflexus aurantiacus]
  misc_feature (57)..(148): NCBI GI NO: 20807075 NR Description: Co-chaperonin GroES (HSP10)
  misc_feature (154)..(248): NCBI GI NO: 3599923 NR Description: GroES/HSP10 homolog [Lawsonia intracellularis]
  misc_feature (200)..(200): Xaa is any aa, unknown or other
MASVQLCGAAAVGAAGFSGKVAANAPAAVGVRPARRGALRGLVARAATVVAPMYTTVKPLADRVLLKTKTAEQKTTGGILLPSTAQSKPQSGEVVAVGEGRTIGDSKVEVGIKVGAQVVYSKYAGMEVELNDSNHLILKEDDIIGILETEDVKDMKPLSDRVLIKVAVAEDKTAGGLLLTNSVQEKPSVGTVVAVGPGHXDEEGKRIPLPVSTGNSVLYSKYAGAEFKGADGTNYIVLRVSDLMAILS

SEQ ID NO: 11020 - protein, 196 aa, Triticum aestivum
  peptide (1)..(196): Ceres Seq. ID no. 12598104
  misc_feature (101)..(196): Pfam Name: Pfam Description:  Chaperonin 10 Kd subunit
  misc_feature (1)..(196): NCBI GI NO: 15242045 NR Description: chloroplast Cpn21 protein; protein id: At5g20720
  misc_feature (1)..(196): NCBI GI NO: 7331143 NR Description: chaperonin 21 precursor [Lycopersicon esculentum]
  misc_feature (1)..(196): NCBI GI NO: 25453528 NR Description: chaperonin 10 [imported] - Arabidopsis thaliana
  misc_feature (1)..(196): NCBI GI NO: 21780187 NR Description: cp10-like protein [Gossypium hirsutum]
  misc_feature (1)..(196): NCBI GI NO: 399241 NR Description: 20 kDa chaperonin, chloroplast precursor
  misc_feature (100)..(195): NCBI GI NO: 22297730 NR Description: 10kD chaperonin
  misc_feature (5)..(96): NCBI GI NO: 2493659 NR Description: 10 kDa chaperonin (Protein Cpn10) (groES protein)
  misc_feature (5)..(98): NCBI GI NO: 22973795 NR Description: hypothetical protein [Chloroflexus aurantiacus]
  misc_feature (5)..(96): NCBI GI NO: 20807075 NR Description: Co-chaperonin GroES (HSP10)
  misc_feature (102)..(196): NCBI GI NO: 3599923 NR Description: GroES/HSP10 homolog [Lawsonia intracellularis]
  misc_feature (148)..(148): Xaa is any aa, unknown or other
MYTTVKPLADRVLLKTKTAEQKTTGGILLPSTAQSKPQSGEVVAVGEGRTIGDSKVEVGIKVGAQVVYSKYAGMEVELNDSNHLILKEDDIIGILETEDVKDMKPLSDRVLIKVAVAEDKTAGGLLLTNSVQEKPSVGTVVAVGPGHXDEEGKRIPLPVSTGNSVLYSKYAGAEFKGADGTNYIVLRVSDLMAILS

SEQ ID NO: 11021 - DNA, 506 bp, Triticum aestivum
  misc_feature (1)..(506): Ceres Seq. ID no. 12598105
atcctcgagcccaagcagcaaaacgcgagcagagagcgcaacacgaagatggcgacgatgtccctcgccgcggcctcacccctcaccgcctccactccccacggcctcgccgtgtccgcgccccgagcgccattcctcggcctccgctcatttggcgcgccggcgacgcggttcgcgggactggcggcggcgccgcggccgtcggggaggggcgatgcggcggtggtgaggatggcgaagagggagcaggagctggaggagatacgggccatggagacggagaatctggagcaggaggtggtggacctgaagggggagctcttcctgctccgcctcaagcgctccgcgcgccaggagttcaagtccagcgagttcggccgcatgcgcaagagggttgctcgtctgctgactgtgagaagagaaagggaaattgaacaaggaatcaacaaaagaaattctaggaagcttgacaggaaatggaaactgggtattgtggttggaccacc

SEQ ID NO: 11022 - protein, 168 aa, Triticum aestivum
  peptide (1)..(168): Ceres Seq. ID no. 12598106
  misc_feature (17)..(167): NCBI GI NO: 5739218 NR Description: ribosomal protein L29 [Zea mays]
  misc_feature (20)..(167): NCBI GI NO: 15238369 NR Description: 50S ribosomal protein L29; protein id: At5g65220
ILEPKQQNASRERNTKMATMSLAAASPLTASTPHGLAVSAPRAPFLGLRSFGAPATRFAGLAAAPRPSGRGDAAVVRMAKREQELEEIRAMETENLEQEVVDLKGELFLLRLKRSARQEFKSSEFGRMRKRVARLLTVRREREIEQGINKRNSRKLDRKWKLGIVVGP

SEQ ID NO: 11023 - protein, 152 aa, Triticum aestivum
  peptide (1)..(152): Ceres Seq. ID no. 12598107
  misc_feature (1)..(151): NCBI GI NO: 5739218 NR Description: ribosomal protein L29 [Zea mays]
  misc_feature (4)..(151): NCBI GI NO: 15238369 NR Description: 50S ribosomal protein L29; protein id: At5g65220
MATMSLAAASPLTASTPHGLAVSAPRAPFLGLRSFGAPATRFAGLAAAPRPSGRGDAAVVRMAKREQELEEIRAMETENLEQEVVDLKGELFLLRLKRSARQEFKSSEFGRMRKRVARLLTVRREREIEQGINKRNSRKLDRKWKLGIVVGP

SEQ ID NO: 11024 - protein, 149 aa, Triticum aestivum
  peptide (1)..(149): Ceres Seq. ID no. 12598108
  misc_feature (1)..(148): NCBI GI NO: 5739218 NR Description: ribosomal protein L29 [Zea mays]
  misc_feature (1)..(148): NCBI GI NO: 15238369 NR Description: 50S ribosomal protein L29; protein id: At5g65220
MSLAAASPLTASTPHGLAVSAPRAPFLGLRSFGAPATRFAGLAAAPRPSGRGDAAVVRMAKREQELEEIRAMETENLEQEVVDLKGELFLLRLKRSARQEFKSSEFGRMRKRVARLLTVRREREIEQGINKRNSRKLDRKWKLGIVVGP

SEQ ID NO: 11025 - DNA, 909 bp, Triticum aestivum
  misc_feature (1)..(909): Ceres Seq. ID no. 12627237
gataacaaactgagcggcagaggcggccatagccgcgagcgaaagcttctctgtgtacaaatcgacttcgatgccactcgtcggtagccctcgccacggcccgccgctgaagctcgctggccgcgcccagcgccggcctccgccccgcaccattgcgcccaaatgcgacatctacttccctcccccgcgcctgaccagaagagccgtttccgccgcctcgctgctcctcaccgccctccctttccccgcctcgtcaccgcaactccccgtggcctccgcatcggaaacggaggcagaagccgggggaggagaaggaggcgcaccggcgctggagttggagcggtacacagaccaggaccaggggttcaccctcctcaagcccgcctcatggcccaaggtggaaaaggcgggcgcgacggcgctgtttcagcaagaggggaaggggagtaacaatattggggtcgtcgtcaatcctgttcgcctctcctcgctgacggatttcggcacaccgcagtttgtcgctgacaggcttctacaggcagagaagaaaaaggaaagtaccaaatctgcagaggtgatttccaccagagagagatcaggtcgcgatggcctgacagtgtacgaaatcgagtattcgttggatagcaccaggggagggatgaagcgcatcttctcagcggcgtttgttgcttctagaaatctttatctgctcaatgtagcctactctgatactgaggagaagcccttggacaagcagactagacttgttttggaggaagtccttcattcctttgattctgtgtagtttctttctcttaacaggggatgtatcatgtatgtctccctttcttgtttatacaaacttcgaccctaacataagcttctttacgttgatttgtaaaaagagtt

SEQ ID NO: 11026 - protein, 244 aa, Triticum aestivum
  peptide (1)..(244): Ceres Seq. ID no. 12627238
  misc_feature (75)..(243): Pfam Name: Pfam Description:  PsbP
  misc_feature (1)..(161): NCBI GI NO: 21741209 NR Description: OSJNBb0086G13.4
  misc_feature (88)..(244): NCBI GI NO: 20198164 NR Description: hypothetical protein [Arabidopsis thaliana]
  misc_feature (88)..(244): NCBI GI NO: 30683953 NR Description: expressed protein [Arabidopsis thaliana]
MPLVGSPRHGPPLKLAGRAQRRPPPRTIAPKCDIYFPPPRLTRRAVSAASLLLTALPFPASSPQLPVASASETEAEAGGGEGGAPALELERYTDQDQGFTLLKPASWPKVEKAGATALFQQEGKGSNNIGVVVNPVRLSSLTDFGTPQFVADRLLQAEKKKESTKSAEVISTRERSGRDGLTVYEIEYSLDSTRGGMKRIFSAAFVASRNLYLLNVAYSDTEEKPLDKQTRLVLEEVLHSFDSV

SEQ ID NO: 11027 - DNA, 640 bp, Triticum aestivum
  misc_feature (1)..(640): Ceres Seq. ID no. 12599839
acaactcgcagctcacaagcctcaagcactactgcacgcagatccaaagcattcgcttgccatcatcccctctcctctccaagtctcgggcaaggctttcaccgtcgacaagaaccggatggctcgcttcgccgtcgtcgccgccatcctcgccctcctcgccgtcggcgccgccgcgcagggccccatgccggcgccccggatggccccgcttccggcgccaccggcgaggtccccggccaccgcccccgcgccggtcgccacccctccaaccgccgcgtcgccgtccccgatggcatctccccctgccccgaccaccgacgctccctccgcgatgacgccgtccgcggtctctgccacacccaccggcgcacccatcggcgcccccaccggcacccccgcgagctccgccgtttactcatcggccgccagcttcgtcgcagtcgtcggagcggtcgccgccgccatcgtgttctagatggatcgacgatttttttagcggggggactctgttcgctgttgtctatacaatttcattctttctgagatttcttcgttatagacggaggaaagattacacacgacattgcgatgtaatcttgatacgagattattatgaatataaaattctttcatttgt

SEQ ID NO: 11028 - protein, 181 aa, Triticum aestivum
  peptide (1)..(181): Ceres Seq. ID no. 12599840
TTRSSQASSTTARRSKAFACHHPLSSPSLGQGFHRRQEPDGSLRRRRRHPRPPRRRRRRAGPHAGAPDGPASGATGEVPGHRPRAGRHPSNRRVAVPDGISPCPDHRRSLRDDAVRGLCHTHRRTHRRPHRHPRELRRLLIGRQLRRSRRSGRRRHRVLDGSTIFLAGGLCSLLSIQFHSF

SEQ ID NO: 11029 - protein, 158 aa, Triticum aestivum
  peptide (1)..(158): Ceres Seq. ID no. 12599841
  misc_feature (48)..(155): Pfam Name: Pfam Description:  Glycoprotein GG/GX
  misc_feature (40)..(141): NCBI GI NO: 40737023 NR Description: hypothetical protein
  misc_feature (40)..(135): NCBI GI NO: 30140331 NR Description: putative arabinagalactan protein [Lotus japonicus]
  misc_feature (41)..(158): NCBI GI NO: 15238164 NR Description: arabinogalactan-protein
  misc_feature (47)..(158): NCBI GI NO: 806720 NR Description: arabinogalactan-protein precursor
  misc_feature (39)..(131): NCBI GI NO: 27375589 NR Description: blr0478 [Bradyrhizobium japonicum]
  misc_feature (62)..(142): NCBI GI NO: 30140331 NR Description: putative arabinagalactan protein [Lotus japonicus]
  misc_feature (40)..(148): NCBI GI NO: 5139695 NR Description: expressed in cucumber hypocotyls [Cucumis sativus]
  misc_feature (17)..(155): NCBI GI NO: 10945166 NR Description: TapA protein [Acidithiobacillus ferrooxidans]
  misc_feature (59)..(134): NCBI GI NO: 27375632 NR Description: blr0521 [Bradyrhizobium japonicum]
  misc_feature (66)..(136): NCBI GI NO: 5139695 NR Description: expressed in cucumber hypocotyls [Cucumis sativus]
QLAAHKPQALLHADPKHSLAIIPSPLQVSGKAFTVDKNRMARFAVVAAILALLAVGAAAQGPMPAPRMAPLPAPPARSPATAPAPVATPPTAASPSPMASPPAPTTDAPSAMTPSAVSATPTGAPIGAPTGTPASSAVYSSAASFVAVVGAVAAAIVF

SEQ ID NO: 11030 - protein, 119 aa, Triticum aestivum
  peptide (1)..(119): Ceres Seq. ID no. 12599842
  misc_feature (9)..(116): Pfam Name: Pfam Description:  Glycoprotein GG/GX
  misc_feature (1)..(102): NCBI GI NO: 40737023 NR Description: hypothetical protein
  misc_feature (1)..(96): NCBI GI NO: 30140331 NR Description: putative arabinagalactan protein [Lotus japonicus]
  misc_feature (2)..(119): NCBI GI NO: 15238164 NR Description: arabinogalactan-protein
  misc_feature (8)..(119): NCBI GI NO: 806720 NR Description: arabinogalactan-protein precursor
  misc_feature (1)..(92): NCBI GI NO: 27375589 NR Description: blr0478 [Bradyrhizobium japonicum]
  misc_feature (23)..(103): NCBI GI NO: 30140331 NR Description: putative arabinagalactan protein [Lotus japonicus]
  misc_feature (1)..(109): NCBI GI NO: 5139695 NR Description: expressed in cucumber hypocotyls [Cucumis sativus]
  misc_feature (1)..(116): NCBI GI NO: 10945166 NR Description: TapA protein [Acidithiobacillus ferrooxidans]
  misc_feature (20)..(95): NCBI GI NO: 27375632 NR Description: blr0521 [Bradyrhizobium japonicum]
  misc_feature (27)..(97): NCBI GI NO: 5139695 NR Description: expressed in cucumber hypocotyls [Cucumis sativus]
MARFAVVAAILALLAVGAAAQGPMPAPRMAPLPAPPARSPATAPAPVATPPTAASPSPMASPPAPTTDAPSAMTPSAVSATPTGAPIGAPTGTPASSAVYSSAASFVAVVGAVAAAIVF

SEQ ID NO: 11031 - DNA, 819 bp, Triticum aestivum
  misc_feature (1)..(819): Ceres Seq. ID no. 13590650
ttcccccccttccgccccgtcccgtctccctccccccttcctcggcggccgccgccgccccccaccgcggcgagtccctccgtccacagccggcctaagccgccgccgcgtgcgcccggggtcaccgaggaggcggcgccatgaggttggagaagtgctggttctgctcctccaccgtctaccccggccacggcatccagttcgtccgcaacgacgccaagatctttcggttctgccgatcaaaatgccacaagaacttcaagatgaagaggawccctcgcaaggttaagtggaccaaggcgtacagacgcctgcgtggaaaggacatgacacaggatgccacgtttgagttcgagaggaagaggaacaggccggagcgctacgaccgtaacgtcactgagcacactctcaaggccatcccacttatcacaaagatcagacatgaacggcagaagaaacacatchcagagagacagaaggytggtaagagcatggtgcgaaagagmgacgccaaggagctggatcaggatattggcatggttcccaagaaggagaccgagamctatgtagccaagcagaaggttctagtttytcagctgaagaccgaggagaatcttatggaagagtaatggaatcmaacagttttgtgtgtgcgcgtgcatgtgatcctcttytatatggagkamtttgtgttccatcagattgtagacgacagtgaacatttgttttccactcaccatgagcaagttatgcatgtgatgttatcgcgtggacgatggtcagatttgctctcccmccgtttaatagaattgsgaaatt

SEQ ID NO: 11032 - protein, 162 aa, Triticum aestivum
  peptide (1)..(162): Ceres Seq. ID no. 15220992
  misc_feature (1)..(75): Pfam Name: Pfam Description:  Ribosomal protein L24e
  misc_feature (1)..(162): NCBI GI NO: 27817966 NR Description: putative 60S ribosomal protein L30
  misc_feature (1)..(162): NCBI GI NO: 15225363 NR Description: 60S ribosomal protein L24, putative
  misc_feature (1)..(134): NCBI GI NO: 28828084 NR Description: similar to Mus musculus (Mouse)
  misc_feature (1)..(162): NCBI GI NO: 38083793 NR Description: similar to ribosomal protein L24-like
  misc_feature (1)..(134): NCBI GI NO: 27769143 NR Description: Similar to chromosome 15 open reading frame 15
  misc_feature (1)..(162): NCBI GI NO: 16740902 NR Description: 60S ribosomal protein L30 isolog [Homo sapiens]
  misc_feature (1)..(162): NCBI GI NO: 10047102 NR Description: ribosomal protein L24-like
  misc_feature (1)..(162): NCBI GI NO: 30354249 NR Description: Similar to chromosome 15 open reading frame 15
  misc_feature (1)..(134): NCBI GI NO: 13529146 NR Description: 60S ribosomal protein L30 isolog [Homo sapiens]
  misc_feature (1)..(134): NCBI GI NO: 20381079 NR Description: Similar to 60S ribosomal protein L30 isolog
  misc_feature (45)..(45): Xaa is any aa, unknown or other
  misc_feature (109)..(109): Xaa is any aa, unknown or other
  misc_feature (114)..(114): Xaa is any aa, unknown or other
  misc_feature (122)..(122): Xaa is any aa, unknown or other
  misc_feature (141)..(141): Xaa is any aa, unknown or other
  misc_feature (151)..(151): Xaa is any aa, unknown or other
MRLEKCWFCSSTVYPGHGIQFVRNDAKIFRFCRSKCHKNFKMKRXPRKVKWTKAYRRLRGKDMTQDATFEFERKRNRPERYDRNVTEHTLKAIPLITKIRHERQKKHIXERQKXGKSMVRKXDAKELDQDIGMVPKKETEXYVAKQKVLVXQLKTEENLMEE

SEQ ID NO: 11033 - protein, 121 aa, Triticum aestivum
  peptide (1)..(121): Ceres Seq. ID no. 15220993
  misc_feature (1)..(121): NCBI GI NO: 27817966 NR Description: putative 60S ribosomal protein L30
  misc_feature (1)..(121): NCBI GI NO: 15225363 NR Description: 60S ribosomal protein L24, putative
  misc_feature (1)..(93): NCBI GI NO: 28828084 NR Description: similar to Mus musculus (Mouse)
  misc_feature (1)..(121): NCBI GI NO: 38083793 NR Description: similar to ribosomal protein L24-like
  misc_feature (1)..(93): NCBI GI NO: 27769143 NR Description: Similar to chromosome 15 open reading frame 15
  misc_feature (1)..(121): NCBI GI NO: 16740902 NR Description: 60S ribosomal protein L30 isolog [Homo sapiens]
  misc_feature (1)..(121): NCBI GI NO: 10047102 NR Description: ribosomal protein L24-like
  misc_feature (1)..(121): NCBI GI NO: 30354249 NR Description: Similar to chromosome 15 open reading frame 15
  misc_feature (1)..(93): NCBI GI NO: 13529146 NR Description: 60S ribosomal protein L30 isolog [Homo sapiens]
  misc_feature (1)..(93): NCBI GI NO: 20381079 NR Description: Similar to 60S ribosomal protein L30 isolog
  misc_feature (4)..(4): Xaa is any aa, unknown or other
  misc_feature (68)..(68): Xaa is any aa, unknown or other
  misc_feature (73)..(73): Xaa is any aa, unknown or other
  misc_feature (81)..(81): Xaa is any aa, unknown or other
  misc_feature (100)..(100): Xaa is any aa, unknown or other
  misc_feature (110)..(110): Xaa is any aa, unknown or other
MKRXPRKVKWTKAYRRLRGKDMTQDATFEFERKRNRPERYDRNVTEHTLKAIPLITKIRHERQKKHIXERQKXGKSMVRKXDAKELDQDIGMVPKKETEXYVAKQKVLVXQLKTEENLMEE

SEQ ID NO: 11034 - protein, 100 aa, Triticum aestivum
  peptide (1)..(100): Ceres Seq. ID no. 15220994
  misc_feature (1)..(100): NCBI GI NO: 27817966 NR Description: putative 60S ribosomal protein L30
  misc_feature (1)..(100): NCBI GI NO: 15225363 NR Description: 60S ribosomal protein L24, putative
  misc_feature (1)..(72): NCBI GI NO: 28828084 NR Description: similar to Mus musculus (Mouse)
  misc_feature (1)..(100): NCBI GI NO: 38083793 NR Description: similar to ribosomal protein L24-like
  misc_feature (1)..(72): NCBI GI NO: 27769143 NR Description: Similar to chromosome 15 open reading frame 15
  misc_feature (1)..(100): NCBI GI NO: 16740902 NR Description: 60S ribosomal protein L30 isolog [Homo sapiens]
  misc_feature (1)..(100): NCBI GI NO: 10047102 NR Description: ribosomal protein L24-like
  misc_feature (1)..(100): NCBI GI NO: 30354249 NR Description: Similar to chromosome 15 open reading frame 15
  misc_feature (1)..(72): NCBI GI NO: 13529146 NR Description: 60S ribosomal protein L30 isolog [Homo sapiens]
  misc_feature (1)..(72): NCBI GI NO: 20381079 NR Description: Similar to 60S ribosomal protein L30 isolog
  misc_feature (47)..(47): Xaa is any aa, unknown or other
  misc_feature (52)..(52): Xaa is any aa, unknown or other
  misc_feature (60)..(60): Xaa is any aa, unknown or other
  misc_feature (79)..(79): Xaa is any aa, unknown or other
  misc_feature (89)..(89): Xaa is any aa, unknown or other
MTQDATFEFERKRNRPERYDRNVTEHTLKAIPLITKIRHERQKKHIXERQKXGKSMVRKXDAKELDQDIGMVPKKETEXYVAKQKVLVXQLKTEENLMEE

SEQ ID NO: 11035 - DNA, 699 bp, Triticum aestivum
  misc_feature (1)..(699): Ceres Seq. ID no. 13591265
  misc_feature (152)..(152): n is a, c, t, g, unknown, or other
  misc_feature (453)..(453): n is a, c, t, g, unknown, or other
  misc_feature (93)..(93): n is a, c, t, g, unknown, or other
  misc_feature (436)..(436): n is a, c, t, g, unknown, or other
  misc_feature (259)..(259): n is a, c, t, g, unknown, or other
  misc_feature (485)..(485): n is a, c, t, g, unknown, or other
agcaaatccaagacacacacacacacacacacaaactagcttagcaggttgtcactgatcaccgtggtcgacgagaagacgacgatggcggtnaggctgatgctggtggcggcgctgctgtgcgcggcggcggcggcggccgcggcgcagcnggcgaacaacgtgcgcgcgacgtaccactactaccggccggcccagaacaactgggacctgggcgcgccggcggtgagcgcctactgcgcgacctgggacgccagcnagccgctgtcgtggcggtccaagtacgggtggacggcgttctgcggccccgccggcgcccacgggcaggcggcgtgcggcaagtgcctccgggtgacgaacccggcgacgggggcgcaggtgacggcgaggatcgtggaccagtgcgccaacggcgggctggacctggactgggacnccgtcttcaccaagatngacaccaacggggtcgggtaccagcagggccncctcaacgtcaactaccagttcgtcgactgccgcgactagatgaaatgaaagggtaagcaagctatgataagaataaaaggctagctagtagcgggctagctacgagtgagcactgagactgatccatgctgttgaataaaagctaccacgtgttgctgcattgtatacgtgtatacagtacgtacatggaaggaaataaagtggatcgtttcc

SEQ ID NO: 11036 - protein, 146 aa, Triticum aestivum
  peptide (1)..(146): Ceres Seq. ID no. 13591266
  misc_feature (24)..(144): Pfam Name: Pfam Description:  Barwin family
  misc_feature (1)..(146): NCBI GI NO: 34925032 NR Description: Wheatwin2 precursor
  misc_feature (1)..(146): NCBI GI NO: 34925030 NR Description: Wheatwin1 precursor
  misc_feature (1)..(146): NCBI GI NO: 7442145 NR Description: pathogenesis-related protein 4 - barley
  misc_feature (22)..(146): NCBI GI NO: 1588926 NR Description: pathogenesis-related protein
  misc_feature (22)..(146): NCBI GI NO: 114832 NR Description: BARWIN
  misc_feature (22)..(146): NCBI GI NO: 442693 NR Description: Barwin, Basic Barley Seed Protein
  misc_feature (22)..(146): NCBI GI NO: 626038 NR Description: barwin homolog wheatwin1 - wheat
  misc_feature (29)..(146): NCBI GI NO: 6002595 NR Description: pathogenesis-related protein 4 [Triticum aestivum]
  misc_feature (29)..(146): NCBI GI NO: 6048569 NR Description: PR-4 [Triticum aestivum]
  misc_feature (29)..(146): NCBI GI NO: 6048567 NR Description: PR-4 [Triticum aestivum]
  misc_feature (3)..(3): Xaa is any aa, unknown or other
  misc_feature (23)..(23): Xaa is any aa, unknown or other
  misc_feature (59)..(59): Xaa is any aa, unknown or other
  misc_feature (118)..(118): Xaa is any aa, unknown or other
  misc_feature (123)..(123): Xaa is any aa, unknown or other
  misc_feature (134)..(134): Xaa is any aa, unknown or other
MAXRLMLVAALLCAAAAAAAAQXANNVRATYHYYRPAQNNWDLGAPAVSAYCATWDASXPLSWRSKYGWTAFCGPAGAHGQAACGKCLRVTNPATGAQVTARIVDQCANGGLDLDWDXVFTKXDTNGVGYQQGXLNVNYQFVDCRD

SEQ ID NO: 11037 - protein, 141 aa, Triticum aestivum
  peptide (1)..(141): Ceres Seq. ID no. 13591267
  misc_feature (19)..(139): Pfam Name: Pfam Description:  Barwin family
  misc_feature (1)..(141): NCBI GI NO: 34925032 NR Description: Wheatwin2 precursor
  misc_feature (1)..(141): NCBI GI NO: 34925030 NR Description: Wheatwin1 precursor
  misc_feature (1)..(141): NCBI GI NO: 7442145 NR Description: pathogenesis-related protein 4 - barley
  misc_feature (17)..(141): NCBI GI NO: 1588926 NR Description: pathogenesis-related protein
  misc_feature (17)..(141): NCBI GI NO: 114832 NR Description: BARWIN
  misc_feature (17)..(141): NCBI GI NO: 442693 NR Description: Barwin, Basic Barley Seed Protein
  misc_feature (17)..(141): NCBI GI NO: 626038 NR Description: barwin homolog wheatwin1 - wheat
  misc_feature (24)..(141): NCBI GI NO: 6002595 NR Description: pathogenesis-related protein 4 [Triticum aestivum]
  misc_feature (24)..(141): NCBI GI NO: 6048569 NR Description: PR-4 [Triticum aestivum]
  misc_feature (24)..(141): NCBI GI NO: 6048567 NR Description: PR-4 [Triticum aestivum]
  misc_feature (18)..(18): Xaa is any aa, unknown or other
  misc_feature (54)..(54): Xaa is any aa, unknown or other
  misc_feature (113)..(113): Xaa is any aa, unknown or other
  misc_feature (118)..(118): Xaa is any aa, unknown or other
  misc_feature (129)..(129): Xaa is any aa, unknown or other
MLVAALLCAAAAAAAAQXANNVRATYHYYRPAQNNWDLGAPAVSAYCATWDASXPLSWRSKYGWTAFCGPAGAHGQAACGKCLRVTNPATGAQVTARIVDQCANGGLDLDWDXVFTKXDTNGVGYQQGXLNVNYQFVDCRD

SEQ ID NO: 11038 - DNA, 900 bp, Triticum aestivum
  misc_feature (1)..(900): Ceres Seq. ID no. 12781196
ataacccgaactctagaaaacttttcctcttatctctctccctctctcccaagtgtggttttcaacccattcgtaaagatcatgaaccttgaagagaaaccaaccatggcttcgagggctctacctcaagccgaaaatctctactacgtccggtgcagcatctgcaacaccatcctcgcggttgggataccaatgaagagaatgcttgacactgtaacggtgaaatgtggccattgtggtaacctctcgtttctcaccacaacccctcctctgcaaggccatgtcagcctcacccttcagatgcagagctttgatgggagtgagtataagaagggaagctcttcttcctcctcctcttctacctccagtgaccagccaccgtctcctagaccaccctttgtcgttaaacctcctgagaagaagcagagactcccatcggcttacaaccgcttcatgagggatgagatacaacgtatcaagagtgccaatccggaaataccacatcgcgaagcttttagtgctgctgccaaaaattgggctaagtacatacccaattctcctacttccattgcttccggagccagcaacatccatggttttggatttggtgagaagaagtgatagcccaaggaaatgtgcctaaaaataataaacgcacgtgtgcgagatcaacctttctggaaagggtttagttagctgcgtcgtttttctcatgttgtgttgctttagatgtttaaagttggtgtgttttcatttgtgtgtctctgcagaaatgatgttgccttagtatctttagttctgtctgtcttagatatgaaagctacattacgttgttgtgttcatctggacgttcatgtcgggacgttataagtttgtcttaatcctataacatttctgcct

SEQ ID NO: 11039 - protein, 206 aa, Triticum aestivum
  peptide (1)..(206): Ceres Seq. ID no. 12781197
  misc_feature (38)..(190): Pfam Name: Pfam Description:  YABBY protein
  misc_feature (28)..(206): NCBI GI NO: 15222228 NR Description: transcription factor CRC; protein id: At1g69180
  misc_feature (37)..(206): NCBI GI NO: 21617944 NR Description: transcription factor CRC [Arabidopsis thaliana]
  misc_feature (28)..(196): NCBI GI NO: 37542843 NR Description: crabs claw
  misc_feature (44)..(196): NCBI GI NO: 40362873 NR Description: drooping leaf
  misc_feature (44)..(195): NCBI GI NO: 33333529 NR Description: CRC-related protein [Triticum aestivum]
  misc_feature (117)..(182): NCBI GI NO: 37535908 NR Description: hypothetical protein
  misc_feature (34)..(82): NCBI GI NO: 37535908 NR Description: hypothetical protein
  misc_feature (113)..(182): NCBI GI NO: 38605890 NR Description: OSJNBb0020O11.2
  misc_feature (41)..(82): NCBI GI NO: 38605890 NR Description: OSJNBb0020O11.2
  misc_feature (36)..(196): NCBI GI NO: 11280864 NR Description: hypothetical protein 2 [imported] - rice
ITRTLENFSSYLSPSLPSVVFNPFVKIMNLEEKPTMASRALPQAENLYYVRCSICNTILAVGIPMKRMLDTVTVKCGHCGNLSFLTTTPPLQGHVSLTLQMQSFDGSEYKKGSSSSSSSSTSSDQPPSPRPPFVVKPPEKKQRLPSAYNRFMRDEIQRIKSANPEIPHREAFSAAAKNWAKYIPNSPTSIASGASNIHGFGFGEKK

SEQ ID NO: 11040 - protein, 179 aa, Triticum aestivum
  peptide (1)..(179): Ceres Seq. ID no. 12781198
  misc_feature (11)..(163): Pfam Name: Pfam Description:  YABBY protein
  misc_feature (1)..(179): NCBI GI NO: 15222228 NR Description: transcription factor CRC; protein id: At1g69180
  misc_feature (10)..(179): NCBI GI NO: 21617944 NR Description: transcription factor CRC [Arabidopsis thaliana]
  misc_feature (1)..(169): NCBI GI NO: 37542843 NR Description: crabs claw
  misc_feature (17)..(169): NCBI GI NO: 40362873 NR Description: drooping leaf
  misc_feature (17)..(168): NCBI GI NO: 33333529 NR Description: CRC-related protein [Triticum aestivum]
  misc_feature (90)..(155): NCBI GI NO: 37535908 NR Description: hypothetical protein
  misc_feature (7)..(55): NCBI GI NO: 37535908 NR Description: hypothetical protein
  misc_feature (86)..(155): NCBI GI NO: 38605890 NR Description: OSJNBb0020O11.2
  misc_feature (14)..(55): NCBI GI NO: 38605890 NR Description: OSJNBb0020O11.2
  misc_feature (9)..(169): NCBI GI NO: 11280864 NR Description: hypothetical protein 2 [imported] - rice
MNLEEKPTMASRALPQAENLYYVRCSICNTILAVGIPMKRMLDTVTVKCGHCGNLSFLTTTPPLQGHVSLTLQMQSFDGSEYKKGSSSSSSSSTSSDQPPSPRPPFVVKPPEKKQRLPSAYNRFMRDEIQRIKSANPEIPHREAFSAAAKNWAKYIPNSPTSIASGASNIHGFGFGEKK

SEQ ID NO: 11041 - protein, 171 aa, Triticum aestivum
  peptide (1)..(171): Ceres Seq. ID no. 12781199
  misc_feature (3)..(155): Pfam Name: Pfam Description:  YABBY protein
  misc_feature (1)..(171): NCBI GI NO: 15222228 NR Description: transcription factor CRC; protein id: At1g69180
  misc_feature (2)..(171): NCBI GI NO: 21617944 NR Description: transcription factor CRC [Arabidopsis thaliana]
  misc_feature (1)..(161): NCBI GI NO: 37542843 NR Description: crabs claw
  misc_feature (9)..(161): NCBI GI NO: 40362873 NR Description: drooping leaf
  misc_feature (9)..(160): NCBI GI NO: 33333529 NR Description: CRC-related protein [Triticum aestivum]
  misc_feature (82)..(147): NCBI GI NO: 37535908 NR Description: hypothetical protein
  misc_feature (1)..(47): NCBI GI NO: 37535908 NR Description: hypothetical protein
  misc_feature (78)..(147): NCBI GI NO: 38605890 NR Description: OSJNBb0020O11.2
  misc_feature (6)..(47): NCBI GI NO: 38605890 NR Description: OSJNBb0020O11.2
  misc_feature (1)..(161): NCBI GI NO: 11280864 NR Description: hypothetical protein 2 [imported] - rice
MASRALPQAENLYYVRCSICNTILAVGIPMKRMLDTVTVKCGHCGNLSFLTTTPPLQGHVSLTLQMQSFDGSEYKKGSSSSSSSSTSSDQPPSPRPPFVVKPPEKKQRLPSAYNRFMRDEIQRIKSANPEIPHREAFSAAAKNWAKYIPNSPTSIASGASNIHGFGFGEKK

SEQ ID NO: 11042 - DNA, 716 bp, Triticum aestivum
  misc_feature (1)..(716): Ceres Seq. ID no. 13661089
acaacagcaaaccaaatcccccaagaccaaaaaaggccccagcaacccaagcgcgtcgaccccatccacagttgaatctctgagtttactttcagagaagattttagtcgagatggcgcaggcgatcgaggctcagagggagggcgcggaggtgtaccacggcgcggcgctgtgcgcggagaaggcggtggagctgctggccgagaccaacatgccgctgggcctgctgccgctggcagacatcgaggaggtgggctacaaccgcgccaccggcttcgtctggctgcgccagaagaaggcgctcacgcacaccttcaagcagatcgggcggcaggtctcgtacggcaccgaggtgacggccttcgtcgaggaccgcaagatgaagcgcatgaccggggtcaagagcaaggagctcctcatctggatcaccctctgcgacatgtacatcgagaaggacgatccctccaagatcaccttcaagacgcccacagggctggggaggaccttccccgtctccgccttcgagaagcaggacgacggcaaggccaaggccgcggctgccgacggcaaggaggccgtcgtggccaagtaggtgaggacggccggcatactctacaaagtttggatgaagagtcctcgagtccaatattaactatatacaaagtttggatgaagagtactatttgcttttatctttataataaactacggattat

SEQ ID NO: 11043 - protein, 196 aa, Triticum aestivum
  peptide (1)..(196): Ceres Seq. ID no. 13661090
  misc_feature (40)..(180): Pfam Name: Pfam Description:  Protein of unknown function, DUF538
  misc_feature (39)..(194): NCBI GI NO: 34903866 NR Description: unnamed protein product
  misc_feature (38)..(196): NCBI GI NO: 18391006 NR Description: expressed protein [Arabidopsis thaliana]
  misc_feature (45)..(178): NCBI GI NO: 18422648 NR Description: expressed protein [Arabidopsis thaliana]
  misc_feature (38)..(174): NCBI GI NO: 33146557 NR Description: unknown protein
  misc_feature (38)..(174): NCBI GI NO: 34915418 NR Description: hypothetical protein~similar to Arabidopsisthaliana chromosome1
  misc_feature (38)..(174): NCBI GI NO: 34915376 NR Description: hypothetical protein~similar to Oryza sativachromosome 7
  misc_feature (38)..(174): NCBI GI NO: 34915422 NR Description: hypothetical protein~similar to Arabidopsisthaliana chromosome1
  misc_feature (38)..(193): NCBI GI NO: 18405887 NR Description: expressed protein [Arabidopsis thaliana]
  misc_feature (36)..(174): NCBI GI NO: 34915430 NR Description: hypothetical protein~similar to Arabidopsisthaliana chromosome3
QQQTKSPKTKKGPSNPSASTPSTVESLSLLSEKILVEMAQAIEAQREGAEVYHGAALCAEKAVELLAETNMPLGLLPLADIEEVGYNRATGFVWLRQKKALTHTFKQIGRQVSYGTEVTAFVEDRKMKRMTGVKSKELLIWITLCDMYIEKDDPSKITFKTPTGLGRTFPVSAFEKQDDGKAKAAAADGKEAVVAK

SEQ ID NO: 11044 - protein, 159 aa, Triticum aestivum
  peptide (1)..(159): Ceres Seq. ID no. 13661091
  misc_feature (3)..(143): Pfam Name: Pfam Description:  Protein of unknown function, DUF538
  misc_feature (2)..(157): NCBI GI NO: 34903866 NR Description: unnamed protein product
  misc_feature (1)..(159): NCBI GI NO: 18391006 NR Description: expressed protein [Arabidopsis thaliana]
  misc_feature (8)..(141): NCBI GI NO: 18422648 NR Description: expressed protein [Arabidopsis thaliana]
  misc_feature (1)..(137): NCBI GI NO: 33146557 NR Description: unknown protein
  misc_feature (1)..(137): NCBI GI NO: 34915418 NR Description: hypothetical protein~similar to Arabidopsisthaliana chromosome1
  misc_feature (1)..(137): NCBI GI NO: 34915376 NR Description: hypothetical protein~similar to Oryza sativachromosome 7
  misc_feature (1)..(137): NCBI GI NO: 34915422 NR Description: hypothetical protein~similar to Arabidopsisthaliana chromosome1
  misc_feature (1)..(156): NCBI GI NO: 18405887 NR Description: expressed protein [Arabidopsis thaliana]
  misc_feature (1)..(137): NCBI GI NO: 34915430 NR Description: hypothetical protein~similar to Arabidopsisthaliana chromosome3
MAQAIEAQREGAEVYHGAALCAEKAVELLAETNMPLGLLPLADIEEVGYNRATGFVWLRQKKALTHTFKQIGRQVSYGTEVTAFVEDRKMKRMTGVKSKELLIWITLCDMYIEKDDPSKITFKTPTGLGRTFPVSAFEKQDDGKAKAAAADGKEAVVAK

SEQ ID NO: 11045 - protein, 126 aa, Triticum aestivum
  peptide (1)..(126): Ceres Seq. ID no. 13661092
  misc_feature (1)..(110): Pfam Name: Pfam Description:  Protein of unknown function, DUF538
  misc_feature (1)..(124): NCBI GI NO: 34903866 NR Description: unnamed protein product
  misc_feature (1)..(126): NCBI GI NO: 18391006 NR Description: expressed protein [Arabidopsis thaliana]
  misc_feature (1)..(108): NCBI GI NO: 18422648 NR Description: expressed protein [Arabidopsis thaliana]
  misc_feature (1)..(104): NCBI GI NO: 33146557 NR Description: unknown protein
  misc_feature (1)..(104): NCBI GI NO: 34915418 NR Description: hypothetical protein~similar to Arabidopsisthaliana chromosome1
  misc_feature (1)..(104): NCBI GI NO: 34915376 NR Description: hypothetical protein~similar to Oryza sativachromosome 7
  misc_feature (1)..(104): NCBI GI NO: 34915422 NR Description: hypothetical protein~similar to Arabidopsisthaliana chromosome1
  misc_feature (1)..(123): NCBI GI NO: 18405887 NR Description: expressed protein [Arabidopsis thaliana]
  misc_feature (1)..(104): NCBI GI NO: 34915430 NR Description: hypothetical protein~similar to Arabidopsisthaliana chromosome3
MPLGLLPLADIEEVGYNRATGFVWLRQKKALTHTFKQIGRQVSYGTEVTAFVEDRKMKRMTGVKSKELLIWITLCDMYIEKDDPSKITFKTPTGLGRTFPVSAFEKQDDGKAKAAAADGKEAVVAK

SEQ ID NO: 11046 - DNA, 1140 bp, Triticum aestivum
  misc_feature (1)..(1140): Ceres Seq. ID no. 15179622
acgtacggtgggctagaagataataggcgcgagtttttccatgttgctccgcctgaagattaccaccgtccagcctgtggcgctgcttcttgggcatgaccatggcgcgacagcatccccgcggcgtctcgccggagcccttccgcagggcggtggagcgtccacgagggcaaagaggctgaggagcgtggcggtggcgatggcgctcaaggaggaggagccggagagcagccgaagccgcttcgccgggggcggcccgagctgggaccccaggatggagatcggagtcccatacgagcaaagaccggttaacgagtactccgctctcaaggagagcaccttgtactcttgggcagagctgagtccaggctctttcttcatgcgcctaggcagcctgtgcctggtcacatttacagttctggcggccccaatctcagccgcaagtttcagtcccggaaaggatccactcaagttcgtgctagctgctgggattgggaccctgctcctggtgtctcttgtggttctcaggatctacctgggttggagctacgtgggtgacaggctattatcggcagtcgtgccgtatgaagaaaccgggtggtacgatggccaaatgtgggtcaagccagcagaggtgctggctcgcgacagactattgggatcttacaaggtaaagccggtgatcaacctgctcaaacagacactggtgggcaccggtgcgctgctcgtcggggcggtggcactcttcgccttcgccgcccccgtcgaggaattcgtccactccttcaatggagcccccactaccgcctcctctaagccgatcatgaggagagaggacctgctgaagctgcctgccgaggtgaggcaagacgacgacctcgctgcggctgctgcggaggccgccaatggacgcccggtttactgcagggaccgctactaccgggcgctcgccggcggtcagtactgcacctcggacgacctgctcaactgatgatagcaaatagtaatagtacatacgtattctggtatatgcagtttgccacattgatataataagcacaagttaagcaaatgtatcttatcggaatgaaattttgggaagaacgatgttgttgattctgtaatagattgcttcatgat

SEQ ID NO: 11047 - protein, 316 aa, Triticum aestivum
  peptide (1)..(316): Ceres Seq. ID no. 15179623
  misc_feature (54)..(316): NCBI GI NO: 40736997 NR Description: expressed protein
  misc_feature (38)..(315): NCBI GI NO: 15240715 NR Description: expressed protein [Arabidopsis thaliana]
  misc_feature (81)..(238): NCBI GI NO: 37520418 NR Description: hypothetical protein [Gloeobacter violaceus]
  misc_feature (83)..(238): NCBI GI NO: 11465739 NR Description: ORF36 [Porphyra purpurea]
  misc_feature (83)..(229): NCBI GI NO: 16331827 NR Description: hypothetical protein [Synechocystis sp. PCC 6803]
  misc_feature (83)..(226): NCBI GI NO: 3184557 NR Description: unknown [Synechococcus sp. PCC 7002]
  misc_feature (83)..(238): NCBI GI NO: 17231662 NR Description: hypothetical protein [Nostoc sp. PCC 7120]
  misc_feature (83)..(233): NCBI GI NO: 23040962 NR Description: hypothetical protein
  misc_feature (83)..(235): NCBI GI NO: 22298607 NR Description: ORF_ID:tll1063~hypothetical protein
  misc_feature (83)..(235): NCBI GI NO: 11467354 NR Description: ycf36 [Cyanophora paradoxa]
MLLRLKITTVQPVALLLGHDHGATASPRRLAGALPQGGGASTRAKRLRSVAVAMALKEEEPESSRSRFAGGGPSWDPRMEIGVPYEQRPVNEYSALKESTLYSWAELSPGSFFMRLGSLCLVTFTVLAAPISAASFSPGKDPLKFVLAAGIGTLLLVSLVVLRIYLGWSYVGDRLLSAVVPYEETGWYDGQMWVKPAEVLARDRLLGSYKVKPVINLLKQTLVGTGALLVGAVALFAFAAPVEEFVHSFNGAPTTASSKPIMRREDLLKLPAEVRQDDDLAAAAAEAANGRPVYCRDRYYRALAGGQYCTSDDLLN

SEQ ID NO: 11048 - protein, 263 aa, Triticum aestivum
  peptide (1)..(263): Ceres Seq. ID no. 15179624
  misc_feature (1)..(263): NCBI GI NO: 40736997 NR Description: expressed protein
  misc_feature (1)..(262): NCBI GI NO: 15240715 NR Description: expressed protein [Arabidopsis thaliana]
  misc_feature (28)..(185): NCBI GI NO: 37520418 NR Description: hypothetical protein [Gloeobacter violaceus]
  misc_feature (30)..(185): NCBI GI NO: 11465739 NR Description: ORF36 [Porphyra purpurea]
  misc_feature (30)..(176): NCBI GI NO: 16331827 NR Description: hypothetical protein [Synechocystis sp. PCC 6803]
  misc_feature (30)..(173): NCBI GI NO: 3184557 NR Description: unknown [Synechococcus sp. PCC 7002]
  misc_feature (30)..(185): NCBI GI NO: 17231662 NR Description: hypothetical protein [Nostoc sp. PCC 7120]
  misc_feature (30)..(180): NCBI GI NO: 23040962 NR Description: hypothetical protein
  misc_feature (30)..(182): NCBI GI NO: 22298607 NR Description: ORF_ID:tll1063~hypothetical protein
  misc_feature (30)..(182): NCBI GI NO: 11467354 NR Description: ycf36 [Cyanophora paradoxa]
MALKEEEPESSRSRFAGGGPSWDPRMEIGVPYEQRPVNEYSALKESTLYSWAELSPGSFFMRLGSLCLVTFTVLAAPISAASFSPGKDPLKFVLAAGIGTLLLVSLVVLRIYLGWSYVGDRLLSAVVPYEETGWYDGQMWVKPAEVLARDRLLGSYKVKPVINLLKQTLVGTGALLVGAVALFAFAAPVEEFVHSFNGAPTTASSKPIMRREDLLKLPAEVRQDDDLAAAAAEAANGRPVYCRDRYYRALAGGQYCTSDDLLN

SEQ ID NO: 11049 - protein, 238 aa, Triticum aestivum
  peptide (1)..(238): Ceres Seq. ID no. 15179625
  misc_feature (1)..(238): NCBI GI NO: 40736997 NR Description: expressed protein
  misc_feature (1)..(237): NCBI GI NO: 15240715 NR Description: expressed protein [Arabidopsis thaliana]
  misc_feature (3)..(160): NCBI GI NO: 37520418 NR Description: hypothetical protein [Gloeobacter violaceus]
  misc_feature (5)..(160): NCBI GI NO: 11465739 NR Description: ORF36 [Porphyra purpurea]
  misc_feature (5)..(151): NCBI GI NO: 16331827 NR Description: hypothetical protein [Synechocystis sp. PCC 6803]
  misc_feature (5)..(148): NCBI GI NO: 3184557 NR Description: unknown [Synechococcus sp. PCC 7002]
  misc_feature (5)..(160): NCBI GI NO: 17231662 NR Description: hypothetical protein [Nostoc sp. PCC 7120]
  misc_feature (5)..(155): NCBI GI NO: 23040962 NR Description: hypothetical protein
  misc_feature (5)..(157): NCBI GI NO: 22298607 NR Description: ORF_ID:tll1063~hypothetical protein
  misc_feature (5)..(157): NCBI GI NO: 11467354 NR Description: ycf36 [Cyanophora paradoxa]
MEIGVPYEQRPVNEYSALKESTLYSWAELSPGSFFMRLGSLCLVTFTVLAAPISAASFSPGKDPLKFVLAAGIGTLLLVSLVVLRIYLGWSYVGDRLLSAVVPYEETGWYDGQMWVKPAEVLARDRLLGSYKVKPVINLLKQTLVGTGALLVGAVALFAFAAPVEEFVHSFNGAPTTASSKPIMRREDLLKLPAEVRQDDDLAAAAAEAANGRPVYCRDRYYRALAGGQYCTSDDLLN

SEQ ID NO: 11050 - DNA, 853 bp, Triticum aestivum
  misc_feature (1)..(853): Ceres Seq. ID no. 12597985
  misc_feature (839)..(839): n is a, c, t, g, unknown, or other
  misc_feature (525)..(525): n is a, c, t, g, unknown, or other
  misc_feature (824)..(824): n is a, c, t, g, unknown, or other
  misc_feature (592)..(592): n is a, c, t, g, unknown, or other
  misc_feature (618)..(618): n is a, c, t, g, unknown, or other
  misc_feature (655)..(655): n is a, c, t, g, unknown, or other
  misc_feature (501)..(501): n is a, c, t, g, unknown, or other
  misc_feature (624)..(624): n is a, c, t, g, unknown, or other
acaccacccggagaactgagctgagatactacttctgttctcttctccccccttttccgagccccccacccgtcatctctccagcctccagtctccgccgacgccatggggcaggtctgggcgtctctgcaagagaagctccaagggcggcactggaaggagaggcaggtgcggaagatcaccgacagggtgttcgaccggctcaccgaggatacccggaagcccgagaaggacgccctcaagttcgaggaggtctacatcgccgtcctctgcgtctacaatgacatcaacaagtacttgccggggccgcactacgaccctccgtccaaggagaggctcaaggaactcatgaaagagtttgacatcgacatgaacggtctcctggatcgcgaggagttcgcggagttcatccggaagctgaccgccgagtcactctgcgcgatcagcctcaagctgatcatcacgctggtcgccgcccctgcgctggcgctggcgaccaanagggcaaccgagggcgtccccggngtcggcaaggtagtgcacaaggtgcccaatgccatttatgccgccgccatcaccatggctgccgtgntcatccagagatccgccgagggcgtngagtanaagcggcatcgcgccgtgaactgtagatgcnccaggcaaccagggagggtgtaaatgtgctgtgatttgccgtgtgaagggtgatgccctgtgggacttatagttttttctgtaataccttcctgtctgtgcttcttggtgttgctagcctggtgtgattcaaaaagacagtattcgctgcttgttgacatgataaattnttggactaaataaanccgtggtcctgctg

SEQ ID NO: 11051 - protein, 190 aa, Triticum aestivum
  peptide (1)..(190): Ceres Seq. ID no. 12597986
  misc_feature (1)..(172): NCBI GI NO: 38344137 NR Description: OSJNBa0041A02.4
  misc_feature (1)..(164): NCBI GI NO: 18408144 NR Description: expressed protein; protein id: At1g64850
  misc_feature (1)..(165): NCBI GI NO: 38344138 NR Description: OSJNBa0041A02.5
  misc_feature (41)..(162): NCBI GI NO: 18420040 NR Description: Expressed protein; protein id: At4g37445
  misc_feature (41)..(162): NCBI GI NO: 26453144 NR Description: unknown protein [Arabidopsis thaliana]
  misc_feature (132)..(132): Xaa is any aa, unknown or other
  misc_feature (140)..(140): Xaa is any aa, unknown or other
  misc_feature (163)..(163): Xaa is any aa, unknown or other
  misc_feature (171)..(171): Xaa is any aa, unknown or other
  misc_feature (173)..(173): Xaa is any aa, unknown or other
  misc_feature (184)..(184): Xaa is any aa, unknown or other
MGQVWASLQEKLQGRHWKERQVRKITDRVFDRLTEDTRKPEKDALKFEEVYIAVLCVYNDINKYLPGPHYDPPSKERLKELMKEFDIDMNGLLDREEFAEFIRKLTAESLCAISLKLIITLVAAPALALATXRATEGVPXVGKVVHKVPNAIYAAAITMAAVXIQRSAEGXEXKRHRAVNCRCXRQPGRV

SEQ ID NO: 11052 - protein, 109 aa, Triticum aestivum
  peptide (1)..(109): Ceres Seq. ID no. 12597987
  misc_feature (1)..(91): NCBI GI NO: 38344137 NR Description: OSJNBa0041A02.4
  misc_feature (1)..(83): NCBI GI NO: 18408144 NR Description: expressed protein; protein id: At1g64850
  misc_feature (1)..(84): NCBI GI NO: 38344138 NR Description: OSJNBa0041A02.5
  misc_feature (1)..(81): NCBI GI NO: 18420040 NR Description: Expressed protein; protein id: At4g37445
  misc_feature (1)..(81): NCBI GI NO: 26453144 NR Description: unknown protein [Arabidopsis thaliana]
  misc_feature (51)..(51): Xaa is any aa, unknown or other
  misc_feature (59)..(59): Xaa is any aa, unknown or other
  misc_feature (82)..(82): Xaa is any aa, unknown or other
  misc_feature (90)..(90): Xaa is any aa, unknown or other
  misc_feature (92)..(92): Xaa is any aa, unknown or other
  misc_feature (103)..(103): Xaa is any aa, unknown or other
MKEFDIDMNGLLDREEFAEFIRKLTAESLCAISLKLIITLVAAPALALATXRATEGVPXVGKVVHKVPNAIYAAAITMAAVXIQRSAEGXEXKRHRAVNCRCXRQPGRV

SEQ ID NO: 11053 - protein, 102 aa, Triticum aestivum
  peptide (1)..(102): Ceres Seq. ID no. 12597988
  misc_feature (1)..(84): NCBI GI NO: 38344137 NR Description: OSJNBa0041A02.4
  misc_feature (1)..(76): NCBI GI NO: 18408144 NR Description: expressed protein; protein id: At1g64850
  misc_feature (1)..(77): NCBI GI NO: 38344138 NR Description: OSJNBa0041A02.5
  misc_feature (1)..(74): NCBI GI NO: 18420040 NR Description: Expressed protein; protein id: At4g37445
  misc_feature (1)..(74): NCBI GI NO: 26453144 NR Description: unknown protein [Arabidopsis thaliana]
  misc_feature (44)..(44): Xaa is any aa, unknown or other
  misc_feature (52)..(52): Xaa is any aa, unknown or other
  misc_feature (75)..(75): Xaa is any aa, unknown or other
  misc_feature (83)..(83): Xaa is any aa, unknown or other
  misc_feature (85)..(85): Xaa is any aa, unknown or other
  misc_feature (96)..(96): Xaa is any aa, unknown or other
MNGLLDREEFAEFIRKLTAESLCAISLKLIITLVAAPALALATXRATEGVPXVGKVVHKVPNAIYAAAITMAAVXIQRSAEGXEXKRHRAVNCRCXRQPGRV

SEQ ID NO: 11054 - DNA, 1231 bp, Triticum aestivum
  misc_feature (1)..(1231): Ceres Seq. ID no. 15225993
atttagcttcccattacaaacacagatcaaaacttcgttcttgtcggaaaaaacaaatcaatggcaaacgcctggaaaagagacaagaatcagaagctattagctccaaagaccttaataatcactcttcttgttctctccatcatcttcctctcctcactcttcttcttctcctcctcctcctcctcctcatatctccaaaacaccaatccaaatccgaccatctccaccaagttcccaatcccacccttcgactgcttcaaatgcccccaatccaaacccgtgatcgccaacgtcgtcgagaatctcaaataccctttcctctactccctcgccgatctcggtaacctcccggagaagccgcacaagaacatcgtgaggctgctcaaggggaagccctttcggaaaccggacatctccgctacgattcaggaggttctggagaggatgagtgctgatggcaaaagagatgggttcgttgtcgatgtgggagctaatgtcggtatggctagcttcgctgccgcggccatggggtttaaagtgcttgcctttgagcctgttttcgagaatttgcagaggatctgtgatgggatttggttcaatagagttgcctctttggtcactgtgtttgaagctgctgcttctgatagaaatggggatattaccttccacaagttggttggaaggcttgacaacagcgcggtttcgaaggtgggagcaagacttgcattcaagtccaacaaagaaatagcggtccaagtgaaatccatacctcttgatgaactcatcccgccttctcaaccgatccttttaatcaagatcgatgttcaaggctgggagaagcatgttttaaacggtgcaaagaagctgctctcgaggaaaccggcggaagctccgtatctaatctacgaggaagatgaaagattgctcaaggcgagcaatagtagctccaaagagatacgggatttcctgaaaagcgttgggtatagcaagtgcgtcgagcatggcacagatgcgcattgcactaaggagtaattgacattggaactttgcgagaagggctaataagttgttgccatgcgagttgaggaacataagaaaatgaggccattagtatttgctgagaaagaaagttgctaattgtggtcagtcatatttgtttctccttgtaatatttactcattttttgtgataccagttctaactagtaaagatatgttattgttgatgt

SEQ ID NO: 11055 - protein, 324 aa, Triticum aestivum
  peptide (1)..(324): Ceres Seq. ID no. 15225994
  misc_feature (135)..(311): Pfam Name: Pfam Description:  Vibrio cholerae RfbT protein
  misc_feature (1)..(324): NCBI GI NO: 21593723 NR Description: unknown [Arabidopsis thaliana]
  misc_feature (1)..(324): NCBI GI NO: 18401209 NR Description: expressed protein [Arabidopsis thaliana]
  misc_feature (2)..(323): NCBI GI NO: 34896590 NR Description: hypothetical protein [Oryza sativa]
MANAWKRDKNQKLLAPKTLIITLLVLSIIFLSSLFFFSSSSSSSYLQNTNPNPTISTKFPIPPFDCFKCPQSKPVIANVVENLKYPFLYSLADLGNLPEKPHKNIVRLLKGKPFRKPDISATIQEVLERMSADGKRDGFVVDVGANVGMASFAAAAMGFKVLAFEPVFENLQRICDGIWFNRVASLVTVFEAAASDRNGDITFHKLVGRLDNSAVSKVGARLAFKSNKEIAVQVKSIPLDELIPPSQPILLIKIDVQGWEKHVLNGAKKLLSRKPAEAPYLIYEEDERLLKASNSSSKEIRDFLKSVGYSKCVEHGTDAHCTKE

SEQ ID NO: 11056 - protein, 195 aa, Triticum aestivum
  peptide (1)..(195): Ceres Seq. ID no. 15225995
  misc_feature (6)..(182): Pfam Name: Pfam Description:  Vibrio cholerae RfbT protein
  misc_feature (1)..(195): NCBI GI NO: 21593723 NR Description: unknown [Arabidopsis thaliana]
  misc_feature (1)..(195): NCBI GI NO: 18401209 NR Description: expressed protein [Arabidopsis thaliana]
  misc_feature (1)..(194): NCBI GI NO: 34896590 NR Description: hypothetical protein [Oryza sativa]
MSADGKRDGFVVDVGANVGMASFAAAAMGFKVLAFEPVFENLQRICDGIWFNRVASLVTVFEAAASDRNGDITFHKLVGRLDNSAVSKVGARLAFKSNKEIAVQVKSIPLDELIPPSQPILLIKIDVQGWEKHVLNGAKKLLSRKPAEAPYLIYEEDERLLKASNSSSKEIRDFLKSVGYSKCVEHGTDAHCTKE

SEQ ID NO: 11057 - protein, 176 aa, Triticum aestivum
  peptide (1)..(176): Ceres Seq. ID no. 15225996
  misc_feature (1)..(163): Pfam Name: Pfam Description:  Vibrio cholerae RfbT protein
  misc_feature (1)..(176): NCBI GI NO: 21593723 NR Description: unknown [Arabidopsis thaliana]
  misc_feature (1)..(176): NCBI GI NO: 18401209 NR Description: expressed protein [Arabidopsis thaliana]
  misc_feature (1)..(175): NCBI GI NO: 34896590 NR Description: hypothetical protein [Oryza sativa]
MASFAAAAMGFKVLAFEPVFENLQRICDGIWFNRVASLVTVFEAAASDRNGDITFHKLVGRLDNSAVSKVGARLAFKSNKEIAVQVKSIPLDELIPPSQPILLIKIDVQGWEKHVLNGAKKLLSRKPAEAPYLIYEEDERLLKASNSSSKEIRDFLKSVGYSKCVEHGTDAHCTKE

SEQ ID NO: 11058 - DNA, 1102 bp, Triticum aestivum
  misc_feature (1)..(1102): Ceres Seq. ID no. 13598724
gactaatatttttcagttgtcaccaaatttctgctctttttaagtaatttaattttatatcagattaaattaaatcccctccgttgttaacgttgtattgttttctgggatgcaggacggcggatcaaagttcttctggttctccatctgcatcatgttcatacgatgtctactgctttggaaaagtattgctggagctggtgacagggagacttggtatcagtgcatcaagtgacggtacaacaagtgattggcttgataacaccctgaggtacatcaacatttatgagaaagagctcatgagcaaaatcattgacccaaccctcattattgatgaggatcatttggaggaagtctgggcaatggcaattgtcgcgaagtcttgcttgaatcctaggtcttcgaagcggccaccaatgaaatatatcctaaaagcacttgagaatcccttgaaagtggtaagagaagataacggctctagctcggccaggttgagagcaacatcttcaaggggttcatggaatgctgcattcttcgggagttggcggcatagctcgtcagagattggtccttcaagggatgataacatgtttaaacggtcagagacaatcaaatcatctggagggagcaatggtgatcactcttcgtcccgcaggaggcaatctaaggagatcttccccgagccatctggttctcgtgacacagaggattaaggatacttcattctttctttttgcgatcctttgggttaacagaggttgctctgttgaagctctgctgccagcgtgtgattagattctttcagctgaaaagccggagggcgaattcgcctgttgccaatgacttcgcaagcagcggactgtcgccgaggcaccattttttgggggttggaatgtgaggtgagcgtatggaggtccgtgtataccctgcctggtgcactgtctggactatggcgtggagtggctctggtttctctttcttttccttttttcttcttctcctggtcatgattaaagaggaaatgtcgagctgattctttttctccttcctgctgtaattgattgtttcattgttgatcatagcaaaaatgttcgttccgtcc

SEQ ID NO: 11059 - protein, 137 aa, Triticum aestivum
  peptide (1)..(137): Ceres Seq. ID no. 13598725
  misc_feature (1)..(131): NCBI GI NO: 34394416 NR Description: putative Systemin receptor SR160 precursor
  misc_feature (1)..(129): NCBI GI NO: 34915200 NR Description: putative  receptor-like protein kinase
  misc_feature (1)..(121): NCBI GI NO: 15226721 NR Description: leucine-rich repeat transmembrane protein kinase
  misc_feature (1)..(125): NCBI GI NO: 15235005 NR Description: leucine-rich repeat transmembrane protein kinase
  misc_feature (1)..(125): NCBI GI NO: 20466770 NR Description: receptor protein kinase-like protein
  misc_feature (57)..(137): NCBI GI NO: 15226721 NR Description: leucine-rich repeat transmembrane protein kinase
  misc_feature (1)..(47): NCBI GI NO: 18395641 NR Description: leucine-rich repeat transmembrane protein kinase
MSKIIDPTLIIDEDHLEEVWAMAIVAKSCLNPRSSKRPPMKYILKALENPLKVVREDNGSSSARLRATSSRGSWNAAFFGSWRHSSSEIGPSRDDNMFKRSETIKSSGGSNGDHSSSRRRQSKEIFPEPSGSRDTED

SEQ ID NO: 11060 - protein, 116 aa, Triticum aestivum
  peptide (1)..(116): Ceres Seq. ID no. 13598726
  misc_feature (1)..(110): NCBI GI NO: 34394416 NR Description: putative Systemin receptor SR160 precursor
  misc_feature (1)..(108): NCBI GI NO: 34915200 NR Description: putative  receptor-like protein kinase
  misc_feature (1)..(100): NCBI GI NO: 15226721 NR Description: leucine-rich repeat transmembrane protein kinase
  misc_feature (1)..(104): NCBI GI NO: 15235005 NR Description: leucine-rich repeat transmembrane protein kinase
  misc_feature (1)..(104): NCBI GI NO: 20466770 NR Description: receptor protein kinase-like protein
  misc_feature (36)..(116): NCBI GI NO: 15226721 NR Description: leucine-rich repeat transmembrane protein kinase
  misc_feature (1)..(26): NCBI GI NO: 18395641 NR Description: leucine-rich repeat transmembrane protein kinase
MAIVAKSCLNPRSSKRPPMKYILKALENPLKVVREDNGSSSARLRATSSRGSWNAAFFGSWRHSSSEIGPSRDDNMFKRSETIKSSGGSNGDHSSSRRRQSKEIFPEPSGSRDTED

SEQ ID NO: 11061 - protein, 98 aa, Triticum aestivum
  peptide (1)..(98): Ceres Seq. ID no. 13598727
  misc_feature (1)..(92): NCBI GI NO: 34394416 NR Description: putative Systemin receptor SR160 precursor
  misc_feature (1)..(90): NCBI GI NO: 34915200 NR Description: putative  receptor-like protein kinase
  misc_feature (1)..(82): NCBI GI NO: 15226721 NR Description: leucine-rich repeat transmembrane protein kinase
  misc_feature (1)..(86): NCBI GI NO: 15235005 NR Description: leucine-rich repeat transmembrane protein kinase
  misc_feature (1)..(86): NCBI GI NO: 20466770 NR Description: receptor protein kinase-like protein
  misc_feature (18)..(98): NCBI GI NO: 15226721 NR Description: leucine-rich repeat transmembrane protein kinase
MKYILKALENPLKVVREDNGSSSARLRATSSRGSWNAAFFGSWRHSSSEIGPSRDDNMFKRSETIKSSGGSNGDHSSSRRRQSKEIFPEPSGSRDTED

SEQ ID NO: 11062 - DNA, 1005 bp, Triticum aestivum
  misc_feature (1)..(1005): Ceres Seq. ID no. 12598249
aaatatccacggagcgcacggaggagatcgtcgtcatccgccaaaccagatcggcttcttcttcttcttcttcttcttcaacttcgcagaatcgtcggcggtcgtctcttcctctagttagatccttcgagagcaatgggaggaggcaatgatggtcatgggtacccacccggtggccaggggggataccctccggcagggtacccgccgcagcagggaggttaccctccacagcaaggaggttaccctccacagcaaggatacccgcctgcacctggagcttacccacctgcacctggggcataccctcctgcacctggggcgtaccctcctgcacctggagcgggaggccctgacggggagaaggggctcctctccaacatcatgcatggtgttgccggtgctcatggtggtggtcatggctacccatctggtggccacgggtaccccccgcagcagcatggataccctcagcaaggctaccctcctcagcatggctacccaccgcagcagcatggctaccctccacagcagcatggctacccccctgctggctaccctggctcatctggtcacagtggtagccatggaggaggaggcatgggcatgggtggcattctggctggaggagcagcagctgctgccgccgcttacggagcacacaagctttctcacggcggccacggtggaggtggacacatgatgggaggcatgatgggcggccatggaggatatggcggcgggtacggccaccacggcggcaagttcaagcacgggaagcacggccacggcaagttcaagcacggcaagcatgggaagcacggcatgttcggcggcggcggaaagttcaagaagtggaagtaatgcgctagctagtagcttcaccatggctgatgaatcaaaaaaaatacctaatctcttcgtgtaggcttccagaacttggtttggtcagggaaagcctttgtagatgtatctaagcagggtgtggtgtggttgcttcccggc

SEQ ID NO: 11063 - protein, 242 aa, Triticum aestivum
  peptide (1)..(242): Ceres Seq. ID no. 12598250
  misc_feature (7)..(236): Pfam Name: Pfam Description:  Dehydrin
  misc_feature (74)..(242): NCBI GI NO: 6478148 NR Description: putative glycine and proline-rich protein
  misc_feature (57)..(242): NCBI GI NO: 33668156 NR Description: GPRP [Oryza sativa (indica cultivar-group)]
  misc_feature (67)..(242): NCBI GI NO: 13543234 NR Description: Unknown (protein for MGC:12025) [Mus musculus]
  misc_feature (93)..(242): NCBI GI NO: 15234178 NR Description: putative protein; protein id: At4g19200
  misc_feature (69)..(234): NCBI GI NO: 8099125 NR Description: rice EST C27893 corresponds to a region of thepredicated gene
  misc_feature (74)..(242): NCBI GI NO: 13543234 NR Description: Unknown (protein for MGC:12025) [Mus musculus]
  misc_feature (50)..(235): NCBI GI NO: 18422542 NR Description: expressed protein; protein id: At5g45350
  misc_feature (85)..(242): NCBI GI NO: 15238005 NR Description: glycine/proline-rich protein; protein id:At5g17650
  misc_feature (94)..(242): NCBI GI NO: 18398103 NR Description: expressed protein; protein id: At1g31750
  misc_feature (94)..(242): NCBI GI NO: 21553447 NR Description: putative glycine and proline-rich protein
MGGGNDGHGYPPGGQGGYPPAGYPPQQGGYPPQQGGYPPQQGYPPAPGAYPPAPGAYPPAPGAYPPAPGAGGPDGEKGLLSNIMHGVAGAHGGGHGYPSGGHGYPPQQHGYPQQGYPPQHGYPPQQHGYPPQQHGYPPAGYPGSSGHSGSHGGGGMGMGGILAGGAAAAAAAYGAHKLSHGGHGGGGHMMGGMMGGHGGYGGGYGHHGGKFKHGKHGHGKFKHGKHGKHGMFGGGGKFKKWK

SEQ ID NO: 11064 - protein, 184 aa, Triticum aestivum
  peptide (1)..(184): Ceres Seq. ID no. 12598251
MMVMGTHPVARGDTLRQGTRRSREVTLHSKEVTLHSKDTRLHLELTHLHLGHTLLHLGRTLLHLEREALTGRRGSSPTSCMVLPVLMVVVMATHLVATGTPRSSMDTLSKATLLSMATHRSSMATLHSSMATPLLATLAHLVTVVAMEEEAWAWVAFWLEEQQLLPPLTEHTSFLTAATVEVDT

SEQ ID NO: 11065 - protein, 183 aa, Triticum aestivum
  peptide (1)..(183): Ceres Seq. ID no. 12598252
MVMGTHPVARGDTLRQGTRRSREVTLHSKEVTLHSKDTRLHLELTHLHLGHTLLHLGRTLLHLEREALTGRRGSSPTSCMVLPVLMVVVMATHLVATGTPRSSMDTLSKATLLSMATHRSSMATLHSSMATPLLATLAHLVTVVAMEEEAWAWVAFWLEEQQLLPPLTEHTSFLTAATVEVDT

SEQ ID NO: 11066 - DNA, 778 bp, Triticum aestivum
  misc_feature (1)..(778): Ceres Seq. ID no. 13661310
ataaattcccacgaccatcggaccaaagaatcatacccctctcttctagccattcaaactagtaaacaatggggatactcaggaagaaaaaacacgagcgaaagccgtcgtttaagagtgttttaacctcaatattagctacacaagccgcaacattcctcttgttgatctccggtgtatccctcgccggcacagccaccgcatttatcgctaccatgccactattcgtagtattcagtccgattctcgtaccagctggtattaccactggtttactgactacgggtttagcagccgccggtggcgccggtgcgactgctgtcaccatcatcctgtggctctacaagcaagcaacgggcaaggagccgccagcagtcctgtcaaaagtcttgaaaaagataataccaggtgctgcagccgcgccagcagccgcaccagcagccgctccagcagccgcaccagctgccgcgccagcagccgcaccagcacctaagcccgcagccgcaccagcacctaagccagcagccccaccggcactatgaaaagaagtggtgggcatgagtaaaggctgatatggaaaatttgatacatggaaacaaaagagtaatccaactttttaaaaataaataacaacttcacgtggggatagaaaaaaattcaaatattattctactaatggatgtcgtggtacaaagtagtaacaaatgtaagcatatttattgtatagcattttaagaacgaagctgtgtatcgttgatattagtaccttattcaagtt

SEQ ID NO: 11067 - protein, 157 aa, Triticum aestivum
  peptide (1)..(157): Ceres Seq. ID no. 13661311
  misc_feature (14)..(128): Pfam Name: Pfam Description:  Oleosin
  misc_feature (1)..(157): NCBI GI NO: 1076452 NR Description: oleosin - rape
  misc_feature (1)..(156): NCBI GI NO: 1076453 NR Description: oleosin - rape
  misc_feature (1)..(157): NCBI GI NO: 123952 NR Description: MICROSPORE-SPECIFIC PROTEIN I3
  misc_feature (1)..(140): NCBI GI NO: 7488519 NR Description: anther-specific protein BNA237 - turnip
  misc_feature (11)..(147): NCBI GI NO: 15240816 NR Description: glycine-rich protein GRP20 [Arabidopsis thaliana]
  misc_feature (11)..(147): NCBI GI NO: 15081213 NR Description: glycine-rich protein GRP20 [Arabidopsis thaliana]
  misc_feature (11)..(145): NCBI GI NO: 15081227 NR Description: glycine-rich protein GRP20 [Arabidopsis thaliana]
  misc_feature (11)..(145): NCBI GI NO: 15081220 NR Description: glycine-rich protein GRP20 [Arabidopsis thaliana]
  misc_feature (56)..(140): NCBI GI NO: 7488475 NR Description: oleosin-like protein OLN8 - rape (fragment)
  misc_feature (55)..(141): NCBI GI NO: 7488470 NR Description: oleosin-like protein OLN10 - rape (fragment)
MGILRKKKHERKPSFKSVLTSILATQAATFLLLISGVSLAGTATAFIATMPLFVVFSPILVPAGITTGLLTTGLAAAGGAGATAVTIILWLYKQATGKEPPAVLSKVLKKIIPGAAAAPAAAPAAAPAAAPAAAPAAAPAPKPAAAPAPKPAAPPAL

SEQ ID NO: 11068 - protein, 108 aa, Triticum aestivum
  peptide (1)..(108): Ceres Seq. ID no. 13661312
  misc_feature (1)..(79): Pfam Name: Pfam Description:  Oleosin
  misc_feature (1)..(108): NCBI GI NO: 1076452 NR Description: oleosin - rape
  misc_feature (1)..(107): NCBI GI NO: 1076453 NR Description: oleosin - rape
  misc_feature (1)..(108): NCBI GI NO: 123952 NR Description: MICROSPORE-SPECIFIC PROTEIN I3
  misc_feature (1)..(91): NCBI GI NO: 7488519 NR Description: anther-specific protein BNA237 - turnip
  misc_feature (1)..(98): NCBI GI NO: 15240816 NR Description: glycine-rich protein GRP20 [Arabidopsis thaliana]
  misc_feature (1)..(98): NCBI GI NO: 15081213 NR Description: glycine-rich protein GRP20 [Arabidopsis thaliana]
  misc_feature (1)..(96): NCBI GI NO: 15081227 NR Description: glycine-rich protein GRP20 [Arabidopsis thaliana]
  misc_feature (1)..(96): NCBI GI NO: 15081220 NR Description: glycine-rich protein GRP20 [Arabidopsis thaliana]
  misc_feature (7)..(91): NCBI GI NO: 7488475 NR Description: oleosin-like protein OLN8 - rape (fragment)
  misc_feature (6)..(92): NCBI GI NO: 7488470 NR Description: oleosin-like protein OLN10 - rape (fragment)
MPLFVVFSPILVPAGITTGLLTTGLAAAGGAGATAVTIILWLYKQATGKEPPAVLSKVLKKIIPGAAAAPAAAPAAAPAAAPAAAPAAAPAPKPAAAPAPKPAAPPAL

SEQ ID NO: 11069 - DNA, 513 bp, Triticum aestivum
  misc_feature (1)..(513): Ceres Seq. ID no. 13663329
agtaatactaggctcaaagacaggaaaggtcacacgcactcccctgatctccccgtttctccccaaatcctcagcaaccccgccagatcgcgggcgatcttctcgcaggctgcctgcgacgagcgcgtgtgccaggcgccagcaaccaccggcctccttgcagtggcgcacctgcagccgctgcataataatccgtagcggcgacagtgagaaagcgagagaagaggggatgaccagcctgtccatcacggtgatgacgctgaacctgcacgaggggaatcaaccgggcgagagccctaacagctgggagaagcgccgcgacatctgcgtcagcgtcatcaccagttactcccccaccatcctctgcacccagcaagggttgaggtgccagctggactacctacagcaatgcctgcctggttatgagcaatttggcatttcaagaaaaagttcacaggacaccactgatgaatattgcacaatattctacgaaaaggagaaggtggagcttac

SEQ ID NO: 11070 - protein, 170 aa, Triticum aestivum
  peptide (1)..(170): Ceres Seq. ID no. 13663330
  misc_feature (84)..(169): Pfam Name: Pfam Description:  Endonuclease/Exonuclease/phosphatase family
VILGSKTGKVTRTPLISPFLPKSSATPPDRGRSSRRLPATSACARRQQPPASLQWRTCSRCIIIRSGDSEKAREEGMTSLSITVMTLNLHEGNQPGESPNSWEKRRDICVSVITSYSPTILCTQQGLRCQLDYLQQCLPGYEQFGISRKSSQDTTDEYCTIFYEKEKVEL

SEQ ID NO: 11071 - protein, 94 aa, Triticum aestivum
  peptide (1)..(94): Ceres Seq. ID no. 13663331
  misc_feature (8)..(93): Pfam Name: Pfam Description:  Endonuclease/Exonuclease/phosphatase family
MTSLSITVMTLNLHEGNQPGESPNSWEKRRDICVSVITSYSPTILCTQQGLRCQLDYLQQCLPGYEQFGISRKSSQDTTDEYCTIFYEKEKVEL

SEQ ID NO: 11072 - protein, 86 aa, Triticum aestivum
  peptide (1)..(86): Ceres Seq. ID no. 13663332
  misc_feature (1)..(85): Pfam Name: Pfam Description:  Endonuclease/Exonuclease/phosphatase family
MTLNLHEGNQPGESPNSWEKRRDICVSVITSYSPTILCTQQGLRCQLDYLQQCLPGYEQFGISRKSSQDTTDEYCTIFYEKEKVEL

SEQ ID NO: 11073 - DNA, 769 bp, Triticum aestivum
  misc_feature (1)..(769): Ceres Seq. ID no. 13661117
atcgaaaaacccacatacgacaagaaaactgcaccagtgcacaccagtgctagtgtgtgacacgccaccatgaggtctctgcaggctgtgctcgtggcggtcctcgtcctgctcgccgtcgccgcgacgacagacgccgcgtgggcgccgataccggaccgcgacctgaacggcatggtggtgcagcaggcgggccggttcgccgtgctcgtgcatgacatcacgcaccggacgaccctggtgttcgtcaaggtggagcgcggcgagatggagcggccggtcggcggcggcaacggcaccaactaccggctcgtggtgaccgcggcgagggcgcccggcgggaacaagggccagtacgagtgcgtcgtgtggggcgtgcccggctcgcgcaccagcacctggaagctcctcagcttcaaggcgctctagctgcatgcatggccactgagcactcgtacgtgtgagtgtgatggtccgaggcaaagccgcgcgcgtactccgctgaataatctgcatatagtatgtgcatgggttttttaagtactggtacacgtcctttaatttgtaacccgcgtaggcacggcaaatacctgtctgcgtgcagtccgcacacactagcgccggaataagtaagttgtgactatcacccagtatacttcttttttgtcatcactgcccgaatgatgtatgttggtgattttataagagtcttgatactatgatcgttccctactakgakgggggtcttgatactatgatcgttcccttg

SEQ ID NO: 11074 - protein, 119 aa, Triticum aestivum
  peptide (1)..(119): Ceres Seq. ID no. 15220071
  misc_feature (1)..(118): NCBI GI NO: 37534118 NR Description: hypothetical protein
MRSLQAVLVAVLVLLAVAATTDAAWAPIPDRDLNGMVVQQAGRFAVLVHDITHRTTLVFVKVERGEMERPVGGGNGTNYRLVVTAARAPGGNKGQYECVVWGVPGSRTSTWKLLSFKAL

SEQ ID NO: 11075 - protein, 84 aa, Triticum aestivum
  peptide (1)..(84): Ceres Seq. ID no. 15220072
  misc_feature (1)..(83): NCBI GI NO: 37534118 NR Description: hypothetical protein
MVVQQAGRFAVLVHDITHRTTLVFVKVERGEMERPVGGGNGTNYRLVVTAARAPGGNKGQYECVVWGVPGSRTSTWKLLSFKAL

SEQ ID NO: 11076 - DNA, 869 bp, Triticum aestivum
  misc_feature (1)..(869): Ceres Seq. ID no. 13662992
atcggtacttaggttgtgatcccttcaccactgcgccatgcccacatccaaggcatttctcatcttggtgctcgccgtgctcactcccatggcggcgacctcccaggacacggcgacgaacctcaccctccacaacctgtgcgcgtaccctgtgtggccgctcatcactccgaacatcggcctccccgccatccccgacctggacgacgccgccagccgcctcgacgggggcggagaggggctcgtcaccctggcgttcccttccggcgcgtggtccggccgcgtcgtggcgcgcaccggctgcagcagcagcgatgactacgactcctcctccccctcctcctcctcgacggcggcggtggccaggtgcgtcacgggcatgccgccggcgccggtgacggtggcgcaggtgagcgtgcacgggtccggcgggctggcggagtacagcgtgagcctggtggacgggttcaacctgccggtgatggtgacgccgcacgggttcgagcagggccggcagtgcccgtccctcggctgcgccgtggacctcgacgtggactgcccccgcgacgccagggcccccgccggcgggtgcagggcccagggtcaggggcacttcttcaaggagaggtgcccggacactcggacgacgccgacggacgtggaggccacgccacagcgctgcctccagcccggcgagctcaagatcgtcttctgccccgattcttccgactagtcacttgctaccacacacactaggctagctagaccggctgtgtgtcactcacgatgccggttatataataagctaagcgattgattgctgattcgctaagccagattcaaccgaataatatgttaactattcttct

SEQ ID NO: 11077 - protein, 231 aa, Triticum aestivum
  peptide (1)..(231): Ceres Seq. ID no. 13662993
  misc_feature (33)..(227): Pfam Name: Pfam Description:  Thaumatin family
  misc_feature (26)..(227): NCBI GI NO: 4105697 NR Description: thaumatin-like protein [Arabidopsis thaliana]
  misc_feature (26)..(227): NCBI GI NO: 15222875 NR Description: thaumatin family [Arabidopsis thaliana]
  misc_feature (12)..(227): NCBI GI NO: 7442162 NR Description: osmotin protein homolog - rice (fragment)
  misc_feature (4)..(198): NCBI GI NO: 37531042 NR Description: putative thaumatin-like protein
  misc_feature (12)..(185): NCBI GI NO: 2062389 NR Description: pathogenesis-related thaumatin-like protein
  misc_feature (12)..(185): NCBI GI NO: 7442171 NR Description: thaumatin-like protein - rice
  misc_feature (182)..(227): NCBI GI NO: 2062389 NR Description: pathogenesis-related thaumatin-like protein
  misc_feature (182)..(227): NCBI GI NO: 7442171 NR Description: thaumatin-like protein - rice
  misc_feature (7)..(229): NCBI GI NO: 5823278 NR Description: osmotin-like protein [Benincasa hispida]
  misc_feature (9)..(227): NCBI GI NO: 30692042 NR Description: thaumatin family [Arabidopsis thaliana]
MPTSKAFLILVLAVLTPMAATSQDTATNLTLHNLCAYPVWPLITPNIGLPAIPDLDDAASRLDGGGEGLVTLAFPSGAWSGRVVARTGCSSSDDYDSSSPSSSSTAAVARCVTGMPPAPVTVAQVSVHGSGGLAEYSVSLVDGFNLPVMVTPHGFEQGRQCPSLGCAVDLDVDCPRDARAPAGGCRAQGQGHFFKERCPDTRTTPTDVEATPQRCLQPGELKIVFCPDSSD

SEQ ID NO: 11078 - protein, 214 aa, Triticum aestivum
  peptide (1)..(214): Ceres Seq. ID no. 13662994
  misc_feature (16)..(210): Pfam Name: Pfam Description:  Thaumatin family
  misc_feature (9)..(210): NCBI GI NO: 4105697 NR Description: thaumatin-like protein [Arabidopsis thaliana]
  misc_feature (9)..(210): NCBI GI NO: 15222875 NR Description: thaumatin family [Arabidopsis thaliana]
  misc_feature (1)..(210): NCBI GI NO: 7442162 NR Description: osmotin protein homolog - rice (fragment)
  misc_feature (1)..(181): NCBI GI NO: 37531042 NR Description: putative thaumatin-like protein
  misc_feature (1)..(168): NCBI GI NO: 2062389 NR Description: pathogenesis-related thaumatin-like protein
  misc_feature (1)..(168): NCBI GI NO: 7442171 NR Description: thaumatin-like protein - rice
  misc_feature (165)..(210): NCBI GI NO: 2062389 NR Description: pathogenesis-related thaumatin-like protein
  misc_feature (165)..(210): NCBI GI NO: 7442171 NR Description: thaumatin-like protein - rice
  misc_feature (1)..(212): NCBI GI NO: 5823278 NR Description: osmotin-like protein [Benincasa hispida]
  misc_feature (1)..(210): NCBI GI NO: 30692042 NR Description: thaumatin family [Arabidopsis thaliana]
MAATSQDTATNLTLHNLCAYPVWPLITPNIGLPAIPDLDDAASRLDGGGEGLVTLAFPSGAWSGRVVARTGCSSSDDYDSSSPSSSSTAAVARCVTGMPPAPVTVAQVSVHGSGGLAEYSVSLVDGFNLPVMVTPHGFEQGRQCPSLGCAVDLDVDCPRDARAPAGGCRAQGQGHFFKERCPDTRTTPTDVEATPQRCLQPGELKIVFCPDSSD

SEQ ID NO: 11079 - protein, 131 aa, Triticum aestivum
  peptide (1)..(131): Ceres Seq. ID no. 13662995
RYLGCDPFTTAPCPHPRHFSSWCSPCSLPWRRPPRTRRRTSPSTTCARTLCGRSSLRTSASPPSPTWTTPPAASTGAERGSSPWRSLPARGPAASWRAPAAAAAMTTTPPPPPPPRRRRWPGASRACRRRR

SEQ ID NO: 11080 - DNA, 627 bp, Triticum aestivum
  misc_feature (1)..(627): Ceres Seq. ID no. 12623242
acaaaaccatcacagctagtactagacaccgagacagcccttggaagatcgatcagtagctaccaaaaccaatttcgattttagcctcgcttgaacgcggacattttccgagtttctatttctcattgatagggagcatctgccaaaccagcagcacgcaaaatgaagcaaagattgtcatccaattgagcatgtcgtgcgacaaacgccggtcgaaagcactgacgctggcctccagagcagccggggtgacgtcgatgggcataaccggcgacgccagggaccagctggaggtggtcggtgacggcgtcgacccggtgtgcctcgtcagctgcctccgcaagaaactcggccacgcccacatcatcaaggtagaggaagtgaagaagccggaggagaagaagaagccggtgaaccccccgcagtactactactcgccggcgccggccggctactaccaccaccaatacccgccgcacatggtcgtctgcgaggaacagcctagcaactgccggaccatgtaactgccagagaacgattttgacgtagtactttaattttgtcagcaactatagttgcatacatgtacttgtaaattaattggaggaagaaataaaaaggagaaag

SEQ ID NO: 11081 - protein, 110 aa, Triticum aestivum
  peptide (1)..(110): Ceres Seq. ID no. 12623243
  misc_feature (1)..(110): NCBI GI NO: 21741986 NR Description: OSJNBa0060P14.7
  misc_feature (1)..(110): NCBI GI NO: 38606529 NR Description: OSJNBa0016O02.17
  misc_feature (1)..(110): NCBI GI NO: 38606530 NR Description: OSJNBa0016O02.18
  misc_feature (1)..(78): NCBI GI NO: 38606531 NR Description: OSJNBa0016O02.19
  misc_feature (1)..(110): NCBI GI NO: 38606532 NR Description: OSJNBa0016O02.20
  misc_feature (1)..(64): NCBI GI NO: 18412779 NR Description: hypothetical protein; protein id: At4g05030.1
  misc_feature (1)..(76): NCBI GI NO: 15231057 NR Description: hypothetical protein; protein id: At3g20180.1
  misc_feature (1)..(73): NCBI GI NO: 4097549 NR Description: ATFP4 [Arabidopsis thaliana]
  misc_feature (1)..(73): NCBI GI NO: 15231486 NR Description: unknown protein; protein id: At3g07600.1
  misc_feature (1)..(71): NCBI GI NO: 8978333 NR Description: ATFP4-like [Arabidopsis thaliana]
MSCDKRRSKALTLASRAAGVTSMGITGDARDQLEVVGDGVDPVCLVSCLRKKLGHAHIIKVEEVKKPEEKKKPVNPPQYYYSPAPAGYYHHQYPPHMVVCEEQPSNCRTM

SEQ ID NO: 11082 - protein, 88 aa, Triticum aestivum
  peptide (1)..(88): Ceres Seq. ID no. 12623244
  misc_feature (1)..(88): NCBI GI NO: 21741986 NR Description: OSJNBa0060P14.7
  misc_feature (1)..(88): NCBI GI NO: 38606529 NR Description: OSJNBa0016O02.17
  misc_feature (1)..(88): NCBI GI NO: 38606530 NR Description: OSJNBa0016O02.18
  misc_feature (1)..(56): NCBI GI NO: 38606531 NR Description: OSJNBa0016O02.19
  misc_feature (1)..(88): NCBI GI NO: 38606532 NR Description: OSJNBa0016O02.20
  misc_feature (1)..(42): NCBI GI NO: 18412779 NR Description: hypothetical protein; protein id: At4g05030.1
  misc_feature (1)..(54): NCBI GI NO: 15231057 NR Description: hypothetical protein; protein id: At3g20180.1
  misc_feature (1)..(51): NCBI GI NO: 4097549 NR Description: ATFP4 [Arabidopsis thaliana]
  misc_feature (1)..(51): NCBI GI NO: 15231486 NR Description: unknown protein; protein id: At3g07600.1
  misc_feature (1)..(49): NCBI GI NO: 8978333 NR Description: ATFP4-like [Arabidopsis thaliana]
MGITGDARDQLEVVGDGVDPVCLVSCLRKKLGHAHIIKVEEVKKPEEKKKPVNPPQYYYSPAPAGYYHHQYPPHMVVCEEQPSNCRTM

SEQ ID NO: 11083 - DNA, 1016 bp, Triticum aestivum
  misc_feature (1)..(1016): Ceres Seq. ID no. 13664262
  misc_feature (217)..(217): n is a, c, t, g, unknown, or other
  misc_feature (218)..(218): n is a, c, t, g, unknown, or other
gtattaagacatgaggagctgagtcttccggagagactgcgaaaaccctaatttcgttcgtgcgcgaaaggggtttttggttctatcttcagacaacgatgatgcaccactcaaccgacgattcggaacctgatggtgctatgcccgtccaacaaagagacgactctgcctcctcctccgactctgcttccgccgtttctaatcacaccatcactannaccgtttaccatggctcctccgaccaccatctccatgttcctcagcacgccactttcggggatgtgaagaaagcctttgttctggaaactgggttggaggctactgatctgaagatcttgttcaggggagatgtgaaagatgacgctgagcagttgcaagctgctggtgttacggacgggtctgtagttgtccttgtggatgagcctaataagggagttgaccatgttgaaccgcctcctgtgatgaccgaagagattgccaaggctattgctgctgttctagcagtctctggagaggtcgatgagctctcggatagggttggtgctttagaggctgctgtcgatggagggacgatagttgcggtgaaggagtttgacatgactgctgagctgctcatgaggcagttgctcaaattggatggcatcaaggcagatggggaagctagactacagcgaaaggcagaggtacgtagggttcaaaagttgcaggaggatgtggatacgttgaaggcaagatgttacagagcaaagccgcagctgtaagcactgagtgggattcgttctgaaacggtgttggagagcttgaaccctcctccgccagctttcgccttgtaccaatgtaaacccaagattgggagaaattttactgacatttttattattctgttacgttacaaaaaaaatattgcttctttttgttattgttaaatgaggaaatgaccagaaaaatatgggttgtatcctggaatttgtatgatttttttagtatctcaatctgaatagcaatacatttttttt

SEQ ID NO: 11084 - protein, 220 aa, Triticum aestivum
  peptide (1)..(220): Ceres Seq. ID no. 13664263
  misc_feature (129)..(210): Pfam Name: Pfam Description:  BAG domain
  misc_feature (1)..(220): NCBI GI NO: 15231035 NR Description: expressed protein [Arabidopsis thaliana]
  misc_feature (1)..(220): NCBI GI NO: 19699283 NR Description: At3g51780/ORF3 [Arabidopsis thaliana]
  misc_feature (2)..(220): NCBI GI NO: 21554254 NR Description: unknown [Arabidopsis thaliana]
  misc_feature (13)..(220): NCBI GI NO: 34907972 NR Description: P0446G04.18
  misc_feature (13)..(212): NCBI GI NO: 25553557 NR Description: OSJNBa0038F22.4
  misc_feature (13)..(212): NCBI GI NO: 34898024 NR Description: ESTs AU082174
  misc_feature (13)..(219): NCBI GI NO: 15242267 NR Description: BAG domain containing protein
  misc_feature (8)..(212): NCBI GI NO: 21537107 NR Description: unknown [Arabidopsis thaliana]
  misc_feature (8)..(212): NCBI GI NO: 15240726 NR Description: BAG domain containing protein
  misc_feature (38)..(210): NCBI GI NO: 6624711 NR Description: hypothetical protein
  misc_feature (40)..(40): Xaa is any aa, unknown or other
MMHHSTDDSEPDGAMPVQQRDDSASSSDSASAVSNHTITXTVYHGSSDHHLHVPQHATFGDVKKAFVLETGLEATDLKILFRGDVKDDAEQLQAAGVTDGSVVVLVDEPNKGVDHVEPPPVMTEEIAKAIAAVLAVSGEVDELSDRVGALEAAVDGGTIVAVKEFDMTAELLMRQLLKLDGIKADGEARLQRKAEVRRVQKLQEDVDTLKARCYRAKPQL

SEQ ID NO: 11085 - protein, 219 aa, Triticum aestivum
  peptide (1)..(219): Ceres Seq. ID no. 13664264
  misc_feature (128)..(209): Pfam Name: Pfam Description:  BAG domain
  misc_feature (1)..(219): NCBI GI NO: 15231035 NR Description: expressed protein [Arabidopsis thaliana]
  misc_feature (1)..(219): NCBI GI NO: 19699283 NR Description: At3g51780/ORF3 [Arabidopsis thaliana]
  misc_feature (1)..(219): NCBI GI NO: 21554254 NR Description: unknown [Arabidopsis thaliana]
  misc_feature (12)..(219): NCBI GI NO: 34907972 NR Description: P0446G04.18
  misc_feature (12)..(211): NCBI GI NO: 25553557 NR Description: OSJNBa0038F22.4
  misc_feature (12)..(211): NCBI GI NO: 34898024 NR Description: ESTs AU082174
  misc_feature (12)..(218): NCBI GI NO: 15242267 NR Description: BAG domain containing protein
  misc_feature (7)..(211): NCBI GI NO: 21537107 NR Description: unknown [Arabidopsis thaliana]
  misc_feature (7)..(211): NCBI GI NO: 15240726 NR Description: BAG domain containing protein
  misc_feature (37)..(209): NCBI GI NO: 6624711 NR Description: hypothetical protein
  misc_feature (39)..(39): Xaa is any aa, unknown or other
MHHSTDDSEPDGAMPVQQRDDSASSSDSASAVSNHTITXTVYHGSSDHHLHVPQHATFGDVKKAFVLETGLEATDLKILFRGDVKDDAEQLQAAGVTDGSVVVLVDEPNKGVDHVEPPPVMTEEIAKAIAAVLAVSGEVDELSDRVGALEAAVDGGTIVAVKEFDMTAELLMRQLLKLDGIKADGEARLQRKAEVRRVQKLQEDVDTLKARCYRAKPQL

SEQ ID NO: 11086 - protein, 206 aa, Triticum aestivum
  peptide (1)..(206): Ceres Seq. ID no. 13664265
  misc_feature (115)..(196): Pfam Name: Pfam Description:  BAG domain
  misc_feature (1)..(206): NCBI GI NO: 15231035 NR Description: expressed protein [Arabidopsis thaliana]
  misc_feature (1)..(206): NCBI GI NO: 19699283 NR Description: At3g51780/ORF3 [Arabidopsis thaliana]
  misc_feature (1)..(206): NCBI GI NO: 21554254 NR Description: unknown [Arabidopsis thaliana]
  misc_feature (1)..(206): NCBI GI NO: 34907972 NR Description: P0446G04.18
  misc_feature (1)..(198): NCBI GI NO: 25553557 NR Description: OSJNBa0038F22.4
  misc_feature (1)..(198): NCBI GI NO: 34898024 NR Description: ESTs AU082174
  misc_feature (1)..(205): NCBI GI NO: 15242267 NR Description: BAG domain containing protein
  misc_feature (1)..(198): NCBI GI NO: 21537107 NR Description: unknown [Arabidopsis thaliana]
  misc_feature (1)..(198): NCBI GI NO: 15240726 NR Description: BAG domain containing protein
  misc_feature (24)..(196): NCBI GI NO: 6624711 NR Description: hypothetical protein
  misc_feature (26)..(26): Xaa is any aa, unknown or other
MPVQQRDDSASSSDSASAVSNHTITXTVYHGSSDHHLHVPQHATFGDVKKAFVLETGLEATDLKILFRGDVKDDAEQLQAAGVTDGSVVVLVDEPNKGVDHVEPPPVMTEEIAKAIAAVLAVSGEVDELSDRVGALEAAVDGGTIVAVKEFDMTAELLMRQLLKLDGIKADGEARLQRKAEVRRVQKLQEDVDTLKARCYRAKPQL

SEQ ID NO: 11087 - DNA, 892 bp, Triticum aestivum
  misc_feature (1)..(892): Ceres Seq. ID no. 13661594
agattcaggtgatggcaatgctaatggcagtacaggcagtggtagatcagtaggaaatcatatggttaacccatcacaaattgggaaggcagagtcagttaatctccagtttggttcttttgggattagcgcgtggctgagtgacacaggcggtggcaccagccatgctggaagtgtagatgacctgagggctgatgggatcgagacaagcggtagatacttctcctcatgctgcagctcaccaaaaacgtcagactgcgcctccaaagagcatatggaggattattcagtctatggtagtgaagaggatgctgacgacccacctgatgctgaaactgatgaggatctaactgatgaagaaagggatgctcatgagattgaagcgggctccgtcgacgagcactccaccaagtctgacgaggagtacgacgacctagccatgcaggacgtgatggggaacggcaactgctccgacgacgacgacgagcaagctgcagggtacggcaccaggggctcacagcccatggaggagagcatccttggagcagatggcgccgtggtggagggcaggtaccaccacaacctggacctcttcacgatgtccaaggacgtcgccgccacaaagatgccgtgcgcgtgacacagcctaacccgaccaacccctgggggaagaaagacaccactgccacggttcactgtcagccgcggtgctcttgggcacattctccggtggtgcttaggagtctgcaccggttactgtacccatatgagcttatgttggtggttgtgactgttagaggatctcatgcttggctatatataggaatcctggggctttgcccttttgtcgaaactcgaataatgaaaagttgaaattgcattctgaatttgc

SEQ ID NO: 11088 - protein, 212 aa, Triticum aestivum
  peptide (1)..(212): Ceres Seq. ID no. 13661595
  misc_feature (26)..(208): NCBI GI NO: 11290092 NR Description: hypothetical protein T14D3
  misc_feature (26)..(208): NCBI GI NO: 18407911 NR Description: expressed protein [Arabidopsis thaliana]
  misc_feature (19)..(212): NCBI GI NO: 30697428 NR Description: expressed protein [Arabidopsis thaliana]
DSGDGNANGSTGSGRSVGNHMVNPSQIGKAESVNLQFGSFGISAWLSDTGGGTSHAGSVDDLRADGIETSGRYFSSCCSSPKTSDCASKEHMEDYSVYGSEEDADDPPDAETDEDLTDEERDAHEIEAGSVDEHSTKSDEEYDDLAMQDVMGNGNCSDDDDEQAAGYGTRGSQPMEESILGADGAVVEGRYHHNLDLFTMSKDVAATKMPCA

SEQ ID NO: 11089 - protein, 192 aa, Triticum aestivum
  peptide (1)..(192): Ceres Seq. ID no. 13661596
  misc_feature (6)..(188): NCBI GI NO: 11290092 NR Description: hypothetical protein T14D3
  misc_feature (6)..(188): NCBI GI NO: 18407911 NR Description: expressed protein [Arabidopsis thaliana]
  misc_feature (1)..(192): NCBI GI NO: 30697428 NR Description: expressed protein [Arabidopsis thaliana]
MVNPSQIGKAESVNLQFGSFGISAWLSDTGGGTSHAGSVDDLRADGIETSGRYFSSCCSSPKTSDCASKEHMEDYSVYGSEEDADDPPDAETDEDLTDEERDAHEIEAGSVDEHSTKSDEEYDDLAMQDVMGNGNCSDDDDEQAAGYGTRGSQPMEESILGADGAVVEGRYHHNLDLFTMSKDVAATKMPCA

SEQ ID NO: 11090 - protein, 121 aa, Triticum aestivum
  peptide (1)..(121): Ceres Seq. ID no. 13661597
  misc_feature (1)..(117): NCBI GI NO: 11290092 NR Description: hypothetical protein T14D3
  misc_feature (1)..(117): NCBI GI NO: 18407911 NR Description: expressed protein [Arabidopsis thaliana]
  misc_feature (1)..(121): NCBI GI NO: 30697428 NR Description: expressed protein [Arabidopsis thaliana]
MEDYSVYGSEEDADDPPDAETDEDLTDEERDAHEIEAGSVDEHSTKSDEEYDDLAMQDVMGNGNCSDDDDEQAAGYGTRGSQPMEESILGADGAVVEGRYHHNLDLFTMSKDVAATKMPCA

SEQ ID NO: 11091 - DNA, 1120 bp, Triticum aestivum
  misc_feature (1)..(1120): Ceres Seq. ID no. 13661606
cttttctttcgataagacctcactctgctttcctctgctctgctcctactcgtgtcccggtcacgccacctcccgaccccccaaatcgcgagaccacccgcggcggctggccggccggcgggataggcgacgaggcgaagtaactcgagacggcgcgggcggaccgctccgtgtggctcatgaagcgctcccccatcgtctcccaggcccggcagggcgcctccgcctcctccagcgaagctaaccctaacccggccgtcgccaaggtcgtgctgtccctcgaccccctcagctccgctgagccctccctccagctcaagatggagatgcctcaaactagggaaactagcacttgcaacttaccaaagagttgccccttgaatatgttcttcctcctccgtctcttcgctatcgccatcctgccttgctctgccaacaacgccacccaactggtctatgacacagaaggcaacgagctaaatagcaagtcaaattactacatcctcccagccaaacctgcaagcggtggcggcctcaaagccatcccaaccggtctacggtgcctacattttgtggtcgaggagcgcagcgagacgactctcctcgacacgcccatgcgattcatgccgttgccagaacacgcttctaccactgagccgatccgcctttcgagtgacatatggatccgcctttcgagtgacatatggatcgagtttcacgacttgagaagcttttgctccgaaaggctagattggcccttaccgaacaggtgccggagtcgtcatcaggagagcctaaacacatggctgccggcagtgaagagggcctaagatcatttggggtgttccgggacggatctctcgggatataagataatttcatgtgttggcaaggggccatgcagagacctaggtttgcatgtttacaaggacaagacatggctgactgtaaaggataaaccttttatggttgtgtttaggaaaaagactatataggtgtttttttgcttgcttcttgaggtgatccctgtaggcgagttcattgtatcgccactgtggtgttcatgttatgtaatgtgttcccccactttgcaataaagcgatactaactatattatgtg

SEQ ID NO: 11092 - protein, 216 aa, Triticum aestivum
  peptide (1)..(216): Ceres Seq. ID no. 13661607
  misc_feature (92)..(216): Pfam Name: Pfam Description:  Trypsin and protease inhibitor
  misc_feature (72)..(216): NCBI GI NO: 17402591 NR Description: bifunctional alpha-amylase/subtilisin inhibitor
  misc_feature (92)..(216): NCBI GI NO: 123975 NR Description: Endogenous alpha-amylase/subtilisin inhibitor
  misc_feature (92)..(216): NCBI GI NO: 82362 NR Description: alpha-amylase/ subtilisin inhibitor precursor -barley
  misc_feature (92)..(216): NCBI GI NO: 123974 NR Description: Alpha-amylase/subtilisin inhibitor precursor
  misc_feature (92)..(216): NCBI GI NO: 4699833 NR Description: Chain C
  misc_feature (92)..(216): NCBI GI NO: 225172 NR Description: amylase subtilisin inhibitor alpha
  misc_feature (92)..(173): NCBI GI NO: 266323 NR Description: ALPHA-AMYLASE/SUBTILISIN INHIBITOR (RASI)
  misc_feature (1)..(70): NCBI GI NO: 34909946 NR Description: putative transcription initiation factor
MKRSPIVSQARQGASASSSEANPNPAVAKVVLSLDPLSSAEPSLQLKMEMPQTRETSTCNLPKSCPLNMFFLLRLFAIAILPCSANNATQLVYDTEGNELNSKSNYYILPAKPASGGGLKAIPTGLRCLHFVVEERSETTLLDTPMRFMPLPEHASTTEPIRLSSDIWIRLSSDIWIEFHDLRSFCSERLDWPLPNRCRSRHQESLNTWLPAVKRA

SEQ ID NO: 11093 - protein, 169 aa, Triticum aestivum
  peptide (1)..(169): Ceres Seq. ID no. 13661608
  misc_feature (45)..(169): Pfam Name: Pfam Description:  Trypsin and protease inhibitor
  misc_feature (25)..(169): NCBI GI NO: 17402591 NR Description: bifunctional alpha-amylase/subtilisin inhibitor
  misc_feature (45)..(169): NCBI GI NO: 123975 NR Description: Endogenous alpha-amylase/subtilisin inhibitor
  misc_feature (45)..(169): NCBI GI NO: 82362 NR Description: alpha-amylase/ subtilisin inhibitor precursor -barley
  misc_feature (45)..(169): NCBI GI NO: 123974 NR Description: Alpha-amylase/subtilisin inhibitor precursor
  misc_feature (45)..(169): NCBI GI NO: 225172 NR Description: amylase subtilisin inhibitor alpha
  misc_feature (45)..(169): NCBI GI NO: 4699833 NR Description: Chain C
  misc_feature (45)..(126): NCBI GI NO: 266323 NR Description: ALPHA-AMYLASE/SUBTILISIN INHIBITOR (RASI)
  misc_feature (1)..(23): NCBI GI NO: 34909946 NR Description: putative transcription initiation factor
MEMPQTRETSTCNLPKSCPLNMFFLLRLFAIAILPCSANNATQLVYDTEGNELNSKSNYYILPAKPASGGGLKAIPTGLRCLHFVVEERSETTLLDTPMRFMPLPEHASTTEPIRLSSDIWIRLSSDIWIEFHDLRSFCSERLDWPLPNRCRSRHQESLNTWLPAVKRA

SEQ ID NO: 11094 - protein, 167 aa, Triticum aestivum
  peptide (1)..(167): Ceres Seq. ID no. 13661609
  misc_feature (43)..(167): Pfam Name: Pfam Description:  Trypsin and protease inhibitor
  misc_feature (23)..(167): NCBI GI NO: 17402591 NR Description: bifunctional alpha-amylase/subtilisin inhibitor
  misc_feature (43)..(167): NCBI GI NO: 123975 NR Description: Endogenous alpha-amylase/subtilisin inhibitor
  misc_feature (43)..(167): NCBI GI NO: 82362 NR Description: alpha-amylase/ subtilisin inhibitor precursor -barley
  misc_feature (43)..(167): NCBI GI NO: 4699833 NR Description: Chain C
  misc_feature (43)..(167): NCBI GI NO: 225172 NR Description: amylase subtilisin inhibitor alpha
  misc_feature (43)..(167): NCBI GI NO: 123974 NR Description: Alpha-amylase/subtilisin inhibitor precursor
  misc_feature (43)..(124): NCBI GI NO: 266323 NR Description: ALPHA-AMYLASE/SUBTILISIN INHIBITOR (RASI)
  misc_feature (1)..(21): NCBI GI NO: 34909946 NR Description: putative transcription initiation factor
MPQTRETSTCNLPKSCPLNMFFLLRLFAIAILPCSANNATQLVYDTEGNELNSKSNYYILPAKPASGGGLKAIPTGLRCLHFVVEERSETTLLDTPMRFMPLPEHASTTEPIRLSSDIWIRLSSDIWIEFHDLRSFCSERLDWPLPNRCRSRHQESLNTWLPAVKRA

SEQ ID NO: 11095 - DNA, 846 bp, Triticum aestivum
  misc_feature (1)..(846): Ceres Seq. ID no. 15173102
taccccggcgagtaaggaggcacggccatcgccaacgtgctcttcggaagatacaatccagggggaaggctgccgctaacgtggtacaagaacgagtacatcagcaagatcccgatgacgtccatggcgctgcggccggtcgccggcaaggggtaccctggcaggacctacaagttctacggcgggccggaagtgctctacccgttcggccacggtctcagctacagcaacttcagctacgcgtccgacgccaccgccgcatcggtcacagtcccggttggcgcatgggagtcctgcaagcagctcacccgcaagccggggacggccccgctggcctgcccggccgtcaacgttgccgggcacgggtgccaagaggaggtaggcttcagtctgaccgtggccaaccgtggcagcagggacggcacccacgtcgtgatggtctacacggtgccgccggccgaggtggacgacgcaccgctgaagcagctggtggcgttccggagggtgttcgtgcccgctggagccgccgtccaagtgccgttcacgctcaatgtgtgcaaggcgttcgccatcgtcgaggagacggcgtacaccgtcgtgccgtcgggcgtcagcacggtcctggtcggagacgaagcgctgtcattctctttccccgtgaagatcgagctggctgtatagattctttacatgtccattgaattttttagtttctttacataccaaagatgaaagattgaaggccaaaccgttagatactgtgggcagcacgtataatatcttctccttttctttgcgagaagtgtaatatcttctcctctgctactataaacgcacagtttacac

SEQ ID NO: 11096 - protein, 232 aa, Triticum aestivum
  peptide (1)..(232): Ceres Seq. ID no. 15173103
PRRVRRHGHRQRALRKIQSRGKAAANVVQERVHQQDPDDVHGAAAGRRQGVPWQDLQVLRRAGSALPVRPRSQLQQLQLRVRRHRRIGHSPGWRMGVLQAAHPQAGDGPAGLPGRQRCRARVPRGGRLQSDRGQPWQQGRHPRRDGLHGAAGRGGRRTAEAAGGVPEGVRARWSRRPSAVHAQCVQGVRHRRGDGVHRRAVGRQHGPGRRRSAVILFPREDRAGCIDSLHVH

SEQ ID NO: 11097 - protein, 188 aa, Triticum aestivum
  peptide (1)..(188): Ceres Seq. ID no. 15173104
  misc_feature (1)..(186): NCBI GI NO: 34894432 NR Description: putative beta-xylosidase
  misc_feature (1)..(179): NCBI GI NO: 25518461 NR Description: hypothetical protein T14P4
  misc_feature (1)..(179): NCBI GI NO: 18378991 NR Description: glycosyl hydrolase family 3 [Arabidopsis thaliana]
  misc_feature (1)..(173): NCBI GI NO: 30316196 NR Description: Putative beta-D-xylosidase (PpAz152)
  misc_feature (1)..(182): NCBI GI NO: 15242489 NR Description: beta-glucosidase - like protein
  misc_feature (1)..(174): NCBI GI NO: 32481073 NR Description: auxin-induced beta-glucosidase
  misc_feature (1)..(184): NCBI GI NO: 15237736 NR Description: glycosyl hydrolase family 3 [Arabidopsis thaliana]
  misc_feature (1)..(173): NCBI GI NO: 15239867 NR Description: glycosyl hydrolase family 3 [Arabidopsis thaliana]
  misc_feature (1)..(173): NCBI GI NO: 38344900 NR Description: OSJNBb0079B02.3
  misc_feature (1)..(180): NCBI GI NO: 40363751 NR Description: putative beta-xylosidase [Triticum aestivum]
MTSMALRPVAGKGYPGRTYKFYGGPEVLYPFGHGLSYSNFSYASDATAASVTVPVGAWESCKQLTRKPGTAPLACPAVNVAGHGCQEEVGFSLTVANRGSRDGTHVVMVYTVPPAEVDDAPLKQLVAFRRVFVPAGAAVQVPFTLNVCKAFAIVEETAYTVVPSGVSTVLVGDEALSFSFPVKIELAV

SEQ ID NO: 11098 - protein, 185 aa, Triticum aestivum
  peptide (1)..(185): Ceres Seq. ID no. 15173105
  misc_feature (1)..(183): NCBI GI NO: 34894432 NR Description: putative beta-xylosidase
  misc_feature (1)..(176): NCBI GI NO: 25518461 NR Description: hypothetical protein T14P4
  misc_feature (1)..(176): NCBI GI NO: 18378991 NR Description: glycosyl hydrolase family 3 [Arabidopsis thaliana]
  misc_feature (1)..(170): NCBI GI NO: 30316196 NR Description: Putative beta-D-xylosidase (PpAz152)
  misc_feature (1)..(179): NCBI GI NO: 15242489 NR Description: beta-glucosidase - like protein
  misc_feature (1)..(171): NCBI GI NO: 32481073 NR Description: auxin-induced beta-glucosidase
  misc_feature (1)..(181): NCBI GI NO: 15237736 NR Description: glycosyl hydrolase family 3 [Arabidopsis thaliana]
  misc_feature (1)..(170): NCBI GI NO: 15239867 NR Description: glycosyl hydrolase family 3 [Arabidopsis thaliana]
  misc_feature (1)..(170): NCBI GI NO: 38344900 NR Description: OSJNBb0079B02.3
  misc_feature (1)..(177): NCBI GI NO: 40363751 NR Description: putative beta-xylosidase [Triticum aestivum]
MALRPVAGKGYPGRTYKFYGGPEVLYPFGHGLSYSNFSYASDATAASVTVPVGAWESCKQLTRKPGTAPLACPAVNVAGHGCQEEVGFSLTVANRGSRDGTHVVMVYTVPPAEVDDAPLKQLVAFRRVFVPAGAAVQVPFTLNVCKAFAIVEETAYTVVPSGVSTVLVGDEALSFSFPVKIELAV

SEQ ID NO: 11099 - DNA, 1088 bp, Triticum aestivum
  misc_feature (1)..(1088): Ceres Seq. ID no. 13661175
cgaaaagcacccaagttcagtctagatcgagtaggtagaagcccattgatcaacttcacttagcatttttgtccatccttgtccatggccactcaccccaatttccatgctagtgcatttgatgggtcggtgcaaaacaccgagtttaagttcagtagcttgtactggcaccacatttattctggaccaagcccaaaccaatcagttttgataggtgcagaggctaccactgggttgggccagtcagcagttaacgattggacgatttatggtggggttggctccgacgcggagctagtggcacgcgcacaaggattgcatctctacgctggtagttggcacaatacattcacccttcgtttcgagattgaaaggcttaagaaaagcacgcttcaggtaatgggagcatctgtagaggatgaaggtgagtggtctattgtcggcgggacaggtgatctcgcgatggcacgtggtgttgtagccaaaaggctgcatgagaaaacagatggtggagacatagtcgagcttaccatacatggattctgtcgcatgcaactgcccattctcaacaagaggggcccatggggtagcaagcagggttccgctgttggtttggaaaaaccctccaagattgcaagtatcaccatccattatcaagaaataattaattcgtttgaatatatttacgtcgaccaatatggcaacattggtaacacaaatatttggggcactaagagtcccaatcacgcagagatcgtgctcggccctgatgagatagtgacgggaatgtccggaactgtgatcaaacataataatctcgatgttatacagacactgatgtttaccaccagcaagaaaacatacgggccttatggaaacaccacaaatatacaaggtggtactactttcagcaccgtcgtgccaaatggccaagcaattgtcggcttcttcgggcatactgatatgaaatgcctgaacggaattggtgtctatatggcctaggttttatttgagtcatatgtggttaatttggttgttctttcaagaagaataagatgtttagggatctccggccccgttcttatgat

SEQ ID NO: 11100 - protein, 305 aa, Triticum aestivum
  peptide (1)..(305): Ceres Seq. ID no. 15220076
  misc_feature (16)..(154): Pfam Name: Pfam Description:  Dirigent-like protein
  misc_feature (1)..(304): NCBI GI NO: 7489383 NR Description: jacalin homolog - barley
  misc_feature (6)..(304): NCBI GI NO: 7489385 NR Description: jakalin homolog - barley
  misc_feature (7)..(303): NCBI GI NO: 16151819 NR Description: VER2 [Triticum aestivum]
  misc_feature (6)..(292): NCBI GI NO: 7489384 NR Description: jacalin homolog - barley
  misc_feature (10)..(304): NCBI GI NO: 9313027 NR Description: beta-glucosidase aggregating factor precursor
  misc_feature (7)..(206): NCBI GI NO: 7489672 NR Description: jasmonate-induced protein homolog - wheat
  misc_feature (9)..(225): NCBI GI NO: 21311647 NR Description: hessian fly response gene 1 protein
  misc_feature (23)..(153): NCBI GI NO: 34895198 NR Description: P0463A02.21
  misc_feature (4)..(154): NCBI GI NO: 7489661 NR Description: benzothiadiazole-induced protein
  misc_feature (16)..(153): NCBI GI NO: 37532940 NR Description: putative disease resistance protein
MATHPNFHASAFDGSVQNTEFKFSSLYWHHIYSGPSPNQSVLIGAEATTGLGQSAVNDWTIYGGVGSDAELVARAQGLHLYAGSWHNTFTLRFEIERLKKSTLQVMGASVEDEGEWSIVGGTGDLAMARGVVAKRLHEKTDGGDIVELTIHGFCRMQLPILNKRGPWGSKQGSAVGLEKPSKIASITIHYQEIINSFEYIYVDQYGNIGNTNIWGTKSPNHAEIVLGPDEIVTGMSGTVIKHNNLDVIQTLMFTTSKKTYGPYGNTTNIQGGTTFSTVVPNGQAIVGFFGHTDMKCLNGIGVYMA

SEQ ID NO: 11101 - protein, 200 aa, Triticum aestivum
  peptide (1)..(200): Ceres Seq. ID no. 15220077
  misc_feature (67)..(198): Pfam Name: Pfam Description:  Jacalin-like lectin domain
  misc_feature (1)..(199): NCBI GI NO: 7489383 NR Description: jacalin homolog - barley
  misc_feature (1)..(199): NCBI GI NO: 7489385 NR Description: jakalin homolog - barley
  misc_feature (1)..(198): NCBI GI NO: 16151819 NR Description: VER2 [Triticum aestivum]
  misc_feature (1)..(187): NCBI GI NO: 7489384 NR Description: jacalin homolog - barley
  misc_feature (1)..(199): NCBI GI NO: 9313027 NR Description: beta-glucosidase aggregating factor precursor
  misc_feature (1)..(101): NCBI GI NO: 7489672 NR Description: jasmonate-induced protein homolog - wheat
  misc_feature (1)..(120): NCBI GI NO: 21311647 NR Description: hessian fly response gene 1 protein
  misc_feature (1)..(48): NCBI GI NO: 34895198 NR Description: P0463A02.21
  misc_feature (1)..(49): NCBI GI NO: 7489661 NR Description: benzothiadiazole-induced protein
  misc_feature (1)..(48): NCBI GI NO: 37532940 NR Description: putative disease resistance protein
MGASVEDEGEWSIVGGTGDLAMARGVVAKRLHEKTDGGDIVELTIHGFCRMQLPILNKRGPWGSKQGSAVGLEKPSKIASITIHYQEIINSFEYIYVDQYGNIGNTNIWGTKSPNHAEIVLGPDEIVTGMSGTVIKHNNLDVIQTLMFTTSKKTYGPYGNTTNIQGGTTFSTVVPNGQAIVGFFGHTDMKCLNGIGVYMA

SEQ ID NO: 11102 - protein, 179 aa, Triticum aestivum
  peptide (1)..(179): Ceres Seq. ID no. 15220078
  misc_feature (46)..(177): Pfam Name: Pfam Description:  Jacalin-like lectin domain
  misc_feature (1)..(178): NCBI GI NO: 7489383 NR Description: jacalin homolog - barley
  misc_feature (1)..(178): NCBI GI NO: 7489385 NR Description: jakalin homolog - barley
  misc_feature (1)..(177): NCBI GI NO: 16151819 NR Description: VER2 [Triticum aestivum]
  misc_feature (1)..(166): NCBI GI NO: 7489384 NR Description: jacalin homolog - barley
  misc_feature (1)..(178): NCBI GI NO: 9313027 NR Description: beta-glucosidase aggregating factor precursor
  misc_feature (1)..(80): NCBI GI NO: 7489672 NR Description: jasmonate-induced protein homolog - wheat
  misc_feature (1)..(99): NCBI GI NO: 21311647 NR Description: hessian fly response gene 1 protein
  misc_feature (1)..(27): NCBI GI NO: 34895198 NR Description: P0463A02.21
  misc_feature (1)..(28): NCBI GI NO: 7489661 NR Description: benzothiadiazole-induced protein
  misc_feature (1)..(27): NCBI GI NO: 37532940 NR Description: putative disease resistance protein
MARGVVAKRLHEKTDGGDIVELTIHGFCRMQLPILNKRGPWGSKQGSAVGLEKPSKIASITIHYQEIINSFEYIYVDQYGNIGNTNIWGTKSPNHAEIVLGPDEIVTGMSGTVIKHNNLDVIQTLMFTTSKKTYGPYGNTTNIQGGTTFSTVVPNGQAIVGFFGHTDMKCLNGIGVYMA

SEQ ID NO: 11103 - DNA, 774 bp, Triticum aestivum
  misc_feature (1)..(774): Ceres Seq. ID no. 13661176
cctagcagaggaggcggcggaggcagagaaggagagcggcagctcgcgcgcgcgcgcccccattgccgccgcagcaggagcccgccgattccaatccaaggaggagctttgaaggtttgtcagggcggggaagatggttctcaagacagagctctgccgtttcagtggtgccaagatatacccagggaaggggatcagattcatccgctcagactctcaagtcttccttttctccaactcaaagtgcaagagctacttccacaaccgtctcaagccagctaagcttgcatggacggccatgtacaggaagcagcacaagaaggatattcatgctgaggctgcaaagaagaggcgccgcaccaccaagaggccgtattccaggtcaattgtaggtgcttcccttgaagttatccagaagaagagagctgagaagccggaggtccgtgatgcagccagggaagcagctctgcgtgagatcaaggagcgcattaagaagaccaaggatgagaagaaagctaagaaggtggaggtgacgaaatcccagaagaccgccggcagaggcaatgcccccaaacccgggaaggcccccaagcttggcggtggtggtgggaagcgctaggtggcgtccctgccgatcaatgcgaaattttgaactagttacatgatgtcctaccctgtatcttttaggaagtttttggctcaaacctgctgttgccgtcggtatgcagcatctgggtgcataaaccgtcgtcaatgtgagattgttttatgctc

SEQ ID NO: 11104 - protein, 161 aa, Triticum aestivum
  peptide (1)..(161): Ceres Seq. ID no. 13661177
  misc_feature (3)..(73): Pfam Name: Pfam Description:  Ribosomal protein L24e
  misc_feature (4)..(161): NCBI GI NO: 34900364 NR Description: putative 60S ribosomal protein L24
  misc_feature (1)..(161): NCBI GI NO: 1710521 NR Description: 60S RIBOSOMAL PROTEIN L24
  misc_feature (1)..(156): NCBI GI NO: 10180025 NR Description: 60S ribosomal protein L24 [Prunus avium]
  misc_feature (1)..(160): NCBI GI NO: 6094040 NR Description: 60S ribosomal protein L24
  misc_feature (1)..(161): NCBI GI NO: 18404176 NR Description: 60S ribosomal protein L24 (RPL24A)
  misc_feature (1)..(161): NCBI GI NO: 15231730 NR Description: 60S ribosomal protein L24 (RPL24B)
  misc_feature (5)..(161): NCBI GI NO: 25295112 NR Description: 60S ribosomal protein L24
  misc_feature (3)..(151): NCBI GI NO: 19115030 NR Description: 60S ribosomal protein L24
  misc_feature (3)..(150): NCBI GI NO: 19075214 NR Description: 60s ribosomal protein L24
  misc_feature (3)..(156): NCBI GI NO: 37778978 NR Description: 60S ribosomal protein L24 [Pagrus major]
MVLKTELCRFSGAKIYPGKGIRFIRSDSQVFLFSNSKCKSYFHNRLKPAKLAWTAMYRKQHKKDIHAEAAKKRRRTTKRPYSRSIVGASLEVIQKKRAEKPEVRDAAREAALREIKERIKKTKDEKKAKKVEVTKSQKTAGRGNAPKPGKAPKLGGGGGKR

SEQ ID NO: 11105 - protein, 106 aa, Triticum aestivum
  peptide (1)..(106): Ceres Seq. ID no. 13661178
  misc_feature (1)..(106): NCBI GI NO: 34900364 NR Description: putative 60S ribosomal protein L24
  misc_feature (1)..(106): NCBI GI NO: 1710521 NR Description: 60S RIBOSOMAL PROTEIN L24
  misc_feature (1)..(101): NCBI GI NO: 10180025 NR Description: 60S ribosomal protein L24 [Prunus avium]
  misc_feature (1)..(105): NCBI GI NO: 6094040 NR Description: 60S ribosomal protein L24
  misc_feature (1)..(106): NCBI GI NO: 18404176 NR Description: 60S ribosomal protein L24 (RPL24A)
  misc_feature (1)..(106): NCBI GI NO: 15231730 NR Description: 60S ribosomal protein L24 (RPL24B)
  misc_feature (1)..(106): NCBI GI NO: 25295112 NR Description: 60S ribosomal protein L24
  misc_feature (1)..(96): NCBI GI NO: 19115030 NR Description: 60S ribosomal protein L24
  misc_feature (1)..(95): NCBI GI NO: 19075214 NR Description: 60s ribosomal protein L24
  misc_feature (1)..(101): NCBI GI NO: 37778978 NR Description: 60S ribosomal protein L24 [Pagrus major]
MYRKQHKKDIHAEAAKKRRRTTKRPYSRSIVGASLEVIQKKRAEKPEVRDAAREAALREIKERIKKTKDEKKAKKVEVTKSQKTAGRGNAPKPGKAPKLGGGGGKR

SEQ ID NO: 11106 - protein, 93 aa, Triticum aestivum
  peptide (1)..(93): Ceres Seq. ID no. 13661179
PSRGGGGGREGERQLARARPHCRRSRSPPIPIQGGALKVCQGGEDGSQDRALPFQWCQDIPREGDQIHPLRLSSLPFLQLKVQELLPQPSQAS

SEQ ID NO: 11107 - DNA, 849 bp, Triticum aestivum
  misc_feature (1)..(849): Ceres Seq. ID no. 13661185
agaacatcctaatcgaaaatagattgttcctacacacgccatttgcattcttctctctcttcagctactaaccaacgaatctctctctctctctaaaacaatggctcaggaagacgtcgctgctgctgctgctgctgctaacggtgctaccacggcggtggagaagtccgttacgttcacggcgtacaagcctcagctgattgtggaagcacagaaggtcggtgacgctgttgcgttctacaaggctgtgtttggcgccgtggagactggacgctctctctaccccaagcgtaaggctgaccaagagctccctcacctcgtctcttccgagctcgagctcgccggaacaaccgtagtcgtttctgacgtatccgttaactctggccctgatgcgaagacggggactatgcctgcgatcctcgaaaccgatgacgtggaagctgccgttgcgaaggccgttgcggctggagctgtcaaggaggaggaggaggaggaggtctcggagggtggagtcaaggggaaagtgacggatccgttcgggttcacgtggatctttgttgctccggcgaagaagagtgagaaggaaggaaacaaagaggtctaactgttaaccgtcggatctgatcatttcgtcggtttctgaacgaactttttaatattattatcctatgctttttattagtttgtcttttgtggaatctccggtatgagtaaaccggattgattaggctaaaatgacttttgttcttcaccaccttttgacataaacttggtgaaagaaataacaaaaatatcggatgttaatgtcaaaaaaaaaaaaaaaaaagcttatcgataccgtcgacctyg

SEQ ID NO: 11108 - protein, 167 aa, Triticum aestivum
  peptide (1)..(167): Ceres Seq. ID no. 15220082
  misc_feature (1)..(167): NCBI GI NO: 18422918 NR Description: expressed protein [Arabidopsis thaliana]
  misc_feature (1)..(160): NCBI GI NO: 28565534 NR Description: early tobacco anther 1 [Nicotiana tabacum]
  misc_feature (12)..(162): NCBI GI NO: 37520521 NR Description: hypothetical protein glr0952
MAQEDVAAAAAAANGATTAVEKSVTFTAYKPQLIVEAQKVGDAVAFYKAVFGAVETGRSLYPKRKADQELPHLVSSELELAGTTVVVSDVSVNSGPDAKTGTMPAILETDDVEAAVAKAVAAGAVKEEEEEEVSEGGVKGKVTDPFGFTWIFVAPAKKSEKEGNKEV

SEQ ID NO: 11109 - DNA, 870 bp, Triticum aestivum
  misc_feature (1)..(870): Ceres Seq. ID no. 13664275
agaacatcctaatcgaaaaataccaactctacagttaagatctacctcacagtttaataacctttatttcatactttctcctctatttcatccaaacaccaaagttttagaaatggcaacagcatcggttaacatgcagtcagtcttcgcctgtgggttggccactcgcaagatcaacacaaacaagctcttcttcgccggaaacttcccaaatctcaagaggaactatccggtgggagtgaagtgcatggctgagggagaacccatgaaggacgagtccgcaccttcgacctccgcggctaagcctttgtctagctcatcatcgccgccacctcctccacctcctactaaacctaaggtgagcacgaagtttagcgacttgctagcgtttagcggtccagcaccagaaagaataaacgggcgtttagcgatggttggattcgtggcggccttggcggttgaactttccaagggtgaaaacgttttggctcagatctcggacggcggcgtctcgtggttccttggtacgactgcgatcttgacgcttgcgtcgcttgtaccccttttcaagggtatcaccgccgagtctaagtccaaaggtttcatgacgtccgacgctgagctttggaacggacgtttcgcgatgcttggtttggtcgcgttggcgttcactgagtttgtcaagggtgggacccttgtctgaggaaagaaaatttcttattggggagaatgttatattacagttttgcccttgtaaagttatctggtatgatatgtgtttaagcctatggtgtgtttctttacatatgtattagtgacatgagactttgtggtaaagcactatatcagtaaaagtagtgatgtttttct

SEQ ID NO: 11110 - protein, 233 aa, Triticum aestivum
  peptide (1)..(233): Ceres Seq. ID no. 13664276
  misc_feature (38)..(233): NCBI GI NO: 38123375 NR Description: ELIP [Brassica rapa subsp. pekinensis]
  misc_feature (38)..(233): NCBI GI NO: 15228866 NR Description: early light-induced protein [Arabidopsis thaliana]
  misc_feature (38)..(233): NCBI GI NO: 21618071 NR Description: light-induced protein-like protein
  misc_feature (38)..(233): NCBI GI NO: 18414282 NR Description: expressed protein [Arabidopsis thaliana]
  misc_feature (38)..(232): NCBI GI NO: 7488128 NR Description: probable light induced protein - Arabidopsisthaliana
  misc_feature (45)..(233): NCBI GI NO: 25315849 NR Description: early light-inducable protein
  misc_feature (38)..(230): NCBI GI NO: 28194659 NR Description: putative early light induced protein
  misc_feature (38)..(233): NCBI GI NO: 7447856 NR Description: early light-inducible protein precursor - soybean
  misc_feature (70)..(233): NCBI GI NO: 119290 NR Description: Early light-induced protein, chloroplast precursor
  misc_feature (95)..(233): NCBI GI NO: 16930757 NR Description: early light-induced protein-like protein
EHPNRKIPTLQLRSTSQFNNLYFILSPLFHPNTKVLEMATASVNMQSVFACGLATRKINTNKLFFAGNFPNLKRNYPVGVKCMAEGEPMKDESAPSTSAAKPLSSSSSPPPPPPPTKPKVSTKFSDLLAFSGPAPERINGRLAMVGFVAALAVELSKGENVLAQISDGGVSWFLGTTAILTLASLVPLFKGITAESKSKGFMTSDAELWNGRFAMLGLVALAFTEFVKGGTLV

SEQ ID NO: 11111 - protein, 196 aa, Triticum aestivum
  peptide (1)..(196): Ceres Seq. ID no. 13664277
  misc_feature (1)..(196): NCBI GI NO: 38123375 NR Description: ELIP [Brassica rapa subsp. pekinensis]
  misc_feature (1)..(196): NCBI GI NO: 15228866 NR Description: early light-induced protein [Arabidopsis thaliana]
  misc_feature (1)..(196): NCBI GI NO: 21618071 NR Description: light-induced protein-like protein
  misc_feature (1)..(196): NCBI GI NO: 18414282 NR Description: expressed protein [Arabidopsis thaliana]
  misc_feature (1)..(195): NCBI GI NO: 7488128 NR Description: probable light induced protein - Arabidopsisthaliana
  misc_feature (8)..(196): NCBI GI NO: 25315849 NR Description: early light-inducable protein
  misc_feature (1)..(193): NCBI GI NO: 28194659 NR Description: putative early light induced protein
  misc_feature (1)..(196): NCBI GI NO: 7447856 NR Description: early light-inducible protein precursor - soybean
  misc_feature (33)..(196): NCBI GI NO: 119290 NR Description: Early light-induced protein, chloroplast precursor
  misc_feature (58)..(196): NCBI GI NO: 16930757 NR Description: early light-induced protein-like protein
MATASVNMQSVFACGLATRKINTNKLFFAGNFPNLKRNYPVGVKCMAEGEPMKDESAPSTSAAKPLSSSSSPPPPPPPTKPKVSTKFSDLLAFSGPAPERINGRLAMVGFVAALAVELSKGENVLAQISDGGVSWFLGTTAILTLASLVPLFKGITAESKSKGFMTSDAELWNGRFAMLGLVALAFTEFVKGGTLV

SEQ ID NO: 11112 - protein, 189 aa, Triticum aestivum
  peptide (1)..(189): Ceres Seq. ID no. 13664278
  misc_feature (1)..(189): NCBI GI NO: 38123375 NR Description: ELIP [Brassica rapa subsp. pekinensis]
  misc_feature (1)..(189): NCBI GI NO: 15228866 NR Description: early light-induced protein [Arabidopsis thaliana]
  misc_feature (1)..(189): NCBI GI NO: 21618071 NR Description: light-induced protein-like protein
  misc_feature (1)..(189): NCBI GI NO: 18414282 NR Description: expressed protein [Arabidopsis thaliana]
  misc_feature (1)..(188): NCBI GI NO: 7488128 NR Description: probable light induced protein - Arabidopsisthaliana
  misc_feature (1)..(189): NCBI GI NO: 25315849 NR Description: early light-inducable protein
  misc_feature (1)..(186): NCBI GI NO: 28194659 NR Description: putative early light induced protein
  misc_feature (1)..(189): NCBI GI NO: 7447856 NR Description: early light-inducible protein precursor - soybean
  misc_feature (26)..(189): NCBI GI NO: 119290 NR Description: Early light-induced protein, chloroplast precursor
  misc_feature (51)..(189): NCBI GI NO: 16930757 NR Description: early light-induced protein-like protein
MQSVFACGLATRKINTNKLFFAGNFPNLKRNYPVGVKCMAEGEPMKDESAPSTSAAKPLSSSSSPPPPPPPTKPKVSTKFSDLLAFSGPAPERINGRLAMVGFVAALAVELSKGENVLAQISDGGVSWFLGTTAILTLASLVPLFKGITAESKSKGFMTSDAELWNGRFAMLGLVALAFTEFVKGGTLV

SEQ ID NO: 11113 - DNA, 911 bp, Triticum aestivum
  misc_feature (1)..(911): Ceres Seq. ID no. 13664381
atactaactcacacacaaattactagacatcctcgttctctgtgcagttccaacaatcctagtgatggcgtgtgcaagccatgtcatgattttccttgtgttctcaaatttagccatagccatggccacccttcctcctcccttgtatgaccctaacctagggaagtgtaagaatagttgtgaggaagagctcaatctatctttgtacctacaccaagttgtgacaggaccagcccacaaccaagaagtaattctcagccctggctttcctaacatgtttggtatgatagccgtcgttgactggaccatatacgccgtccctgattccacttcaagtatcattgctcgggcaaagggaatgactatccaggctacccaaagcgaggtcaatggtgttgcctggtttcttcctttcagcatggtctttcaggattccaggtttggcggttctacgctgcaagtgatgggagcaattactggtgcagtagatggtgagtgggctattgtgggtgggactggcaaattgtccacggcacgtggtactattaagttcatagcagtccaggcacagagcaccccaacctttgaggtctacagaaggattgatatccatgcattctacacacccgcaccggccgtttaagatatgaagaatacacatgcagcactccgactggaaaggcgagccagcaatctcgcataaataaaatatgtgttttccattatgactagtagtactacctcgttgtaatatgtggtcaagtcgtctttactttcaaaaaatgcaggagtttgtggcatatcattgaaaatcttagacataaatccacaaggcctttgtccttttttgtaaaattggactgtatgatttaatttggaatattacaatcttaatatattatgtgaaaagg

SEQ ID NO: 11114 - protein, 192 aa, Triticum aestivum
  peptide (1)..(192): Ceres Seq. ID no. 13664382
  misc_feature (28)..(187): Pfam Name: Pfam Description:  Dirigent-like protein
  misc_feature (1)..(187): NCBI GI NO: 37532952 NR Description: putative disease resistance response protein
  misc_feature (36)..(188): NCBI GI NO: 37532964 NR Description: putative disease resistance response protein
  misc_feature (40)..(188): NCBI GI NO: 37532940 NR Description: putative disease resistance protein
  misc_feature (1)..(192): NCBI GI NO: 38636734 NR Description: benzothiadiazole-induced protein-like
  misc_feature (1)..(192): NCBI GI NO: 38637464 NR Description: disease resistance response protein-like
  misc_feature (1)..(192): NCBI GI NO: 38637455 NR Description: putative benzothiadiazole-induced protein
  misc_feature (42)..(188): NCBI GI NO: 34895198 NR Description: P0463A02.21
  misc_feature (29)..(188): NCBI GI NO: 21311647 NR Description: hessian fly response gene 1 protein
  misc_feature (21)..(163): NCBI GI NO: 7489661 NR Description: benzothiadiazole-induced protein
  misc_feature (47)..(192): NCBI GI NO: 38636739 NR Description: benzothiadiazole-induced protein-like
MACASHVMIFLVFSNLAIAMATLPPPLYDPNLGKCKNSCEEELNLSLYLHQVVTGPAHNQEVILSPGFPNMFGMIAVVDWTIYAVPDSTSSIIARAKGMTIQATQSEVNGVAWFLPFSMVFQDSRFGGSTLQVMGAITGAVDGEWAIVGGTGKLSTARGTIKFIAVQAQSTPTFEVYRRIDIHAFYTPAPAV

SEQ ID NO: 11115 - protein, 185 aa, Triticum aestivum
  peptide (1)..(185): Ceres Seq. ID no. 13664383
  misc_feature (21)..(180): Pfam Name: Pfam Description:  Dirigent-like protein
  misc_feature (1)..(180): NCBI GI NO: 37532952 NR Description: putative disease resistance response protein
  misc_feature (29)..(181): NCBI GI NO: 37532964 NR Description: putative disease resistance response protein
  misc_feature (33)..(181): NCBI GI NO: 37532940 NR Description: putative disease resistance protein
  misc_feature (1)..(185): NCBI GI NO: 38636734 NR Description: benzothiadiazole-induced protein-like
  misc_feature (1)..(185): NCBI GI NO: 38637464 NR Description: disease resistance response protein-like
  misc_feature (1)..(185): NCBI GI NO: 38637455 NR Description: putative benzothiadiazole-induced protein
  misc_feature (35)..(181): NCBI GI NO: 34895198 NR Description: P0463A02.21
  misc_feature (22)..(181): NCBI GI NO: 21311647 NR Description: hessian fly response gene 1 protein
  misc_feature (14)..(156): NCBI GI NO: 7489661 NR Description: benzothiadiazole-induced protein
  misc_feature (40)..(185): NCBI GI NO: 38636739 NR Description: benzothiadiazole-induced protein-like
MIFLVFSNLAIAMATLPPPLYDPNLGKCKNSCEEELNLSLYLHQVVTGPAHNQEVILSPGFPNMFGMIAVVDWTIYAVPDSTSSIIARAKGMTIQATQSEVNGVAWFLPFSMVFQDSRFGGSTLQVMGAITGAVDGEWAIVGGTGKLSTARGTIKFIAVQAQSTPTFEVYRRIDIHAFYTPAPAV

SEQ ID NO: 11116 - protein, 173 aa, Triticum aestivum
  peptide (1)..(173): Ceres Seq. ID no. 13664384
  misc_feature (9)..(168): Pfam Name: Pfam Description:  Dirigent-like protein
  misc_feature (1)..(168): NCBI GI NO: 37532952 NR Description: putative disease resistance response protein
  misc_feature (17)..(169): NCBI GI NO: 37532964 NR Description: putative disease resistance response protein
  misc_feature (21)..(169): NCBI GI NO: 37532940 NR Description: putative disease resistance protein
  misc_feature (1)..(173): NCBI GI NO: 38636734 NR Description: benzothiadiazole-induced protein-like
  misc_feature (1)..(173): NCBI GI NO: 38637464 NR Description: disease resistance response protein-like
  misc_feature (1)..(173): NCBI GI NO: 38637455 NR Description: putative benzothiadiazole-induced protein
  misc_feature (23)..(169): NCBI GI NO: 34895198 NR Description: P0463A02.21
  misc_feature (10)..(169): NCBI GI NO: 21311647 NR Description: hessian fly response gene 1 protein
  misc_feature (2)..(144): NCBI GI NO: 7489661 NR Description: benzothiadiazole-induced protein
  misc_feature (28)..(173): NCBI GI NO: 38636739 NR Description: benzothiadiazole-induced protein-like
MATLPPPLYDPNLGKCKNSCEEELNLSLYLHQVVTGPAHNQEVILSPGFPNMFGMIAVVDWTIYAVPDSTSSIIARAKGMTIQATQSEVNGVAWFLPFSMVFQDSRFGGSTLQVMGAITGAVDGEWAIVGGTGKLSTARGTIKFIAVQAQSTPTFEVYRRIDIHAFYTPAPAV

SEQ ID NO: 11117 - DNA, 1113 bp, Triticum aestivum
  misc_feature (1)..(1113): Ceres Seq. ID no. 13661469
atcaatcactcttaacccaaatcgctgaaagcagtacagtatgacgatcatgcggatgttcctagctctctgcgcccttgggttcgtcgcaggagtagtagaagatggatcgtcgtttgacgtcagcgcttacccggtcaagtgggatgaggacccatctgtgggatcaggggacgtggccgctccaccgtctcccggtactgaggcgccggcgccgcctccgaagcatcacatgatggtgaagaagggcatgctgtttctggagcgcgacctctttgccggggcgctcctgccggcaaacacccggctgggctacgtcagacgcacgagttcaccaggcccagtcatttcaagtactacaagcccagtaccacccttcaggtacagcagtttcgagaaaatcttgaagttttacaatgtaacgcacggctccaagcaagcagggaggatctcggagactctccagttctgcgaggaggcgggagacaaggaaccacacgcgtgcgcaacgtctgtggccgccgcgagagacttcgcggccaccgttttggggaccaaggagccgcgcgcggtcacttcaatccttcacggacgcacacaacccctccgctacgtggtggcgcccaacggaatcgccagcgtcggcggcgacgcggtggtgccatgccaccccctggcgtaccctgtggaggtcttttactgccacaaccccagcaacgtgcaagcgctccgtgtccaacttgttggacaggaggacccttccgtcggcgccacggccatcgcagtatgccacaaggataccagctactgggatgaggcatacttcatgatgctcaacggatcccgtggcgagccgatatgtcacttcatgccggccaattaccttctgtggctctaggaggtgaggacacgagcagcaagtacgagagttgagagacagccggccggtgacgtgtaatttcggacttagtagccgatctagcttaaataaacgtcactgtatctgtatgcccttaccagttattgtaagcgcatgtagcgcaaagatatatgtaccccgaaaaatgatacgtatgatacagatatatattgtgaamtrraaaaaaagggggg

SEQ ID NO: 11118 - protein, 285 aa, Triticum aestivum
  peptide (1)..(285): Ceres Seq. ID no. 15218784
  misc_feature (71)..(285): Pfam Name: Pfam Description:  BURP domain
  misc_feature (62)..(285): NCBI GI NO: 18568375 NR Description: seed coat BURP domain protein 1 [Glycine max]
  misc_feature (63)..(284): NCBI GI NO: 24416618 NR Description: resistant specific protein-2 [Vigna radiata]
  misc_feature (71)..(284): NCBI GI NO: 15239478 NR Description: dehydration-induced protein RD22
  misc_feature (63)..(284): NCBI GI NO: 24416614 NR Description: resistant specific protein-1(4) [Vigna radiata]
  misc_feature (63)..(284): NCBI GI NO: 24416620 NR Description: resistant specific protein-3 [Vigna radiata]
  misc_feature (71)..(285): NCBI GI NO: 18447761 NR Description: dehydration-induced protein RD22-like protein
  misc_feature (71)..(285): NCBI GI NO: 14422444 NR Description: BURP domain-containing protein
  misc_feature (42)..(285): NCBI GI NO: 33578034 NR Description: BURP domain-containing protein
  misc_feature (71)..(285): NCBI GI NO: 14422446 NR Description: BURP domain-containing protein
  misc_feature (71)..(285): NCBI GI NO: 14422448 NR Description: BURP domain-containing protein
MTIMRMFLALCALGFVAGVVEDGSSFDVSAYPVKWDEDPSVGSGDVAAPPSPGTEAPAPPPKHHMMVKKGMLFLERDLFAGALLPANTRLGYVRRTSSPGPVISSTTSPVPPFRYSSFEKILKFYNVTHGSKQAGRISETLQFCEEAGDKEPHACATSVAAARDFAATVLGTKEPRAVTSILHGRTQPLRYVVAPNGIASVGGDAVVPCHPLAYPVEVFYCHNPSNVQALRVQLVGQEDPSVGATAIAVCHKDTSYWDEAYFMMLNGSRGEPICHFMPANYLLWL

SEQ ID NO: 11119 - protein, 282 aa, Triticum aestivum
  peptide (1)..(282): Ceres Seq. ID no. 15218785
  misc_feature (68)..(282): Pfam Name: Pfam Description:  BURP domain
  misc_feature (59)..(282): NCBI GI NO: 18568375 NR Description: seed coat BURP domain protein 1 [Glycine max]
  misc_feature (60)..(281): NCBI GI NO: 24416618 NR Description: resistant specific protein-2 [Vigna radiata]
  misc_feature (68)..(281): NCBI GI NO: 15239478 NR Description: dehydration-induced protein RD22
  misc_feature (60)..(281): NCBI GI NO: 24416614 NR Description: resistant specific protein-1(4) [Vigna radiata]
  misc_feature (60)..(281): NCBI GI NO: 24416620 NR Description: resistant specific protein-3 [Vigna radiata]
  misc_feature (68)..(282): NCBI GI NO: 18447761 NR Description: dehydration-induced protein RD22-like protein
  misc_feature (68)..(282): NCBI GI NO: 14422444 NR Description: BURP domain-containing protein
  misc_feature (39)..(282): NCBI GI NO: 33578034 NR Description: BURP domain-containing protein
  misc_feature (68)..(282): NCBI GI NO: 14422446 NR Description: BURP domain-containing protein
  misc_feature (68)..(282): NCBI GI NO: 14422448 NR Description: BURP domain-containing protein
MRMFLALCALGFVAGVVEDGSSFDVSAYPVKWDEDPSVGSGDVAAPPSPGTEAPAPPPKHHMMVKKGMLFLERDLFAGALLPANTRLGYVRRTSSPGPVISSTTSPVPPFRYSSFEKILKFYNVTHGSKQAGRISETLQFCEEAGDKEPHACATSVAAARDFAATVLGTKEPRAVTSILHGRTQPLRYVVAPNGIASVGGDAVVPCHPLAYPVEVFYCHNPSNVQALRVQLVGQEDPSVGATAIAVCHKDTSYWDEAYFMMLNGSRGEPICHFMPANYLLWL

SEQ ID NO: 11120 - protein, 280 aa, Triticum aestivum
  peptide (1)..(280): Ceres Seq. ID no. 15218786
  misc_feature (66)..(280): Pfam Name: Pfam Description:  BURP domain
  misc_feature (57)..(280): NCBI GI NO: 18568375 NR Description: seed coat BURP domain protein 1 [Glycine max]
  misc_feature (58)..(279): NCBI GI NO: 24416618 NR Description: resistant specific protein-2 [Vigna radiata]
  misc_feature (66)..(279): NCBI GI NO: 15239478 NR Description: dehydration-induced protein RD22
  misc_feature (58)..(279): NCBI GI NO: 24416614 NR Description: resistant specific protein-1(4) [Vigna radiata]
  misc_feature (58)..(279): NCBI GI NO: 24416620 NR Description: resistant specific protein-3 [Vigna radiata]
  misc_feature (66)..(280): NCBI GI NO: 18447761 NR Description: dehydration-induced protein RD22-like protein
  misc_feature (66)..(280): NCBI GI NO: 14422444 NR Description: BURP domain-containing protein
  misc_feature (37)..(280): NCBI GI NO: 33578034 NR Description: BURP domain-containing protein
  misc_feature (66)..(280): NCBI GI NO: 14422446 NR Description: BURP domain-containing protein
  misc_feature (66)..(280): NCBI GI NO: 14422448 NR Description: BURP domain-containing protein
MFLALCALGFVAGVVEDGSSFDVSAYPVKWDEDPSVGSGDVAAPPSPGTEAPAPPPKHHMMVKKGMLFLERDLFAGALLPANTRLGYVRRTSSPGPVISSTTSPVPPFRYSSFEKILKFYNVTHGSKQAGRISETLQFCEEAGDKEPHACATSVAAARDFAATVLGTKEPRAVTSILHGRTQPLRYVVAPNGIASVGGDAVVPCHPLAYPVEVFYCHNPSNVQALRVQLVGQEDPSVGATAIAVCHKDTSYWDEAYFMMLNGSRGEPICHFMPANYLLWL

SEQ ID NO: 11121 - DNA, 907 bp, Triticum aestivum
  misc_feature (1)..(907): Ceres Seq. ID no. 13661617
  misc_feature (172)..(172): n is a, c, t, g, unknown, or other
aaaagtcatatcttcttgtaccactctccttcaaacatagtcagagaaaaacagcaactcttgtctgaaaaatcagagagagagagagagagaaaaagaatggatcaaaatgtgctaggcactcaagtatacccctacacgacccaaacccatggccagtgcatcatcgttnaccagatcgatggatcatcatcaggcgaaggatcaaagccggtgaagcggcggaggaggaggaggagcaaagggtcgtctgccacgagcgaagatgacatgacggcgatcggagtgatgttgaggaagaggaagttgaccgatgagcaagtgaatatgctcgaattcagcttcgagaacgagcacaagcttgagtcagggaggaaagagaagatcgccgcagagttaggtctcgacccgagacaggtggctgtttggttccagaaccgccgtgcacggtggaagaacaagaaactcgaggaagaatacgccaaactgaagagccaacacgacaccgtcgtcctcggccaatgtcagctcgaatctcaggtattaaaactgtcggaacaattgagtgaagctcaaaacgaaattcgaaaactttccgagcgacttgctcaagaaacattaacaaacagtccgagttcacctcgttctgttgaagccaatggtgcaccaattcatttcgagtttccgccggatgttaattacaacatcccgttttacatatcggataatagttacttgcagaacatggagtattgggatggtttgtatgtgtaattttaacaactaaaatatttagagtctatggatcgaaaatcatgtttaaattaatgtataaatagatgtttgtcaacctgttgtaaatgcagtgtttaaaatatttttattttaataaataactttgtttctc

SEQ ID NO: 11122 - protein, 257 aa, Triticum aestivum
  peptide (1)..(257): Ceres Seq. ID no. 13661618
  misc_feature (100)..(153): Pfam Name: Pfam Description:  Homeobox domain
  misc_feature (35)..(257): NCBI GI NO: 15240052 NR Description: homeodomain protein [Arabidopsis thaliana]
  misc_feature (66)..(257): NCBI GI NO: 15234508 NR Description: homeodomain protein [Arabidopsis thaliana]
  misc_feature (66)..(255): NCBI GI NO: 15224190 NR Description: homeodomain protein [Arabidopsis thaliana]
  misc_feature (46)..(222): NCBI GI NO: 33146844 NR Description: homeodomain protein-like
  misc_feature (143)..(251): NCBI GI NO: 11231049 NR Description: homeobox-leucine zipper protein [Zinnia elegans]
  misc_feature (99)..(230): NCBI GI NO: 18034441 NR Description: homeodomain leucine zipper protein CPHB-5
  misc_feature (50)..(192): NCBI GI NO: 15232122 NR Description: homeobox-leucine zipper protein HAT5
  misc_feature (71)..(206): NCBI GI NO: 3868841 NR Description: CRHB7 [Ceratopteris richardii]
  misc_feature (99)..(228): NCBI GI NO: 1435022 NR Description: DNA-binding protein [Daucus carota]
  misc_feature (99)..(222): NCBI GI NO: 29367373 NR Description: homeodomain leucine zipper protein-like protein
  misc_feature (58)..(58): Xaa is any aa, unknown or other
KSHIFLYHSPSNIVREKQQLLSEKSERERERKRMDQNVLGTQVYPYTTQTHGQCIIVXQIDGSSSGEGSKPVKRRRRRRSKGSSATSEDDMTAIGVMLRKRKLTDEQVNMLEFSFENEHKLESGRKEKIAAELGLDPRQVAVWFQNRRARWKNKKLEEEYAKLKSQHDTVVLGQCQLESQVLKLSEQLSEAQNEIRKLSERLAQETLTNSPSSPRSVEANGAPIHFEFPPDVNYNIPFYISDNSYLQNMEYWDGLYV

SEQ ID NO: 11123 - protein, 224 aa, Triticum aestivum
  peptide (1)..(224): Ceres Seq. ID no. 13661619
  misc_feature (67)..(120): Pfam Name: Pfam Description:  Homeobox domain
  misc_feature (2)..(224): NCBI GI NO: 15240052 NR Description: homeodomain protein [Arabidopsis thaliana]
  misc_feature (33)..(224): NCBI GI NO: 15234508 NR Description: homeodomain protein [Arabidopsis thaliana]
  misc_feature (33)..(222): NCBI GI NO: 15224190 NR Description: homeodomain protein [Arabidopsis thaliana]
  misc_feature (13)..(189): NCBI GI NO: 33146844 NR Description: homeodomain protein-like
  misc_feature (110)..(218): NCBI GI NO: 11231049 NR Description: homeobox-leucine zipper protein [Zinnia elegans]
  misc_feature (66)..(197): NCBI GI NO: 18034441 NR Description: homeodomain leucine zipper protein CPHB-5
  misc_feature (17)..(159): NCBI GI NO: 15232122 NR Description: homeobox-leucine zipper protein HAT5
  misc_feature (38)..(173): NCBI GI NO: 3868841 NR Description: CRHB7 [Ceratopteris richardii]
  misc_feature (66)..(195): NCBI GI NO: 1435022 NR Description: DNA-binding protein [Daucus carota]
  misc_feature (66)..(189): NCBI GI NO: 29367373 NR Description: homeodomain leucine zipper protein-like protein
  misc_feature (25)..(25): Xaa is any aa, unknown or other
MDQNVLGTQVYPYTTQTHGQCIIVXQIDGSSSGEGSKPVKRRRRRRSKGSSATSEDDMTAIGVMLRKRKLTDEQVNMLEFSFENEHKLESGRKEKIAAELGLDPRQVAVWFQNRRARWKNKKLEEEYAKLKSQHDTVVLGQCQLESQVLKLSEQLSEAQNEIRKLSERLAQETLTNSPSSPRSVEANGAPIHFEFPPDVNYNIPFYISDNSYLQNMEYWDGLYV

SEQ ID NO: 11124 - protein, 167 aa, Triticum aestivum
  peptide (1)..(167): Ceres Seq. ID no. 13661620
  misc_feature (10)..(63): Pfam Name: Pfam Description:  Homeobox domain
  misc_feature (1)..(167): NCBI GI NO: 15240052 NR Description: homeodomain protein [Arabidopsis thaliana]
  misc_feature (1)..(167): NCBI GI NO: 15234508 NR Description: homeodomain protein [Arabidopsis thaliana]
  misc_feature (1)..(165): NCBI GI NO: 15224190 NR Description: homeodomain protein [Arabidopsis thaliana]
  misc_feature (1)..(132): NCBI GI NO: 33146844 NR Description: homeodomain protein-like
  misc_feature (53)..(161): NCBI GI NO: 11231049 NR Description: homeobox-leucine zipper protein [Zinnia elegans]
  misc_feature (9)..(140): NCBI GI NO: 18034441 NR Description: homeodomain leucine zipper protein CPHB-5
  misc_feature (1)..(102): NCBI GI NO: 15232122 NR Description: homeobox-leucine zipper protein HAT5
  misc_feature (1)..(116): NCBI GI NO: 3868841 NR Description: CRHB7 [Ceratopteris richardii]
  misc_feature (9)..(138): NCBI GI NO: 1435022 NR Description: DNA-binding protein [Daucus carota]
  misc_feature (9)..(132): NCBI GI NO: 29367373 NR Description: homeodomain leucine zipper protein-like protein
MTAIGVMLRKRKLTDEQVNMLEFSFENEHKLESGRKEKIAAELGLDPRQVAVWFQNRRARWKNKKLEEEYAKLKSQHDTVVLGQCQLESQVLKLSEQLSEAQNEIRKLSERLAQETLTNSPSSPRSVEANGAPIHFEFPPDVNYNIPFYISDNSYLQNMEYWDGLYV

SEQ ID NO: 11125 - DNA, 1028 bp, Triticum aestivum
  misc_feature (1)..(1028): Ceres Seq. ID no. 12623490
gcaggccgtcgctagctatcatccaaagaccaacgagtacgccaacatgtgaagtgcaccgagctgagcagtgagtgagcggccggggacgcggtcgacgagccaagaatggcgacgcaccatcgtgctctcctcctcctgctcgccgtgctgctccccgcggccgccttcgccgacccggacgccgtgcaggacttctgcgtgccggaccccgggcgcggccggccggtggagctcaacctcatccgctcctacccgtgcaggaaccccgcgaacctcaccgcgggcgacttcgccttctcaggcgtgcgcgcggcgggcaacttctcggcggacacggggttcgcgggggtgtccgtcacgccggcgcagttcccgggcctgcacaccctcggcatgtccttcgcgcgcgccgacctctcggcggccggcggcgtcaacccgccccactaccacccgcgcgccaccgagacggcgctagtgctcgccggccgcgtctacgccggcttcgtcgacaccgccggccgcctcttcgccaaggtgctcgtggagggggaggtcatggtgttcccccgcggcatggtgcacttccagctcaacgtcggcgaccagcccgccaccgtctacggcaccttcaacagcgagaaccccgggatcgtgcgcgtcccggccaccgtgttcgggtccgggatcagggacgccgtcctcgagagggccttcgggctctcccccgaggagctccggcggatcgagaagaggttcggcgtgcccaagaaggccgagctggaggactagttaattagtttattactacttcgttcgttgctggccggccatggccgcatgcgcatgattagttgacaggtagacttgtgggttgggagtatgggcaatacttatctctttccatttgattaatataatatacttgtggatttatagtggtggttggtagggctcatccgcgtaatgatacgaaaagtgtaaggtatacaaatgattgcgagtatattatactctctgttttt

SEQ ID NO: 11126 - protein, 228 aa, Triticum aestivum
  peptide (1)..(228): Ceres Seq. ID no. 12623491
  misc_feature (65)..(211): Pfam Name: Pfam Description:  Cupin
  misc_feature (6)..(218): NCBI GI NO: 15232830 NR Description: germin-like protein; protein id: At3g10080
  misc_feature (7)..(223): NCBI GI NO: 34904670 NR Description: putative germin protein
  misc_feature (9)..(220): NCBI GI NO: 27529869 NR Description: germin-like protein [Barbula unguiculata]
  misc_feature (1)..(219): NCBI GI NO: 19071771 NR Description: germin-like protein [Pinus sylvestris]
  misc_feature (1)..(219): NCBI GI NO: 2745849 NR Description: germin-like protein; PcGER1 [Pinus caribaea]
  misc_feature (1)..(219): NCBI GI NO: 7447346 NR Description: germin-like protein - Monterey pine
  misc_feature (9)..(219): NCBI GI NO: 4996622 NR Description: germin-like protein [Atriplex lentiformis]
  misc_feature (1)..(219): NCBI GI NO: 15241589 NR Description: germin - like protein; protein id: At5g38960.1
  misc_feature (1)..(219): NCBI GI NO: 18202909 NR Description: Putative germin-like protein subfamily 1 member 12precursor
  misc_feature (8)..(222): NCBI GI NO: 18202917 NR Description: Germin-like protein subfamily 2 member 2 precursor
MATHHRALLLLLAVLLPAAAFADPDAVQDFCVPDPGRGRPVELNLIRSYPCRNPANLTAGDFAFSGVRAAGNFSADTGFAGVSVTPAQFPGLHTLGMSFARADLSAAGGVNPPHYHPRATETALVLAGRVYAGFVDTAGRLFAKVLVEGEVMVFPRGMVHFQLNVGDQPATVYGTFNSENPGIVRVPATVFGSGIRDAVLERAFGLSPEELRRIEKRFGVPKKAELED

SEQ ID NO: 11127 - protein, 132 aa, Triticum aestivum
  peptide (1)..(132): Ceres Seq. ID no. 12623492
  misc_feature (1)..(115): Pfam Name: Pfam Description:  Cupin
  misc_feature (1)..(122): NCBI GI NO: 15232830 NR Description: germin-like protein; protein id: At3g10080
  misc_feature (1)..(127): NCBI GI NO: 34904670 NR Description: putative germin protein
  misc_feature (1)..(124): NCBI GI NO: 27529869 NR Description: germin-like protein [Barbula unguiculata]
  misc_feature (1)..(123): NCBI GI NO: 19071771 NR Description: germin-like protein [Pinus sylvestris]
  misc_feature (1)..(123): NCBI GI NO: 2745849 NR Description: germin-like protein; PcGER1 [Pinus caribaea]
  misc_feature (1)..(123): NCBI GI NO: 7447346 NR Description: germin-like protein - Monterey pine
  misc_feature (1)..(123): NCBI GI NO: 4996622 NR Description: germin-like protein [Atriplex lentiformis]
  misc_feature (1)..(123): NCBI GI NO: 15241589 NR Description: germin - like protein; protein id: At5g38960.1
  misc_feature (1)..(123): NCBI GI NO: 18202909 NR Description: Putative germin-like protein subfamily 1 member 12precursor
  misc_feature (1)..(126): NCBI GI NO: 18202917 NR Description: Germin-like protein subfamily 2 member 2 precursor
MSFARADLSAAGGVNPPHYHPRATETALVLAGRVYAGFVDTAGRLFAKVLVEGEVMVFPRGMVHFQLNVGDQPATVYGTFNSENPGIVRVPATVFGSGIRDAVLERAFGLSPEELRRIEKRFGVPKKAELED

SEQ ID NO: 11128 - DNA, 808 bp, Triticum aestivum
  misc_feature (1)..(808): Ceres Seq. ID no. 13661143
aacatcctaatcgaaaaacaccacacgcaacgcaagccttcgcacccgaacgcaagaaagagagagagagagagagagagagcacacgcggcgggggaaaagcaggagcgaagcgagggatcgggaggaacatcggcgaggccatggcgcggcggggcacggaggcgttcccggacctgggcgcgcactgcgacagggaggactgcaaccagctcgacttcctgcccttcgactgcaacggctgcggcaaggtgttctgcacggagcaccgcgcgtacgttgaccacggctgcccgctcgcggccgacaacggccgcaccgtcgtcgtctgcgaggcctgcggcgactccatcgagcgcgccgggtcggacgagacggatgcgcagatcctcgagaagcacgcgcggtcgcgccggggctgcgacccggccaggaagctcaagccgcgatgccccgcgcggcgctgcaaggagacactcaccttctccaacacgagccactgcaaggagtgcgggcagaagctgtgcctcaagcaccggttccccgaggaccacgggtgctcgcgcgtgtcgccggtgggggccgccgccgccgcgaggagggccggcgactgcggccgcgacgcgcagaagacaaaggacggcggtgggtgggcgctgccgccgttgatccggaatttcaattgattaccctgaagctgaaattgtggctgggatttacgcaattcatggaacgtttgttttctccggtgtcatattttcaattgtgcacattttgttgttgttaaatgaagaatcaaattcagtct

SEQ ID NO: 11129 - protein, 227 aa, Triticum aestivum
  peptide (1)..(227): Ceres Seq. ID no. 13661144
  misc_feature (150)..(188): Pfam Name: Pfam Description:  AN1-like Zinc finger
  misc_feature (48)..(188): NCBI GI NO: 15232930 NR Description: zinc finger protein (PMZ) -related
  misc_feature (52)..(186): NCBI GI NO: 33146779 NR Description: putative arsenite inducible RNA associated protein
  misc_feature (52)..(187): NCBI GI NO: 15230311 NR Description: expressed protein [Arabidopsis thaliana]
  misc_feature (52)..(186): NCBI GI NO: 30688811 NR Description: zinc finger protein (PMZ) -related
  misc_feature (56)..(202): NCBI GI NO: 15079311 NR Description: RIKEN cDNA 1110060O18 [Mus musculus]
  misc_feature (56)..(202): NCBI GI NO: 21312112 NR Description: RIKEN cDNA 1110060O18 [Mus musculus]
  misc_feature (56)..(202): NCBI GI NO: 34876869 NR Description: similar to RIKEN cDNA 1110060O18
  misc_feature (53)..(212): NCBI GI NO: 31207325 NR Description: ENSANGP00000015397 [Anopheles gambiae]
  misc_feature (56)..(199): NCBI GI NO: 20270357 NR Description: hypothetical protein BC018415 [Homo sapiens]
  misc_feature (56)..(199): NCBI GI NO: 21749694 NR Description: unnamed protein product [Homo sapiens]
HPNRKTPHATQAFAPERKKERERERESTRGGGKAGAKRGIGRNIGEAMARRGTEAFPDLGAHCDREDCNQLDFLPFDCNGCGKVFCTEHRAYVDHGCPLAADNGRTVVVCEACGDSIERAGSDETDAQILEKHARSRRGCDPARKLKPRCPARRCKETLTFSNTSHCKECGQKLCLKHRFPEDHGCSRVSPVGAAAAARRAGDCGRDAQKTKDGGGWALPPLIRNFN

SEQ ID NO: 11130 - protein, 222 aa, Triticum aestivum
  peptide (1)..(222): Ceres Seq. ID no. 13661145
  misc_feature (44)..(206): Pfam Name: Pfam Description:  Equine herpesvirus glycoprotein gp2
  misc_feature (28)..(222): NCBI GI NO: 11360494 NR Description: antifreeze glycopeptide AFGP polyprotein precursor
  misc_feature (44)..(206): NCBI GI NO: 17221102 NR Description: glycoprotein gp2 [Equine herpesvirus 1]
  misc_feature (9)..(192): NCBI GI NO: 7460853 NR Description: probable immediate early protein 2 - humanherpesvirus 6
  misc_feature (59)..(206): NCBI GI NO: 17221110 NR Description: glycoprotein gp2 [Equine herpesvirus 1]
  misc_feature (44)..(206): NCBI GI NO: 17221106 NR Description: glycoprotein gp2 [Equine herpesvirus 1]
  misc_feature (59)..(208): NCBI GI NO: 17221112 NR Description: glycoprotein gp2 [Equine herpesvirus 1]
  misc_feature (9)..(203): NCBI GI NO: 2769724 NR Description: H87 [Human herpesvirus 6]
  misc_feature (44)..(206): NCBI GI NO: 17221114 NR Description: glycoprotein gp2 [Equine herpesvirus 1]
  misc_feature (44)..(206): NCBI GI NO: 17221112 NR Description: glycoprotein gp2 [Equine herpesvirus 1]
  misc_feature (22)..(207): NCBI GI NO: 2769724 NR Description: H87 [Human herpesvirus 6]
NILIEKHHTQRKPSHPNARKRERERERAHAAGEKQERSEGSGGTSARPWRGGARRRSRTWARTATGRTATSSTSCPSTATAAARCSARSTARTLTTAARSRPTTAAPSSSARPAATPSSAPGRTRRMRRSSRSTRGRAGAATRPGSSSRDAPRGAARRHSPSPTRATARSAGRSCASSTGSPRTTGARACRRWGPPPPRGGPATAAATRRRQRTAVGGRCRR

SEQ ID NO: 11131 - protein, 180 aa, Triticum aestivum
  peptide (1)..(180): Ceres Seq. ID no. 13661146
  misc_feature (103)..(141): Pfam Name: Pfam Description:  AN1-like Zinc finger
  misc_feature (1)..(141): NCBI GI NO: 15232930 NR Description: zinc finger protein (PMZ) -related
  misc_feature (5)..(139): NCBI GI NO: 33146779 NR Description: putative arsenite inducible RNA associated protein
  misc_feature (5)..(140): NCBI GI NO: 15230311 NR Description: expressed protein [Arabidopsis thaliana]
  misc_feature (5)..(139): NCBI GI NO: 30688811 NR Description: zinc finger protein (PMZ) -related
  misc_feature (9)..(155): NCBI GI NO: 15079311 NR Description: RIKEN cDNA 1110060O18 [Mus musculus]
  misc_feature (9)..(155): NCBI GI NO: 21312112 NR Description: RIKEN cDNA 1110060O18 [Mus musculus]
  misc_feature (9)..(155): NCBI GI NO: 34876869 NR Description: similar to RIKEN cDNA 1110060O18
  misc_feature (6)..(165): NCBI GI NO: 31207325 NR Description: ENSANGP00000015397 [Anopheles gambiae]
  misc_feature (9)..(152): NCBI GI NO: 20270357 NR Description: hypothetical protein BC018415 [Homo sapiens]
  misc_feature (9)..(152): NCBI GI NO: 21749694 NR Description: unnamed protein product [Homo sapiens]
MARRGTEAFPDLGAHCDREDCNQLDFLPFDCNGCGKVFCTEHRAYVDHGCPLAADNGRTVVVCEACGDSIERAGSDETDAQILEKHARSRRGCDPARKLKPRCPARRCKETLTFSNTSHCKECGQKLCLKHRFPEDHGCSRVSPVGAAAAARRAGDCGRDAQKTKDGGGWALPPLIRNFN

SEQ ID NO: 11132 - DNA, 725 bp, Triticum aestivum
  misc_feature (1)..(725): Ceres Seq. ID no. 12623748
ctgaatagtcttgaaccgataaggagaggagacgaccgtaaaatcccggagaggagcgccccgggcagcgatggcgacgagggtgtgggcggcgtcggcggcggccttaaaccccactctcctccccctttcgtcttccgcacgtccgagcaggcccgccccctccacgcggccgagcgggcacctccgactgcgcagccgcccgccgcggccggccagggtcgtgtgccgccgcgccaagaacgccgccttcgaggactacaagttcccggactccatccccgagttcgccgagcaggagacgagcaagttcagggagcacatgacgtggcggctggagcagaagaaggagcagtacttcgggaagcacgtggaggacatcgtcgacgtctgcaccgaggtcttgagcacgttcttgcaacatgagtactgcggacccgggacgctcctggttcaccccttcttggatatgaagggcgagatcaaagagaggggcctccccggcgcgcctcaggctgcgcgcgcccccatcgcgtgggctgagaagaacatcgacaaggactggaaggagtgggacggagattgatagcgctgacttccttttgtctctgctgtagcagcagcatgtggtacctgtagtagtagtagtcttaatgtttcagtagcagcaggaatctaactatagattttagtttagtcatattcatcctatctggatcccgaga

SEQ ID NO: 11133 - protein, 171 aa, Triticum aestivum
  peptide (1)..(171): Ceres Seq. ID no. 12623749
  misc_feature (52)..(170): NCBI GI NO: 18391169 NR Description: Expressed protein; protein id: At1g10522
MATRVWAASAAALNPTLLPLSSSARPSRPAPSTRPSGHLRLRSRPPRPARVVCRRAKNAAFEDYKFPDSIPEFAEQETSKFREHMTWRLEQKKEQYFGKHVEDIVDVCTEVLSTFLQHEYCGPGTLLVHPFLDMKGEIKERGLPGAPQAARAPIAWAEKNIDKDWKEWDGD

SEQ ID NO: 11134 - protein, 141 aa, Triticum aestivum
  peptide (1)..(141): Ceres Seq. ID no. 12623750
LNSLEPIRRGDDRKIPERSAPGSDGDEGVGGVGGGLKPHSPPPFVFRTSEQARPLHAAERAPPTAQPPAAAGQGRVPPRQERRLRGLQVPGLHPRVRRAGDEQVQGAHDVAAGAEEGAVLREARGGHRRRLHRGLEHVLAT

SEQ ID NO: 11135 - protein, 87 aa, Triticum aestivum
  peptide (1)..(87): Ceres Seq. ID no. 12623751
  misc_feature (1)..(86): NCBI GI NO: 18391169 NR Description: Expressed protein; protein id: At1g10522
MTWRLEQKKEQYFGKHVEDIVDVCTEVLSTFLQHEYCGPGTLLVHPFLDMKGEIKERGLPGAPQAARAPIAWAEKNIDKDWKEWDGD

SEQ ID NO: 11136 - DNA, 848 bp, Triticum aestivum
  misc_feature (1)..(848): Ceres Seq. ID no. 13598740
atgatatgacaagttgctcagatatatcccgtgaggcccttgaatgagcaatctccaattgtaaagcctggattaaactctagtatcactagaacaggagttggtgaagcagtgtcgcccaatggttcccaaaacggacagacacctttggccattttgggtctacagttatcaaagctttctataaaaaagaccagctacttcagtgacaagacagagattcaaaagtctgctactcttcttggatatgttgcacatgcggtctcccttattgcatcatatctcgatgttcctcttcgatatccactacggttgggaggttcacattcttatgttgttgatcatgccccttcagttgacccatctatagctccaggagtaagttcttctaccccttcgagcacgagcatgaggacaatggaatttcctctgttttttgaaggccaagaaacaacaagatcggcatatgctgtattcttgttaaacaaggatgtcgaacaacttctgaaccacattggcgctgaaagtcttggcccaagacatgtactagctaacctgaagcagctaacaaccattgtccagtcasaacaatacatttctgattgatttaacccaaaggaacacagttttgaatttctgagggatgatattryttgcttatggctgagtcctagtgtaacctggtgcwgtttttwscgagcrcctttcctttcccaggacagaaatgagctcaggtctccctttgctgacatgttgatgtaaacgcgtaaaycgctttctccgtgtaaaacgttrtcacttggatgtgtacakgaaatagatggatgatgataaatgagttgtagtgc

SEQ ID NO: 11137 - protein, 65 aa, Triticum aestivum
  peptide (1)..(65): Ceres Seq. ID no. 15222415
  misc_feature (1)..(63): NCBI GI NO: 30685426 NR Description: expressed protein [Arabidopsis thaliana]
  misc_feature (1)..(27): NCBI GI NO: 7486092 NR Description: hypothetical protein At2g32760
  misc_feature (1)..(27): NCBI GI NO: 20197059 NR Description: hypothetical protein [Arabidopsis thaliana]
  misc_feature (60)..(60): Xaa is any aa, unknown or other
MRTMEFPLFFEGQETTRSAYAVFLLNKDVEQLLNHIGAESLGPRHVLANLKQLTTIVQSXQYISD

SEQ ID NO: 11138 - protein, 62 aa, Triticum aestivum
  peptide (1)..(62): Ceres Seq. ID no. 15222416
  misc_feature (1)..(60): NCBI GI NO: 30685426 NR Description: expressed protein [Arabidopsis thaliana]
  misc_feature (1)..(24): NCBI GI NO: 7486092 NR Description: hypothetical protein At2g32760
  misc_feature (1)..(24): NCBI GI NO: 20197059 NR Description: hypothetical protein [Arabidopsis thaliana]
  misc_feature (57)..(57): Xaa is any aa, unknown or other
MEFPLFFEGQETTRSAYAVFLLNKDVEQLLNHIGAESLGPRHVLANLKQLTTIVQSXQYISD

SEQ ID NO: 11139 - protein, 40 aa, Triticum aestivum
  peptide (1)..(40): Ceres Seq. ID no. 15222417
MLHMRSPLLHHISMFLFDIHYGWEVHILMLLIMPLQLTHL

SEQ ID NO: 11140 - DNA, 1180 bp, Triticum aestivum
  misc_feature (1)..(1180): Ceres Seq. ID no. 13664220
accaaccaagcaaccgagccaaacaggctcaccttccaacagtagtatagctgccgaagcaaatcaacatggcgagtggcacgagggatctcggcgtggcgcttgctgtcctgctcctgctgttcatgttcggggcctccgccgctgccgcggtcgtccccagcatcgacgccacgcggacccgccacctgccgctgccgcctggactgctgcgcggcccggagagcgtcgccttcgacgccaaaggcaacggcccatacagcggcgtctccgacggccgcgtcctcaagtggaacggcgacaggctcggctggacgacgtacacttacagccctggatacagcagcgaggcgtgcacggcgtccgtccgccgccccgagaccgtgaccgagagccgctgcggccgtccgctgggcctacggtttcacctcaagtctggctacttgtacatagccgacgcctacaaggggctcatgagggtcgcgccaggaggtggggaggcgacggtgcttgtgacggaggccgatggcgctcctctccgtttcaccaacggcgtggacgtcgaccaggtgaccggtgaagtctacttcaccgacagctctatgaaatatcaaaggtcacaacacgagatggtaacaagaaccggggactcgacaggccgcctaatgagatatgatccacgcacaggaaaagtgattgtgctaaaggccggcatcacttaccccaatggtctcgccatcagcgttgaccggacacacctcgtcatctcatcgaccgggccgtgcaagttgttgaggtactggaccaaaggtcccaagacaggcacgatcgaactgttaactgatctaccgggctatcctgataatgtgagcccggataagagaggaggatactgggtggcattacatcatgagaagacagagctcccctttgacgttgatagccatctacttgccttgaggatcaatgctgatggaaaaataatcgaggagatgagaggacccaaaggcatgaggccgacagaggtggtggaacggacaggcggtagactatttgtgggatccgtcgagctttcttatgtggccgtggccacccgcaaatagagattaatttaagttctgtaaaggatttgcattgagcatgctctttttttcaatgtcatgttctgcttttctttccc

SEQ ID NO: 11141 - protein, 344 aa, Triticum aestivum
  peptide (1)..(344): Ceres Seq. ID no. 15220299
  misc_feature (10)..(340): NCBI GI NO: 34395247 NR Description: putative strictosidine synthase
  misc_feature (10)..(333): NCBI GI NO: 34393255 NR Description: putative male fertility protein
  misc_feature (103)..(340): NCBI GI NO: 34395252 NR Description: putative strictosidine synthase-related
  misc_feature (103)..(340): NCBI GI NO: 34395249 NR Description: putative strictosidine synthase
  misc_feature (15)..(340): NCBI GI NO: 40253286 NR Description: putative male fertility protein
  misc_feature (31)..(279): NCBI GI NO: 14028757 NR Description: male fertility protein [Zea mays]
  misc_feature (31)..(279): NCBI GI NO: 34902140 NR Description: putative male fertility protein
  misc_feature (50)..(283): NCBI GI NO: 11280567 NR Description: hypothetical protein F24I3
  misc_feature (50)..(283): NCBI GI NO: 30694556 NR Description: strictosidine synthase-related
  misc_feature (50)..(279): NCBI GI NO: 15231703 NR Description: strictosidine synthase-related
MASGTRDLGVALAVLLLLFMFGASAAAAVVPSIDATRTRHLPLPPGLLRGPESVAFDAKGNGPYSGVSDGRVLKWNGDRLGWTTYTYSPGYSSEACTASVRRPETVTESRCGRPLGLRFHLKSGYLYIADAYKGLMRVAPGGGEATVLVTEADGAPLRFTNGVDVDQVTGEVYFTDSSMKYQRSQHEMVTRTGDSTGRLMRYDPRTGKVIVLKAGITYPNGLAISVDRTHLVISSTGPCKLLRYWTKGPKTGTIELLTDLPGYPDNVSPDKRGGYWVALHHEKTELPFDVDSHLLALRINADGKIIEEMRGPKGMRPTEVVERTGGRLFVGSVELSYVAVATRK

SEQ ID NO: 11142 - protein, 325 aa, Triticum aestivum
  peptide (1)..(325): Ceres Seq. ID no. 15220300
  misc_feature (1)..(321): NCBI GI NO: 34395247 NR Description: putative strictosidine synthase
  misc_feature (1)..(314): NCBI GI NO: 34393255 NR Description: putative male fertility protein
  misc_feature (84)..(321): NCBI GI NO: 34395252 NR Description: putative strictosidine synthase-related
  misc_feature (84)..(321): NCBI GI NO: 34395249 NR Description: putative strictosidine synthase
  misc_feature (1)..(321): NCBI GI NO: 40253286 NR Description: putative male fertility protein
  misc_feature (12)..(260): NCBI GI NO: 14028757 NR Description: male fertility protein [Zea mays]
  misc_feature (12)..(260): NCBI GI NO: 34902140 NR Description: putative male fertility protein
  misc_feature (31)..(264): NCBI GI NO: 11280567 NR Description: hypothetical protein F24I3
  misc_feature (31)..(264): NCBI GI NO: 30694556 NR Description: strictosidine synthase-related
  misc_feature (31)..(260): NCBI GI NO: 15231703 NR Description: strictosidine synthase-related
MFGASAAAAVVPSIDATRTRHLPLPPGLLRGPESVAFDAKGNGPYSGVSDGRVLKWNGDRLGWTTYTYSPGYSSEACTASVRRPETVTESRCGRPLGLRFHLKSGYLYIADAYKGLMRVAPGGGEATVLVTEADGAPLRFTNGVDVDQVTGEVYFTDSSMKYQRSQHEMVTRTGDSTGRLMRYDPRTGKVIVLKAGITYPNGLAISVDRTHLVISSTGPCKLLRYWTKGPKTGTIELLTDLPGYPDNVSPDKRGGYWVALHHEKTELPFDVDSHLLALRINADGKIIEEMRGPKGMRPTEVVERTGGRLFVGSVELSYVAVATRK

SEQ ID NO: 11143 - protein, 209 aa, Triticum aestivum
  peptide (1)..(209): Ceres Seq. ID no. 15220301
  misc_feature (1)..(205): NCBI GI NO: 34395247 NR Description: putative strictosidine synthase
  misc_feature (1)..(198): NCBI GI NO: 34393255 NR Description: putative male fertility protein
  misc_feature (1)..(205): NCBI GI NO: 34395252 NR Description: putative strictosidine synthase-related
  misc_feature (1)..(205): NCBI GI NO: 34395249 NR Description: putative strictosidine synthase
  misc_feature (1)..(205): NCBI GI NO: 40253286 NR Description: putative male fertility protein
  misc_feature (1)..(144): NCBI GI NO: 14028757 NR Description: male fertility protein [Zea mays]
  misc_feature (1)..(144): NCBI GI NO: 34902140 NR Description: putative male fertility protein
  misc_feature (1)..(148): NCBI GI NO: 11280567 NR Description: hypothetical protein F24I3
  misc_feature (1)..(148): NCBI GI NO: 30694556 NR Description: strictosidine synthase-related
  misc_feature (1)..(144): NCBI GI NO: 15231703 NR Description: strictosidine synthase-related
MRVAPGGGEATVLVTEADGAPLRFTNGVDVDQVTGEVYFTDSSMKYQRSQHEMVTRTGDSTGRLMRYDPRTGKVIVLKAGITYPNGLAISVDRTHLVISSTGPCKLLRYWTKGPKTGTIELLTDLPGYPDNVSPDKRGGYWVALHHEKTELPFDVDSHLLALRINADGKIIEEMRGPKGMRPTEVVERTGGRLFVGSVELSYVAVATRK

SEQ ID NO: 11144 - DNA, 1065 bp, Triticum aestivum
  misc_feature (1)..(1065): Ceres Seq. ID no. 13661928
accattattgttgttctgccagcggcatatacggagggagggagctccaccgtcccctgtttcccaccccctcccctgtcccattcgacaaaacacgccaagcacgcgcaccgaatccatcgcccgagcaagcgaagcagacgccacctgccctgcccagaccgccgcccaccgtctcccaggagctcagaggcgccaccaagaaccgcacggaagagagcggatcgatggcgatggccggcggagccccgccggcgccgctgccggtggtggggcaccagttctgcgcgccctacgtggtgccgctgacggtgaccaagaaggcgctcagcctctccgacggcgacttcgccatcacggacgccaacggcgccgtcgtgctcaaggtcaagggcgccatcttcagcatccggagccgccgcaccatcctcgacggcgccgggatgcccctcctcaccatgcaggaaaaggtgttcagcatgcaccaccgatgggaggttttcagaggggacagcaccaacgcaggtgacctgctcttcaccgtgaagacaacttcgctgatccaactcaagaccgagatggatgtcttcttggcagggaacaccgcgcagcaggtctgcgacttcaagatcaagggcagctacttcgacaggtcctgcgtcttctaccttggcgactccaacaacatggtagctcaaatgagccgtaaactgactgtttccaatgtgctgctggggagggacacgttcagtgtgaccgtgttcccgcacgtcgactacgtgttcatcgcgagccttgttgtgatcctggatgaggttcacagggacaagcgcgacgattgatgagtgagttatatacgctcctcgatcctaagcgttcctggagttctactactgtcgtgtcatctcaagttgatatgttgtcactgtaagtcactggtgttatctgcatttcttgtagcattatgcgtgcatggtgagccatgctgaattgtgatgttgtggaataatgttcatgcaccttacatttgatccctggcctgccagtgtatcattcgtatttact

SEQ ID NO: 11145 - protein, 279 aa, Triticum aestivum
  peptide (1)..(279): Ceres Seq. ID no. 13661929
  misc_feature (89)..(268): Pfam Name: DUF567 Pfam Description: Protein of unknown function
  misc_feature (78)..(278): NCBI GI NO: 27818079 NR Description: OSJNBa0086N05.7
  misc_feature (74)..(277): NCBI GI NO: 30679390 NR Description: expressed protein [Arabidopsis thaliana]
  misc_feature (86)..(274): NCBI GI NO: 17979321 NR Description: unknown protein [Arabidopsis thaliana]
  misc_feature (86)..(274): NCBI GI NO: 15225960 NR Description: expressed protein [Arabidopsis thaliana]
  misc_feature (82)..(269): NCBI GI NO: 9665105 NR Description: Hypothetical protein [Arabidopsis thaliana]
  misc_feature (89)..(269): NCBI GI NO: 15217694 NR Description: hypothetical protein [Arabidopsis thaliana]
  misc_feature (74)..(233): NCBI GI NO: 18413737 NR Description: expressed protein [Arabidopsis thaliana]
  misc_feature (74)..(233): NCBI GI NO: 21553506 NR Description: unknown [Arabidopsis thaliana]
  misc_feature (82)..(235): NCBI GI NO: 25352417 NR Description: hypothetical protein T3M13
  misc_feature (87)..(273): NCBI GI NO: 15228906 NR Description: hypothetical protein [Arabidopsis thaliana]
HYCCSASGIYGGRELHRPLFPTPSPVPFDKTRQARAPNPSPEQAKQTPPALPRPPPTVSQELRGATKNRTEESGSMAMAGGAPPAPLPVVGHQFCAPYVVPLTVTKKALSLSDGDFAITDANGAVVLKVKGAIFSIRSRRTILDGAGMPLLTMQEKVFSMHHRWEVFRGDSTNAGDLLFTVKTTSLIQLKTEMDVFLAGNTAQQVCDFKIKGSYFDRSCVFYLGDSNNMVAQMSRKLTVSNVLLGRDTFSVTVFPHVDYVFIASLVVILDEVHRDKRDD

SEQ ID NO: 11146 - protein, 204 aa, Triticum aestivum
  peptide (1)..(204): Ceres Seq. ID no. 13661930
  misc_feature (14)..(193): Pfam Name: DUF567 Pfam Description: Protein of unknown function
  misc_feature (3)..(203): NCBI GI NO: 27818079 NR Description: OSJNBa0086N05.7
  misc_feature (1)..(202): NCBI GI NO: 30679390 NR Description: expressed protein [Arabidopsis thaliana]
  misc_feature (11)..(199): NCBI GI NO: 17979321 NR Description: unknown protein [Arabidopsis thaliana]
  misc_feature (11)..(199): NCBI GI NO: 15225960 NR Description: expressed protein [Arabidopsis thaliana]
  misc_feature (7)..(194): NCBI GI NO: 9665105 NR Description: Hypothetical protein [Arabidopsis thaliana]
  misc_feature (14)..(194): NCBI GI NO: 15217694 NR Description: hypothetical protein [Arabidopsis thaliana]
  misc_feature (1)..(158): NCBI GI NO: 18413737 NR Description: expressed protein [Arabidopsis thaliana]
  misc_feature (1)..(158): NCBI GI NO: 21553506 NR Description: unknown [Arabidopsis thaliana]
  misc_feature (7)..(160): NCBI GI NO: 25352417 NR Description: hypothetical protein T3M13
  misc_feature (12)..(198): NCBI GI NO: 15228906 NR Description: hypothetical protein [Arabidopsis thaliana]
MAMAGGAPPAPLPVVGHQFCAPYVVPLTVTKKALSLSDGDFAITDANGAVVLKVKGAIFSIRSRRTILDGAGMPLLTMQEKVFSMHHRWEVFRGDSTNAGDLLFTVKTTSLIQLKTEMDVFLAGNTAQQVCDFKIKGSYFDRSCVFYLGDSNNMVAQMSRKLTVSNVLLGRDTFSVTVFPHVDYVFIASLVVILDEVHRDKRDD

SEQ ID NO: 11147 - protein, 202 aa, Triticum aestivum
  peptide (1)..(202): Ceres Seq. ID no. 13661931
  misc_feature (12)..(191): Pfam Name: DUF567 Pfam Description: Protein of unknown function
  misc_feature (1)..(201): NCBI GI NO: 27818079 NR Description: OSJNBa0086N05.7
  misc_feature (1)..(200): NCBI GI NO: 30679390 NR Description: expressed protein [Arabidopsis thaliana]
  misc_feature (9)..(197): NCBI GI NO: 17979321 NR Description: unknown protein [Arabidopsis thaliana]
  misc_feature (9)..(197): NCBI GI NO: 15225960 NR Description: expressed protein [Arabidopsis thaliana]
  misc_feature (5)..(192): NCBI GI NO: 9665105 NR Description: Hypothetical protein [Arabidopsis thaliana]
  misc_feature (12)..(192): NCBI GI NO: 15217694 NR Description: hypothetical protein [Arabidopsis thaliana]
  misc_feature (1)..(156): NCBI GI NO: 18413737 NR Description: expressed protein [Arabidopsis thaliana]
  misc_feature (1)..(156): NCBI GI NO: 21553506 NR Description: unknown [Arabidopsis thaliana]
  misc_feature (5)..(158): NCBI GI NO: 25352417 NR Description: hypothetical protein T3M13
  misc_feature (10)..(196): NCBI GI NO: 15228906 NR Description: hypothetical protein [Arabidopsis thaliana]
MAGGAPPAPLPVVGHQFCAPYVVPLTVTKKALSLSDGDFAITDANGAVVLKVKGAIFSIRSRRTILDGAGMPLLTMQEKVFSMHHRWEVFRGDSTNAGDLLFTVKTTSLIQLKTEMDVFLAGNTAQQVCDFKIKGSYFDRSCVFYLGDSNNMVAQMSRKLTVSNVLLGRDTFSVTVFPHVDYVFIASLVVILDEVHRDKRDD

SEQ ID NO: 11148 - DNA, 1155 bp, Triticum aestivum
  misc_feature (1)..(1155): Ceres Seq. ID no. 14301506
gtcactctcctctcctctgactcgtactctgcacagcttccccccacagaaaacaatcatggttaaaggtccaggactctacaccgaaatcggcaaaaaggccagagatcttctctacaaggactaccaaggagaccagaagctcagcgtcaccacttactcttccaccggcgttgcaatcaccaccactggaacaaacaagggagacttgtttgttggtgatgtaactacccaagtcaagaacaagaacttcactgccgatatcaaagtcgccactgattcttctctgctgaccacctttacctatgatgaggctacccctggattgaaggcaatcgtcagcgccaaggtgcctgatcagaaatctggcaaggttgagctccagtatctgcacgactatgctggtatctgcaccagtgttggtttgacagctagccccattgtcaatttctccggcgtggttggaaacaacgtcttggctcttggtaccgatgtgtccttcaacacccagtctggtgatttcaagcatttcaacgctggtttcagcttcaccaaggacgatctgattgctgcccttactctgaatgacaaaggtgacaaactgaatgcatcgtactaccacattgtgaacccgttgagcaacacagtggttggagctgaggttacccacagcttcacgactcaaaagaacgccattaccgttggtgctcagcatgctcttgacccattgacgacattgaaggcacgcgtgaacaatgatggtgtagctaacgcgctgatccagcaccagtggcgtccaaagtcgttcatcaccgtttctggagaggttaactccagggcgattgagaagggtgccaaggttgggtttgctcttgctctcaagccttgagaaagaatcaagaatccaaatgtgcccttgaggaggggtagcttagtttttttttcatcttctcggtcttctaatcttttggactaatctctctgcctggttttgctttaaaaatctttcatttgttgttttgttttaatcggtgttgggatttgtagaaaataagaaaaaaaaactattaaaaggatcgtcttgaagatgaaccgtacgaatctctttcctaattatttgtctcaatgctctgctaaaacactctgttcaattcg

SEQ ID NO: 11149 - protein, 295 aa, Triticum aestivum
  peptide (1)..(295): Ceres Seq. ID no. 14301507
  misc_feature (23)..(288): Pfam Name: Pfam Description:  Eukaryotic porin
  misc_feature (20)..(295): NCBI GI NO: 21553387 NR Description: voltage-dependent anion-selective channel proteinhsr2
  misc_feature (20)..(295): NCBI GI NO: 15242210 NR Description: voltage-dependent anion-selective channel proteinhsr2
  misc_feature (20)..(295): NCBI GI NO: 36957170 NR Description: VDAC1.1 [Lotus corniculatus var. japonicus]
  misc_feature (20)..(295): NCBI GI NO: 7442953 NR Description: porin - common ice plant
  misc_feature (20)..(295): NCBI GI NO: 36957183 NR Description: VDAC1.2 [Lotus corniculatus var. japonicus]
  misc_feature (20)..(295): NCBI GI NO: 1172555 NR Description: 34 kDa outer mitochondrial membrane protein porin
  misc_feature (20)..(295): NCBI GI NO: 5031279 NR Description: porin [Prunus armeniaca]
  misc_feature (20)..(295): NCBI GI NO: 15232074 NR Description: porin -related [Arabidopsis thaliana]
  misc_feature (20)..(295): NCBI GI NO: 21593558 NR Description: putative porin [Arabidopsis thaliana]
  misc_feature (20)..(295): NCBI GI NO: 7442952 NR Description: voltage-dependent anion channel protein - spinach
SLSSPLTRTLHSFPPQKTIMVKGPGLYTEIGKKARDLLYKDYQGDQKLSVTTYSSTGVAITTTGTNKGDLFVGDVTTQVKNKNFTADIKVATDSSLLTTFTYDEATPGLKAIVSAKVPDQKSGKVELQYLHDYAGICTSVGLTASPIVNFSGVVGNNVLALGTDVSFNTQSGDFKHFNAGFSFTKDDLIAALTLNDKGDKLNASYYHIVNPLSNTVVGAEVTHSFTTQKNAITVGAQHALDPLTTLKARVNNDGVANALIQHQWRPKSFITVSGEVNSRAIEKGAKVGFALALKP

SEQ ID NO: 11150 - protein, 276 aa, Triticum aestivum
  peptide (1)..(276): Ceres Seq. ID no. 14301508
  misc_feature (4)..(269): Pfam Name: Pfam Description:  Eukaryotic porin
  misc_feature (1)..(276): NCBI GI NO: 21553387 NR Description: voltage-dependent anion-selective channel proteinhsr2
  misc_feature (1)..(276): NCBI GI NO: 15242210 NR Description: voltage-dependent anion-selective channel proteinhsr2
  misc_feature (1)..(276): NCBI GI NO: 36957170 NR Description: VDAC1.1 [Lotus corniculatus var. japonicus]
  misc_feature (1)..(276): NCBI GI NO: 7442953 NR Description: porin - common ice plant
  misc_feature (1)..(276): NCBI GI NO: 36957183 NR Description: VDAC1.2 [Lotus corniculatus var. japonicus]
  misc_feature (1)..(276): NCBI GI NO: 1172555 NR Description: 34 kDa outer mitochondrial membrane protein porin
  misc_feature (1)..(276): NCBI GI NO: 5031279 NR Description: porin [Prunus armeniaca]
  misc_feature (1)..(276): NCBI GI NO: 15232074 NR Description: porin -related [Arabidopsis thaliana]
  misc_feature (1)..(276): NCBI GI NO: 21593558 NR Description: putative porin [Arabidopsis thaliana]
  misc_feature (1)..(276): NCBI GI NO: 7442952 NR Description: voltage-dependent anion channel protein - spinach
MVKGPGLYTEIGKKARDLLYKDYQGDQKLSVTTYSSTGVAITTTGTNKGDLFVGDVTTQVKNKNFTADIKVATDSSLLTTFTYDEATPGLKAIVSAKVPDQKSGKVELQYLHDYAGICTSVGLTASPIVNFSGVVGNNVLALGTDVSFNTQSGDFKHFNAGFSFTKDDLIAALTLNDKGDKLNASYYHIVNPLSNTVVGAEVTHSFTTQKNAITVGAQHALDPLTTLKARVNNDGVANALIQHQWRPKSFITVSGEVNSRAIEKGAKVGFALALKP

SEQ ID NO: 11151 - DNA, 978 bp, Triticum aestivum
  misc_feature (1)..(978): Ceres Seq. ID no. 12627370
agattagataattagggatttgaaaccagcatccctaaaatggagattacggagcggagggacgatgagatcagagacgcaaaagaatccgcaaacattgacaccatcaagtcgcagtatgtcaccgactctttttccgatgaacgctactctcgcgagctcaaggatggtcttcatcctctacggtacaagtttgcgatttggtacacacgtcgaacacctggggtcaggagccagacttcttacgaggataacattaagaagattgttgaattcagcactgttgaagggttttgggccagttactgtcaccttgctcgttcttctctcttgcctaacccaacagaccttcatttcttcaaggatgggattcgccccttgtgggaggatggtgccaactgcaatggaggaaagtggatcatacgtttctccaaagttgtctctgctcgcttctgggaggatctgcttcttgcgttggtaggcgaccagcttgatgatgctgaaaacatttgtggggcagtgctgagtgtccgcatcaatgaggacatcattagtgtatggaatcgcaatgcttctgatcatcaggcagtgatggggttgagagactcaatcaagcgccacttgaagctgcctcatgcttatgtgatggagtacaagcctcacgatgcttctcttcgcgataactcatcctacagaaacacatggagaggataggctcaaagtggactattgtatcacttgaggtgttaaaagattcggaagctctcctgcaacctaggatgatatatggattgaaccttgtttctggtagcgtactgtatcaatggcttacaatctcagcaatgaaaaatcctggctacttctgcaacagtagtttattaagtcgttttatggtttctaaatcttcttgctaccttcaatggtttgtgtcttgtttaaaactctattgtttcatttttcaaaagaaaacttgagctc

SEQ ID NO: 11152 - protein, 224 aa, Triticum aestivum
  peptide (1)..(224): Ceres Seq. ID no. 12627371
  misc_feature (1)..(224): NCBI GI NO: 25453555 NR Description: eukaryotic cap-binding protein
  misc_feature (1)..(224): NCBI GI NO: 15238740 NR Description: eukaryotic cap-binding protein (gb|AAC17220
  misc_feature (46)..(221): NCBI GI NO: 13624327 NR Description: RIKEN cDNA 2700069E09; DNA segment, human D0S6743E
  misc_feature (44)..(221): NCBI GI NO: 37590370 NR Description: Unknown (protein for MGC:73242) [Danio rerio]
  misc_feature (46)..(213): NCBI GI NO: 3329384 NR Description: translation initiation factor 4e [Homo sapiens]
  misc_feature (46)..(213): NCBI GI NO: 4757702 NR Description: eukaryotic translation initiation factor 4E-like 3
  misc_feature (46)..(213): NCBI GI NO: 29839292 NR Description: Eukaryotic translation initiation factor 4E type 3
  misc_feature (46)..(213): NCBI GI NO: 12653185 NR Description: EIF4EL3 protein [Homo sapiens]
  misc_feature (46)..(213): NCBI GI NO: 34877568 NR Description: similar to eukaryotic translation initiation factor4E like 3
  misc_feature (46)..(213): NCBI GI NO: 3201958 NR Description: eIF4E-like protein 4E-LP [Mus musculus]
MEITERRDDEIRDAKESANIDTIKSQYVTDSFSDERYSRELKDGLHPLRYKFAIWYTRRTPGVRSQTSYEDNIKKIVEFSTVEGFWASYCHLARSSLLPNPTDLHFFKDGIRPLWEDGANCNGGKWIIRFSKVVSARFWEDLLLALVGDQLDDAENICGAVLSVRINEDIISVWNRNASDHQAVMGLRDSIKRHLKLPHAYVMEYKPHDASLRDNSSYRNTWRG

SEQ ID NO: 11153 - protein, 138 aa, Triticum aestivum
  peptide (1)..(138): Ceres Seq. ID no. 12627372
MRSETQKNPQTLTPSSRSMSPTLFPMNATLASSRMVFILYGTSLRFGTHVEHLGSGARLLTRITLRRLLNSALLKGFGPVTVTLLVLLSCLTQQTFISSRMGFAPCGRMVPTAMEESGSYVSPKLSLLASGRICFLRW

SEQ ID NO: 11154 - protein, 120 aa, Triticum aestivum
  peptide (1)..(120): Ceres Seq. ID no. 12627373
MSPTLFPMNATLASSRMVFILYGTSLRFGTHVEHLGSGARLLTRITLRRLLNSALLKGFGPVTVTLLVLLSCLTQQTFISSRMGFAPCGRMVPTAMEESGSYVSPKLSLLASGRICFLRW

SEQ ID NO: 11155 - DNA, 799 bp, Triticum aestivum
  misc_feature (1)..(799): Ceres Seq. ID no. 13664228
acctagaacatcctaatcgaaaaatcagaagaagaagtatctttgttttcgctctcttcttctactttcgatctttgacgattagaaaaggaaagtgatggctgccgttaatgggtaccaaggaaacactccggcggcgtcaaagcaatctgctcctccgactaagactgttgatagccaatctgttctcaaaaggctgcaatctgaactaatgggcttgatgatgggtggtgacccgggaatatcggctttcccagaggaagacaacatattctgttggaaagggacaataacaggaagcaaagatactgtgtttgaaggaactgagtacagactctcactctctttctccaatgactatcctttcaagcctcctaagatcaagttccacactggttgcttccaccccaatgttgatctctacggcaatatctgtttggacattcttcaggataaatggtcgtctgcatacgatgtcaggacaatactactatcgattcagagccttttgggagaaccgaacatcagctcaccattgaacactcaagcagcgcagctctggagcaaccaagaagagtataggaagatggttgagaagctctacaagcctcccagtgcatgatagcttcaggatgtgtcattcctttgctctacaatttgtttctgatcatcaacagttttatctgtagcagtttgtgtcattcatttgctctataatttgtttctgatcttcaacagttttacctgagccaaatattgatattgatgtgagcttttcaaaaattaatcagaatgatcc

SEQ ID NO: 11156 - protein, 174 aa, Triticum aestivum
  peptide (1)..(174): Ceres Seq. ID no. 13664229
  misc_feature (1)..(174): NCBI GI NO: 18403097 NR Description: ubiquitin-conjugating enzyme (UBC20)
  misc_feature (1)..(174): NCBI GI NO: 21618179 NR Description: E2, ubiquitin-conjugating enzyme, putative
  misc_feature (1)..(174): NCBI GI NO: 18402475 NR Description: ubiquitin-conjugating enzyme (UBC19)
  misc_feature (15)..(174): NCBI GI NO: 25293673 NR Description: hypothetical protein F17J6.3
  misc_feature (30)..(174): NCBI GI NO: 9454557 NR Description: Putative ubiquitin carrier protein
  misc_feature (9)..(171): NCBI GI NO: 34903234 NR Description: unnamed protein product
  misc_feature (8)..(170): NCBI GI NO: 3915196 NR Description: Ubiquitin-conjugating enzyme E2-C
  misc_feature (22)..(170): NCBI GI NO: 4388942 NR Description: E2-C
  misc_feature (1)..(170): NCBI GI NO: 31216813 NR Description: ENSANGP00000020629 [Anopheles gambiae]
  misc_feature (15)..(170): NCBI GI NO: 24663332 NR Description: vihar CG10682-PA [Drosophila melanogaster]
MAAVNGYQGNTPAASKQSAPPTKTVDSQSVLKRLQSELMGLMMGGDPGISAFPEEDNIFCWKGTITGSKDTVFEGTEYRLSLSFSNDYPFKPPKIKFHTGCFHPNVDLYGNICLDILQDKWSSAYDVRTILLSIQSLLGEPNISSPLNTQAAQLWSNQEEYRKMVEKLYKPPSA

SEQ ID NO: 11157 - protein, 136 aa, Triticum aestivum
  peptide (1)..(136): Ceres Seq. ID no. 13664230
  misc_feature (1)..(136): NCBI GI NO: 18403097 NR Description: ubiquitin-conjugating enzyme (UBC20)
  misc_feature (1)..(136): NCBI GI NO: 21618179 NR Description: E2, ubiquitin-conjugating enzyme, putative
  misc_feature (1)..(136): NCBI GI NO: 18402475 NR Description: ubiquitin-conjugating enzyme (UBC19)
  misc_feature (1)..(136): NCBI GI NO: 25293673 NR Description: hypothetical protein F17J6.3
  misc_feature (1)..(136): NCBI GI NO: 9454557 NR Description: Putative ubiquitin carrier protein
  misc_feature (1)..(133): NCBI GI NO: 34903234 NR Description: unnamed protein product
  misc_feature (1)..(132): NCBI GI NO: 3915196 NR Description: Ubiquitin-conjugating enzyme E2-C
  misc_feature (1)..(132): NCBI GI NO: 4388942 NR Description: E2-C
  misc_feature (1)..(132): NCBI GI NO: 31216813 NR Description: ENSANGP00000020629 [Anopheles gambiae]
  misc_feature (1)..(132): NCBI GI NO: 24663332 NR Description: vihar CG10682-PA [Drosophila melanogaster]
MGLMMGGDPGISAFPEEDNIFCWKGTITGSKDTVFEGTEYRLSLSFSNDYPFKPPKIKFHTGCFHPNVDLYGNICLDILQDKWSSAYDVRTILLSIQSLLGEPNISSPLNTQAAQLWSNQEEYRKMVEKLYKPPSA

SEQ ID NO: 11158 - protein, 133 aa, Triticum aestivum
  peptide (1)..(133): Ceres Seq. ID no. 13664231
  misc_feature (1)..(133): NCBI GI NO: 18403097 NR Description: ubiquitin-conjugating enzyme (UBC20)
  misc_feature (1)..(133): NCBI GI NO: 21618179 NR Description: E2, ubiquitin-conjugating enzyme, putative
  misc_feature (1)..(133): NCBI GI NO: 18402475 NR Description: ubiquitin-conjugating enzyme (UBC19)
  misc_feature (1)..(133): NCBI GI NO: 25293673 NR Description: hypothetical protein F17J6.3
  misc_feature (1)..(133): NCBI GI NO: 9454557 NR Description: Putative ubiquitin carrier protein
  misc_feature (1)..(130): NCBI GI NO: 34903234 NR Description: unnamed protein product
  misc_feature (1)..(129): NCBI GI NO: 3915196 NR Description: Ubiquitin-conjugating enzyme E2-C
  misc_feature (1)..(129): NCBI GI NO: 4388942 NR Description: E2-C
  misc_feature (1)..(129): NCBI GI NO: 31216813 NR Description: ENSANGP00000020629 [Anopheles gambiae]
  misc_feature (1)..(129): NCBI GI NO: 24663332 NR Description: vihar CG10682-PA [Drosophila melanogaster]
MMGGDPGISAFPEEDNIFCWKGTITGSKDTVFEGTEYRLSLSFSNDYPFKPPKIKFHTGCFHPNVDLYGNICLDILQDKWSSAYDVRTILLSIQSLLGEPNISSPLNTQAAQLWSNQEEYRKMVEKLYKPPSA

SEQ ID NO: 11159 - DNA, 884 bp, Triticum aestivum
  misc_feature (1)..(884): Ceres Seq. ID no. 13661939
cctagaacatcctaatcgaaaagattaagattcactttttattccgatagatcagattcatttcctgaatctgttatataaaattctttctaaagaggaagaaatctcacggttccaacaggaaaaatgggttctgaacagaatgatagcacgagcttcacacaatcatcagagccgaaactttgtgcaaacggatgtggtttctttggttcgccatcaaacatggatctgtgttcgaaatgctaccgagacatatgcgcagaggaagctcaaacagctgttgcaaaagctgccgttgagaaatctttcaagccatcgccatcgcctcctcctcctaccctcttcatagcagagcctgatgtggcgaaaccagagaaagaaaaggcggttgctactgttcttgtggtggccgagccatcttctgcaacaggagaagctacagttcctgaacagaacgaaccaccatctaaacctgcacggccgaaccggtgcctttgttgcaacaagaaggttggtatacttgggtttaagtgcaaatgcgggagcactttctgcggcgaacatcggtaccctgagagacatgattgcagctttgatttcaaagaagctgggcgtggagagattgcaaaagccaatccggttattaaagctgataaacttcaaaggttctgagaaaggctacggtgttggtctctcttttcttttatctcaaattgtatttgaatggaattgggtttctactagtggattgtttccaaaggggggtaacatgatgaatttggttctttaataaactcagtcatctctatttcatgctattcaggtacggattataatctttgtgggtaacttgtaaaatcaatttatcaaagcttcttttggcc

SEQ ID NO: 11160 - protein, 181 aa, Triticum aestivum
  peptide (1)..(181): Ceres Seq. ID no. 15220147
  misc_feature (122)..(162): Pfam Name: Pfam Description:  AN1-like Zinc finger
  misc_feature (1)..(181): NCBI GI NO: 15235819 NR Description: zinc finger -related protein
  misc_feature (1)..(180): NCBI GI NO: 15234402 NR Description: expressed protein [Arabidopsis thaliana]
  misc_feature (1)..(180): NCBI GI NO: 8778645 NR Description: F5O11.17 [Arabidopsis thaliana]
  misc_feature (1)..(180): NCBI GI NO: 15221329 NR Description: expressed protein [Arabidopsis thaliana]
  misc_feature (18)..(180): NCBI GI NO: 15231686 NR Description: zinc finger - like protein [Arabidopsis thaliana]
  misc_feature (18)..(180): NCBI GI NO: 18404102 NR Description: expressed protein [Arabidopsis thaliana]
  misc_feature (16)..(180): NCBI GI NO: 15225894 NR Description: zinc finger protein -related
  misc_feature (18)..(180): NCBI GI NO: 14596167 NR Description: zinc finger-like protein [Arabidopsis thaliana]
  misc_feature (6)..(180): NCBI GI NO: 18403408 NR Description: expressed protein [Arabidopsis thaliana]
  misc_feature (6)..(180): NCBI GI NO: 25082726 NR Description: expressed protein [Arabidopsis thaliana]
MGSEQNDSTSFTQSSEPKLCANGCGFFGSPSNMDLCSKCYRDICAEEAQTAVAKAAVEKSFKPSPSPPPPTLFIAEPDVAKPEKEKAVATVLVVAEPSSATGEATVPEQNEPPSKPARPNRCLCCNKKVGILGFKCKCGSTFCGEHRYPERHDCSFDFKEAGRGEIAKANPVIKADKLQRF

SEQ ID NO: 11161 - protein, 149 aa, Triticum aestivum
  peptide (1)..(149): Ceres Seq. ID no. 15220148
  misc_feature (90)..(130): Pfam Name: Pfam Description:  AN1-like Zinc finger
  misc_feature (1)..(149): NCBI GI NO: 15235819 NR Description: zinc finger -related protein
  misc_feature (1)..(148): NCBI GI NO: 15234402 NR Description: expressed protein [Arabidopsis thaliana]
  misc_feature (1)..(148): NCBI GI NO: 8778645 NR Description: F5O11.17 [Arabidopsis thaliana]
  misc_feature (1)..(148): NCBI GI NO: 15221329 NR Description: expressed protein [Arabidopsis thaliana]
  misc_feature (1)..(148): NCBI GI NO: 15231686 NR Description: zinc finger - like protein [Arabidopsis thaliana]
  misc_feature (1)..(148): NCBI GI NO: 18404102 NR Description: expressed protein [Arabidopsis thaliana]
  misc_feature (1)..(148): NCBI GI NO: 15225894 NR Description: zinc finger protein -related
  misc_feature (1)..(148): NCBI GI NO: 14596167 NR Description: zinc finger-like protein [Arabidopsis thaliana]
  misc_feature (1)..(148): NCBI GI NO: 18403408 NR Description: expressed protein [Arabidopsis thaliana]
  misc_feature (1)..(148): NCBI GI NO: 25082726 NR Description: expressed protein [Arabidopsis thaliana]
MDLCSKCYRDICAEEAQTAVAKAAVEKSFKPSPSPPPPTLFIAEPDVAKPEKEKAVATVLVVAEPSSATGEATVPEQNEPPSKPARPNRCLCCNKKVGILGFKCKCGSTFCGEHRYPERHDCSFDFKEAGRGEIAKANPVIKADKLQRF

SEQ ID NO: 11162 - protein, 143 aa, Triticum aestivum
  peptide (1)..(143): Ceres Seq. ID no. 15220149
MWRNQRKKRRLLLFLWWPSHLLQQEKLQFLNRTNHHLNLHGRTGAFVATRRLVYLGLSANAGALSAANIGTLRDMIAALISKKLGVERLQKPIRLLKLINFKGSEKGYGVGLSFLLSQIVFEWNWVSTSGLFPKGGNMMNLVL

SEQ ID NO: 11163 - DNA, 932 bp, Triticum aestivum
  misc_feature (1)..(932): Ceres Seq. ID no. 13661681
aaaaaaaacaaacaatcggcagggttcgcgaaaaaaaggaaactcctccctccctcctcccccgcgccgacccgccgccgtcgacagcgcgccccgacgcgatggcccgcaccaagcacccggccgtcaggaagaccaaggcgccgcccaagaagcagctcgggccccgccccgcgcagcggcggcaggagacagatggcgcgggcacgtcggcgacaccgaggcgagccgggcgggcggcggccccagggggggctcaaggggcaactgggcaacccaagcagaggaaaccacaccggttcaggccaggcacggtggcactgcgggagatcaggaggtatcagaagtcggtcgactttctcatcccgtttgcaccatttgtccgtctgatcaaggaggtcaccgacttcttctgtcctgaaatcagccgctggactccccaagcgctcgtcgcgattcaagaggctgcagagtatcacctcgtcgacgtatttgaaagggcaaatcactgtgccatccatgcaaagcgtgttaccgtcatgcaaaaggacatacagcttgcaaggcgtatcggcgggaggaggctttggtgatacttctggaagacgttttctgcatcataggggggaaagactctggtgatactaatgggagatgttttatgtattgggggtgcaaaggcagtgttcatagtggtccaatatgtttgactgtatcgttagaaagtattgtaggtgtatcttcatttagttagctttgtcttcgaagttgatctgattcgttacatgtttgggatcattcgacttcttcattcaggcattgttccatttgaattgattgtggatatgggattttaaatgacttggaatcggttgtggattttccacattattgaaggagcgaaccagaattgcgcgcaagcgttttcatgc

SEQ ID NO: 11164 - protein, 196 aa, Triticum aestivum
  peptide (1)..(196): Ceres Seq. ID no. 15220130
  misc_feature (44)..(194): Pfam Name: Pfam Description:  Core histone H2A/H2B/H3/H4
  misc_feature (34)..(196): NCBI GI NO: 40365140 NR Description: centromeric histone 3
  misc_feature (34)..(196): NCBI GI NO: 21668094 NR Description: centromeric histone h3-like protein [Zea mays]
  misc_feature (34)..(196): NCBI GI NO: 33146144 NR Description: histone H3 like protein [Arabis glabra]
  misc_feature (34)..(196): NCBI GI NO: 33146136 NR Description: histone H3 like protein [Arabis gemmifera]
  misc_feature (34)..(196): NCBI GI NO: 19338704 NR Description: centromeric histone H3 HTR12 [Arabidopsis arenosa]
  misc_feature (34)..(196): NCBI GI NO: 33146140 NR Description: histone H3 like protein [Arabis gemmifera]
  misc_feature (34)..(196): NCBI GI NO: 19338706 NR Description: centromeric histone H3 HTR12 [Arabidopsis arenosa]
  misc_feature (34)..(196): NCBI GI NO: 33146142 NR Description: histone H3 like protein [Arabis gemmifera]
  misc_feature (21)..(196): NCBI GI NO: 21592479 NR Description: histone, putative [Arabidopsis thaliana]
  misc_feature (21)..(196): NCBI GI NO: 18378832 NR Description: histone family [Arabidopsis thaliana]
KKQTIGRVREKKETPPSLLPRADPPPSTARPDAMARTKHPAVRKTKAPPKKQLGPRPAQRRQETDGAGTSATPRRAGRAAAPGGAQGATGQPKQRKPHRFRPGTVALREIRRYQKSVDFLIPFAPFVRLIKEVTDFFCPEISRWTPQALVAIQEAAEYHLVDVFERANHCAIHAKRVTVMQKDIQLARRIGGRRLW

SEQ ID NO: 11165 - protein, 163 aa, Triticum aestivum
  peptide (1)..(163): Ceres Seq. ID no. 15220131
  misc_feature (11)..(161): Pfam Name: Pfam Description:  Core histone H2A/H2B/H3/H4
  misc_feature (1)..(163): NCBI GI NO: 40365140 NR Description: centromeric histone 3
  misc_feature (1)..(163): NCBI GI NO: 21668094 NR Description: centromeric histone h3-like protein [Zea mays]
  misc_feature (1)..(163): NCBI GI NO: 33146144 NR Description: histone H3 like protein [Arabis glabra]
  misc_feature (1)..(163): NCBI GI NO: 33146136 NR Description: histone H3 like protein [Arabis gemmifera]
  misc_feature (1)..(163): NCBI GI NO: 19338704 NR Description: centromeric histone H3 HTR12 [Arabidopsis arenosa]
  misc_feature (1)..(163): NCBI GI NO: 33146140 NR Description: histone H3 like protein [Arabis gemmifera]
  misc_feature (1)..(163): NCBI GI NO: 19338706 NR Description: centromeric histone H3 HTR12 [Arabidopsis arenosa]
  misc_feature (1)..(163): NCBI GI NO: 33146142 NR Description: histone H3 like protein [Arabis gemmifera]
  misc_feature (1)..(163): NCBI GI NO: 21592479 NR Description: histone, putative [Arabidopsis thaliana]
  misc_feature (1)..(163): NCBI GI NO: 18378832 NR Description: histone family [Arabidopsis thaliana]
MARTKHPAVRKTKAPPKKQLGPRPAQRRQETDGAGTSATPRRAGRAAAPGGAQGATGQPKQRKPHRFRPGTVALREIRRYQKSVDFLIPFAPFVRLIKEVTDFFCPEISRWTPQALVAIQEAAEYHLVDVFERANHCAIHAKRVTVMQKDIQLARRIGGRRLW

SEQ ID NO: 11166 - protein, 139 aa, Triticum aestivum
  peptide (1)..(139): Ceres Seq. ID no. 15220132
KKTNNRQGSRKKGNSSLPPPPRRPAAVDSAPRRDGPHQAPGRQEDQGAAQEAARAPPRAAAAGDRWRGHVGDTEASRAGGGPRGGSRGNWATQAEETTPVQARHGGTAGDQEVSEVGRLSHPVCTICPSDQGGHRLLLS

SEQ ID NO: 11167 - DNA, 777 bp, Triticum aestivum
  misc_feature (1)..(777): Ceres Seq. ID no. 13661950
aggattgccgtgttgtttgtccagcaattattcagcgtcgtcggtatgtgtgctctaaaatagcagctgtagggcgttgtttcaactcaggcacactaatggccaagattggggaagaggtcacctggacaggcacacttgattgcgtttgcattgagcgaatatcacgtaaaatcagcaaggctggtattggagggccccttgttaatttggacggggaagttgttggcatggacttctacgatccgaggataggaacccctatcgtgatgtgggaccatgttgaacacattctgcaccatatagaaaagagtgacccctccggcgcggctttctggaaaatggctggggatcccagcacgaggctaaataggtggcctgtgcctgcgccatgttggcgtagccgtgaggacgtggagaaggacaagaaatctgaggaagatgagatgaaccttgagcccccgcccctaccccccagggagagtttctcatgggtcttcaatttctttcaacagaagccgggctctgaaccctcatccagtcacataaaccgcagtaacccattcatatacggattcatagatggaaagaaagttttactgtctatttgatacgtggctgcatttcgttaggatgttggctagttttcacgaggatctgcttgttgctagtcttagcaaatattacatgtgttgctccgcttgctctcttgaattatccagtgtgtgcagccttgtgtaatactcgatggtgatgactttagtttatatattgtcc

SEQ ID NO: 11168 - protein, 202 aa, Triticum aestivum
  peptide (1)..(202): Ceres Seq. ID no. 13661951
  misc_feature (1)..(142): NCBI GI NO: 34910018 NR Description: P0413G02.10
  misc_feature (19)..(125): NCBI GI NO: 34897514 NR Description: unknown protein
  misc_feature (18)..(102): NCBI GI NO: 5803253 NR Description: ESTs AU068856
  misc_feature (18)..(103): NCBI GI NO: 24431600 NR Description: Putative polyprotein from transposon TNT
  misc_feature (19)..(140): NCBI GI NO: 37535324 NR Description: putative serine protease
DCRVVCPAIIQRRRYVCSKIAAVGRCFNSGTLMAKIGEEVTWTGTLDCVCIERISRKISKAGIGGPLVNLDGEVVGMDFYDPRIGTPIVMWDHVEHILHHIEKSDPSGAAFWKMAGDPSTRLNRWPVPAPCWRSREDVEKDKKSEEDEMNLEPPPLPPRESFSWVFNFFQQKPGSEPSSSHINRSNPFIYGFIDGKKVLLSI

SEQ ID NO: 11169 - protein, 170 aa, Triticum aestivum
  peptide (1)..(170): Ceres Seq. ID no. 13661952
  misc_feature (1)..(110): NCBI GI NO: 34910018 NR Description: P0413G02.10
  misc_feature (1)..(93): NCBI GI NO: 34897514 NR Description: unknown protein
  misc_feature (1)..(70): NCBI GI NO: 5803253 NR Description: ESTs AU068856
  misc_feature (1)..(71): NCBI GI NO: 24431600 NR Description: Putative polyprotein from transposon TNT
  misc_feature (1)..(108): NCBI GI NO: 37535324 NR Description: putative serine protease
MAKIGEEVTWTGTLDCVCIERISRKISKAGIGGPLVNLDGEVVGMDFYDPRIGTPIVMWDHVEHILHHIEKSDPSGAAFWKMAGDPSTRLNRWPVPAPCWRSREDVEKDKKSEEDEMNLEPPPLPPRESFSWVFNFFQQKPGSEPSSSHINRSNPFIYGFIDGKKVLLSI

SEQ ID NO: 11170 - protein, 126 aa, Triticum aestivum
  peptide (1)..(126): Ceres Seq. ID no. 13661953
  misc_feature (1)..(66): NCBI GI NO: 34910018 NR Description: P0413G02.10
  misc_feature (1)..(49): NCBI GI NO: 34897514 NR Description: unknown protein
  misc_feature (1)..(26): NCBI GI NO: 5803253 NR Description: ESTs AU068856
  misc_feature (1)..(27): NCBI GI NO: 24431600 NR Description: Putative polyprotein from transposon TNT
  misc_feature (1)..(64): NCBI GI NO: 37535324 NR Description: putative serine protease
MDFYDPRIGTPIVMWDHVEHILHHIEKSDPSGAAFWKMAGDPSTRLNRWPVPAPCWRSREDVEKDKKSEEDEMNLEPPPLPPRESFSWVFNFFQQKPGSEPSSSHINRSNPFIYGFIDGKKVLLSI

SEQ ID NO: 11171 - DNA, 718 bp, Triticum aestivum
  misc_feature (1)..(718): Ceres Seq. ID no. 13661954
agcaggaagctctaacatacaatggatacgaggcagagcgtcgcggcggtggtgaagccgtcgttggatggcggtgccccggccacggcgtcgttccgtctccgtaacggcagcctcaactcggttcgcctccgccgggtgttcgacctgttcgacaagaacggcgacggtcagatcacggtcgacgagctggcgcaggcgctggattcgctcgggctcgtcgccgaccgcgagggcctggcctccactgtgggcgcgtacgtccccgagggcgcggcggggcttcggttccaggacttcgagtgcctccaccgtgagctgggtgacgcgctcttcggcgcgctggacgacgtgcccgaggacggcgaggccggcgcgggcggggacgaggaggagatgaaggaggcgttcaaggtgttcgacgtggacggcgacggcttcatctcggcaaccgagctgcaggaggtgctcaagaagctgggcctccccgagggcagcagcctcgccaccgtgcgccagatgatttgcaacgtcgaccgtaacagcgacggccgcgtcgactttggggagttcaagtgcatgatgaaggggatcacggtgttgggcgcgtgaccatcgaaaccaatcgtgtccgatcgcacgctgcaacaaaccgcacatcctctcgttcatgggtggcgatcagaatcggttcccgtcaatcaagtacaccatctcc

SEQ ID NO: 11172 - protein, 196 aa, Triticum aestivum
  peptide (1)..(196): Ceres Seq. ID no. 13661955
  misc_feature (36)..(64): Pfam Name: Pfam Description:  EF hand
  misc_feature (4)..(196): NCBI GI NO: 33146667 NR Description: putative Avr9/Cf-9 rapidly elicited protein 31
  misc_feature (1)..(195): NCBI GI NO: 29467539 NR Description: P0665F09.7
  misc_feature (9)..(196): NCBI GI NO: 13194672 NR Description: calmodulin-like protein [Pennisetum ciliare]
  misc_feature (19)..(193): NCBI GI NO: 15233402 NR Description: calcium-binding protein, putative
  misc_feature (9)..(193): NCBI GI NO: 12003380 NR Description: Avr9/Cf-9 rapidly elicited protein 31
  misc_feature (22)..(193): NCBI GI NO: 15241500 NR Description: calcium-binding protein, putative
  misc_feature (12)..(193): NCBI GI NO: 1168782 NR Description: Calcium-binding protein CAST
  misc_feature (21)..(193): NCBI GI NO: 1168696 NR Description: Calcium-binding allergen Bet v 3 (Bet v III)
  misc_feature (12)..(190): NCBI GI NO: 21740787 NR Description: OSJNBb0091E11.1
  misc_feature (13)..(190): NCBI GI NO: 18406202 NR Description: calmodulin-like protein (MSS3)
MDTRQSVAAVVKPSLDGGAPATASFRLRNGSLNSVRLRRVFDLFDKNGDGQITVDELAQALDSLGLVADREGLASTVGAYVPEGAAGLRFQDFECLHRELGDALFGALDDVPEDGEAGAGGDEEEMKEAFKVFDVDGDGFISATELQEVLKKLGLPEGSSLATVRQMICNVDRNSDGRVDFGEFKCMMKGITVLGA

SEQ ID NO: 11173 - protein, 110 aa, Triticum aestivum
  peptide (1)..(110): Ceres Seq. ID no. 13661956
  misc_feature (1)..(110): NCBI GI NO: 34868816 NR Description: similar to splicing coactivator subunit SRm300
MAVPRPRRRSVSVTAASTRFASAGCSTCSTRTATVRSRSTSWRRRWIRSGSSPTARAWPPLWARTSPRARRGFGSRTSSASTVSWVTRSSARWTTCPRTARPARAGTRRR

SEQ ID NO: 11174 - DNA, 817 bp, Triticum aestivum
  misc_feature (1)..(817): Ceres Seq. ID no. 13661628
attacctagaacatcctaatcgaaaagtcgaacgataacgatggtgcttccaggatccttttttgcgcttgactggcccgtctcgcgcaattttggccagcaacccggtgacatttgaagttgaactaaaaactgtgtatcctggagcggagccggatccccaaggcgcattgctctcttgcgtctatgattggcgcgccgtgcaggataccacccctatgttccttggctatgcttgttctgcacagttaagccttgagcaacttcctagagcaatccaggccactatcatgggtgtccacattgttgatggctcatggcctcctaaatatggatgccgggtttcttgctccttgtctgctccagatgatcccactcctagggaagtgttgttgcttgattgttcccgttctgatgctgaaaaaaaaaagccctgttggatcagatggctactttggtctggcaaggaatgttgtttcagctgaactacaatcaacactgaaagttgtcatacaagcccagtcgtggaggcatggtggtgcacagggtcatgtcgagttccctgtccaacaatactgccaaacaagcaagggttcatgtgttgtaggcatgtgtaaggtcgaggttgttgttgcttggtccctccttgtcgagaacaagctgaatctcatgctttgagacgtgagatctactatgtaagagtcagctctagcttgcgactcatcttgacccagatattcgtgtactgactattagcttatcttgtgaaacattgttatgctggtggtttgctagcatgttaagcatttctgttcgg

SEQ ID NO: 11175 - protein, 122 aa, Triticum aestivum
  peptide (1)..(122): Ceres Seq. ID no. 15220702
  misc_feature (12)..(122): NCBI GI NO: 21913313 NR Description: csAtPR5 [Aegilops tauschii]
MAHGLLNMDAGFLAPCLLQMIPLLGKCCCLIVPVLMLKKKSPVGSDGYFGLARNVVSAELQSTLKVVIQAQSWRHGGAQGHVEFPVQQYCQTSKGSCVVGMCKVEVVVAWSLLVENKLNLML

SEQ ID NO: 11176 - protein, 115 aa, Triticum aestivum
  peptide (1)..(115): Ceres Seq. ID no. 15220703
  misc_feature (5)..(115): NCBI GI NO: 21913313 NR Description: csAtPR5 [Aegilops tauschii]
MDAGFLAPCLLQMIPLLGKCCCLIVPVLMLKKKSPVGSDGYFGLARNVVSAELQSTLKVVIQAQSWRHGGAQGHVEFPVQQYCQTSKGSCVVGMCKVEVVVAWSLLVENKLNLML

SEQ ID NO: 11177 - protein, 103 aa, Triticum aestivum
  peptide (1)..(103): Ceres Seq. ID no. 15220704
  misc_feature (1)..(103): NCBI GI NO: 21913313 NR Description: csAtPR5 [Aegilops tauschii]
MIPLLGKCCCLIVPVLMLKKKSPVGSDGYFGLARNVVSAELQSTLKVVIQAQSWRHGGAQGHVEFPVQQYCQTSKGSCVVGMCKVEVVVAWSLLVENKLNLML

SEQ ID NO: 11178 - DNA, 902 bp, Triticum aestivum
  misc_feature (1)..(902): Ceres Seq. ID no. 13661833
agatcccctccaccggggcctccttcgacctcctctcctctcccaatccactgcagccggccggccttcccctcccccctccgaccgctagctgctcacccccctccctcctccgaccgctagctgctcgccccactccctccccgtgagaagcttggtccagcaccgagcggcgccgagagctgtccgcgtcgggcgctgttggcatggagagcagcgcggcggcgcggatggatcctgaggcggcgacggagctggcgcggaagggggtcaccctcctgctcctagacgtgccccagcacaccctcctcggcctcgacacccaggtgttctcggtgagccccaggttcagagggatcaagatggtgcccccaggcccacatttcctccactactgctcccccagcagagcaaaaaggttcaacaaccatgaaatcctagctgaggacgtgcgagactgggatatagccagtgaccgggggcaagggcagcgtgcgcagggtgatcgacgaggactactgcggcccgatgggagtcgtgctcttcaactactgagaggcagacttcaccgtgaagccccgcgaccgcgtcatacagattattgtccaggtgattgcgacgcaggaggtcctcggggtggaggagctcgacgccaccgttcggaggtcaccgaggtggaggacgacgccaccgtccggagttcctcaaggtggaggacctcgacgctttgtacatacatctagagaagtggtctggttaggttggtggtgaaacgctagagaaggtaccaaccttttgatgacgattgtgtgtgtcctcgtgatctcttcgagttgagatgttgaatgttgcatccatgaacactgcaagtgttaagatggttatgtgaaatttattttgct

SEQ ID NO: 11179 - protein, 178 aa, Triticum aestivum
  peptide (1)..(178): Ceres Seq. ID no. 13661834
  misc_feature (9)..(73): Pfam Name: Pfam Description:  AAR2 protein
  misc_feature (5)..(72): NCBI GI NO: 38346780 NR Description: OSJNBa0095H06.5
  misc_feature (9)..(73): NCBI GI NO: 15864559 NR Description: CePP putative protein [Brassica napus]
  misc_feature (9)..(73): NCBI GI NO: 7657874 NR Description: CePP protein [Brassica napus var. napus]
  misc_feature (9)..(71): NCBI GI NO: 18408532 NR Description: expressed protein [Arabidopsis thaliana]
  misc_feature (5)..(69): NCBI GI NO: 4680685 NR Description: CGI-23 protein [Homo sapiens]
  misc_feature (5)..(69): NCBI GI NO: 18034690 NR Description: chromosome 20 open reading frame 4 [Homo sapiens]
  misc_feature (1)..(69): NCBI GI NO: 3406621 NR Description: unknown [Oryctolagus cuniculus]
  misc_feature (5)..(69): NCBI GI NO: 7512778 NR Description: hypothetical protein DKFZp564N1363.1 - human
  misc_feature (5)..(69): NCBI GI NO: 24211562 NR Description: Protein c20orf4 homolog
  misc_feature (5)..(69): NCBI GI NO: 24211598 NR Description: Protein c20orf4 homolog
MESSAAARMDPEAATELARKGVTLLLLDVPQHTLLGLDTQVFSVSPRFRGIKMVPPGPHFLHYCSPSRAKRFNNHEILAEDVRDWDIASDRGQGQRAQGDRRGLLRPDGSRALQLLRGRLHREAPRPRHTDYCPGDCDAGGPRGGGARRHRSEVTEVEDDATVRSSSRWRTSTLCTYI

SEQ ID NO: 11180 - protein, 170 aa, Triticum aestivum
  peptide (1)..(170): Ceres Seq. ID no. 13661835
  misc_feature (1)..(65): Pfam Name: Pfam Description:  AAR2 protein
  misc_feature (1)..(64): NCBI GI NO: 38346780 NR Description: OSJNBa0095H06.5
  misc_feature (1)..(65): NCBI GI NO: 15864559 NR Description: CePP putative protein [Brassica napus]
  misc_feature (1)..(65): NCBI GI NO: 7657874 NR Description: CePP protein [Brassica napus var. napus]
  misc_feature (1)..(63): NCBI GI NO: 18408532 NR Description: expressed protein [Arabidopsis thaliana]
  misc_feature (1)..(61): NCBI GI NO: 4680685 NR Description: CGI-23 protein [Homo sapiens]
  misc_feature (1)..(61): NCBI GI NO: 18034690 NR Description: chromosome 20 open reading frame 4 [Homo sapiens]
  misc_feature (1)..(61): NCBI GI NO: 3406621 NR Description: unknown [Oryctolagus cuniculus]
  misc_feature (1)..(61): NCBI GI NO: 7512778 NR Description: hypothetical protein DKFZp564N1363.1 - human
  misc_feature (1)..(61): NCBI GI NO: 24211562 NR Description: Protein c20orf4 homolog
  misc_feature (1)..(61): NCBI GI NO: 24211598 NR Description: Protein c20orf4 homolog
MDPEAATELARKGVTLLLLDVPQHTLLGLDTQVFSVSPRFRGIKMVPPGPHFLHYCSPSRAKRFNNHEILAEDVRDWDIASDRGQGQRAQGDRRGLLRPDGSRALQLLRGRLHREAPRPRHTDYCPGDCDAGGPRGGGARRHRSEVTEVEDDATVRSSSRWRTSTLCTYI

SEQ ID NO: 11181 - protein, 126 aa, Triticum aestivum
  peptide (1)..(126): Ceres Seq. ID no. 13661836
  misc_feature (1)..(20): NCBI GI NO: 38346780 NR Description: OSJNBa0095H06.5
  misc_feature (1)..(21): NCBI GI NO: 15864559 NR Description: CePP putative protein [Brassica napus]
  misc_feature (1)..(21): NCBI GI NO: 7657874 NR Description: CePP protein [Brassica napus var. napus]
  misc_feature (1)..(19): NCBI GI NO: 18408532 NR Description: expressed protein [Arabidopsis thaliana]
  misc_feature (1)..(17): NCBI GI NO: 4680685 NR Description: CGI-23 protein [Homo sapiens]
  misc_feature (1)..(17): NCBI GI NO: 18034690 NR Description: chromosome 20 open reading frame 4 [Homo sapiens]
  misc_feature (1)..(17): NCBI GI NO: 3406621 NR Description: unknown [Oryctolagus cuniculus]
  misc_feature (1)..(17): NCBI GI NO: 7512778 NR Description: hypothetical protein DKFZp564N1363.1 - human
  misc_feature (1)..(17): NCBI GI NO: 24211562 NR Description: Protein c20orf4 homolog
  misc_feature (1)..(17): NCBI GI NO: 24211598 NR Description: Protein c20orf4 homolog
MVPPGPHFLHYCSPSRAKRFNNHEILAEDVRDWDIASDRGQGQRAQGDRRGLLRPDGSRALQLLRGRLHREAPRPRHTDYCPGDCDAGGPRGGGARRHRSEVTEVEDDATVRSSSRWRTSTLCTYI

SEQ ID NO: 11182 - DNA, 681 bp, Triticum aestivum
  misc_feature (1)..(681): Ceres Seq. ID no. 12624445
aacgacgacggaacacgcagctacactcccacactctcaccagctcctcgccgagcctcttgtcctacgacggtgagcatgggcggaggggacgagcatggcgcgtcggctcggctggagagcatcctcacggactcgtcggcaccgcgggcggagcgcgtgtgggcggcgggggcaatcgagctcgggatgctcttgcggctggccgtcccggcggtgatcatgtacatgatcaacttcctcatgtccatgtccacccagatcttctccggccacctcgggagcctggagctcgccgccgcctccctcggaaacacaggcgtccagatgttcgcctatggcctcatggcgctgcagggcgaaagatgcgcggggaaagctctagggaatatttggagccgcgggaaatagccgatcgccgcgtctttttctcccacttatccaaaatctgacaactaatcctgtgtttagtgctgtgatggtcgctaaagcatgcaataattgcacgtcccacgatccgctcggcacgtgcatgcattcacggttcaattaacctgtcattaatgggcgttgatttgaccaaagagtagcagttgacgtttttttattgccacgagcttggatcctgtgtcactcatggtgttcatttctttaatgaatgatgagtggttgatggactgc

SEQ ID NO: 11183 - protein, 149 aa, Triticum aestivum
  peptide (1)..(149): Ceres Seq. ID no. 12624446
RRRNTQLHSHTLTSSSPSLLSYDGEHGRRGRAWRVGSAGEHPHGLVGTAGGARVGGGGNRARDALAAGRPGGDHVHDQLPHVHVHPDLLRPPREPGARRRLPRKHRRPDVRLWPHGAAGRKMRGESSREYLEPREIADRRVFFSHLSKI

SEQ ID NO: 11184 - protein, 136 aa, Triticum aestivum
  peptide (1)..(136): Ceres Seq. ID no. 12624447
  misc_feature (36)..(129): NCBI GI NO: 15233127 NR Description: integral membrane protein, putative
  misc_feature (36)..(129): NCBI GI NO: 20466556 NR Description: integral membrane protein, putative
  misc_feature (38)..(129): NCBI GI NO: 15081773 NR Description: At1g61890/F8K4_9 [Arabidopsis thaliana]
  misc_feature (38)..(129): NCBI GI NO: 18407368 NR Description: expressed protein; protein id: At1g61890
  misc_feature (35)..(129): NCBI GI NO: 15221073 NR Description: unknown protein; protein id: At1g11670.1
  misc_feature (35)..(129): NCBI GI NO: 22655139 NR Description: unknown protein [Arabidopsis thaliana]
  misc_feature (39)..(129): NCBI GI NO: 7487826 NR Description: hypothetical protein T8O5
  misc_feature (39)..(129): NCBI GI NO: 18415793 NR Description: putative protein; protein id: At4g21910.1
  misc_feature (39)..(129): NCBI GI NO: 21553843 NR Description: unknown [Arabidopsis thaliana]
  misc_feature (56)..(129): NCBI GI NO: 34901880 NR Description: putative Multidrug resistance protein norM
NDDGTRSYTPTLSPAPRRASCPTTVSMGGGDEHGASARLESILTDSSAPRAERVWAAGAIELGMLLRLAVPAVIMYMINFLMSMSTQIFSGHLGSLELAAASLGNTGVQMFAYGLMALQGERCAGKALGNIWSRGK

SEQ ID NO: 11185 - protein, 110 aa, Triticum aestivum
  peptide (1)..(110): Ceres Seq. ID no. 12624448
  misc_feature (10)..(103): NCBI GI NO: 15233127 NR Description: integral membrane protein, putative
  misc_feature (10)..(103): NCBI GI NO: 20466556 NR Description: integral membrane protein, putative
  misc_feature (12)..(103): NCBI GI NO: 15081773 NR Description: At1g61890/F8K4_9 [Arabidopsis thaliana]
  misc_feature (12)..(103): NCBI GI NO: 18407368 NR Description: expressed protein; protein id: At1g61890
  misc_feature (9)..(103): NCBI GI NO: 15221073 NR Description: unknown protein; protein id: At1g11670.1
  misc_feature (9)..(103): NCBI GI NO: 22655139 NR Description: unknown protein [Arabidopsis thaliana]
  misc_feature (13)..(103): NCBI GI NO: 7487826 NR Description: hypothetical protein T8O5
  misc_feature (13)..(103): NCBI GI NO: 18415793 NR Description: putative protein; protein id: At4g21910.1
  misc_feature (13)..(103): NCBI GI NO: 21553843 NR Description: unknown [Arabidopsis thaliana]
  misc_feature (30)..(103): NCBI GI NO: 34901880 NR Description: putative Multidrug resistance protein norM
MGGGDEHGASARLESILTDSSAPRAERVWAAGAIELGMLLRLAVPAVIMYMINFLMSMSTQIFSGHLGSLELAAASLGNTGVQMFAYGLMALQGERCAGKALGNIWSRGK

SEQ ID NO: 11186 - DNA, 1020 bp, Triticum aestivum
  misc_feature (1)..(1020): Ceres Seq. ID no. 12624676
agtttttacttttcaggaggagaagaagaaacaaaacccgaaaccagattcgtctctctgcaaaatcgagacgttgtcggaatcgcacttcttcttcttgttcaatccacaatcagtaggtcgaaattcaagaaagatggtggtgtcgccaaagatagctccatcaatgctgtcttcggactttgcaaatctggcggcagaggccaagcggatggttgatttgggcgctgactggcttcacatggacatcatggacgggcattttgtcccgaatctaaccattggtgctcctgtcatcgagagtttgagaaagcacacaagtgcatatcttgattgccacctaatggtgacgaaccccatggattacgtggagcagatgggtaaagctggggcttctggtttcacattccacgttgaggtggccaaagagaactggcaagaacttgtgagtaagattaagtctgctgggatgaggccaggtgtggctctaaagcctggaacacctgttgaagaagtctatcctctggttgaaggggaaactccagtagaaatggtgctagtgatgacggtggagcctggatttggaggccagaagttcatgcccaacatgatggacaaggtcagggcattgaggcagaagtatccaacgctagatattgaggtggacggagggttaggcccatcgactatagaagcagcggctgcagcaggggccaactgtatcgtagctggaagttcggtgtttggagctccggagtcagggaaagtcatttcccttttgcggaccagtgttgagaaagcccaacccaccacctgagtgcactgcccgtttctaataatatatgcacccaccaaaggcaataataattttacgacaactataatttaagagctgaaacatacaaaaagaatcgttcaaacatttccttagtagtttgatcatattgcacttgtgtaatggaatgtttcgtattgtcaagcaaacttggtcatacagtaagaatgtttttgtaaaatggt

SEQ ID NO: 11187 - protein, 271 aa, Triticum aestivum
  peptide (1)..(271): Ceres Seq. ID no. 12624677
  misc_feature (51)..(251): Pfam Name: Pfam Description:  Ribulose-phosphate 3 epimerase family
  misc_feature (47)..(271): NCBI GI NO: 18395962 NR Description: putative D-ribulose-5-phosphate 3-epimerase
  misc_feature (48)..(271): NCBI GI NO: 15221735 NR Description: putative D-ribulose-5-phosphate-3-epimerase
  misc_feature (47)..(271): NCBI GI NO: 6091725 NR Description: putative D-ribulose-5-phosphate 3-epimerase
  misc_feature (51)..(268): NCBI GI NO: 28373310 NR Description: Chain A
  misc_feature (47)..(270): NCBI GI NO: 19114917 NR Description: putative ribulose phosphate 3-epimerase
  misc_feature (46)..(267): NCBI GI NO: 17552948 NR Description: D-ribulose-5-Phosphate 3-epimerase (24.4 kD)
  misc_feature (10)..(267): NCBI GI NO: 7498654 NR Description: hypothetical protein F08F8
  misc_feature (52)..(267): NCBI GI NO: 39581355 NR Description: Hypothetical protein CBG15299
  misc_feature (51)..(267): NCBI GI NO: 27532955 NR Description: RIKEN cDNA 5730518J08 [Mus musculus]
  misc_feature (51)..(267): NCBI GI NO: 29833422 NR Description: putative ribulose-phosphate 3-epimerase
VFTFQEEKKKQNPKPDSSLCKIETLSESHFFFLFNPQSVGRNSRKMVVSPKIAPSMLSSDFANLAAEAKRMVDLGADWLHMDIMDGHFVPNLTIGAPVIESLRKHTSAYLDCHLMVTNPMDYVEQMGKAGASGFTFHVEVAKENWQELVSKIKSAGMRPGVALKPGTPVEEVYPLVEGETPVEMVLVMTVEPGFGGQKFMPNMMDKVRALRQKYPTLDIEVDGGLGPSTIEAAAAAGANCIVAGSSVFGAPESGKVISLLRTSVEKAQPTT

SEQ ID NO: 11188 - protein, 226 aa, Triticum aestivum
  peptide (1)..(226): Ceres Seq. ID no. 12624678
  misc_feature (6)..(206): Pfam Name: Pfam Description:  Ribulose-phosphate 3 epimerase family
  misc_feature (2)..(226): NCBI GI NO: 18395962 NR Description: putative D-ribulose-5-phosphate 3-epimerase
  misc_feature (3)..(226): NCBI GI NO: 15221735 NR Description: putative D-ribulose-5-phosphate-3-epimerase
  misc_feature (2)..(226): NCBI GI NO: 6091725 NR Description: putative D-ribulose-5-phosphate 3-epimerase
  misc_feature (6)..(223): NCBI GI NO: 28373310 NR Description: Chain A
  misc_feature (2)..(225): NCBI GI NO: 19114917 NR Description: putative ribulose phosphate 3-epimerase
  misc_feature (1)..(222): NCBI GI NO: 17552948 NR Description: D-ribulose-5-Phosphate 3-epimerase (24.4 kD)
  misc_feature (1)..(222): NCBI GI NO: 7498654 NR Description: hypothetical protein F08F8
  misc_feature (7)..(222): NCBI GI NO: 39581355 NR Description: Hypothetical protein CBG15299
  misc_feature (6)..(222): NCBI GI NO: 27532955 NR Description: RIKEN cDNA 5730518J08 [Mus musculus]
  misc_feature (6)..(222): NCBI GI NO: 29833422 NR Description: putative ribulose-phosphate 3-epimerase
MVVSPKIAPSMLSSDFANLAAEAKRMVDLGADWLHMDIMDGHFVPNLTIGAPVIESLRKHTSAYLDCHLMVTNPMDYVEQMGKAGASGFTFHVEVAKENWQELVSKIKSAGMRPGVALKPGTPVEEVYPLVEGETPVEMVLVMTVEPGFGGQKFMPNMMDKVRALRQKYPTLDIEVDGGLGPSTIEAAAAAGANCIVAGSSVFGAPESGKVISLLRTSVEKAQPTT

SEQ ID NO: 11189 - protein, 216 aa, Triticum aestivum
  peptide (1)..(216): Ceres Seq. ID no. 12624679
  misc_feature (1)..(196): Pfam Name: Pfam Description:  Ribulose-phosphate 3 epimerase family
  misc_feature (1)..(216): NCBI GI NO: 18395962 NR Description: putative D-ribulose-5-phosphate 3-epimerase
  misc_feature (1)..(216): NCBI GI NO: 15221735 NR Description: putative D-ribulose-5-phosphate-3-epimerase
  misc_feature (1)..(216): NCBI GI NO: 6091725 NR Description: putative D-ribulose-5-phosphate 3-epimerase
  misc_feature (1)..(213): NCBI GI NO: 28373310 NR Description: Chain A
  misc_feature (1)..(215): NCBI GI NO: 19114917 NR Description: putative ribulose phosphate 3-epimerase
  misc_feature (1)..(212): NCBI GI NO: 17552948 NR Description: D-ribulose-5-Phosphate 3-epimerase (24.4 kD)
  misc_feature (1)..(212): NCBI GI NO: 7498654 NR Description: hypothetical protein F08F8
  misc_feature (1)..(212): NCBI GI NO: 39581355 NR Description: Hypothetical protein CBG15299
  misc_feature (1)..(212): NCBI GI NO: 27532955 NR Description: RIKEN cDNA 5730518J08 [Mus musculus]
  misc_feature (1)..(212): NCBI GI NO: 29833422 NR Description: putative ribulose-phosphate 3-epimerase
MLSSDFANLAAEAKRMVDLGADWLHMDIMDGHFVPNLTIGAPVIESLRKHTSAYLDCHLMVTNPMDYVEQMGKAGASGFTFHVEVAKENWQELVSKIKSAGMRPGVALKPGTPVEEVYPLVEGETPVEMVLVMTVEPGFGGQKFMPNMMDKVRALRQKYPTLDIEVDGGLGPSTIEAAAAAGANCIVAGSSVFGAPESGKVISLLRTSVEKAQPTT

SEQ ID NO: 11190 - DNA, 711 bp, Triticum aestivum
  misc_feature (1)..(711): Ceres Seq. ID no. 14301738
agttcatctacagacaaaggcattccaacctcccactagcagaagaatttctccagttccagaaacacaagaaactaccatgacgagtgccaagacacttgctcggctggccaagaagtggcagagggtggcggctatgggaaggaagaggctcacctggtcgccatcaacgtccaaagaagaagccggagagtcgtgcagcacgccgtgctcgacagcggccggcaagggccactgcgtcgtgtacactgccgatggtgtaaggttcgaggtgcctcttacgttcctcggaacgaccatcttcagcgagctcttgaggatatcccaagaggagtttggcttcacaggtgttgacggtggcagaatcactctgccctgcgacgcatcggtgatggagtatgccatgtgcttgctcaggagaagcgcctccacagagatggaggccgcgttcctcaacaccatggtgatgccatgccactatcatgtggcgccacatctgggagttggccagcgattcggtgtatgcagctcctgattaccatctgcagagatacaggaaaatagaacaaggaaaacagtttatgtgtagcattttgatcttgctagcaaagaagcaatcaaggaagatggacctagtaagagatattgttctttcaatgtatgcatatactttgttccgaagataaatgatcgatcgcagttttttaaaat

SEQ ID NO: 11191 - protein, 177 aa, Triticum aestivum
  peptide (1)..(177): Ceres Seq. ID no. 14301739
  misc_feature (27)..(133): Pfam Name: Pfam Description:  Auxin responsive protein
  misc_feature (27)..(174): NCBI GI NO: 32187718 NR Description: auxin induced protein [Zea mays]
  misc_feature (27)..(175): NCBI GI NO: 20149052 NR Description: auxin-induced SAUR-like protein [Capsicum annuum]
  misc_feature (27)..(151): NCBI GI NO: 18397103 NR Description: auxin-induced
  misc_feature (27)..(151): NCBI GI NO: 21553494 NR Description: auxin-induced protein, putative
  misc_feature (27)..(151): NCBI GI NO: 26452075 NR Description: putative auxin-induced protein
  misc_feature (27)..(151): NCBI GI NO: 15218924 NR Description: auxin-induced
  misc_feature (27)..(151): NCBI GI NO: 21592571 NR Description: auxin-induced protein, putative
  misc_feature (27)..(165): NCBI GI NO: 38603942 NR Description: At1g29420 [Arabidopsis thaliana]
  misc_feature (27)..(151): NCBI GI NO: 21593671 NR Description: auxin-induced protein, putative
  misc_feature (36)..(151): NCBI GI NO: 25403069 NR Description: probable auxin-induced protein, 50455-50036
VHLQTKAFQPPTSRRISPVPETQETTMTSAKTLARLAKKWQRVAAMGRKRLTWSPSTSKEEAGESCSTPCSTAAGKGHCVVYTADGVRFEVPLTFLGTTIFSELLRISQEEFGFTGVDGGRITLPCDASVMEYAMCLLRRSASTEMEAAFLNTMVMPCHYHVAPHLGVGQRFGVCSS

SEQ ID NO: 11192 - protein, 151 aa, Triticum aestivum
  peptide (1)..(151): Ceres Seq. ID no. 14301740
  misc_feature (1)..(107): Pfam Name: Pfam Description:  Auxin responsive protein
  misc_feature (1)..(148): NCBI GI NO: 32187718 NR Description: auxin induced protein [Zea mays]
  misc_feature (1)..(149): NCBI GI NO: 20149052 NR Description: auxin-induced SAUR-like protein [Capsicum annuum]
  misc_feature (1)..(125): NCBI GI NO: 18397103 NR Description: auxin-induced
  misc_feature (1)..(125): NCBI GI NO: 21553494 NR Description: auxin-induced protein, putative
  misc_feature (1)..(125): NCBI GI NO: 26452075 NR Description: putative auxin-induced protein
  misc_feature (1)..(125): NCBI GI NO: 15218924 NR Description: auxin-induced
  misc_feature (1)..(125): NCBI GI NO: 21592571 NR Description: auxin-induced protein, putative
  misc_feature (1)..(139): NCBI GI NO: 38603942 NR Description: At1g29420 [Arabidopsis thaliana]
  misc_feature (1)..(125): NCBI GI NO: 21593671 NR Description: auxin-induced protein, putative
  misc_feature (10)..(125): NCBI GI NO: 25403069 NR Description: probable auxin-induced protein, 50455-50036
MTSAKTLARLAKKWQRVAAMGRKRLTWSPSTSKEEAGESCSTPCSTAAGKGHCVVYTADGVRFEVPLTFLGTTIFSELLRISQEEFGFTGVDGGRITLPCDASVMEYAMCLLRRSASTEMEAAFLNTMVMPCHYHVAPHLGVGQRFGVCSS

SEQ ID NO: 11193 - protein, 132 aa, Triticum aestivum
  peptide (1)..(132): Ceres Seq. ID no. 14301741
  misc_feature (1)..(88): Pfam Name: Pfam Description:  Auxin responsive protein
  misc_feature (1)..(129): NCBI GI NO: 32187718 NR Description: auxin induced protein [Zea mays]
  misc_feature (1)..(130): NCBI GI NO: 20149052 NR Description: auxin-induced SAUR-like protein [Capsicum annuum]
  misc_feature (1)..(106): NCBI GI NO: 18397103 NR Description: auxin-induced
  misc_feature (1)..(106): NCBI GI NO: 21553494 NR Description: auxin-induced protein, putative
  misc_feature (1)..(106): NCBI GI NO: 26452075 NR Description: putative auxin-induced protein
  misc_feature (1)..(106): NCBI GI NO: 15218924 NR Description: auxin-induced
  misc_feature (1)..(106): NCBI GI NO: 21592571 NR Description: auxin-induced protein, putative
  misc_feature (1)..(120): NCBI GI NO: 38603942 NR Description: At1g29420 [Arabidopsis thaliana]
  misc_feature (1)..(106): NCBI GI NO: 21593671 NR Description: auxin-induced protein, putative
  misc_feature (1)..(106): NCBI GI NO: 25403069 NR Description: probable auxin-induced protein, 50455-50036
MGRKRLTWSPSTSKEEAGESCSTPCSTAAGKGHCVVYTADGVRFEVPLTFLGTTIFSELLRISQEEFGFTGVDGGRITLPCDASVMEYAMCLLRRSASTEMEAAFLNTMVMPCHYHVAPHLGVGQRFGVCSS

SEQ ID NO: 11194 - DNA, 1127 bp, Triticum aestivum
  misc_feature (1)..(1127): Ceres Seq. ID no. 14301502
aagaaaaaacgaatcgttcctctccacctccctgacgcgagcgaccaaagtccggcggccgacgcggcaacggcggcggagaaggtgcctgttagatcgactttctacattgccttttgagaaaacatagagggatctttctgccctctgctcttacctgaagctagaatcacggagggggtgctctgataggtctatgcaccctgtgtcgatctcctttcaacccttcactgcaacttcagcgggcaatttttcctcaaggaccactaatgtgaggtctcgctgtgattttatcaagttgctgacagttggaagaagtagtggataccgtgccatgaattccggaccaacttctgcttccaggtctgaaacgaccggggaacaggattatgctgtgggagagaatgatggtgtgatcatagtcgaccacgggtcacggcgacaggaatctaatctcatgctaaacgattttgttgcaatgttcagggcaaggactggctacaggattgttgagcctgctcacatggagctcgctgagcctactattaaagaagcatttggaaaatgtgtccagcaaggagcatcccgcattattgtcagcccatatttcctttcacctggacggcactggaaacaagatattccttctttagcagcagaagcctctaaagagcactctaacgtggcctacattgtcactgctcctcttggattgcatgagcttatggtggatattatgaacgaccgcatcaagtactgcctgaggcacgttgcaggcgatgctgatgagtgtgcagtatgtgctgggactggaaagtgccacctctactcctgacggtgatgacatgtgagttgctcgaaagtctaatcaggtcatcctgtttttggctcattggcagcacagattgatggctgaggccaataattccatcttgttaacccatgctccttgttatctgccatgtaatcagaaaacattgtaacaatgatctcggcggttttattcagcttgtagatttagagtgttttcagtagtctgaacaagatatcatgacaagagagtgtaaatttgtcatgcaaatcaaacactgcttgctatgcactaccgcaagaaaaaaactgttacc

SEQ ID NO: 11195 - protein, 212 aa, Triticum aestivum
  peptide (1)..(212): Ceres Seq. ID no. 14301503
  misc_feature (76)..(188): Pfam Name: Pfam Description:  CbiX
  misc_feature (58)..(212): NCBI GI NO: 18402963 NR Description: expressed protein [Arabidopsis thaliana]
  misc_feature (58)..(212): NCBI GI NO: 21618095 NR Description: unknown [Arabidopsis thaliana]
  misc_feature (109)..(212): NCBI GI NO: 25405354 NR Description: hypothetical protein F14I3.20
  misc_feature (58)..(110): NCBI GI NO: 25405354 NR Description: hypothetical protein F14I3.20
  misc_feature (73)..(189): NCBI GI NO: 39998091 NR Description: cbiX protein [Geobacter sulfurreducens PCA]
  misc_feature (73)..(189): NCBI GI NO: 23054392 NR Description: hypothetical protein [Geobacter metallireducens]
  misc_feature (72)..(186): NCBI GI NO: 21400014 NR Description: CbiX, CbiX [Bacillus anthracis A2012]
  misc_feature (72)..(194): NCBI GI NO: 15614059 NR Description: BH1496~unknown conserved protein
  misc_feature (72)..(186): NCBI GI NO: 30020268 NR Description: CbiX protein [Bacillus cereus ATCC 14579]
  misc_feature (60)..(206): NCBI GI NO: 40642725 NR Description: ferrochelatase [Bacillus megaterium]
MHPVSISFQPFTATSAGNFSSRTTNVRSRCDFIKLLTVGRSSGYRAMNSGPTSASRSETTGEQDYAVGENDGVIIVDHGSRRQESNLMLNDFVAMFRARTGYRIVEPAHMELAEPTIKEAFGKCVQQGASRIIVSPYFLSPGRHWKQDIPSLAAEASKEHSNVAYIVTAPLGLHELMVDIMNDRIKYCLRHVAGDADECAVCAGTGKCHLYS

SEQ ID NO: 11196 - protein, 166 aa, Triticum aestivum
  peptide (1)..(166): Ceres Seq. ID no. 14301504
  misc_feature (30)..(142): Pfam Name: Pfam Description:  CbiX
  misc_feature (12)..(166): NCBI GI NO: 18402963 NR Description: expressed protein [Arabidopsis thaliana]
  misc_feature (12)..(166): NCBI GI NO: 21618095 NR Description: unknown [Arabidopsis thaliana]
  misc_feature (63)..(166): NCBI GI NO: 25405354 NR Description: hypothetical protein F14I3.20
  misc_feature (12)..(64): NCBI GI NO: 25405354 NR Description: hypothetical protein F14I3.20
  misc_feature (27)..(143): NCBI GI NO: 39998091 NR Description: cbiX protein [Geobacter sulfurreducens PCA]
  misc_feature (27)..(143): NCBI GI NO: 23054392 NR Description: hypothetical protein [Geobacter metallireducens]
  misc_feature (26)..(140): NCBI GI NO: 21400014 NR Description: CbiX, CbiX [Bacillus anthracis A2012]
  misc_feature (26)..(148): NCBI GI NO: 15614059 NR Description: BH1496~unknown conserved protein
  misc_feature (26)..(140): NCBI GI NO: 30020268 NR Description: CbiX protein [Bacillus cereus ATCC 14579]
  misc_feature (14)..(160): NCBI GI NO: 40642725 NR Description: ferrochelatase [Bacillus megaterium]
MNSGPTSASRSETTGEQDYAVGENDGVIIVDHGSRRQESNLMLNDFVAMFRARTGYRIVEPAHMELAEPTIKEAFGKCVQQGASRIIVSPYFLSPGRHWKQDIPSLAAEASKEHSNVAYIVTAPLGLHELMVDIMNDRIKYCLRHVAGDADECAVCAGTGKCHLYS

SEQ ID NO: 11197 - protein, 125 aa, Triticum aestivum
  peptide (1)..(125): Ceres Seq. ID no. 14301505
  misc_feature (1)..(101): Pfam Name: Pfam Description:  CbiX
  misc_feature (1)..(125): NCBI GI NO: 18402963 NR Description: expressed protein [Arabidopsis thaliana]
  misc_feature (1)..(125): NCBI GI NO: 21618095 NR Description: unknown [Arabidopsis thaliana]
  misc_feature (22)..(125): NCBI GI NO: 25405354 NR Description: hypothetical protein F14I3.20
  misc_feature (1)..(23): NCBI GI NO: 25405354 NR Description: hypothetical protein F14I3.20
  misc_feature (1)..(102): NCBI GI NO: 39998091 NR Description: cbiX protein [Geobacter sulfurreducens PCA]
  misc_feature (1)..(102): NCBI GI NO: 23054392 NR Description: hypothetical protein [Geobacter metallireducens]
  misc_feature (1)..(99): NCBI GI NO: 21400014 NR Description: CbiX, CbiX [Bacillus anthracis A2012]
  misc_feature (1)..(107): NCBI GI NO: 15614059 NR Description: BH1496~unknown conserved protein
  misc_feature (1)..(99): NCBI GI NO: 30020268 NR Description: CbiX protein [Bacillus cereus ATCC 14579]
  misc_feature (1)..(119): NCBI GI NO: 40642725 NR Description: ferrochelatase [Bacillus megaterium]
MLNDFVAMFRARTGYRIVEPAHMELAEPTIKEAFGKCVQQGASRIIVSPYFLSPGRHWKQDIPSLAAEASKEHSNVAYIVTAPLGLHELMVDIMNDRIKYCLRHVAGDADECAVCAGTGKCHLYS

SEQ ID NO: 11198 - DNA, 892 bp, Triticum aestivum
  misc_feature (1)..(892): Ceres Seq. ID no. 14301727
aatcaaaaaaaaaaatcaaccacttcatcatcatcatcgtctcagatttcgaaaaatggcagcgaagatctcccagcttgcgtgtttctcctccaccaaccgccaattccacttccagaaccgatcgtttccaagccttaggttccgtcccgagtcttttgtagttagaagcgttgttgatgggaacagctcggaaacaccagcttctctgagctatgcagctgaggtttcgaaacctttcgttgagaaaacatctacagtggatgaaactactacgggtaaagaggttatcacagagtcggtagaggaacatgttgccacaacacagcctaaaagagcagcgaagattcatgacttctgttttggcattccttatggtggtctggttatgagtggaggattgcttggatttgcgttttcacgaaatcttacaagtttaagtactggggttctctatggtggtggccttctagctcttagtacgttgagcatgaagatttggcgacagggaaagtctagtttcccttatattctaggtcaagcagtgctttcagctgtcgtcttctggaagaacttcacatcttactctatgactaagaagctgtttcctgccgggctatttgctgtcgtcagtgctgccatgttgtgtttctattcgtacgtggtgctctctggaggaaacccacctccaaagaaacttaaaccatctgctactactagtccttcatactgaagaaacttcacataggttagattcaaagatgaagatcttctcttttggtggctcttgtgcgttgcattcctggtgtaattttatacttttgacttttgaggcaacaactgtgacctgttctttccaatgtcgtaattgaaagttttgtttaatggtgac

SEQ ID NO: 11199 - protein, 243 aa, Triticum aestivum
  peptide (1)..(243): Ceres Seq. ID no. 14301728
  misc_feature (119)..(222): Pfam Name: UPF0136 Pfam Description: Uncharacterised protein family
  misc_feature (19)..(243): NCBI GI NO: 18410685 NR Description: expressed protein [Arabidopsis thaliana]
  misc_feature (19)..(243): NCBI GI NO: 11290570 NR Description: hypothetical protein F28O9
  misc_feature (57)..(240): NCBI GI NO: 38344745 NR Description: OSJNBa0089K21.3
  misc_feature (116)..(232): NCBI GI NO: 15232290 NR Description: expressed protein [Arabidopsis thaliana]
  misc_feature (116)..(231): NCBI GI NO: 18403201 NR Description: expressed protein [Arabidopsis thaliana]
  misc_feature (116)..(232): NCBI GI NO: 34896628 NR Description: hypothetical protein [Oryza sativa]
  misc_feature (97)..(232): NCBI GI NO: 7488560 NR Description: inner envelope membrane protein precursor
  misc_feature (97)..(220): NCBI GI NO: 25365973 NR Description: hypothetical protein At2g38550
  misc_feature (97)..(220): NCBI GI NO: 18404784 NR Description: non-green plastid inner envelope membrane protein -related
  misc_feature (97)..(220): NCBI GI NO: 21554522 NR Description: putative non-green plastid inner envelope membraneprotein
IKKKNQPLHHHHRLRFRKMAAKISQLACFSSTNRQFHFQNRSFPSLRFRPESFVVRSVVDGNSSETPASLSYAAEVSKPFVEKTSTVDETTTGKEVITESVEEHVATTQPKRAAKIHDFCFGIPYGGLVMSGGLLGFAFSRNLTSLSTGVLYGGGLLALSTLSMKIWRQGKSSFPYILGQAVLSAVVFWKNFTSYSMTKKLFPAGLFAVVSAAMLCFYSYVVLSGGNPPPKKLKPSATTSPSY

SEQ ID NO: 11200 - protein, 225 aa, Triticum aestivum
  peptide (1)..(225): Ceres Seq. ID no. 14301729
  misc_feature (101)..(204): Pfam Name: UPF0136 Pfam Description: Uncharacterised protein family
  misc_feature (1)..(225): NCBI GI NO: 18410685 NR Description: expressed protein [Arabidopsis thaliana]
  misc_feature (1)..(225): NCBI GI NO: 11290570 NR Description: hypothetical protein F28O9
  misc_feature (39)..(222): NCBI GI NO: 38344745 NR Description: OSJNBa0089K21.3
  misc_feature (98)..(214): NCBI GI NO: 15232290 NR Description: expressed protein [Arabidopsis thaliana]
  misc_feature (98)..(213): NCBI GI NO: 18403201 NR Description: expressed protein [Arabidopsis thaliana]
  misc_feature (98)..(214): NCBI GI NO: 34896628 NR Description: hypothetical protein [Oryza sativa]
  misc_feature (79)..(214): NCBI GI NO: 7488560 NR Description: inner envelope membrane protein precursor
  misc_feature (79)..(202): NCBI GI NO: 25365973 NR Description: hypothetical protein At2g38550
  misc_feature (79)..(202): NCBI GI NO: 18404784 NR Description: non-green plastid inner envelope membrane protein -related
  misc_feature (79)..(202): NCBI GI NO: 21554522 NR Description: putative non-green plastid inner envelope membraneprotein
MAAKISQLACFSSTNRQFHFQNRSFPSLRFRPESFVVRSVVDGNSSETPASLSYAAEVSKPFVEKTSTVDETTTGKEVITESVEEHVATTQPKRAAKIHDFCFGIPYGGLVMSGGLLGFAFSRNLTSLSTGVLYGGGLLALSTLSMKIWRQGKSSFPYILGQAVLSAVVFWKNFTSYSMTKKLFPAGLFAVVSAAMLCFYSYVVLSGGNPPPKKLKPSATTSPSY

SEQ ID NO: 11201 - DNA, 1467 bp, Triticum aestivum
  misc_feature (1)..(1467): Ceres Seq. ID no. 14302754
atcgcctcatcccgctctccggtaatacacgttctctgcactcctctcgtgcgagaatggctgcaagcattctgtcccacgttgtctccgacctctgcatcggcaagccggcggtgcgtgtgctgccgccgtcgactccaatcgcggcggccctcgccacgctccgcgctggtgccgacccgttcgtcttcgtggacgctgcacccccggacgcgaagaagacggccgtgttgtccgtcgtcaaggtcagcgtcgcggagatcctgtgttacgtctgcggcgacggtggcaacctcagcgaccccgcggccgcgctcggccggcccgtttccgtgctcacggccgtggtgggcgatcacggcgtcactcgccaagtggatccacagacgagcctgctcgacgccatcgacgcgctgctggccaacaactcgcacagcctggtcgtcccgctccacgcccgggcccgaaagaagcaccaccacgtctccgccggctactgcgtgctgacgcagcaagacatcgtccggcacctcttcggctccatctccctcttctccccggtcgccgcgctctccgtgtcctccctcggcctcgtgcgccgggacgacgtgcacgccgtccacgtcgacgacgacgcgctcgacgccatccctctcctgcggaggtccatcgggcaaggcaccgccgtggccgtcgtggcggacgacgacgcgctcgtcggagagatctgcccgggcgtgctcggctcgtgcgacgacgtcgagtccgtgtccgcggccttcgccacgctctccgccggcgacgccatgacgtacatcgactgctacttctcgccgcccgagttcctgctccgctccatcagagccgagctcacgggcaaagggcttcatgccatgtgcgacctcatggatgccgcctacacaacggacgttggagctctgtcgtcgtcatcaacgtcatctgatgaggagtgtttgccattggcgcctgcgagacgcgcgaggaagatgtcgtcgggaagcttccggtggcggtcgacggaggacgtggcggcgtgtcatgctgagagttcgctggtcgccgtcatggcccaagcgcttgcgcaccgagtcgggcatgtttgggtcgtcgatgagctcagcggcgctctagtcggagtcgtcagctgcgccgatgtgcttgctgtgctccgggaccatctccgcccagagtgatatgcagatgatttgtgatcgatcctatagcctgcggatgtgtaagcatagcttagagctcggcgatttcccgtcgtgccgccctgctacgactgttggagacctgctgctgttttttttaggatcggcccagcttttttttagaacatgttggttccagtttttatttttgtttttgattttgagggtgtaaccaagttttatattcatcgtaagccaggaatacatctcggatcatgaggttgaccaagcc

SEQ ID NO: 11202 - protein, 403 aa, Triticum aestivum
  peptide (1)..(403): Ceres Seq. ID no. 14302755
  misc_feature (197)..(252): Pfam Name: Pfam Description:  CBS domain
  misc_feature (19)..(401): NCBI GI NO: 37535750 NR Description: unknown protein
  misc_feature (19)..(400): NCBI GI NO: 27754524 NR Description: unknown protein [Arabidopsis thaliana]
  misc_feature (19)..(400): NCBI GI NO: 30687603 NR Description: expressed protein [Arabidopsis thaliana]
  misc_feature (145)..(385): NCBI GI NO: 15238832 NR Description: expressed protein [Arabidopsis thaliana]
  misc_feature (19)..(157): NCBI GI NO: 15238832 NR Description: expressed protein [Arabidopsis thaliana]
  misc_feature (19)..(387): NCBI GI NO: 7486257 NR Description: hypothetical protein F27G19
  misc_feature (25)..(400): NCBI GI NO: 32487397 NR Description: OSJNBb0017I01.11
  misc_feature (19)..(402): NCBI GI NO: 19386732 NR Description: P0678F11.21
  misc_feature (165)..(281): NCBI GI NO: 15218643 NR Description: CBS domain containing protein
  misc_feature (326)..(396): NCBI GI NO: 15218643 NR Description: CBS domain containing protein
RLIPLSGNTRSLHSSRARMAASILSHVVSDLCIGKPAVRVLPPSTPIAAALATLRAGADPFVFVDAAPPDAKKTAVLSVVKVSVAEILCYVCGDGGNLSDPAAALGRPVSVLTAVVGDHGVTRQVDPQTSLLDAIDALLANNSHSLVVPLHARARKKHHHVSAGYCVLTQQDIVRHLFGSISLFSPVAALSVSSLGLVRRDDVHAVHVDDDALDAIPLLRRSIGQGTAVAVVADDDALVGEICPGVLGSCDDVESVSAAFATLSAGDAMTYIDCYFSPPEFLLRSIRAELTGKGLHAMCDLMDAAYTTDVGALSSSSTSSDEECLPLAPARRARKMSSGSFRWRSTEDVAACHAESSLVAVMAQALAHRVGHVWVVDELSGALVGVVSCADVLAVLRDHLRPE

SEQ ID NO: 11203 - protein, 385 aa, Triticum aestivum
  peptide (1)..(385): Ceres Seq. ID no. 14302756
  misc_feature (179)..(234): Pfam Name: Pfam Description:  CBS domain
  misc_feature (1)..(383): NCBI GI NO: 37535750 NR Description: unknown protein
  misc_feature (1)..(382): NCBI GI NO: 27754524 NR Description: unknown protein [Arabidopsis thaliana]
  misc_feature (1)..(382): NCBI GI NO: 30687603 NR Description: expressed protein [Arabidopsis thaliana]
  misc_feature (127)..(367): NCBI GI NO: 15238832 NR Description: expressed protein [Arabidopsis thaliana]
  misc_feature (1)..(139): NCBI GI NO: 15238832 NR Description: expressed protein [Arabidopsis thaliana]
  misc_feature (1)..(369): NCBI GI NO: 7486257 NR Description: hypothetical protein F27G19
  misc_feature (7)..(382): NCBI GI NO: 32487397 NR Description: OSJNBb0017I01.11
  misc_feature (1)..(384): NCBI GI NO: 19386732 NR Description: P0678F11.21
  misc_feature (147)..(263): NCBI GI NO: 15218643 NR Description: CBS domain containing protein
  misc_feature (308)..(378): NCBI GI NO: 15218643 NR Description: CBS domain containing protein
MAASILSHVVSDLCIGKPAVRVLPPSTPIAAALATLRAGADPFVFVDAAPPDAKKTAVLSVVKVSVAEILCYVCGDGGNLSDPAAALGRPVSVLTAVVGDHGVTRQVDPQTSLLDAIDALLANNSHSLVVPLHARARKKHHHVSAGYCVLTQQDIVRHLFGSISLFSPVAALSVSSLGLVRRDDVHAVHVDDDALDAIPLLRRSIGQGTAVAVVADDDALVGEICPGVLGSCDDVESVSAAFATLSAGDAMTYIDCYFSPPEFLLRSIRAELTGKGLHAMCDLMDAAYTTDVGALSSSSTSSDEECLPLAPARRARKMSSGSFRWRSTEDVAACHAESSLVAVMAQALAHRVGHVWVVDELSGALVGVVSCADVLAVLRDHLRPE

SEQ ID NO: 11204 - DNA, 853 bp, Triticum aestivum
  misc_feature (1)..(853): Ceres Seq. ID no. 13661969
aatggtaagagagagtatgggagaagagtccgaggcttttgccacgacggcgccgttagctccagtgaccggtgagcgaaaagtaaggaacgacttggaggaaacattaccaaaaccatatttggcaagagcactagtagctccagatacagagcatccgaatggatcagaaggtcatgacagcaaaggcatgagtgttatgcaacaacatgttgcttttttcgaccaaaacggcgatggaatcgtctatccttgggagacttatgcgggattccgtgacctcggtttcaacccaatctcttctgttttttgggccatattcataaactttgcgtttagctacgttacacttccgagttggttgccatcaccactattgcctgtttatatcgacaacattcacaaagccaagcatgggagtgattcaagcacctatgataccgaaggaaggtacgtcccggttaatctcgagaacatctttagcaaatatgcgttaacggctccaaataaaataacattaaaagagctttggaacttaaccgagggaaaccgaatggcaatcgatccttttggatggcttgcgaataaagttgaatggctactagtctatcttcttgcaaaggatgaggaagggttcgtgtctaaagaagctgtgagaggtgtctttgatgcaagtttctttgaatactgtgctaaaaagaataaagagaaggccgattctcgcaagcaagactaagcatttaatttgcttatcttttaaatttgtccgtttgtattattatgctctcaatcttaattaggaaaaggacagaaaacaaaaactctatgtggaataaaacgtttgtgttcttgg

SEQ ID NO: 11205 - protein, 244 aa, Triticum aestivum
  peptide (1)..(244): Ceres Seq. ID no. 13661970
  misc_feature (59)..(232): Pfam Name: Pfam Description:  Caleosin related protein
  misc_feature (6)..(244): NCBI GI NO: 15226103 NR Description: RD20 protein [Arabidopsis thaliana]
  misc_feature (9)..(232): NCBI GI NO: 7459611 NR Description: Ca+2-binding EF hand protein homolog PM13
  misc_feature (2)..(242): NCBI GI NO: 6478218 NR Description: caleosin [Sesamum indicum]
  misc_feature (9)..(232): NCBI GI NO: 15236846 NR Description: embryo-specific protein 1 (ATS1)
  misc_feature (9)..(232): NCBI GI NO: 17380858 NR Description: putative embryo-specific protein ATS1
  misc_feature (9)..(236): NCBI GI NO: 15240486 NR Description: embryo-specific protein 1 (ATS1)
  misc_feature (5)..(242): NCBI GI NO: 7459612 NR Description: abscisic acid-induced protein - rice
  misc_feature (11)..(236): NCBI GI NO: 34538477 NR Description: caleosin 2 [Hordeum vulgare]
  misc_feature (8)..(238): NCBI GI NO: 32488447 NR Description: OSJNBa0004N05.4
  misc_feature (2)..(236): NCBI GI NO: 34538473 NR Description: caleosin 1 [Hordeum vulgare]
MVRESMGEESEAFATTAPLAPVTGERKVRNDLEETLPKPYLARALVAPDTEHPNGSEGHDSKGMSVMQQHVAFFDQNGDGIVYPWETYAGFRDLGFNPISSVFWAIFINFAFSYVTLPSWLPSPLLPVYIDNIHKAKHGSDSSTYDTEGRYVPVNLENIFSKYALTAPNKITLKELWNLTEGNRMAIDPFGWLANKVEWLLVYLLAKDEEGFVSKEAVRGVFDASFFEYCAKKNKEKADSRKQD

SEQ ID NO: 11206 - protein, 239 aa, Triticum aestivum
  peptide (1)..(239): Ceres Seq. ID no. 13661971
  misc_feature (54)..(227): Pfam Name: Pfam Description:  Caleosin related protein
  misc_feature (1)..(239): NCBI GI NO: 15226103 NR Description: RD20 protein [Arabidopsis thaliana]
  misc_feature (4)..(227): NCBI GI NO: 7459611 NR Description: Ca+2-binding EF hand protein homolog PM13
  misc_feature (1)..(237): NCBI GI NO: 6478218 NR Description: caleosin [Sesamum indicum]
  misc_feature (4)..(227): NCBI GI NO: 15236846 NR Description: embryo-specific protein 1 (ATS1)
  misc_feature (4)..(227): NCBI GI NO: 17380858 NR Description: putative embryo-specific protein ATS1
  misc_feature (4)..(231): NCBI GI NO: 15240486 NR Description: embryo-specific protein 1 (ATS1)
  misc_feature (1)..(237): NCBI GI NO: 7459612 NR Description: abscisic acid-induced protein - rice
  misc_feature (6)..(231): NCBI GI NO: 34538477 NR Description: caleosin 2 [Hordeum vulgare]
  misc_feature (3)..(233): NCBI GI NO: 32488447 NR Description: OSJNBa0004N05.4
  misc_feature (1)..(231): NCBI GI NO: 34538473 NR Description: caleosin 1 [Hordeum vulgare]
MGEESEAFATTAPLAPVTGERKVRNDLEETLPKPYLARALVAPDTEHPNGSEGHDSKGMSVMQQHVAFFDQNGDGIVYPWETYAGFRDLGFNPISSVFWAIFINFAFSYVTLPSWLPSPLLPVYIDNIHKAKHGSDSSTYDTEGRYVPVNLENIFSKYALTAPNKITLKELWNLTEGNRMAIDPFGWLANKVEWLLVYLLAKDEEGFVSKEAVRGVFDASFFEYCAKKNKEKADSRKQD

SEQ ID NO: 11207 - protein, 181 aa, Triticum aestivum
  peptide (1)..(181): Ceres Seq. ID no. 13661972
  misc_feature (1)..(169): Pfam Name: Pfam Description:  Caleosin related protein
  misc_feature (1)..(181): NCBI GI NO: 15226103 NR Description: RD20 protein [Arabidopsis thaliana]
  misc_feature (1)..(169): NCBI GI NO: 7459611 NR Description: Ca+2-binding EF hand protein homolog PM13
  misc_feature (1)..(179): NCBI GI NO: 6478218 NR Description: caleosin [Sesamum indicum]
  misc_feature (1)..(169): NCBI GI NO: 15236846 NR Description: embryo-specific protein 1 (ATS1)
  misc_feature (1)..(169): NCBI GI NO: 17380858 NR Description: putative embryo-specific protein ATS1
  misc_feature (1)..(173): NCBI GI NO: 15240486 NR Description: embryo-specific protein 1 (ATS1)
  misc_feature (1)..(179): NCBI GI NO: 7459612 NR Description: abscisic acid-induced protein - rice
  misc_feature (1)..(173): NCBI GI NO: 34538477 NR Description: caleosin 2 [Hordeum vulgare]
  misc_feature (1)..(175): NCBI GI NO: 32488447 NR Description: OSJNBa0004N05.4
  misc_feature (1)..(173): NCBI GI NO: 34538473 NR Description: caleosin 1 [Hordeum vulgare]
MSVMQQHVAFFDQNGDGIVYPWETYAGFRDLGFNPISSVFWAIFINFAFSYVTLPSWLPSPLLPVYIDNIHKAKHGSDSSTYDTEGRYVPVNLENIFSKYALTAPNKITLKELWNLTEGNRMAIDPFGWLANKVEWLLVYLLAKDEEGFVSKEAVRGVFDASFFEYCAKKNKEKADSRKQD

SEQ ID NO: 11208 - DNA, 586 bp, Triticum aestivum
  misc_feature (1)..(586): Ceres Seq. ID no. 12623423
cctaccgacaaaagtagtggtgatcgcactgctcggtatggcagccaatgttcctcttggcatctggagggagcacaccacgaagttttcagtgcaatggtttgcggcggtccatgctgcagtgcctttcatagggatgctgaggaagtccatcctgatgccgaagagtgccatggcccttaccatagctgcctcaatattgggtcagacaattggttcaagagctgaacgtatcagattgaagagggcaaaattagcagcagagggccatggccatgaacatgctacccggattgaagctccggtgagcctgaaaactgggagctcaggtgctgtccagctctgggacccgctcggccttagggtcaaaggcggcgtgtctccaaccctggttccgactgttggtgccatgtattgatgagatgatcatgcttcgttgcggcggctgtgataattgtatcaagagtttcagaaattgtttcttgtattcattgttattgtgtcttgtaaaggattactggctacattggattcttctccccacatgagtttgggtgcaatcaataaatttcaccgtgtcctttgg

SEQ ID NO: 11209 - protein, 138 aa, Triticum aestivum
  peptide (1)..(138): Ceres Seq. ID no. 12623424
  misc_feature (1)..(133): NCBI GI NO: 37537220 NR Description: unknown protein
  misc_feature (1)..(127): NCBI GI NO: 33146734 NR Description: unknown protein
  misc_feature (1)..(127): NCBI GI NO: 34899856 NR Description: OJ1714_H10.10
  misc_feature (1)..(125): NCBI GI NO: 34897958 NR Description: contains ESTsAU068433
  misc_feature (1)..(127): NCBI GI NO: 15234866 NR Description: putative protein; protein id: At4g25030
  misc_feature (1)..(81): NCBI GI NO: 21595083 NR Description: unknown [Arabidopsis thaliana]
  misc_feature (1)..(81): NCBI GI NO: 21954084 NR Description: unknown protein [Arabidopsis thaliana]
  misc_feature (1)..(81): NCBI GI NO: 30694759 NR Description: expressed protein [Arabidopsis thaliana]
LPTKVVVIALLGMAANVPLGIWREHTTKFSVQWFAAVHAAVPFIGMLRKSILMPKSAMALTIAASILGQTIGSRAERIRLKRAKLAAEGHGHEHATRIEAPVSLKTGSSGAVQLWDPLGLRVKGGVSPTLVPTVGAMY

SEQ ID NO: 11210 - protein, 126 aa, Triticum aestivum
  peptide (1)..(126): Ceres Seq. ID no. 12623425
  misc_feature (1)..(121): NCBI GI NO: 37537220 NR Description: unknown protein
  misc_feature (1)..(115): NCBI GI NO: 33146734 NR Description: unknown protein
  misc_feature (1)..(115): NCBI GI NO: 34899856 NR Description: OJ1714_H10.10
  misc_feature (1)..(113): NCBI GI NO: 34897958 NR Description: contains ESTsAU068433
  misc_feature (1)..(115): NCBI GI NO: 15234866 NR Description: putative protein; protein id: At4g25030
  misc_feature (1)..(69): NCBI GI NO: 21595083 NR Description: unknown [Arabidopsis thaliana]
  misc_feature (1)..(69): NCBI GI NO: 21954084 NR Description: unknown protein [Arabidopsis thaliana]
  misc_feature (1)..(69): NCBI GI NO: 30694759 NR Description: expressed protein [Arabidopsis thaliana]
MAANVPLGIWREHTTKFSVQWFAAVHAAVPFIGMLRKSILMPKSAMALTIAASILGQTIGSRAERIRLKRAKLAAEGHGHEHATRIEAPVSLKTGSSGAVQLWDPLGLRVKGGVSPTLVPTVGAMY

SEQ ID NO: 11211 - protein, 93 aa, Triticum aestivum
  peptide (1)..(93): Ceres Seq. ID no. 12623426
  misc_feature (1)..(88): NCBI GI NO: 37537220 NR Description: unknown protein
  misc_feature (1)..(82): NCBI GI NO: 33146734 NR Description: unknown protein
  misc_feature (1)..(82): NCBI GI NO: 34899856 NR Description: OJ1714_H10.10
  misc_feature (1)..(80): NCBI GI NO: 34897958 NR Description: contains ESTsAU068433
  misc_feature (1)..(82): NCBI GI NO: 15234866 NR Description: putative protein; protein id: At4g25030
  misc_feature (1)..(36): NCBI GI NO: 21595083 NR Description: unknown [Arabidopsis thaliana]
  misc_feature (1)..(36): NCBI GI NO: 21954084 NR Description: unknown protein [Arabidopsis thaliana]
  misc_feature (1)..(36): NCBI GI NO: 30694759 NR Description: expressed protein [Arabidopsis thaliana]
MLRKSILMPKSAMALTIAASILGQTIGSRAERIRLKRAKLAAEGHGHEHATRIEAPVSLKTGSSGAVQLWDPLGLRVKGGVSPTLVPTVGAMY

SEQ ID NO: 11212 - DNA, 1102 bp, Triticum aestivum
  misc_feature (1)..(1102): Ceres Seq. ID no. 13664173
cctagaacatcctaatcgaaaaaccatttcccccaacacagaacagaattgaacaaagctagcaatcactcataggtggccaccatggacgtggcctcggtgcttctccccttcgtcctggcgctggtggcgatcccgatcttgctcgcgctacacgactggccacgcctcccaccgggcccgtgcccgtggccggtggtgggcaacctgcgccagatcaagcccgtgcggtgccgctgcttccaggagtgggcggagcggtatgggccaatcttctctgtgtggttcggctcctccctcaccgtcgtcgtctccacgccagagctggcaaaggaggtgctcaaggaccacgaccagcagctcgccaaccgcacccgcaaccgctccacccaacgcttcagccgcaacggccaggacctcgtctgggccgactacggcccgcactacatcaaggtgcgcaagctgtgcaatctcgagctcttcacgcagaagcgactcgaggcgctccgccccatccgggaggacgaggtcaccgccatggtctcgtccgtccaccgcgccgccaccggccccggtaatgaaggaaagccactggttgtcaggagtcaccttgccatggtgtctttcaacaatataacaaggctagtttttgggaagcggttcatgwrtdmaasayrdtracagttrgaacgaagaagggcaggagttcaagagtattgtcaacaacggtatcaaaattggtgcatctctctctattgctgaatatgtttggtacttgagatggttgtttccacttaatgaggagctttacaagacccacaatgagagaagggatcagctgaccaagaagatcatagaagagcatgcgaaggccctcaaggagagtggtagcaagcatcatttcgtggatgcactgttgactctcagagaacagtatgacctcagtgatgacacagttttcggacttctatgggtatgatggatgcccctttatatttaattaatatatcttcctacagtacattttgcttttagtgtcataagatgagatgtcgtgctaatttttaatgtggaataaaatatcaatgccttgtcagtgctc

SEQ ID NO: 11213 - protein, 198 aa, Triticum aestivum
  peptide (1)..(198): Ceres Seq. ID no. 15220282
  misc_feature (30)..(194): Pfam Name: Pfam Description:  Cytochrome P450
  misc_feature (1)..(194): NCBI GI NO: 40641240 NR Description: cytochrome P450 [Triticum aestivum]
  misc_feature (1)..(194): NCBI GI NO: 40641238 NR Description: cytochrome P450 [Triticum aestivum]
  misc_feature (1)..(194): NCBI GI NO: 5915857 NR Description: Cytochrome P450 98A1
  misc_feature (1)..(194): NCBI GI NO: 40641242 NR Description: cytochrome P450 [Triticum aestivum]
  misc_feature (3)..(194): NCBI GI NO: 22651519 NR Description: p-coumaroyl shikimate 3'-hydroxylase isoform 1
  misc_feature (11)..(194): NCBI GI NO: 22651521 NR Description: p-coumaroyl shikimate 3'-hydroxylase isoform 2
  misc_feature (11)..(194): NCBI GI NO: 30688445 NR Description: cytochrome P450 98A3 [Arabidopsis thaliana]
  misc_feature (5)..(194): NCBI GI NO: 5915858 NR Description: Cytochrome P450 98A2
  misc_feature (11)..(194): NCBI GI NO: 17978651 NR Description: p-coumarate 3-hydroxylase [Pinus taeda]
  misc_feature (28)..(194): NCBI GI NO: 26522472 NR Description: cytochrome P-450 [Lithospermum erythrorhizon]
  misc_feature (195)..(195): Xaa is any aa, unknown or other
  misc_feature (196)..(196): Xaa is any aa, unknown or other
  misc_feature (197)..(197): Xaa is any aa, unknown or other
  misc_feature (198)..(198): Xaa is any aa, unknown or other
MDVASVLLPFVLALVAIPILLALHDWPRLPPGPCPWPVVGNLRQIKPVRCRCFQEWAERYGPIFSVWFGSSLTVVVSTPELAKEVLKDHDQQLANRTRNRSTQRFSRNGQDLVWADYGPHYIKVRKLCNLELFTQKRLEALRPIREDEVTAMVSSVHRAATGPGNEGKPLVVRSHLAMVSFNNITRLVFGKRFMXXXX

SEQ ID NO: 11214 - protein, 124 aa, Triticum aestivum
  peptide (1)..(124): Ceres Seq. ID no. 15220283
  misc_feature (3)..(90): Pfam Name: Pfam Description:  Thymidine kinase from herpesvirus
MGQSSLCGSAPPSPSSSPRQSWQRRCSRTTTSSSPTAPATAPPNASAATARTSSGPTTARTTSRCASCAISSSSRRSDSRRSAPSGRTRSPPWSRPSTAPPPAPVMKESHWLSGVTLPWCLSTI

SEQ ID NO: 11215 - DNA, 625 bp, Triticum aestivum
  misc_feature (1)..(625): Ceres Seq. ID no. 12624483
acacgcccaacagctccacacatcgccacggtcttcttggctcctccgtccacagctagccagcccctccgctccgctccaccaccagcagccaaatggcgaagctgctggcggccggcgtcgcgttcctcctggccctcgccgcagcggcggcgctggccccgtctccggcctcggccttgaagggcgccggcgggctaggcctcggcggcgcggctgcggccgtggttatgcggcggggcgggcggacgtgccggggcacggtgggcgagtgcatggagtacttcggcgtggacggcgagggcgagagcgaggtggcggcgatggccggcaagcggcgggtgctgcaggacgggtccgggtacatcggctacgacgcgctgcggcgggacaacgtgccgtgctcgcagcgcggtgcctcctactacaactgccagcccggagccgaggccaacccctactcccgcggatgcagcgccatcacccagtgcaggggctgatccccttcattaaaccctgcttcattccttcttaccacctgcatgcctcatcaattagtattgctatctatctgtaacgtaatgtaatgtaatgtaattacaagaagaagatcaaacacttcttg

SEQ ID NO: 11216 - protein, 191 aa, Triticum aestivum
  peptide (1)..(191): Ceres Seq. ID no. 12624484
HAQQLHTSPRSSWLLRPQLASPSAPLHHQQPNGEAAGGRRRVPPGPRRSGGAGPVSGLGLEGRRRARPRRRGCGRGYAAGRADVPGHGGRVHGVLRRGRRGRERGGGDGRQAAGAAGRVRVHRLRRAAAGQRAVLAARCLLLQLPARSRGQPLLPRMQRHHPVQGLIPFIKPCFIPSYHLHASSISIAIYL

SEQ ID NO: 11217 - protein, 134 aa, Triticum aestivum
  peptide (1)..(134): Ceres Seq. ID no. 12624485
  misc_feature (69)..(134): Pfam Name: RALF Pfam Description: Rapid ALkalinization Factor
  misc_feature (1)..(134): NCBI GI NO: 34902918 NR Description: unnamed protein product
  misc_feature (55)..(134): NCBI GI NO: 34915066 NR Description: P0025H06.17
  misc_feature (21)..(134): NCBI GI NO: 34907152 NR Description: P0506E04.27
  misc_feature (14)..(134): NCBI GI NO: 34915062 NR Description: P0025H06.15
  misc_feature (11)..(133): NCBI GI NO: 28628203 NR Description: rapid alkalinization factor 1 precursor
  misc_feature (36)..(133): NCBI GI NO: 16566316 NR Description: RALF precursor [Nicotiana tabacum]
  misc_feature (53)..(133): NCBI GI NO: 18414528 NR Description: Expressed protein; protein id: At4g15800
  misc_feature (37)..(133): NCBI GI NO: 15218637 NR Description: hypothetical protein; protein id: At1g02900.1
  misc_feature (88)..(134): NCBI GI NO: 37532832 NR Description: hypothetical protein
  misc_feature (14)..(133): NCBI GI NO: 18397246 NR Description: expressed protein; protein id: At3g05490
MAKLLAAGVAFLLALAAAAALAPSPASALKGAGGLGLGGAAAAVVMRRGGRTCRGTVGECMEYFGVDGEGESEVAAMAGKRRVLQDGSGYIGYDALRRDNVPCSQRGASYYNCQPGAEANPYSRGCSAITQCRG

SEQ ID NO: 11218 - DNA, 875 bp, Triticum aestivum
  misc_feature (1)..(875): Ceres Seq. ID no. 12624490
ttcgacgaggacgaacaacagtgcaacaaagaagtactctgcttttggatcaagaactcgagaacagagaggagaatcgatggccacgttcgcgacgtcaacggcggcagtgatgggatcggctcgccctggccgggtggccgggcctcggcggtgcgtggtggcgcgcgcgtccgccatgatggcggcaccggcgccggtggcggccgggaggacgcactacgaggtgctcggtgtgagtgccagggcgagcaggggggagatcaaggaggcgtaccggcgtctggccagggaggtgcacccggacgctgctggtggcggcggcgacgaggggttcatccggcttcacgcggcctacgccacgctggccgaccctgacgagcgcgcgcgctacgaccgggacgtggcctgccgcaccgccgggatgatgatgcggcggccggccgcggccgggccggcgttccggcggaggacgtgggagaccgaccagtgctggtaggaggggcggacacacgacgacacgtggttgctcagttctcccgttcccggccggcggccgtctggttcgatcaggcacggcgtcgaggttgtcgatggtcgccaggaaggaaaccgcgtcgtctgacgtgcgccgtccgatcagtgttggccggtccagatctaacgacgcggatgcgggagagctgtgaactgcgacgcgacgagaggcattttttgaagatctcttgcgttcgaccagcaaatgattagctactgcctgtaaattaatggcctgggaaatgttatagctctctgtggttatagaaggaaatatttaccccctccatgtcatagttttttgtttgccaagtaaggattaaagggttactaacttc

SEQ ID NO: 11219 - protein, 165 aa, Triticum aestivum
  peptide (1)..(165): Ceres Seq. ID no. 12624491
  misc_feature (74)..(135): Pfam Name: Pfam Description:  DnaJ domain
  misc_feature (23)..(165): NCBI GI NO: 7488763 NR Description: DnaJ protein homolog - kidney bean (fragment)
  misc_feature (64)..(165): NCBI GI NO: 15227919 NR Description: putative DnaJ protein; protein id: At2g17880
  misc_feature (74)..(165): NCBI GI NO: 15233446 NR Description: DnaJ-like protein; protein id: At4g36040.1
  misc_feature (55)..(165): NCBI GI NO: 15231204 NR Description: DnaJ protein, putative; protein id: At3g13310
  misc_feature (74)..(165): NCBI GI NO: 9843641 NR Description: J11 protein [Arabidopsis thaliana]
  misc_feature (28)..(148): NCBI GI NO: 34894012 NR Description: P0672D08.16
  misc_feature (71)..(158): NCBI GI NO: 29833781 NR Description: putative heat shock protein DnaJ
  misc_feature (69)..(133): NCBI GI NO: 144832 NR Description: dnaJ
  misc_feature (69)..(133): NCBI GI NO: 22972332 NR Description: hypothetical protein [Chloroflexus aurantiacus]
  misc_feature (71)..(133): NCBI GI NO: 17229939 NR Description: DnaJ protein [Nostoc sp. PCC 7120]
STRTNNSATKKYSAFGSRTREQRGESMATFATSTAAVMGSARPGRVAGPRRCVVARASAMMAAPAPVAAGRTHYEVLGVSARASRGEIKEAYRRLAREVHPDAAGGGGDEGFIRLHAAYATLADPDERARYDRDVACRTAGMMMRRPAAAGPAFRRRTWETDQCW

SEQ ID NO: 11220 - protein, 139 aa, Triticum aestivum
  peptide (1)..(139): Ceres Seq. ID no. 12624492
  misc_feature (48)..(109): Pfam Name: Pfam Description:  DnaJ domain
  misc_feature (1)..(139): NCBI GI NO: 7488763 NR Description: DnaJ protein homolog - kidney bean (fragment)
  misc_feature (38)..(139): NCBI GI NO: 15227919 NR Description: putative DnaJ protein; protein id: At2g17880
  misc_feature (48)..(139): NCBI GI NO: 15233446 NR Description: DnaJ-like protein; protein id: At4g36040.1
  misc_feature (29)..(139): NCBI GI NO: 15231204 NR Description: DnaJ protein, putative; protein id: At3g13310
  misc_feature (48)..(139): NCBI GI NO: 9843641 NR Description: J11 protein [Arabidopsis thaliana]
  misc_feature (2)..(122): NCBI GI NO: 34894012 NR Description: P0672D08.16
  misc_feature (45)..(132): NCBI GI NO: 29833781 NR Description: putative heat shock protein DnaJ
  misc_feature (43)..(107): NCBI GI NO: 144832 NR Description: dnaJ
  misc_feature (43)..(107): NCBI GI NO: 22972332 NR Description: hypothetical protein [Chloroflexus aurantiacus]
  misc_feature (45)..(107): NCBI GI NO: 17229939 NR Description: DnaJ protein [Nostoc sp. PCC 7120]
MATFATSTAAVMGSARPGRVAGPRRCVVARASAMMAAPAPVAAGRTHYEVLGVSARASRGEIKEAYRRLAREVHPDAAGGGGDEGFIRLHAAYATLADPDERARYDRDVACRTAGMMMRRPAAAGPAFRRRTWETDQCW

SEQ ID NO: 11221 - protein, 128 aa, Triticum aestivum
  peptide (1)..(128): Ceres Seq. ID no. 12624493
  misc_feature (37)..(98): Pfam Name: Pfam Description:  DnaJ domain
  misc_feature (1)..(128): NCBI GI NO: 7488763 NR Description: DnaJ protein homolog - kidney bean (fragment)
  misc_feature (27)..(128): NCBI GI NO: 15227919 NR Description: putative DnaJ protein; protein id: At2g17880
  misc_feature (37)..(128): NCBI GI NO: 15233446 NR Description: DnaJ-like protein; protein id: At4g36040.1
  misc_feature (18)..(128): NCBI GI NO: 15231204 NR Description: DnaJ protein, putative; protein id: At3g13310
  misc_feature (37)..(128): NCBI GI NO: 9843641 NR Description: J11 protein [Arabidopsis thaliana]
  misc_feature (1)..(111): NCBI GI NO: 34894012 NR Description: P0672D08.16
  misc_feature (34)..(121): NCBI GI NO: 29833781 NR Description: putative heat shock protein DnaJ
  misc_feature (32)..(96): NCBI GI NO: 144832 NR Description: dnaJ
  misc_feature (32)..(96): NCBI GI NO: 22972332 NR Description: hypothetical protein [Chloroflexus aurantiacus]
  misc_feature (34)..(96): NCBI GI NO: 17229939 NR Description: DnaJ protein [Nostoc sp. PCC 7120]
MGSARPGRVAGPRRCVVARASAMMAAPAPVAAGRTHYEVLGVSARASRGEIKEAYRRLAREVHPDAAGGGGDEGFIRLHAAYATLADPDERARYDRDVACRTAGMMMRRPAAAGPAFRRRTWETDQCW

SEQ ID NO: 11222 - DNA, 990 bp, Triticum aestivum
  misc_feature (1)..(990): Ceres Seq. ID no. 13661987
atatctcaccccccgctccattgatagttcgtctcatcttagcttaatatccatggcagcaaagatggcgaagaacgtggacaagccactcttcacggcgacgttcaacgtccaggccagctccaccgactatgtcaccttcatcaccggcatccgcaacaagctccgcaacccggggcaatcctcccacaaccgccccgtgctaccgccgatcgagcccaacgtcccgccgagcaggtggttccacatcgtgctcaagacatcgccggccaacaccgggctcacactcgccacccgcgccgacaacctctattgggagggcttcaagagcagcgacggcacctggtgggagctcacccccggccttatccccggtgccacctatgtcgggtttggcggcacctaccgcgacctcctcggcgacaccgacaagctgaccaacgttgccctcggccggcagcagatggccgacgcggtgactgcgctccacgggcgcaccaaggccgacaagacctccggcccgaagcagcagcaggcgagggaagcggtgacgacgctgctcctcatggtgcacgaggccacgcggttccagaccgtgtcggggttcgtggctggcctgctgcaccccaagacggtggagaagaagagcgggaagatctccaacgagctaaaggcccaggtgaacgggtggcaggacctgtccgaagcgctgttgaagacggatgcgaagcccccggcgggaaagccgccagcaaagttcacgccgatcgagaagatgggtgtgaggacggcagagcaggcggccgccaccctggggatcctactgttcgtccaggtgcccggtgggatgacagtggctcaggcgctggagctgtttcataagagtggggggaaataggtagttgtgcaggtatatctgcatgggtatcgtataagtcaaataaacatgtcacagagtgactaaatgatataaataaataaacatgtcgc

SEQ ID NO: 11223 - protein, 298 aa, Triticum aestivum
  peptide (1)..(298): Ceres Seq. ID no. 13661988
  misc_feature (26)..(282): Pfam Name: Pfam Description:  Ribosome inactivating protein
  misc_feature (22)..(298): NCBI GI NO: 479388 NR Description: tritin - wheat
  misc_feature (19)..(298): NCBI GI NO: 7442154 NR Description: protein synthesis inhibitor - rye
  misc_feature (19)..(298): NCBI GI NO: 132580 NR Description: Protein synthesis inhibitor II
  misc_feature (18)..(298): NCBI GI NO: 132577 NR Description: Protein synthesis inhibitor I
  misc_feature (29)..(293): NCBI GI NO: 34896138 NR Description: putative protein synthesis inhibitor II
  misc_feature (29)..(293): NCBI GI NO: 34896052 NR Description: unnamed protein product
  misc_feature (182)..(298): NCBI GI NO: 167034 NR Description: ribosome-inactivating protein
  misc_feature (15)..(274): NCBI GI NO: 7331166 NR Description: ribosome-inactivating protein [Zea mays]
  misc_feature (15)..(274): NCBI GI NO: 7442155 NR Description: rRNA N-glycosidase (EC 3.2.2.22) - maize
  misc_feature (29)..(167): NCBI GI NO: 132600 NR Description: Ribosome-inactivating protein precursor
YLTPRSIDSSSHLSLISMAAKMAKNVDKPLFTATFNVQASSTDYVTFITGIRNKLRNPGQSSHNRPVLPPIEPNVPPSRWFHIVLKTSPANTGLTLATRADNLYWEGFKSSDGTWWELTPGLIPGATYVGFGGTYRDLLGDTDKLTNVALGRQQMADAVTALHGRTKADKTSGPKQQQAREAVTTLLLMVHEATRFQTVSGFVAGLLHPKTVEKKSGKISNELKAQVNGWQDLSEALLKTDAKPPAGKPPAKFTPIEKMGVRTAEQAAATLGILLFVQVPGGMTVAQALELFHKSGGK

SEQ ID NO: 11224 - protein, 281 aa, Triticum aestivum
  peptide (1)..(281): Ceres Seq. ID no. 13661989
  misc_feature (9)..(265): Pfam Name: Pfam Description:  Ribosome inactivating protein
  misc_feature (5)..(281): NCBI GI NO: 479388 NR Description: tritin - wheat
  misc_feature (2)..(281): NCBI GI NO: 7442154 NR Description: protein synthesis inhibitor - rye
  misc_feature (2)..(281): NCBI GI NO: 132580 NR Description: Protein synthesis inhibitor II
  misc_feature (1)..(281): NCBI GI NO: 132577 NR Description: Protein synthesis inhibitor I
  misc_feature (12)..(276): NCBI GI NO: 34896138 NR Description: putative protein synthesis inhibitor II
  misc_feature (12)..(276): NCBI GI NO: 34896052 NR Description: unnamed protein product
  misc_feature (165)..(281): NCBI GI NO: 167034 NR Description: ribosome-inactivating protein
  misc_feature (1)..(257): NCBI GI NO: 7331166 NR Description: ribosome-inactivating protein [Zea mays]
  misc_feature (1)..(257): NCBI GI NO: 7442155 NR Description: rRNA N-glycosidase (EC 3.2.2.22) - maize
  misc_feature (12)..(150): NCBI GI NO: 132600 NR Description: Ribosome-inactivating protein precursor
MAAKMAKNVDKPLFTATFNVQASSTDYVTFITGIRNKLRNPGQSSHNRPVLPPIEPNVPPSRWFHIVLKTSPANTGLTLATRADNLYWEGFKSSDGTWWELTPGLIPGATYVGFGGTYRDLLGDTDKLTNVALGRQQMADAVTALHGRTKADKTSGPKQQQAREAVTTLLLMVHEATRFQTVSGFVAGLLHPKTVEKKSGKISNELKAQVNGWQDLSEALLKTDAKPPAGKPPAKFTPIEKMGVRTAEQAAATLGILLFVQVPGGMTVAQALELFHKSGGK

SEQ ID NO: 11225 - protein, 277 aa, Triticum aestivum
  peptide (1)..(277): Ceres Seq. ID no. 13661990
  misc_feature (5)..(261): Pfam Name: Pfam Description:  Ribosome inactivating protein
  misc_feature (1)..(277): NCBI GI NO: 479388 NR Description: tritin - wheat
  misc_feature (1)..(277): NCBI GI NO: 7442154 NR Description: protein synthesis inhibitor - rye
  misc_feature (1)..(277): NCBI GI NO: 132580 NR Description: Protein synthesis inhibitor II
  misc_feature (1)..(277): NCBI GI NO: 132577 NR Description: Protein synthesis inhibitor I
  misc_feature (8)..(272): NCBI GI NO: 34896138 NR Description: putative protein synthesis inhibitor II
  misc_feature (8)..(272): NCBI GI NO: 34896052 NR Description: unnamed protein product
  misc_feature (161)..(277): NCBI GI NO: 167034 NR Description: ribosome-inactivating protein
  misc_feature (1)..(253): NCBI GI NO: 7331166 NR Description: ribosome-inactivating protein [Zea mays]
  misc_feature (1)..(253): NCBI GI NO: 7442155 NR Description: rRNA N-glycosidase (EC 3.2.2.22) - maize
  misc_feature (8)..(146): NCBI GI NO: 132600 NR Description: Ribosome-inactivating protein precursor
MAKNVDKPLFTATFNVQASSTDYVTFITGIRNKLRNPGQSSHNRPVLPPIEPNVPPSRWFHIVLKTSPANTGLTLATRADNLYWEGFKSSDGTWWELTPGLIPGATYVGFGGTYRDLLGDTDKLTNVALGRQQMADAVTALHGRTKADKTSGPKQQQAREAVTTLLLMVHEATRFQTVSGFVAGLLHPKTVEKKSGKISNELKAQVNGWQDLSEALLKTDAKPPAGKPPAKFTPIEKMGVRTAEQAAATLGILLFVQVPGGMTVAQALELFHKSGGK

SEQ ID NO: 11226 - DNA, 712 bp, Triticum aestivum
  misc_feature (1)..(712): Ceres Seq. ID no. 12624501
cagacattgctggccacttgcccaacagcttcttcgtctcgaattcctcctgcaagctagagtagtagcgcacggagacgagatctagagggaacaccggcggcccttggccttgggggagggagatctagggatggtgggggtgagcgccgggacgggggcaatgggctccctcctcgccaagctcaccgcgcttctcagcgacgagtacaagctcctgaagcgcgtccgaaaggagatcgagttcctcaagtgcgagctcgagaggatgcggatcctgttggagaggctggcggacatggaggggaggctcgacggcctggccaggggctggagagacagcgtgcgcgacctcagctacgacatggaagactgcatcgaccgcttcatggaccggcttggcagcggcgacgccaaacccaagttcatgaagaggacggcgcgccggctcgagactctgtgggcgcgccatgacatcgcgacccagatcaaggagctcatggctcgcgtcatggaggaaatgagcggcgtgacagatactgcatttttcctaactcttgcacttgttgttgttgttgttgaggatcttaactcttgcacttgtatgtatttctggattttttttagaaaaggaggatgacccccggcctctgcatctgggagatgcatacggccactttattgattattctggagaaccatacaaagtatt

SEQ ID NO: 11227 - protein, 168 aa, Triticum aestivum
  peptide (1)..(168): Ceres Seq. ID no. 12624502
  misc_feature (1)..(128): NCBI GI NO: 40253400 NR Description: putative MLA1
  misc_feature (5)..(128): NCBI GI NO: 4680207 NR Description: disease resistance protein RPM1 homolog
  misc_feature (4)..(128): NCBI GI NO: 31126724 NR Description: putative CC-NBS-LRR resistance protein
  misc_feature (1)..(129): NCBI GI NO: 38636971 NR Description: putative NBS-LRR disease resistance proteinhomologue
  misc_feature (9)..(128): NCBI GI NO: 40253375 NR Description: putative disease resistance protein RPM1
  misc_feature (4)..(128): NCBI GI NO: 38636973 NR Description: putative RGH1A
  misc_feature (4)..(127): NCBI GI NO: 37530848 NR Description: putative disease resistance protein RPM1
  misc_feature (5)..(129): NCBI GI NO: 40253777 NR Description: disease resistance protein RPM1-like
  misc_feature (4)..(127): NCBI GI NO: 20514810 NR Description: Putative disease resistance protein
  misc_feature (4)..(127): NCBI GI NO: 37530808 NR Description: putative disease resistance protein
MVGVSAGTGAMGSLLAKLTALLSDEYKLLKRVRKEIEFLKCELERMRILLERLADMEGRLDGLARGWRDSVRDLSYDMEDCIDRFMDRLGSGDAKPKFMKRTARRLETLWARHDIATQIKELMARVMEEMSGVTDTAFFLTLALVVVVVEDLNSCTCMYFWIFFRKGG

SEQ ID NO: 11228 - protein, 158 aa, Triticum aestivum
  peptide (1)..(158): Ceres Seq. ID no. 12624503
  misc_feature (1)..(118): NCBI GI NO: 40253400 NR Description: putative MLA1
  misc_feature (1)..(118): NCBI GI NO: 4680207 NR Description: disease resistance protein RPM1 homolog
  misc_feature (1)..(118): NCBI GI NO: 31126724 NR Description: putative CC-NBS-LRR resistance protein
  misc_feature (1)..(119): NCBI GI NO: 38636971 NR Description: putative NBS-LRR disease resistance proteinhomologue
  misc_feature (1)..(118): NCBI GI NO: 40253375 NR Description: putative disease resistance protein RPM1
  misc_feature (1)..(118): NCBI GI NO: 38636973 NR Description: putative RGH1A
  misc_feature (1)..(117): NCBI GI NO: 37530848 NR Description: putative disease resistance protein RPM1
  misc_feature (1)..(119): NCBI GI NO: 40253777 NR Description: disease resistance protein RPM1-like
  misc_feature (1)..(117): NCBI GI NO: 20514810 NR Description: Putative disease resistance protein
  misc_feature (1)..(117): NCBI GI NO: 37530808 NR Description: putative disease resistance protein
MGSLLAKLTALLSDEYKLLKRVRKEIEFLKCELERMRILLERLADMEGRLDGLARGWRDSVRDLSYDMEDCIDRFMDRLGSGDAKPKFMKRTARRLETLWARHDIATQIKELMARVMEEMSGVTDTAFFLTLALVVVVVEDLNSCTCMYFWIFFRKGG

SEQ ID NO: 11229 - protein, 123 aa, Triticum aestivum
  peptide (1)..(123): Ceres Seq. ID no. 12624504
  misc_feature (1)..(83): NCBI GI NO: 40253400 NR Description: putative MLA1
  misc_feature (1)..(83): NCBI GI NO: 4680207 NR Description: disease resistance protein RPM1 homolog
  misc_feature (1)..(83): NCBI GI NO: 31126724 NR Description: putative CC-NBS-LRR resistance protein
  misc_feature (1)..(84): NCBI GI NO: 38636971 NR Description: putative NBS-LRR disease resistance proteinhomologue
  misc_feature (1)..(83): NCBI GI NO: 40253375 NR Description: putative disease resistance protein RPM1
  misc_feature (1)..(83): NCBI GI NO: 38636973 NR Description: putative RGH1A
  misc_feature (1)..(82): NCBI GI NO: 37530848 NR Description: putative disease resistance protein RPM1
  misc_feature (1)..(84): NCBI GI NO: 40253777 NR Description: disease resistance protein RPM1-like
  misc_feature (1)..(82): NCBI GI NO: 20514810 NR Description: Putative disease resistance protein
  misc_feature (1)..(82): NCBI GI NO: 37530808 NR Description: putative disease resistance protein
MRILLERLADMEGRLDGLARGWRDSVRDLSYDMEDCIDRFMDRLGSGDAKPKFMKRTARRLETLWARHDIATQIKELMARVMEEMSGVTDTAFFLTLALVVVVVEDLNSCTCMYFWIFFRKGG

SEQ ID NO: 11230 - DNA, 911 bp, Triticum aestivum
  misc_feature (1)..(911): Ceres Seq. ID no. 12623607
aacaagcgagcgaacacacagcatcgtcgcacgccattgcttagtagccagggaaaaagagaagccgatctgattctgctctcatcacacacaccgccatgccggggagagaagacgaagccttcgctgacgaggagagctcgcagtgcagcagcggctgccagtccggctggaccctgtacctggagcattccgggtcaggccagcagcaacgtcgcacgctgccatacgtgcagcccggcgacgtcctgaggcagatgctgccgccggtggaatactccgacgacgaggaggaggattctatggtctccgacgcgtcctccggcctgccgccgcacctgcgcggcgaagaggaggagctgctgcaagtgcaaggtcagaccagcatgctttcacagcagcgtcggtcggccttcggcggcgaccaatgccactccggctggggtggcagtcgtcacagcgcgagcctctctggctcccgttccttcatctccacgaggtctcgtagttcgggcgatatgaggagcaggaagaagaggagggccgtcgtccaacggcaggatgagccggcgacgcgtcgccatggtgtcttcgacgacgacgacgatctccacgacaccgcgagttcgtccgacgtcattgctcccgcggcagtggtggaagctatgaaggatggtatggacctgcagccaagctgcgccttctcggttcgaagcaccggcatgcagggtctcgcgatgctgcaccataactcatgaagtagctagctagggaacgagaacggccttcttttgtcggccgcatgtataaccagatcgcccatagcctcacacgtcacctagcttgtttgtttccaagttatatgtacgtatgcaaatcgtccgtactcgagacaagaaccaacagttttg

SEQ ID NO: 11231 - protein, 219 aa, Triticum aestivum
  peptide (1)..(219): Ceres Seq. ID no. 12623608
  misc_feature (12)..(209): NCBI GI NO: 38347493 NR Description: OSJNBa0091C07.3
MPGREDEAFADEESSQCSSGCQSGWTLYLEHSGSGQQQRRTLPYVQPGDVLRQMLPPVEYSDDEEEDSMVSDASSGLPPHLRGEEEELLQVQGQTSMLSQQRRSAFGGDQCHSGWGGSRHSASLSGSRSFISTRSRSSGDMRSRKKRRAVVQRQDEPATRRHGVFDDDDDLHDTASSSDVIAPAAVVEAMKDGMDLQPSCAFSVRSTGMQGLAMLHHNS

SEQ ID NO: 11232 - protein, 166 aa, Triticum aestivum
  peptide (1)..(166): Ceres Seq. ID no. 12623609
  misc_feature (1)..(156): NCBI GI NO: 38347493 NR Description: OSJNBa0091C07.3
MLPPVEYSDDEEEDSMVSDASSGLPPHLRGEEEELLQVQGQTSMLSQQRRSAFGGDQCHSGWGGSRHSASLSGSRSFISTRSRSSGDMRSRKKRRAVVQRQDEPATRRHGVFDDDDDLHDTASSSDVIAPAAVVEAMKDGMDLQPSCAFSVRSTGMQGLAMLHHNS

SEQ ID NO: 11233 - protein, 151 aa, Triticum aestivum
  peptide (1)..(151): Ceres Seq. ID no. 12623610
  misc_feature (1)..(141): NCBI GI NO: 38347493 NR Description: OSJNBa0091C07.3
MVSDASSGLPPHLRGEEEELLQVQGQTSMLSQQRRSAFGGDQCHSGWGGSRHSASLSGSRSFISTRSRSSGDMRSRKKRRAVVQRQDEPATRRHGVFDDDDDLHDTASSSDVIAPAAVVEAMKDGMDLQPSCAFSVRSTGMQGLAMLHHNS

SEQ ID NO: 11234 - DNA, 760 bp, Triticum aestivum
  misc_feature (1)..(760): Ceres Seq. ID no. 13661991
atgaaattagaagctttaagttcctctctgttctcaacttgtcaccgaagattacaaacagggtctctcataaatggccgctaggtttcttagtttgagacgagctttgtctgtctacctcactaaccaacaacctcgtgttcctctgtttcaagcaggtaagcttgcgcaatcaaagtcactcttgagcagagattatgcttatgggggattactacagaggcactttagtgaaactgcagcaaccaatggctgctgcaactcttcaaactctgctgcggaacttaccaaagctccctccacctcccctgcaacagcctatgaggagctgattgtgaagtacaagtcccagttgaaaataaacccgaggcatgacttcatgatggtctttacttgcaaggtctgtgagacgaggtcgatgaagatggcgagcagagagtcttacgagaagggagttgtggtggtacgatgcgaaggatgtgataatctacatttgattgcagaccgtcgtggttggtttggagagccggggagcgtggaggagtttcttgctgctcaaggggaagagttcaagaaaggatccatggattctcttagccttacagttgaagacttggctggagagaagatgtccagtgaatagagcaacaagctcttcgttgctttagctattaggacttgaaccctgcagagaaaataaaatattttatatatttttattttaatttttgagacaaattaagatacataatatttggct

SEQ ID NO: 11235 - protein, 189 aa, Triticum aestivum
  peptide (1)..(189): Ceres Seq. ID no. 15220150
  misc_feature (104)..(165): Pfam Name: Pfam Description:  DNL zinc finger
  misc_feature (1)..(189): NCBI GI NO: 29028810 NR Description: At3g54830 [Arabidopsis thaliana]
  misc_feature (95)..(179): NCBI GI NO: 12835133 NR Description: unnamed protein product [Mus musculus]
  misc_feature (95)..(168): NCBI GI NO: 31212801 NR Description: ENSANGP00000021116 [Anopheles gambiae]
  misc_feature (84)..(181): NCBI GI NO: 23509418 NR Description: hypothetical protein [Plasmodium falciparum 3D7]
  misc_feature (103)..(181): NCBI GI NO: 23485607 NR Description: Drosophila melanogaster CG12379 gene product
  misc_feature (95)..(179): NCBI GI NO: 34853079 NR Description: similar to CG12379-PA [Rattus norvegicus]
  misc_feature (104)..(165): NCBI GI NO: 24642261 NR Description: CG12379-PA [Drosophila melanogaster]
  misc_feature (95)..(169): NCBI GI NO: 19113862 NR Description: hypothetical protein [Schizosaccharomyces pombe]
  misc_feature (106)..(168): NCBI GI NO: 17553552 NR Description: Protein required for cell viability like
  misc_feature (103)..(189): NCBI GI NO: 6324019 NR Description: Protein required for cell viability; Ynl310cp
MAARFLSLRRALSVYLTNQQPRVPLFQAGKLAQSKSLLSRDYAYGGLLQRHFSETAATNGCCNSSNSAAELTKAPSTSPATAYEELIVKYKSQLKINPRHDFMMVFTCKVCETRSMKMASRESYEKGVVVVRCEGCDNLHLIADRRGWFGEPGSVEEFLAAQGEEFKKGSMDSLSLTVEDLAGEKMSSE

SEQ ID NO: 11236 - DNA, 525 bp, Triticum aestivum
  misc_feature (1)..(525): Ceres Seq. ID no. 13664178
  misc_feature (511)..(511): n is a, c, t, g, unknown, or other
atcactacttcttcatctccattcaaaatttctatcctcagcttctactaggaagcacactcgtgagacatggccgccgcagtttccaccgtcggtgccatcaacagagctccgttgagcttgaacgggtcaggagcaggagctgcttcagtcccagctacgaccttcttgggaaagaaagttgtaaccgcgtcgagattcgcacagaacaacaagaagagcaacggatcattcaaggtggttgccgtgaaagaagacaaacaaaccgatggagacagatggaggggacttgcctacgacatctctgatgatcaacaagacatcaccagaggcaaaggtatggttgactcagtcttccaagctcctatgggaaccggaactcacmrcgccgtccttagctcctatgagtacctcagccaaggtcttaagcagtacaacttggacaacatgatggatgggctttacattgcccctgctttcatggacaagcttgttgttcacatcaccragnacttcttgactttg

SEQ ID NO: 11237 - protein, 152 aa, Triticum aestivum
  peptide (1)..(152): Ceres Seq. ID no. 13664179
  misc_feature (1)..(151): NCBI GI NO: 81660 NR Description: ribulose-bisphosphate carboxylase activase (EC6
  misc_feature (1)..(151): NCBI GI NO: 15450379 NR Description: At2g39730/T5I7.3 [Arabidopsis thaliana]
  misc_feature (1)..(151): NCBI GI NO: 18405145 NR Description: auxin-regulated protein [Arabidopsis thaliana]
  misc_feature (1)..(151): NCBI GI NO: 30687995 NR Description: auxin-regulated protein [Arabidopsis thaliana]
  misc_feature (1)..(151): NCBI GI NO: 30687999 NR Description: auxin-regulated protein [Arabidopsis thaliana]
  misc_feature (1)..(151): NCBI GI NO: 23308421 NR Description: At2g39730/T5I7.3 [Arabidopsis thaliana]
  misc_feature (1)..(151): NCBI GI NO: 12620881 NR Description: ribulose-1
  misc_feature (1)..(151): NCBI GI NO: 32481065 NR Description: Rubisco activase alpha form precursor
  misc_feature (1)..(151): NCBI GI NO: 32481067 NR Description: Rubisco activase beta form precursor
  misc_feature (1)..(151): NCBI GI NO: 3914605 NR Description: Ribulose bisphosphate carboxylase/ oxygenaseactivase
  misc_feature (106)..(106): Xaa is any aa, unknown or other
  misc_feature (147)..(147): Xaa is any aa, unknown or other
  misc_feature (148)..(148): Xaa is any aa, unknown or other
MAAAVSTVGAINRAPLSLNGSGAGAASVPATTFLGKKVVTASRFAQNNKKSNGSFKVVAVKEDKQTDGDRWRGLAYDISDDQQDITRGKGMVDSVFQAPMGTGTHXAVLSSYEYLSQGLKQYNLDNMMDGLYIAPAFMDKLVVHITXXFLTL

SEQ ID NO: 11238 - protein, 101 aa, Triticum aestivum
  peptide (1)..(101): Ceres Seq. ID no. 13664180
HYFFISIQNFYPQLLLGSTLVRHGRRSFHRRCHQQSSVELERVRSRSCFSPSYDLLGKESCNRVEIRTEQQEEQRIIQGGCRERRQTNRWRQMEGTCLRHL

SEQ ID NO: 11239 - DNA, 531 bp, Triticum aestivum
  misc_feature (1)..(531): Ceres Seq. ID no. 12784493
acacaactggtcctacaacgcgcgaacacacacaaacccaagcacatagtaacatcacagatcggcatggcgcacttccaggaggtggactactgctcggaggaggtgagggcggtgggcaacccggcccgccgcggctgcggcggcgtgcaggagcacatcgtcagggagacgttcgtgcaggagttcgacaccgccggccgccgccacggccaccacggccgcggctccggccacttcgaggtgcgcgagagcaggctcgaggaggacgtcaacacctgcaccggcgagttccacgagcgcaaggagaacttcgtcgtcagggccgatgactgagcttacacgtaacggagcacactaccatgtgtgtatatgtcagcagcatatgtatgtgtgatgttgcgcacagtcgtatagcgtatgcatgcgtgcgtgcttggcggccatcagcccctatcgcgcgcgcgtgcagcgcttaaataagcgctctaatcgtgaaccagaataaagcttctcgtgattattattccg

SEQ ID NO: 11240 - protein, 111 aa, Triticum aestivum
  peptide (1)..(111): Ceres Seq. ID no. 12784494
  misc_feature (22)..(110): NCBI GI NO: 34906856 NR Description: P0470A12.5
TQLVLQRANTHKPKHIVTSQIGMAHFQEVDYCSEEVRAVGNPARRGCGGVQEHIVRETFVQEFDTAGRRHGHHGRGSGHFEVRESRLEEDVNTCTGEFHERKENFVVRADD

SEQ ID NO: 11241 - protein, 109 aa, Triticum aestivum
  peptide (1)..(109): Ceres Seq. ID no. 12784495
TTGPTTREHTQTQAHSNITDRHGALPGGGLLLGGGEGGGQPGPPRLRRRAGAHRQGDVRAGVRHRRPPPRPPRPRLRPLRGAREQARGGRQHLHRRVPRAQGELRRQGR

SEQ ID NO: 11242 - protein, 89 aa, Triticum aestivum
  peptide (1)..(89): Ceres Seq. ID no. 12784496
  misc_feature (1)..(88): NCBI GI NO: 34906856 NR Description: P0470A12.5
MAHFQEVDYCSEEVRAVGNPARRGCGGVQEHIVRETFVQEFDTAGRRHGHHGRGSGHFEVRESRLEEDVNTCTGEFHERKENFVVRADD

SEQ ID NO: 11243 - DNA, 1137 bp, Triticum aestivum
  misc_feature (1)..(1137): Ceres Seq. ID no. 13661426
cctttcgatttcttcgcttgtggcgagtcacagcgttccaatttcccagcacttaactcgcccgacctacccaccaaccaccccgcgtcgagactgaccagactgaattgatcgataataaatcagcacgctgcacgcgctgggggtctgagtcagaggaggaagaagatcgaggagcagctgattcgttcgcacaaagcgccgggatcagatccatctctccgcgcgggatgtctgaggtggcggcgatggcggggcaggcgtacatgagacagctctccaagcaccctctccgcaccaaggccatcacctccggggtgctggcgggctgcagcgacgccgtcgcccagaagatctccggcgtcaagaggctccagctcaggaggctcctcctcataatgctctatggatttgcatacgcaggaccattcggtcattttttccacaagcttatggacaagattttcaagggacagaagaaaggaaaagaaactacagccaagaaggtcatagtggagcagctaactgtatcaccatggaacaatatgatgttcatgatgtactacggtctggtagttgaagggaggccattcgggcaagtaaagagcaaggtcaagaaggactttgcaaacatccaattgacagcttggaagttctggccaatagttagctggatcaactatgagtacatgccactccagctccgagttcttttcgccagctccgttgcatcatgctgggcagtgtttctgaacctgaaagcagcaagatccattgccggcgctagtaagaatgcatagaagaaggttggaaggaaggggctagtgctacattgtatttctagctaattaagtatccactagcgattttctcagttcatttttatcgctcagtttgtatttatgtttctatttgaaccccttgagcatcgagaacctagagttaatgtttcaactaagtatgccagtatgtcaatgtgaagagtccctttcttgccaccgggaaaaaaaccctacaaagcaaaaattatcctctacaaggtaccatgtttgttattcctttgggaggaaaatagggactttactgggatctgacgcgtggaaataaatgaacatgctctgaggtttgtagaagctc

SEQ ID NO: 11244 - protein, 189 aa, Triticum aestivum
  peptide (1)..(189): Ceres Seq. ID no. 13661427
  misc_feature (112)..(182): Pfam Name: Pfam Description:  Mpv17 / PMP22 family
  misc_feature (28)..(189): NCBI GI NO: 30682784 NR Description: expressed protein [Arabidopsis thaliana]
  misc_feature (10)..(189): NCBI GI NO: 15233520 NR Description: peroxisomal membrane protein (22-kDa)(PMP22)
  misc_feature (28)..(166): NCBI GI NO: 7485192 NR Description: hypothetical protein d13195c - Arabidopsis thaliana
  misc_feature (11)..(181): NCBI GI NO: 31215743 NR Description: ENSANGP00000012562 [Anopheles gambiae]
  misc_feature (12)..(183): NCBI GI NO: 18422298 NR Description: peroxisomal membrane protein family (22 kDa)
  misc_feature (12)..(183): NCBI GI NO: 21553640 NR Description: contains similarity to 22 kDa peroxisomal membraneprotein
  misc_feature (9)..(188): NCBI GI NO: 28828632 NR Description: hypothetical protein [Dictyostelium discoideum]
  misc_feature (2)..(174): NCBI GI NO: 10954089 NR Description: 22 kDa peroxisomal membrane protein PMP22
  misc_feature (2)..(174): NCBI GI NO: 6679577 NR Description: peroxisomal membrane protein 2
  misc_feature (1)..(174): NCBI GI NO: 8923892 NR Description: peroxisomal membrane protein 2, 22kDa
MSEVAAMAGQAYMRQLSKHPLRTKAITSGVLAGCSDAVAQKISGVKRLQLRRLLLIMLYGFAYAGPFGHFFHKLMDKIFKGQKKGKETTAKKVIVEQLTVSPWNNMMFMMYYGLVVEGRPFGQVKSKVKKDFANIQLTAWKFWPIVSWINYEYMPLQLRVLFASSVASCWAVFLNLKAARSIAGASKNA

SEQ ID NO: 11245 - protein, 183 aa, Triticum aestivum
  peptide (1)..(183): Ceres Seq. ID no. 13661428
  misc_feature (106)..(176): Pfam Name: Pfam Description:  Mpv17 / PMP22 family
  misc_feature (22)..(183): NCBI GI NO: 30682784 NR Description: expressed protein [Arabidopsis thaliana]
  misc_feature (4)..(183): NCBI GI NO: 15233520 NR Description: peroxisomal membrane protein (22-kDa)(PMP22)
  misc_feature (22)..(160): NCBI GI NO: 7485192 NR Description: hypothetical protein d13195c - Arabidopsis thaliana
  misc_feature (5)..(175): NCBI GI NO: 31215743 NR Description: ENSANGP00000012562 [Anopheles gambiae]
  misc_feature (6)..(177): NCBI GI NO: 18422298 NR Description: peroxisomal membrane protein family (22 kDa)
  misc_feature (6)..(177): NCBI GI NO: 21553640 NR Description: contains similarity to 22 kDa peroxisomal membraneprotein
  misc_feature (3)..(182): NCBI GI NO: 28828632 NR Description: hypothetical protein [Dictyostelium discoideum]
  misc_feature (1)..(168): NCBI GI NO: 10954089 NR Description: 22 kDa peroxisomal membrane protein PMP22
  misc_feature (1)..(168): NCBI GI NO: 6679577 NR Description: peroxisomal membrane protein 2
  misc_feature (1)..(168): NCBI GI NO: 8923892 NR Description: peroxisomal membrane protein 2, 22kDa
MAGQAYMRQLSKHPLRTKAITSGVLAGCSDAVAQKISGVKRLQLRRLLLIMLYGFAYAGPFGHFFHKLMDKIFKGQKKGKETTAKKVIVEQLTVSPWNNMMFMMYYGLVVEGRPFGQVKSKVKKDFANIQLTAWKFWPIVSWINYEYMPLQLRVLFASSVASCWAVFLNLKAARSIAGASKNA

SEQ ID NO: 11246 - protein, 177 aa, Triticum aestivum
  peptide (1)..(177): Ceres Seq. ID no. 13661429
  misc_feature (100)..(170): Pfam Name: Pfam Description:  Mpv17 / PMP22 family
  misc_feature (16)..(177): NCBI GI NO: 30682784 NR Description: expressed protein [Arabidopsis thaliana]
  misc_feature (1)..(177): NCBI GI NO: 15233520 NR Description: peroxisomal membrane protein (22-kDa)(PMP22)
  misc_feature (16)..(154): NCBI GI NO: 7485192 NR Description: hypothetical protein d13195c - Arabidopsis thaliana
  misc_feature (1)..(169): NCBI GI NO: 31215743 NR Description: ENSANGP00000012562 [Anopheles gambiae]
  misc_feature (1)..(171): NCBI GI NO: 18422298 NR Description: peroxisomal membrane protein family (22 kDa)
  misc_feature (1)..(171): NCBI GI NO: 21553640 NR Description: contains similarity to 22 kDa peroxisomal membraneprotein
  misc_feature (1)..(176): NCBI GI NO: 28828632 NR Description: hypothetical protein [Dictyostelium discoideum]
  misc_feature (1)..(162): NCBI GI NO: 10954089 NR Description: 22 kDa peroxisomal membrane protein PMP22
  misc_feature (1)..(162): NCBI GI NO: 6679577 NR Description: peroxisomal membrane protein 2
  misc_feature (1)..(162): NCBI GI NO: 8923892 NR Description: peroxisomal membrane protein 2, 22kDa
MRQLSKHPLRTKAITSGVLAGCSDAVAQKISGVKRLQLRRLLLIMLYGFAYAGPFGHFFHKLMDKIFKGQKKGKETTAKKVIVEQLTVSPWNNMMFMMYYGLVVEGRPFGQVKSKVKKDFANIQLTAWKFWPIVSWINYEYMPLQLRVLFASSVASCWAVFLNLKAARSIAGASKNA

SEQ ID NO: 11247 - DNA, 1185 bp, Triticum aestivum
  misc_feature (1)..(1185): Ceres Seq. ID no. 13661430
ctcaagctcaaatcccttaccctcctcgcgtgccctcccttatccccttcaccatggccacctccgccatgacactcgccatggccgcggccacggacgcctccctctttcaccccacgttcctctcccaacacaagctcaccccggcggccgccttcctcccactcattttctctcgcgcgccgctcctccgctccacccgcccccgcgccccccttacgcccctcgtcgcctcctccgacgccgccgaggcgggcctcgactgggccgacgcggaggaagccgaagagacggtgacggaggaggagcccgcggtggcggcctccggtggggatgcggggtacgcagccgagcctcccgaggaggctaaggtgtacgtcgggaacctgccgtatgatgtggacagcgagcggctcgcccagctcttcgaccaggccggcgtcgtcgaggtcgccgaggtcatttacaacagagagtcatgccagagccgtggatttggatttgttaccatgagtactattgaggaagctgacaaagccatcgagacgttcaaccgctacgacatcagcggaaggcttctgaacgtaaacagggcagctcaaaggggctcccgtgttgagagacctcctcgacagtttgcatcttctttcagggcttatgttggtaacctgccatggcaagcggaagactctaggttggtgcaattgttcagcgagcatggggaagtagttaacgctacagttgtgtacgacagagaaactgggcgttcacgaggatttggttttgtaactatggcttcaaaggaagatcttgacagtgctatttcagcgcttgatggacaggagatggatggccgtccactccgagtgaacgttgccgcggagcgaccgcagcgagggttctgatgcagaggagagcgggtgtttcttttggacacacgagaacaacactgctgaaatgttactgcggaagactgaagcatgtcaccacttaaaaatcctgcactggcctcctgatgttgggctatctcctcccatcccatattcttttttcatgcttccgtttgctgttgatgtcatcatgttactttcttgtcaacaccgtaagttcaacttttcaagtaggctactgtaatgatgtcctagtgttctcatgataatcgaagaaggttttgttggtaatgct

SEQ ID NO: 11248 - protein, 300 aa, Triticum aestivum
  peptide (1)..(300): Ceres Seq. ID no. 13661431
  misc_feature (218)..(289): Pfam Name: a.k.a. RRM, RBD, or RNP domain Pfam Description: RNA recognition motif.
  misc_feature (18)..(300): NCBI GI NO: 7446359 NR Description: nucleic acid-binding protein - barley
  misc_feature (17)..(300): NCBI GI NO: 7446358 NR Description: cp31AHv protein - barley
  misc_feature (17)..(300): NCBI GI NO: 7446356 NR Description: Ps16 protein - wheat
  misc_feature (90)..(300): NCBI GI NO: 100903 NR Description: nucleic acid-binding protein - maize
  misc_feature (79)..(298): NCBI GI NO: 19032260 NR Description: RNA-binding protein precursor [Persea americana]
  misc_feature (12)..(300): NCBI GI NO: 1076305 NR Description: RNA-binding protein cp31 precursor
  misc_feature (11)..(298): NCBI GI NO: 133248 NR Description: 31 kDa ribonucleoprotein, chloroplast precursor
  misc_feature (15)..(300): NCBI GI NO: 681908 NR Description: cp31 [Arabidopsis thaliana]
  misc_feature (18)..(298): NCBI GI NO: 133246 NR Description: 28 kDa ribonucleoprotein, chloroplast precursor
  misc_feature (62)..(300): NCBI GI NO: 1076251 NR Description: RNA-binding protein - common ice plant
QAQIPYPPRVPSLIPFTMATSAMTLAMAAATDASLFHPTFLSQHKLTPAAAFLPLIFSRAPLLRSTRPRAPLTPLVASSDAAEAGLDWADAEEAEETVTEEEPAVAASGGDAGYAAEPPEEAKVYVGNLPYDVDSERLAQLFDQAGVVEVAEVIYNRESCQSRGFGFVTMSTIEEADKAIETFNRYDISGRLLNVNRAAQRGSRVERPPRQFASSFRAYVGNLPWQAEDSRLVQLFSEHGEVVNATVVYDRETGRSRGFGFVTMASKEDLDSAISALDGQEMDGRPLRVNVAAERPQRGF

SEQ ID NO: 11249 - protein, 283 aa, Triticum aestivum
  peptide (1)..(283): Ceres Seq. ID no. 13661432
  misc_feature (201)..(272): Pfam Name: a.k.a. RRM, RBD, or RNP domain Pfam Description: RNA recognition motif.
  misc_feature (1)..(283): NCBI GI NO: 7446359 NR Description: nucleic acid-binding protein - barley
  misc_feature (1)..(283): NCBI GI NO: 7446358 NR Description: cp31AHv protein - barley
  misc_feature (1)..(283): NCBI GI NO: 7446356 NR Description: Ps16 protein - wheat
  misc_feature (73)..(283): NCBI GI NO: 100903 NR Description: nucleic acid-binding protein - maize
  misc_feature (62)..(281): NCBI GI NO: 19032260 NR Description: RNA-binding protein precursor [Persea americana]
  misc_feature (1)..(283): NCBI GI NO: 1076305 NR Description: RNA-binding protein cp31 precursor
  misc_feature (1)..(281): NCBI GI NO: 133248 NR Description: 31 kDa ribonucleoprotein, chloroplast precursor
  misc_feature (1)..(283): NCBI GI NO: 681908 NR Description: cp31 [Arabidopsis thaliana]
  misc_feature (1)..(281): NCBI GI NO: 133246 NR Description: 28 kDa ribonucleoprotein, chloroplast precursor
  misc_feature (45)..(283): NCBI GI NO: 1076251 NR Description: RNA-binding protein - common ice plant
MATSAMTLAMAAATDASLFHPTFLSQHKLTPAAAFLPLIFSRAPLLRSTRPRAPLTPLVASSDAAEAGLDWADAEEAEETVTEEEPAVAASGGDAGYAAEPPEEAKVYVGNLPYDVDSERLAQLFDQAGVVEVAEVIYNRESCQSRGFGFVTMSTIEEADKAIETFNRYDISGRLLNVNRAAQRGSRVERPPRQFASSFRAYVGNLPWQAEDSRLVQLFSEHGEVVNATVVYDRETGRSRGFGFVTMASKEDLDSAISALDGQEMDGRPLRVNVAAERPQRGF

SEQ ID NO: 11250 - protein, 278 aa, Triticum aestivum
  peptide (1)..(278): Ceres Seq. ID no. 13661433
  misc_feature (196)..(267): Pfam Name: a.k.a. RRM, RBD, or RNP domain Pfam Description: RNA recognition motif.
  misc_feature (1)..(278): NCBI GI NO: 7446359 NR Description: nucleic acid-binding protein - barley
  misc_feature (1)..(278): NCBI GI NO: 7446358 NR Description: cp31AHv protein - barley
  misc_feature (1)..(278): NCBI GI NO: 7446356 NR Description: Ps16 protein - wheat
  misc_feature (68)..(278): NCBI GI NO: 100903 NR Description: nucleic acid-binding protein - maize
  misc_feature (57)..(276): NCBI GI NO: 19032260 NR Description: RNA-binding protein precursor [Persea americana]
  misc_feature (1)..(278): NCBI GI NO: 1076305 NR Description: RNA-binding protein cp31 precursor
  misc_feature (1)..(276): NCBI GI NO: 133248 NR Description: 31 kDa ribonucleoprotein, chloroplast precursor
  misc_feature (1)..(278): NCBI GI NO: 681908 NR Description: cp31 [Arabidopsis thaliana]
  misc_feature (1)..(276): NCBI GI NO: 133246 NR Description: 28 kDa ribonucleoprotein, chloroplast precursor
  misc_feature (40)..(278): NCBI GI NO: 1076251 NR Description: RNA-binding protein - common ice plant
MTLAMAAATDASLFHPTFLSQHKLTPAAAFLPLIFSRAPLLRSTRPRAPLTPLVASSDAAEAGLDWADAEEAEETVTEEEPAVAASGGDAGYAAEPPEEAKVYVGNLPYDVDSERLAQLFDQAGVVEVAEVIYNRESCQSRGFGFVTMSTIEEADKAIETFNRYDISGRLLNVNRAAQRGSRVERPPRQFASSFRAYVGNLPWQAEDSRLVQLFSEHGEVVNATVVYDRETGRSRGFGFVTMASKEDLDSAISALDGQEMDGRPLRVNVAAERPQRGF

SEQ ID NO: 11251 - DNA, 799 bp, Triticum aestivum
  misc_feature (1)..(799): Ceres Seq. ID no. 12624653
aacgagaaagattgttcctgtctccgacgacaaacgagacctctgctgcgacaccctttgagatagatagatagagagaaaaaatgggtttcttctcttttctcggaagagttctcttcgcttctctattcatcctctccgcctggcaaatgttcaatgactttggaactgacggtggtccagcagctaaagagttggctccaaagcttcatctgaccaaagcacatctctcttccagattaggagttgcattgcctgacattgaggtgaaacaagtggtatgggcaattgttggtctgaaaggacttggaggcttactctttgttgttggcaacgtctttggtgcctatcttctggctgtctacttggtggtcgttagccccatcctatatgatttctacaactttggacctcaggaccgcgagttctctcttctgtttaccgagttcttgcagagcgttgcgcttcttggggcattgctattttttatcggaatgaagaattcgacgactaccagctcctcctcctccgccaagaggaacctgaagaagaggacaccaaagcctaaagctgcttagagttcttctatttacaacagcttctgatgtcttcaagctctaccttcatgttgcttccttacaatttttgcttctttttctactctgtgggattctagagttagccacatttttgtgtttcctatattttactttgggttctaaaagagttttccccttttttatcagagtatactaccctacacttggctgctattcttaagtatctgacaaagctaatt

SEQ ID NO: 11252 - protein, 164 aa, Triticum aestivum
  peptide (1)..(164): Ceres Seq. ID no. 12624654
  misc_feature (1)..(138): Pfam Name: Pfam Description:  HR-like lesion-inducing
  misc_feature (1)..(164): NCBI GI NO: 15219714 NR Description: unknown protein; protein id: At1g04340
  misc_feature (1)..(164): NCBI GI NO: 21592798 NR Description: Nicotiana lesion-inducing like
  misc_feature (1)..(164): NCBI GI NO: 15239873 NR Description: Nicotiana lesion-inducing like
  misc_feature (1)..(162): NCBI GI NO: 27261473 NR Description: Unknown protein
  misc_feature (1)..(162): NCBI GI NO: 38346190 NR Description: OSJNBa0027O01.6
  misc_feature (1)..(158): NCBI GI NO: 40287494 NR Description: putative lesion-inducing protein [Capsicum annuum]
  misc_feature (1)..(163): NCBI GI NO: 15236497 NR Description: elicitor like protein; protein id: At4g14420
  misc_feature (1)..(162): NCBI GI NO: 7489144 NR Description: hypothetical protein (clone NF22) - common tobacco
  misc_feature (24)..(163): NCBI GI NO: 37534824 NR Description: putative RNA-binding protein
  misc_feature (1)..(24): NCBI GI NO: 37534824 NR Description: putative RNA-binding protein
MGFFSFLGRVLFASLFILSAWQMFNDFGTDGGPAAKELAPKLHLTKAHLSSRLGVALPDIEVKQVVWAIVGLKGLGGLLFVVGNVFGAYLLAVYLVVVSPILYDFYNFGPQDREFSLLFTEFLQSVALLGALLFFIGMKNSTTTSSSSSAKRNLKKRTPKPKAA

SEQ ID NO: 11253 - protein, 142 aa, Triticum aestivum
  peptide (1)..(142): Ceres Seq. ID no. 12624655
  misc_feature (1)..(116): Pfam Name: Pfam Description:  HR-like lesion-inducing
  misc_feature (1)..(142): NCBI GI NO: 15219714 NR Description: unknown protein; protein id: At1g04340
  misc_feature (1)..(142): NCBI GI NO: 21592798 NR Description: Nicotiana lesion-inducing like
  misc_feature (1)..(142): NCBI GI NO: 15239873 NR Description: Nicotiana lesion-inducing like
  misc_feature (1)..(140): NCBI GI NO: 27261473 NR Description: Unknown protein
  misc_feature (1)..(140): NCBI GI NO: 38346190 NR Description: OSJNBa0027O01.6
  misc_feature (1)..(136): NCBI GI NO: 40287494 NR Description: putative lesion-inducing protein [Capsicum annuum]
  misc_feature (1)..(141): NCBI GI NO: 15236497 NR Description: elicitor like protein; protein id: At4g14420
  misc_feature (1)..(140): NCBI GI NO: 7489144 NR Description: hypothetical protein (clone NF22) - common tobacco
  misc_feature (2)..(141): NCBI GI NO: 37534824 NR Description: putative RNA-binding protein
  misc_feature (9)..(141): NCBI GI NO: 3885517 NR Description: similar to Nicotiana HR lesion-inducing ORF
MFNDFGTDGGPAAKELAPKLHLTKAHLSSRLGVALPDIEVKQVVWAIVGLKGLGGLLFVVGNVFGAYLLAVYLVVVSPILYDFYNFGPQDREFSLLFTEFLQSVALLGALLFFIGMKNSTTTSSSSSAKRNLKKRTPKPKAA

SEQ ID NO: 11254 - DNA, 715 bp, Triticum aestivum
  misc_feature (1)..(715): Ceres Seq. ID no. 13661894
aggataaggtaaaggaagcaggcaaggcgagacgagagcgtagcagtcagcgtgagcaagagagatggcagcaggaacggcctgggcgggatgccatctcgcccacctcccccaaattcccatctcggtcagcatccccgtgaccggcgctgccgctagcagcaggaggaggaggtgcggcttagcggcggcggcgggggcagcagcagcagcagcgacagacgggcgggtgctgggccggcgccccgtggaggacgtgtacaaggtgcgcgtggtgcgcggcgcggcggcgcaggagcgggtggaggcgctgcgggcgatggagacgtggtcgacgtggcgcacgaggggccgctgccacctggcctgggactggcaggtggaccagctcgtgtacatcgtcgccggcgaggtccgcgtgctccccgccggggccaccaccggcgaggagtacatgcacttcgtggccggcgacctggtccggtaccccaagtggctggaggcggacctccacttcgacgggccctacgaggagcgctaccgcttcctcgcctacggcgacgacaactgaaccgcggcgccccctcctagctagctcctttagtccttctactactagttcactgaagctttcgttcgagttctagccatatagtatttccttttgtttactatatactcctagcctgggacaataaggagtatttcctagtcg

SEQ ID NO: 11255 - protein, 168 aa, Triticum aestivum
  peptide (1)..(168): Ceres Seq. ID no. 13661895
  misc_feature (77)..(158): Pfam Name: DUF861 Pfam Description: Protein of unknown function
  misc_feature (60)..(167): NCBI GI NO: 15225202 NR Description: expressed protein [Arabidopsis thaliana]
  misc_feature (60)..(167): NCBI GI NO: 18403036 NR Description: expressed protein [Arabidopsis thaliana]
  misc_feature (60)..(167): NCBI GI NO: 21592432 NR Description: unknown [Arabidopsis thaliana]
MAAGTAWAGCHLAHLPQIPISVSIPVTGAAASSRRRRCGLAAAAGAAAAAATDGRVLGRRPVEDVYKVRVVRGAAAQERVEALRAMETWSTWRTRGRCHLAWDWQVDQLVYIVAGEVRVLPAGATTGEEYMHFVAGDLVRYPKWLEADLHFDGPYEERYRFLAYGDDN

SEQ ID NO: 11256 - DNA, 807 bp, Triticum aestivum
  misc_feature (1)..(807): Ceres Seq. ID no. 13664337
attcctcttccttcccgagattctctgtaggaaaacgataatccaaacgggataaacttaatcagtcttgtttgctcagattcttagagatcgtgtgattgaaagacccatgactctgttcccgattctaaccgcctcgtttctcttcctcttctgcgttccgttcaccaccgcatctgcagacgacgatttgccgacggcgtacactctcctccaaagctacaacttccccgtcggcattctccccaaaggagtcttgtcctacgatctggacgaatccacggggaagttccacgcctatttcgacaagtcgtgcagcttcgccctccaaggctcttaccaattggattacaaatcgaccatctccggcgtcatatcggagaacaagatcacgaagctcaccggcgtgaaggtgaaagttttattcttgtggctcaacatcgtggaggttatcagggacggagacgagctcgagttctccgtcgggatcacgtcggcgaacttcgcgatcgaggagttttacgagtcgcctcagtgtggatgcgggttcgattgcaacggattgaagtcggagaatttgggaagaaaccctcttgtctcttcggtctgaaggtgcttagcttattcacttgtaattaatttatgtgaatgagggggacttttcttacagaacctgaactctttggaggctttggttctttgtttcaacaattgctttgctttgtatctgttcttaagaagatcgttggattaatcaaccaatgtattgtactcttccaaaagtaataaaacggtgcatacattcgg

SEQ ID NO: 11257 - protein, 166 aa, Triticum aestivum
  peptide (1)..(166): Ceres Seq. ID no. 15220310
  misc_feature (11)..(149): Pfam Name: Pfam Description:  Protein of unknown function, DUF538
  misc_feature (1)..(166): NCBI GI NO: 18379014 NR Description: expressed protein [Arabidopsis thaliana]
  misc_feature (1)..(165): NCBI GI NO: 21554037 NR Description: unknown [Arabidopsis thaliana]
  misc_feature (1)..(165): NCBI GI NO: 18411923 NR Description: expressed protein [Arabidopsis thaliana]
  misc_feature (11)..(152): NCBI GI NO: 15235335 NR Description: expressed protein [Arabidopsis thaliana]
  misc_feature (12)..(149): NCBI GI NO: 18379012 NR Description: expressed protein [Arabidopsis thaliana]
  misc_feature (12)..(149): NCBI GI NO: 21553750 NR Description: unknown [Arabidopsis thaliana]
  misc_feature (6)..(143): NCBI GI NO: 34912320 NR Description: P0451D05.23
  misc_feature (31)..(165): NCBI GI NO: 28273408 NR Description: unknown protein
  misc_feature (1)..(143): NCBI GI NO: 18420052 NR Description: expressed protein [Arabidopsis thaliana]
  misc_feature (1)..(166): NCBI GI NO: 28273404 NR Description: unknown protein
MTLFPILTASFLFLFCVPFTTASADDDLPTAYTLLQSYNFPVGILPKGVLSYDLDESTGKFHAYFDKSCSFALQGSYQLDYKSTISGVISENKITKLTGVKVKVLFLWLNIVEVIRDGDELEFSVGITSANFAIEEFYESPQCGCGFDCNGLKSENLGRNPLVSSV

SEQ ID NO: 11258 - DNA, 861 bp, Triticum aestivum
  misc_feature (1)..(861): Ceres Seq. ID no. 13661664
  misc_feature (98)..(98): n is a, c, t, g, unknown, or other
ataaagcaagctagctttcttggtgaacaagccactgctattacgaaccagacccacttgtgaaggccacgtttatttctgcgtgttatacgacgatngaggcagagctgatacgttggccagctggccaggtctgccttattgctctgatactcctccgtgattctcaccctgctaacatcaaccaagaggggaatttattgccagcggaagtgatgatggtagatggttcatatgggagaaaagaacaggaaggcttgttaaaatgcttgcaggggatggagctgttgtgaactgtatacagtctcatccctatgattgtgctgttgcaacgagtggaattgacaatacaataaagttatggacaccggatgcagaaggtacttctatggttgatggaccagaaattgatgtgttaagtgccatagagaacaaccagaagaagttatgccgcaaccgtgaaactttgttgccttttgagtttttggaacgatttggggcgcatgaatttgctgaaggaagcttgcatcctttagagtgtgcgcagacttgatatactattgcttgggttgctgaggaaaagggaggacatttaatccaagatacaagcagccagtgtctaggtaaacatgagattgcaaggttgtgttgcaatcgtagccagtgttttgcacaccttgcttagataatattgcaggggcgctggtattaagttgttgcttgagatgtgaatagacagtaaaggctgtttgttggtgcattcacttgtacagattgtagaaaagcgaagtcttgtaataagtaaatcatctgtacatgcttccataatagagccgtctgctgtgacgtttttctggggcg

SEQ ID NO: 11259 - protein, 95 aa, Triticum aestivum
  peptide (1)..(95): Ceres Seq. ID no. 13661665
  misc_feature (1)..(95): NCBI GI NO: 11358295 NR Description: hypothetical protein T30N20_210 - Arabidopsisthaliana
  misc_feature (1)..(95): NCBI GI NO: 18416416 NR Description: transducin / WD-40 repeat protein family
  misc_feature (1)..(76): NCBI GI NO: 16076860 NR Description: SD07783p [Drosophila melanogaster]
  misc_feature (1)..(76): NCBI GI NO: 24654819 NR Description: CG5124-PA [Drosophila melanogaster]
  misc_feature (1)..(61): NCBI GI NO: 10435814 NR Description: unnamed protein product [Homo sapiens]
  misc_feature (1)..(64): NCBI GI NO: 40556280 NR Description: KIAA1037 protein [Mus musculus]
  misc_feature (1)..(64): NCBI GI NO: 34871778 NR Description: similar to KIAA1037 protein [Rattus norvegicus]
  misc_feature (1)..(61): NCBI GI NO: 22095349 NR Description: KIAA1037 protein [Homo sapiens]
  misc_feature (1)..(48): NCBI GI NO: 37536570 NR Description: putative WD-40 repeat protein
  misc_feature (1)..(70): NCBI GI NO: 21618316 NR Description: unknown [Arabidopsis thaliana]
MLAGDGAVVNCIQSHPYDCAVATSGIDNTIKLWTPDAEGTSMVDGPEIDVLSAIENNQKKLCRNRETLLPFEFLERFGAHEFAEGSLHPLECAQT

SEQ ID NO: 11260 - protein, 54 aa, Triticum aestivum
  peptide (1)..(54): Ceres Seq. ID no. 13661666
  misc_feature (1)..(54): NCBI GI NO: 11358295 NR Description: hypothetical protein T30N20_210 - Arabidopsisthaliana
  misc_feature (1)..(54): NCBI GI NO: 18416416 NR Description: transducin / WD-40 repeat protein family
  misc_feature (1)..(35): NCBI GI NO: 16076860 NR Description: SD07783p [Drosophila melanogaster]
  misc_feature (1)..(35): NCBI GI NO: 24654819 NR Description: CG5124-PA [Drosophila melanogaster]
  misc_feature (1)..(20): NCBI GI NO: 10435814 NR Description: unnamed protein product [Homo sapiens]
  misc_feature (1)..(23): NCBI GI NO: 40556280 NR Description: KIAA1037 protein [Mus musculus]
  misc_feature (1)..(23): NCBI GI NO: 34871778 NR Description: similar to KIAA1037 protein [Rattus norvegicus]
  misc_feature (1)..(20): NCBI GI NO: 22095349 NR Description: KIAA1037 protein [Homo sapiens]
  misc_feature (1)..(29): NCBI GI NO: 21618316 NR Description: unknown [Arabidopsis thaliana]
  misc_feature (1)..(27): NCBI GI NO: 458692 NR Description: homologous to mouse gene PC326:GenBank AccessionNumber M95564
MVDGPEIDVLSAIENNQKKLCRNRETLLPFEFLERFGAHEFAEGSLHPLECAQT

SEQ ID NO: 11261 - DNA, 641 bp, Triticum aestivum
  misc_feature (1)..(641): Ceres Seq. ID no. 13598209
atcctaatcgaaaaatagtcgcgcagcgcaccccctacagccccgtgctctggcatacatacagtgtggtcatagtggtgaactgagaagagctactgcgaacaaggcacgccggagatcgagatgggctgcgacgacaagtgcgggtgcgccgtgccgtgccccggcggcacgggctgcaggtgcacctcggcgaggagcggcgcggcggcgggggagcacacgacgtgcgggtgcggcgagcactgtggatgcaacccgtgcgcgtgcgggcgcgaggggacgccgtccgggcgggcgaacaggagggccaactgctcctgcggcgcggcctgcaactgcgcttcatgcggctcggcgaccgcctgatcgatggccgacgcgtcgacgcgccactagtcgtgagctgatgcacaagtagtagagctagctaccgagttagccataaataagtgccgctgtgccgtgatcagtcatatgtggacgtgtcgtgtgtatttacctacgtactcgcatcagtgtgtaagaacgaataaatagtttatgtgtgctattttctcctttcctaaatgtacttgaagtcttttggcttgttacaagttttacttgttgcaaaataattatagttctacgattttctt

SEQ ID NO: 11262 - protein, 81 aa, Triticum aestivum
  peptide (1)..(81): Ceres Seq. ID no. 15222264
  misc_feature (2)..(78): Pfam Name: Pfam Description:  Plant PEC family metallothionein
  misc_feature (1)..(81): NCBI GI NO: 232025 NR Description: EC protein I/II (Zinc-metallothionein class II)
  misc_feature (1)..(81): NCBI GI NO: 232026 NR Description: EC protein III (Zinc-metallothionein class II)
  misc_feature (1)..(78): NCBI GI NO: 29786355 NR Description: metallothionein-like protein type 4
  misc_feature (1)..(81): NCBI GI NO: 37536538 NR Description: putative zinc-metallothionein
  misc_feature (1)..(79): NCBI GI NO: 1169469 NR Description: EC protein homolog (Zinc-metallothionein class II)
  misc_feature (3)..(78): NCBI GI NO: 4105810 NR Description: PGPS/NH21 [Petunia x hybrida]
  misc_feature (3)..(76): NCBI GI NO: 7488689 NR Description: metallothionein-II - soybean
  misc_feature (3)..(76): NCBI GI NO: 7488690 NR Description: metallothionein II PGMPM19 [similarity] - soybean
  misc_feature (3)..(78): NCBI GI NO: 10834829 NR Description: metallothionein-like protein [Sesamum indicum]
  misc_feature (1)..(78): NCBI GI NO: 15227794 NR Description: metallothionein-related protein
MGCDDKCGCAVPCPGGTGCRCTSARSGAAAGEHTTCGCGEHCGCNPCACGREGTPSGRANRRANCSCGAACNCASCGSATA

SEQ ID NO: 11263 - protein, 52 aa, Triticum aestivum
  peptide (1)..(52): Ceres Seq. ID no. 15222265
MQPVRVRARGDAVRAGEQEGQLLLRRGLQLRFMRLGDRLIDGRRVDAPLVVS

SEQ ID NO: 11264 - DNA, 742 bp, Triticum aestivum
  misc_feature (1)..(742): Ceres Seq. ID no. 14303027
tgtgttagctgtagatgttgaaagtgaagccttgtgcagtgttctttggatcttgtctaagccatgtgctacctttctgtggagatcgacaatgttgatgcccagtgtggtctgcagtggtattcaggaatcagggtgacgcatttatcttgtttgtatactgatgatggtcttttaattttgcagatgtgaaggatattaagtgtgtgattaattttgatttcccgacaactatcgaggattatattcataggataggtcgcactggccgtgccggtgctaccgggatggcattcacgttcttcacacattccaatgcaaaatattcaaggaatctcgttaagatcttgcgcgaagctgggcaggttgtgaatccagcgttagaagctatgtccaagtctgctggttctatgggaggaggaggtaatttccggtcaaggggccgaggtgggtttggtggtggtgggtatggtggtaaccgttctggatcaaattccattccagtacgtagaagatactaagacacaaacatgaaggtcaattctgatgctggaaaagacagagcgatgaagttttatctgtatacattaggcattaaattaaatgcatttttggggaatttctttgaaatccttctactgttagaagatcaaaacaaaagtcattcttgatatttttgtaccggagctcaaatggaaggaactcatgtatcagcgaccttggagattagaatagtcttgtc

SEQ ID NO: 11265 - protein, 77 aa, Triticum aestivum
  peptide (1)..(77): Ceres Seq. ID no. 14303028
  misc_feature (1)..(77): NCBI GI NO: 39653663 NR Description: DEAD box RNA helicase [Zea mays]
  misc_feature (1)..(72): NCBI GI NO: 10177293 NR Description: ATP-dependent RNA helicase-like protein
  misc_feature (1)..(68): NCBI GI NO: 5669638 NR Description: ethylene-responsive RNA helicase
  misc_feature (1)..(75): NCBI GI NO: 5270 NR Description: p68 protein [Schizosaccharomyces pombe]
  misc_feature (1)..(75): NCBI GI NO: 19113315 NR Description: p68-like protein. [Schizosaccharomyces pombe]
  misc_feature (1)..(76): NCBI GI NO: 32416134 NR Description: hypothetical protein [Neurospora crassa]
  misc_feature (1)..(77): NCBI GI NO: 40738604 NR Description: hypothetical protein AN5931.2
  misc_feature (1)..(70): NCBI GI NO: 24644481 NR Description: Rm62 CG10279-PD [Drosophila melanogaster]
  misc_feature (1)..(70): NCBI GI NO: 24644483 NR Description: Rm62 CG10279-PE [Drosophila melanogaster]
  misc_feature (1)..(70): NCBI GI NO: 24644485 NR Description: Rm62 CG10279-PC [Drosophila melanogaster]
MAFTFFTHSNAKYSRNLVKILREAGQVVNPALEAMSKSAGSMGGGGNFRSRGRGGFGGGGYGGNRSGSNSIPVRRRY

SEQ ID NO: 11266 - protein, 46 aa, Triticum aestivum
  peptide (1)..(46): Ceres Seq. ID no. 14303029
  misc_feature (1)..(46): NCBI GI NO: 3986287 NR Description: DjVLGB [Dugesia japonica]
MKVNSDAGKDRAMKFYLYTLGIKLNAFLGNFFEILLLLEDQNKSHS

SEQ ID NO: 11267 - protein, 45 aa, Triticum aestivum
  peptide (1)..(45): Ceres Seq. ID no. 14303030
VLAVDVESEALCSVLWILSKPCATFLWRSTMLMPSVVCSGIQESG

SEQ ID NO: 11268 - DNA, 734 bp, Triticum aestivum
  misc_feature (1)..(734): Ceres Seq. ID no. 13661668
aatgatggatgcgatgaaaaagatagataaggataaggtgaaagctgcgctggagaaacggaggaagtcgaaaggcgatgctggtaggaaagtggacgtcatggatgatcatgacctgattgagagggagctggaacatggcgtggagttggctgccgaggacgagaaaaaacacgacagaaggcagagctggccccaccccgcgcaccgggaggatcaccagaacacggctcgcaaggcggagaacaccgaagagggcgagctgtccctggatggccaggaataccgctctcctggccccgacaaccggaagaggaaggacgcgcacgagcacaggagcaatgaccgcagcgccgagagagacatcaagaggccgaggccatgagatgaagtattcattgtggggggtgatcagcggtgacggactgagaactggtgttttgagcgccagtgcgtgatacctagtttttgcatcgcgggaacatacaggtgcttgtttgcctatgttgggagatttgaaatgtactgtactgtaacttgaaaagatgaggagtatgtacatgttcaggttatggaacattcggcagcagtttggtgtcgaggaacgataggaaagaggctgcatggcctgcacccgaaggctatataaataactttttaaatacatggatttgaagcaaatttggattgggacatttatatggatttgaaacaaatttgattggcacatttct

SEQ ID NO: 11269 - protein, 127 aa, Triticum aestivum
  peptide (1)..(127): Ceres Seq. ID no. 13661669
  misc_feature (7)..(106): NCBI GI NO: 30694715 NR Description: cyclin family [Arabidopsis thaliana]
  misc_feature (7)..(106): NCBI GI NO: 9759604 NR Description: contains similarity to cyclin~gene_id:K18C1.7
MMDAMKKIDKDKVKAALEKRRKSKGDAGRKVDVMDDHDLIERELEHGVELAAEDEKKHDRRQSWPHPAHREDHQNTARKAENTEEGELSLDGQEYRSPGPDNRKRKDAHEHRSNDRSAERDIKRPRP

SEQ ID NO: 11270 - protein, 126 aa, Triticum aestivum
  peptide (1)..(126): Ceres Seq. ID no. 13661670
  misc_feature (6)..(105): NCBI GI NO: 30694715 NR Description: cyclin family [Arabidopsis thaliana]
  misc_feature (6)..(105): NCBI GI NO: 9759604 NR Description: contains similarity to cyclin~gene_id:K18C1.7
MDAMKKIDKDKVKAALEKRRKSKGDAGRKVDVMDDHDLIERELEHGVELAAEDEKKHDRRQSWPHPAHREDHQNTARKAENTEEGELSLDGQEYRSPGPDNRKRKDAHEHRSNDRSAERDIKRPRP

SEQ ID NO: 11271 - protein, 123 aa, Triticum aestivum
  peptide (1)..(123): Ceres Seq. ID no. 13661671
  misc_feature (3)..(102): NCBI GI NO: 30694715 NR Description: cyclin family [Arabidopsis thaliana]
  misc_feature (3)..(102): NCBI GI NO: 9759604 NR Description: contains similarity to cyclin~gene_id:K18C1.7
MKKIDKDKVKAALEKRRKSKGDAGRKVDVMDDHDLIERELEHGVELAAEDEKKHDRRQSWPHPAHREDHQNTARKAENTEEGELSLDGQEYRSPGPDNRKRKDAHEHRSNDRSAERDIKRPRP

SEQ ID NO: 11272 - DNA, 1015 bp, Triticum aestivum
  misc_feature (1)..(1015): Ceres Seq. ID no. 13664283
  misc_feature (104)..(104): n is a, c, t, g, unknown, or other
  misc_feature (295)..(295): n is a, c, t, g, unknown, or other
  misc_feature (294)..(294): n is a, c, t, g, unknown, or other
tcgtcccttggtgactgaagagaagagtttaagcaaagaatggcagcacaagcgcttgtgtcttcttcacttacttcctctgttcagactgctagacagatatncggcgcaaaaccagctgtgtccgtatcacagaggaaggtttccttggttgttaaggctgcctcaactccacctgccaagcaaggagcaaacaggcaattgtggtttgcatcatcacagagtctctcttacttggatggcagcttacctggcgactttggattcgatccgcttggtctttcagacccaganngtactggaggcttcatcgagccgagatggctagcctacggagagatcatcaacgggaggttcgctatgttgggtgcacctggagctatagcacctgagattctaggaaaggccggtctgattcctgcagacactgctcttccctggttccaaaccggtgtgattccacctgcagggacatacagctactgggcagacccttacacactctttgttctcgagatggctttgatgggatttgccgagcacaggaggttgcaggactggtacaacccaggatctatgggtaaacaatacttcttgggtctagagaaaggtttcgcgggttcaggtgacccggcttaccccggtggaccattcttcaaccctcttgggtttggaaaagacgagaagtcgatgaaggagttgaaactcaaggaggtcaagaacggtagactggcaatgctcgccatcctaggctattttgtgcagggactagtgaccggtgtggggccttaccagaaccttcttgatcatttggcggatcccgtcaacaacaatgtcttgaccagcctcaagttccactgagatgatcatatatcgtattcatcacatggtgttttatgttggtttcccattctcttgtatcctacaatcttgtttgtttctcttggtaccatcagtttctctgtgttgtaacaccctgtgtaaacatattcgtcttttgtaagaaataatggcc

SEQ ID NO: 11273 - protein, 273 aa, Triticum aestivum
  peptide (1)..(273): Ceres Seq. ID no. 13664284
  misc_feature (61)..(244): Pfam Name: Pfam Description:  Chlorophyll A-B binding protein
  misc_feature (1)..(273): NCBI GI NO: 15219941 NR Description: light-harvesting chlorophyll a/b binding protein
  misc_feature (1)..(273): NCBI GI NO: 430947 NR Description: PSI type III chlorophyll a/b-binding protein
  misc_feature (1)..(273): NCBI GI NO: 21554335 NR Description: PSI type III chlorophyll a/b-binding protein
  misc_feature (1)..(273): NCBI GI NO: 82080 NR Description: chlorophyll a/b-binding protein type III precursor
  misc_feature (1)..(273): NCBI GI NO: 115813 NR Description: Chlorophyll A-B binding protein 8
  misc_feature (1)..(273): NCBI GI NO: 7443229 NR Description: probable chlorophyll a/b-binding protein type IIIprecursor
  misc_feature (1)..(273): NCBI GI NO: 99487 NR Description: chlorophyll a/b-binding protein
  misc_feature (72)..(264): NCBI GI NO: 7271947 NR Description: chlorophyll a/b-binding protein type III
  misc_feature (11)..(269): NCBI GI NO: 40714511 NR Description: light-harvesting chlorophyll-a/b protein ofphotosystem I
  misc_feature (109)..(273): NCBI GI NO: 37780998 NR Description: chlorophyll a/b binding protein [Vitis vinifera]
  misc_feature (22)..(22): Xaa is any aa, unknown or other
  misc_feature (85)..(85): Xaa is any aa, unknown or other
  misc_feature (86)..(86): Xaa is any aa, unknown or other
MAAQALVSSSLTSSVQTARQIXGAKPAVSVSQRKVSLVVKAASTPPAKQGANRQLWFASSQSLSYLDGSLPGDFGFDPLGLSDPXXTGGFIEPRWLAYGEIINGRFAMLGAPGAIAPEILGKAGLIPADTALPWFQTGVIPPAGTYSYWADPYTLFVLEMALMGFAEHRRLQDWYNPGSMGKQYFLGLEKGFAGSGDPAYPGGPFFNPLGFGKDEKSMKELKLKEVKNGRLAMLAILGYFVQGLVTGVGPYQNLLDHLADPVNNNVLTSLKFH

SEQ ID NO: 11274 - protein, 166 aa, Triticum aestivum
  peptide (1)..(166): Ceres Seq. ID no. 13664285
  misc_feature (1)..(137): Pfam Name: Pfam Description:  Chlorophyll A-B binding protein
  misc_feature (1)..(166): NCBI GI NO: 15219941 NR Description: light-harvesting chlorophyll a/b binding protein
  misc_feature (1)..(166): NCBI GI NO: 430947 NR Description: PSI type III chlorophyll a/b-binding protein
  misc_feature (1)..(166): NCBI GI NO: 21554335 NR Description: PSI type III chlorophyll a/b-binding protein
  misc_feature (1)..(166): NCBI GI NO: 82080 NR Description: chlorophyll a/b-binding protein type III precursor
  misc_feature (1)..(166): NCBI GI NO: 115813 NR Description: Chlorophyll A-B binding protein 8
  misc_feature (1)..(166): NCBI GI NO: 7443229 NR Description: probable chlorophyll a/b-binding protein type IIIprecursor
  misc_feature (1)..(166): NCBI GI NO: 99487 NR Description: chlorophyll a/b-binding protein
  misc_feature (1)..(157): NCBI GI NO: 7271947 NR Description: chlorophyll a/b-binding protein type III
  misc_feature (1)..(162): NCBI GI NO: 40714511 NR Description: light-harvesting chlorophyll-a/b protein ofphotosystem I
  misc_feature (2)..(166): NCBI GI NO: 37780998 NR Description: chlorophyll a/b binding protein [Vitis vinifera]
MLGAPGAIAPEILGKAGLIPADTALPWFQTGVIPPAGTYSYWADPYTLFVLEMALMGFAEHRRLQDWYNPGSMGKQYFLGLEKGFAGSGDPAYPGGPFFNPLGFGKDEKSMKELKLKEVKNGRLAMLAILGYFVQGLVTGVGPYQNLLDHLADPVNNNVLTSLKFH

SEQ ID NO: 11275 - DNA, 665 bp, Triticum aestivum
  misc_feature (1)..(665): Ceres Seq. ID no. 12623695
atttagaaatctatgtaattacttttaggcttaaaaagttggagacaatattttggagaaaaaaaaaagcataaatccttctttacggaaagtttttcattagtcaaaattcatcataatgtataaagtatttgattggaaaaagaaatagcttttggtagataaattgtatctgtggctaccaaaacgtatttcctttatgtaatgatgattatatttgttctttttgtttctgattctttctatccggcgaccgcgcagtgcttttgtggctattgacagcagcgtgcataaagacgggacggccacagatagcgagacgagccatcgacctggcggagtcacggttgttgaaagacggttggccggagtactacgacggaaaatcgggaaggtttattggaaaacaggcgaggaagtttcagacatggtccatcgctggttacttggtcgccaagatgatgttggaagatccttctcatcttggaatgatctcattggaagaggacaaacagaccaaacctgtcattaagagatctcattcttggacttgataatgcttgtcaatctttgagaatattcggctaagacttgttagtttctaaattttgttttacaatttatttagtttgtgtttaattatcctatatcttttcacttttccc

SEQ ID NO: 11276 - protein, 34 aa, Triticum aestivum
  peptide (1)..(34): Ceres Seq. ID no. 12623696
MVHRWLLGRQDDVGRSFSSWNDLIGRGQTDQTCH

SEQ ID NO: 11277 - protein, 31 aa, Triticum aestivum
  peptide (1)..(31): Ceres Seq. ID no. 12623697
  misc_feature (1)..(31): NCBI GI NO: 18395144 NR Description: putative invertase; protein id: At1g22650
  misc_feature (1)..(31): NCBI GI NO: 21594008 NR Description: putative invertase [Arabidopsis thaliana]
  misc_feature (1)..(31): NCBI GI NO: 7487359 NR Description: hypothetical protein T22J18
  misc_feature (1)..(31): NCBI GI NO: 18413234 NR Description: neutral invertase like protein
  misc_feature (1)..(31): NCBI GI NO: 25354737 NR Description: neutral invertase like protein
  misc_feature (1)..(31): NCBI GI NO: 15218303 NR Description: neutral invertase, putative; protein id:At1g72000
  misc_feature (1)..(31): NCBI GI NO: 15236209 NR Description: invertase - like protein; protein id: At4g34860
  misc_feature (1)..(30): NCBI GI NO: 30693221 NR Description: invertase -related [Arabidopsis thaliana]
  misc_feature (1)..(31): NCBI GI NO: 38344939 NR Description: OSJNBa0084A10.15
  misc_feature (1)..(27): NCBI GI NO: 17228314 NR Description: putative invertase [Nostoc sp. PCC 7120]
MMLEDPSHLGMISLEEDKQTKPVIKRSHSWT

SEQ ID NO: 11278 - protein, 30 aa, Triticum aestivum
  peptide (1)..(30): Ceres Seq. ID no. 12623698
  misc_feature (1)..(30): NCBI GI NO: 18395144 NR Description: putative invertase; protein id: At1g22650
  misc_feature (1)..(30): NCBI GI NO: 21594008 NR Description: putative invertase [Arabidopsis thaliana]
  misc_feature (1)..(30): NCBI GI NO: 7487359 NR Description: hypothetical protein T22J18
  misc_feature (1)..(30): NCBI GI NO: 18413234 NR Description: neutral invertase like protein
  misc_feature (1)..(30): NCBI GI NO: 25354737 NR Description: neutral invertase like protein
  misc_feature (1)..(30): NCBI GI NO: 15218303 NR Description: neutral invertase, putative; protein id:At1g72000
  misc_feature (1)..(30): NCBI GI NO: 15236209 NR Description: invertase - like protein; protein id: At4g34860
  misc_feature (1)..(29): NCBI GI NO: 30693221 NR Description: invertase -related [Arabidopsis thaliana]
  misc_feature (1)..(30): NCBI GI NO: 38344939 NR Description: OSJNBa0084A10.15
  misc_feature (1)..(26): NCBI GI NO: 17228314 NR Description: putative invertase [Nostoc sp. PCC 7120]
MLEDPSHLGMISLEEDKQTKPVIKRSHSWT

SEQ ID NO: 11279 - DNA, 856 bp, Triticum aestivum
  misc_feature (1)..(856): Ceres Seq. ID no. 13662695
cagctgccaccctgcccagttgctgttgcgcagcctccttcctctagtctcccctcttctccccctgttgccatctccaacctaatctttctcttctcgcggtctgcccgacggattccaaaagggctcgctcattcgggggaaaagctgttcgccgtggctcccagtctcatccatttcttgtctcttccaggaatctgtgaaattttgtgcctttaaaggcaatccagggtctggtcctgagctgtcggggctctatgtctaagtgggaacctgtcacatttgaggaatctcttagctttgttaagagagttaaggcccgtgactacttgttatacctgtcactgctcaatgtgctcacccggagtgatcagatccctctggaagcttacaacgagcttttacttcttttccgggatcacggagacctgctagaggagctagggaagttcagacccctcccctctttcccaagcactgtgtacagccacaacacaatctggatgttcatattccttatgccctttctgctcctgagccttctcctcgcgtttgagaagccgttggatagcttccttctccgataacccgtcgcgagctaaagatcagcactacgatgaaaatgaccggacacggaatgcgtgcatggactgctgtcttgtgatatcccctcagagcccattgccttattggtgcttttgtgatcatgttcatccttttgtgatccgcccgcataccggtgcgcggatagtatctctgaatctctcggaaggacagactaaatcgattgttttggcttgttcaagacaaacttcagtgtacaattgacaaactaaatgaaagagtttagttttac

SEQ ID NO: 11280 - protein, 109 aa, Triticum aestivum
  peptide (1)..(109): Ceres Seq. ID no. 13662696
  misc_feature (24)..(67): Pfam Name: Pfam Description:  Paired amphipathic helix repeat
  misc_feature (2)..(103): NCBI GI NO: 34894158 NR Description: putative co-repressor protein
MSKWEPVTFEESLSFVKRVKARDYLLYLSLLNVLTRSDQIPLEAYNELLLLFRDHGDLLEELGKFRPLPSFPSTVYSHNTIWMFIFLMPFLLLSLLLAFEKPLDSFLLR

SEQ ID NO: 11281 - protein, 72 aa, Triticum aestivum
  peptide (1)..(72): Ceres Seq. ID no. 13662697
QLPPCPVAVAQPPSSSLPSSPPVAISNLIFLFSRSARRIPKGLAHSGEKLFAVAPSLIHFLSLPGICEILCL

SEQ ID NO: 11282 - protein, 60 aa, Triticum aestivum
  peptide (1)..(60): Ceres Seq. ID no. 13662698
MDCCLVISPQSPLPYWCFCDHVHPFVIRPHTGARIVSLNLSEGQTKSIVLACSRQTSVYN

SEQ ID NO: 11283 - DNA, 1339 bp, Triticum aestivum
  misc_feature (1)..(1339): Ceres Seq. ID no. 13661504
atcaccagtaaagcagtaagcaattccactcccgccgccacctccctctactccggcgctctctcggacgctccggcatacatacgtacttacaagcggaagcagccagagccagccatgtgccccggggcgccggtcgcggcggcggcgtcggacaagagcgtgtgcgtgatggacgcgtccggcccgctgggccaggcgctcgtgcaccgcctcctccgccggggctacaccgtccacgccgccacctacggccgctcgctcgacgcgctcgcgctgctcgccgccgccggccacgacgaggaccggctcaagctcttccgcgccgaccccttcgactaccactccatcgccgacgccgtccgcggctgctccggcctcttctgcatgttcaacacccacgaggaccaggccggctgcgacgaggtgatggtggaggtggaggtccgggcggcgcagaacgtgctggaggcgtgcgcgcagacggtgaccatggagcgggtggtcttcacctcctccgtcaccgccgtcgtctggaaggacgacgaccacaagcccgtcgacgccttcgacgagcggaactggagcgacctcaacctctgcaggaagcgcaagttgtggcatgcgctggccaagacgctgtcggagaagacggcctgggccttggccatggacagaggggtggacatggtggccatcaacgccggcctgctcaccgggccggggctctcctccgcccacccctgcctcaagggggtccccgagatgtacgagcacggcgtcctcgtcaccgtcgacgccgacttcctcgccgacgcccacgtggccgcctacgagtgccccacggccttcggccgctacctctgcttcaacaacgtcgtgtgccggcccgaggacgccctccagttcgcccagatgctcaccccgtccgctccatgctacccgccgagtgatgagctgaaggtgatcccacaaaggattcagaacaagaagctgaacaacctgatggtggagtttgccagtgccatatacggggacttggattagagaatcactagttcattgatttacatctcaagggcagctagggttgtattctttatgtacctaaatatctgtattctttttcctcctgaaaagggaaatatggttggtcagatgtacaaatctgtacaaggccaagcatgccgcatgtattccaccactcttaccaggatggtaggagcatttgagccagtgcttagcaatgtagtagtaatccttaggtccaacaaaagggaaaataagtccacagttatgttactactgccttgtacagcagcattatatgaatatgatg

SEQ ID NO: 11284 - protein, 348 aa, Triticum aestivum
  peptide (1)..(348): Ceres Seq. ID no. 13661505
  misc_feature (53)..(348): NCBI GI NO: 37537132 NR Description: putative cinnamoyl-CoA reductase
  misc_feature (56)..(336): NCBI GI NO: 25412171 NR Description: probable cinnamoyl CoA reductase
  misc_feature (56)..(336): NCBI GI NO: 18400407 NR Description: cinnamoyl-CoA reductase-related
  misc_feature (56)..(336): NCBI GI NO: 21553382 NR Description: putative cinnamoyl CoA reductase
  misc_feature (52)..(342): NCBI GI NO: 15234751 NR Description: cinnamoyl-CoA reductase-related
  misc_feature (52)..(342): NCBI GI NO: 21553548 NR Description: cinnamoyl-CoA reductase-like protein
  misc_feature (43)..(339): NCBI GI NO: 3341511 NR Description: cinnamoyl-CoA reductase [Saccharum officinarum]
  misc_feature (43)..(339): NCBI GI NO: 3242328 NR Description: cinnamoyl-CoA reductase [Zea mays]
  misc_feature (53)..(342): NCBI GI NO: 17978649 NR Description: cinnamoyl-CoA reductase [Pinus taeda]
  misc_feature (53)..(339): NCBI GI NO: 9964087 NR Description: cinnamoyl CoA reductase [Lolium perenne]
ITSKAVSNSTPAATSLYSGALSDAPAYIRTYKRKQPEPAMCPGAPVAAAASDKSVCVMDASGPLGQALVHRLLRRGYTVHAATYGRSLDALALLAAAGHDEDRLKLFRADPFDYHSIADAVRGCSGLFCMFNTHEDQAGCDEVMVEVEVRAAQNVLEACAQTVTMERVVFTSSVTAVVWKDDDHKPVDAFDERNWSDLNLCRKRKLWHALAKTLSEKTAWALAMDRGVDMVAINAGLLTGPGLSSAHPCLKGVPEMYEHGVLVTVDADFLADAHVAAYECPTAFGRYLCFNNVVCRPEDALQFAQMLTPSAPCYPPSDELKVIPQRIQNKKLNNLMVEFASAIYGDLD

SEQ ID NO: 11285 - protein, 309 aa, Triticum aestivum
  peptide (1)..(309): Ceres Seq. ID no. 13661506
  misc_feature (14)..(309): NCBI GI NO: 37537132 NR Description: putative cinnamoyl-CoA reductase
  misc_feature (17)..(297): NCBI GI NO: 25412171 NR Description: probable cinnamoyl CoA reductase
  misc_feature (17)..(297): NCBI GI NO: 18400407 NR Description: cinnamoyl-CoA reductase-related
  misc_feature (17)..(297): NCBI GI NO: 21553382 NR Description: putative cinnamoyl CoA reductase
  misc_feature (13)..(303): NCBI GI NO: 15234751 NR Description: cinnamoyl-CoA reductase-related
  misc_feature (13)..(303): NCBI GI NO: 21553548 NR Description: cinnamoyl-CoA reductase-like protein
  misc_feature (4)..(300): NCBI GI NO: 3341511 NR Description: cinnamoyl-CoA reductase [Saccharum officinarum]
  misc_feature (4)..(300): NCBI GI NO: 3242328 NR Description: cinnamoyl-CoA reductase [Zea mays]
  misc_feature (14)..(303): NCBI GI NO: 17978649 NR Description: cinnamoyl-CoA reductase [Pinus taeda]
  misc_feature (14)..(300): NCBI GI NO: 9964087 NR Description: cinnamoyl CoA reductase [Lolium perenne]
MCPGAPVAAAASDKSVCVMDASGPLGQALVHRLLRRGYTVHAATYGRSLDALALLAAAGHDEDRLKLFRADPFDYHSIADAVRGCSGLFCMFNTHEDQAGCDEVMVEVEVRAAQNVLEACAQTVTMERVVFTSSVTAVVWKDDDHKPVDAFDERNWSDLNLCRKRKLWHALAKTLSEKTAWALAMDRGVDMVAINAGLLTGPGLSSAHPCLKGVPEMYEHGVLVTVDADFLADAHVAAYECPTAFGRYLCFNNVVCRPEDALQFAQMLTPSAPCYPPSDELKVIPQRIQNKKLNNLMVEFASAIYGDLD

SEQ ID NO: 11286 - protein, 291 aa, Triticum aestivum
  peptide (1)..(291): Ceres Seq. ID no. 13661507
  misc_feature (1)..(291): NCBI GI NO: 37537132 NR Description: putative cinnamoyl-CoA reductase
  misc_feature (1)..(279): NCBI GI NO: 25412171 NR Description: probable cinnamoyl CoA reductase
  misc_feature (1)..(279): NCBI GI NO: 18400407 NR Description: cinnamoyl-CoA reductase-related
  misc_feature (1)..(279): NCBI GI NO: 21553382 NR Description: putative cinnamoyl CoA reductase
  misc_feature (1)..(285): NCBI GI NO: 15234751 NR Description: cinnamoyl-CoA reductase-related
  misc_feature (1)..(285): NCBI GI NO: 21553548 NR Description: cinnamoyl-CoA reductase-like protein
  misc_feature (1)..(282): NCBI GI NO: 3341511 NR Description: cinnamoyl-CoA reductase [Saccharum officinarum]
  misc_feature (1)..(282): NCBI GI NO: 3242328 NR Description: cinnamoyl-CoA reductase [Zea mays]
  misc_feature (1)..(285): NCBI GI NO: 17978649 NR Description: cinnamoyl-CoA reductase [Pinus taeda]
  misc_feature (1)..(282): NCBI GI NO: 9964087 NR Description: cinnamoyl CoA reductase [Lolium perenne]
MDASGPLGQALVHRLLRRGYTVHAATYGRSLDALALLAAAGHDEDRLKLFRADPFDYHSIADAVRGCSGLFCMFNTHEDQAGCDEVMVEVEVRAAQNVLEACAQTVTMERVVFTSSVTAVVWKDDDHKPVDAFDERNWSDLNLCRKRKLWHALAKTLSEKTAWALAMDRGVDMVAINAGLLTGPGLSSAHPCLKGVPEMYEHGVLVTVDADFLADAHVAAYECPTAFGRYLCFNNVVCRPEDALQFAQMLTPSAPCYPPSDELKVIPQRIQNKKLNNLMVEFASAIYGDLD

SEQ ID NO: 11287 - DNA, 994 bp, Triticum aestivum
  misc_feature (1)..(994): Ceres Seq. ID no. 12623816
catgtcccttgccgccgcagcctccccgtcctcgtcccgcttcctgttgccctccacggccgcccgccgccggttcctccaccacctcctcgccgcgcccgcgcccccgaggccgccgcagcttcggcgctgctccccgtaccactggatggcgcaattttgggctgaaggatcactggagaagaacaacgctctggttgaatacctgaaacagtatggtgttgttcgaaccgataaagtggcagaagttatggaaactatcgaccgagccttatttgtaccggagggctttaccccttacaccgacagtcctatgcctattggttacaatgcaacaatatctgctcctcacatgcacgcaacctgcttagaactgttgaaggattatttacagccaggcatgcatgctctggacgttggatcaggcagtggttacttgactgcttgctttgcaatgatggtcggaccagaaggtcgcgcagtggggattgaacacattcctgaactcgttgttgcttctactgaaaatgtcgaacggagtgctgcagcagcactaatgaaggatggttcactttcttttcatgtttcagatggaaggcttggctggccggatgcggcgccatacgatgctattcatgtgggcgcagcggcacctgagatccctcggccactgctggagcagctgaagcctggcgggcggatggtcatacccgttggcacatactctcaggacctgcaggtgattgacaagagcgccgacggatccaccagcgtccgcaacgatgcctctgttcgctacgtccctctgaccagccgctctgctcagctgcaggacagctgagatccttcgctctggatctggaaatgtgtgtgtatatatgtgagtgccgatgatctttgtctaccaatgtggcgtctgatgttttagatggtttggttttgtataatgcttactgctggttgatgttgcttagaatatgtgaatacgtgttgt

SEQ ID NO: 11288 - protein, 279 aa, Triticum aestivum
  peptide (1)..(279): Ceres Seq. ID no. 12623817
  misc_feature (60)..(274): Pfam Name: D-aspartate Pfam Description: Protein-L-isoaspartate
  misc_feature (50)..(279): NCBI GI NO: 2499570 NR Description: PROTEIN-L-ISOASPARTATE O-METHYLTRANSFERASE
  misc_feature (50)..(279): NCBI GI NO: 38345249 NR Description: OSJNBb0011N17.10
  misc_feature (50)..(277): NCBI GI NO: 1322021 NR Description: L-isoaspartyl methyltransferase
  misc_feature (50)..(277): NCBI GI NO: 22331684 NR Description: similar to protein-L-isoaspartate
  misc_feature (57)..(276): NCBI GI NO: 26451260 NR Description: unknown protein [Arabidopsis thaliana]
  misc_feature (54)..(275): NCBI GI NO: 19070126 NR Description: protein carboxyl-o-methyltransferase
  misc_feature (65)..(275): NCBI GI NO: 37589722 NR Description: Unknown (protein for MGC:73268) [Danio rerio]
  misc_feature (54)..(275): NCBI GI NO: 18859221 NR Description: l-isoaspartyl protein carboxyl methyltransferase
  misc_feature (54)..(275): NCBI GI NO: 130215 NR Description: PROTEIN-L-ISOASPARTATE
  misc_feature (54)..(275): NCBI GI NO: 482365 NR Description: protein-L-isoaspartate
MSLAAAASPSSSRFLLPSTAARRRFLHHLLAAPAPPRPPQLRRCSPYHWMAQFWAEGSLEKNNALVEYLKQYGVVRTDKVAEVMETIDRALFVPEGFTPYTDSPMPIGYNATISAPHMHATCLELLKDYLQPGMHALDVGSGSGYLTACFAMMVGPEGRAVGIEHIPELVVASTENVERSAAAALMKDGSLSFHVSDGRLGWPDAAPYDAIHVGAAAPEIPRPLLEQLKPGGRMVIPVGTYSQDLQVIDKSADGSTSVRNDASVRYVPLTSRSAQLQDS

SEQ ID NO: 11289 - protein, 230 aa, Triticum aestivum
  peptide (1)..(230): Ceres Seq. ID no. 12623818
  misc_feature (11)..(225): Pfam Name: D-aspartate Pfam Description: Protein-L-isoaspartate
  misc_feature (1)..(230): NCBI GI NO: 2499570 NR Description: PROTEIN-L-ISOASPARTATE O-METHYLTRANSFERASE
  misc_feature (1)..(230): NCBI GI NO: 38345249 NR Description: OSJNBb0011N17.10
  misc_feature (1)..(228): NCBI GI NO: 1322021 NR Description: L-isoaspartyl methyltransferase
  misc_feature (1)..(228): NCBI GI NO: 22331684 NR Description: similar to protein-L-isoaspartate
  misc_feature (8)..(227): NCBI GI NO: 26451260 NR Description: unknown protein [Arabidopsis thaliana]
  misc_feature (5)..(226): NCBI GI NO: 19070126 NR Description: protein carboxyl-o-methyltransferase
  misc_feature (16)..(226): NCBI GI NO: 37589722 NR Description: Unknown (protein for MGC:73268) [Danio rerio]
  misc_feature (5)..(226): NCBI GI NO: 18859221 NR Description: l-isoaspartyl protein carboxyl methyltransferase
  misc_feature (5)..(226): NCBI GI NO: 130215 NR Description: PROTEIN-L-ISOASPARTATE
  misc_feature (5)..(226): NCBI GI NO: 482365 NR Description: protein-L-isoaspartate
MAQFWAEGSLEKNNALVEYLKQYGVVRTDKVAEVMETIDRALFVPEGFTPYTDSPMPIGYNATISAPHMHATCLELLKDYLQPGMHALDVGSGSGYLTACFAMMVGPEGRAVGIEHIPELVVASTENVERSAAAALMKDGSLSFHVSDGRLGWPDAAPYDAIHVGAAAPEIPRPLLEQLKPGGRMVIPVGTYSQDLQVIDKSADGSTSVRNDASVRYVPLTSRSAQLQDS

SEQ ID NO: 11290 - protein, 196 aa, Triticum aestivum
  peptide (1)..(196): Ceres Seq. ID no. 12623819
  misc_feature (1)..(191): Pfam Name: D-aspartate Pfam Description: Protein-L-isoaspartate
  misc_feature (1)..(196): NCBI GI NO: 2499570 NR Description: PROTEIN-L-ISOASPARTATE O-METHYLTRANSFERASE
  misc_feature (1)..(196): NCBI GI NO: 38345249 NR Description: OSJNBb0011N17.10
  misc_feature (1)..(194): NCBI GI NO: 1322021 NR Description: L-isoaspartyl methyltransferase
  misc_feature (1)..(194): NCBI GI NO: 22331684 NR Description: similar to protein-L-isoaspartate
  misc_feature (1)..(193): NCBI GI NO: 26451260 NR Description: unknown protein [Arabidopsis thaliana]
  misc_feature (1)..(192): NCBI GI NO: 19070126 NR Description: protein carboxyl-o-methyltransferase
  misc_feature (1)..(192): NCBI GI NO: 37589722 NR Description: Unknown (protein for MGC:73268) [Danio rerio]
  misc_feature (1)..(192): NCBI GI NO: 18859221 NR Description: l-isoaspartyl protein carboxyl methyltransferase
  misc_feature (1)..(192): NCBI GI NO: 130215 NR Description: PROTEIN-L-ISOASPARTATE
  misc_feature (1)..(192): NCBI GI NO: 482365 NR Description: protein-L-isoaspartate
METIDRALFVPEGFTPYTDSPMPIGYNATISAPHMHATCLELLKDYLQPGMHALDVGSGSGYLTACFAMMVGPEGRAVGIEHIPELVVASTENVERSAAAALMKDGSLSFHVSDGRLGWPDAAPYDAIHVGAAAPEIPRPLLEQLKPGGRMVIPVGTYSQDLQVIDKSADGSTSVRNDASVRYVPLTSRSAQLQDS

SEQ ID NO: 11291 - DNA, 771 bp, Triticum aestivum
  misc_feature (1)..(771): Ceres Seq. ID no. 13661508
agagccaaccaacagggcgaccaagctcaattagctcagactactcagctaccgcctgtctgctctcaattgctccataccctacatggcgagggttcaccccaacatggtggccgcgccgggcgccgtcgacgaggcgccggccagctccgcggtggacgggccgacgacgctgacggtgtggcgcaagtccctgctgttcgactgcaaggggttcacggtgttcgacgccgagggcaaccttgcctaccgcgtcgacagctacgcctccgagagcggcgacgaggtcgtcctcatggacgcggccggccgccccgccttcaccgtccgccgcaagcggttcaccctgcagggcgagcagtggctcgtcttctccggcgaggagacgcggagtcccgtgtacaccgtcaggcggagcggccgcggcaagacgttggcgcacgtgacggcgtgcgcgggctccggccatgggccgtcttacgaggtggaggggtcgtacgcgcggcggagctgcgtggtgtacgacggcgagcggcgcgcggtggcggagatcaggcccaaggaggtggtcggcacggatgtgttccgcctggcggtgcagcccggcgtgggcgtgccgctcgccatggcagtggtggtggcgctggagcagatgttcgcgaggccgtcgctcctcaggagctggtccacatagattatatatttaattataatttgtttgttcatcggagtacgtctcagtatagccaagcttatagcttttttttgcct

SEQ ID NO: 11292 - protein, 257 aa, Triticum aestivum
  peptide (1)..(257): Ceres Seq. ID no. 13661509
  misc_feature (170)..(227): Pfam Name: Pfam Description:  MARCKS family
RANQQGDQAQLAQTTQLPPVCSQLLHTLHGEGSPQHGGRAGRRRRGAGQLRGGRADDADGVAQVPAVRLQGVHGVRRRGQPCLPRRQLRLRERRRGRPHGRGRPPRLHRPPQAVHPAGRAVARLLRRGDAESRVHRQAERPRQDVGARDGVRGLRPWAVLRGGGVVRAAELRGVRRRAARGGGDQAQGGGRHGCVPPGGAARRGRAARHGSGGGAGADVREAVAPQELVHIDYIFNYNLFVHRSTSQYSQAYSFFLP

SEQ ID NO: 11293 - protein, 202 aa, Triticum aestivum
  peptide (1)..(202): Ceres Seq. ID no. 13661510
  misc_feature (30)..(186): Pfam Name: DUF567 Pfam Description: Protein of unknown function
  misc_feature (1)..(202): NCBI GI NO: 34909256 NR Description: B1148D12.16
  misc_feature (14)..(200): NCBI GI NO: 27542765 NR Description: hypothetical protein-like protein
  misc_feature (6)..(200): NCBI GI NO: 27542769 NR Description: hypothetical protein-like protein
  misc_feature (3)..(99): NCBI GI NO: 27542767 NR Description: hypothetical protein-like protein
  misc_feature (111)..(201): NCBI GI NO: 27542767 NR Description: hypothetical protein-like protein
  misc_feature (1)..(191): NCBI GI NO: 15224921 NR Description: expressed protein [Arabidopsis thaliana]
  misc_feature (30)..(190): NCBI GI NO: 18400907 NR Description: expressed protein [Arabidopsis thaliana]
  misc_feature (30)..(190): NCBI GI NO: 21554362 NR Description: unknown [Arabidopsis thaliana]
  misc_feature (29)..(191): NCBI GI NO: 15220064 NR Description: expressed protein [Arabidopsis thaliana]
  misc_feature (11)..(161): NCBI GI NO: 15238123 NR Description: hypothetical protein [Arabidopsis thaliana]
MARVHPNMVAAPGAVDEAPASSAVDGPTTLTVWRKSLLFDCKGFTVFDAEGNLAYRVDSYASESGDEVVLMDAAGRPAFTVRRKRFTLQGEQWLVFSGEETRSPVYTVRRSGRGKTLAHVTACAGSGHGPSYEVEGSYARRSCVVYDGERRAVAEIRPKEVVGTDVFRLAVQPGVGVPLAMAVVVALEQMFARPSLLRSWST

SEQ ID NO: 11294 - protein, 195 aa, Triticum aestivum
  peptide (1)..(195): Ceres Seq. ID no. 13661511
  misc_feature (23)..(179): Pfam Name: DUF567 Pfam Description: Protein of unknown function
  misc_feature (1)..(195): NCBI GI NO: 34909256 NR Description: B1148D12.16
  misc_feature (7)..(193): NCBI GI NO: 27542765 NR Description: hypothetical protein-like protein
  misc_feature (1)..(193): NCBI GI NO: 27542769 NR Description: hypothetical protein-like protein
  misc_feature (1)..(92): NCBI GI NO: 27542767 NR Description: hypothetical protein-like protein
  misc_feature (104)..(194): NCBI GI NO: 27542767 NR Description: hypothetical protein-like protein
  misc_feature (1)..(184): NCBI GI NO: 15224921 NR Description: expressed protein [Arabidopsis thaliana]
  misc_feature (23)..(183): NCBI GI NO: 18400907 NR Description: expressed protein [Arabidopsis thaliana]
  misc_feature (23)..(183): NCBI GI NO: 21554362 NR Description: unknown [Arabidopsis thaliana]
  misc_feature (22)..(184): NCBI GI NO: 15220064 NR Description: expressed protein [Arabidopsis thaliana]
  misc_feature (4)..(154): NCBI GI NO: 15238123 NR Description: hypothetical protein [Arabidopsis thaliana]
MVAAPGAVDEAPASSAVDGPTTLTVWRKSLLFDCKGFTVFDAEGNLAYRVDSYASESGDEVVLMDAAGRPAFTVRRKRFTLQGEQWLVFSGEETRSPVYTVRRSGRGKTLAHVTACAGSGHGPSYEVEGSYARRSCVVYDGERRAVAEIRPKEVVGTDVFRLAVQPGVGVPLAMAVVVALEQMFARPSLLRSWST

SEQ ID NO: 11295 - DNA, 792 bp, Triticum aestivum
  misc_feature (1)..(792): Ceres Seq. ID no. 13661674
  misc_feature (186)..(186): n is a, c, t, g, unknown, or other
  misc_feature (185)..(185): n is a, c, t, g, unknown, or other
  misc_feature (184)..(184): n is a, c, t, g, unknown, or other
ccccgaaggccgtataatcattcgcgaagaacgggaatggcgtaaaaagaagcccatcatctcgcatgaggaggaggctgatgacaagacctctgtcagaagccagtcagtgaagaggaggaaggtggccagcactggctggtcctacaccggccatgagtacaccagcaagaaggccggtggnnnctcaagaagaaagacaagatggagccatatgcttactggcctttggatcgtaagctgctcaaccgccggtcggatcgcaagcagtccgcccgcaaggggcatggccagtgtcatgaagatggcgaaaaggtttgaggggaagagcgcttcgggtgccctcgcagccaagaggacacaaaaacmcaagcacaagaagaacaagtgagtagacaaggctgtagggaatttttgtaactgtacagcgagggtttagctagcactagctgcgcttgtcgtggcgtatttatgctgctgccgtttctctgggtttttcctgaaggaaaattttgagtgcttctccgggctttttcctgaaggaaaaacttaagtttattgttcgcaagatataattttctgtatcttacttttttttgtactcccagattcagattgactgaaatgtgttgtaattttgattgatggtggaatgtaaaatcttgcaatttgccatctagtgttagtttgtctagccgtatgcctttattgtaatgcaaaacgcttgtgtggatagctgaagatggttctcaaatttggaggtaatagactaatgacagttgatgtagatgc

SEQ ID NO: 11296 - protein, 129 aa, Triticum aestivum
  peptide (1)..(129): Ceres Seq. ID no. 15220128
  misc_feature (2)..(129): NCBI GI NO: 30686022 NR Description: 68409.m03800 nodulin-related protein
  misc_feature (2)..(129): NCBI GI NO: 7485467 NR Description: nodulin-like protein
  misc_feature (61)..(61): Xaa is any aa, unknown or other
  misc_feature (62)..(62): Xaa is any aa, unknown or other
  misc_feature (123)..(123): Xaa is any aa, unknown or other
PEGRIIIREEREWRKKKPIISHEEEADDKTSVRSQSVKRRKVASTGWSYTGHEYTSKKAGXXSRRKTRWSHMLTGLWIVSCSTAGRIASSPPARGMASVMKMAKRFEGKSASGALAAKRTQKXKHKKNK

SEQ ID NO: 11297 - protein, 58 aa, Triticum aestivum
  peptide (1)..(58): Ceres Seq. ID no. 15220129
  misc_feature (1)..(58): NCBI GI NO: 30686022 NR Description: 68409.m03800 nodulin-related protein
  misc_feature (1)..(58): NCBI GI NO: 7485467 NR Description: nodulin-like protein
  misc_feature (52)..(52): Xaa is any aa, unknown or other
MLTGLWIVSCSTAGRIASSPPARGMASVMKMAKRFEGKSASGALAAKRTQKXKHKKNK

SEQ ID NO: 11298 - DNA, 710 bp, Triticum aestivum
  misc_feature (1)..(710): Ceres Seq. ID no. 13661521
ttggaactagagcgaaaaccaaaagatgggtctaagagcactgcctcttcaacataatagtggattcatctccacgaccaaagtcccgatctcaagaacctcgcagagattaagccggaaccctagatgggtcgtggtgtcggccaagcaagagaaagatgaggagaagaagagggaagatgagacttcattgttcaccagactaacagatgcgttggatttcgcacaggttcggtcggagaaagacgccgagcttctctatgaggcccgtgaagccaccaaatctggtggcaagatgagcaaagaacagtatggggcgttgagaagaaaaatcggagggacatacaaggacttctttaaatcctacgttgaagtggatggagaatatgtggaggaaggatgggtggacaaaacatgtaagatatgcaaaaaggacacaaagggtgaggcaagacaagtggacaaggcagggagatatgctcatgtctcctgtcttcaaaacccctccaactcttctggaaatttcttcaccagactcttctcaagatgatcaatctcccatatcgtatacatgactctgtttgtttctgtttttttatagctaagtcattcttgcaattttgtgtatcttatagaaatcgaaattatacacatgccaaaacaaaaattatgtgtattgggatctttagaaacaaagacataacgatatc

SEQ ID NO: 11299 - protein, 174 aa, Triticum aestivum
  peptide (1)..(174): Ceres Seq. ID no. 13661522
  misc_feature (1)..(174): NCBI GI NO: 15228878 NR Description: expressed protein [Arabidopsis thaliana]
  misc_feature (1)..(174): NCBI GI NO: 34907850 NR Description: P0031D02.12
MGLRALPLQHNSGFISTTKVPISRTSQRLSRNPRWVVVSAKQEKDEEKKREDETSLFTRLTDALDFAQVRSEKDAELLYEAREATKSGGKMSKEQYGALRRKIGGTYKDFFKSYVEVDGEYVEEGWVDKTCKICKKDTKGEARQVDKAGRYAHVSCLQNPSNSSGNFFTRLFSR

SEQ ID NO: 11300 - DNA, 890 bp, Triticum aestivum
  misc_feature (1)..(890): Ceres Seq. ID no. 12784413
actttaaatacctccgctccccggcccgtagcgtagtagtacgcatcagccctcccttccctggcctcagtagttagccactagccactgaacactaccaggagggatcagaaggctaccatgaggcaaggagggggcggaggcgacggggtgagccccggcaatgtcccggtgtgctactacggcgcgggcgggcgagtctcggccaccctggagcggcgggtgcgcgccgccgaggtgctcctgcggtgcgcggcgtgcggcctggccgtgctcgccgccgccctcctcggcgccgaccgccagtcccgcaccttcttctcctgtgatcaggtgatggcgtacgtgataatcggggcggtggcggtggccatggaggcggcgctgctggggaagaccgggcaggtggagttccagtggatgaagacgtgcgagctataccagcggttctgcacgcaggcggggggcggcgttgcgtgcgccgtcgccgccagcgccaccatggtcgggatcgccctcgtctccgccttcaacctcttccgcctctacggccacggcaagggcagcagcaagtgaagccaaagccctcgctgcgtgcatgcgtgcatgcatggccggcctcttttaggttttaacgacaccgaatccaaatccagtccggggagagaaccgtacgtacgtagcatatgtagctaccgttgctctttttactatagtttgtttgatgttgacacgcatggtgtcagtcagcgttagccataagaagctctgtgggacaaaagctagaccggtttctctgtatatgatgtcaagtgatccacaaggtgtttgtagacagtaatactgctatgtgcgtaataaaagaggaacaagaaagcgatgtagtatcc

SEQ ID NO: 11301 - protein, 151 aa, Triticum aestivum
  peptide (1)..(151): Ceres Seq. ID no. 12784414
  misc_feature (35)..(125): Pfam Name: DUF588 Pfam Description: Domain of unknown function
  misc_feature (35)..(147): NCBI GI NO: 18414659 NR Description: Expressed protein; protein id: At4g16442
  misc_feature (35)..(147): NCBI GI NO: 18403948 NR Description: expressed protein; protein id: At2g35760
  misc_feature (35)..(147): NCBI GI NO: 21617945 NR Description: unknown [Arabidopsis thaliana]
  misc_feature (35)..(142): NCBI GI NO: 25408415 NR Description: hypothetical protein At2g35760
  misc_feature (70)..(143): NCBI GI NO: 18416627 NR Description: Expressed protein; protein id: At4g25830
  misc_feature (70)..(143): NCBI GI NO: 7485479 NR Description: hypothetical protein F14M19
  misc_feature (44)..(140): NCBI GI NO: 15231842 NR Description: unknown protein; protein id: At3g14380.1
  misc_feature (44)..(140): NCBI GI NO: 14030504 NR Description: salicylic acid-induced fragment 1 protein
MRQGGGGGDGVSPGNVPVCYYGAGGRVSATLERRVRAAEVLLRCAACGLAVLAAALLGADRQSRTFFSCDQVMAYVIIGAVAVAMEAALLGKTGQVEFQWMKTCELYQRFCTQAGGGVACAVAASATMVGIALVSAFNLFRLYGHGKGSSK

SEQ ID NO: 11302 - protein, 79 aa, Triticum aestivum
  peptide (1)..(79): Ceres Seq. ID no. 12784415
  misc_feature (1)..(53): Pfam Name: DUF588 Pfam Description: Domain of unknown function
  misc_feature (1)..(75): NCBI GI NO: 18414659 NR Description: Expressed protein; protein id: At4g16442
  misc_feature (1)..(75): NCBI GI NO: 18403948 NR Description: expressed protein; protein id: At2g35760
  misc_feature (1)..(75): NCBI GI NO: 21617945 NR Description: unknown [Arabidopsis thaliana]
  misc_feature (1)..(70): NCBI GI NO: 25408415 NR Description: hypothetical protein At2g35760
  misc_feature (1)..(71): NCBI GI NO: 18416627 NR Description: Expressed protein; protein id: At4g25830
  misc_feature (1)..(71): NCBI GI NO: 7485479 NR Description: hypothetical protein F14M19
  misc_feature (1)..(68): NCBI GI NO: 15231842 NR Description: unknown protein; protein id: At3g14380.1
  misc_feature (1)..(68): NCBI GI NO: 14030504 NR Description: salicylic acid-induced fragment 1 protein
MAYVIIGAVAVAMEAALLGKTGQVEFQWMKTCELYQRFCTQAGGGVACAVAASATMVGIALVSAFNLFRLYGHGKGSSK

SEQ ID NO: 11303 - DNA, 871 bp, Triticum aestivum
  misc_feature (1)..(871): Ceres Seq. ID no. 13662094
ctatctagtccaactgctccgccgcagatccgcgattgccagcagcaccatctccgaatcgcctcgctagggtttcctctccagcggcggccggctcgaccgtactccgttcgtgagcaatggctgcgaaagctgggaattctgtgggtggtgttcttccccatccccacgtgattggaaatgcatttgcccaacactactacaaaattctgaatgagtcaccagaggatgtccataagttctaccatgatcaaagtattcttggtcggaagccaaattctgatggtacattgacatctataaccacattgcgtgatatcaataaacactttgtatctacatacctcaagggatgttcgatggagatagacaatgtagattctcagccatcccacgagggcggtgtgctcgttttagttagtgggtccttcactgtccctgatgccatgaagcgtaggtttactcagtcgttcttccttgctccacaaaaaggaggctattttgttctgaatgatgtgcttagatacattccagttgagccagaaacaccacctgtcaaggttacagtgcttccgttgatggattatttctgggtatgatgatatcgccggtgaagtcatgaatcaatctacagaaagtacctccatcagcaatgaagtcatgaatgacagatagtcacgtctcggcagtgcactactagctttcttacagaatgcaagtttatccatctatagattatgtttgcttttgcaacaaatgggtgcgaaaagtttaacatttgcgaatgccttagcattgtacatacattatgacttgttaaaaggggagaaaacatcagacaagtatacaactgaatatatctattatatgc

SEQ ID NO: 11304 - protein, 159 aa, Triticum aestivum
  peptide (1)..(159): Ceres Seq. ID no. 13662095
  misc_feature (19)..(136): Pfam Name: NTF2 Pfam Description: Nuclear transport factor 2
  misc_feature (1)..(136): NCBI GI NO: 34394922 NR Description: putative Ras-GTPase activating protein SH3 domain-binding protein 2
  misc_feature (1)..(149): NCBI GI NO: 31126693 NR Description: putative GAP SH3 binding protein
  misc_feature (16)..(152): NCBI GI NO: 18394029 NR Description: NTF2-containing RNA-binding protein, putative
  misc_feature (14)..(137): NCBI GI NO: 30697452 NR Description: NTF2-containing RNA-binding protein, putative
  misc_feature (14)..(137): NCBI GI NO: 30697455 NR Description: NTF2-containing RNA-binding protein, putative
  misc_feature (1)..(137): NCBI GI NO: 30687772 NR Description: NTF2-containing RNA-binding protein, putative
  misc_feature (14)..(137): NCBI GI NO: 21553535 NR Description: ras-GTPase-activating protein SH3-domain bindingprotein-like
  misc_feature (11)..(152): NCBI GI NO: 21742151 NR Description: OSJNBa0069D17.2
  misc_feature (19)..(137): NCBI GI NO: 9294171 NR Description: RNA-binding protein-like [Arabidopsis thaliana]
  misc_feature (16)..(142): NCBI GI NO: 30678068 NR Description: NTF2-containing RNA-binding protein, putative
MAAKAGNSVGGVLPHPHVIGNAFAQHYYKILNESPEDVHKFYHDQSILGRKPNSDGTLTSITTLRDINKHFVSTYLKGCSMEIDNVDSQPSHEGGVLVLVSGSFTVPDAMKRRFTQSFFLAPQKGGYFVLNDVLRYIPVEPETPPVKVTVLPLMDYFWV

SEQ ID NO: 11305 - protein, 79 aa, Triticum aestivum
  peptide (1)..(79): Ceres Seq. ID no. 13662096
  misc_feature (1)..(56): Pfam Name: NTF2 Pfam Description: Nuclear transport factor 2
  misc_feature (1)..(56): NCBI GI NO: 34394922 NR Description: putative Ras-GTPase activating protein SH3 domain-binding protein 2
  misc_feature (1)..(69): NCBI GI NO: 31126693 NR Description: putative GAP SH3 binding protein
  misc_feature (1)..(72): NCBI GI NO: 18394029 NR Description: NTF2-containing RNA-binding protein, putative
  misc_feature (1)..(57): NCBI GI NO: 30697452 NR Description: NTF2-containing RNA-binding protein, putative
  misc_feature (1)..(57): NCBI GI NO: 30697455 NR Description: NTF2-containing RNA-binding protein, putative
  misc_feature (1)..(57): NCBI GI NO: 30687772 NR Description: NTF2-containing RNA-binding protein, putative
  misc_feature (1)..(57): NCBI GI NO: 21553535 NR Description: ras-GTPase-activating protein SH3-domain bindingprotein-like
  misc_feature (1)..(72): NCBI GI NO: 21742151 NR Description: OSJNBa0069D17.2
  misc_feature (1)..(57): NCBI GI NO: 9294171 NR Description: RNA-binding protein-like [Arabidopsis thaliana]
  misc_feature (1)..(62): NCBI GI NO: 30678068 NR Description: NTF2-containing RNA-binding protein, putative
MEIDNVDSQPSHEGGVLVLVSGSFTVPDAMKRRFTQSFFLAPQKGGYFVLNDVLRYIPVEPETPPVKVTVLPLMDYFWV

SEQ ID NO: 11306 - DNA, 1038 bp, Triticum aestivum
  misc_feature (1)..(1038): Ceres Seq. ID no. 13598160
acctaaaggcccaaccgcccaagcgacggccatagccgaaaaccctaacccgccgccacgccgccctcccgccacccgcgccggcgccgcttctccccgccgatacaggccaaaaccctcgcgcgggggcatcggaggcggaggagggatggcgtccaacggggacaacaagcggctgttccgcgtgcggcgcacggtgttgcagatgctgagagaccgcgggtacacggtgaaggacgaggaaatcaagctgtccctgtacgagttcgtcgaccgctacggagaccccgtccgccgggacgagatcgtcatccattgcgagaagcagggcgaccccaacgacaaggtcaacgtcttcttcctcgacgagtccaagaccggcctggccgtggtcaggagctgcgtcgagaagatgaagctggggaacgccaccaatggcatactcgtcctgcagaaggcgctgagcggcccggcccggaccgaggtcgcacagagcaagaagtaccacctcgaggtcttccaggaaggggagcttcttgtaaacattactgaacaccatctcgttccgaagcacgagctcctgagtgacgaggagaagaaggagctgctgcagaaatacactgcccacgaaactcagctcccgaggattcagctcacggatccggtagcaagataccacggcatgaagcgtgggcaggtggtgaagatcacccggcagagcgaagtcgccggagaatacgtgacctaccgctacgtcatctgatcctcaccgacgtatcaaggcctgaggttggtctgggatttaaaatggttccttcgtcgccaaacccctcccagtactcgaaagaagcattgctgtgtgtgtgtgtggaggaaccaaggtgctcgctgaagtggctcggtgcccctttgtttgtaacttgctggcaatttggcatgagtgtgttagctagaaaaataggtttctgtgtagatgtgctgtgttccgtgctgctaaataactcttgactgtatacgtgagatgcgttggtctgttcc

SEQ ID NO: 11307 - protein, 253 aa, Triticum aestivum
  peptide (1)..(253): Ceres Seq. ID no. 13598161
  misc_feature (180)..(253): Pfam Name: Pfam Description:  RNA polymerase Rpb5, C-terminal domain
  misc_feature (50)..(253): NCBI GI NO: 38344231 NR Description: OJ991113_30.8
  misc_feature (50)..(253): NCBI GI NO: 15228724 NR Description: DNA-directed RNA polymerase
  misc_feature (58)..(253): NCBI GI NO: 15242916 NR Description: eukaryotic rpb5 RNA polymerase subunit family
  misc_feature (58)..(253): NCBI GI NO: 39595790 NR Description: Hypothetical protein CBG12745
  misc_feature (58)..(253): NCBI GI NO: 17507947 NR Description: RNA polymerase Rpb5
  misc_feature (50)..(252): NCBI GI NO: 1173134 NR Description: DNA-directed RNA polymerase II 23 kDa polypeptide
  misc_feature (50)..(252): NCBI GI NO: 2135016 NR Description: DNA-directed RNA polymerase (EC 2
  misc_feature (50)..(252): NCBI GI NO: 28497750 NR Description: polymerase (RNA) II (DNA directed) polypeptide E
  misc_feature (50)..(252): NCBI GI NO: 14589951 NR Description: DNA directed RNA polymerase II polypeptide E
  misc_feature (50)..(252): NCBI GI NO: 2896797 NR Description: RPB5_Human [Homo sapiens]
PKGPTAQATAIAENPNPPPRRPPATRAGAASPRRYRPKPSRGGIGGGGGMASNGDNKRLFRVRRTVLQMLRDRGYTVKDEEIKLSLYEFVDRYGDPVRRDEIVIHCEKQGDPNDKVNVFFLDESKTGLAVVRSCVEKMKLGNATNGILVLQKALSGPARTEVAQSKKYHLEVFQEGELLVNITEHHLVPKHELLSDEEKKELLQKYTAHETQLPRIQLTDPVARYHGMKRGQVVKITRQSEVAGEYVTYRYVI

SEQ ID NO: 11308 - protein, 204 aa, Triticum aestivum
  peptide (1)..(204): Ceres Seq. ID no. 13598162
  misc_feature (131)..(204): Pfam Name: Pfam Description:  RNA polymerase Rpb5, C-terminal domain
  misc_feature (1)..(204): NCBI GI NO: 38344231 NR Description: OJ991113_30.8
  misc_feature (1)..(204): NCBI GI NO: 15228724 NR Description: DNA-directed RNA polymerase
  misc_feature (9)..(204): NCBI GI NO: 15242916 NR Description: eukaryotic rpb5 RNA polymerase subunit family
  misc_feature (9)..(204): NCBI GI NO: 39595790 NR Description: Hypothetical protein CBG12745
  misc_feature (9)..(204): NCBI GI NO: 17507947 NR Description: RNA polymerase Rpb5
  misc_feature (1)..(203): NCBI GI NO: 1173134 NR Description: DNA-directed RNA polymerase II 23 kDa polypeptide
  misc_feature (1)..(203): NCBI GI NO: 2135016 NR Description: DNA-directed RNA polymerase (EC 2
  misc_feature (1)..(203): NCBI GI NO: 28497750 NR Description: polymerase (RNA) II (DNA directed) polypeptide E
  misc_feature (1)..(203): NCBI GI NO: 14589951 NR Description: DNA directed RNA polymerase II polypeptide E
  misc_feature (1)..(203): NCBI GI NO: 2896797 NR Description: RPB5_Human [Homo sapiens]
MASNGDNKRLFRVRRTVLQMLRDRGYTVKDEEIKLSLYEFVDRYGDPVRRDEIVIHCEKQGDPNDKVNVFFLDESKTGLAVVRSCVEKMKLGNATNGILVLQKALSGPARTEVAQSKKYHLEVFQEGELLVNITEHHLVPKHELLSDEEKKELLQKYTAHETQLPRIQLTDPVARYHGMKRGQVVKITRQSEVAGEYVTYRYVI

SEQ ID NO: 11309 - protein, 185 aa, Triticum aestivum
  peptide (1)..(185): Ceres Seq. ID no. 13598163
  misc_feature (112)..(185): Pfam Name: Pfam Description:  RNA polymerase Rpb5, C-terminal domain
  misc_feature (1)..(185): NCBI GI NO: 38344231 NR Description: OJ991113_30.8
  misc_feature (1)..(185): NCBI GI NO: 15228724 NR Description: DNA-directed RNA polymerase
  misc_feature (1)..(185): NCBI GI NO: 15242916 NR Description: eukaryotic rpb5 RNA polymerase subunit family
  misc_feature (1)..(185): NCBI GI NO: 39595790 NR Description: Hypothetical protein CBG12745
  misc_feature (1)..(185): NCBI GI NO: 17507947 NR Description: RNA polymerase Rpb5
  misc_feature (1)..(184): NCBI GI NO: 1173134 NR Description: DNA-directed RNA polymerase II 23 kDa polypeptide
  misc_feature (1)..(184): NCBI GI NO: 2135016 NR Description: DNA-directed RNA polymerase (EC 2
  misc_feature (1)..(184): NCBI GI NO: 28497750 NR Description: polymerase (RNA) II (DNA directed) polypeptide E
  misc_feature (1)..(184): NCBI GI NO: 14589951 NR Description: DNA directed RNA polymerase II polypeptide E
  misc_feature (1)..(184): NCBI GI NO: 2896797 NR Description: RPB5_Human [Homo sapiens]
MLRDRGYTVKDEEIKLSLYEFVDRYGDPVRRDEIVIHCEKQGDPNDKVNVFFLDESKTGLAVVRSCVEKMKLGNATNGILVLQKALSGPARTEVAQSKKYHLEVFQEGELLVNITEHHLVPKHELLSDEEKKELLQKYTAHETQLPRIQLTDPVARYHGMKRGQVVKITRQSEVAGEYVTYRYVI

SEQ ID NO: 11310 - DNA, 555 bp, Triticum aestivum
  misc_feature (1)..(555): Ceres Seq. ID no. 13661526
aacagccagccagcacaagctcaacgagccacgctagcgtttgagagaacaaaaacagtccaccgacgtacgatggcgccgagcaccttcccgctcgcgctcctggccgtgtccctcgttctcctggtggtcggcggcctcgggccggcggcggaggcacagccgccggggaggtgcgtgccgcagctgaaccggctgctggcgtgccgcgcgtacctggtgcccggcgcggccgaccccagcgccgactgctgcagcgcgctgaactccatctcgcgcgactgcgcgtgcagcaccatgggcatcatcaacagcctcccctcccgctgcaacatcggacaagtcaactgctcggcttgaggcggaacgaagaaacgatgcgagtcacagagtgactaataatgaaggtggtcatttctgccgttgttgcggcatgtctgcctcttcgccgccgtcttagttttcgtttgtccagtctgtcgtgtcctgctgctgctgtcgatctcgacacgttaataaaatggacgatttgaggcacggcctctcactttaacc

SEQ ID NO: 11311 - protein, 119 aa, Triticum aestivum
  peptide (1)..(119): Ceres Seq. ID no. 13661527
  misc_feature (59)..(117): Pfam Name: Pfam Description:  Protease inhibitor/seed storage/LTP family
  misc_feature (28)..(119): NCBI GI NO: 6689676 NR Description: LTP-like protein; anther specific protein
  misc_feature (27)..(117): NCBI GI NO: 6137315 NR Description: Anther-specific protein MZm3-3 precursor
  misc_feature (25)..(117): NCBI GI NO: 6016542 NR Description: MEN-8 protein precursor
  misc_feature (28)..(119): NCBI GI NO: 5902675 NR Description: PROTEIN 108 PRECURSOR
  misc_feature (39)..(117): NCBI GI NO: 6137299 NR Description: YY1 protein precursor
  misc_feature (29)..(118): NCBI GI NO: 15242288 NR Description: putative protein; protein id: At5g52160
  misc_feature (33)..(119): NCBI GI NO: 6016503 NR Description: LIM1 PROTEIN PRECURSOR
  misc_feature (33)..(119): NCBI GI NO: 452592 NR Description: ORF [Lilium longiflorum]
  misc_feature (33)..(119): NCBI GI NO: 6016504 NR Description: LIM2 PROTEIN PRECURSOR
  misc_feature (33)..(119): NCBI GI NO: 6016523 NR Description: M7 protein precursor (LHM7)
NSQPAQAQRATLAFERTKTVHRRTMAPSTFPLALLAVSLVLLVVGGLGPAAEAQPPGRCVPQLNRLLACRAYLVPGAADPSADCCSALNSISRDCACSTMGIINSLPSRCNIGQVNCSA

SEQ ID NO: 11312 - protein, 95 aa, Triticum aestivum
  peptide (1)..(95): Ceres Seq. ID no. 13661528
  misc_feature (35)..(93): Pfam Name: Pfam Description:  Protease inhibitor/seed storage/LTP family
  misc_feature (4)..(95): NCBI GI NO: 6689676 NR Description: LTP-like protein; anther specific protein
  misc_feature (3)..(93): NCBI GI NO: 6137315 NR Description: Anther-specific protein MZm3-3 precursor
  misc_feature (1)..(93): NCBI GI NO: 6016542 NR Description: MEN-8 protein precursor
  misc_feature (4)..(95): NCBI GI NO: 5902675 NR Description: PROTEIN 108 PRECURSOR
  misc_feature (15)..(93): NCBI GI NO: 6137299 NR Description: YY1 protein precursor
  misc_feature (5)..(94): NCBI GI NO: 15242288 NR Description: putative protein; protein id: At5g52160
  misc_feature (9)..(95): NCBI GI NO: 6016503 NR Description: LIM1 PROTEIN PRECURSOR
  misc_feature (9)..(95): NCBI GI NO: 452592 NR Description: ORF [Lilium longiflorum]
  misc_feature (9)..(95): NCBI GI NO: 6016504 NR Description: LIM2 PROTEIN PRECURSOR
  misc_feature (9)..(95): NCBI GI NO: 6016523 NR Description: M7 protein precursor (LHM7)
MAPSTFPLALLAVSLVLLVVGGLGPAAEAQPPGRCVPQLNRLLACRAYLVPGAADPSADCCSALNSISRDCACSTMGIINSLPSRCNIGQVNCSA

SEQ ID NO: 11313 - DNA, 1042 bp, Triticum aestivum
  misc_feature (1)..(1042): Ceres Seq. ID no. 12784416
acgcctcaaagttaatatcgcggcatcgggtcctgcgctgcgcgcctgctgctgctccctcgccctcgcctccgctgccgtcgcgcgagatcaaccccgccgccatggctggagaagctgatgggaagacctaccaggtatcaaggatgccccctgctgctctcaacgagcgcatcctttcttccatgtctcaaaagcacgttgctgctcacccatggcatgacctggagataggtccaggggcccctgcagttttcaactgtgtggttgagattcctagaggcagcaaggttaagtatgagttggacaaagcaactggtcttatcaaggttgatcgtgttctgtactcctcagttgtgtacccacacaactatggcttcattccacgcacactctgtgaggataatgacccgatggatgtccttgtcctgatgcaggaacaagttgttcctggttgcttcctgcgtgcccgtgctattgggcttatgcctatgattgatcagggtgagaaagatgacaagatcatagctgtctgtgctgatgatcctgagtaccgtcacttcagagacatcagtgaacttcccccgcatcgcctacaggaaatccgtcgcttctttgaagactacaagaagaatgaaaacaaggaggttgcagtgaatgatttcctcccagcagaagatgccatcaacgcaatcaagtactcgatggacctctacggttcgtacatcatggagggcttaaggaagtgatctccagttggcggactgcggatgctacgcgatccgccctacggcttatcaatagtacgacaaacatctatgttaacatgatgatcgaaaaccatcagtctgttggggatctatatataccttctgtccatgctgagtcaagcatgggtacattttccttccgtatatgccatgtcaggtccaagtatttgacctcttgctggaaccttttttgtcaaaccgtctcttgacagagcggctgcttaataggaaatcagcgttacgcgaaggcgcgtatgcgtgcctccagtcct

SEQ ID NO: 11314 - protein, 248 aa, Triticum aestivum
  peptide (1)..(248): Ceres Seq. ID no. 12784417
  misc_feature (86)..(240): Pfam Name: Pfam Description:  Inorganic pyrophosphatase
  misc_feature (35)..(248): NCBI GI NO: 3885882 NR Description: inorganic pyrophosphatase [Oryza sativa]
  misc_feature (38)..(248): NCBI GI NO: 15231849 NR Description: inorganic pyrophosphatase -like protein
  misc_feature (42)..(248): NCBI GI NO: 15223288 NR Description: soluble inorganic pyrophosphatase, putative
  misc_feature (38)..(248): NCBI GI NO: 21593570 NR Description: inorganic pyrophosphatase-like protein
  misc_feature (35)..(248): NCBI GI NO: 4033421 NR Description: Soluble inorganic pyrophosphatase
  misc_feature (35)..(248): NCBI GI NO: 15226453 NR Description: putative inorganic pyrophosphatase
  misc_feature (35)..(248): NCBI GI NO: 2500047 NR Description: Soluble inorganic pyrophosphatase
  misc_feature (45)..(248): NCBI GI NO: 38345829 NR Description: OSJNBa0070M12.12
  misc_feature (35)..(248): NCBI GI NO: 26451240 NR Description: putative inorganic pyrophosphatase
  misc_feature (54)..(248): NCBI GI NO: 5669924 NR Description: soluble inorganic pyrophosphatase
ASKLISRHRVLRCAPAAAPSPSPPLPSREINPAAMAGEADGKTYQVSRMPPAALNERILSSMSQKHVAAHPWHDLEIGPGAPAVFNCVVEIPRGSKVKYELDKATGLIKVDRVLYSSVVYPHNYGFIPRTLCEDNDPMDVLVLMQEQVVPGCFLRARAIGLMPMIDQGEKDDKIIAVCADDPEYRHFRDISELPPHRLQEIRRFFEDYKKNENKEVAVNDFLPAEDAINAIKYSMDLYGSYIMEGLRK

SEQ ID NO: 11315 - protein, 214 aa, Triticum aestivum
  peptide (1)..(214): Ceres Seq. ID no. 12784418
  misc_feature (52)..(206): Pfam Name: Pfam Description:  Inorganic pyrophosphatase
  misc_feature (1)..(214): NCBI GI NO: 3885882 NR Description: inorganic pyrophosphatase [Oryza sativa]
  misc_feature (4)..(214): NCBI GI NO: 15231849 NR Description: inorganic pyrophosphatase -like protein
  misc_feature (8)..(214): NCBI GI NO: 15223288 NR Description: soluble inorganic pyrophosphatase, putative
  misc_feature (4)..(214): NCBI GI NO: 21593570 NR Description: inorganic pyrophosphatase-like protein
  misc_feature (1)..(214): NCBI GI NO: 4033421 NR Description: Soluble inorganic pyrophosphatase
  misc_feature (1)..(214): NCBI GI NO: 15226453 NR Description: putative inorganic pyrophosphatase
  misc_feature (1)..(214): NCBI GI NO: 2500047 NR Description: Soluble inorganic pyrophosphatase
  misc_feature (11)..(214): NCBI GI NO: 38345829 NR Description: OSJNBa0070M12.12
  misc_feature (1)..(214): NCBI GI NO: 26451240 NR Description: putative inorganic pyrophosphatase
  misc_feature (20)..(214): NCBI GI NO: 5669924 NR Description: soluble inorganic pyrophosphatase
MAGEADGKTYQVSRMPPAALNERILSSMSQKHVAAHPWHDLEIGPGAPAVFNCVVEIPRGSKVKYELDKATGLIKVDRVLYSSVVYPHNYGFIPRTLCEDNDPMDVLVLMQEQVVPGCFLRARAIGLMPMIDQGEKDDKIIAVCADDPEYRHFRDISELPPHRLQEIRRFFEDYKKNENKEVAVNDFLPAEDAINAIKYSMDLYGSYIMEGLRK

SEQ ID NO: 11316 - protein, 200 aa, Triticum aestivum
  peptide (1)..(200): Ceres Seq. ID no. 12784419
  misc_feature (38)..(192): Pfam Name: Pfam Description:  Inorganic pyrophosphatase
  misc_feature (1)..(200): NCBI GI NO: 3885882 NR Description: inorganic pyrophosphatase [Oryza sativa]
  misc_feature (1)..(200): NCBI GI NO: 15231849 NR Description: inorganic pyrophosphatase -like protein
  misc_feature (1)..(200): NCBI GI NO: 15223288 NR Description: soluble inorganic pyrophosphatase, putative
  misc_feature (1)..(200): NCBI GI NO: 21593570 NR Description: inorganic pyrophosphatase-like protein
  misc_feature (1)..(200): NCBI GI NO: 4033421 NR Description: Soluble inorganic pyrophosphatase
  misc_feature (1)..(200): NCBI GI NO: 15226453 NR Description: putative inorganic pyrophosphatase
  misc_feature (1)..(200): NCBI GI NO: 2500047 NR Description: Soluble inorganic pyrophosphatase
  misc_feature (1)..(200): NCBI GI NO: 38345829 NR Description: OSJNBa0070M12.12
  misc_feature (1)..(200): NCBI GI NO: 26451240 NR Description: putative inorganic pyrophosphatase
  misc_feature (6)..(200): NCBI GI NO: 5669924 NR Description: soluble inorganic pyrophosphatase
MPPAALNERILSSMSQKHVAAHPWHDLEIGPGAPAVFNCVVEIPRGSKVKYELDKATGLIKVDRVLYSSVVYPHNYGFIPRTLCEDNDPMDVLVLMQEQVVPGCFLRARAIGLMPMIDQGEKDDKIIAVCADDPEYRHFRDISELPPHRLQEIRRFFEDYKKNENKEVAVNDFLPAEDAINAIKYSMDLYGSYIMEGLRK

SEQ ID NO: 11317 - DNA, 924 bp, Triticum aestivum
  misc_feature (1)..(924): Ceres Seq. ID no. 13664294
atcatttgctagggttcgaatcagattatctgcaacaacaaaaaaaaatggcgttggctggtcgtatcagatccgggatctccttatccttcttcaagaccttctcctccgcgagatctcactcacgtggagcgccgcttatccccgcgttgagagattatgctacagcttcggctcaggaaactcggaatgttaaggtgcctgtggctttagttggtgaatctgggaactttgcctcgtggctgtatattgcagctgtgaaaatgaactccttggagaagattgagtctgatctctctgagctggttgaggctatgaagacaagtcctactttttcgcagtttactaaggatccctctgttcctagagagacgagactcgctgctattgtggatgtttgtgataaagccaagtttgcagaacccaccaagaacttcctctctttgttagctgagaatgggaagctgaagaatttagacgtgattgtgaagaaattcatgcagctgacaacagcacataggggagacgtcaaggttttggttaccacagtcatgccacttccccctgctgaggagaaggaactgaaggagacactccaagagataatcggagaagggaagaaagtaactgtggaacaaaagattgatccgagtatctatggagggctaatagtagagttccaacaaaaggtgttggacatgtctatcaggacaagggcacagcagatggagaggctcctccgtgaacctgttgacctcagcaacctttgaagacttcccctaaaagaaacgtgtttgtgatgctaccttcaattaacaaataaatatgagaaacaacatgacacttgtgtcgtttttttgaaaatttatcatttcatttaacagttgttgttttgattcgaaataagcttttttgaagccatcg

SEQ ID NO: 11318 - protein, 255 aa, Triticum aestivum
  peptide (1)..(255): Ceres Seq. ID no. 15220742
  misc_feature (75)..(246): Pfam Name: OSCP Pfam Description: ATP synthase delta
  misc_feature (18)..(255): NCBI GI NO: 14190495 NR Description: AT5g13450/T22N19_100 [Arabidopsis thaliana]
  misc_feature (18)..(255): NCBI GI NO: 15240628 NR Description: delta subunit of mitochondrial F1-ATPase
  misc_feature (18)..(255): NCBI GI NO: 1655482 NR Description: delta subunit of mitochondrial F1-ATPase
  misc_feature (16)..(251): NCBI GI NO: 114682 NR Description: ATP synthase delta chain, mitochondrial precursor
  misc_feature (16)..(251): NCBI GI NO: 4774163 NR Description: F1-ATP synthase delta subunit [Ipomoea batatas]
  misc_feature (16)..(252): NCBI GI NO: 23507246 NR Description: oligomycin sensitivity conferring protein
  misc_feature (16)..(252): NCBI GI NO: 23507248 NR Description: oligomycin sensitivity conferring protein
  misc_feature (50)..(250): NCBI GI NO: 4502303 NR Description: ATP synthase
  misc_feature (64)..(248): NCBI GI NO: 913531 NR Description: H+-ATPase subunit
  misc_feature (50)..(248): NCBI GI NO: 27806307 NR Description: ATP synthase
HLLGFESDYLQQQKKMALAGRIRSGISLSFFKTFSSARSHSRGAPLIPALRDYATASAQETRNVKVPVALVGESGNFASWLYIAAVKMNSLEKIESDLSELVEAMKTSPTFSQFTKDPSVPRETRLAAIVDVCDKAKFAEPTKNFLSLLAENGKLKNLDVIVKKFMQLTTAHRGDVKVLVTTVMPLPPAEEKELKETLQEIIGEGKKVTVEQKIDPSIYGGLIVEFQQKVLDMSIRTRAQQMERLLREPVDLSNL

SEQ ID NO: 11319 - protein, 240 aa, Triticum aestivum
  peptide (1)..(240): Ceres Seq. ID no. 15220743
  misc_feature (60)..(231): Pfam Name: OSCP Pfam Description: ATP synthase delta
  misc_feature (3)..(240): NCBI GI NO: 14190495 NR Description: AT5g13450/T22N19_100 [Arabidopsis thaliana]
  misc_feature (3)..(240): NCBI GI NO: 15240628 NR Description: delta subunit of mitochondrial F1-ATPase
  misc_feature (3)..(240): NCBI GI NO: 1655482 NR Description: delta subunit of mitochondrial F1-ATPase
  misc_feature (1)..(236): NCBI GI NO: 114682 NR Description: ATP synthase delta chain, mitochondrial precursor
  misc_feature (1)..(236): NCBI GI NO: 4774163 NR Description: F1-ATP synthase delta subunit [Ipomoea batatas]
  misc_feature (1)..(237): NCBI GI NO: 23507246 NR Description: oligomycin sensitivity conferring protein
  misc_feature (1)..(237): NCBI GI NO: 23507248 NR Description: oligomycin sensitivity conferring protein
  misc_feature (35)..(235): NCBI GI NO: 4502303 NR Description: ATP synthase
  misc_feature (49)..(233): NCBI GI NO: 913531 NR Description: H+-ATPase subunit
  misc_feature (35)..(233): NCBI GI NO: 27806307 NR Description: ATP synthase
MALAGRIRSGISLSFFKTFSSARSHSRGAPLIPALRDYATASAQETRNVKVPVALVGESGNFASWLYIAAVKMNSLEKIESDLSELVEAMKTSPTFSQFTKDPSVPRETRLAAIVDVCDKAKFAEPTKNFLSLLAENGKLKNLDVIVKKFMQLTTAHRGDVKVLVTTVMPLPPAEEKELKETLQEIIGEGKKVTVEQKIDPSIYGGLIVEFQQKVLDMSIRTRAQQMERLLREPVDLSNL

SEQ ID NO: 11320 - protein, 168 aa, Triticum aestivum
  peptide (1)..(168): Ceres Seq. ID no. 15220744
  misc_feature (1)..(159): Pfam Name: OSCP Pfam Description: ATP synthase delta
  misc_feature (1)..(168): NCBI GI NO: 14190495 NR Description: AT5g13450/T22N19_100 [Arabidopsis thaliana]
  misc_feature (1)..(168): NCBI GI NO: 15240628 NR Description: delta subunit of mitochondrial F1-ATPase
  misc_feature (1)..(168): NCBI GI NO: 1655482 NR Description: delta subunit of mitochondrial F1-ATPase
  misc_feature (1)..(164): NCBI GI NO: 114682 NR Description: ATP synthase delta chain, mitochondrial precursor
  misc_feature (1)..(164): NCBI GI NO: 4774163 NR Description: F1-ATP synthase delta subunit [Ipomoea batatas]
  misc_feature (1)..(165): NCBI GI NO: 23507246 NR Description: oligomycin sensitivity conferring protein
  misc_feature (1)..(165): NCBI GI NO: 23507248 NR Description: oligomycin sensitivity conferring protein
  misc_feature (1)..(163): NCBI GI NO: 4502303 NR Description: ATP synthase
  misc_feature (1)..(161): NCBI GI NO: 913531 NR Description: H+-ATPase subunit
  misc_feature (1)..(161): NCBI GI NO: 27806307 NR Description: ATP synthase
MNSLEKIESDLSELVEAMKTSPTFSQFTKDPSVPRETRLAAIVDVCDKAKFAEPTKNFLSLLAENGKLKNLDVIVKKFMQLTTAHRGDVKVLVTTVMPLPPAEEKELKETLQEIIGEGKKVTVEQKIDPSIYGGLIVEFQQKVLDMSIRTRAQQMERLLREPVDLSNL

SEQ ID NO: 11321 - DNA, 656 bp, Triticum aestivum
  misc_feature (1)..(656): Ceres Seq. ID no. 14302392
caaatctcccagtcccttcctcgctcttctctctagctattggatcggtgactctgcttctgttagtttcagctttgagtcgctgctacaatgtcttgcattaagagagttgatagatccgcgtacgttgccatggcaccagaagctccgttcatggctgccggaacgatggccggagccgttgatctgtctttcagctcatcctccaacctcgagatctttgaactcgattttaactccgaagaccacgagatcaaactattaggtcagtgctcaagctcagagaggtttactcgactcgcttggggaagttatggacccgggtccgaggaatctccttatggtctcatcgctggtggcctcgtcgacgggaatatcggtttatggaatccaatcactctgattcggtgagttttctctttctctataaccctaattgttagggtttatatatgaaaaagtgtttccgtaatggacaagtaaagtatttgattttctttttgtttatttcagttctgagtgtaatgaaagtgcgcacgttagacatctttcaaaacataaagggccagtgagttgtaatctctttaacagaatctaatgttgggctaggttcttttcgatgcttacatatatatatatatattctcttgtatgtt

SEQ ID NO: 11322 - protein, 106 aa, Triticum aestivum
  peptide (1)..(106): Ceres Seq. ID no. 14302393
  misc_feature (1)..(103): NCBI GI NO: 25518075 NR Description: F6A14.8 protein - Arabidopsis thaliana
  misc_feature (1)..(103): NCBI GI NO: 15221878 NR Description: transducin / WD-40 repeat protein family
  misc_feature (1)..(105): NCBI GI NO: 11357943 NR Description: hypothetical protein MAA21
  misc_feature (1)..(105): NCBI GI NO: 30695804 NR Description: conserved hypothetical protein
  misc_feature (1)..(105): NCBI GI NO: 30695806 NR Description: conserved hypothetical protein
  misc_feature (4)..(100): NCBI GI NO: 27882028 NR Description: SEC31B-1 protein [Homo sapiens]
  misc_feature (4)..(100): NCBI GI NO: 38149910 NR Description: S
  misc_feature (4)..(105): NCBI GI NO: 28839044 NR Description: Similar to yeast Sec31p homolog [Homo sapiens]
  misc_feature (4)..(100): NCBI GI NO: 38085179 NR Description: similar to secretory pathway component Sec31B-1
  misc_feature (4)..(105): NCBI GI NO: 7705258 NR Description: yeast Sec31p homolog [Homo sapiens]
MSCIKRVDRSAYVAMAPEAPFMAAGTMAGAVDLSFSSSSNLEIFELDFNSEDHEIKLLGQCSSSERFTRLAWGSYGPGSEESPYGLIAGGLVDGNIGLWNPITLIR

SEQ ID NO: 11323 - protein, 92 aa, Triticum aestivum
  peptide (1)..(92): Ceres Seq. ID no. 14302394
  misc_feature (1)..(89): NCBI GI NO: 25518075 NR Description: F6A14.8 protein - Arabidopsis thaliana
  misc_feature (1)..(89): NCBI GI NO: 15221878 NR Description: transducin / WD-40 repeat protein family
  misc_feature (1)..(91): NCBI GI NO: 11357943 NR Description: hypothetical protein MAA21
  misc_feature (1)..(91): NCBI GI NO: 30695804 NR Description: conserved hypothetical protein
  misc_feature (1)..(91): NCBI GI NO: 30695806 NR Description: conserved hypothetical protein
  misc_feature (1)..(86): NCBI GI NO: 27882028 NR Description: SEC31B-1 protein [Homo sapiens]
  misc_feature (1)..(86): NCBI GI NO: 38149910 NR Description: S
  misc_feature (1)..(91): NCBI GI NO: 28839044 NR Description: Similar to yeast Sec31p homolog [Homo sapiens]
  misc_feature (1)..(86): NCBI GI NO: 38085179 NR Description: similar to secretory pathway component Sec31B-1
  misc_feature (1)..(91): NCBI GI NO: 7705258 NR Description: yeast Sec31p homolog [Homo sapiens]
MAPEAPFMAAGTMAGAVDLSFSSSSNLEIFELDFNSEDHEIKLLGQCSSSERFTRLAWGSYGPGSEESPYGLIAGGLVDGNIGLWNPITLIR

SEQ ID NO: 11324 - protein, 87 aa, Triticum aestivum
  peptide (1)..(87): Ceres Seq. ID no. 14302395
KSPSPFLALLSSYWIGDSASVSFSFESLLQCLALRELIDPRTLPWHQKLRSWLPERWPEPLICLSAHPPTSRSLNSILTPKTTRSNY

SEQ ID NO: 11325 - DNA, 1065 bp, Triticum aestivum
  misc_feature (1)..(1065): Ceres Seq. ID no. 15226909
gagaaacttcgacgtaattattgcaatttagcccttaaattctgcattgctatcagataaagcatcatattttcctttgtacagaattatccttccattttattatctgagctaagaatgggaagcagcgaggagatgccagtggtgctcatcacgggatgctcacaaggaggaatcggcaacgcgctggctcgtgagttctctgcgaaaggttgtcgtgtggtggcgacgagtcgatcgcagagcacgatggctgacttggagaaagatcccaagtttttcgtacaaaagctcgatgttcagtcagaacataacgtgaataaagtcttgtcggaagttatcgataagttcggtcagatcgatgttctggtcaataatgccggagttcaatgcatcggaccactcgcggagattccaattcaggccatggagcacaccttcaacaccaatgtgttcggttccatgaggatgactcaagctgttgtacctcacatggcgtcaaagaagaaaggaaagattgtgaacataggaagtatcagcacaatggcacctggaccatgggcaggggtttacactgcatcaaaagctgctcttcatgctcttacagacacattaaggttggagcttaggccatttgggattgatatgatcaacattgtcccaggaggtattcaatctaacatatccgattcagggatatctagcttcaacaagttacctgagctgaaactatacaagccgttccaagaagctatccgtgaaagggcgtttttgtcgcaaaacgttaagccaatacctgcagagacgtttgcgaaggaggtggtgtcggtggtcctgaaggaacacccaccggcttggtactctacaggaaggttatccactgtcgcggcgatcatgcaccatttgcccatatccgtcaaagattttctcctgactaagagcttcatgaaaagaaactgtttgaatgtatctaagaagtaagaactaaccatgaaacaagctagatacagaagccacatagtaatgggctcttaagcccaacacggtccagaataagttcccagt

SEQ ID NO: 11326 - protein, 287 aa, Triticum aestivum
  peptide (1)..(287): Ceres Seq. ID no. 15226910
  misc_feature (1)..(279): NCBI GI NO: 18424923 NR Description: short-chain dehydrogenase/reductase family protein
  misc_feature (1)..(287): NCBI GI NO: 10178182 NR Description: contains similarity todehydrogenase~gene_id:MQN23
  misc_feature (1)..(279): NCBI GI NO: 30682984 NR Description: short-chain dehydrogenase/reductase family protein
  misc_feature (1)..(279): NCBI GI NO: 26453106 NR Description: unknown protein [Arabidopsis thaliana]
  misc_feature (107)..(279): NCBI GI NO: 11358313 NR Description: hypothetical protein T31P16
  misc_feature (1)..(115): NCBI GI NO: 11358313 NR Description: hypothetical protein T31P16
  misc_feature (45)..(279): NCBI GI NO: 26450169 NR Description: unknown protein [Arabidopsis thaliana]
  misc_feature (45)..(278): NCBI GI NO: 38567881 NR Description: OSJNBa0036B21.7
  misc_feature (7)..(282): NCBI GI NO: 23058177 NR Description: COG1028: Dehydrogenases with differentspecificities
  misc_feature (7)..(276): NCBI GI NO: 28868436 NR Description: oxidoreductase
MGSSEEMPVVLITGCSQGGIGNALAREFSAKGCRVVATSRSQSTMADLEKDPKFFVQKLDVQSEHNVNKVLSEVIDKFGQIDVLVNNAGVQCIGPLAEIPIQAMEHTFNTNVFGSMRMTQAVVPHMASKKKGKIVNIGSISTMAPGPWAGVYTASKAALHALTDTLRLELRPFGIDMINIVPGGIQSNISDSGISSFNKLPELKLYKPFQEAIRERAFLSQNVKPIPAETFAKEVVSVVLKEHPPAWYSTGRLSTVAAIMHHLPISVKDFLLTKSFMKRNCLNVSKK

SEQ ID NO: 11327 - protein, 281 aa, Triticum aestivum
  peptide (1)..(281): Ceres Seq. ID no. 15226911
  misc_feature (1)..(273): NCBI GI NO: 18424923 NR Description: short-chain dehydrogenase/reductase family protein
  misc_feature (1)..(281): NCBI GI NO: 10178182 NR Description: contains similarity todehydrogenase~gene_id:MQN23
  misc_feature (1)..(273): NCBI GI NO: 30682984 NR Description: short-chain dehydrogenase/reductase family protein
  misc_feature (1)..(273): NCBI GI NO: 26453106 NR Description: unknown protein [Arabidopsis thaliana]
  misc_feature (101)..(273): NCBI GI NO: 11358313 NR Description: hypothetical protein T31P16
  misc_feature (1)..(109): NCBI GI NO: 11358313 NR Description: hypothetical protein T31P16
  misc_feature (39)..(273): NCBI GI NO: 26450169 NR Description: unknown protein [Arabidopsis thaliana]
  misc_feature (39)..(272): NCBI GI NO: 38567881 NR Description: OSJNBa0036B21.7
  misc_feature (1)..(276): NCBI GI NO: 23058177 NR Description: COG1028: Dehydrogenases with differentspecificities
  misc_feature (1)..(270): NCBI GI NO: 28868436 NR Description: oxidoreductase
MPVVLITGCSQGGIGNALAREFSAKGCRVVATSRSQSTMADLEKDPKFFVQKLDVQSEHNVNKVLSEVIDKFGQIDVLVNNAGVQCIGPLAEIPIQAMEHTFNTNVFGSMRMTQAVVPHMASKKKGKIVNIGSISTMAPGPWAGVYTASKAALHALTDTLRLELRPFGIDMINIVPGGIQSNISDSGISSFNKLPELKLYKPFQEAIRERAFLSQNVKPIPAETFAKEVVSVVLKEHPPAWYSTGRLSTVAAIMHHLPISVKDFLLTKSFMKRNCLNVSKK

SEQ ID NO: 11328 - protein, 243 aa, Triticum aestivum
  peptide (1)..(243): Ceres Seq. ID no. 15226912
  misc_feature (1)..(235): NCBI GI NO: 18424923 NR Description: short-chain dehydrogenase/reductase family protein
  misc_feature (1)..(243): NCBI GI NO: 10178182 NR Description: contains similarity todehydrogenase~gene_id:MQN23
  misc_feature (1)..(235): NCBI GI NO: 30682984 NR Description: short-chain dehydrogenase/reductase family protein
  misc_feature (1)..(235): NCBI GI NO: 26453106 NR Description: unknown protein [Arabidopsis thaliana]
  misc_feature (63)..(235): NCBI GI NO: 11358313 NR Description: hypothetical protein T31P16
  misc_feature (1)..(71): NCBI GI NO: 11358313 NR Description: hypothetical protein T31P16
  misc_feature (1)..(235): NCBI GI NO: 26450169 NR Description: unknown protein [Arabidopsis thaliana]
  misc_feature (1)..(234): NCBI GI NO: 38567881 NR Description: OSJNBa0036B21.7
  misc_feature (1)..(238): NCBI GI NO: 23058177 NR Description: COG1028: Dehydrogenases with differentspecificities
  misc_feature (1)..(232): NCBI GI NO: 28868436 NR Description: oxidoreductase
MADLEKDPKFFVQKLDVQSEHNVNKVLSEVIDKFGQIDVLVNNAGVQCIGPLAEIPIQAMEHTFNTNVFGSMRMTQAVVPHMASKKKGKIVNIGSISTMAPGPWAGVYTASKAALHALTDTLRLELRPFGIDMINIVPGGIQSNISDSGISSFNKLPELKLYKPFQEAIRERAFLSQNVKPIPAETFAKEVVSVVLKEHPPAWYSTGRLSTVAAIMHHLPISVKDFLLTKSFMKRNCLNVSKK

SEQ ID NO: 11329 - DNA, 904 bp, Triticum aestivum
  misc_feature (1)..(904): Ceres Seq. ID no. 13661265
atcaaaccaaaagtcgctcttctattctcctctcttcaaccacaatacagagaaaaacttcaagatcagaaatggctttccacctgagatcgataagtttgccatcaaggcctcaggccaaccagactgaagtcgagcaagaggtgctgagcctagaggcgagcatctcttcctccaccaccaccatcggcaccatgtgtgccggtctgaggaggctcggagacatctacaatggtgttgaagagattattggcctgccaagcaaccaggctggcaagatgttggattcagagatggaagtctctctcgagctgctagatctctgcagcaccatgcaagagatcttcgtcaagatgaaggccatcatccaagagctacaagtggctctaagaaaaggagatgatgtaactgctcaagccaagatccagtcttatgcccgtttggtgaagacggccaagaaacatttcaagaagagcgcgaagaaggctaatgctgtgtctgcgggttgcaagatggtcatgctattgaccaaggctagagagatttctgtgtctctgctggagtccacagtccatctcctgtcaaaggaaatcggaatgccaaaacagtctcttgtctcaaaggcatttcacaagaagaaggcagttgtctgccaggaggagcaattgcaggagttagagtgtagtattggagatctcgagaatggggtgggacatctgttcaggaaattagtccagatcagagtttctctcttgaacattcttagctcatagatgctccaagtcactctacaccctgtgattggcatccgcctttttgaggactagccggtcttcatacaattttgccatatgtatacagtacaaatgtacagaaacttagagaaagaaaaagtgaagttttg

SEQ ID NO: 11330 - protein, 256 aa, Triticum aestivum
  peptide (1)..(256): Ceres Seq. ID no. 13661266
  misc_feature (92)..(157): Pfam Name: Pfam Description:  Arabidopsis protein of unknown function
  misc_feature (24)..(221): NCBI GI NO: 15227365 NR Description: hypothetical protein [Arabidopsis thaliana]
  misc_feature (205)..(254): NCBI GI NO: 15227365 NR Description: hypothetical protein [Arabidopsis thaliana]
  misc_feature (24)..(221): NCBI GI NO: 15227363 NR Description: hypothetical protein [Arabidopsis thaliana]
  misc_feature (24)..(220): NCBI GI NO: 15236926 NR Description: hypothetical protein [Arabidopsis thaliana]
  misc_feature (24)..(220): NCBI GI NO: 15236290 NR Description: hypothetical protein [Arabidopsis thaliana]
  misc_feature (26)..(158): NCBI GI NO: 12698918 NR Description: hypothetical protein [Glycine max]
QTKSRSSILLSSTTIQRKTSRSEMAFHLRSISLPSRPQANQTEVEQEVLSLEASISSSTTTIGTMCAGLRRLGDIYNGVEEIIGLPSNQAGKMLDSEMEVSLELLDLCSTMQEIFVKMKAIIQELQVALRKGDDVTAQAKIQSYARLVKTAKKHFKKSAKKANAVSAGCKMVMLLTKAREISVSLLESTVHLLSKEIGMPKQSLVSKAFHKKKAVVCQEEQLQELECSIGDLENGVGHLFRKLVQIRVSLLNILSS

SEQ ID NO: 11331 - protein, 233 aa, Triticum aestivum
  peptide (1)..(233): Ceres Seq. ID no. 13661267
  misc_feature (69)..(134): Pfam Name: Pfam Description:  Arabidopsis protein of unknown function
  misc_feature (1)..(198): NCBI GI NO: 15227365 NR Description: hypothetical protein [Arabidopsis thaliana]
  misc_feature (182)..(231): NCBI GI NO: 15227365 NR Description: hypothetical protein [Arabidopsis thaliana]
  misc_feature (1)..(198): NCBI GI NO: 15227363 NR Description: hypothetical protein [Arabidopsis thaliana]
  misc_feature (1)..(197): NCBI GI NO: 15236926 NR Description: hypothetical protein [Arabidopsis thaliana]
  misc_feature (1)..(197): NCBI GI NO: 15236290 NR Description: hypothetical protein [Arabidopsis thaliana]
  misc_feature (3)..(135): NCBI GI NO: 12698918 NR Description: hypothetical protein [Glycine max]
MAFHLRSISLPSRPQANQTEVEQEVLSLEASISSSTTTIGTMCAGLRRLGDIYNGVEEIIGLPSNQAGKMLDSEMEVSLELLDLCSTMQEIFVKMKAIIQELQVALRKGDDVTAQAKIQSYARLVKTAKKHFKKSAKKANAVSAGCKMVMLLTKAREISVSLLESTVHLLSKEIGMPKQSLVSKAFHKKKAVVCQEEQLQELECSIGDLENGVGHLFRKLVQIRVSLLNILSS

SEQ ID NO: 11332 - protein, 192 aa, Triticum aestivum
  peptide (1)..(192): Ceres Seq. ID no. 13661268
  misc_feature (28)..(93): Pfam Name: Pfam Description:  Arabidopsis protein of unknown function
  misc_feature (1)..(157): NCBI GI NO: 15227365 NR Description: hypothetical protein [Arabidopsis thaliana]
  misc_feature (141)..(190): NCBI GI NO: 15227365 NR Description: hypothetical protein [Arabidopsis thaliana]
  misc_feature (1)..(157): NCBI GI NO: 15227363 NR Description: hypothetical protein [Arabidopsis thaliana]
  misc_feature (1)..(156): NCBI GI NO: 15236926 NR Description: hypothetical protein [Arabidopsis thaliana]
  misc_feature (1)..(156): NCBI GI NO: 15236290 NR Description: hypothetical protein [Arabidopsis thaliana]
  misc_feature (1)..(94): NCBI GI NO: 12698918 NR Description: hypothetical protein [Glycine max]
MCAGLRRLGDIYNGVEEIIGLPSNQAGKMLDSEMEVSLELLDLCSTMQEIFVKMKAIIQELQVALRKGDDVTAQAKIQSYARLVKTAKKHFKKSAKKANAVSAGCKMVMLLTKAREISVSLLESTVHLLSKEIGMPKQSLVSKAFHKKKAVVCQEEQLQELECSIGDLENGVGHLFRKLVQIRVSLLNILSS

SEQ ID NO: 11333 - DNA, 823 bp, Triticum aestivum
  misc_feature (1)..(823): Ceres Seq. ID no. 13664333
agacggtgccagagtccacgctccggaagaaaaaggcaccacctttgttcgcccttctcctctccctcgtgacaccactcccagagaaagagagagacagatggcgatgcgggcggtggcggtgctgctgcttctggcggtggcgagcgtgctggcggcgggcgcggcggcgcagtcgacgggcacgccggcgtgcgcgtccaagctgacgggctgcgccggctacatgaacggcacggacgcgcagaagccgccggagacctgctgcggcccgctccgggacgccgtgaagaacgagaagccctgcctctgcgcgctttacgcctcgcccgagatcttcaaggccttcaacatcaacgtcaccgacgcgctccgcctctccaagcgctgcggcgtctccgaggacgtcagcagctgccccagcacctctctgacgaagtctcctccaggttcgagttcttctccatcaggtggcgctccatcaggtggcaagagcgccgggcaccctaccatgtcggccagcttcgcggggctgatgagcctcttcctggtcctgtggtctgcactggcataagaaatcggcgattcggcatgctagacatgttcttctttcggcttatatcccatggtagatgagctgcagctctggtggtagttcttggtggtgtcgccgcgtttgtttttgctgtgtattggttggtgttgccagttcagtagacttgctgtgaataaggatttcggcactctcttcagacctgtgatgaccagagcagagtgggcattgtgtgagacgtatttcggcttcactattttcttttctttt

SEQ ID NO: 11334 - protein, 190 aa, Triticum aestivum
  peptide (1)..(190): Ceres Seq. ID no. 13664334
  misc_feature (65)..(139): Pfam Name: Pfam Description:  Protease inhibitor/seed storage/LTP family
  misc_feature (39)..(179): NCBI GI NO: 18410388 NR Description: lipid transfer protein family
  misc_feature (36)..(179): NCBI GI NO: 21593596 NR Description: lipid transfer protein, putative
  misc_feature (41)..(182): NCBI GI NO: 15221585 NR Description: protease inhibitor/seed storage/lipid transfer
  misc_feature (39)..(139): NCBI GI NO: 25406276 NR Description: probable lipid transfer protein F6D5.5
  misc_feature (41)..(182): NCBI GI NO: 30696757 NR Description: protease inhibitor/seed storage/lipid transfer
  misc_feature (52)..(178): NCBI GI NO: 15221052 NR Description: lipid transfer protein family
  misc_feature (38)..(177): NCBI GI NO: 25553595 NR Description: OJ1656_E11.26
  misc_feature (41)..(139): NCBI GI NO: 6630451 NR Description: F23N19.16 [Arabidopsis thaliana]
  misc_feature (65)..(142): NCBI GI NO: 15223104 NR Description: protease inhibitor/seed storage/lipid transfer
  misc_feature (34)..(177): NCBI GI NO: 25553588 NR Description: OJ1656_E11.14
DGARVHAPEEKGTTFVRPSPLPRDTTPRERERQMAMRAVAVLLLLAVASVLAAGAAAQSTGTPACASKLTGCAGYMNGTDAQKPPETCCGPLRDAVKNEKPCLCALYASPEIFKAFNINVTDALRLSKRCGVSEDVSSCPSTSLTKSPPGSSSSPSGGAPSGGKSAGHPTMSASFAGLMSLFLVLWSALA

SEQ ID NO: 11335 - protein, 157 aa, Triticum aestivum
  peptide (1)..(157): Ceres Seq. ID no. 13664335
  misc_feature (32)..(106): Pfam Name: Pfam Description:  Protease inhibitor/seed storage/LTP family
  misc_feature (6)..(146): NCBI GI NO: 18410388 NR Description: lipid transfer protein family
  misc_feature (3)..(146): NCBI GI NO: 21593596 NR Description: lipid transfer protein, putative
  misc_feature (8)..(149): NCBI GI NO: 15221585 NR Description: protease inhibitor/seed storage/lipid transfer
  misc_feature (6)..(106): NCBI GI NO: 25406276 NR Description: probable lipid transfer protein F6D5.5
  misc_feature (8)..(149): NCBI GI NO: 30696757 NR Description: protease inhibitor/seed storage/lipid transfer
  misc_feature (19)..(145): NCBI GI NO: 15221052 NR Description: lipid transfer protein family
  misc_feature (5)..(144): NCBI GI NO: 25553595 NR Description: OJ1656_E11.26
  misc_feature (8)..(106): NCBI GI NO: 6630451 NR Description: F23N19.16 [Arabidopsis thaliana]
  misc_feature (32)..(109): NCBI GI NO: 15223104 NR Description: protease inhibitor/seed storage/lipid transfer
  misc_feature (1)..(144): NCBI GI NO: 25553588 NR Description: OJ1656_E11.14
MAMRAVAVLLLLAVASVLAAGAAAQSTGTPACASKLTGCAGYMNGTDAQKPPETCCGPLRDAVKNEKPCLCALYASPEIFKAFNINVTDALRLSKRCGVSEDVSSCPSTSLTKSPPGSSSSPSGGAPSGGKSAGHPTMSASFAGLMSLFLVLWSALA

SEQ ID NO: 11336 - protein, 155 aa, Triticum aestivum
  peptide (1)..(155): Ceres Seq. ID no. 13664336
  misc_feature (30)..(104): Pfam Name: Pfam Description:  Protease inhibitor/seed storage/LTP family
  misc_feature (4)..(144): NCBI GI NO: 18410388 NR Description: lipid transfer protein family
  misc_feature (1)..(144): NCBI GI NO: 21593596 NR Description: lipid transfer protein, putative
  misc_feature (6)..(147): NCBI GI NO: 15221585 NR Description: protease inhibitor/seed storage/lipid transfer
  misc_feature (4)..(104): NCBI GI NO: 25406276 NR Description: probable lipid transfer protein F6D5.5
  misc_feature (6)..(147): NCBI GI NO: 30696757 NR Description: protease inhibitor/seed storage/lipid transfer
  misc_feature (17)..(143): NCBI GI NO: 15221052 NR Description: lipid transfer protein family
  misc_feature (3)..(142): NCBI GI NO: 25553595 NR Description: OJ1656_E11.26
  misc_feature (6)..(104): NCBI GI NO: 6630451 NR Description: F23N19.16 [Arabidopsis thaliana]
  misc_feature (30)..(107): NCBI GI NO: 15223104 NR Description: protease inhibitor/seed storage/lipid transfer
  misc_feature (1)..(142): NCBI GI NO: 25553588 NR Description: OJ1656_E11.14
MRAVAVLLLLAVASVLAAGAAAQSTGTPACASKLTGCAGYMNGTDAQKPPETCCGPLRDAVKNEKPCLCALYASPEIFKAFNINVTDALRLSKRCGVSEDVSSCPSTSLTKSPPGSSSSPSGGAPSGGKSAGHPTMSASFAGLMSLFLVLWSALA

SEQ ID NO: 11337 - DNA, 1596 bp, Triticum aestivum
  misc_feature (1)..(1596): Ceres Seq. ID no. 15176851
gcatccttagcctttttctcttcttgcaactatggccacacattcagctcttgccgtctccagaatccccgtcaaaccgaggctgcagtctaagagtgccattcactctttcccagctcaatgttcctccaagaggctagaagtggctgcattctccggcctgcgagtcagcagtaacggtggggaagcatctttctttgatgccatagctgctcaaatcacccccaaggctgtggggacatcctctcctgttagaggagagacagtggcaaaactgaaggtggccatcaatgggtttggaaggattggtaggaacttcctcaggtgttggcacggtcgcaaggactctcctctcgaagttgttgtgcttaatgacagtggtggtgtcaagaacgcatcccacttgctcaagtatgactccatgcttggaaccttcaaggccgatgtgaagatagtcgacaatgaaactatcagcgttgatggcaagttcatcaaagtcgtctcaaacagagatcctcttaagcttccatgggctgagctcggcattgacattgtcatcgagggaacaggagtgtttgttgatgggccaggagcagggaagcacatccaagctggagcctcaaaagtgatcatcacagcaccagctaaaggcgctgatatcccaacctatgttgtgggagtcaatgagcaagactattctcatgacgttgctaacattattagcaatgcatcttgcaccaccaactgtttggctccctttgcgaaagttttggatgaagagtttggaatcgtcaaggggactatgacaacgacacactcttacaccggagaccaaaggctcctagatgcatcacacagggacctaaggcgtgcaagagccgcagcactgaacattgtaccgactagcacaggtgcagcaaaggcggtgtcgttggtgctcccccagctgaagggtaaactcaacggcattgcactccgtgtgccgaccccaaacgtctctgtggttgaccttgttataaacgttgagaagaaaggtttgactgctgaagacgttaacgaggccttcagaaaagcggccgctggaccgctcaagggcgttttagaggtttgcgacacgccacttgtctcttgtgacttcaggtgctctgatgtctcaaccaccattgactcttccctcacaatggtcatgggtgatgatatggtcaaggtggtcgcctggtacgacaacgagtggggttacagccaaagagtagtggatttggctcacctagtggctgccaagtggccgggagaagtagctgctggaagcggagaccctttggaagatttctgtaagacaaacccagccgatgaggaatgcaaagtctatgaagcttgattctaatctttttctctaaactgtttccgagcaatttggtttatcttctagtgacaatttatcgaaatcatataaaccctgcctcttaaactctatcatatatttcgttttctttctttttactattatatcaaaaggcaatgtatgtaatacccattccttttcattgcctcatgtgcgatctcgaggatactataatttcaatgatatgtgcgaac

SEQ ID NO: 11338 - protein, 448 aa, Triticum aestivum
  peptide (1)..(448): Ceres Seq. ID no. 15176852
  misc_feature (236)..(397): Pfam Name: Pfam Description:  Glyceraldehyde 3-phosphate dehydrogenase
  misc_feature (1)..(447): NCBI GI NO: 15217555 NR Description: glyceraldehyde-3-phosphate dehydrogenase
  misc_feature (1)..(447): NCBI GI NO: 120663 NR Description: Glyceraldehyde 3-phosphate dehydrogenase B
  misc_feature (46)..(447): NCBI GI NO: 81621 NR Description: glyceraldehyde-3-phosphate dehydrogenase
  misc_feature (1)..(447): NCBI GI NO: 66028 NR Description: glyceraldehyde-3-phosphate dehydrogenase
  misc_feature (5)..(447): NCBI GI NO: 20733 NR Description: unnamed protein product [Pisum sativum]
  misc_feature (1)..(447): NCBI GI NO: 120664 NR Description: Glyceraldehyde 3-phosphate dehydrogenase B
  misc_feature (1)..(447): NCBI GI NO: 6063542 NR Description: EST C74302
  misc_feature (31)..(420): NCBI GI NO: 120665 NR Description: Glyceraldehyde 3-phosphate dehydrogenase B
  misc_feature (1)..(431): NCBI GI NO: 18076102 NR Description: glyceraldehyde-3-phosphate dehydrogenase
  misc_feature (81)..(420): NCBI GI NO: 82166 NR Description: glyceraldehyde-3-phosphate dehydrogenase
MATHSALAVSRIPVKPRLQSKSAIHSFPAQCSSKRLEVAAFSGLRVSSNGGEASFFDAIAAQITPKAVGTSSPVRGETVAKLKVAINGFGRIGRNFLRCWHGRKDSPLEVVVLNDSGGVKNASHLLKYDSMLGTFKADVKIVDNETISVDGKFIKVVSNRDPLKLPWAELGIDIVIEGTGVFVDGPGAGKHIQAGASKVIITAPAKGADIPTYVVGVNEQDYSHDVANIISNASCTTNCLAPFAKVLDEEFGIVKGTMTTTHSYTGDQRLLDASHRDLRRARAAALNIVPTSTGAAKAVSLVLPQLKGKLNGIALRVPTPNVSVVDLVINVEKKGLTAEDVNEAFRKAAAGPLKGVLEVCDTPLVSCDFRCSDVSTTIDSSLTMVMGDDMVKVVAWYDNEWGYSQRVVDLAHLVAAKWPGEVAAGSGDPLEDFCKTNPADEECKVYEA

SEQ ID NO: 11339 - protein, 318 aa, Triticum aestivum
  peptide (1)..(318): Ceres Seq. ID no. 15176853
  misc_feature (106)..(267): Pfam Name: Pfam Description:  Glyceraldehyde 3-phosphate dehydrogenase
  misc_feature (1)..(317): NCBI GI NO: 15217555 NR Description: glyceraldehyde-3-phosphate dehydrogenase
  misc_feature (1)..(317): NCBI GI NO: 120663 NR Description: Glyceraldehyde 3-phosphate dehydrogenase B
  misc_feature (1)..(317): NCBI GI NO: 81621 NR Description: glyceraldehyde-3-phosphate dehydrogenase
  misc_feature (1)..(317): NCBI GI NO: 66028 NR Description: glyceraldehyde-3-phosphate dehydrogenase
  misc_feature (1)..(317): NCBI GI NO: 20733 NR Description: unnamed protein product [Pisum sativum]
  misc_feature (1)..(317): NCBI GI NO: 120664 NR Description: Glyceraldehyde 3-phosphate dehydrogenase B
  misc_feature (1)..(317): NCBI GI NO: 6063542 NR Description: EST C74302
  misc_feature (1)..(290): NCBI GI NO: 120665 NR Description: Glyceraldehyde 3-phosphate dehydrogenase B
  misc_feature (1)..(301): NCBI GI NO: 18076102 NR Description: glyceraldehyde-3-phosphate dehydrogenase
  misc_feature (1)..(290): NCBI GI NO: 82166 NR Description: glyceraldehyde-3-phosphate dehydrogenase
MLGTFKADVKIVDNETISVDGKFIKVVSNRDPLKLPWAELGIDIVIEGTGVFVDGPGAGKHIQAGASKVIITAPAKGADIPTYVVGVNEQDYSHDVANIISNASCTTNCLAPFAKVLDEEFGIVKGTMTTTHSYTGDQRLLDASHRDLRRARAAALNIVPTSTGAAKAVSLVLPQLKGKLNGIALRVPTPNVSVVDLVINVEKKGLTAEDVNEAFRKAAAGPLKGVLEVCDTPLVSCDFRCSDVSTTIDSSLTMVMGDDMVKVVAWYDNEWGYSQRVVDLAHLVAAKWPGEVAAGSGDPLEDFCKTNPADEECKVYEA

SEQ ID NO: 11340 - DNA, 1123 bp, Triticum aestivum
  misc_feature (1)..(1123): Ceres Seq. ID no. 15227147
acgaaatctatcaacccctccaccagttgcaagaaaatcattttcgaagtcttcctcccctgatcctgtgaagccaccccagagagctgcctcgatcgccgcaatgtctgcttctttcgagcggcctagacaaactctgataccaaagtcaattaaagcgagtcctgaggtaaagaaaccacaatctgaagcaagcaaacctaagccagaggaagacgccaaagaaagtacccctgctgcgaaggatgggcaaactgtgactccgacaatacaggaagatgtaaaggaggatcaacccgaagacgaggaagggcttcctacatatccgtatgatcgcttgaggacatcttcaagcaatcctgtcacagacattgatagtaccaggcgtgagacgtatctatcttcggcagagttcagggagaagtttggcatgacaaaggaggcttttgcaaagctaccaaagtggaagcagaataggctcaagatcgctcttcagctcttttaaaatcttatgctgtcaaatatgcagtagttatgtctgcttgttggtgaaagcaaggacggcgagattggttttcaaaggcaaatctcagacatgaagatctctctcgcacacgtcgcaatgttaagaagagacatcggtaagtgtaagcctatctgggtcaaggggaccctcagtaggcgtctgaggggctggagcagtgagttttgagctgcccatgcccccaaattgtgtgttgtccactgacgaattctccatgtcgtgtgccgggtcgctgcattggcggtcctggtcacacaccctaattttttcctttccaaggtcaccggtttggttgtgagcttgcaatgctttttcctcgccctctttgaaacctcaccatttgtttcattctttcatgctgtgtatggtttcctgacaaataattatgttacatatatggtgtaagaagttaggtgatgggatgggtcgggatgaacgccccttatgttggaaaatccaggcgatgtacgggagacgggcgtcttgccctcggaatttgatcttttaagtggtaattagttattcatgcgtgcaaattttgtaatcagatttacagtaagcctctgttctcgtaagtac

SEQ ID NO: 11341 - protein, 167 aa, Triticum aestivum
  peptide (1)..(167): Ceres Seq. ID no. 15227148
  misc_feature (132)..(167): Pfam Name: Pfam Description:  Villin headpiece domain
  misc_feature (1)..(167): NCBI GI NO: 40253250 NR Description: putative villin
  misc_feature (1)..(167): NCBI GI NO: 15234646 NR Description: villin -related [Arabidopsis thaliana]
  misc_feature (1)..(167): NCBI GI NO: 31339056 NR Description: actin filament bundling protein P-115-ABP
  misc_feature (1)..(167): NCBI GI NO: 15242097 NR Description: villin [Arabidopsis thaliana]
  misc_feature (25)..(167): NCBI GI NO: 38344157 NR Description: OSJNBa0041A02.24
  misc_feature (17)..(167): NCBI GI NO: 11358920 NR Description: villin 3 homolog F28O9
  misc_feature (17)..(167): NCBI GI NO: 18410709 NR Description: villin 3 fragment [Arabidopsis thaliana]
  misc_feature (13)..(167): NCBI GI NO: 25295744 NR Description: probable villin 2
  misc_feature (13)..(167): NCBI GI NO: 11358919 NR Description: villin 2 [imported] - Arabidopsis thaliana
  misc_feature (13)..(167): NCBI GI NO: 18405794 NR Description: villin 2 -related [Arabidopsis thaliana]
RNLSTPPPVARKSFSKSSSPDPVKPPQRAASIAAMSASFERPRQTLIPKSIKASPEVKKPQSEASKPKPEEDAKESTPAAKDGQTVTPTIQEDVKEDQPEDEEGLPTYPYDRLRTSSSNPVTDIDSTRRETYLSSAEFREKFGMTKEAFAKLPKWKQNRLKIALQLF

SEQ ID NO: 11342 - protein, 133 aa, Triticum aestivum
  peptide (1)..(133): Ceres Seq. ID no. 15227149
  misc_feature (98)..(133): Pfam Name: Pfam Description:  Villin headpiece domain
  misc_feature (1)..(133): NCBI GI NO: 40253250 NR Description: putative villin
  misc_feature (1)..(133): NCBI GI NO: 15234646 NR Description: villin -related [Arabidopsis thaliana]
  misc_feature (1)..(133): NCBI GI NO: 31339056 NR Description: actin filament bundling protein P-115-ABP
  misc_feature (1)..(133): NCBI GI NO: 15242097 NR Description: villin [Arabidopsis thaliana]
  misc_feature (1)..(133): NCBI GI NO: 38344157 NR Description: OSJNBa0041A02.24
  misc_feature (1)..(133): NCBI GI NO: 11358920 NR Description: villin 3 homolog F28O9
  misc_feature (1)..(133): NCBI GI NO: 18410709 NR Description: villin 3 fragment [Arabidopsis thaliana]
  misc_feature (1)..(133): NCBI GI NO: 25295744 NR Description: probable villin 2
  misc_feature (1)..(133): NCBI GI NO: 11358919 NR Description: villin 2 [imported] - Arabidopsis thaliana
  misc_feature (1)..(133): NCBI GI NO: 18405794 NR Description: villin 2 -related [Arabidopsis thaliana]
MSASFERPRQTLIPKSIKASPEVKKPQSEASKPKPEEDAKESTPAAKDGQTVTPTIQEDVKEDQPEDEEGLPTYPYDRLRTSSSNPVTDIDSTRRETYLSSAEFREKFGMTKEAFAKLPKWKQNRLKIALQLF

SEQ ID NO: 11343 - DNA, 647 bp, Triticum aestivum
  misc_feature (1)..(647): Ceres Seq. ID no. 12624098
ctcagttaatgacacgtgtcattcggtccgtggcttgtcactttgcttcctcaatcgtcaagctacaacgtaaagagaccggcgaggccacccacaacttgtgaatctgaaaatggaatcaaaagctttcgtatctgttacgttcttgatcgtaaccctcctcctctgtcgaacaattcaatcaagaagttgcagatcagatgagaaaaccacggagaagacgatgattttaggaggcgttcatgatctccgaggaaaccaaaacagtggagagatcgagaatctcgctcgattcgctattcaacaacataacaaccgaaagaacaaggttcttgagttcaagaagattgtaaaggcaagagaacaggtagttgctggaaccatgtactacttaactcttgaagcaaacgaaggtggccaggccaagaacttcgaagccaaagtttgggtgaagccatggatgaacttcaagcagttacaagagtttaaagaatcttcttcttgaacatttcacttgttcaaaagggtaatctaaatgtttctgctaaattatatgaaataaataaggctgagatagctttgtttcagaccagtgtgtgtaatactaaaccagaagttaatgtaatcaaggaacctgttatggcttt

SEQ ID NO: 11344 - protein, 130 aa, Triticum aestivum
  peptide (1)..(130): Ceres Seq. ID no. 12624099
  misc_feature (8)..(130): NCBI GI NO: 15226769 NR Description: putative cysteine proteinase inhibitor B
  misc_feature (15)..(130): NCBI GI NO: 19347961 NR Description: putative cysteine proteinase inhibitor cystatin B
  misc_feature (39)..(130): NCBI GI NO: 11127597 NR Description: cysteine proteinase inhibitor homolog
  misc_feature (1)..(129): NCBI GI NO: 12321971 NR Description: cysteine proteinase inhibitor, putative
  misc_feature (1)..(128): NCBI GI NO: 27752377 NR Description: cysteine protease inhibitor cystatin
  misc_feature (39)..(129): NCBI GI NO: 18399630 NR Description: cysteine proteinase inhibitor, putative
  misc_feature (39)..(129): NCBI GI NO: 24899735 NR Description: cysteine proteinase inhibitor, putative 1
  misc_feature (35)..(129): NCBI GI NO: 11139270 NR Description: PRLI-interacting factor M [Arabidopsis thaliana]
  misc_feature (39)..(129): NCBI GI NO: 7488521 NR Description: cysteine proteinase inhibitor BCPI-2 - turnip
  misc_feature (39)..(129): NCBI GI NO: 18158608 NR Description: cysteine protease inhibitor CPI-1
MESKAFVSVTFLIVTLLLCRTIQSRSCRSDEKTTEKTMILGGVHDLRGNQNSGEIENLARFAIQQHNNRKNKVLEFKKIVKAREQVVAGTMYYLTLEANEGGQAKNFEAKVWVKPWMNFKQLQEFKESSS

SEQ ID NO: 11345 - protein, 93 aa, Triticum aestivum
  peptide (1)..(93): Ceres Seq. ID no. 12624100
  misc_feature (1)..(93): NCBI GI NO: 15226769 NR Description: putative cysteine proteinase inhibitor B
  misc_feature (1)..(93): NCBI GI NO: 19347961 NR Description: putative cysteine proteinase inhibitor cystatin B
  misc_feature (2)..(93): NCBI GI NO: 11127597 NR Description: cysteine proteinase inhibitor homolog
  misc_feature (1)..(92): NCBI GI NO: 12321971 NR Description: cysteine proteinase inhibitor, putative
  misc_feature (1)..(91): NCBI GI NO: 27752377 NR Description: cysteine protease inhibitor cystatin
  misc_feature (2)..(92): NCBI GI NO: 18399630 NR Description: cysteine proteinase inhibitor, putative
  misc_feature (2)..(92): NCBI GI NO: 24899735 NR Description: cysteine proteinase inhibitor, putative 1
  misc_feature (1)..(92): NCBI GI NO: 11139270 NR Description: PRLI-interacting factor M [Arabidopsis thaliana]
  misc_feature (2)..(92): NCBI GI NO: 7488521 NR Description: cysteine proteinase inhibitor BCPI-2 - turnip
  misc_feature (2)..(92): NCBI GI NO: 18158608 NR Description: cysteine protease inhibitor CPI-1
MILGGVHDLRGNQNSGEIENLARFAIQQHNNRKNKVLEFKKIVKAREQVVAGTMYYLTLEANEGGQAKNFEAKVWVKPWMNFKQLQEFKESSS

SEQ ID NO: 11346 - DNA, 905 bp, Triticum aestivum
  misc_feature (1)..(905): Ceres Seq. ID no. 13598171
cacaatcaaaacaccgactactcaagggaaatccatggcctctgccgcgctcctcgtcctcctcgccctggccaccatgcaggcgcagaccacgtcgtccgagaaggagacgcacctcaaggtgtactggcacgacgtggtgagcggacaagacccgacatcggtgccggtggcgcgcgcggccacgaccaacacctccaagtcggccttcggcgtcgtcatggtcatggacaactcactcacagaggggccgagcctcgactcatccaggctcatgggccgcgcccagggcacgtacatcgccgccggcaaggaccagctggcgctgctcatgctcatgaacttcgtctttaccgccggaaagtacaacggcagcagcatcgccattgtgggtcgcaacgccgtgtttaccgaggtccgtgagatggctgtcgtcggtggtaccggcgtgttcaggtgggcacgcgggtacgcgcaggccaggacgcataccttagacctcaagaccggcgacgccaccgtcgagtacaacatattcatcaggcactagtctcggccgttgtcaaaatttacttttgaaaacgggtttgctatttcacatctaaatgtgaaatacttatctcacatctaaatctagaacagttgatattgtttgtctttaattttcgtgcaaacatgatcgtctcgcctggcgcacccgttcgcttcacgttgtctgctgcagcggcctgtgtcccggccatgcaagtggtggtgggccgttgttgttcctttttaattcgcgggcttaggctggcagccgttgtttgtctcgattatggactcctgtttacgctttttttactggattgtccacgtatttgttgtctgtataattttttgaagacaatgtgattttagagtgg

SEQ ID NO: 11347 - protein, 182 aa, Triticum aestivum
  peptide (1)..(182): Ceres Seq. ID no. 13598172
  misc_feature (34)..(182): Pfam Name: Pfam Description:  Dirigent-like protein
  misc_feature (11)..(182): NCBI GI NO: 15217886 NR Description: disease resistance response protein-related/dirigent protein-related
  misc_feature (34)..(182): NCBI GI NO: 15239779 NR Description: disease resistance response protein-related/dirigent protein-related
  misc_feature (34)..(182): NCBI GI NO: 15231302 NR Description: disease resistance response protein-related/dirigent protein-related
  misc_feature (34)..(182): NCBI GI NO: 15218836 NR Description: disease resistance response protein-related/dirigent protein-related
  misc_feature (25)..(182): NCBI GI NO: 15238980 NR Description: disease resistance response protein-related
  misc_feature (34)..(182): NCBI GI NO: 15222673 NR Description: disease resistance response protein-related/dirigent protein-related
  misc_feature (34)..(182): NCBI GI NO: 22135914 NR Description: unknown protein [Arabidopsis thaliana]
  misc_feature (15)..(182): NCBI GI NO: 15238982 NR Description: disease resistance response protein-related
  misc_feature (25)..(182): NCBI GI NO: 15219966 NR Description: disease resistance response protein-related
  misc_feature (29)..(182): NCBI GI NO: 30681257 NR Description: disease resistance response protein-related/dirigent protein-related
TIKTPTTQGKSMASAALLVLLALATMQAQTTSSEKETHLKVYWHDVVSGQDPTSVPVARAATTNTSKSAFGVVMVMDNSLTEGPSLDSSRLMGRAQGTYIAAGKDQLALLMLMNFVFTAGKYNGSSIAIVGRNAVFTEVREMAVVGGTGVFRWARGYAQARTHTLDLKTGDATVEYNIFIRH

SEQ ID NO: 11348 - protein, 171 aa, Triticum aestivum
  peptide (1)..(171): Ceres Seq. ID no. 13598173
  misc_feature (23)..(171): Pfam Name: Pfam Description:  Dirigent-like protein
  misc_feature (1)..(171): NCBI GI NO: 15217886 NR Description: disease resistance response protein-related/dirigent protein-related
  misc_feature (23)..(171): NCBI GI NO: 15239779 NR Description: disease resistance response protein-related/dirigent protein-related
  misc_feature (23)..(171): NCBI GI NO: 15231302 NR Description: disease resistance response protein-related/dirigent protein-related
  misc_feature (23)..(171): NCBI GI NO: 15218836 NR Description: disease resistance response protein-related/dirigent protein-related
  misc_feature (14)..(171): NCBI GI NO: 15238980 NR Description: disease resistance response protein-related
  misc_feature (23)..(171): NCBI GI NO: 15222673 NR Description: disease resistance response protein-related/dirigent protein-related
  misc_feature (23)..(171): NCBI GI NO: 22135914 NR Description: unknown protein [Arabidopsis thaliana]
  misc_feature (4)..(171): NCBI GI NO: 15238982 NR Description: disease resistance response protein-related
  misc_feature (14)..(171): NCBI GI NO: 15219966 NR Description: disease resistance response protein-related
  misc_feature (18)..(171): NCBI GI NO: 30681257 NR Description: disease resistance response protein-related/dirigent protein-related
MASAALLVLLALATMQAQTTSSEKETHLKVYWHDVVSGQDPTSVPVARAATTNTSKSAFGVVMVMDNSLTEGPSLDSSRLMGRAQGTYIAAGKDQLALLMLMNFVFTAGKYNGSSIAIVGRNAVFTEVREMAVVGGTGVFRWARGYAQARTHTLDLKTGDATVEYNIFIRH

SEQ ID NO: 11349 - protein, 157 aa, Triticum aestivum
  peptide (1)..(157): Ceres Seq. ID no. 13598174
  misc_feature (9)..(157): Pfam Name: Pfam Description:  Dirigent-like protein
  misc_feature (1)..(157): NCBI GI NO: 15217886 NR Description: disease resistance response protein-related/dirigent protein-related
  misc_feature (9)..(157): NCBI GI NO: 15239779 NR Description: disease resistance response protein-related/dirigent protein-related
  misc_feature (9)..(157): NCBI GI NO: 15231302 NR Description: disease resistance response protein-related/dirigent protein-related
  misc_feature (9)..(157): NCBI GI NO: 15218836 NR Description: disease resistance response protein-related/dirigent protein-related
  misc_feature (1)..(157): NCBI GI NO: 15238980 NR Description: disease resistance response protein-related
  misc_feature (9)..(157): NCBI GI NO: 15222673 NR Description: disease resistance response protein-related/dirigent protein-related
  misc_feature (9)..(157): NCBI GI NO: 22135914 NR Description: unknown protein [Arabidopsis thaliana]
  misc_feature (1)..(157): NCBI GI NO: 15238982 NR Description: disease resistance response protein-related
  misc_feature (1)..(157): NCBI GI NO: 15219966 NR Description: disease resistance response protein-related
  misc_feature (4)..(157): NCBI GI NO: 30681257 NR Description: disease resistance response protein-related/dirigent protein-related
MQAQTTSSEKETHLKVYWHDVVSGQDPTSVPVARAATTNTSKSAFGVVMVMDNSLTEGPSLDSSRLMGRAQGTYIAAGKDQLALLMLMNFVFTAGKYNGSSIAIVGRNAVFTEVREMAVVGGTGVFRWARGYAQARTHTLDLKTGDATVEYNIFIRH

SEQ ID NO: 11350 - DNA, 686 bp, Triticum aestivum
  misc_feature (1)..(686): Ceres Seq. ID no. 12624105
aacaaaacaactgaatctgtttgcttgagttgaagcatcaagagacagaacagcaatggcttcttcttcttccatctccttctcatgcgcaccttcactcttctccatcaaacccatcacctcttcttcttctttcccaaagcagctctcctctcgattcctaggaacccgaaacttaaagattcgaatccgacccaacagactcggaccctccaacggttcaagaaccacctgctggttcaagttcggcaagaacggcgtcgatgctgaaagtgcaggaatctatggtagtcaaacacgcgatgacttcgacaaagacgacgttgaacagtacttcaattacatggggatgcttgcggtagaaggtacatattcaaagatggaagctcttcttaacctaaacattcatccagtcgatatcctattgatgttggcagccacggaaggtgacaaacctaagatcgaggagctgcttagagctggtgctagctactcggtcaaggatgctgatggaagaaccgctatagacagagctaatagtgaagagattcgtgacttgatccttggctactccactcagaaggcttgaatgttcctgagttttttaaagaaatgttgtgctagaacaaactgtctttatgagttccccggatgagtaggttataaaatccatcttcttttgcttc

SEQ ID NO: 11351 - protein, 177 aa, Triticum aestivum
  peptide (1)..(177): Ceres Seq. ID no. 12624106
  misc_feature (1)..(177): NCBI GI NO: 25373264 NR Description: unknown protein [imported] - Arabidopsis thaliana
  misc_feature (3)..(177): NCBI GI NO: 18403267 NR Description: expressed protein; protein id: At1g50900
  misc_feature (45)..(177): NCBI GI NO: 34901972 NR Description: hypothetical protein~similar to Arabidopsisthaliana chromosome 1
  misc_feature (97)..(177): NCBI GI NO: 33146521 NR Description: unknown protein
MASSSSISFSCAPSLFSIKPITSSSSFPKQLSSRFLGTRNLKIRIRPNRLGPSNGSRTTCWFKFGKNGVDAESAGIYGSQTRDDFDKDDVEQYFNYMGMLAVEGTYSKMEALLNLNIHPVDILLMLAATEGDKPKIEELLRAGASYSVKDADGRTAIDRANSEEIRDLILGYSTQKA

SEQ ID NO: 11352 - DNA, 1374 bp, Triticum aestivum
  misc_feature (1)..(1374): Ceres Seq. ID no. 14303656
aaaccgccgtcccccgttcgccgtctccgcgccgcgcgacccttcggcccggccgccctccccgaacccccctccgtctgctgcgccgccgcccgcgaatccgggccatggaggcgctgtggaagcaggcctccaggctcaaggagcaggtcgcccgccagggcgtgtttaagcagtttggggctggtggctatggaaattctgataatgcattcacagacgagtcagaagttaaactacatcagagattggaaaaactttacttatccactcgtgctgccaaacattttcaaagggacgtcgtccggggtgtggagggctacatagtgacaggatctaagcaagtggagatagggaacaaattgtctgatgatagccagaaatatggcattgaaaacacatgcacaagtggtaatactttatccagagctgctacatactatggaaaggcgcgttcactgatagaaaaggaacgcgggaacatgctaaaagcatttggtactcaggtggcagagcctctacgggcaatggtaatgggtgcccctctagaggatgctagacatctagcccagagatatgacagagtaaggcaagaagctgatgctcaggtcgttgaagtttcaaggcgtcaaagcagagtaagagaatcagctgggaatagtgacgtgatatcaaagttggaggcagctgagtataaacttgaagaactgaagtcaaacatggtggggttaggaaaggaagcggtttcagctatggctgctgtagaggggcagcagcaaagattgacattacaacgcctcattgcaatggttgaggcggagagaacttatcatcagaaagtcctggagatccttgaccatttggaagaagaaatggtgtctgagcgccaaaaaatcgaagcacctccaccccctgcagcagaaagttatatgtcaccgccgccaccatcatatgacgaagttaatggcatgtttgcctccacttctgctgatcaggcagttaactctgtcgacttcttcctgggagaggcgctcgattccttcgaggctgagagtgagtttgagcttaacttatcagttggcgacatcgttatcgtccggaagatatcaagcaacggttgggcggaaggtgaatgcaaggggaaagcaggatggttcccacatgcctatgtcgaaagacgcgagcgtgttctggcgagcaaagtcccgcatattttctaggggttttgaggaggaacataggttataggtgtttgatttcaatagttgaacagcgtactttcagacttctacagtattcatgtgtatagattgaattttcgtcccgtgagccagtttttgtgaagataatgtacatctgacatttcagaacacc

SEQ ID NO: 11353 - protein, 405 aa, Triticum aestivum
  peptide (1)..(405): Ceres Seq. ID no. 14303657
  misc_feature (339)..(393): Pfam Name: Pfam Description:  SH3 domain
  misc_feature (36)..(405): NCBI GI NO: 38344978 NR Description: OSJNBa0011L07.8
  misc_feature (36)..(405): NCBI GI NO: 18418491 NR Description: SH3 domain-containing protein 2
  misc_feature (36)..(367): NCBI GI NO: 7487662 NR Description: hypothetical protein T4L20
  misc_feature (36)..(330): NCBI GI NO: 34902022 NR Description: unknown protein
  misc_feature (339)..(400): NCBI GI NO: 34902022 NR Description: unknown protein
  misc_feature (176)..(405): NCBI GI NO: 37535998 NR Description: unknown protein
  misc_feature (36)..(302): NCBI GI NO: 15221714 NR Description: SH3 domain-containing protein 1
  misc_feature (288)..(401): NCBI GI NO: 15221714 NR Description: SH3 domain-containing protein 1
  misc_feature (36)..(278): NCBI GI NO: 7485521 NR Description: hypothetical protein F15J5
  misc_feature (338)..(396): NCBI GI NO: 7485521 NR Description: hypothetical protein F15J5
TAVPRSPSPRRATLRPGRPPRTPLRLLRRRPRIRAMEALWKQASRLKEQVARQGVFKQFGAGGYGNSDNAFTDESEVKLHQRLEKLYLSTRAAKHFQRDVVRGVEGYIVTGSKQVEIGNKLSDDSQKYGIENTCTSGNTLSRAATYYGKARSLIEKERGNMLKAFGTQVAEPLRAMVMGAPLEDARHLAQRYDRVRQEADAQVVEVSRRQSRVRESAGNSDVISKLEAAEYKLEELKSNMVGLGKEAVSAMAAVEGQQQRLTLQRLIAMVEAERTYHQKVLEILDHLEEEMVSERQKIEAPPPPAAESYMSPPPPSYDEVNGMFASTSADQAVNSVDFFLGEALDSFEAESEFELNLSVGDIVIVRKISSNGWAEGECKGKAGWFPHAYVERRERVLASKVPHIF

SEQ ID NO: 11354 - protein, 370 aa, Triticum aestivum
  peptide (1)..(370): Ceres Seq. ID no. 14303658
  misc_feature (304)..(358): Pfam Name: Pfam Description:  SH3 domain
  misc_feature (1)..(370): NCBI GI NO: 38344978 NR Description: OSJNBa0011L07.8
  misc_feature (1)..(370): NCBI GI NO: 18418491 NR Description: SH3 domain-containing protein 2
  misc_feature (1)..(332): NCBI GI NO: 7487662 NR Description: hypothetical protein T4L20
  misc_feature (1)..(295): NCBI GI NO: 34902022 NR Description: unknown protein
  misc_feature (304)..(365): NCBI GI NO: 34902022 NR Description: unknown protein
  misc_feature (141)..(370): NCBI GI NO: 37535998 NR Description: unknown protein
  misc_feature (1)..(267): NCBI GI NO: 15221714 NR Description: SH3 domain-containing protein 1
  misc_feature (253)..(366): NCBI GI NO: 15221714 NR Description: SH3 domain-containing protein 1
  misc_feature (1)..(243): NCBI GI NO: 7485521 NR Description: hypothetical protein F15J5
  misc_feature (303)..(361): NCBI GI NO: 7485521 NR Description: hypothetical protein F15J5
MEALWKQASRLKEQVARQGVFKQFGAGGYGNSDNAFTDESEVKLHQRLEKLYLSTRAAKHFQRDVVRGVEGYIVTGSKQVEIGNKLSDDSQKYGIENTCTSGNTLSRAATYYGKARSLIEKERGNMLKAFGTQVAEPLRAMVMGAPLEDARHLAQRYDRVRQEADAQVVEVSRRQSRVRESAGNSDVISKLEAAEYKLEELKSNMVGLGKEAVSAMAAVEGQQQRLTLQRLIAMVEAERTYHQKVLEILDHLEEEMVSERQKIEAPPPPAAESYMSPPPPSYDEVNGMFASTSADQAVNSVDFFLGEALDSFEAESEFELNLSVGDIVIVRKISSNGWAEGECKGKAGWFPHAYVERRERVLASKVPHIF

SEQ ID NO: 11355 - protein, 245 aa, Triticum aestivum
  peptide (1)..(245): Ceres Seq. ID no. 14303659
  misc_feature (179)..(233): Pfam Name: Pfam Description:  SH3 domain
  misc_feature (1)..(245): NCBI GI NO: 38344978 NR Description: OSJNBa0011L07.8
  misc_feature (1)..(245): NCBI GI NO: 18418491 NR Description: SH3 domain-containing protein 2
  misc_feature (1)..(207): NCBI GI NO: 7487662 NR Description: hypothetical protein T4L20
  misc_feature (1)..(170): NCBI GI NO: 34902022 NR Description: unknown protein
  misc_feature (179)..(240): NCBI GI NO: 34902022 NR Description: unknown protein
  misc_feature (16)..(245): NCBI GI NO: 37535998 NR Description: unknown protein
  misc_feature (1)..(142): NCBI GI NO: 15221714 NR Description: SH3 domain-containing protein 1
  misc_feature (128)..(241): NCBI GI NO: 15221714 NR Description: SH3 domain-containing protein 1
  misc_feature (1)..(118): NCBI GI NO: 7485521 NR Description: hypothetical protein F15J5
  misc_feature (178)..(236): NCBI GI NO: 7485521 NR Description: hypothetical protein F15J5
MLKAFGTQVAEPLRAMVMGAPLEDARHLAQRYDRVRQEADAQVVEVSRRQSRVRESAGNSDVISKLEAAEYKLEELKSNMVGLGKEAVSAMAAVEGQQQRLTLQRLIAMVEAERTYHQKVLEILDHLEEEMVSERQKIEAPPPPAAESYMSPPPPSYDEVNGMFASTSADQAVNSVDFFLGEALDSFEAESEFELNLSVGDIVIVRKISSNGWAEGECKGKAGWFPHAYVERRERVLASKVPHIF

SEQ ID NO: 11356 - DNA, 920 bp, Triticum aestivum
  misc_feature (1)..(920): Ceres Seq. ID no. 13661277
tcatctcaaaccaacaccactctaactcaagcttatcgttcgcatctagcctctgtttgtagtcactccatcgggtgcatctagcctctggtggtagtacattcaaattgaggaagcaaagatagatatgctgctgtcaggcggcttctcctgggtgtaccttgctctgctgttggccttgctcaccttcaactccgtcatggcggtgtaccactccaagggcgacacggccactgtcgccttcgtcgccacctcctacctcgacctggtgctgctcttctgctgcctctggctctacaacacaacggcagcggggtcggcgtggaggaaccggctcaaggcgtcagtgtggactctcaccacgctgctcaccttctccttcgcctacatggtcatgggcacggctggcctcaccctccacgtcgcgttgctcgtgtggttcatcgccgcggcgacggggattggtgccttctccgccttcttcgagcagggcagaatcaacccagctccgggtgaacccatgctgccgccaccggtgtagcccaggctctgaatcactacggggatatgcttttgtgatgcattcagacgcatggagtttgccaggttgtgagcttacgatggagttcaaatactgttgggtcgccctcgtcttgtaaatatatttaccttgaaagcatgcaagagtccttgtagaatcgttgtccttgtcccttctaggggtgcacgcttaggtgtgtatgtgtgtagtgtgcaatgtaaccggcaacgaaataatgaattgcgtggttcagtaacaagcgtgtgatctcctatgtctctgcagtcctttactattttgaatcacacgcaaggcgccaaatttccttggcgccaaatttagtattccatgcggattcgcctttattctgcgataatct

SEQ ID NO: 11357 - protein, 137 aa, Triticum aestivum
  peptide (1)..(137): Ceres Seq. ID no. 13661278
  misc_feature (13)..(119): NCBI GI NO: 34904462 NR Description: OSJNBa0086P08.10
  misc_feature (13)..(136): NCBI GI NO: 34910564 NR Description: B1131B07.10
  misc_feature (13)..(123): NCBI GI NO: 34912134 NR Description: OSJNBb0024F06.19
MLLSGGFSWVYLALLLALLTFNSVMAVYHSKGDTATVAFVATSYLDLVLLFCCLWLYNTTAAGSAWRNRLKASVWTLTTLLTFSFAYMVMGTAGLTLHVALLVWFIAAATGIGAFSAFFEQGRINPAPGEPMLPPPV

SEQ ID NO: 11358 - protein, 113 aa, Triticum aestivum
  peptide (1)..(113): Ceres Seq. ID no. 13661279
  misc_feature (1)..(95): NCBI GI NO: 34904462 NR Description: OSJNBa0086P08.10
  misc_feature (1)..(112): NCBI GI NO: 34910564 NR Description: B1131B07.10
  misc_feature (1)..(99): NCBI GI NO: 34912134 NR Description: OSJNBb0024F06.19
MAVYHSKGDTATVAFVATSYLDLVLLFCCLWLYNTTAAGSAWRNRLKASVWTLTTLLTFSFAYMVMGTAGLTLHVALLVWFIAAATGIGAFSAFFEQGRINPAPGEPMLPPPV

SEQ ID NO: 11359 - DNA, 754 bp, Triticum aestivum
  misc_feature (1)..(754): Ceres Seq. ID no. 13661351
ctttctcgcttctcataaactcgttggaacaaaaatcaaacaaaccatattacaaaatttgcgacccaaaggaagaaaaaaggtgaattttctgattccgagcagcccggccgatttagttgaggtcatccggggaatccggttcggctccagacggcgtcacgcacccgcgacgcgtcccggcccttgagcgtgcgtccgacgccctcgaccaccgacgccctggcctgacgccgcgccaggtacacgtgcggcggcacccagccgtcggcgtcgtcttgctgctgctcgtcgggctcgggctccagctccaggtcggcgaaccggctcggccacgcgggcacctcgacgggcgccgacgacgccacctgccgcccgtccgcgaacgcccggctgagcccgcccacgcgccgcggcggctcgcccctgggcgccctgtccgtgcgctgaatcccgtcctgatccgcggtggtggttggcgcgtccgacgatggagaataccagacgtccgattcggccaggtccggcaggtcgtcgtagggggacggggcgacggtggcggagccggggcggtggtggaagccgaggaagcgctcggcggcagagaaggccgtctgcttgcgcgccttggccatcgggcgcagtaccggcggctggctccggtcgattggtttggctgagcgcgcgcgcgcggtgggaaagatgggaggtgggaaagacggaggagcaggagagtgttgagggggggtttggc

SEQ ID NO: 11360 - protein, 88 aa, Triticum aestivum
  peptide (1)..(88): Ceres Seq. ID no. 13661352
  misc_feature (1)..(54): NCBI GI NO: 29829093 NR Description: putative translation initiation factor IF-2
  misc_feature (1)..(50): NCBI GI NO: 31227421 NR Description: ENSANGP00000004917 [Anopheles gambiae]
  misc_feature (1)..(50): NCBI GI NO: 32141270 NR Description: probable translational initiation factor
MENTRRPIRPGPAGRRRGTGRRWRSRGGGGSRGSARRQRRPSACAPWPSGAVPAAGSGRLVWLSARARWERWEVGKTEEQESVEGGFG

SEQ ID NO: 11361 - protein, 62 aa, Triticum aestivum
  peptide (1)..(62): Ceres Seq. ID no. 13661353
  misc_feature (52)..(62): NCBI GI NO: 29829093 NR Description: putative translation initiation factor IF-2
  misc_feature (51)..(62): NCBI GI NO: 31227421 NR Description: ENSANGP00000004917 [Anopheles gambiae]
FLASHKLVGTKIKQTILQNLRPKGRKKVNFLIPSSPADLVEVIRGIRFGSRRRHAPATRPGP

SEQ ID NO: 11362 - DNA, 595 bp, Triticum aestivum
  misc_feature (1)..(595): Ceres Seq. ID no. 14301686
aatcacaatctcaaacctcaaaccctaaaaaaataaaaaagagctacgtagaaagagacagagagaagaatgggtcgccaaaacgttattgtagtttttggcctcgtgttcttggccgtccttggcctcgccgcagctgcctcctctccgtctccttcagcgtcaccttccaaagctccatctacttccacacctgaggttgaatctccagtgtccgaggacaccattggaaccaccgacgacgatgtagctgcttctcctggtgatgatgacgtagctgtggctggtcctctaggaagtgactcgtcctacggtagcaatggaccttcaggctctgccgattctgctgacagcggcgcggcggctcttggagtttctgcggtcgttgcgggtgttacatccatcgtcggttctttcttgtttttctgaggcgtgtattttcatgagaatatcatttttgagtaaagactatttatatatatggatattgtgatgatcatgttgtaatttgtttctccttggttatgagaaccgatgtccttgaaataagctgaaaataaaactttccttagcaatataaaataaagaattacgg

SEQ ID NO: 11363 - protein, 119 aa, Triticum aestivum
  peptide (1)..(119): Ceres Seq. ID no. 14301687
  misc_feature (1)..(119): NCBI GI NO: 1168619 NR Description: ANTHER-SPECIFIC PROTEIN BCP1
  misc_feature (1)..(118): NCBI GI NO: 486757 NR Description: anther-specific protein
  misc_feature (1)..(117): NCBI GI NO: 21592730 NR Description: putative agp1 [Arabidopsis thaliana]
  misc_feature (1)..(117): NCBI GI NO: 25355278 NR Description: protein F21J9.18 [imported] - Arabidopsis thaliana
  misc_feature (1)..(109): NCBI GI NO: 15221772 NR Description: agp1 -related [Arabidopsis thaliana]
  misc_feature (1)..(113): NCBI GI NO: 780177 NR Description: agp1 [Arabidopsis thaliana]
  misc_feature (1)..(119): NCBI GI NO: 18404806 NR Description: expressed protein [Arabidopsis thaliana]
  misc_feature (1)..(119): NCBI GI NO: 21536506 NR Description: unknown [Arabidopsis thaliana]
  misc_feature (21)..(118): NCBI GI NO: 15241392 NR Description: arabinogalactan-protein (AGP6)
  misc_feature (21)..(118): NCBI GI NO: 25354589 NR Description: probable arabinogalactan protein AGP6
MGRQNVIVVFGLVFLAVLGLAAAASSPSPSASPSKAPSTSTPEVESPVSEDTIGTTDDDVAASPGDDDVAVAGPLGSDSSYGSNGPSGSADSADSGAAALGVSAVVAGVTSIVGSFLFF

SEQ ID NO: 11364 - protein, 64 aa, Triticum aestivum
  peptide (1)..(64): Ceres Seq. ID no. 14301688
SQSQTSNPKKIKKSYVERDREKNGSPKRYCSFWPRVLGRPWPRRSCLLSVSFSVTFQSSIYFHT

SEQ ID NO: 11365 - DNA, 996 bp, Triticum aestivum
  misc_feature (1)..(996): Ceres Seq. ID no. 13661727
gatcctttctctcatcctcaaacgctgcaagcagcacaccacacaaaatacaaaatggctcaaaccatgctgcttacttcgggagtttctgcgaaccaattcttaaggaacaagaaccctctcgctcagcccaaagttcaccatttcttcctctcgggaaactctcatgttgttctaccatctcgaagaccatcattagtacctcttgccatcttcaaacccaaaaccaaagctgctcccaaaaaggttgagaaggtgaagccaaaggttgaagacggtatcttcggaacatctggtgggataggtttcacgaagcagaacgagctctttgtgggtcgtgttgctatgatcggtttcgctgcatcgttgctgggtgaggcgttaacagggaaaggtatattagcacagttgaatctggagacagggataccgatttacgaagcagaaccattacttctcttcttcatattgttcactctgttgggtgctatcggagctcttggggacagaggaaaattcgtcgacgatcctcccaccggacttgagaaagccgtcattcctcccggcaaaggcgtccgatctgctctcggtcttaaagaacaaggtccattgtttgggttcacgaaggcaaacgagttgttcgtaggaagattggcacagttgggaatagcattttcattgataggagagattataaccgggaaaggagccttggctcaactcaacattgagactggtattccaattcaagatattgaacccctcgtcctcttaaacgttgctttcttcttctttgctgccattaatcctggtaatggaaagttcattactgatgatggtgaagaaaggtaaactctttatgtacttaaaatttgtggtttgtgagcccatcttcatgttgagacaaaaggacatggacagcttaaactgttgtaattcttaaatcctcttgtttttacttgaattttcagattatatatagtttcacaaccacct

SEQ ID NO: 11366 - protein, 283 aa, Triticum aestivum
  peptide (1)..(283): Ceres Seq. ID no. 13661728
  misc_feature (78)..(231): Pfam Name: Pfam Description:  Chlorophyll A-B binding protein
  misc_feature (19)..(282): NCBI GI NO: 15219418 NR Description: photosystem II 22kDa protein -related
  misc_feature (19)..(282): NCBI GI NO: 15294226 NR Description: unknown protein [Arabidopsis thaliana]
  misc_feature (19)..(282): NCBI GI NO: 1709846 NR Description: Photosystem II 22 kDa protein
  misc_feature (19)..(282): NCBI GI NO: 400890 NR Description: Photosystem II 22 kDa protein
  misc_feature (19)..(282): NCBI GI NO: 18202913 NR Description: Photosystem II 22 kDa protein
  misc_feature (19)..(282): NCBI GI NO: 18203444 NR Description: Photosystem II 22 kDa protein
  misc_feature (57)..(283): NCBI GI NO: 38345525 NR Description: OSJNBa0039K24.28
  misc_feature (19)..(282): NCBI GI NO: 34908652 NR Description: putative photosystem II subunit (22KDa) precursor
  misc_feature (57)..(283): NCBI GI NO: 7489520 NR Description: photosystem II 22-K chlorophyll-binding protein -rice
  misc_feature (129)..(282): NCBI GI NO: 6006279 NR Description: photosystem II 22 kDa protein
DPFSHPQTLQAAHHTKYKMAQTMLLTSGVSANQFLRNKNPLAQPKVHHFFLSGNSHVVLPSRRPSLVPLAIFKPKTKAAPKKVEKVKPKVEDGIFGTSGGIGFTKQNELFVGRVAMIGFAASLLGEALTGKGILAQLNLETGIPIYEAEPLLLFFILFTLLGAIGALGDRGKFVDDPPTGLEKAVIPPGKGVRSALGLKEQGPLFGFTKANELFVGRLAQLGIAFSLIGEIITGKGALAQLNIETGIPIQDIEPLVLLNVAFFFFAAINPGNGKFITDDGEER

SEQ ID NO: 11367 - protein, 265 aa, Triticum aestivum
  peptide (1)..(265): Ceres Seq. ID no. 13661729
  misc_feature (60)..(213): Pfam Name: Pfam Description:  Chlorophyll A-B binding protein
  misc_feature (1)..(264): NCBI GI NO: 15219418 NR Description: photosystem II 22kDa protein -related
  misc_feature (1)..(264): NCBI GI NO: 15294226 NR Description: unknown protein [Arabidopsis thaliana]
  misc_feature (1)..(264): NCBI GI NO: 1709846 NR Description: Photosystem II 22 kDa protein
  misc_feature (1)..(264): NCBI GI NO: 400890 NR Description: Photosystem II 22 kDa protein
  misc_feature (1)..(264): NCBI GI NO: 18202913 NR Description: Photosystem II 22 kDa protein
  misc_feature (1)..(264): NCBI GI NO: 18203444 NR Description: Photosystem II 22 kDa protein
  misc_feature (39)..(265): NCBI GI NO: 38345525 NR Description: OSJNBa0039K24.28
  misc_feature (1)..(264): NCBI GI NO: 34908652 NR Description: putative photosystem II subunit (22KDa) precursor
  misc_feature (39)..(265): NCBI GI NO: 7489520 NR Description: photosystem II 22-K chlorophyll-binding protein -rice
  misc_feature (111)..(264): NCBI GI NO: 6006279 NR Description: photosystem II 22 kDa protein
MAQTMLLTSGVSANQFLRNKNPLAQPKVHHFFLSGNSHVVLPSRRPSLVPLAIFKPKTKAAPKKVEKVKPKVEDGIFGTSGGIGFTKQNELFVGRVAMIGFAASLLGEALTGKGILAQLNLETGIPIYEAEPLLLFFILFTLLGAIGALGDRGKFVDDPPTGLEKAVIPPGKGVRSALGLKEQGPLFGFTKANELFVGRLAQLGIAFSLIGEIITGKGALAQLNIETGIPIQDIEPLVLLNVAFFFFAAINPGNGKFITDDGEER

SEQ ID NO: 11368 - protein, 261 aa, Triticum aestivum
  peptide (1)..(261): Ceres Seq. ID no. 13661730
  misc_feature (56)..(209): Pfam Name: Pfam Description:  Chlorophyll A-B binding protein
  misc_feature (1)..(260): NCBI GI NO: 15219418 NR Description: photosystem II 22kDa protein -related
  misc_feature (1)..(260): NCBI GI NO: 15294226 NR Description: unknown protein [Arabidopsis thaliana]
  misc_feature (1)..(260): NCBI GI NO: 1709846 NR Description: Photosystem II 22 kDa protein
  misc_feature (1)..(260): NCBI GI NO: 400890 NR Description: Photosystem II 22 kDa protein
  misc_feature (1)..(260): NCBI GI NO: 18202913 NR Description: Photosystem II 22 kDa protein
  misc_feature (1)..(260): NCBI GI NO: 18203444 NR Description: Photosystem II 22 kDa protein
  misc_feature (35)..(261): NCBI GI NO: 38345525 NR Description: OSJNBa0039K24.28
  misc_feature (1)..(260): NCBI GI NO: 34908652 NR Description: putative photosystem II subunit (22KDa) precursor
  misc_feature (35)..(261): NCBI GI NO: 7489520 NR Description: photosystem II 22-K chlorophyll-binding protein -rice
  misc_feature (107)..(260): NCBI GI NO: 6006279 NR Description: photosystem II 22 kDa protein
MLLTSGVSANQFLRNKNPLAQPKVHHFFLSGNSHVVLPSRRPSLVPLAIFKPKTKAAPKKVEKVKPKVEDGIFGTSGGIGFTKQNELFVGRVAMIGFAASLLGEALTGKGILAQLNLETGIPIYEAEPLLLFFILFTLLGAIGALGDRGKFVDDPPTGLEKAVIPPGKGVRSALGLKEQGPLFGFTKANELFVGRLAQLGIAFSLIGEIITGKGALAQLNIETGIPIQDIEPLVLLNVAFFFFAAINPGNGKFITDDGEER

SEQ ID NO: 11369 - DNA, 1091 bp, Triticum aestivum
  misc_feature (1)..(1091): Ceres Seq. ID no. 14301638
ttggctacacatctttataagtggccggcatgcactccacatagcagccacgactcagtagatggcggcatcggcggcccacgtcgcggccctggccgccatactcctcttcatcccttccctcctcgccactgtcgccgcgcagcagggcaaggccaaggccttctgcatcagccagttcgccatcgccagtcaggcttgctccatcctgccgcccagccccccggaggacgaccatcaccaccaccacgacgacgatgatgatgacgacgacgacgatgacgacgacgacgacgacgacgagcaccatggcggcgacggtgaccgccgcctccgtggacgccatggccacgcggcggtcatcaacatctcgtcccttggcctgatggcggcaaacaacgacagcagcgaagttcacgttgcaagaaacggcaccggtcaccatggcggcaaccacacccgccgcgggcgcgggcgcgggcgccttcgtgctactggacgcggccggcgtgtgcgtgtgcgcgacggtgatgatgacccggaccatgaccacgaccaccaggaggaccccgaccatgatgatgaccatgaggaggactccgaccccgacgacgcccatgacgacgaacctgatgacgatgacgacgacgacgacgacgaccacgagcacaatgacgacgaccacgagcaccaccacgacgaggagcttcgggcgtaccgcgactgctgccggtggctgcaggaggtgcagaaggactgtgtgtgcgaggcgctcctgcggctgcccccgttcctcgtgaaaccacagcacaagtacgtcgtccgggtggggcggacgtgccggatcgtctaccgctgcggcggcgtgtagccaactggccggttcacacgtttggttaactgcactcgttgtccctgcttcctctctacgattacgtgcctgttttgctcttcagtctacgtagatggataattaggtaggcagcacgtatggatcgggtgtaatttttctactaagtattgtcctcaaagtttttcgatgtgcttccattcggatagactaattgataataatactacatgttgtcccg

SEQ ID NO: 11370 - protein, 269 aa, Triticum aestivum
  peptide (1)..(269): Ceres Seq. ID no. 14301639
  misc_feature (155)..(221): Pfam Name: Pfam Description:  Mpp10 protein
  misc_feature (71)..(268): NCBI GI NO: 23617114 NR Description: contains ESTs C73631
  misc_feature (1)..(246): NCBI GI NO: 23617114 NR Description: contains ESTs C73631
  misc_feature (155)..(214): NCBI GI NO: 35210492 NR Description: aspartic acid-rich protein aspolin1
  misc_feature (56)..(88): NCBI GI NO: 35210492 NR Description: aspartic acid-rich protein aspolin1
  misc_feature (56)..(88): NCBI GI NO: 35210492 NR Description: aspartic acid-rich protein aspolin1
  misc_feature (56)..(88): NCBI GI NO: 35210492 NR Description: aspartic acid-rich protein aspolin1
  misc_feature (56)..(88): NCBI GI NO: 35210492 NR Description: aspartic acid-rich protein aspolin1
  misc_feature (56)..(88): NCBI GI NO: 35210492 NR Description: aspartic acid-rich protein aspolin1
  misc_feature (56)..(88): NCBI GI NO: 35210492 NR Description: aspartic acid-rich protein aspolin1
  misc_feature (56)..(88): NCBI GI NO: 35210492 NR Description: aspartic acid-rich protein aspolin1
MAASAAHVAALAAILLFIPSLLATVAAQQGKAKAFCISQFAIASQACSILPPSPPEDDHHHHHDDDDDDDDDDDDDDDDDEHHGGDGDRRLRGRHGHAAVINISSLGLMAANNDSSEVHVARNGTGHHGGNHTRRGRGRGRLRATGRGRRVRVRDGDDDPDHDHDHQEDPDHDDDHEEDSDPDDAHDDEPDDDDDDDDDDHEHNDDDHEHHHDEELRAYRDCCRWLQEVQKDCVCEALLRLPPFLVKPQHKYVVRVGRTCRIVYRCGGV

SEQ ID NO: 11371 - protein, 161 aa, Triticum aestivum
  peptide (1)..(161): Ceres Seq. ID no. 14301640
  misc_feature (47)..(113): Pfam Name: Pfam Description:  Mpp10 protein
  misc_feature (1)..(160): NCBI GI NO: 23617114 NR Description: contains ESTs C73631
  misc_feature (1)..(138): NCBI GI NO: 23617114 NR Description: contains ESTs C73631
  misc_feature (47)..(106): NCBI GI NO: 35210492 NR Description: aspartic acid-rich protein aspolin1
  misc_feature (47)..(107): NCBI GI NO: 35210492 NR Description: aspartic acid-rich protein aspolin1
  misc_feature (47)..(107): NCBI GI NO: 35210492 NR Description: aspartic acid-rich protein aspolin1
  misc_feature (47)..(107): NCBI GI NO: 35210492 NR Description: aspartic acid-rich protein aspolin1
  misc_feature (47)..(107): NCBI GI NO: 35210492 NR Description: aspartic acid-rich protein aspolin1
  misc_feature (47)..(107): NCBI GI NO: 35210492 NR Description: aspartic acid-rich protein aspolin1
  misc_feature (47)..(107): NCBI GI NO: 35210492 NR Description: aspartic acid-rich protein aspolin1
  misc_feature (47)..(107): NCBI GI NO: 35210492 NR Description: aspartic acid-rich protein aspolin1
MAANNDSSEVHVARNGTGHHGGNHTRRGRGRGRLRATGRGRRVRVRDGDDDPDHDHDHQEDPDHDDDHEEDSDPDDAHDDEPDDDDDDDDDDHEHNDDDHEHHHDEELRAYRDCCRWLQEVQKDCVCEALLRLPPFLVKPQHKYVVRVGRTCRIVYRCGGV

SEQ ID NO: 11372 - DNA, 961 bp, Triticum aestivum
  misc_feature (1)..(961): Ceres Seq. ID no. 12784729
actacacgcccacccctcacccttgatcgatcacacatcaaacccctccacacgctcgcccgcgcgcgccacggacgcagcaatggccgccctcaccgcctccatcgccacctccagcgccttcgccgcgaagccgcgcctggcccgcccgccggcgcgcctctccgtctcctgctccgcgtccaacggcgacaacaacaccccctccctctccgcttccatcaagaccttctcggcggccctggcgctctcatccgtcctcctctcctccgccgcgacctccccgccgccggcggccgccgacatcgccggcctgaccccgtgcaaggagtccaaggcgttcgccaagcgggagaagcagtcggtgaagaagctcaactcgtcgctcaagaagtacgcgcccgactcggcgcccgcgctcgccatccaggccaccatcgagaagaccaagcgccggttcgagaactacggcaagttcggcctgctctgcggctccgacggcctgccccacctcatcgtcagcggcgaccagcggcactggggcgagttcatcacccccggcgtgctcttcctctacatcgcggggtggatcgggtgggtcggccgcagctacctcatcgccgtcagcggcgagaagaagcccgccatgcgggagatcatcatcgacgtcgagctcgccgccaggatcatccccaggggcttcatctggcccgtcgccgcctaccgcgagctcatcaacggcgacctcgtcgtcgacgacgccgacatcggctactaagtagctaccatgcgtgcgtggttggctagtcggtcccagatgggcagcggaggattgatgagggcttgtggtgtcgatctgcgtgggcttggtgtaggagctgataggaacatggagaaatggaagctctcttgtatttaagaaactgaacccaatcttgtataactattgtgttctctcttc

SEQ ID NO: 11373 - protein, 268 aa, Triticum aestivum
  peptide (1)..(268): Ceres Seq. ID no. 12784730
  misc_feature (118)..(264): Pfam Name: Pfam Description:  Amidohydrolase family
TTRPPLTLDRSHIKPLHTLARARHGRSNGRPHRLHRHLQRLRREAAPGPPAGAPLRLLLRVQRRQQHPLPLRFHQDLLGGPGALIRPPLLRRDLPAAGGRRHRRPDPVQGVQGVRQAGEAVGEEAQLVAQEVRARLGARARHPGHHREDQAPVRELRQVRPALRLRRPAPPHRQRRPAALGRVHHPRRALPLHRGVDRVGRPQLPHRRQRREEARHAGDHHRRRARRQDHPQGLHLARRRLPRAHQRRPRRRRRRHRLLSSYHACVVG

SEQ ID NO: 11374 - protein, 258 aa, Triticum aestivum
  peptide (1)..(258): Ceres Seq. ID no. 12784731
  misc_feature (76)..(254): Pfam Name: Pfam Description:  Photosystem I reaction centre subunit III
  misc_feature (28)..(258): NCBI GI NO: 548604 NR Description: Photosystem I reaction centre subunit III
  misc_feature (28)..(258): NCBI GI NO: 34897038 NR Description: photosystem-1 F subunit precursor
  misc_feature (28)..(258): NCBI GI NO: 3885892 NR Description: photosystem-1 F subunit precursor [Oryza sativa]
  misc_feature (30)..(253): NCBI GI NO: 8954295 NR Description: photosystem I reaction center subunit III
  misc_feature (50)..(253): NCBI GI NO: 15221681 NR Description: photosystem I subunit III precursor, putative
  misc_feature (50)..(253): NCBI GI NO: 15450361 NR Description: At1g31330/T19E23_1 [Arabidopsis thaliana]
  misc_feature (64)..(253): NCBI GI NO: 5734518 NR Description: photosystem I subunit III precursor
  misc_feature (31)..(250): NCBI GI NO: 30013659 NR Description: putative photosystem I subunit III precursor
  misc_feature (55)..(250): NCBI GI NO: 1172664 NR Description: Photosystem I reaction centre subunit III
  misc_feature (53)..(250): NCBI GI NO: 131187 NR Description: Photosystem I reaction centre subunit III
LHAHPSPLIDHTSNPSTRSPARATDAAMAALTASIATSSAFAAKPRLARPPARLSVSCSASNGDNNTPSLSASIKTFSAALALSSVLLSSAATSPPPAAADIAGLTPCKESKAFAKREKQSVKKLNSSLKKYAPDSAPALAIQATIEKTKRRFENYGKFGLLCGSDGLPHLIVSGDQRHWGEFITPGVLFLYIAGWIGWVGRSYLIAVSGEKKPAMREIIIDVELAARIIPRGFIWPVAAYRELINGDLVVDDADIGY

SEQ ID NO: 11375 - protein, 231 aa, Triticum aestivum
  peptide (1)..(231): Ceres Seq. ID no. 12784732
  misc_feature (49)..(227): Pfam Name: Pfam Description:  Photosystem I reaction centre subunit III
  misc_feature (1)..(231): NCBI GI NO: 548604 NR Description: Photosystem I reaction centre subunit III
  misc_feature (1)..(231): NCBI GI NO: 34897038 NR Description: photosystem-1 F subunit precursor
  misc_feature (1)..(231): NCBI GI NO: 3885892 NR Description: photosystem-1 F subunit precursor [Oryza sativa]
  misc_feature (3)..(226): NCBI GI NO: 8954295 NR Description: photosystem I reaction center subunit III
  misc_feature (23)..(226): NCBI GI NO: 15221681 NR Description: photosystem I subunit III precursor, putative
  misc_feature (23)..(226): NCBI GI NO: 15450361 NR Description: At1g31330/T19E23_1 [Arabidopsis thaliana]
  misc_feature (37)..(226): NCBI GI NO: 5734518 NR Description: photosystem I subunit III precursor
  misc_feature (4)..(223): NCBI GI NO: 30013659 NR Description: putative photosystem I subunit III precursor
  misc_feature (28)..(223): NCBI GI NO: 1172664 NR Description: Photosystem I reaction centre subunit III
  misc_feature (26)..(223): NCBI GI NO: 131187 NR Description: Photosystem I reaction centre subunit III
MAALTASIATSSAFAAKPRLARPPARLSVSCSASNGDNNTPSLSASIKTFSAALALSSVLLSSAATSPPPAAADIAGLTPCKESKAFAKREKQSVKKLNSSLKKYAPDSAPALAIQATIEKTKRRFENYGKFGLLCGSDGLPHLIVSGDQRHWGEFITPGVLFLYIAGWIGWVGRSYLIAVSGEKKPAMREIIIDVELAARIIPRGFIWPVAAYRELINGDLVVDDADIGY

SEQ ID NO: 11376 - DNA, 981 bp, Triticum aestivum
  misc_feature (1)..(981): Ceres Seq. ID no. 13661434
agaacatcctaatcgaaaaactaccagcaggtccagcgccaccatcgccctacccctacgcccccacagcaacacgagaaaaccaccgcaagcacgcgccccgctccgccccgagacgcgacggtggaatccggcaggcacgggcacgagcaggcgtgcggacacatagcccgagcgcgcgcgatggcagtcggagggcggcgcgcggcggcggcggcgtgcgggcgctggtgcctggtgatcctcgccgtggcctccgcgctcggcgtctccgggcccgcgctctactggcgctacaagaagggcttctcctcccccgcctccggcgctgccgccgtctccgcaccctcctgcccgccctgcacctgcgactgcccgccgccgctctccctccagtccatcgcgccagggctcatgaacttctcaatttcagcttgcggcacaaatgaccctgagcgtaccaaggagatggcgaagcagtttgttgatctcctcaacgaggaactcaagctgcagcaggttgtagctgaggagcacatccatcacatgaatgccacacttgtcgaggcaaaaaggcaggctaccctgtaccagcgagaggcggagaagtgtaacgcggccacagagacttgtgaggaagccagggagaagtctgagggggcaatctcaaaggagaggaaactgacagcactgtgggaacgtcgagctcgcgaattgggttggcaggattctcgagccgcgaccaccgcacgatagcttggcaagcagtttgcttctgcaggtaaaagtatttgcagcaggcggcattttaccacaccgagcaatgttagctgtatgggtccacgtgtaatgtttgccagtgtatgactatgagttgtcccagttgaagtatagttactctagacactgtagattccttataaatgtaactagtatacattgtttaaatatgcaagctttatattgaagacaaaaaaaaaa

SEQ ID NO: 11377 - protein, 190 aa, Triticum aestivum
  peptide (1)..(190): Ceres Seq. ID no. 13661435
  misc_feature (13)..(181): Pfam Name: DUF1068 Pfam Description: Protein of unknown function
  misc_feature (5)..(188): NCBI GI NO: 38345038 NR Description: OSJNBa0029H02.22
  misc_feature (13)..(181): NCBI GI NO: 18417716 NR Description: expressed protein [Arabidopsis thaliana]
  misc_feature (13)..(181): NCBI GI NO: 18400504 NR Description: expressed protein [Arabidopsis thaliana]
  misc_feature (17)..(181): NCBI GI NO: 25364110 NR Description: hypothetical protein At2g24290
  misc_feature (13)..(181): NCBI GI NO: 25407700 NR Description: hypothetical protein AT4g30990
  misc_feature (15)..(190): NCBI GI NO: 27922919 NR Description: unknown protein [Phytophthora sojae]
  misc_feature (18)..(190): NCBI GI NO: 18403016 NR Description: expressed protein [Arabidopsis thaliana]
  misc_feature (18)..(190): NCBI GI NO: 21553781 NR Description: unknown [Arabidopsis thaliana]
  misc_feature (6)..(182): NCBI GI NO: 18390477 NR Description: expressed protein [Arabidopsis thaliana]
  misc_feature (18)..(182): NCBI GI NO: 25364108 NR Description: hypothetical protein
MAVGGRRAAAAACGRWCLVILAVASALGVSGPALYWRYKKGFSSPASGAAAVSAPSCPPCTCDCPPPLSLQSIAPGLMNFSISACGTNDPERTKEMAKQFVDLLNEELKLQQVVAEEHIHHMNATLVEAKRQATLYQREAEKCNAATETCEEAREKSEGAISKERKLTALWERRARELGWQDSRAATTAR

SEQ ID NO: 11378 - protein, 148 aa, Triticum aestivum
  peptide (1)..(148): Ceres Seq. ID no. 13661436
NILIEKLPAGPAPPSPYPYAPTATRENHRKHAPRSAPRRDGGIRQARARAGVRTHSPSARDGSRRAARGGGGVRALVPGDPRRGLRARRLRARALLALQEGLLLPRLRRCRRLRTLLPALHLRLPAAALPPVHRARAHELLNFSLRHK

SEQ ID NO: 11379 - protein, 113 aa, Triticum aestivum
  peptide (1)..(113): Ceres Seq. ID no. 13661437
  misc_feature (1)..(104): Pfam Name: DUF1068 Pfam Description: Protein of unknown function
  misc_feature (1)..(111): NCBI GI NO: 38345038 NR Description: OSJNBa0029H02.22
  misc_feature (1)..(104): NCBI GI NO: 18417716 NR Description: expressed protein [Arabidopsis thaliana]
  misc_feature (1)..(104): NCBI GI NO: 18400504 NR Description: expressed protein [Arabidopsis thaliana]
  misc_feature (1)..(104): NCBI GI NO: 25364110 NR Description: hypothetical protein At2g24290
  misc_feature (1)..(104): NCBI GI NO: 25407700 NR Description: hypothetical protein AT4g30990
  misc_feature (1)..(113): NCBI GI NO: 27922919 NR Description: unknown protein [Phytophthora sojae]
  misc_feature (1)..(113): NCBI GI NO: 18403016 NR Description: expressed protein [Arabidopsis thaliana]
  misc_feature (1)..(113): NCBI GI NO: 21553781 NR Description: unknown [Arabidopsis thaliana]
  misc_feature (1)..(105): NCBI GI NO: 18390477 NR Description: expressed protein [Arabidopsis thaliana]
  misc_feature (1)..(105): NCBI GI NO: 25364108 NR Description: hypothetical protein
MNFSISACGTNDPERTKEMAKQFVDLLNEELKLQQVVAEEHIHHMNATLVEAKRQATLYQREAEKCNAATETCEEAREKSEGAISKERKLTALWERRARELGWQDSRAATTAR

SEQ ID NO: 11380 - DNA, 922 bp, Triticum aestivum
  misc_feature (1)..(922): Ceres Seq. ID no. 15225738
aaggttcttgatttgtggtacagactagaaagctttatcctgccatgtcagggacctctttcaccggcgcgccggcgtcagatgcccccctggctccgtacccgcggcagcagaactacagcttcaacgggcgcgtcctgcttatggccgccttcctccttttcgggctcaccatcttcttcaccctcatccgcttcttgctgtacgtgttagtggcgcggtctggcggccgccgtcgccgcggcagcttcaccgccggcatcctgcggtccatcaactcgtttggcggaactagcggccggcgtgggctggacgcctccgcgctctccgcgctgccggtcaccgcgtaccggaaggagggcgccgccaccgccggggctgactgcgccgtgtgcctgtcggagctcgccgacggagaaaaggtgcgggagctgcccaactgcgggcactcgttccacgtggagtgcgtcgacgcatggctgcgctccaggacgacctgccctctctgccgcgccgaggctgagctgcccaaggggaacggcaaggcggaggtggcggcgcagtcgtcgtcgtcctccccctcatcctctgccagggagccgccgcaacaggcgttgttcgtgggaggaggaaccttgatcgtgaccgtgcaaggtggcttcccggatacgcaaaggggcgtgcgtgggtcaacatcggggtaggaggtcagtccggatcttcctattcctaaattgcagcgaagtttcgaagaaggctacagcgacagatgcatatactgtaggttagaccgttgttcacggcgtgcacaagttggatacaatcatacaaaacacctctgtttgagcgaaagtcacccatttgtttgtttgtttgttgtatttcgaggagagcatataagaaactcatatgttgttaattc

SEQ ID NO: 11381 - protein, 219 aa, Triticum aestivum
  peptide (1)..(219): Ceres Seq. ID no. 15225739
  misc_feature (114)..(155): Pfam Name: RING finger Pfam Description: Zinc finger, C3HC4 type
  misc_feature (1)..(205): NCBI GI NO: 34903936 NR Description: OSJNBa0038J17.13
  misc_feature (20)..(190): NCBI GI NO: 34903920 NR Description: OSJNBa0038J17.5
  misc_feature (5)..(187): NCBI GI NO: 38569180 NR Description: OSJNBa0086B14.4
  misc_feature (22)..(157): NCBI GI NO: 21645888 NR Description: ring-H2 zinc finger protein [Zea mays]
  misc_feature (10)..(184): NCBI GI NO: 34894514 NR Description: P0551A11.21
  misc_feature (22)..(157): NCBI GI NO: 18092342 NR Description: ring-H2 zinc finger protein [Zea mays]
  misc_feature (1)..(162): NCBI GI NO: 8698833 NR Description: EL5 [Oryza sativa (japonica cultivar-group)]
  misc_feature (61)..(195): NCBI GI NO: 30017522 NR Description: putative ring-H2 zinc finger protein
  misc_feature (19)..(160): NCBI GI NO: 15227929 NR Description: RING zinc finger protein -related
  misc_feature (24)..(175): NCBI GI NO: 34907968 NR Description: P0446G04.15
MSGTSFTGAPASDAPLAPYPRQQNYSFNGRVLLMAAFLLFGLTIFFTLIRFLLYVLVARSGGRRRRGSFTAGILRSINSFGGTSGRRGLDASALSALPVTAYRKEGAATAGADCAVCLSELADGEKVRELPNCGHSFHVECVDAWLRSRTTCPLCRAEAELPKGNGKAEVAAQSSSSSPSSSAREPPQQALFVGGGTLIVTVQGGFPDTQRGVRGSTSG

SEQ ID NO: 11382 - protein, 186 aa, Triticum aestivum
  peptide (1)..(186): Ceres Seq. ID no. 15225740
  misc_feature (81)..(122): Pfam Name: RING finger Pfam Description: Zinc finger, C3HC4 type
  misc_feature (1)..(172): NCBI GI NO: 34903936 NR Description: OSJNBa0038J17.13
  misc_feature (1)..(157): NCBI GI NO: 34903920 NR Description: OSJNBa0038J17.5
  misc_feature (1)..(154): NCBI GI NO: 38569180 NR Description: OSJNBa0086B14.4
  misc_feature (1)..(124): NCBI GI NO: 21645888 NR Description: ring-H2 zinc finger protein [Zea mays]
  misc_feature (1)..(151): NCBI GI NO: 34894514 NR Description: P0551A11.21
  misc_feature (1)..(124): NCBI GI NO: 18092342 NR Description: ring-H2 zinc finger protein [Zea mays]
  misc_feature (1)..(129): NCBI GI NO: 8698833 NR Description: EL5 [Oryza sativa (japonica cultivar-group)]
  misc_feature (28)..(162): NCBI GI NO: 30017522 NR Description: putative ring-H2 zinc finger protein
  misc_feature (1)..(127): NCBI GI NO: 15227929 NR Description: RING zinc finger protein -related
  misc_feature (1)..(142): NCBI GI NO: 34907968 NR Description: P0446G04.15
MAAFLLFGLTIFFTLIRFLLYVLVARSGGRRRRGSFTAGILRSINSFGGTSGRRGLDASALSALPVTAYRKEGAATAGADCAVCLSELADGEKVRELPNCGHSFHVECVDAWLRSRTTCPLCRAEAELPKGNGKAEVAAQSSSSSPSSSAREPPQQALFVGGGTLIVTVQGGFPDTQRGVRGSTSG

SEQ ID NO: 11383 - DNA, 964 bp, Triticum aestivum
  misc_feature (1)..(964): Ceres Seq. ID no. 14301656
atttctttcttgtgatcaatctacctatctatctgcttctgcttcttcttcttcttcttcttaacactgaacgacaatgtggcttgggatctccatctccaagcaaggacaaggacaaggacaaggagcggcggctgtagcagtggtcgccatgctcggcctctgcaccatatccatacccatgtcgatgctgcctctcgccgcacccaccatccaccacgaaggaggcgctcaaggcggaagggggaacccaaacccagccaacgcgctggtggcgctggtgaacgccgaccgggcagccgccaagctacccgccctccgcaccaccaagggcctcggctgcatggcgctgcagtgcatcgcccgctgcctcgccctctcccccgccaccgcctgcgccgccgacggcacgctggcgccgccctgccacccgccggagactgacatcaccgaggtctacgccgccaactgcggggtcgagctgcccacggtcgacgtcgtctccggccgcatcctcggctgcagcagccaaagctccgacggcgtcagcggggacgcgctccacatggccaacgccaccgtggtgcgtggcagggagcacgcgcaggtgggcgccggcgtcgaccgcggcggcttctggtgcctcctcttcagcagcggcagccccaactccagcttccagctggaggccgccggcaggggcatcgcccagcagcacggctgcttcagcgaccccgacgccaccctctcctgcaccacctccgccggccaccaccaaaccagacgactcaccgccggagtcacgtcctttgccttggctgcttccactctgcttttcctcctctagtctagtctagtaatgaataagctagcagagacaccctagaagatactagtattactcggacttgtaactttgctattcaaacagtctgtcagtcagtgatgagtgtgatcatttttc

SEQ ID NO: 11384 - protein, 256 aa, Triticum aestivum
  peptide (1)..(256): Ceres Seq. ID no. 14301657
  misc_feature (60)..(238): NCBI GI NO: 30678256 NR Description: expressed protein [Arabidopsis thaliana]
MWLGISISKQGQGQGQGAAAVAVVAMLGLCTISIPMSMLPLAAPTIHHEGGAQGGRGNPNPANALVALVNADRAAAKLPALRTTKGLGCMALQCIARCLALSPATACAADGTLAPPCHPPETDITEVYAANCGVELPTVDVVSGRILGCSSQSSDGVSGDALHMANATVVRGREHAQVGAGVDRGGFWCLLFSSGSPNSSFQLEAAGRGIAQQHGCFSDPDATLSCTTSAGHHQTRRLTAGVTSFALAASTLLFLL

SEQ ID NO: 11385 - protein, 231 aa, Triticum aestivum
  peptide (1)..(231): Ceres Seq. ID no. 14301658
  misc_feature (35)..(213): NCBI GI NO: 30678256 NR Description: expressed protein [Arabidopsis thaliana]
MLGLCTISIPMSMLPLAAPTIHHEGGAQGGRGNPNPANALVALVNADRAAAKLPALRTTKGLGCMALQCIARCLALSPATACAADGTLAPPCHPPETDITEVYAANCGVELPTVDVVSGRILGCSSQSSDGVSGDALHMANATVVRGREHAQVGAGVDRGGFWCLLFSSGSPNSSFQLEAAGRGIAQQHGCFSDPDATLSCTTSAGHHQTRRLTAGVTSFALAASTLLFLL

SEQ ID NO: 11386 - protein, 221 aa, Triticum aestivum
  peptide (1)..(221): Ceres Seq. ID no. 14301659
  misc_feature (25)..(203): NCBI GI NO: 30678256 NR Description: expressed protein [Arabidopsis thaliana]
MSMLPLAAPTIHHEGGAQGGRGNPNPANALVALVNADRAAAKLPALRTTKGLGCMALQCIARCLALSPATACAADGTLAPPCHPPETDITEVYAANCGVELPTVDVVSGRILGCSSQSSDGVSGDALHMANATVVRGREHAQVGAGVDRGGFWCLLFSSGSPNSSFQLEAAGRGIAQQHGCFSDPDATLSCTTSAGHHQTRRLTAGVTSFALAASTLLFLL

SEQ ID NO: 11387 - DNA, 766 bp, Triticum aestivum
  misc_feature (1)..(766): Ceres Seq. ID no. 13661756
  misc_feature (97)..(97): n is a, c, t, g, unknown, or other
attacgatttagagggagggaggaagaagaatcagatcggagaaaatgacaatgacgacgtcgatgatacagaggctgttcacgcaaggcaccaagntcgtctgcgtcgggcgtaactacgccgctcacgccaaagaactaggcaacgccgttcccaaggaaccagttatattcttaaagccgacgtcatcatacttagagaacggaggaacgattgagattccacatcctctagaatcactccatcatgaggtggagctcgctgtagtgatgggagagaaggctagagatgtacccgaggcaaccgccatggattacattggaggatatgcggttgctcttgatatgactgctagggaactccaagctactgccaaggcatctggtctcccttggactcttgctaaaggacaggatactttcactccaataagctctgttctgccaaaggcgatggtgcatgatcctgataacctagaactttggctgaaggttgatggtgaaacaagacagaagggtttgacaaaagatatgatcttcaaggttccgtacctcatcagctacataagctctataatgactctctacgaaggagatgtcatcttgacaggtacgccagaaggtgttggacctgtaaagataggacagaagataaccgcagggatcactggtctatctgaagttcagttcgatgttgataggcgtctaaagcctttgagttaattgttttgtttgtgtttcatataatactattaataaaaatgtt

SEQ ID NO: 11388 - protein, 225 aa, Triticum aestivum
  peptide (1)..(225): Ceres Seq. ID no. 13661757
  misc_feature (32)..(199): Pfam Name: FAA Pfam Description: Fumarylacetoacetate
  misc_feature (3)..(225): NCBI GI NO: 16209656 NR Description: AT4g15940/dl4011w [Arabidopsis thaliana]
  misc_feature (3)..(225): NCBI GI NO: 15234757 NR Description: isomerase like protein [Arabidopsis thaliana]
  misc_feature (3)..(224): NCBI GI NO: 15228286 NR Description: decarboxilase -related [Arabidopsis thaliana]
  misc_feature (3)..(188): NCBI GI NO: 7485073 NR Description: hypothetical protein - Arabidopsis thaliana
  misc_feature (9)..(225): NCBI GI NO: 34897304 NR Description: putative hydroxylase [Oryza sativa]
  misc_feature (9)..(189): NCBI GI NO: 28372682 NR Description: putative isomerase
  misc_feature (8)..(217): NCBI GI NO: 28829830 NR Description: similar to Arabidopsis thaliana (Mouse-ear cress)
  misc_feature (8)..(219): NCBI GI NO: 13654274 NR Description: hypothetical protein DKFZp566J2046 [Homo sapiens]
  misc_feature (8)..(219): NCBI GI NO: 14336767 NR Description: similar to homoprotocatechuate catabolismbifunctional isomerase/ decarboxylase
  misc_feature (8)..(213): NCBI GI NO: 38648928 NR Description: Unknown (protein for MGC:74876) [Homo sapiens]
  misc_feature (18)..(18): Xaa is any aa, unknown or other
MTMTTSMIQRLFTQGTKXVCVGRNYAAHAKELGNAVPKEPVIFLKPTSSYLENGGTIEIPHPLESLHHEVELAVVMGEKARDVPEATAMDYIGGYAVALDMTARELQATAKASGLPWTLAKGQDTFTPISSVLPKAMVHDPDNLELWLKVDGETRQKGLTKDMIFKVPYLISYISSIMTLYEGDVILTGTPEGVGPVKIGQKITAGITGLSEVQFDVDRRLKPLS

SEQ ID NO: 11389 - protein, 223 aa, Triticum aestivum
  peptide (1)..(223): Ceres Seq. ID no. 13661758
  misc_feature (30)..(197): Pfam Name: FAA Pfam Description: Fumarylacetoacetate
  misc_feature (1)..(223): NCBI GI NO: 16209656 NR Description: AT4g15940/dl4011w [Arabidopsis thaliana]
  misc_feature (1)..(223): NCBI GI NO: 15234757 NR Description: isomerase like protein [Arabidopsis thaliana]
  misc_feature (1)..(222): NCBI GI NO: 15228286 NR Description: decarboxilase -related [Arabidopsis thaliana]
  misc_feature (1)..(186): NCBI GI NO: 7485073 NR Description: hypothetical protein - Arabidopsis thaliana
  misc_feature (7)..(223): NCBI GI NO: 34897304 NR Description: putative hydroxylase [Oryza sativa]
  misc_feature (7)..(187): NCBI GI NO: 28372682 NR Description: putative isomerase
  misc_feature (6)..(215): NCBI GI NO: 28829830 NR Description: similar to Arabidopsis thaliana (Mouse-ear cress)
  misc_feature (6)..(217): NCBI GI NO: 13654274 NR Description: hypothetical protein DKFZp566J2046 [Homo sapiens]
  misc_feature (6)..(217): NCBI GI NO: 14336767 NR Description: similar to homoprotocatechuate catabolismbifunctional isomerase/ decarboxylase
  misc_feature (6)..(211): NCBI GI NO: 38648928 NR Description: Unknown (protein for MGC:74876) [Homo sapiens]
  misc_feature (16)..(16): Xaa is any aa, unknown or other
MTTSMIQRLFTQGTKXVCVGRNYAAHAKELGNAVPKEPVIFLKPTSSYLENGGTIEIPHPLESLHHEVELAVVMGEKARDVPEATAMDYIGGYAVALDMTARELQATAKASGLPWTLAKGQDTFTPISSVLPKAMVHDPDNLELWLKVDGETRQKGLTKDMIFKVPYLISYISSIMTLYEGDVILTGTPEGVGPVKIGQKITAGITGLSEVQFDVDRRLKPLS

SEQ ID NO: 11390 - protein, 219 aa, Triticum aestivum
  peptide (1)..(219): Ceres Seq. ID no. 13661759
  misc_feature (26)..(193): Pfam Name: FAA Pfam Description: Fumarylacetoacetate
  misc_feature (1)..(219): NCBI GI NO: 16209656 NR Description: AT4g15940/dl4011w [Arabidopsis thaliana]
  misc_feature (1)..(219): NCBI GI NO: 15234757 NR Description: isomerase like protein [Arabidopsis thaliana]
  misc_feature (1)..(218): NCBI GI NO: 15228286 NR Description: decarboxilase -related [Arabidopsis thaliana]
  misc_feature (1)..(182): NCBI GI NO: 7485073 NR Description: hypothetical protein - Arabidopsis thaliana
  misc_feature (3)..(219): NCBI GI NO: 34897304 NR Description: putative hydroxylase [Oryza sativa]
  misc_feature (3)..(183): NCBI GI NO: 28372682 NR Description: putative isomerase
  misc_feature (2)..(211): NCBI GI NO: 28829830 NR Description: similar to Arabidopsis thaliana (Mouse-ear cress)
  misc_feature (2)..(213): NCBI GI NO: 13654274 NR Description: hypothetical protein DKFZp566J2046 [Homo sapiens]
  misc_feature (2)..(213): NCBI GI NO: 14336767 NR Description: similar to homoprotocatechuate catabolismbifunctional isomerase/ decarboxylase
  misc_feature (2)..(207): NCBI GI NO: 38648928 NR Description: Unknown (protein for MGC:74876) [Homo sapiens]
  misc_feature (12)..(12): Xaa is any aa, unknown or other
MIQRLFTQGTKXVCVGRNYAAHAKELGNAVPKEPVIFLKPTSSYLENGGTIEIPHPLESLHHEVELAVVMGEKARDVPEATAMDYIGGYAVALDMTARELQATAKASGLPWTLAKGQDTFTPISSVLPKAMVHDPDNLELWLKVDGETRQKGLTKDMIFKVPYLISYISSIMTLYEGDVILTGTPEGVGPVKIGQKITAGITGLSEVQFDVDRRLKPLS

SEQ ID NO: 11391 - DNA, 559 bp, Triticum aestivum
  misc_feature (1)..(559): Ceres Seq. ID no. 12624623
atggctagggaagttcttaccaggtttgcagctgagatttggccattactttgttacctgctgtagctttttgtcagccgtatttagcccctactttcaagtatgcctgaacatatgatgtcaactcccaggttcccagacatagcatccgttcagcttaggatgccaaacctccactttcttcccgtgaacctaggggggaaagaaaatccaggattggtgaagtttgctgatgatgtgtacatgccgactgacgagccgcatggaaccatcgaagcaacgttgagccgtgccaactcaaagctgtaatttcacttgatgcttgtggccaggctcatgatttggtttggtttcttgaagatcacaatcgccaataaacaaagtgatagggggaaagctagcacaaccaccccttgcaaaagggtaaaaggacgtaaactttgcatatgtattcagctaattgacttgtacatggctagctagagttcccccatcgtaaattttactgttgtacaaaaccttcaatgtttcgttgtctccacaatgctataatatagcc

SEQ ID NO: 11392 - protein, 68 aa, Triticum aestivum
  peptide (1)..(68): Ceres Seq. ID no. 12624624
  misc_feature (10)..(68): NCBI GI NO: 34908558 NR Description: putative uricase
  misc_feature (10)..(68): NCBI GI NO: 6175090 NR Description: Uricase (Urate oxidase) (Nodulin 35 homolog)
  misc_feature (10)..(68): NCBI GI NO: 15225267 NR Description: putative uricase subunit; protein id: At2g26230
  misc_feature (10)..(68): NCBI GI NO: 11414898 NR Description: uricase [Lotus japonicus]
  misc_feature (10)..(68): NCBI GI NO: 7242493 NR Description: urate oxidase [Cicer arietinum]
  misc_feature (10)..(68): NCBI GI NO: 4996846 NR Description: uricase (Nod-35) [Medicago sativa]
  misc_feature (10)..(68): NCBI GI NO: 4996848 NR Description: uricase (Nod-35) [Medicago sativa]
  misc_feature (10)..(68): NCBI GI NO: 6175091 NR Description: Uricase II
  misc_feature (10)..(68): NCBI GI NO: 170031 NR Description: nodulin 35
  misc_feature (10)..(68): NCBI GI NO: 6136152 NR Description: Uricase II isozyme 2
MPEHMMSTPRFPDIASVQLRMPNLHFLPVNLGGKENPGLVKFADDVYMPTDEPHGTIEATLSRANSKL

SEQ ID NO: 11393 - protein, 64 aa, Triticum aestivum
  peptide (1)..(64): Ceres Seq. ID no. 12624625
  misc_feature (6)..(64): NCBI GI NO: 34908558 NR Description: putative uricase
  misc_feature (6)..(64): NCBI GI NO: 6175090 NR Description: Uricase (Urate oxidase) (Nodulin 35 homolog)
  misc_feature (6)..(64): NCBI GI NO: 15225267 NR Description: putative uricase subunit; protein id: At2g26230
  misc_feature (6)..(64): NCBI GI NO: 11414898 NR Description: uricase [Lotus japonicus]
  misc_feature (6)..(64): NCBI GI NO: 7242493 NR Description: urate oxidase [Cicer arietinum]
  misc_feature (6)..(64): NCBI GI NO: 4996846 NR Description: uricase (Nod-35) [Medicago sativa]
  misc_feature (6)..(64): NCBI GI NO: 4996848 NR Description: uricase (Nod-35) [Medicago sativa]
  misc_feature (6)..(64): NCBI GI NO: 6175091 NR Description: Uricase II
  misc_feature (6)..(64): NCBI GI NO: 170031 NR Description: nodulin 35
  misc_feature (6)..(64): NCBI GI NO: 6136152 NR Description: Uricase II isozyme 2
MMSTPRFPDIASVQLRMPNLHFLPVNLGGKENPGLVKFADDVYMPTDEPHGTIEATLSRANSKL

SEQ ID NO: 11394 - protein, 63 aa, Triticum aestivum
  peptide (1)..(63): Ceres Seq. ID no. 12624626
  misc_feature (5)..(63): NCBI GI NO: 34908558 NR Description: putative uricase
  misc_feature (5)..(63): NCBI GI NO: 6175090 NR Description: Uricase (Urate oxidase) (Nodulin 35 homolog)
  misc_feature (5)..(63): NCBI GI NO: 15225267 NR Description: putative uricase subunit; protein id: At2g26230
  misc_feature (5)..(63): NCBI GI NO: 11414898 NR Description: uricase [Lotus japonicus]
  misc_feature (5)..(63): NCBI GI NO: 7242493 NR Description: urate oxidase [Cicer arietinum]
  misc_feature (5)..(63): NCBI GI NO: 4996846 NR Description: uricase (Nod-35) [Medicago sativa]
  misc_feature (5)..(63): NCBI GI NO: 4996848 NR Description: uricase (Nod-35) [Medicago sativa]
  misc_feature (5)..(63): NCBI GI NO: 6175091 NR Description: Uricase II
  misc_feature (5)..(63): NCBI GI NO: 170031 NR Description: nodulin 35
  misc_feature (5)..(63): NCBI GI NO: 6136152 NR Description: Uricase II isozyme 2
MSTPRFPDIASVQLRMPNLHFLPVNLGGKENPGLVKFADDVYMPTDEPHGTIEATLSRANSKL

SEQ ID NO: 11395 - DNA, 747 bp, Triticum aestivum
  misc_feature (1)..(747): Ceres Seq. ID no. 13661682
atcgcaactcgcagcagttcaatacttgcacaaccatacacatcacacatcacctgtagatcgaccggtgcacgtaaggcgcgacaatggagtaccaggggcagaccggccacgccaccgacaaggtggaggagtacggccagcccgtggccgggcacggcggcgccaccgacggccccacggggacgcacggcgccgcagccgccgcgggcaccgggcagctccagccgaccagggacgaccacaagaccgacggtgtcctgcgccgctccggcagctccagctccagctcgtctgaggacgacggcgttggcgggaggaggaagaaggggatgaaggagaagatcaaggagaagctccccggcggagcccacaaggacgccaccgggcagcagcacacgccggcggccggcgagtacgccggcaccggcaccggcacccacggcgcggaggccaccggcgagaagaaaggcgtcatggacaagatcaaggagaagcttcccggcggacagcactaagttaagctaggcagctagcgatcgccctgtgctgtgtctgtgttcggtcaaagctcggtatcatgcgtacttctgcatgcgttcgtacggataaataatgggcgccgatcgaggtgccggagtatatatgttgtgtgtgtgacgtatttgtggaccccgtgtacatgtatttgtactgaagtgctaaaaccccatcgtaataaagcgctcgtttatatttgtgttttgt

SEQ ID NO: 11396 - protein, 143 aa, Triticum aestivum
  peptide (1)..(143): Ceres Seq. ID no. 13661683
  misc_feature (11)..(143): Pfam Name: Pfam Description:  Dehydrin
  misc_feature (1)..(143): NCBI GI NO: 6017930 NR Description: dehydrin; Dhn2 [Hordeum vulgare]
  misc_feature (1)..(143): NCBI GI NO: 118486 NR Description: DEHYDRIN DHN2 (B9)
  misc_feature (1)..(143): NCBI GI NO: 4105105 NR Description: dehydrin 2 [Hordeum vulgare]
  misc_feature (1)..(143): NCBI GI NO: 118483 NR Description: DEHYDRIN DHN1 (B8)
  misc_feature (1)..(143): NCBI GI NO: 421976 NR Description: dehydrin 7 - barley
  misc_feature (1)..(143): NCBI GI NO: 7442078 NR Description: dehydrin - barley
  misc_feature (1)..(143): NCBI GI NO: 2970213 NR Description: dehydrin-/LEA group 2-like protein
  misc_feature (1)..(143): NCBI GI NO: 82684 NR Description: dehydrin 3 - maize
  misc_feature (1)..(143): NCBI GI NO: 1181292 NR Description: dehydrin [Triticum turgidum subsp. durum]
  misc_feature (1)..(143): NCBI GI NO: 118484 NR Description: DEHYDRIN DHN1 (M3) (RAB-17 PROTEIN)
MEYQGQTGHATDKVEEYGQPVAGHGGATDGPTGTHGAAAAAGTGQLQPTRDDHKTDGVLRRSGSSSSSSSEDDGVGGRRKKGMKEKIKEKLPGGAHKDATGQQHTPAAGEYAGTGTGTHGAEATGEKKGVMDKIKEKLPGGQH

SEQ ID NO: 11397 - protein, 111 aa, Triticum aestivum
  peptide (1)..(111): Ceres Seq. ID no. 13661684
  misc_feature (10)..(111): Pfam Name: Pfam Description:  Glycoprotein GG/GX
IATRSSSILAQPYTSHITCRSTGARKARQWSTRGRPATPPTRWRSTASPWPGTAAPPTAPRGRTAPQPPRAPGSSSRPGTTTRPTVSCAAPAAPAPARLRTTALAGGGRRG

SEQ ID NO: 11398 - protein, 98 aa, Triticum aestivum
  peptide (1)..(98): Ceres Seq. ID no. 13661685
SQLAAVQYLHNHTHHTSPVDRPVHVRRDNGVPGADRPRHRQGGGVRPARGRARRRHRRPHGDARRRSRRGHRAAPADQGRPQDRRCPAPLRQLQLQLV

SEQ ID NO: 11399 - DNA, 1266 bp, Triticum aestivum
  misc_feature (1)..(1266): Ceres Seq. ID no. 15225256
gtctttcttcacatcctcaaacccaccctaatactcctcaaattatcactctcttagattagggatccaagtcggaaccctaatttgaatcgtcttgatttcgatcagttgtgtgcaaagggaggaaacatggattccgactcaaccgtgccactgagcgagcgcccggagtggtctgacgttgtcccgttgactcaggacgatggtccgaacccggtggttcggatcgcttacaaggaagacttccgcgagacgatggattacttccgggcgatttaccgctccgacgagcgttctgctcgcgcgctgcgactcacggaagaagctctccgcttaaactcgggcaactacaccgtaactgatccttcttcttttgccctagtactactgttcttaaagagttggatttgattagattgtaactttttgaaggtgtggcacttcaggcgcttagtactcgaggagcttaataacgacttgtatgaagagctcaagttcatcgaaagcattgctgaggataactctaagaactaccagttgtggcatcatcgacgatgggttgcagagaaactgggtcctgatgttgcaggaaaggaacttgagtttactcggagggtactatcacttgatgccaagcattatcatgcttggtcacataggcagtgggcgctacaagcattaggaggatgggaaaatgagcttaactactgccacgagctccttgaagctgacgtctttaacaactctgcatggaatcagaggtattacgttataactagatcaccttcgttgggaggcctagaagccatgagagaatctgaagtaagctacacagtcaaagccattttagcaaatcccgggaacgagagctcttggaggtacctgaaagccctttacaaagacgacacagagtcttggattagtgatccaagtgtttcctcagtctgtttgaaagttctctcacgcacggactgcttccatggattcgctctgagcacccttttggatcttctgtgcgatgggttgagaccaaccaacgagcatagagactcggtgaaagctctagctaatgaagaaccagagactaacttggccaatttggtgtgtaccattctgtgtcgtgttgatcctataagagctaactattgggcatggaggaagagcaagattacagtggcaatataaccacacttgagaaagttatttatttttacgttttaatctactgcttttttcatgaaacatgatgcatcaaaacaaatctcg

SEQ ID NO: 11400 - protein, 125 aa, Triticum aestivum
  peptide (1)..(125): Ceres Seq. ID no. 15225257
  misc_feature (1)..(124): NCBI GI NO: 11281721 NR Description: protein farnesyltransferase (EC 2.5.1.-) chain A
  misc_feature (1)..(124): NCBI GI NO: 12643807 NR Description: Protein farnesyltransferase alpha subunit
  misc_feature (1)..(124): NCBI GI NO: 18411158 NR Description: farnesyltransferase alpha subunit
  misc_feature (1)..(124): NCBI GI NO: 12230395 NR Description: Protein farnesyltransferase alpha subunit
  misc_feature (1)..(125): NCBI GI NO: 12230437 NR Description: Protein farnesyltransferase alpha subunit
  misc_feature (1)..(116): NCBI GI NO: 266752 NR Description: PROTEIN FARNESYLTRANSFERASE ALPHA SUBUNIT
  misc_feature (1)..(116): NCBI GI NO: 29135287 NR Description: farnesyltransferase, CAAX box, alpha [Bos taurus]
  misc_feature (1)..(116): NCBI GI NO: 4503771 NR Description: farnesyltransferase, CAAX box, alpha
  misc_feature (1)..(116): NCBI GI NO: 16974883 NR Description: Chain A
  misc_feature (1)..(116): NCBI GI NO: 34782840 NR Description: FNTA protein [Homo sapiens]
MRESEVSYTVKAILANPGNESSWRYLKALYKDDTESWISDPSVSSVCLKVLSRTDCFHGFALSTLLDLLCDGLRPTNEHRDSVKALANEEPETNLANLVCTILCRVDPIRANYWAWRKSKITVAI

SEQ ID NO: 11401 - protein, 93 aa, Triticum aestivum
  peptide (1)..(93): Ceres Seq. ID no. 15225258
  misc_feature (74)..(93): NCBI GI NO: 12230395 NR Description: Protein farnesyltransferase alpha subunit
  misc_feature (1)..(93): NCBI GI NO: 12643807 NR Description: Protein farnesyltransferase alpha subunit
  misc_feature (1)..(93): NCBI GI NO: 11281721 NR Description: protein farnesyltransferase (EC 2.5.1.-) chain A
  misc_feature (1)..(93): NCBI GI NO: 18411158 NR Description: farnesyltransferase alpha subunit
  misc_feature (7)..(93): NCBI GI NO: 12230437 NR Description: Protein farnesyltransferase alpha subunit
  misc_feature (1)..(93): NCBI GI NO: 266752 NR Description: PROTEIN FARNESYLTRANSFERASE ALPHA SUBUNIT
  misc_feature (1)..(93): NCBI GI NO: 29135287 NR Description: farnesyltransferase, CAAX box, alpha [Bos taurus]
  misc_feature (1)..(93): NCBI GI NO: 4503771 NR Description: farnesyltransferase, CAAX box, alpha
  misc_feature (1)..(93): NCBI GI NO: 34782840 NR Description: FNTA protein [Homo sapiens]
  misc_feature (1)..(93): NCBI GI NO: 16974883 NR Description: Chain A
MDSDSTVPLSERPEWSDVVPLTQDDGPNPVVRIAYKEDFRETMDYFRAIYRSDERSARALRLTEEALRLNSGNYTVTDPSSFALVLLFLKSWI

SEQ ID NO: 11402 - protein, 66 aa, Triticum aestivum
  peptide (1)..(66): Ceres Seq. ID no. 15225259
MKSSSSSKALLRITLRTTSCGIIDDGLQRNWVLMLQERNLSLLGGYYHLMPSIIMLGHIGSGRYKH

SEQ ID NO: 11403 - DNA, 1090 bp, Triticum aestivum
  misc_feature (1)..(1090): Ceres Seq. ID no. 13661438
gtttaagcccatttcggaataatgggccattagattaggcgcacctccttctagaaccctccagaaccttcctcctcccccaaccaaactaaatggtggtttgctaagcgttttctgcaccctagtgttgtggctatctacgatttcatatttttatgggacgaagaccttggggtggaaaattttgatccgaggaggtatattgatataatggtttccgaaggcttagaaatcacgcaacctgcattggatcctgatctatcaacagatattcaccaccgcatcacaatccgcaacaagatgacaaaagtgcataggagagtatatgacaatcgttcaagcatgaactgttctgatgatagtaaaggacctccatgcacagggtgggtcgagggcatggcaccagttttttctcgtgctgcctggaaatgtgtatggcatctaatacagaatgacttgattcatggatggggccttgacatgaagcttggttactgtgctcagggtgatcgagctgagaaggtcggtgtaattgacagtgagtatgtcgtccatcaagggataccatcattaggaggaccatcagataccagcaagttacctcgaagatctttggatttgcggacacacattagaagacagtcgtcggcggagctggaaaagttcaaagaacggtgggaaaaagccgtaagggaagacgatgagtggatggatccttttgacgcttgattactttggaagaaacatctgacatgaagatacaaggcccaccatacatgggtggatgcgtccacattcatcatggcgattggagtcgagatcatgtgggcctcatagcaaaacagttagttatatagccttataggcattttgctgactaacacacccccccctgccatcaagagctataagaacaagtgggaatgtcgtcgcgctaatacacggagaaactgagcaaggacctgtatactaccagtggctgacagacacagtatcttgtaatcttaattcgattctccaatcaccgaggttgtatagtgacaatgcatatatgtatgtgcagttatttttagtaataataagtatttat

SEQ ID NO: 11404 - protein, 172 aa, Triticum aestivum
  peptide (1)..(172): Ceres Seq. ID no. 13661439
  misc_feature (1)..(168): Pfam Name: DUF707 Pfam Description: Protein of unknown function
  misc_feature (1)..(168): NCBI GI NO: 15219892 NR Description: expressed protein [Arabidopsis thaliana]
  misc_feature (1)..(125): NCBI GI NO: 33146749 NR Description: putative lysine ketoglutarate reductase trans-splicing related 1
  misc_feature (132)..(170): NCBI GI NO: 33146749 NR Description: putative lysine ketoglutarate reductase trans-splicing related 1
  misc_feature (1)..(169): NCBI GI NO: 22329488 NR Description: expressed protein [Arabidopsis thaliana]
  misc_feature (1)..(168): NCBI GI NO: 24636978 NR Description: lysine ketoglutarate reductase trans-splicingrelated 1
  misc_feature (1)..(169): NCBI GI NO: 25402652 NR Description: hypothetical protein
  misc_feature (1)..(38): NCBI GI NO: 34899756 NR Description: OJ1773_H01.1
  misc_feature (59)..(125): NCBI GI NO: 34899756 NR Description: OJ1773_H01.1
  misc_feature (132)..(170): NCBI GI NO: 34899756 NR Description: OJ1773_H01.1
  misc_feature (1)..(170): NCBI GI NO: 19386727 NR Description: P0678F11.16
MVSEGLEITQPALDPDLSTDIHHRITIRNKMTKVHRRVYDNRSSMNCSDDSKGPPCTGWVEGMAPVFSRAAWKCVWHLIQNDLIHGWGLDMKLGYCAQGDRAEKVGVIDSEYVVHQGIPSLGGPSDTSKLPRRSLDLRTHIRRQSSAELEKFKERWEKAVREDDEWMDPFDA

SEQ ID NO: 11405 - protein, 142 aa, Triticum aestivum
  peptide (1)..(142): Ceres Seq. ID no. 13661440
  misc_feature (1)..(138): Pfam Name: DUF707 Pfam Description: Protein of unknown function
  misc_feature (1)..(138): NCBI GI NO: 15219892 NR Description: expressed protein [Arabidopsis thaliana]
  misc_feature (1)..(95): NCBI GI NO: 33146749 NR Description: putative lysine ketoglutarate reductase trans-splicing related 1
  misc_feature (102)..(140): NCBI GI NO: 33146749 NR Description: putative lysine ketoglutarate reductase trans-splicing related 1
  misc_feature (1)..(139): NCBI GI NO: 22329488 NR Description: expressed protein [Arabidopsis thaliana]
  misc_feature (1)..(138): NCBI GI NO: 24636978 NR Description: lysine ketoglutarate reductase trans-splicingrelated 1
  misc_feature (1)..(139): NCBI GI NO: 25402652 NR Description: hypothetical protein
  misc_feature (29)..(95): NCBI GI NO: 34899756 NR Description: OJ1773_H01.1
  misc_feature (102)..(140): NCBI GI NO: 34899756 NR Description: OJ1773_H01.1
  misc_feature (1)..(140): NCBI GI NO: 19386727 NR Description: P0678F11.16
  misc_feature (1)..(140): NCBI GI NO: 34903420 NR Description: hypothetical protein~similar to Oryza sativachromosome 1
MTKVHRRVYDNRSSMNCSDDSKGPPCTGWVEGMAPVFSRAAWKCVWHLIQNDLIHGWGLDMKLGYCAQGDRAEKVGVIDSEYVVHQGIPSLGGPSDTSKLPRRSLDLRTHIRRQSSAELEKFKERWEKAVREDDEWMDPFDA

SEQ ID NO: 11406 - protein, 128 aa, Triticum aestivum
  peptide (1)..(128): Ceres Seq. ID no. 13661441
  misc_feature (1)..(124): Pfam Name: DUF707 Pfam Description: Protein of unknown function
  misc_feature (1)..(124): NCBI GI NO: 15219892 NR Description: expressed protein [Arabidopsis thaliana]
  misc_feature (1)..(81): NCBI GI NO: 33146749 NR Description: putative lysine ketoglutarate reductase trans-splicing related 1
  misc_feature (88)..(126): NCBI GI NO: 33146749 NR Description: putative lysine ketoglutarate reductase trans-splicing related 1
  misc_feature (1)..(125): NCBI GI NO: 22329488 NR Description: expressed protein [Arabidopsis thaliana]
  misc_feature (1)..(124): NCBI GI NO: 24636978 NR Description: lysine ketoglutarate reductase trans-splicingrelated 1
  misc_feature (1)..(125): NCBI GI NO: 25402652 NR Description: hypothetical protein
  misc_feature (15)..(81): NCBI GI NO: 34899756 NR Description: OJ1773_H01.1
  misc_feature (88)..(126): NCBI GI NO: 34899756 NR Description: OJ1773_H01.1
  misc_feature (1)..(126): NCBI GI NO: 19386727 NR Description: P0678F11.16
  misc_feature (1)..(126): NCBI GI NO: 34903420 NR Description: hypothetical protein~similar to Oryza sativachromosome 1
MNCSDDSKGPPCTGWVEGMAPVFSRAAWKCVWHLIQNDLIHGWGLDMKLGYCAQGDRAEKVGVIDSEYVVHQGIPSLGGPSDTSKLPRRSLDLRTHIRRQSSAELEKFKERWEKAVREDDEWMDPFDA

SEQ ID NO: 11407 - DNA, 933 bp, Triticum aestivum
  misc_feature (1)..(933): Ceres Seq. ID no. 13664213
aaacacagacgagaatcctctctcacagtctcttttcgtctcccatacacacactttctctctctatacccattcttcgtcttctacctcggcgacaccactagtagtcactcgcagagagaagtcgtcgaaaggagaacatcaaaaaagattttcggtgagaaggatcgagtgagagattcttcatcggctttagttgtctacacgtctgtgctcatgagccgacggcgactactgttatcggcgacaatactctcgtatttgctccacggaatggctctcgtctctgtcgtagcctccggcgtggaggaggttagagataacgtggatttgaccaaaacgaacgacgttagctacaacctctacgcatcggaagatgctacgtctctctcatgagacgagagtagagccggataggatcggagagaagtgcaagaagtcagacattgtggtgaaccaggcagcgaccgaacctatgcccaacggaatacccggttacaccgtggagatcacgaaccagtgcatgtctggatgcaacatctcgaggatccacgtcagctgcggttggttcagctccgttaagttggttaacccgagggttttcaagcgtattcactatgatgactgtctcgtcaacaacgggaagcctttgccttatggctctacgctctctttccactacgccaacactttcccttaccgtctcgctgtcgcattcgttacctgctcttgagaccggatcttttcctttcttatataggataagatgatagtagaaacatggcgggaggaaaattaagatacaggaagtatgattgatattaatcatattcataccacactcatcctcttttgggttattttcttctctttaggatgttaaatgtttttgagcaacagtgatatatatataaaagaatctatcaacctccc

SEQ ID NO: 11408 - protein, 131 aa, Triticum aestivum
  peptide (1)..(131): Ceres Seq. ID no. 15220292
  misc_feature (73)..(118): NCBI GI NO: 38607340 NR Description: TPD1 [Arabidopsis thaliana]
  misc_feature (73)..(118): NCBI GI NO: 15724336 NR Description: At4g24973/At4g24973 [Arabidopsis thaliana]
KHRRESSLTVSFRLPYTHFLSLYPFFVFYLGDTTSSHSQREVVERRTSKKIFGEKDRVRDSSSALVVYTSVLMSRRRLLLSATILSYLLHGMALVSVVASGVEEVRDNVDLTKTNDVSYNLYASEDATSLS

SEQ ID NO: 11409 - protein, 118 aa, Triticum aestivum
  peptide (1)..(118): Ceres Seq. ID no. 15220293
  misc_feature (1)..(118): NCBI GI NO: 38607340 NR Description: TPD1 [Arabidopsis thaliana]
  misc_feature (9)..(117): NCBI GI NO: 20270065 NR Description: Unknown protein
  misc_feature (9)..(117): NCBI GI NO: 37532318 NR Description: unknown protein
  misc_feature (19)..(118): NCBI GI NO: 25272006 NR Description: hypothetical protein [Marchantia polymorpha]
MLRLSHETRVEPDRIGEKCKKSDIVVNQAATEPMPNGIPGYTVEITNQCMSGCNISRIHVSCGWFSSVKLVNPRVFKRIHYDDCLVNNGKPLPYGSTLSFHYANTFPYRLAVAFVTCS

SEQ ID NO: 11410 - protein, 85 aa, Triticum aestivum
  peptide (1)..(85): Ceres Seq. ID no. 15220294
  misc_feature (1)..(85): NCBI GI NO: 38607340 NR Description: TPD1 [Arabidopsis thaliana]
  misc_feature (1)..(84): NCBI GI NO: 20270065 NR Description: Unknown protein
  misc_feature (1)..(84): NCBI GI NO: 37532318 NR Description: unknown protein
  misc_feature (1)..(85): NCBI GI NO: 25272006 NR Description: hypothetical protein [Marchantia polymorpha]
MPNGIPGYTVEITNQCMSGCNISRIHVSCGWFSSVKLVNPRVFKRIHYDDCLVNNGKPLPYGSTLSFHYANTFPYRLAVAFVTCS

SEQ ID NO: 11411 - protein, 59 aa, Triticum aestivum
  peptide (1)..(59): Ceres Seq. ID no. 15220295
  misc_feature (1)..(46): NCBI GI NO: 38607340 NR Description: TPD1 [Arabidopsis thaliana]
  misc_feature (1)..(46): NCBI GI NO: 15724336 NR Description: At4g24973/At4g24973 [Arabidopsis thaliana]
MSRRRLLLSATILSYLLHGMALVSVVASGVEEVRDNVDLTKTNDVSYNLYASEDATSLS

SEQ ID NO: 11412 - DNA, 839 bp, Triticum aestivum
  misc_feature (1)..(839): Ceres Seq. ID no. 13661767
atattcattctattcgcgtggttttgacgacgaagaagggaacaacgcataacgaagacgacgatgggtgaagccgtgaaggatggaagaaaagaagtgattcaggcttggtacatggatgatagccaagatgatcagcgacttcctcaccacaaggatcctaaagagtttatctctctcgacaaacttgcagagcttggagtccttagctggagacttgatgctgataactacgaaaccgatgaggagttgaaaaagatccgcgagtctcgtggttactcctacatggacttttgtgaggtatgcccagagaagcttccaaattatgaagagaaagtaaagagcttcttcgaggaacatctccacactgatgaagagatccgttactgcgttgcaggaagtggctactttgatgtgagggatcgcaacgaagcttggatcagagtttgggtgaagaagggaggaatgatagtcttgcctgctggaatttatcatcgcttcaccgtggattctgacaactatatcaaggcaatgcgtcttttcgtgggtgaaccggtgtggacaccatacaatcgtccacacgaccatcttcctgcaaggaaagaatatgttgataacttcgtgaagaaagccattaacgcctctgcttagagagcgcgctctctctcctgcttccaaaaataagagaggttctataataaacttggcctacaataaagagagatcttgaatcgataatatgcatgtggagaatgatggctttggtatgcatgtgttgtatacttattaataacactctgttcgtctttraragcctttttttmwgmaaaaaaaaaaaa

SEQ ID NO: 11413 - protein, 195 aa, Triticum aestivum
  peptide (1)..(195): Ceres Seq. ID no. 15220133
  misc_feature (14)..(168): Pfam Name: Pfam Description:  ARD/ARD' family
  misc_feature (1)..(188): NCBI GI NO: 18414289 NR Description: expressed protein [Arabidopsis thaliana]
  misc_feature (1)..(195): NCBI GI NO: 18414293 NR Description: expressed protein [Arabidopsis thaliana]
  misc_feature (69)..(179): NCBI GI NO: 7485194 NR Description: hypothetical protein - Arabidopsis thaliana
  misc_feature (1)..(75): NCBI GI NO: 7485194 NR Description: hypothetical protein - Arabidopsis thaliana
  misc_feature (1)..(195): NCBI GI NO: 15225298 NR Description: hypothetical protein [Arabidopsis thaliana]
  misc_feature (1)..(189): NCBI GI NO: 7489559 NR Description: probable submergence induced
  misc_feature (1)..(192): NCBI GI NO: 14522834 NR Description: iron-deficiency induced gene [Hordeum vulgare]
  misc_feature (5)..(189): NCBI GI NO: 34902616 NR Description: Putative probable submergence induced
  misc_feature (1)..(188): NCBI GI NO: 7489558 NR Description: probable submergence induced protein 2 - rice
  misc_feature (7)..(188): NCBI GI NO: 37534408 NR Description: putative zinc finger protein ID1
MGEAVKDGRKEVIQAWYMDDSQDDQRLPHHKDPKEFISLDKLAELGVLSWRLDADNYETDEELKKIRESRGYSYMDFCEVCPEKLPNYEEKVKSFFEEHLHTDEEIRYCVAGSGYFDVRDRNEAWIRVWVKKGGMIVLPAGIYHRFTVDSDNYIKAMRLFVGEPVWTPYNRPHDHLPARKEYVDNFVKKAINASA

SEQ ID NO: 11414 - protein, 178 aa, Triticum aestivum
  peptide (1)..(178): Ceres Seq. ID no. 15220134
  misc_feature (1)..(151): Pfam Name: Pfam Description:  ARD/ARD' family
  misc_feature (1)..(171): NCBI GI NO: 18414289 NR Description: expressed protein [Arabidopsis thaliana]
  misc_feature (1)..(178): NCBI GI NO: 18414293 NR Description: expressed protein [Arabidopsis thaliana]
  misc_feature (52)..(162): NCBI GI NO: 7485194 NR Description: hypothetical protein - Arabidopsis thaliana
  misc_feature (1)..(58): NCBI GI NO: 7485194 NR Description: hypothetical protein - Arabidopsis thaliana
  misc_feature (1)..(178): NCBI GI NO: 15225298 NR Description: hypothetical protein [Arabidopsis thaliana]
  misc_feature (1)..(172): NCBI GI NO: 7489559 NR Description: probable submergence induced
  misc_feature (1)..(175): NCBI GI NO: 14522834 NR Description: iron-deficiency induced gene [Hordeum vulgare]
  misc_feature (1)..(172): NCBI GI NO: 34902616 NR Description: Putative probable submergence induced
  misc_feature (1)..(171): NCBI GI NO: 7489558 NR Description: probable submergence induced protein 2 - rice
  misc_feature (1)..(171): NCBI GI NO: 37534408 NR Description: putative zinc finger protein ID1
MDDSQDDQRLPHHKDPKEFISLDKLAELGVLSWRLDADNYETDEELKKIRESRGYSYMDFCEVCPEKLPNYEEKVKSFFEEHLHTDEEIRYCVAGSGYFDVRDRNEAWIRVWVKKGGMIVLPAGIYHRFTVDSDNYIKAMRLFVGEPVWTPYNRPHDHLPARKEYVDNFVKKAINASA

SEQ ID NO: 11415 - protein, 121 aa, Triticum aestivum
  peptide (1)..(121): Ceres Seq. ID no. 15220135
  misc_feature (1)..(94): Pfam Name: Pfam Description:  ARD/ARD' family
  misc_feature (1)..(114): NCBI GI NO: 18414289 NR Description: expressed protein [Arabidopsis thaliana]
  misc_feature (1)..(121): NCBI GI NO: 18414293 NR Description: expressed protein [Arabidopsis thaliana]
  misc_feature (1)..(105): NCBI GI NO: 7485194 NR Description: hypothetical protein - Arabidopsis thaliana
  misc_feature (1)..(121): NCBI GI NO: 15225298 NR Description: hypothetical protein [Arabidopsis thaliana]
  misc_feature (1)..(115): NCBI GI NO: 7489559 NR Description: probable submergence induced
  misc_feature (1)..(118): NCBI GI NO: 14522834 NR Description: iron-deficiency induced gene [Hordeum vulgare]
  misc_feature (1)..(115): NCBI GI NO: 34902616 NR Description: Putative probable submergence induced
  misc_feature (1)..(114): NCBI GI NO: 7489558 NR Description: probable submergence induced protein 2 - rice
  misc_feature (1)..(114): NCBI GI NO: 37534408 NR Description: putative zinc finger protein ID1
  misc_feature (1)..(115): NCBI GI NO: 10177955 NR Description: gene_id:MQD19
MDFCEVCPEKLPNYEEKVKSFFEEHLHTDEEIRYCVAGSGYFDVRDRNEAWIRVWVKKGGMIVLPAGIYHRFTVDSDNYIKAMRLFVGEPVWTPYNRPHDHLPARKEYVDNFVKKAINASA

SEQ ID NO: 11416 - DNA, 973 bp, Triticum aestivum
  misc_feature (1)..(973): Ceres Seq. ID no. 13661768
gtttaaggtcactaaggtacaagaaaaaaataggaatcataatcacttcaaatctaaaattctcatcaagtctcttatataaacatctccactcctcaaaaatcacaaacaatgcctttaagttttggatcggtccctatcttggccgcggtggccatacaactcctccttatatccagcgtttcttccctcaacattaccaatgagtatctccaccacgcatgcaacaacacccaagggaaatacaagccagggagtgtgttcgaggaaaatctcaacattgccctcaaaaacatatccgcttttaatctgcaaaaaggttttgcccttgactccaatatgaatagaccctacaaaaatatacctcccgataccgccttcgtcatgctccagtgtcgtggcgactcctacgggtctaagtgtcactcatgcctcaccacagccctctctgggcttcgtaagaaatgtccgagaaacaaagcaggaacaatatggtatgaccaatgcactctggatatttctacattcagtgccggtgacagcagaatcctctatgatgattatttatgtataaccaacccaaaggacctgagcggagataagaagatgttcgataagaaaaagaaggatttcaccgataagctaatatctgaagccggcaagttgggaaacaacagcaaggggtcactgtacgctacgggagagacgatgatcgggacaaagaagctttatggaatgatgcaatgtacggacgagttatatgagaatggttgctctgtgtgtctagattggcttgtcttgcaacatccattctgcggcgatggaaaaaacggagttcgatatatgtgtagaagctgtaatgcaaggtttgagctttacccttttcttagaacttaatactgtttgatgggagctcttaatttgctttatgtttgaataagtactatatcaagaaataaaaattgttaacctt

SEQ ID NO: 11417 - protein, 261 aa, Triticum aestivum
  peptide (1)..(261): Ceres Seq. ID no. 15220136
  misc_feature (90)..(138): Pfam Name: Pfam Description:  Domain of unknown function DUF26
  misc_feature (5)..(260): NCBI GI NO: 15233228 NR Description: receptor-like protein kinase-related
  misc_feature (10)..(260): NCBI GI NO: 11994708 NR Description: contains similarity to serine/threoninekinase~gene_id:MRI12
  misc_feature (14)..(260): NCBI GI NO: 15228583 NR Description: receptor kinase, putative [Arabidopsis thaliana]
  misc_feature (5)..(260): NCBI GI NO: 15233235 NR Description: receptor-like kinase-related
  misc_feature (5)..(228): NCBI GI NO: 9279753 NR Description: emb|CAB45833
  misc_feature (5)..(260): NCBI GI NO: 15233366 NR Description: pollen coat receptor kinase, putative
  misc_feature (8)..(260): NCBI GI NO: 9279762 NR Description: emb|CAB45834
  misc_feature (9)..(261): NCBI GI NO: 15233368 NR Description: receptor-like protein kinase-related
  misc_feature (9)..(259): NCBI GI NO: 9279746 NR Description: contains similarity to receptor proteinkinase~gene_id:MZN24
  misc_feature (9)..(261): NCBI GI NO: 15233236 NR Description: receptor-like protein kinase-related
MPLSFGSVPILAAVAIQLLLISSVSSLNITNEYLHHACNNTQGKYKPGSVFEENLNIALKNISAFNLQKGFALDSNMNRPYKNIPPDTAFVMLQCRGDSYGSKCHSCLTTALSGLRKKCPRNKAGTIWYDQCTLDISTFSAGDSRILYDDYLCITNPKDLSGDKKMFDKKKKDFTDKLISEAGKLGNNSKGSLYATGETMIGTKKLYGMMQCTDELYENGCSVCLDWLVLQHPFCGDGKNGVRYMCRSCNARFELYPFLRT

SEQ ID NO: 11418 - protein, 185 aa, Triticum aestivum
  peptide (1)..(185): Ceres Seq. ID no. 15220137
  misc_feature (14)..(62): Pfam Name: Pfam Description:  Domain of unknown function DUF26
  misc_feature (1)..(184): NCBI GI NO: 15233228 NR Description: receptor-like protein kinase-related
  misc_feature (1)..(184): NCBI GI NO: 11994708 NR Description: contains similarity to serine/threoninekinase~gene_id:MRI12
  misc_feature (1)..(184): NCBI GI NO: 15228583 NR Description: receptor kinase, putative [Arabidopsis thaliana]
  misc_feature (1)..(184): NCBI GI NO: 15233235 NR Description: receptor-like kinase-related
  misc_feature (1)..(152): NCBI GI NO: 9279753 NR Description: emb|CAB45833
  misc_feature (1)..(184): NCBI GI NO: 15233366 NR Description: pollen coat receptor kinase, putative
  misc_feature (1)..(184): NCBI GI NO: 9279762 NR Description: emb|CAB45834
  misc_feature (1)..(185): NCBI GI NO: 15233368 NR Description: receptor-like protein kinase-related
  misc_feature (1)..(183): NCBI GI NO: 9279746 NR Description: contains similarity to receptor proteinkinase~gene_id:MZN24
  misc_feature (1)..(185): NCBI GI NO: 15233236 NR Description: receptor-like protein kinase-related
MNRPYKNIPPDTAFVMLQCRGDSYGSKCHSCLTTALSGLRKKCPRNKAGTIWYDQCTLDISTFSAGDSRILYDDYLCITNPKDLSGDKKMFDKKKKDFTDKLISEAGKLGNNSKGSLYATGETMIGTKKLYGMMQCTDELYENGCSVCLDWLVLQHPFCGDGKNGVRYMCRSCNARFELYPFLRT

SEQ ID NO: 11419 - protein, 170 aa, Triticum aestivum
  peptide (1)..(170): Ceres Seq. ID no. 15220138
  misc_feature (1)..(47): Pfam Name: Pfam Description:  Domain of unknown function DUF26
  misc_feature (1)..(169): NCBI GI NO: 15233228 NR Description: receptor-like protein kinase-related
  misc_feature (1)..(169): NCBI GI NO: 11994708 NR Description: contains similarity to serine/threoninekinase~gene_id:MRI12
  misc_feature (1)..(169): NCBI GI NO: 15228583 NR Description: receptor kinase, putative [Arabidopsis thaliana]
  misc_feature (1)..(169): NCBI GI NO: 15233235 NR Description: receptor-like kinase-related
  misc_feature (1)..(137): NCBI GI NO: 9279753 NR Description: emb|CAB45833
  misc_feature (1)..(169): NCBI GI NO: 15233366 NR Description: pollen coat receptor kinase, putative
  misc_feature (1)..(169): NCBI GI NO: 9279762 NR Description: emb|CAB45834
  misc_feature (1)..(170): NCBI GI NO: 15233368 NR Description: receptor-like protein kinase-related
  misc_feature (1)..(168): NCBI GI NO: 9279746 NR Description: contains similarity to receptor proteinkinase~gene_id:MZN24
  misc_feature (1)..(170): NCBI GI NO: 15233236 NR Description: receptor-like protein kinase-related
MLQCRGDSYGSKCHSCLTTALSGLRKKCPRNKAGTIWYDQCTLDISTFSAGDSRILYDDYLCITNPKDLSGDKKMFDKKKKDFTDKLISEAGKLGNNSKGSLYATGETMIGTKKLYGMMQCTDELYENGCSVCLDWLVLQHPFCGDGKNGVRYMCRSCNARFELYPFLRT

SEQ ID NO: 11420 - DNA, 799 bp, Triticum aestivum
  misc_feature (1)..(799): Ceres Seq. ID no. 13661453
ctagaacatcctaatcgaaaaaacacccgactgagtgagagagcgctagcgaccggataaggtttcgcctaccagctgccaacggccagcctcgacgccggcgggggctggtccgaccacgcgcctctccgcctcccgtcgcagcctctctcccccgagtttcccttctgcccaagctgcaccttgctagcaaggatactgcgcactccgatctataatatcagctctctatagcgaccgtcgctgtcgcccacctttcgccctgtaggcaagaacaagacggcatggcttgtgacgagtgccgcggtccgaaccataaacagaaagattgccccacactaccctgtcacaactgtgggggaactcttcacacccgaggcacttgctgttacacggatcctgtttaccgcgttggagaaagatgtcccagatgtggtggttttcaacacggggtacccggcaagcccccctgcccagtccaagaagctcatgctcgcccgcctatgtgcccgcggtgtcaagtgccacatcgtccaagagactgccctcatcgtggagccgaatattccgggtggacaagctccgacagatgcacgcaatgcaatgaaactggtcattttttccccgactgccctaacaaatactagtactagtttctctgtatcttgttattgtagctcgtaagtttgtttgagtatttttcaagactattagcttagtggtttgcccattgttgatgtatattattaagcctgaaagcacttcaattctcagtatcttttaatatatagtattattt

SEQ ID NO: 11421 - protein, 120 aa, Triticum aestivum
  peptide (1)..(120): Ceres Seq. ID no. 13661454
  misc_feature (2)..(118): NCBI GI NO: 3661541 NR Description: poly-zinc finger protein 1 [Trypanosoma cruzi]
MACDECRGPNHKQKDCPTLPCHNCGGTLHTRGTCCYTDPVYRVGERCPRCGGFQHGVPGKPPCPVQEAHARPPMCPRCQVPHRPRDCPHRGAEYSGWTSSDRCTQCNETGHFFPDCPNKY

SEQ ID NO: 11422 - protein, 64 aa, Triticum aestivum
  peptide (1)..(64): Ceres Seq. ID no. 13661455
MLARLCARGVKCHIVQETALIVEPNIPGGQAPTDARNAMKLVIFSPTALTNTSTSFSVSCYCSS

SEQ ID NO: 11423 - protein, 61 aa, Triticum aestivum
  peptide (1)..(61): Ceres Seq. ID no. 13661456
MSQMWWFSTRGTRQAPLPSPRSSCSPAYVPAVSSATSSKRLPSSWSRIFRVDKLRQMHAMQ

SEQ ID NO: 11424 - DNA, 1013 bp, Triticum aestivum
  misc_feature (1)..(1013): Ceres Seq. ID no. 13661769
accgcaatacaccactcaccccctcacgctctcgctcatcacccccccaacaactaactccaccaccacagtatcaatcagccatgggcgccacggaggattcctcctccggctccgagaccaccacctcgtcctcggtggaggccctggcctcgccgccgtccccgacggccaccaccgcgtcgtcgaagaagaagcggccgcgcaacgacgggcggcacccgacgtaccgcggggtgcgcatgcggagctggggcaagtgggtgtcggagattcgggagccccgcaagaagtcgcgcatctggctcggcaccttcgccaccgcggagatggcggcgcgcgcgcacgacgtggccgccctcgccatcaagggccgtgccgcgcacctcaacttccccgamctcgcccacgagctcccgcgcccggccaccgccgcgcccaaagacgtccaggcgggcgccgcactcgccgcctccgccgacttcccggcctctgccactgcagctgccaatgccggcgccaagaaccccgacggcccggaacacagcggcgcctccgcctctgcctccgcctctgcctctgcctctgcctcgccgccgcctgacaccgctgaggatgcgctgttcgacctccccgacctcctcttcgacctcagacacggccctccgtcctgccagctttcgtgcgcctcctcgtgggacgacgacgtggccttcgccggccctggcgccggcgtgttccgcctggaggagccgctgcagtgggagtactaaagccaggcgccaactcgctcagtcaccggtgccatcaaaccgcgccgccgctgcatgcatgtatggctcgttcgtttccacatcgggccggaaatcatttcgaaaccattggagaaccaaaagaaggaagcaaaaccactggagtactactaaatttaggagtgagaccatgtacaaattggggttagccttgtgttctttatcataaaaaaaaaaaaaaaaaagcttatcgataccgtc

SEQ ID NO: 11425 - protein, 256 aa, Triticum aestivum
  peptide (1)..(256): Ceres Seq. ID no. 15220139
  misc_feature (73)..(137): Pfam Name: Pfam Description:  AP2 domain
  misc_feature (32)..(256): NCBI GI NO: 14140163 NR Description: putative AP2 domain containing protein
  misc_feature (28)..(256): NCBI GI NO: 38605848 NR Description: OSJNBb0034G17.6
  misc_feature (6)..(255): NCBI GI NO: 21908034 NR Description: DRE binding factor 2 [Zea mays]
  misc_feature (6)..(255): NCBI GI NO: 25990951 NR Description: DREB-like protein [Zea mays]
  misc_feature (2)..(255): NCBI GI NO: 37536842 NR Description: putative DNA binding protein
  misc_feature (9)..(232): NCBI GI NO: 14140155 NR Description: putative AP2 domain transcription factor
  misc_feature (25)..(256): NCBI GI NO: 38605845 NR Description: OSJNBb0034G17.3
  misc_feature (26)..(254): NCBI GI NO: 38605844 NR Description: OSJNBb0034G17.2
  misc_feature (36)..(255): NCBI GI NO: 15232340 NR Description: AP2 domain transcription factor TINY, putative
  misc_feature (2)..(204): NCBI GI NO: 15225381 NR Description: AP2 domain transcription factor TINY, putative
  misc_feature (133)..(133): Xaa is any aa, unknown or other
RNTPLTPSRSRSSPPQQLTPPPQYQSAMGATEDSSSGSETTTSSSVEALASPPSPTATTASSKKKRPRNDGRHPTYRGVRMRSWGKWVSEIREPRKKSRIWLGTFATAEMAARAHDVAALAIKGRAAHLNFPXLAHELPRPATAAPKDVQAGAALAASADFPASATAAANAGAKNPDGPEHSGASASASASASASASPPPDTAEDALFDLPDLLFDLRHGPPSCQLSCASSWDDDVAFAGPGAGVFRLEEPLQWEY

SEQ ID NO: 11426 - protein, 229 aa, Triticum aestivum
  peptide (1)..(229): Ceres Seq. ID no. 15220140
  misc_feature (46)..(110): Pfam Name: Pfam Description:  AP2 domain
  misc_feature (5)..(229): NCBI GI NO: 14140163 NR Description: putative AP2 domain containing protein
  misc_feature (1)..(229): NCBI GI NO: 38605848 NR Description: OSJNBb0034G17.6
  misc_feature (1)..(228): NCBI GI NO: 21908034 NR Description: DRE binding factor 2 [Zea mays]
  misc_feature (1)..(228): NCBI GI NO: 25990951 NR Description: DREB-like protein [Zea mays]
  misc_feature (1)..(228): NCBI GI NO: 37536842 NR Description: putative DNA binding protein
  misc_feature (1)..(205): NCBI GI NO: 14140155 NR Description: putative AP2 domain transcription factor
  misc_feature (1)..(229): NCBI GI NO: 38605845 NR Description: OSJNBb0034G17.3
  misc_feature (1)..(227): NCBI GI NO: 38605844 NR Description: OSJNBb0034G17.2
  misc_feature (9)..(228): NCBI GI NO: 15232340 NR Description: AP2 domain transcription factor TINY, putative
  misc_feature (1)..(177): NCBI GI NO: 15225381 NR Description: AP2 domain transcription factor TINY, putative
  misc_feature (106)..(106): Xaa is any aa, unknown or other
MGATEDSSSGSETTTSSSVEALASPPSPTATTASSKKKRPRNDGRHPTYRGVRMRSWGKWVSEIREPRKKSRIWLGTFATAEMAARAHDVAALAIKGRAAHLNFPXLAHELPRPATAAPKDVQAGAALAASADFPASATAAANAGAKNPDGPEHSGASASASASASASASPPPDTAEDALFDLPDLLFDLRHGPPSCQLSCASSWDDDVAFAGPGAGVFRLEEPLQWEY

SEQ ID NO: 11427 - protein, 200 aa, Triticum aestivum
  peptide (1)..(200): Ceres Seq. ID no. 15220141
  misc_feature (134)..(134): Xaa is any aa, unknown or other
PQYTTHPLTLSLITPPTTNSTTTVSISHGRHGGFLLRLRDHHLVLGGGPGLAAVPDGHHRVVEEEAAAQRRAAPDVPRGAHAELGQVGVGDSGAPQEVAHLARHLRHRGDGGARARRGRPRHQGPCRAPQLPRXRPRAPAPGHRRAQRRPGGRRTRRLRRLPGLCHCSCQCRRQEPRRPGTQRRLRLCLRLCLCLCLAAA

SEQ ID NO: 11428 - DNA, 1012 bp, Triticum aestivum
  misc_feature (1)..(1012): Ceres Seq. ID no. 13598179
tcgctcgttgtctctcccgtctcaggtcgccatcgaagcaccagtagcaggaactccttaacgccccagcgtgagatcgcgagattgtttgtagcttgatcgaggcagggaagaccggaagaggatgatgcagtcgccgtcgcagcaccagtcctcctactacgccgtgctcggcgtccacccaggcgcgtcctccgccgagatacgcgccgcgtaccaccgcctcgccatgaggtggcacccggataagattgccaatggccgtgtggatccggcgatcgcggaggaagccaagggaaggttccagaagatacacgaggcataccaggtgttgtcggatcagaagcggagggagctctatgacgccgggatgtacgaccccctcgacgacgaccaagaagaggtcgagggcttccatgatttccttcaggagatgctctcgctcatggccaccgttggtagagaggagcccgtatattccctgggcgaactccaatccatgcttgacgggatgatgcaggatttcacctccccccagccgccgccaccaagcagcttcttcagcagcaccagttcgtcgacgcggttcggcgcacccagcggcggagcgcagcagcagcgtcgacccccctcacgcgtacggcctcaggggttcggcagctcggcatgcttcagccagacggctttctccggctgctaagcacctgcgcgatctgcatcgcagttcatgcgtccgtggggatcaccggcgtgaagacgctgagttgcagagactgggagagacagggaacgtcgagcgctctagcgatgcacacggcgggagccggtactgtacatcacccactggatgagcggaataaagaagacggtagatatttctagttgacagcaactcgaaaggatttccattgttagtttttcttagatagatcgtaggtgtacatagatgagaacagaagtgaagacatgatgttttgcactgtggtgtgtatttacttcaaaagcaagcacg

SEQ ID NO: 11429 - protein, 191 aa, Triticum aestivum
  peptide (1)..(191): Ceres Seq. ID no. 13598180
  misc_feature (11)..(83): Pfam Name: Pfam Description:  DnaJ domain
  misc_feature (1)..(189): NCBI GI NO: 34912486 NR Description: heat shock protein-like
  misc_feature (6)..(131): NCBI GI NO: 21554587 NR Description: DnaJ protein, putative [Arabidopsis thaliana]
  misc_feature (6)..(131): NCBI GI NO: 18405757 NR Description: DnaJ protein family [Arabidopsis thaliana]
  misc_feature (10)..(131): NCBI GI NO: 23428796 NR Description: DnaJ-like protein [Glycine max]
  misc_feature (9)..(133): NCBI GI NO: 7484474 NR Description: probable heat shock protein EMB1 - white spruce
  misc_feature (6)..(92): NCBI GI NO: 25404111 NR Description: probable DnaJ protein
  misc_feature (9)..(151): NCBI GI NO: 15223307 NR Description: DnaJ protein family [Arabidopsis thaliana]
  misc_feature (1)..(155): NCBI GI NO: 15231803 NR Description: DnaJ protein family [Arabidopsis thaliana]
  misc_feature (12)..(162): NCBI GI NO: 6680299 NR Description: DnaJ
  misc_feature (12)..(162): NCBI GI NO: 12838392 NR Description: unnamed protein product [Mus musculus]
MMQSPSQHQSSYYAVLGVHPGASSAEIRAAYHRLAMRWHPDKIANGRVDPAIAEEAKGRFQKIHEAYQVLSDQKRRELYDAGMYDPLDDDQEEVEGFHDFLQEMLSLMATVGREEPVYSLGELQSMLDGMMQDFTSPQPPPPSSFFSSTSSSTRFGAPSGGAQQQRRPPSRVRPQGFGSSACFSQTAFSGC

SEQ ID NO: 11430 - protein, 190 aa, Triticum aestivum
  peptide (1)..(190): Ceres Seq. ID no. 13598181
  misc_feature (10)..(82): Pfam Name: Pfam Description:  DnaJ domain
  misc_feature (1)..(188): NCBI GI NO: 34912486 NR Description: heat shock protein-like
  misc_feature (5)..(130): NCBI GI NO: 21554587 NR Description: DnaJ protein, putative [Arabidopsis thaliana]
  misc_feature (5)..(130): NCBI GI NO: 18405757 NR Description: DnaJ protein family [Arabidopsis thaliana]
  misc_feature (9)..(130): NCBI GI NO: 23428796 NR Description: DnaJ-like protein [Glycine max]
  misc_feature (8)..(132): NCBI GI NO: 7484474 NR Description: probable heat shock protein EMB1 - white spruce
  misc_feature (5)..(91): NCBI GI NO: 25404111 NR Description: probable DnaJ protein
  misc_feature (8)..(150): NCBI GI NO: 15223307 NR Description: DnaJ protein family [Arabidopsis thaliana]
  misc_feature (1)..(154): NCBI GI NO: 15231803 NR Description: DnaJ protein family [Arabidopsis thaliana]
  misc_feature (11)..(161): NCBI GI NO: 6680299 NR Description: DnaJ
  misc_feature (11)..(161): NCBI GI NO: 12838392 NR Description: unnamed protein product [Mus musculus]
MQSPSQHQSSYYAVLGVHPGASSAEIRAAYHRLAMRWHPDKIANGRVDPAIAEEAKGRFQKIHEAYQVLSDQKRRELYDAGMYDPLDDDQEEVEGFHDFLQEMLSLMATVGREEPVYSLGELQSMLDGMMQDFTSPQPPPPSSFFSSTSSSTRFGAPSGGAQQQRRPPSRVRPQGFGSSACFSQTAFSGC

SEQ ID NO: 11431 - protein, 156 aa, Triticum aestivum
  peptide (1)..(156): Ceres Seq. ID no. 13598182
  misc_feature (1)..(154): NCBI GI NO: 34912486 NR Description: heat shock protein-like
  misc_feature (1)..(96): NCBI GI NO: 21554587 NR Description: DnaJ protein, putative [Arabidopsis thaliana]
  misc_feature (1)..(96): NCBI GI NO: 18405757 NR Description: DnaJ protein family [Arabidopsis thaliana]
  misc_feature (1)..(96): NCBI GI NO: 23428796 NR Description: DnaJ-like protein [Glycine max]
  misc_feature (1)..(98): NCBI GI NO: 7484474 NR Description: probable heat shock protein EMB1 - white spruce
  misc_feature (1)..(57): NCBI GI NO: 25404111 NR Description: probable DnaJ protein
  misc_feature (1)..(116): NCBI GI NO: 15223307 NR Description: DnaJ protein family [Arabidopsis thaliana]
  misc_feature (1)..(120): NCBI GI NO: 15231803 NR Description: DnaJ protein family [Arabidopsis thaliana]
  misc_feature (1)..(127): NCBI GI NO: 6680299 NR Description: DnaJ
  misc_feature (1)..(127): NCBI GI NO: 12838396 NR Description: unnamed protein product [Mus musculus]
MRWHPDKIANGRVDPAIAEEAKGRFQKIHEAYQVLSDQKRRELYDAGMYDPLDDDQEEVEGFHDFLQEMLSLMATVGREEPVYSLGELQSMLDGMMQDFTSPQPPPPSSFFSSTSSSTRFGAPSGGAQQQRRPPSRVRPQGFGSSACFSQTAFSGC

SEQ ID NO: 11432 - DNA, 1085 bp, Triticum aestivum
  misc_feature (1)..(1085): Ceres Seq. ID no. 13598140
gccaaattatttttgcctgagtcgcactcgcacgcagccttccttcctacctccaccccgcagtagtagcagcagctccatcaccatctcccccctgcttccttcctcggatcggagggggagagcgaccggccgaccaggaggaagcggcggcaggatgagtctcttcggcctcggacggaatcagaagactttccgttccaagaaaagtgctccatcaggcagcaagggggcacagctccgaaagcacatagatgcaaccctcggtagtggaaaccttagggaagctgtgaggctgccttctggagaggatatcaatgaatggcttgctgttaacactgtggacttctttaatcaagttaacctgctgtatggcacactcacagagttctgcacatccgaaagctgcccaacaatgactgcaggcccaaagtatgagtaccgatgggctgatggtgtacagataaagaagcccatagaagtgtcagcaccaaaatacgtggagtacctaatggactggattgaaggccagcttgacaatgaatccttatttcctcagaagcttggcacaccatttccacccaacttcaaggatgttgtaaacacaattttcaagcgcttgtttcgtgtttatgcccacatatatcactcccattttcagaagattgtcagcctcaaggaggaggctcatcttaacacctgcttcaagcacttcattctgtttacgaacgaatttgggctgattgacaagaaagaactggctcccctccaggagctcatcgaatcaatcatcgttccatactgagaaggaaacactgaggctgaaccgaactaaacatggctgctactgagtcttctacaggaatggtcgagcgattgggctatctgcgccaataatttactggcacaaatcttcttgttccatttctttgacataaaaacacaaaaacatgtatattaccagtgatgtatttgtgtgtacatgttcagcagttctcctgtgcaaacgcgattgtactgctataacatgcatgtttgggttcggttgtgatagtaataacattgaaaagggcagttttaagatg

SEQ ID NO: 11433 - protein, 267 aa, Triticum aestivum
  peptide (1)..(267): Ceres Seq. ID no. 13598141
  misc_feature (81)..(264): Pfam Name: Pfam Description:  Mob1/phocein family
  misc_feature (53)..(267): NCBI GI NO: 32470635 NR Description: putative Mob1/phocein family protein
  misc_feature (53)..(267): NCBI GI NO: 15242430 NR Description: expressed protein [Arabidopsis thaliana]
  misc_feature (53)..(267): NCBI GI NO: 32470654 NR Description: unknown [Solanum bulbocastanum]
  misc_feature (53)..(267): NCBI GI NO: 26449776 NR Description: unknown protein [Arabidopsis thaliana]
  misc_feature (61)..(267): NCBI GI NO: 15234110 NR Description: expressed protein [Arabidopsis thaliana]
  misc_feature (53)..(264): NCBI GI NO: 19309913 NR Description: Mob1-like protein [Medicago sativa subsp. falcata]
  misc_feature (60)..(264): NCBI GI NO: 37534032 NR Description: putative F-box protein family
  misc_feature (75)..(264): NCBI GI NO: 10800806 NR Description: hypothetical protein [Cicer arietinum]
  misc_feature (55)..(263): NCBI GI NO: 28277885 NR Description: Similar to hypothetical protein LOC92597
  misc_feature (55)..(263): NCBI GI NO: 27735029 NR Description: hypothetical protein LOC92597 [Homo sapiens]
PNYFCLSRTRTQPSFLPPPRSSSSSSITISPLLPSSDRRGRATGRPGGSGGRMSLFGLGRNQKTFRSKKSAPSGSKGAQLRKHIDATLGSGNLREAVRLPSGEDINEWLAVNTVDFFNQVNLLYGTLTEFCTSESCPTMTAGPKYEYRWADGVQIKKPIEVSAPKYVEYLMDWIEGQLDNESLFPQKLGTPFPPNFKDVVNTIFKRLFRVYAHIYHSHFQKIVSLKEEAHLNTCFKHFILFTNEFGLIDKKELAPLQELIESIIVPY

SEQ ID NO: 11434 - protein, 215 aa, Triticum aestivum
  peptide (1)..(215): Ceres Seq. ID no. 13598142
  misc_feature (29)..(212): Pfam Name: Pfam Description:  Mob1/phocein family
  misc_feature (1)..(215): NCBI GI NO: 32470635 NR Description: putative Mob1/phocein family protein
  misc_feature (1)..(215): NCBI GI NO: 15242430 NR Description: expressed protein [Arabidopsis thaliana]
  misc_feature (1)..(215): NCBI GI NO: 32470654 NR Description: unknown [Solanum bulbocastanum]
  misc_feature (1)..(215): NCBI GI NO: 26449776 NR Description: unknown protein [Arabidopsis thaliana]
  misc_feature (9)..(215): NCBI GI NO: 15234110 NR Description: expressed protein [Arabidopsis thaliana]
  misc_feature (1)..(212): NCBI GI NO: 19309913 NR Description: Mob1-like protein [Medicago sativa subsp. falcata]
  misc_feature (8)..(212): NCBI GI NO: 37534032 NR Description: putative F-box protein family
  misc_feature (23)..(212): NCBI GI NO: 10800806 NR Description: hypothetical protein [Cicer arietinum]
  misc_feature (3)..(211): NCBI GI NO: 28277885 NR Description: Similar to hypothetical protein LOC92597
  misc_feature (3)..(211): NCBI GI NO: 27735029 NR Description: hypothetical protein LOC92597 [Homo sapiens]
MSLFGLGRNQKTFRSKKSAPSGSKGAQLRKHIDATLGSGNLREAVRLPSGEDINEWLAVNTVDFFNQVNLLYGTLTEFCTSESCPTMTAGPKYEYRWADGVQIKKPIEVSAPKYVEYLMDWIEGQLDNESLFPQKLGTPFPPNFKDVVNTIFKRLFRVYAHIYHSHFQKIVSLKEEAHLNTCFKHFILFTNEFGLIDKKELAPLQELIESIIVPY

SEQ ID NO: 11435 - DNA, 774 bp, Triticum aestivum
  misc_feature (1)..(774): Ceres Seq. ID no. 13661770
agataaggaaagctctggttctgcgcacaagctccaaccaaattccgactcctctgcgcagaccaatcaccaatgcctgggcctccttccaccatgtccctgccgaggccgagcaggtgctaccgctgctgctcgtcgtcgacgccgccgccgccgaagcagcgagccgcggagagcaagcggcggcctatccgcggagcgcggctgctgctgacccggagggcgctggcgggcgctgtggcgacggtgacgttggcggtggcgggccgtgccagggcggcggaggagggcggcgagggggtggtgggcgcgttcaagtcgctgttcgacccgaacgaggagaccaaggccgggaaggtgctgcccaaggcgtacctgaaggcggcgcgggaggtggtgcggacgctccgggagtcgctgggggagggcgacgccgccggcgactcggccagcttccgcaggggcgccgactccgccaagacgtccatccgagagttcctcggcggctggagaggccagcccgccgtcgccaaagaggagtcgtatgtggcgctggagaaggccatcaaatcgctggctgagttctactccaaggcagggcccttcgcctcgcttccgggagatgtcaaaaacaagatcctcgacgacctcaacgccgcagaggcctacctctaggtctctttgcttagcggcattgtattttccggcgtaaattcgttatacttgtgtccttttgttgcgacgttatgatgagtaaataataattgacatggt

SEQ ID NO: 11436 - protein, 200 aa, Triticum aestivum
  peptide (1)..(200): Ceres Seq. ID no. 13661771
  misc_feature (1)..(200): NCBI GI NO: 14626275 NR Description: unknown protein
  misc_feature (50)..(200): NCBI GI NO: 18390518 NR Description: expressed protein [Arabidopsis thaliana]
  misc_feature (50)..(200): NCBI GI NO: 26451618 NR Description: unknown protein [Arabidopsis thaliana]
MPGPPSTMSLPRPSRCYRCCSSSTPPPPKQRAAESKRRPIRGARLLLTRRALAGAVATVTLAVAGRARAAEEGGEGVVGAFKSLFDPNEETKAGKVLPKAYLKAAREVVRTLRESLGEGDAAGDSASFRRGADSAKTSIREFLGGWRGQPAVAKEESYVALEKAIKSLAEFYSKAGPFASLPGDVKNKILDDLNAAEAYL

SEQ ID NO: 11437 - protein, 193 aa, Triticum aestivum
  peptide (1)..(193): Ceres Seq. ID no. 13661772
  misc_feature (1)..(193): NCBI GI NO: 14626275 NR Description: unknown protein
  misc_feature (43)..(193): NCBI GI NO: 18390518 NR Description: expressed protein [Arabidopsis thaliana]
  misc_feature (43)..(193): NCBI GI NO: 26451618 NR Description: unknown protein [Arabidopsis thaliana]
MSLPRPSRCYRCCSSSTPPPPKQRAAESKRRPIRGARLLLTRRALAGAVATVTLAVAGRARAAEEGGEGVVGAFKSLFDPNEETKAGKVLPKAYLKAAREVVRTLRESLGEGDAAGDSASFRRGADSAKTSIREFLGGWRGQPAVAKEESYVALEKAIKSLAEFYSKAGPFASLPGDVKNKILDDLNAAEAYL

SEQ ID NO: 11438 - protein, 192 aa, Triticum aestivum
  peptide (1)..(192): Ceres Seq. ID no. 13661773
  misc_feature (48)..(140): Pfam Name: Pfam Description:  Protein of unknown function, DUF584
  misc_feature (64)..(192): NCBI GI NO: 29829093 NR Description: putative translation initiation factor IF-2
  misc_feature (67)..(142): NCBI GI NO: 15224376 NR Description: glycine-rich protein [Arabidopsis thaliana]
  misc_feature (57)..(144): NCBI GI NO: 1345533 NR Description: glycine-rich protein [Lycopersicon esculentum]
  misc_feature (45)..(160): NCBI GI NO: 33864553 NR Description: RNA-binding region RNP-1 (RNA recognition motif)
  misc_feature (48)..(136): NCBI GI NO: 14573437 NR Description: mating type protein Mat3p
  misc_feature (74)..(144): NCBI GI NO: 100221 NR Description: glycine-rich protein (clones wM and wN) - tomato
  misc_feature (74)..(144): NCBI GI NO: 1345540 NR Description: glycine-rich protein [Lycopersicon esculentum]
  misc_feature (74)..(143): NCBI GI NO: 7439998 NR Description: glycine-rich RNA-binding protein GRP1
IRKALVLRTSSNQIPTPLRRPITNAWASFHHVPAEAEQVLPLLLVVDAAAAEAASRGEQAAAYPRSAAAADPEGAGGRCGDGDVGGGGPCQGGGGGRRGGGGRVQVAVRPERGDQGREGAAQGVPEGGAGGGADAPGVAGGGRRRRRLGQLPQGRRLRQDVHPRVPRRLERPARRRQRGVVCGAGEGHQIAG

SEQ ID NO: 11439 - DNA, 971 bp, Triticum aestivum
  misc_feature (1)..(971): Ceres Seq. ID no. 13662063
agtcgtctcccctgtccccctcgtcctcctcccgcaatccaatcacggggacgggtgagcagcgagcgagcgagcgggatggcgacgctgacctcggagctgctgcggccggtgcacgcggcgcaggcgctggacgaggcggcgctgctgcgctacgcggccgcgcacgtcccgggcttccccacgcccgcgccggcgctcgccctcacgcagttcggccacggccagtccaaccccacctactgcatccaggcctccgcgcccggcggggagcccaggcgctacgtgctgcggaagaagcccgccggcgccatcctccagtccgcccacgccgtcgagcgcgagttccaggttctcaaagctttgggtgcctacacggatgttcctgtccctaaggtgttttgcctttgcactgatgccagtgtgatcggaaccccattctacataatggagtatctggaaggagcattatatcttaataacaagttaacgggagtaaccccagagaaacggaggaatatatacttggctgctgcaaaaactttggctgctgtacacaaaattgatacgactgcagttggattgcataagtatggaagaagagacaattattgcaaaagacaagtagaaagatggggaaaacaatatcttcattcaaccggtgaagggaagcctgcacgttatcagaagatgcttgatctgattggttggctgaaagaaaatataccagaagaagattcatcgacaggattgggaactggccttgttcatggtgattatcgtgttgataaccttgtttttcacccaactgaggatcgagtgataggtgtacttgattgggaattatctactttggggaatcagatgtgtgatgttgcttacagctgtatggtatgaaatatgaaactgtattagggaaaatgtgaaataccttcttatacataatattgttggaaattattcacctattt

SEQ ID NO: 11440 - protein, 298 aa, Triticum aestivum
  peptide (1)..(298): Ceres Seq. ID no. 13662064
  misc_feature (30)..(297): NCBI GI NO: 34393862 NR Description: putative acyl-CoA dehydrogenase
  misc_feature (27)..(298): NCBI GI NO: 7549633 NR Description: hypothetical protein [Arabidopsis thaliana]
  misc_feature (27)..(297): NCBI GI NO: 30680020 NR Description: acetyl-coA dehydrogenase -related
  misc_feature (36)..(297): NCBI GI NO: 31543201 NR Description: hypothetical protein MGC5601 [Homo sapiens]
  misc_feature (36)..(297): NCBI GI NO: 22983218 NR Description: hypothetical protein [Burkholderia fungorum]
  misc_feature (36)..(297): NCBI GI NO: 17546735 NR Description: CONSERVED HYPOTHETICAL PROTEIN
  misc_feature (21)..(297): NCBI GI NO: 16124554 NR Description: conserved hypothetical protein
  misc_feature (36)..(297): NCBI GI NO: 22137453 NR Description: 2410021P16Rik protein [Mus musculus]
  misc_feature (27)..(297): NCBI GI NO: 22978608 NR Description: hypothetical protein [Ralstonia metallidurans]
  misc_feature (4)..(298): NCBI GI NO: 23110028 NR Description: hypothetical protein
SRLPCPPRPPPAIQSRGRVSSERASGMATLTSELLRPVHAAQALDEAALLRYAAAHVPGFPTPAPALALTQFGHGQSNPTYCIQASAPGGEPRRYVLRKKPAGAILQSAHAVEREFQVLKALGAYTDVPVPKVFCLCTDASVIGTPFYIMEYLEGALYLNNKLTGVTPEKRRNIYLAAAKTLAAVHKIDTTAVGLHKYGRRDNYCKRQVERWGKQYLHSTGEGKPARYQKMLDLIGWLKENIPEEDSSTGLGTGLVHGDYRVDNLVFHPTEDRVIGVLDWELSTLGNQMCDVAYSCMV

SEQ ID NO: 11441 - protein, 272 aa, Triticum aestivum
  peptide (1)..(272): Ceres Seq. ID no. 13662065
  misc_feature (4)..(271): NCBI GI NO: 34393862 NR Description: putative acyl-CoA dehydrogenase
  misc_feature (1)..(272): NCBI GI NO: 7549633 NR Description: hypothetical protein [Arabidopsis thaliana]
  misc_feature (1)..(271): NCBI GI NO: 30680020 NR Description: acetyl-coA dehydrogenase -related
  misc_feature (10)..(271): NCBI GI NO: 31543201 NR Description: hypothetical protein MGC5601 [Homo sapiens]
  misc_feature (10)..(271): NCBI GI NO: 22983218 NR Description: hypothetical protein [Burkholderia fungorum]
  misc_feature (10)..(271): NCBI GI NO: 17546735 NR Description: CONSERVED HYPOTHETICAL PROTEIN
  misc_feature (1)..(271): NCBI GI NO: 16124554 NR Description: conserved hypothetical protein
  misc_feature (10)..(271): NCBI GI NO: 22137453 NR Description: 2410021P16Rik protein [Mus musculus]
  misc_feature (1)..(271): NCBI GI NO: 22978608 NR Description: hypothetical protein [Ralstonia metallidurans]
  misc_feature (1)..(272): NCBI GI NO: 23110028 NR Description: hypothetical protein
MATLTSELLRPVHAAQALDEAALLRYAAAHVPGFPTPAPALALTQFGHGQSNPTYCIQASAPGGEPRRYVLRKKPAGAILQSAHAVEREFQVLKALGAYTDVPVPKVFCLCTDASVIGTPFYIMEYLEGALYLNNKLTGVTPEKRRNIYLAAAKTLAAVHKIDTTAVGLHKYGRRDNYCKRQVERWGKQYLHSTGEGKPARYQKMLDLIGWLKENIPEEDSSTGLGTGLVHGDYRVDNLVFHPTEDRVIGVLDWELSTLGNQMCDVAYSCMV

SEQ ID NO: 11442 - protein, 149 aa, Triticum aestivum
  peptide (1)..(149): Ceres Seq. ID no. 13662066
  misc_feature (1)..(148): NCBI GI NO: 34393862 NR Description: putative acyl-CoA dehydrogenase
  misc_feature (1)..(149): NCBI GI NO: 7549633 NR Description: hypothetical protein [Arabidopsis thaliana]
  misc_feature (1)..(148): NCBI GI NO: 30680020 NR Description: acetyl-coA dehydrogenase -related
  misc_feature (1)..(148): NCBI GI NO: 31543201 NR Description: hypothetical protein MGC5601 [Homo sapiens]
  misc_feature (1)..(148): NCBI GI NO: 22983218 NR Description: hypothetical protein [Burkholderia fungorum]
  misc_feature (1)..(148): NCBI GI NO: 17546735 NR Description: CONSERVED HYPOTHETICAL PROTEIN
  misc_feature (1)..(148): NCBI GI NO: 16124554 NR Description: conserved hypothetical protein
  misc_feature (1)..(148): NCBI GI NO: 22137453 NR Description: 2410021P16Rik protein [Mus musculus]
  misc_feature (1)..(148): NCBI GI NO: 22978608 NR Description: hypothetical protein [Ralstonia metallidurans]
  misc_feature (1)..(149): NCBI GI NO: 23110028 NR Description: hypothetical protein
MEYLEGALYLNNKLTGVTPEKRRNIYLAAAKTLAAVHKIDTTAVGLHKYGRRDNYCKRQVERWGKQYLHSTGEGKPARYQKMLDLIGWLKENIPEEDSSTGLGTGLVHGDYRVDNLVFHPTEDRVIGVLDWELSTLGNQMCDVAYSCMV

SEQ ID NO: 11443 - DNA, 634 bp, Triticum aestivum
  misc_feature (1)..(634): Ceres Seq. ID no. 12624607
ccgaccctagcgacgcacctcaatggccatggccgcacgcccacgcggctcgccgctcctccgcgccctcgccggcacgagggggccgccgcgggcccgatccatccacgaggggcccgacaccatccacgagctcctggaccgccacctctccaagaagtcccccgccctcgacgacgacgcggcggaggccctggcgcggcggcggctgacgagctcgcggcgggaggcgctggggctgtaccgggacatcctgcgggcgacgcggctgttcgagtggcccgacgagcgcggcgtgccgtggcgcgacacgctgcgcgccaacgcgcgccgcgagttcgaggaggcccgcggcgagcgcgacccggaggtggtcgcgcggctcctcatcggcggccgcgacgcagtcgaccaggccctggagcgcgtcgccgacgcctcgcgccgcatggtccaggccgaggaggccaagcgccgcggcggggcgtagatccccccacacccccaccccgactcgatgcgccccatgcttcctcttcttcttcttcagctgctgctgcttatgtttgttaatttttgttgtaaaatttactatgtacgaaatgagttacttatgaagcatttcttccttgtc

SEQ ID NO: 11444 - protein, 190 aa, Triticum aestivum
  peptide (1)..(190): Ceres Seq. ID no. 12624608
  misc_feature (45)..(185): Pfam Name: Pfam Description:  Progesterone receptor
  misc_feature (17)..(178): NCBI GI NO: 39583977 NR Description: Hypothetical protein CBG08669
  misc_feature (10)..(174): NCBI GI NO: 39583977 NR Description: Hypothetical protein CBG08669
  misc_feature (12)..(185): NCBI GI NO: 29247944 NR Description: GLP_26_54603_52153 [Giardia lamblia ATCC 50803]
  misc_feature (13)..(190): NCBI GI NO: 34894284 NR Description: unnamed protein product
  misc_feature (32)..(158): NCBI GI NO: 7469102 NR Description: vrlB protein - Dichelobacter nodosus
  misc_feature (12)..(159): NCBI GI NO: 25989119 NR Description: unknown [Streptomyces aureofaciens]
  misc_feature (14)..(187): NCBI GI NO: 22962211 NR Description: hypothetical protein [Rhodopseudomonas palustris]
  misc_feature (18)..(165): NCBI GI NO: 11362193 NR Description: hypothetical protein
  misc_feature (7)..(178): NCBI GI NO: 11024339 NR Description: PKSA putative O-methyltransferase; PKSA-ORF6
  misc_feature (11)..(187): NCBI GI NO: 29247944 NR Description: GLP_26_54603_52153 [Giardia lamblia ATCC 50803]
PTLATHLNGHGRTPTRLAAPPRPRRHEGAAAGPIHPRGARHHPRAPGPPPLQEVPRPRRRRGGGPGAAAADELAAGGAGAVPGHPAGDAAVRVARRARRAVARHAARQRAPRVRGGPRRARPGGGRAAPHRRPRRSRPGPGARRRRLAPHGPGRGGQAPRRGVDPPTPPPRLDAPHASSSSSSAAAAYVC

SEQ ID NO: 11445 - protein, 155 aa, Triticum aestivum
  peptide (1)..(155): Ceres Seq. ID no. 12624609
  misc_feature (65)..(134): Pfam Name: LYR family Pfam Description: Complex 1 protein
  misc_feature (26)..(153): NCBI GI NO: 25373205 NR Description: protein T4O12.26 [imported] - Arabidopsis thaliana
  misc_feature (26)..(153): NCBI GI NO: 30699138 NR Description: expressed protein [Arabidopsis thaliana]
  misc_feature (26)..(153): NCBI GI NO: 27754395 NR Description: unknown protein [Arabidopsis thaliana]
MAMAARPRGSPLLRALAGTRGPPRARSIHEGPDTIHELLDRHLSKKSPALDDDAAEALARRRLTSSRREALGLYRDILRATRLFEWPDERGVPWRDTLRANARREFEEARGERDPEVVARLLIGGRDAVDQALERVADASRRMVQAEEAKRRGGA

SEQ ID NO: 11446 - protein, 153 aa, Triticum aestivum
  peptide (1)..(153): Ceres Seq. ID no. 12624610
  misc_feature (63)..(132): Pfam Name: LYR family Pfam Description: Complex 1 protein
  misc_feature (24)..(151): NCBI GI NO: 25373205 NR Description: protein T4O12.26 [imported] - Arabidopsis thaliana
  misc_feature (24)..(151): NCBI GI NO: 30699138 NR Description: expressed protein [Arabidopsis thaliana]
  misc_feature (24)..(151): NCBI GI NO: 27754395 NR Description: unknown protein [Arabidopsis thaliana]
MAARPRGSPLLRALAGTRGPPRARSIHEGPDTIHELLDRHLSKKSPALDDDAAEALARRRLTSSRREALGLYRDILRATRLFEWPDERGVPWRDTLRANARREFEEARGERDPEVVARLLIGGRDAVDQALERVADASRRMVQAEEAKRRGGA

SEQ ID NO: 11447 - DNA, 851 bp, Triticum aestivum
  misc_feature (1)..(851): Ceres Seq. ID no. 12624185
acaggcaagcttagtaaccagccatgaagaccatgaagagatgcattattcctagcatcctgctgatgcattcactcgaggccgtcctcctcgtcgccgccggccgcccttccacggccaccggcgccgacgatgtgggcaccattctcctgccgagccaaggcaaaggtgaccatgccatcattttcttttcctagttcacttcagttcagttagctagctggtgcatgaggaaactggtcacagcttgggtcgttaactgaggacttgcaggcgaagcaggagtggtggcggcagcgaagaagaagggggaagaggaagagaggccatggaaatgctgcgactttgctctgtgcaccaggtcattcccaccgctgtgccgctgcatggacaaggtcgagcagtgtgctgcgacctgcgagaaatgcgagccggccacgtcggactcatcccgccgcgtctgcaacgactggtaccatggcttcccggggcccatgtgcacggaggctgttgcaacagcgaagaaggagaaggcggaagaagaagagaggccgtggaaatgctgtgacttggctctgtgcaccaggtcgttcccgccgatgtgccgctgcctggacaaggtcgagcagtgtgccgcaaactgcaagagctgcgatccggccgcgtcggactcgtcccgccgcgtctgcaacgactggtaccatggcttccccggcgccaagtgcaccgccgacggtaactagcatgcgcgttgatcacctgatcaacgccgtccagcctgagctttagtagctgcagcagcctgcagtgtctgtaagcaacaaaataaaatggaaagtcaggcaatcacg

SEQ ID NO: 11448 - protein, 118 aa, Triticum aestivum
  peptide (1)..(118): Ceres Seq. ID no. 12624186
  misc_feature (59)..(83): Pfam Name: Pfam Description:  Bowman-Birk serine protease inhibitor family
  misc_feature (1)..(114): NCBI GI NO: 6730112 NR Description: Chain A, Crystal Structure Of Barley Bbi
  misc_feature (1)..(118): NCBI GI NO: 34895446 NR Description: putative Bowman Birk tryspin inhibitor
  misc_feature (1)..(113): NCBI GI NO: 34895496 NR Description: P0409B08.18
  misc_feature (1)..(116): NCBI GI NO: 7635923 NR Description: putative Bowman Birk tryspin inhibitor
  misc_feature (1)..(114): NCBI GI NO: 7489819 NR Description: probable trypsin inhibitor - maize
  misc_feature (1)..(113): NCBI GI NO: 34895436 NR Description: putative Bowman Birk trypsin inhibitor
  misc_feature (1)..(113): NCBI GI NO: 7619801 NR Description: Bowman Birk trypsin inhibitor
  misc_feature (1)..(113): NCBI GI NO: 34895440 NR Description: Bowman Birk trypsin inhibitor
  misc_feature (1)..(113): NCBI GI NO: 7635919 NR Description: putative Bowman Birk trypsin inhibitor
  misc_feature (1)..(113): NCBI GI NO: 34895448 NR Description: putative Bowman Birk tryspin inhibitor
MDKVEQCAATCEKCEPATSDSSRRVCNDWYHGFPGPMCTEAVATAKKEKAEEEERPWKCCDLALCTRSFPPMCRCLDKVEQCAANCKSCDPAASDSSRRVCNDWYHGFPGAKCTADGN

SEQ ID NO: 11449 - protein, 103 aa, Triticum aestivum
  peptide (1)..(103): Ceres Seq. ID no. 12624187
MASRGPCARRLLQQRRRRRRKKKRGRGNAVTWLCAPGRSRRCAAAWTRSSSVPQTARAAIRPRRTRPAASATTGTMASPAPSAPPTVTSMRVDHLINAVQPEL

SEQ ID NO: 11450 - protein, 82 aa, Triticum aestivum
  peptide (1)..(82): Ceres Seq. ID no. 12624188
  misc_feature (23)..(47): Pfam Name: Pfam Description:  Bowman-Birk serine protease inhibitor family
  misc_feature (1)..(78): NCBI GI NO: 6730112 NR Description: Chain A, Crystal Structure Of Barley Bbi
  misc_feature (1)..(82): NCBI GI NO: 34895446 NR Description: putative Bowman Birk tryspin inhibitor
  misc_feature (1)..(77): NCBI GI NO: 34895496 NR Description: P0409B08.18
  misc_feature (1)..(80): NCBI GI NO: 7635923 NR Description: putative Bowman Birk tryspin inhibitor
  misc_feature (1)..(78): NCBI GI NO: 7489819 NR Description: probable trypsin inhibitor - maize
  misc_feature (1)..(77): NCBI GI NO: 34895436 NR Description: putative Bowman Birk trypsin inhibitor
  misc_feature (1)..(77): NCBI GI NO: 7619801 NR Description: Bowman Birk trypsin inhibitor
  misc_feature (1)..(77): NCBI GI NO: 34895440 NR Description: Bowman Birk trypsin inhibitor
  misc_feature (1)..(77): NCBI GI NO: 7635919 NR Description: putative Bowman Birk trypsin inhibitor
  misc_feature (1)..(77): NCBI GI NO: 34895448 NR Description: putative Bowman Birk tryspin inhibitor
MCTEAVATAKKEKAEEEERPWKCCDLALCTRSFPPMCRCLDKVEQCAANCKSCDPAASDSSRRVCNDWYHGFPGAKCTADGN

SEQ ID NO: 11451 - DNA, 1080 bp, Triticum aestivum
  misc_feature (1)..(1080): Ceres Seq. ID no. 13661672
agaacatcctaatcgaaaaaaccagacacagagcttgagagagagagagagaagatggcgtacaacgcgtgtttcctacatcagagcgcactagcctcctcctccgtcgcaagatcatcaccttcctcatcatcccagcgctacgtgtcactctctaaactagtctgcaaagcacaacagactcaagaagacgatacctccaccgtctctcgccgtctcgctctcgcacttctcgtcggcgccgctgcggttggttccaaagtgtctcccgccgatgctgcctacggtgaagctgcaaatgtgtttgggaagccaaagacaaacacagacttcactgcgtacaatggagatggattccaagtgcaggtgccagctaagtggaacccaagcagagaggtagagtatccaggacaagtccttaggtacgaagacaactttgacgctactagcaatctcaatgtcatggtcactcctaccgacaagaagtccatcactgattacggttctcctgaagagttcctctctcaggtcaactatcttctcgggaaacaagcgtacttcggtgagactgcctctgagggaggctttgacaacaatgcagtggcaacagcaaacattctggagacaaacattcaggacgttggtgggaaaccatactattacttgtcggtgttgacaagaacagccgatggagatgaaggtggtaagcatcagctgatcacagccaccgtgaatggagggaagctttatatctgcaaagcacaagctggagacaagaggtggttcaagggagccaataaatttgtggagaaagcagccatttctttcagtgttgcttgattaaaaaagctgcacaacagaagaactatatgctctgcttgttgttatcttcatttgtctcttgtaaagaatggaaaaatgaaacttagcttctgagaactatcaagatggtgatgttacctttgcggctttttcaaaattatattcggtagatctttgctcattagtataatggttgctcaaactaaagacactgactcaagaaaaagctatagactaattctaaatccttgaaaacct

SEQ ID NO: 11452 - protein, 261 aa, Triticum aestivum
  peptide (1)..(261): Ceres Seq. ID no. 13661673
  misc_feature (59)..(261): Pfam Name: Pfam Description:  PsbP
  misc_feature (1)..(261): NCBI GI NO: 131391 NR Description: Oxygen-evolving enhancer protein 2
  misc_feature (15)..(261): NCBI GI NO: 81723 NR Description: photosystem II oxygen-evolving complex protein 2precursor
  misc_feature (1)..(261): NCBI GI NO: 15222166 NR Description: photosystem II oxygen-evolving complex 23 (OEC23)
  misc_feature (1)..(261): NCBI GI NO: 11133887 NR Description: OXYGEN-EVOLVING ENHANCER PROTEIN 2-2
  misc_feature (45)..(261): NCBI GI NO: 11134091 NR Description: Oxygen-evolving enhancer protein 2
  misc_feature (1)..(261): NCBI GI NO: 7443216 NR Description: photosystem II oxygen-evolving complex protein 2precursor
  misc_feature (8)..(261): NCBI GI NO: 19898 NR Description: photosystem II 23 kDa polypeptide
  misc_feature (6)..(261): NCBI GI NO: 1345550 NR Description: 23-kDa ploypeptide of photosystem II oxygen-evolving complex
  misc_feature (1)..(261): NCBI GI NO: 15224572 NR Description: photosystem II oxygen-evolving complex 23 (OEC23)
  misc_feature (1)..(261): NCBI GI NO: 417604 NR Description: 23 kDa polypeptide of water-oxidizing complex ofphotosystem II
MAYNACFLHQSALASSSVARSSPSSSSQRYVSLSKLVCKAQQTQEDDTSTVSRRLALALLVGAAAVGSKVSPADAAYGEAANVFGKPKTNTDFTAYNGDGFQVQVPAKWNPSREVEYPGQVLRYEDNFDATSNLNVMVTPTDKKSITDYGSPEEFLSQVNYLLGKQAYFGETASEGGFDNNAVATANILETNIQDVGGKPYYYLSVLTRTADGDEGGKHQLITATVNGGKLYICKAQAGDKRWFKGANKFVEKAAISFSVA

SEQ ID NO: 11453 - DNA, 869 bp, Triticum aestivum
  misc_feature (1)..(869): Ceres Seq. ID no. 13661512
atcgaaaaaccacaaaagctctgtttctcatatctcctctctgttttcatcagatatctaaagacagcgtttgatttcaacagctatggtgagaatcttccttctctacaatctcttaaactcttttctcctctctttagtaccaaagaagctacgaagtctcttccctctctcttggttcgacaaaactccccacaagarctcatccatgttaccatctccctcaccatcctctgctccaacgagaaaaacagatccctccgagctgaaacgcgttttccagaccttcgacaagaacggagacggccgaatcaccaaaaccgagctcaacgactcgctagagaatcttggaatctacataccagacaaagacctcactcagatgatccacaacatcgacgccaacggcgatgggtgcgtggacatagacgagttcgagtccctgtacagctccatcgtcgatgagcatcgcaaggatggagaaacagaggaagatgacatgaaagacgcgtttaacgtgtttgaccaggacggagatggtttcatcactgtggaggagttgaagtctgtgatgggttccttgggactcaagcaaggtaaaacattggaaggctgcaagaagatgattatgcaagtggatggtgatggagatggtagagtcaattacaaagagtttcttcagatgatgagaggtggtggttttagctgcagtaataactgatctttatttaggatttaacgtaagagtgtgtgtgtttatttgtttaacttgtttgttttcctttttatgtgtaaatattttttttttttgatgatgcatcaagtgtgtaattttttttttcctttttaggatttctctaaggttatgt

SEQ ID NO: 11454 - protein, 211 aa, Triticum aestivum
  peptide (1)..(211): Ceres Seq. ID no. 15220107
  misc_feature (176)..(204): Pfam Name: Pfam Description:  EF hand
  misc_feature (1)..(210): NCBI GI NO: 18406202 NR Description: calmodulin-like protein (MSS3)
  misc_feature (42)..(210): NCBI GI NO: 25295758 NR Description: probable calcium binding protein
  misc_feature (1)..(207): NCBI GI NO: 15231685 NR Description: calcium-binding protein, putative
  misc_feature (55)..(207): NCBI GI NO: 28301674 NR Description: calcium-binding protein [Lotus japonicus]
  misc_feature (57)..(207): NCBI GI NO: 15221358 NR Description: calcium-binding protein, putative
  misc_feature (57)..(207): NCBI GI NO: 15231470 NR Description: calcium-binding protein, putative
  misc_feature (57)..(209): NCBI GI NO: 15236276 NR Description: calcium-binding protein, putative
  misc_feature (57)..(211): NCBI GI NO: 15235516 NR Description: calcium-binding protein, putative
  misc_feature (35)..(207): NCBI GI NO: 21740787 NR Description: OSJNBb0091E11.1
  misc_feature (18)..(205): NCBI GI NO: 19386815 NR Description: B1147A04.10
  misc_feature (39)..(39): Xaa is any aa, unknown or other
MVRIFLLYNLLNSFLLSLVPKKLRSLFPLSWFDKTPHKXSSMLPSPSPSSAPTRKTDPSELKRVFQTFDKNGDGRITKTELNDSLENLGIYIPDKDLTQMIHNIDANGDGCVDIDEFESLYSSIVDEHRKDGETEEDDMKDAFNVFDQDGDGFITVEELKSVMGSLGLKQGKTLEGCKKMIMQVDGDGDGRVNYKEFLQMMRGGGFSCSNN

SEQ ID NO: 11455 - protein, 170 aa, Triticum aestivum
  peptide (1)..(170): Ceres Seq. ID no. 15220108
  misc_feature (135)..(163): Pfam Name: Pfam Description:  EF hand
  misc_feature (1)..(169): NCBI GI NO: 18406202 NR Description: calmodulin-like protein (MSS3)
  misc_feature (1)..(169): NCBI GI NO: 25295758 NR Description: probable calcium binding protein
  misc_feature (1)..(166): NCBI GI NO: 15231685 NR Description: calcium-binding protein, putative
  misc_feature (14)..(166): NCBI GI NO: 28301674 NR Description: calcium-binding protein [Lotus japonicus]
  misc_feature (16)..(166): NCBI GI NO: 15221358 NR Description: calcium-binding protein, putative
  misc_feature (16)..(166): NCBI GI NO: 15231470 NR Description: calcium-binding protein, putative
  misc_feature (16)..(168): NCBI GI NO: 15236276 NR Description: calcium-binding protein, putative
  misc_feature (16)..(170): NCBI GI NO: 15235516 NR Description: calcium-binding protein, putative
  misc_feature (1)..(166): NCBI GI NO: 21740787 NR Description: OSJNBb0091E11.1
  misc_feature (1)..(164): NCBI GI NO: 19386815 NR Description: B1147A04.10
MLPSPSPSSAPTRKTDPSELKRVFQTFDKNGDGRITKTELNDSLENLGIYIPDKDLTQMIHNIDANGDGCVDIDEFESLYSSIVDEHRKDGETEEDDMKDAFNVFDQDGDGFITVEELKSVMGSLGLKQGKTLEGCKKMIMQVDGDGDGRVNYKEFLQMMRGGGFSCSNN

SEQ ID NO: 11456 - protein, 154 aa, Triticum aestivum
  peptide (1)..(154): Ceres Seq. ID no. 15220109
  misc_feature (67)..(67): Xaa is any aa, unknown or other
IEKPQKLCFSYLLSVFIRYLKTAFDFNSYGENLPSLQSLKLFSPLFSTKEATKSLPSLLVRQNSPQXLIHVTISLTILCSNEKNRSLRAETRFPDLRQERRRPNHQNRAQRLARESWNLHTRQRPHSDDPQHRRQRRWVRGHRRVRVPVQLHRR

SEQ ID NO: 11457 - DNA, 1060 bp, Triticum aestivum
  misc_feature (1)..(1060): Ceres Seq. ID no. 13661778
  misc_feature (316)..(316): n is a, c, t, g, unknown, or other
actagcttccagcgcacacttgtcaccttcctccccgcaacgcatccagctaccccgtctcactcccgacccatcccaccagcaccaggacagacacggacaggacgatggagtcacccatggcggcccggaggctcctgcaggaggcggcgggcctgtccacgccgggcgcccggatcatcgccgacgacagggacatcgtcatcatcctcgcctcgctgctctgcgcgctcatcaccgtcctcggcatcggcctcgtcgcccgctggtgcgcgtgcggcggcgcggaagccagggcgcgcgccgccgccaaccngggcgtcaagaagtcggtgctccgcgccatccccaccgtcgcctacgtctccgccgacgccggcaagggcaagggcaaggaggcagaggaggccgccgcggcgccggagtgcgccatctgcctcgccgagttcgaggacggcgaggccatgcgcgtgctgccccagtgcggccacgccttccacgccgcctgcgtcgacaagtggctgcgcggccactcttcttgcccctcctgccgccggatcctcgccgtccagctgccggctgcccagcggtgccagcgctgcggcgcgcgccccgacccagccgtggcgacctggaagcctccggcccagtacggcgagatgccgcccttcttgccgtagcggctcgcgcgcgcgctcgatctccacagatctgggcgagagctagaagacgactagtagcagaggaaccagtcaaccaatcgatgagccttctgtttggtcaaatatctcggctgcttctcttaattaccttcctttgtttatctcatcatcagtagcagttcttcttaccgccgagctggaaatgcatagcatttctgaatttaggaccctggtatgcaggtgggtggtgatcaaggtgttgccactacatcttagcagctttgtacatttgtaaatagtaactataattactcctaaggagtaatcggcatcatcgattaggcttatctgaaactgtgaatacctttgctttccatgaatccatttggtcaattctg

SEQ ID NO: 11458 - protein, 278 aa, Triticum aestivum
  peptide (1)..(278): Ceres Seq. ID no. 13661779
  misc_feature (14)..(103): Pfam Name: Pfam Description:  Sperm histone P2
  misc_feature (105)..(105): Xaa is any aa, unknown or other
LASSAHLSPSSPQRIQLPRLTPDPSHQHQDRHGQDDGVTHGGPEAPAGGGGPVHAGRPDHRRRQGHRHHPRLAALRAHHRPRHRPRRPLVRVRRRGSQGARRRQXGRQEVGAPRHPHRRLRLRRRRQGQGQGGRGGRRGAGVRHLPRRVRGRRGHARAAPVRPRLPRRLRRQVAARPLFLPLLPPDPRRPAAGCPAVPALRRAPRPSRGDLEASGPVRRDAALLAVAARARARSPQIWARARRRLVAEEPVNQSMSLLFGQISRLLLLITFLCLSHHQ

SEQ ID NO: 11459 - protein, 241 aa, Triticum aestivum
  peptide (1)..(241): Ceres Seq. ID no. 13661780
  misc_feature (60)..(241): Pfam Name: Pfam Description:  Equine herpesvirus glycoprotein gp2
  misc_feature (17)..(241): NCBI GI NO: 11359723 NR Description: proteophosphoglycan, membrane-associated
  misc_feature (12)..(241): NCBI GI NO: 13592175 NR Description: ppg3 [Leishmania major]
  misc_feature (12)..(241): NCBI GI NO: 13592175 NR Description: ppg3 [Leishmania major]
  misc_feature (12)..(241): NCBI GI NO: 13592175 NR Description: ppg3 [Leishmania major]
  misc_feature (46)..(241): NCBI GI NO: 13592175 NR Description: ppg3 [Leishmania major]
  misc_feature (13)..(241): NCBI GI NO: 13592175 NR Description: ppg3 [Leishmania major]
  misc_feature (43)..(241): NCBI GI NO: 5420387 NR Description: proteophosphoglycan [Leishmania major]
  misc_feature (12)..(241): NCBI GI NO: 13592175 NR Description: ppg3 [Leishmania major]
  misc_feature (43)..(241): NCBI GI NO: 13592175 NR Description: ppg3 [Leishmania major]
  misc_feature (47)..(241): NCBI GI NO: 5420387 NR Description: proteophosphoglycan [Leishmania major]
  misc_feature (106)..(106): Xaa is any aa, unknown or other
TSFQRTLVTFLPATHPATPSHSRPIPPAPGQTRTGRWSHPWRPGGSCRRRRACPRRAPGSSPTTGTSSSSSPRCSARSSPSSASASSPAGARAAARKPGRAPPPTXASRSRCSAPSPPSPTSPPTPARARARRQRRPPRRRSAPSASPSSRTARPCACCPSAATPSTPPASTSGCAATLLAPPAAGSSPSSCRLPSGASAAARAPTQPWRPGSLRPSTARCRPSCRSGSRARSISTDLGES

SEQ ID NO: 11460 - protein, 190 aa, Triticum aestivum
  peptide (1)..(190): Ceres Seq. ID no. 13661781
  misc_feature (107)..(148): Pfam Name: RING finger Pfam Description: Zinc finger, C3HC4 type
  misc_feature (5)..(190): NCBI GI NO: 32487554 NR Description: OSJNBa0013K16.6
  misc_feature (1)..(182): NCBI GI NO: 7489432 NR Description: probable ring finger protein - barley
  misc_feature (9)..(166): NCBI GI NO: 15227839 NR Description: RING zinc finger protein -related
  misc_feature (9)..(169): NCBI GI NO: 15218042 NR Description: RING zinc finger protein -related
  misc_feature (9)..(169): NCBI GI NO: 15223041 NR Description: RING zinc finger protein -related
  misc_feature (9)..(169): NCBI GI NO: 21555237 NR Description: putative RING zinc finger protein
  misc_feature (20)..(190): NCBI GI NO: 15237013 NR Description: RING-H2 finger protein RHA3b
  misc_feature (28)..(152): NCBI GI NO: 15241087 NR Description: expressed protein [Arabidopsis thaliana]
  misc_feature (3)..(149): NCBI GI NO: 34907826 NR Description: P0485B12.26
  misc_feature (58)..(167): NCBI GI NO: 37536508 NR Description: putative ring finger protein
  misc_feature (70)..(70): Xaa is any aa, unknown or other
MESPMAARRLLQEAAGLSTPGARIIADDRDIVIILASLLCALITVLGIGLVARWCACGGAEARARAAANXGVKKSVLRAIPTVAYVSADAGKGKGKEAEEAAAAPECAICLAEFEDGEAMRVLPQCGHAFHAACVDKWLRGHSSCPSCRRILAVQLPAAQRCQRCGARPDPAVATWKPPAQYGEMPPFLP

SEQ ID NO: 11461 - DNA, 678 bp, Triticum aestivum
  misc_feature (1)..(678): Ceres Seq. ID no. 13598194
gtttttgagaggcttctggaaatccgtggtgtagtaagcggctaggcggtagccaccgatgcctgcgacgccggcggccagccccgggtgcgctgggctgccggcgcaacctccgacgagctcactccccggatttgaaggcccccctagccggctgggcgttcggaggccggcatgggtcgtccgcaccgagtctaatgttaggagagaaagaccaaaacgacctgatcctccatgcaccatctgcaaaggcactgggacaataaattgccgcaactgtttcggtagaggaagaataaatcatgtcgatctcgccgtgctccccaagggagaatggccgcaatggtgccaaatatgcgggggtagcggcctagattactgccaccggtgccatggaacaggtgaatatcgagaacccatgggctttcacttcacagtcaataggaaatgagtgtcgcacaggcagtgttggaaggccggccaagtcaaatggtcaggaaaaaaaaatgtcccattgaggccataggattaacatttgaatgagctgtgtgaagttactgtgaaaactttgatcttatgctaatgctgcagaattttcttgccagcaaagaaacattagatgtagattatgatcagaggctaagggtcttcagttttatcaaccggctaaatttgtgt

SEQ ID NO: 11462 - protein, 130 aa, Triticum aestivum
  peptide (1)..(130): Ceres Seq. ID no. 13598195
  misc_feature (65)..(115): Pfam Name: 4 repeats Pfam Description: DnaJ central domain
  misc_feature (1)..(130): NCBI GI NO: 38346709 NR Description: OSJNBa0086O06.7
  misc_feature (2)..(125): NCBI GI NO: 9294155 NR Description: gene_id:MKP6.23~unknown protein
  misc_feature (2)..(116): NCBI GI NO: 15229091 NR Description: hypothetical protein [Arabidopsis thaliana]
MPATPAASPGCAGLPAQPPTSSLPGFEGPPSRLGVRRPAWVVRTESNVRRERPKRPDPPCTICKGTGTINCRNCFGRGRINHVDLAVLPKGEWPQWCQICGGSGLDYCHRCHGTGEYREPMGFHFTVNRK

SEQ ID NO: 11463 - DNA, 1017 bp, Triticum aestivum
  misc_feature (1)..(1017): Ceres Seq. ID no. 13661548
gtcaacaattcatcgttgagacacgactcgaggcaccaaaacgccacacttcttctcgaaacatccatccagcctcgtcgccggcgacctcacccgccgccgcagccgccgccgaagatgccggtcagggtggtcgacaccgccaccccttcctcgcagtcctcatcaggacaagaggcaaatgctgtgcagccgtctcctcctagctgctcactcttaactgctggaagatgttttgcaggaactcagaatgtttcaagtttacaaaaagatgaagcatggaaagtcaatgttcgtatccatggttgtgatattgaacagggttatttatgtggaacaatggaggcacttaatgttcccttagccgacacacctgtggtgacattctgggagggggagatagtagatgctaaaaattataccttttttactggcaagtgggaggcatcagcagaggatgatgtaagacactggtccaagttcccatcatttacccctcttctgagtcagattgaggcagatggtggcaagtctgtggaccttagcaactatccttatatatttatgagatggaaagagcagtactttgttaatgtgggagtggactgcgggttgaccatagctggtttctattacgtctgcttttcttgtagcgatggatccattagtggcttttattacgacccaaacagcagtccatttcagaagcttgaattgaagtgcaccaacgagaaacaatctgggttcaccttttcttcgtatgagctgcagtgacatgcatgacgctattaattgaagtggcagagattaacgggcgaacttcctgtgcttgccaatatgaacatatactgtgtgtgtattgaacccgtagttcctgatgttcctttgaaatagttgagatgttatgtatgtatggttgtgccagaccaaacaattatgtaacttatccttttgcaatctcagtattctgggaaaaaagtatcaatttgtttattttatcgaaagttcgcctgtgtt

SEQ ID NO: 11464 - protein, 257 aa, Triticum aestivum
  peptide (1)..(257): Ceres Seq. ID no. 15220115
  misc_feature (40)..(257): NCBI GI NO: 29150393 NR Description: unknown protein
  misc_feature (74)..(167): NCBI GI NO: 15224341 NR Description: expressed protein [Arabidopsis thaliana]
  misc_feature (182)..(232): NCBI GI NO: 15224341 NR Description: expressed protein [Arabidopsis thaliana]
  misc_feature (165)..(257): NCBI GI NO: 34895748 NR Description: P0024G09.20
  misc_feature (8)..(239): NCBI GI NO: 23111007 NR Description: hypothetical protein MGC3048 [Homo sapiens]
  misc_feature (8)..(239): NCBI GI NO: 18676842 NR Description: unnamed protein product [Homo sapiens]
  misc_feature (40)..(239): NCBI GI NO: 34870809 NR Description: similar to RIKEN cDNA 4933439F18
  misc_feature (40)..(239): NCBI GI NO: 12848536 NR Description: unnamed protein product [Mus musculus]
  misc_feature (40)..(239): NCBI GI NO: 34328469 NR Description: RIKEN cDNA 4933439F18 [Mus musculus]
  misc_feature (4)..(240): NCBI GI NO: 40747141 NR Description: hypothetical protein AN1179.2
VNNSSLRHDSRHQNATLLLETSIQPRRRRPHPPPQPPPKMPVRVVDTATPSSQSSSGQEANAVQPSPPSCSLLTAGRCFAGTQNVSSLQKDEAWKVNVRIHGCDIEQGYLCGTMEALNVPLADTPVVTFWEGEIVDAKNYTFFTGKWEASAEDDVRHWSKFPSFTPLLSQIEADGGKSVDLSNYPYIFMRWKEQYFVNVGVDCGLTIAGFYYVCFSCSDGSISGFYYDPNSSPFQKLELKCTNEKQSGFTFSSYELQ

SEQ ID NO: 11465 - protein, 218 aa, Triticum aestivum
  peptide (1)..(218): Ceres Seq. ID no. 15220116
  misc_feature (1)..(218): NCBI GI NO: 29150393 NR Description: unknown protein
  misc_feature (35)..(128): NCBI GI NO: 15224341 NR Description: expressed protein [Arabidopsis thaliana]
  misc_feature (143)..(193): NCBI GI NO: 15224341 NR Description: expressed protein [Arabidopsis thaliana]
  misc_feature (126)..(218): NCBI GI NO: 34895748 NR Description: P0024G09.20
  misc_feature (1)..(200): NCBI GI NO: 23111007 NR Description: hypothetical protein MGC3048 [Homo sapiens]
  misc_feature (1)..(200): NCBI GI NO: 18676842 NR Description: unnamed protein product [Homo sapiens]
  misc_feature (1)..(200): NCBI GI NO: 34870809 NR Description: similar to RIKEN cDNA 4933439F18
  misc_feature (1)..(200): NCBI GI NO: 12848536 NR Description: unnamed protein product [Mus musculus]
  misc_feature (1)..(200): NCBI GI NO: 34328469 NR Description: RIKEN cDNA 4933439F18 [Mus musculus]
  misc_feature (1)..(201): NCBI GI NO: 40747141 NR Description: hypothetical protein AN1179.2
MPVRVVDTATPSSQSSSGQEANAVQPSPPSCSLLTAGRCFAGTQNVSSLQKDEAWKVNVRIHGCDIEQGYLCGTMEALNVPLADTPVVTFWEGEIVDAKNYTFFTGKWEASAEDDVRHWSKFPSFTPLLSQIEADGGKSVDLSNYPYIFMRWKEQYFVNVGVDCGLTIAGFYYVCFSCSDGSISGFYYDPNSSPFQKLELKCTNEKQSGFTFSSYELQ

SEQ ID NO: 11466 - protein, 144 aa, Triticum aestivum
  peptide (1)..(144): Ceres Seq. ID no. 15220117
  misc_feature (1)..(144): NCBI GI NO: 29150393 NR Description: unknown protein
  misc_feature (1)..(54): NCBI GI NO: 15224341 NR Description: expressed protein [Arabidopsis thaliana]
  misc_feature (69)..(119): NCBI GI NO: 15224341 NR Description: expressed protein [Arabidopsis thaliana]
  misc_feature (52)..(144): NCBI GI NO: 34895748 NR Description: P0024G09.20
  misc_feature (1)..(126): NCBI GI NO: 23111007 NR Description: hypothetical protein MGC3048 [Homo sapiens]
  misc_feature (1)..(126): NCBI GI NO: 18676842 NR Description: unnamed protein product [Homo sapiens]
  misc_feature (1)..(126): NCBI GI NO: 34870809 NR Description: similar to RIKEN cDNA 4933439F18
  misc_feature (1)..(126): NCBI GI NO: 12848536 NR Description: unnamed protein product [Mus musculus]
  misc_feature (1)..(126): NCBI GI NO: 34328469 NR Description: RIKEN cDNA 4933439F18 [Mus musculus]
  misc_feature (1)..(127): NCBI GI NO: 40747141 NR Description: hypothetical protein AN1179.2
MEALNVPLADTPVVTFWEGEIVDAKNYTFFTGKWEASAEDDVRHWSKFPSFTPLLSQIEADGGKSVDLSNYPYIFMRWKEQYFVNVGVDCGLTIAGFYYVCFSCSDGSISGFYYDPNSSPFQKLELKCTNEKQSGFTFSSYELQ

SEQ ID NO: 11467 - DNA, 701 bp, Triticum aestivum
  misc_feature (1)..(701): Ceres Seq. ID no. 13661786
acctagaacatcctaatcgaaaaacacaacacacaatccaagttaaagaaaccgttacaaaaagaaaagaaaaactacgttgtttcttgaaaatggagattcttaagttcgctgtcatttttgtactttgctccatctcgtcgtctaacgccgcaactacaccgccgagcggcggagcaggagatgctcactcaatgccatgtatacaaaaactgatgccgtgtcagccgtatcttcgctcagtcactccgccgcctccagcgtcgtgttgtatgccgctgaaggagatcgtcgagaccgacgtgaactgtctttgctccgtcttcaacaacgtagatatgcttaaatcgcttaaccttactaaagaaaacgctcttgttctccccaaagcttgtggcgccaacgctgatgtgtcgcagtgcaaagccagcaccggtactacgacgccttcgacgtcaccaggaactactaaaactcctccggcagctcccgctgaaagcggatctacgggaggttcagcttcttcaacggccaaaccatcagactcggctccggccatcattttttctggaattagcttcgcctccgctttcgtggcattggcaacaatctttttctgatatcctactaattagtcacgtctttattcagcttagttggtttaaaatgttggaaactactattatcagacaatattcggt

SEQ ID NO: 11468 - protein, 205 aa, Triticum aestivum
  peptide (1)..(205): Ceres Seq. ID no. 13661787
  misc_feature (67)..(140): Pfam Name: Pfam Description:  Protease inhibitor/seed storage/LTP family
  misc_feature (31)..(205): NCBI GI NO: 15221052 NR Description: lipid transfer protein family
  misc_feature (31)..(162): NCBI GI NO: 18410388 NR Description: lipid transfer protein family
  misc_feature (31)..(162): NCBI GI NO: 21593596 NR Description: lipid transfer protein, putative
  misc_feature (31)..(140): NCBI GI NO: 25406276 NR Description: probable lipid transfer protein F6D5.5
  misc_feature (60)..(153): NCBI GI NO: 15219496 NR Description: protease inhibitor/seed storage/lipid transfer
  misc_feature (60)..(153): NCBI GI NO: 25406275 NR Description: hypothetical protein F6D5.6
  misc_feature (61)..(203): NCBI GI NO: 7484433 NR Description: lipid transfer protein - Norway spruce
  misc_feature (37)..(201): NCBI GI NO: 25553602 NR Description: OJ1656_E11.34
  misc_feature (67)..(192): NCBI GI NO: 15221585 NR Description: protease inhibitor/seed storage/lipid transfer
  misc_feature (67)..(177): NCBI GI NO: 30696757 NR Description: protease inhibitor/seed storage/lipid transfer
LEHPNRKTQHTIQVKETVTKRKEKLRCFLKMEILKFAVIFVLCSISSSNAATTPPSGGAGDAHSMPCIQKLMPCQPYLRSVTPPPPASCCMPLKEIVETDVNCLCSVFNNVDMLKSLNLTKENALVLPKACGANADVSQCKASTGTTTPSTSPGTTKTPPAAPAESGSTGGSASSTAKPSDSAPAIIFSGISFASAFVALATIFF

SEQ ID NO: 11469 - protein, 175 aa, Triticum aestivum
  peptide (1)..(175): Ceres Seq. ID no. 13661788
  misc_feature (37)..(110): Pfam Name: Pfam Description:  Protease inhibitor/seed storage/LTP family
  misc_feature (1)..(175): NCBI GI NO: 15221052 NR Description: lipid transfer protein family
  misc_feature (1)..(132): NCBI GI NO: 18410388 NR Description: lipid transfer protein family
  misc_feature (1)..(132): NCBI GI NO: 21593596 NR Description: lipid transfer protein, putative
  misc_feature (1)..(110): NCBI GI NO: 25406276 NR Description: probable lipid transfer protein F6D5.5
  misc_feature (30)..(123): NCBI GI NO: 15219496 NR Description: protease inhibitor/seed storage/lipid transfer
  misc_feature (30)..(123): NCBI GI NO: 25406275 NR Description: hypothetical protein F6D5.6
  misc_feature (31)..(173): NCBI GI NO: 7484433 NR Description: lipid transfer protein - Norway spruce
  misc_feature (7)..(171): NCBI GI NO: 25553602 NR Description: OJ1656_E11.34
  misc_feature (37)..(162): NCBI GI NO: 15221585 NR Description: protease inhibitor/seed storage/lipid transfer
  misc_feature (37)..(147): NCBI GI NO: 30696757 NR Description: protease inhibitor/seed storage/lipid transfer
MEILKFAVIFVLCSISSSNAATTPPSGGAGDAHSMPCIQKLMPCQPYLRSVTPPPPASCCMPLKEIVETDVNCLCSVFNNVDMLKSLNLTKENALVLPKACGANADVSQCKASTGTTTPSTSPGTTKTPPAAPAESGSTGGSASSTAKPSDSAPAIIFSGISFASAFVALATIFF

SEQ ID NO: 11470 - protein, 141 aa, Triticum aestivum
  peptide (1)..(141): Ceres Seq. ID no. 13661789
  misc_feature (3)..(76): Pfam Name: Pfam Description:  Protease inhibitor/seed storage/LTP family
  misc_feature (1)..(141): NCBI GI NO: 15221052 NR Description: lipid transfer protein family
  misc_feature (1)..(98): NCBI GI NO: 18410388 NR Description: lipid transfer protein family
  misc_feature (1)..(98): NCBI GI NO: 21593596 NR Description: lipid transfer protein, putative
  misc_feature (1)..(76): NCBI GI NO: 25406276 NR Description: probable lipid transfer protein F6D5.5
  misc_feature (1)..(89): NCBI GI NO: 15219496 NR Description: protease inhibitor/seed storage/lipid transfer
  misc_feature (1)..(89): NCBI GI NO: 25406275 NR Description: hypothetical protein F6D5.6
  misc_feature (1)..(139): NCBI GI NO: 7484433 NR Description: lipid transfer protein - Norway spruce
  misc_feature (1)..(137): NCBI GI NO: 25553602 NR Description: OJ1656_E11.34
  misc_feature (3)..(128): NCBI GI NO: 15221585 NR Description: protease inhibitor/seed storage/lipid transfer
  misc_feature (3)..(113): NCBI GI NO: 30696757 NR Description: protease inhibitor/seed storage/lipid transfer
MPCIQKLMPCQPYLRSVTPPPPASCCMPLKEIVETDVNCLCSVFNNVDMLKSLNLTKENALVLPKACGANADVSQCKASTGTTTPSTSPGTTKTPPAAPAESGSTGGSASSTAKPSDSAPAIIFSGISFASAFVALATIFF

SEQ ID NO: 11471 - DNA, 864 bp, Triticum aestivum
  misc_feature (1)..(864): Ceres Seq. ID no. 13661890
acatctctcccatccatcaaaccgccgcaaccttctctgaccgagcagctgcgagctccagcccaagttccaagctagaatcgcggcgatggcacggtcggagctggtcatggcgttgctggtggtggtcctcgccggcggctgctgcgcgtcggcgggcgccgtggcgtacctctccaagctgcctgtgatcctcgacgtcaccgcatcccccagtcccggccaagttcttcacgccggcgaggacgtgatcacggtgacttgggccctgaacgcgagccagccggccggcaaggacgccgactacaagaacgtgaaggtgagcctctgctacgcgccggtgagccagaaggagcgcgagtggcgcaagacccacgacgacctcaagaaggacaagacctgccagttcaaggtcacccagcaggcctaccccggcaccggcaaggtcgagtaccgcgtcgccctcgacatccccaccgccacctactatgtgcgtgcctacgcgctcgacgcctccggcacgcaggtcgcctacggccagaccgcgcccgccgccgccttcaacatcgtcagcatcaccggcgtcaccacctccatcaaggtcgccgccggcgtcttctccgccttctccgtcgcgtcgctcgccttcttcttcttcattgagaaacgcaagaagaacaactaaactcggaagtcggaaccgtggcaaagtgttcgtcttcgtccgtgcgcaatttcttcctgtccttcgcaacctacgcataattgtacggaaaaatgtactgtactgtactatatgtaagagattgtttgatgttccctttttcttatccggagactctcgtatataattggttatgttgt

SEQ ID NO: 11472 - protein, 198 aa, Triticum aestivum
  peptide (1)..(198): Ceres Seq. ID no. 13661891
  misc_feature (1)..(197): NCBI GI NO: 32488147 NR Description: OSJNBa0044K18.32
  misc_feature (19)..(194): NCBI GI NO: 20149062 NR Description: unknown [Capsicum annuum]
  misc_feature (1)..(195): NCBI GI NO: 15240632 NR Description: expressed protein [Arabidopsis thaliana]
  misc_feature (36)..(195): NCBI GI NO: 13624657 NR Description: putative component of high affinity nitratetransporter
  misc_feature (36)..(195): NCBI GI NO: 21553714 NR Description: putative component of high affinity nitratetransporter
  misc_feature (36)..(195): NCBI GI NO: 15233944 NR Description: hypothetical protein [Arabidopsis thaliana]
MARSELVMALLVVVLAGGCCASAGAVAYLSKLPVILDVTASPSPGQVLHAGEDVITVTWALNASQPAGKDADYKNVKVSLCYAPVSQKEREWRKTHDDLKKDKTCQFKVTQQAYPGTGKVEYRVALDIPTATYYVRAYALDASGTQVAYGQTAPAAAFNIVSITGVTTSIKVAAGVFSAFSVASLAFFFFIEKRKKNN

SEQ ID NO: 11473 - protein, 191 aa, Triticum aestivum
  peptide (1)..(191): Ceres Seq. ID no. 13661892
  misc_feature (1)..(190): NCBI GI NO: 32488147 NR Description: OSJNBa0044K18.32
  misc_feature (12)..(187): NCBI GI NO: 20149062 NR Description: unknown [Capsicum annuum]
  misc_feature (1)..(188): NCBI GI NO: 15240632 NR Description: expressed protein [Arabidopsis thaliana]
  misc_feature (29)..(188): NCBI GI NO: 13624657 NR Description: putative component of high affinity nitratetransporter
  misc_feature (29)..(188): NCBI GI NO: 21553714 NR Description: putative component of high affinity nitratetransporter
  misc_feature (29)..(188): NCBI GI NO: 15233944 NR Description: hypothetical protein [Arabidopsis thaliana]
MALLVVVLAGGCCASAGAVAYLSKLPVILDVTASPSPGQVLHAGEDVITVTWALNASQPAGKDADYKNVKVSLCYAPVSQKEREWRKTHDDLKKDKTCQFKVTQQAYPGTGKVEYRVALDIPTATYYVRAYALDASGTQVAYGQTAPAAAFNIVSITGVTTSIKVAAGVFSAFSVASLAFFFFIEKRKKNN

SEQ ID NO: 11474 - protein, 120 aa, Triticum aestivum
  peptide (1)..(120): Ceres Seq. ID no. 13661893
  misc_feature (1)..(74): Pfam Name: Pfam Description:  Glycoprotein GG/GX
  misc_feature (1)..(67): NCBI GI NO: 38175466 NR Description: putative high-affinity potassium transporter
  misc_feature (1)..(53): NCBI GI NO: 7441828 NR Description: extensin-like cell wall protein
  misc_feature (1)..(53): NCBI GI NO: 7441829 NR Description: proline-rich cell wall protein - upland cotton
  misc_feature (1)..(57): NCBI GI NO: 38345019 NR Description: OSJNBa0029H02.3
  misc_feature (1)..(72): NCBI GI NO: 25143299 NR Description: pre-mRNA splicing SR protein related RSR-1 (68
  misc_feature (1)..(57): NCBI GI NO: 11360318 NR Description: probable mucin DKFZp434C196.1 - human (fragment)
  misc_feature (1)..(53): NCBI GI NO: 7441829 NR Description: proline-rich cell wall protein - upland cotton
  misc_feature (1)..(53): NCBI GI NO: 2429362 NR Description: proline rich protein [Santalum album]
  misc_feature (1)..(53): NCBI GI NO: 7441828 NR Description: extensin-like cell wall protein
  misc_feature (1)..(55): NCBI GI NO: 7441828 NR Description: extensin-like cell wall protein
MCVPTRSTPPARRSPTARPRPPPPSTSSASPASPPPSRSPPASSPPSPSRRSPSSSSLRNARRTTKLGSRNRGKVFVFVRAQFLPVLRNLRIIVRKNVLYCTICKRLFDVPFFLSGDSRI

SEQ ID NO: 11475 - DNA, 955 bp, Triticum aestivum
  misc_feature (1)..(955): Ceres Seq. ID no. 13664295
gttcactagcttcgaagtttctttcgaatagttaaaaaaaacaaacaatggcgacggttcagttcttcaaccaattcccctgccaaacccgagtccaaagcccatcaaactcaaaacccctctccaagccaccgtcttcgctggtgccaatgagcgcgctcactcgccgtccgtcgttttcccccggagaaatcgccgtttctcgttctgatttcagagtcagagtcatcgatgcggaagacgagttggatccggagacgagtgagggaggaggatctgctctattgatggcggaggaagcaatcgaatctgtggaggaaacggaggctctcaagagatcgctggtggattcgttgtacggcacagaccgagggttgagcgcatcgagcgagacgagagccgagatcggagatctaatcacacagctcgagtccaagaaccctacaccagctcccaccgatgctctcttccttctcaacggcaaatggatccagattaagttcgaggaaggtgtgatcggcactcctcagctaacggattcgattgagatcccggagtatgttgagtttcttggtcagaagattgatcttactccgatcagagggttgcttacatcggtacaagacacggctacgtctgtggctagaaccatatcgagccagccaccgttgaaattctctttgcctggggacagtgctcagtcgtggctgctcacgacttatctggacaaggacattaggatctctagaggagatggtggaagcgtctttgtgcttatcaaagaaggaagccctctgttgaacccttgaactctttaatgccaagtacaaactaagtgtttaatatattgttgttgtagtgttaatcgtttgtatgtattaactcggatggtatggagttaagtaataatgttgtagctgctataaaaatacaaaaaaaaaaatatacaaatgtt

SEQ ID NO: 11476 - protein, 253 aa, Triticum aestivum
  peptide (1)..(253): Ceres Seq. ID no. 13664296
  misc_feature (93)..(148): Pfam Name: Pfam Description:  PAP_fibrillin
  misc_feature (1)..(148): NCBI GI NO: 21618237 NR Description: fibrillin precursor-like protein
  misc_feature (137)..(253): NCBI GI NO: 21618237 NR Description: fibrillin precursor-like protein
  misc_feature (1)..(148): NCBI GI NO: 22261807 NR Description: Light-induced protein, chloroplast precursor
  misc_feature (133)..(253): NCBI GI NO: 22261807 NR Description: Light-induced protein, chloroplast precursor
  misc_feature (1)..(148): NCBI GI NO: 25453087 NR Description: Light-induced protein, chloroplast precursor(C40
  misc_feature (133)..(253): NCBI GI NO: 25453087 NR Description: Light-induced protein, chloroplast precursor(C40
  misc_feature (1)..(180): NCBI GI NO: 14248556 NR Description: plastid-lipid associated protein PAP2
  misc_feature (1)..(180): NCBI GI NO: 14248550 NR Description: plastid-lipid associated protein PAP2
  misc_feature (133)..(253): NCBI GI NO: 7489179 NR Description: plastid-lipid-associated protein pap
  misc_feature (62)..(148): NCBI GI NO: 7489179 NR Description: plastid-lipid-associated protein pap
MATVQFFNQFPCQTRVQSPSNSKPLSKPPSSLVPMSALTRRPSFSPGEIAVSRSDFRVRVIDAEDELDPETSEGGGSALLMAEEAIESVEETEALKRSLVDSLYGTDRGLSASSETRAEIGDLITQLESKNPTPAPTDALFLLNGKWIQIKFEEGVIGTPQLTDSIEIPEYVEFLGQKIDLTPIRGLLTSVQDTATSVARTISSQPPLKFSLPGDSAQSWLLTTYLDKDIRISRGDGGSVFVLIKEGSPLLNP

SEQ ID NO: 11477 - protein, 219 aa, Triticum aestivum
  peptide (1)..(219): Ceres Seq. ID no. 13664297
  misc_feature (59)..(114): Pfam Name: Pfam Description:  PAP_fibrillin
  misc_feature (1)..(114): NCBI GI NO: 21618237 NR Description: fibrillin precursor-like protein
  misc_feature (103)..(219): NCBI GI NO: 21618237 NR Description: fibrillin precursor-like protein
  misc_feature (1)..(114): NCBI GI NO: 22261807 NR Description: Light-induced protein, chloroplast precursor
  misc_feature (99)..(219): NCBI GI NO: 22261807 NR Description: Light-induced protein, chloroplast precursor
  misc_feature (1)..(114): NCBI GI NO: 25453087 NR Description: Light-induced protein, chloroplast precursor(C40
  misc_feature (99)..(219): NCBI GI NO: 25453087 NR Description: Light-induced protein, chloroplast precursor(C40
  misc_feature (1)..(146): NCBI GI NO: 14248556 NR Description: plastid-lipid associated protein PAP2
  misc_feature (1)..(146): NCBI GI NO: 14248550 NR Description: plastid-lipid associated protein PAP2
  misc_feature (99)..(219): NCBI GI NO: 7489179 NR Description: plastid-lipid-associated protein pap
  misc_feature (28)..(114): NCBI GI NO: 7489179 NR Description: plastid-lipid-associated protein pap
MSALTRRPSFSPGEIAVSRSDFRVRVIDAEDELDPETSEGGGSALLMAEEAIESVEETEALKRSLVDSLYGTDRGLSASSETRAEIGDLITQLESKNPTPAPTDALFLLNGKWIQIKFEEGVIGTPQLTDSIEIPEYVEFLGQKIDLTPIRGLLTSVQDTATSVARTISSQPPLKFSLPGDSAQSWLLTTYLDKDIRISRGDGGSVFVLIKEGSPLLNP

SEQ ID NO: 11478 - protein, 173 aa, Triticum aestivum
  peptide (1)..(173): Ceres Seq. ID no. 13664298
  misc_feature (13)..(68): Pfam Name: Pfam Description:  PAP_fibrillin
  misc_feature (1)..(68): NCBI GI NO: 21618237 NR Description: fibrillin precursor-like protein
  misc_feature (57)..(173): NCBI GI NO: 21618237 NR Description: fibrillin precursor-like protein
  misc_feature (1)..(68): NCBI GI NO: 22261807 NR Description: Light-induced protein, chloroplast precursor
  misc_feature (53)..(173): NCBI GI NO: 22261807 NR Description: Light-induced protein, chloroplast precursor
  misc_feature (1)..(68): NCBI GI NO: 25453087 NR Description: Light-induced protein, chloroplast precursor(C40
  misc_feature (53)..(173): NCBI GI NO: 25453087 NR Description: Light-induced protein, chloroplast precursor(C40
  misc_feature (1)..(100): NCBI GI NO: 14248556 NR Description: plastid-lipid associated protein PAP2
  misc_feature (1)..(100): NCBI GI NO: 14248550 NR Description: plastid-lipid associated protein PAP2
  misc_feature (53)..(173): NCBI GI NO: 7489179 NR Description: plastid-lipid-associated protein pap
  misc_feature (1)..(68): NCBI GI NO: 7489179 NR Description: plastid-lipid-associated protein pap
MAEEAIESVEETEALKRSLVDSLYGTDRGLSASSETRAEIGDLITQLESKNPTPAPTDALFLLNGKWIQIKFEEGVIGTPQLTDSIEIPEYVEFLGQKIDLTPIRGLLTSVQDTATSVARTISSQPPLKFSLPGDSAQSWLLTTYLDKDIRISRGDGGSVFVLIKEGSPLLNP

SEQ ID NO: 11479 - DNA, 920 bp, Triticum aestivum
  misc_feature (1)..(920): Ceres Seq. ID no. 13664149
  misc_feature (30)..(30): n is a, c, t, g, unknown, or other
  misc_feature (29)..(29): n is a, c, t, g, unknown, or other
  misc_feature (28)..(28): n is a, c, t, g, unknown, or other
gctcctccgcggtgacgggcgctctagnnntagtggatccmccgggytgcaggaattmgcaygagamcaktrcctagawcatcactaatcgaaaaacaccacttgatatcaacaaaccaactccatagacgccaaagaaaaactcatggctaagctcattttcttcttagccgtgcaaatcctcctcctcgctgtcgtttcttccaccggagacgacggagaaaactttgccagaaccatagatcggaagcttctcgggctccacaagaaagagaagctaacccatttcaaagtctattggcacgacatcttaagtggtccaaacccaacctccatcatgattcaaccaccagttacaaacacttcctacttcggagccatctccatgatcgataacgccttgacggcgagagttccgatgaactcaactgtcttgggccaagctcaaggcttctacgcgggagcggcccaaaaggagttgggttttctaatggctatgaactttgcttttaagacagggaagtacaatggaagcaccattacgattcttggtcggaatacggcgttgtcggaggttagagaaatgccaattgttggaggaagtgggcttttccgatttgctagaggctatgttgaggctcggacaaagtggattaatctcaagaacggcgatgctactgttgagtatagctgttatgttttgcattattgatgtttttgtcgtaattatatatttaatttgacgaggtaataataaagcagatttttaaaatttaagttttctttttgcatttggcttatggtgtgtggtggatttgtggttgtaggtttgtcgtttaataatatttgatatatagttttatttaaaaaaaaaaaaaaaaaagcttatcgataccgtcgacctcgaggkksgscccggt

SEQ ID NO: 11480 - protein, 188 aa, Triticum aestivum
  peptide (1)..(188): Ceres Seq. ID no. 15220733
  misc_feature (15)..(187): Pfam Name: Pfam Description:  Dirigent-like protein
  misc_feature (1)..(188): NCBI GI NO: 15222673 NR Description: disease resistance response protein-related/dirigent protein-related
  misc_feature (1)..(188): NCBI GI NO: 22135914 NR Description: unknown protein [Arabidopsis thaliana]
  misc_feature (1)..(188): NCBI GI NO: 15239779 NR Description: disease resistance response protein-related/dirigent protein-related
  misc_feature (1)..(188): NCBI GI NO: 15231302 NR Description: disease resistance response protein-related/dirigent protein-related
  misc_feature (1)..(179): NCBI GI NO: 15231318 NR Description: disease resistance response protein-related/dirigent protein-related
  misc_feature (4)..(188): NCBI GI NO: 15217886 NR Description: disease resistance response protein-related/dirigent protein-related
  misc_feature (66)..(188): NCBI GI NO: 15231315 NR Description: disease resistance response protein-related/dirigent protein-related
  misc_feature (1)..(187): NCBI GI NO: 15218836 NR Description: disease resistance response protein-related/dirigent protein-related
  misc_feature (1)..(187): NCBI GI NO: 30681257 NR Description: disease resistance response protein-related/dirigent protein-related
  misc_feature (1)..(182): NCBI GI NO: 25412014 NR Description: probable disease resistance response protein
MAKLIFFLAVQILLLAVVSSTGDDGENFARTIDRKLLGLHKKEKLTHFKVYWHDILSGPNPTSIMIQPPVTNTSYFGAISMIDNALTARVPMNSTVLGQAQGFYAGAAQKELGFLMAMNFAFKTGKYNGSTITILGRNTALSEVREMPIVGGSGLFRFARGYVEARTKWINLKNGDATVEYSCYVLHY

SEQ ID NO: 11481 - protein, 124 aa, Triticum aestivum
  peptide (1)..(124): Ceres Seq. ID no. 15220734
  misc_feature (1)..(123): Pfam Name: Pfam Description:  Dirigent-like protein
  misc_feature (1)..(124): NCBI GI NO: 15222673 NR Description: disease resistance response protein-related/dirigent protein-related
  misc_feature (1)..(124): NCBI GI NO: 22135914 NR Description: unknown protein [Arabidopsis thaliana]
  misc_feature (1)..(124): NCBI GI NO: 15239779 NR Description: disease resistance response protein-related/dirigent protein-related
  misc_feature (1)..(124): NCBI GI NO: 15231302 NR Description: disease resistance response protein-related/dirigent protein-related
  misc_feature (1)..(115): NCBI GI NO: 15231318 NR Description: disease resistance response protein-related/dirigent protein-related
  misc_feature (1)..(124): NCBI GI NO: 15217886 NR Description: disease resistance response protein-related/dirigent protein-related
  misc_feature (2)..(124): NCBI GI NO: 15231315 NR Description: disease resistance response protein-related/dirigent protein-related
  misc_feature (1)..(123): NCBI GI NO: 15218836 NR Description: disease resistance response protein-related/dirigent protein-related
  misc_feature (1)..(123): NCBI GI NO: 30681257 NR Description: disease resistance response protein-related/dirigent protein-related
  misc_feature (1)..(118): NCBI GI NO: 25412014 NR Description: probable disease resistance response protein
MIQPPVTNTSYFGAISMIDNALTARVPMNSTVLGQAQGFYAGAAQKELGFLMAMNFAFKTGKYNGSTITILGRNTALSEVREMPIVGGSGLFRFARGYVEARTKWINLKNGDATVEYSCYVLHY

SEQ ID NO: 11482 - protein, 108 aa, Triticum aestivum
  peptide (1)..(108): Ceres Seq. ID no. 15220735
  misc_feature (1)..(107): Pfam Name: Pfam Description:  Dirigent-like protein
  misc_feature (1)..(108): NCBI GI NO: 15222673 NR Description: disease resistance response protein-related/dirigent protein-related
  misc_feature (1)..(108): NCBI GI NO: 22135914 NR Description: unknown protein [Arabidopsis thaliana]
  misc_feature (1)..(108): NCBI GI NO: 15239779 NR Description: disease resistance response protein-related/dirigent protein-related
  misc_feature (1)..(108): NCBI GI NO: 15231302 NR Description: disease resistance response protein-related/dirigent protein-related
  misc_feature (1)..(99): NCBI GI NO: 15231318 NR Description: disease resistance response protein-related/dirigent protein-related
  misc_feature (1)..(108): NCBI GI NO: 15217886 NR Description: disease resistance response protein-related/dirigent protein-related
  misc_feature (1)..(108): NCBI GI NO: 15231315 NR Description: disease resistance response protein-related/dirigent protein-related
  misc_feature (1)..(107): NCBI GI NO: 15218836 NR Description: disease resistance response protein-related/dirigent protein-related
  misc_feature (1)..(107): NCBI GI NO: 30681257 NR Description: disease resistance response protein-related/dirigent protein-related
  misc_feature (1)..(102): NCBI GI NO: 25412014 NR Description: probable disease resistance response protein
MIDNALTARVPMNSTVLGQAQGFYAGAAQKELGFLMAMNFAFKTGKYNGSTITILGRNTALSEVREMPIVGGSGLFRFARGYVEARTKWINLKNGDATVEYSCYVLHY

SEQ ID NO: 11483 - DNA, 639 bp, Triticum aestivum
  misc_feature (1)..(639): Ceres Seq. ID no. 14302329
atattatcaacaccgaatctcaaacacaaacacacacatctttcttcaaaaaaaaacttttgcttctcccaagaatctgaatctgcttcacttttgttcaaccatgatgaacatagacgatacgacatctccaatggcccacccgatcgttccatctcaacctccttccgaccaaacccaacaagatccaagttcgcccaatgaagcttcttctgttaccgacaagaaagatgatcaagcttttcccgaagagaaaccgaagcagaatcaagaagaagagagagtggacacagggagagagaagctaaagaagcaccggagagacgtcgccggaagagtttggatacctgacatatggggacaagaagagcttcttaaggactggatcgactgttcaacgtttgatacgtgtctagtccctgccggaatctcgtcggcacgtgcagctctcgtagacgaagctaggcgagctgcttcggcttctggtgggttacatagtcgttgcttgatctcccgctgaatttttatataatatcatatataaatgtggttcttgttcctcaataatatatgtaagccattattgatatattgttgatatagagtctttttcattttcccaataattatattggccct

SEQ ID NO: 11484 - protein, 172 aa, Triticum aestivum
  peptide (1)..(172): Ceres Seq. ID no. 14302330
  misc_feature (35)..(172): NCBI GI NO: 18409685 NR Description: expressed protein [Arabidopsis thaliana]
  misc_feature (39)..(156): NCBI GI NO: 38346335 NR Description: OSJNBa0073L04.6
  misc_feature (92)..(167): NCBI GI NO: 15229972 NR Description: expressed protein [Arabidopsis thaliana]
YYQHRISNTNTHIFLQKKTFASPKNLNLLHFCSTMMNIDDTTSPMAHPIVPSQPPSDQTQQDPSSPNEASSVTDKKDDQAFPEEKPKQNQEEERVDTGREKLKKHRRDVAGRVWIPDIWGQEELLKDWIDCSTFDTCLVPAGISSARAALVDEARRAASASGGLHSRCLISR

SEQ ID NO: 11485 - protein, 138 aa, Triticum aestivum
  peptide (1)..(138): Ceres Seq. ID no. 14302331
  misc_feature (1)..(138): NCBI GI NO: 18409685 NR Description: expressed protein [Arabidopsis thaliana]
  misc_feature (5)..(122): NCBI GI NO: 38346335 NR Description: OSJNBa0073L04.6
  misc_feature (58)..(133): NCBI GI NO: 15229972 NR Description: expressed protein [Arabidopsis thaliana]
MMNIDDTTSPMAHPIVPSQPPSDQTQQDPSSPNEASSVTDKKDDQAFPEEKPKQNQEEERVDTGREKLKKHRRDVAGRVWIPDIWGQEELLKDWIDCSTFDTCLVPAGISSARAALVDEARRAASASGGLHSRCLISR

SEQ ID NO: 11486 - protein, 137 aa, Triticum aestivum
  peptide (1)..(137): Ceres Seq. ID no. 14302332
  misc_feature (1)..(137): NCBI GI NO: 18409685 NR Description: expressed protein [Arabidopsis thaliana]
  misc_feature (4)..(121): NCBI GI NO: 38346335 NR Description: OSJNBa0073L04.6
  misc_feature (57)..(132): NCBI GI NO: 15229972 NR Description: expressed protein [Arabidopsis thaliana]
MNIDDTTSPMAHPIVPSQPPSDQTQQDPSSPNEASSVTDKKDDQAFPEEKPKQNQEEERVDTGREKLKKHRRDVAGRVWIPDIWGQEELLKDWIDCSTFDTCLVPAGISSARAALVDEARRAASASGGLHSRCLISR

SEQ ID NO: 11487 - DNA, 747 bp, Triticum aestivum
  misc_feature (1)..(747): Ceres Seq. ID no. 13598188
acgagaccattacctagaacatcctaatcgaaaaatagccactacctgcttccacttctgattcagaaactcttaggcattccacattctcaaccccgaaccctaagagcagagcgaaaatgacaaccaccttcgcgaccgtcgcaggactcggtggcgcattactgtcatccacctcatctcgtttcacctcagggtttgtgaaatccccagtgattgctaggaatcccttgaggcaagctgtggcaatgggaaatgggaggattacatgctttgagaggaattggctgcgggcagattacagtgtgattgggtttgggttgattggttggctagcaccctcaagcataccggctatcaacggtaaaagtctgactggcctcttctttgagagcattggtgctgagcttgctcactttcccagccctcctgcccttacttcgtccttttggttatggctggttacgtggcaccttggcttgttcattgtcctcacttttgggcaaattggattcaagggaaggactgaagactacttttgaattctaaacctatggtctctgtttttacctttttttttctcttccttgtgtgcccccactgccccagtgccttgcaatctatgatgactctatgctacctttttccttcttactaggagaaatctatgtaatatcgccttcataatgttgtatattattattgttgtacttgctcctcatcaatgtcccaacttcttctagtcgt

SEQ ID NO: 11488 - protein, 140 aa, Triticum aestivum
  peptide (1)..(140): Ceres Seq. ID no. 13598189
  misc_feature (1)..(140): NCBI GI NO: 18390888 NR Description: expressed protein [Arabidopsis thaliana]
  misc_feature (1)..(140): NCBI GI NO: 22531014 NR Description: expressed protein [Arabidopsis thaliana]
  misc_feature (1)..(140): NCBI GI NO: 6996562 NR Description: putative 16kDa membrane protein
MTTTFATVAGLGGALLSSTSSRFTSGFVKSPVIARNPLRQAVAMGNGRITCFERNWLRADYSVIGFGLIGWLAPSSIPAINGKSLTGLFFESIGAELAHFPSPPALTSSFWLWLVTWHLGLFIVLTFGQIGFKGRTEDYF

SEQ ID NO: 11489 - protein, 97 aa, Triticum aestivum
  peptide (1)..(97): Ceres Seq. ID no. 13598190
  misc_feature (1)..(97): NCBI GI NO: 18390888 NR Description: expressed protein [Arabidopsis thaliana]
  misc_feature (1)..(97): NCBI GI NO: 22531014 NR Description: expressed protein [Arabidopsis thaliana]
  misc_feature (1)..(97): NCBI GI NO: 6996562 NR Description: putative 16kDa membrane protein
MGNGRITCFERNWLRADYSVIGFGLIGWLAPSSIPAINGKSLTGLFFESIGAELAHFPSPPALTSSFWLWLVTWHLGLFIVLTFGQIGFKGRTEDYF

SEQ ID NO: 11490 - DNA, 829 bp, Triticum aestivum
  misc_feature (1)..(829): Ceres Seq. ID no. 14301870
ataacttcaagacacttcactaaataatctataataaaatgaagatgataattcacatttttttcatcctctccctagtttcatcaacctcttttgcctctgttcaagacttctgtgtagctgatccaaagggtcctcaaagcccatcaggatactcttgcaagaaccctgaccaagtcaccgaaaatgactttgcattctccggcctcgccaaagctggaaacacttcgaacctcattaaagccgcagtgacgccagcctttgcccctgctttcgcaggcaccaatggtcttggagtctcaatggctcgtcttgacttagccggtggtggtgtcattcctcttcacacacatcctggtgcgtctgaggttcttgtagtcatacaaggaaccatctgcgccgggtttatttcctctgctaacaaagtttacttgaagactctccagagaggtgattctatggtgtttcctcaaggacttcttcattttcagcttaactctgggaaaggccctgctttggcttttgttgccttcggaagctcatccccaggacttcagattctaccttttgctctgtttgctaatgatttgccttcagagctcgttgaagccaccacctttcttagtgatgaagaagttaagaagcttaagggtgtgcttggaggaactgattaagcttatctttcgttttttttctaagttttgtgtgtgtgtttatgcgctttttattcaagttcgtttagcattttattgcgtgtaattgttctaagtgtttcattttcattgtctctaaggcttaaattttaattaagtaataagcattgcattgc

SEQ ID NO: 11491 - protein, 211 aa, Triticum aestivum
  peptide (1)..(211): Ceres Seq. ID no. 14301871
  misc_feature (55)..(201): Pfam Name: Pfam Description:  Cupin
  misc_feature (1)..(211): NCBI GI NO: 1755154 NR Description: germin-like protein [Arabidopsis thaliana]
  misc_feature (1)..(211): NCBI GI NO: 1169944 NR Description: Germin-like protein 1 precursor
  misc_feature (1)..(211): NCBI GI NO: 15242028 NR Description: germin-like protein (AtGER3)
  misc_feature (24)..(211): NCBI GI NO: 1755188 NR Description: germin-like protein [Arabidopsis thaliana]
  misc_feature (1)..(210): NCBI GI NO: 13277342 NR Description: Germin-like protein [Pisum sativum]
  misc_feature (3)..(211): NCBI GI NO: 18203684 NR Description: Auxin-binding protein ABP19a precursor
  misc_feature (3)..(211): NCBI GI NO: 18201940 NR Description: Auxin-binding protein ABP20 precursor
  misc_feature (3)..(211): NCBI GI NO: 18201941 NR Description: Auxin-binding protein ABP19b precursor
  misc_feature (3)..(211): NCBI GI NO: 31711507 NR Description: 24K germin like protein [Nicotiana tabacum]
  misc_feature (3)..(210): NCBI GI NO: 30841320 NR Description: auxin binding protein [Gossypium hirsutum]
MKMIIHIFFILSLVSSTSFASVQDFCVADPKGPQSPSGYSCKNPDQVTENDFAFSGLAKAGNTSNLIKAAVTPAFAPAFAGTNGLGVSMARLDLAGGGVIPLHTHPGASEVLVVIQGTICAGFISSANKVYLKTLQRGDSMVFPQGLLHFQLNSGKGPALAFVAFGSSSPGLQILPFALFANDLPSELVEATTFLSDEEVKKLKGVLGGTD

SEQ ID NO: 11492 - protein, 209 aa, Triticum aestivum
  peptide (1)..(209): Ceres Seq. ID no. 14301872
  misc_feature (53)..(199): Pfam Name: Pfam Description:  Cupin
  misc_feature (1)..(209): NCBI GI NO: 1755154 NR Description: germin-like protein [Arabidopsis thaliana]
  misc_feature (1)..(209): NCBI GI NO: 1169944 NR Description: Germin-like protein 1 precursor
  misc_feature (1)..(209): NCBI GI NO: 15242028 NR Description: germin-like protein (AtGER3)
  misc_feature (22)..(209): NCBI GI NO: 1755188 NR Description: germin-like protein [Arabidopsis thaliana]
  misc_feature (1)..(208): NCBI GI NO: 13277342 NR Description: Germin-like protein [Pisum sativum]
  misc_feature (1)..(209): NCBI GI NO: 18203684 NR Description: Auxin-binding protein ABP19a precursor
  misc_feature (1)..(209): NCBI GI NO: 18201940 NR Description: Auxin-binding protein ABP20 precursor
  misc_feature (1)..(209): NCBI GI NO: 18201941 NR Description: Auxin-binding protein ABP19b precursor
  misc_feature (1)..(209): NCBI GI NO: 31711507 NR Description: 24K germin like protein [Nicotiana tabacum]
  misc_feature (1)..(208): NCBI GI NO: 30841320 NR Description: auxin binding protein [Gossypium hirsutum]
MIIHIFFILSLVSSTSFASVQDFCVADPKGPQSPSGYSCKNPDQVTENDFAFSGLAKAGNTSNLIKAAVTPAFAPAFAGTNGLGVSMARLDLAGGGVIPLHTHPGASEVLVVIQGTICAGFISSANKVYLKTLQRGDSMVFPQGLLHFQLNSGKGPALAFVAFGSSSPGLQILPFALFANDLPSELVEATTFLSDEEVKKLKGVLGGTD

SEQ ID NO: 11493 - protein, 123 aa, Triticum aestivum
  peptide (1)..(123): Ceres Seq. ID no. 14301873
  misc_feature (1)..(113): Pfam Name: Pfam Description:  Cupin
  misc_feature (1)..(123): NCBI GI NO: 1755154 NR Description: germin-like protein [Arabidopsis thaliana]
  misc_feature (1)..(123): NCBI GI NO: 1169944 NR Description: Germin-like protein 1 precursor
  misc_feature (1)..(123): NCBI GI NO: 15242028 NR Description: germin-like protein (AtGER3)
  misc_feature (1)..(123): NCBI GI NO: 1755188 NR Description: germin-like protein [Arabidopsis thaliana]
  misc_feature (1)..(122): NCBI GI NO: 13277342 NR Description: Germin-like protein [Pisum sativum]
  misc_feature (1)..(123): NCBI GI NO: 18203684 NR Description: Auxin-binding protein ABP19a precursor
  misc_feature (1)..(123): NCBI GI NO: 18201940 NR Description: Auxin-binding protein ABP20 precursor
  misc_feature (1)..(123): NCBI GI NO: 18201941 NR Description: Auxin-binding protein ABP19b precursor
  misc_feature (1)..(123): NCBI GI NO: 31711507 NR Description: 24K germin like protein [Nicotiana tabacum]
  misc_feature (1)..(122): NCBI GI NO: 30841320 NR Description: auxin binding protein [Gossypium hirsutum]
MARLDLAGGGVIPLHTHPGASEVLVVIQGTICAGFISSANKVYLKTLQRGDSMVFPQGLLHFQLNSGKGPALAFVAFGSSSPGLQILPFALFANDLPSELVEATTFLSDEEVKKLKGVLGGTD

SEQ ID NO: 11494 - DNA, 809 bp, Triticum aestivum
  misc_feature (1)..(809): Ceres Seq. ID no. 12623521
cacgaatagaagatgccactcttccccactccactccgagccctattctccccctccaccgccgcctcctccaccgccgccgccccgccgccccgtcgaccgccgctcgcgggggctctcctcttcctcagcctaggagccgtagccggttgcgccctctccactcgccgtgtccccttcctccgggcgataagttctgctagaatggaatctacttccacgaccgtgccttccattgttgtatttgtgacagttccaaatcgggaagcaggcaaaaagctatcagcaagcattatcagtgagaaacttgctgcttgtgtgaacatagtgcctggaatcgaatctgtttactggtgggagggaaaggtgcaaactgatgctgaagagctgctcatcatcaagaccagagaatctcttctaaatgccttgactgaacatgtcaaagctaaccatgagtacgacgttcctgaagtcattgcgctgcccatcagcggaggcaacctcaagtacttggagtggctcaagaacagcaccagggagaattaatctggccagagctgcttcccatggaccgcatctgtgagtagagtacctagtggtgtggagtgtctgttctggtttgggacattgtgcttgtgcagaaagactttagtggcctctgtgcgtctatggcgtggctgcgacgaatcggtcgatctgtactgtctcctagggtcaaataaactttcagaagcgtgtagcgccaagtcgactgcacaaattcctcttgtcgcgctcgtggattatctcatcaccatgttccttcagtt

SEQ ID NO: 11495 - protein, 177 aa, Triticum aestivum
  peptide (1)..(177): Ceres Seq. ID no. 12623522
  misc_feature (74)..(175): Pfam Name: Pfam Description:  CutA1 divalent ion tolerance protein
  misc_feature (45)..(175): NCBI GI NO: 15226156 NR Description: putative related to microbial divalent cationtolerance proteins
  misc_feature (45)..(150): NCBI GI NO: 30685818 NR Description: putative related to microbial divalent cationtolerance proteins
  misc_feature (73)..(176): NCBI GI NO: 23509167 NR Description: cutA, putative [Plasmodium falciparum 3D7]
  misc_feature (62)..(174): NCBI GI NO: 7341255 NR Description: brain acetylcholinesterase putative membrane anchor
  misc_feature (62)..(174): NCBI GI NO: 7706244 NR Description: divalent cation tolerant protein CUTA
  misc_feature (74)..(170): NCBI GI NO: 21430094 NR Description: GM24986p [Drosophila melanogaster]
  misc_feature (74)..(170): NCBI GI NO: 24641937 NR Description: CG11590-PA [Drosophila melanogaster]
  misc_feature (67)..(177): NCBI GI NO: 34852227 NR Description: similar to divalent cation tolerant protein CUTA
  misc_feature (76)..(174): NCBI GI NO: 29726861 NR Description: Chain A, Divalent Cation Tolerance Protein
  misc_feature (67)..(174): NCBI GI NO: 21702737 NR Description: divalent cation tolerant protein CUTA
MPLFPTPLRALFSPSTAASSTAAAPPPRRPPLAGALLFLSLGAVAGCALSTRRVPFLRAISSARMESTSTTVPSIVVFVTVPNREAGKKLSASIISEKLAACVNIVPGIESVYWWEGKVQTDAEELLIIKTRESLLNALTEHVKANHEYDVPEVIALPISGGNLKYLEWLKNSTREN

SEQ ID NO: 11496 - protein, 113 aa, Triticum aestivum
  peptide (1)..(113): Ceres Seq. ID no. 12623523
  misc_feature (10)..(111): Pfam Name: Pfam Description:  CutA1 divalent ion tolerance protein
  misc_feature (1)..(111): NCBI GI NO: 15226156 NR Description: putative related to microbial divalent cationtolerance proteins
  misc_feature (1)..(86): NCBI GI NO: 30685818 NR Description: putative related to microbial divalent cationtolerance proteins
  misc_feature (9)..(112): NCBI GI NO: 23509167 NR Description: cutA, putative [Plasmodium falciparum 3D7]
  misc_feature (1)..(110): NCBI GI NO: 7341255 NR Description: brain acetylcholinesterase putative membrane anchor
  misc_feature (1)..(110): NCBI GI NO: 7706244 NR Description: divalent cation tolerant protein CUTA
  misc_feature (10)..(106): NCBI GI NO: 21430094 NR Description: GM24986p [Drosophila melanogaster]
  misc_feature (10)..(106): NCBI GI NO: 24641937 NR Description: CG11590-PA [Drosophila melanogaster]
  misc_feature (3)..(113): NCBI GI NO: 34852227 NR Description: similar to divalent cation tolerant protein CUTA
  misc_feature (12)..(110): NCBI GI NO: 29726861 NR Description: Chain A, Divalent Cation Tolerance Protein
  misc_feature (3)..(110): NCBI GI NO: 21702737 NR Description: divalent cation tolerant protein CUTA
MESTSTTVPSIVVFVTVPNREAGKKLSASIISEKLAACVNIVPGIESVYWWEGKVQTDAEELLIIKTRESLLNALTEHVKANHEYDVPEVIALPISGGNLKYLEWLKNSTREN

SEQ ID NO: 11497 - DNA, 1062 bp, Triticum aestivum
  misc_feature (1)..(1062): Ceres Seq. ID no. 13598678
catcacaacacaaacaggagtagtactactactccagtctccggcgagtacataccctacaggtccaacaaggttcatagacgacctgtagcgccaatatggctggcgtctccagcaatgccattgcctttgtggcactcctctccgtgctcttcacgggcgtccgttctgcggtcaactacgacaccgccgtagctagatcctacaactccggctggctccccgccaaggccacctggtacggggcgcccaacggcgccggccccgacgacaacggtggtgcttgcggcttcaagaacgtgaaccagtacccaatctcctccatgggggcatgcggtaacgagcctattttcgccggcggcgagggctgtggcatgtgctacgagattaagtgcgactactccaacaacccttcctgctccggccagccgaggaggatcgtcatcaccgacatgaactactaccccgtggccaggtaccacctcgacctcagtggcaccgcattcggctccatggccaggtacggcctcaacgaccggctccgccacgccggcatcatcgacatgcagttcaggagggtgccctgcaacttcccgggtatgaaggtgaccttccacgtccagcgtgtctccaaccccaactatctcgcggtgctcgtggagtacgcgaacgtggacgggaccgtggtgcggatggagctcatgcagaccatcaacggccgcccgacgggctactatcaggatatgcgccgctcgtggggctccatctggcggatggacaccaaccgcccgctgcaggggccattcgccatccgcatcaccagcgataccggaaagacgctggtggccaacaatgccatcccggcttattggcagccggaccatgcctactggtccaacctccagttctattgattggcttacgtgcgtacttctccgatcgatgccgagttaatcattttggtgtcatcagcatgatccctatttgtgaggatctaatggttttaagttattgccaggcactatctactttcaagcgttaacaagcgtgttaactgtcgcc

SEQ ID NO: 11498 - protein, 271 aa, Triticum aestivum
  peptide (1)..(271): Ceres Seq. ID no. 13598679
  misc_feature (170)..(255): Pfam Name: Pfam Description:  Pollen allergen
  misc_feature (1)..(271): NCBI GI NO: 4099919 NR Description: pollen allergen homolog [Triticum aestivum]
  misc_feature (2)..(270): NCBI GI NO: 37536756 NR Description: beta-expansin EXPB6
  misc_feature (1)..(270): NCBI GI NO: 37536758 NR Description: beta-expansin EXPB2
  misc_feature (1)..(270): NCBI GI NO: 7489455 NR Description: beta-expansin - rice
  misc_feature (4)..(270): NCBI GI NO: 14193771 NR Description: beta-expansin 6 [Zea mays]
  misc_feature (39)..(270): NCBI GI NO: 8118432 NR Description: beta-expansin [Oryza sativa]
  misc_feature (1)..(270): NCBI GI NO: 14330328 NR Description: beta expansin B2 [Festuca pratensis]
  misc_feature (27)..(270): NCBI GI NO: 14193775 NR Description: beta-expansin 8 [Zea mays]
  misc_feature (19)..(270): NCBI GI NO: 37536762 NR Description: beta-expansin EXPB4
  misc_feature (27)..(270): NCBI GI NO: 8118425 NR Description: beta-expansin [Oryza sativa]
MAGVSSNAIAFVALLSVLFTGVRSAVNYDTAVARSYNSGWLPAKATWYGAPNGAGPDDNGGACGFKNVNQYPISSMGACGNEPIFAGGEGCGMCYEIKCDYSNNPSCSGQPRRIVITDMNYYPVARYHLDLSGTAFGSMARYGLNDRLRHAGIIDMQFRRVPCNFPGMKVTFHVQRVSNPNYLAVLVEYANVDGTVVRMELMQTINGRPTGYYQDMRRSWGSIWRMDTNRPLQGPFAIRITSDTGKTLVANNAIPAYWQPDHAYWSNLQFY

SEQ ID NO: 11499 - protein, 196 aa, Triticum aestivum
  peptide (1)..(196): Ceres Seq. ID no. 13598680
  misc_feature (95)..(180): Pfam Name: Pfam Description:  Pollen allergen
  misc_feature (1)..(196): NCBI GI NO: 4099919 NR Description: pollen allergen homolog [Triticum aestivum]
  misc_feature (1)..(195): NCBI GI NO: 37536756 NR Description: beta-expansin EXPB6
  misc_feature (1)..(195): NCBI GI NO: 37536758 NR Description: beta-expansin EXPB2
  misc_feature (1)..(195): NCBI GI NO: 7489455 NR Description: beta-expansin - rice
  misc_feature (1)..(195): NCBI GI NO: 14193771 NR Description: beta-expansin 6 [Zea mays]
  misc_feature (1)..(195): NCBI GI NO: 8118432 NR Description: beta-expansin [Oryza sativa]
  misc_feature (1)..(195): NCBI GI NO: 14330328 NR Description: beta expansin B2 [Festuca pratensis]
  misc_feature (1)..(195): NCBI GI NO: 14193775 NR Description: beta-expansin 8 [Zea mays]
  misc_feature (1)..(195): NCBI GI NO: 37536762 NR Description: beta-expansin EXPB4
  misc_feature (1)..(195): NCBI GI NO: 8118425 NR Description: beta-expansin [Oryza sativa]
MGACGNEPIFAGGEGCGMCYEIKCDYSNNPSCSGQPRRIVITDMNYYPVARYHLDLSGTAFGSMARYGLNDRLRHAGIIDMQFRRVPCNFPGMKVTFHVQRVSNPNYLAVLVEYANVDGTVVRMELMQTINGRPTGYYQDMRRSWGSIWRMDTNRPLQGPFAIRITSDTGKTLVANNAIPAYWQPDHAYWSNLQFY

SEQ ID NO: 11500 - protein, 179 aa, Triticum aestivum
  peptide (1)..(179): Ceres Seq. ID no. 13598681
  misc_feature (78)..(163): Pfam Name: Pfam Description:  Pollen allergen
  misc_feature (1)..(179): NCBI GI NO: 4099919 NR Description: pollen allergen homolog [Triticum aestivum]
  misc_feature (1)..(178): NCBI GI NO: 37536756 NR Description: beta-expansin EXPB6
  misc_feature (1)..(178): NCBI GI NO: 37536758 NR Description: beta-expansin EXPB2
  misc_feature (1)..(178): NCBI GI NO: 7489455 NR Description: beta-expansin - rice
  misc_feature (1)..(178): NCBI GI NO: 14193771 NR Description: beta-expansin 6 [Zea mays]
  misc_feature (1)..(178): NCBI GI NO: 8118432 NR Description: beta-expansin [Oryza sativa]
  misc_feature (1)..(178): NCBI GI NO: 14330328 NR Description: beta expansin B2 [Festuca pratensis]
  misc_feature (1)..(178): NCBI GI NO: 14193775 NR Description: beta-expansin 8 [Zea mays]
  misc_feature (1)..(178): NCBI GI NO: 37536762 NR Description: beta-expansin EXPB4
  misc_feature (1)..(178): NCBI GI NO: 8118425 NR Description: beta-expansin [Oryza sativa]
MCYEIKCDYSNNPSCSGQPRRIVITDMNYYPVARYHLDLSGTAFGSMARYGLNDRLRHAGIIDMQFRRVPCNFPGMKVTFHVQRVSNPNYLAVLVEYANVDGTVVRMELMQTINGRPTGYYQDMRRSWGSIWRMDTNRPLQGPFAIRITSDTGKTLVANNAIPAYWQPDHAYWSNLQFY

SEQ ID NO: 11501 - DNA, 734 bp, Triticum aestivum
  misc_feature (1)..(734): Ceres Seq. ID no. 15225568
ctttataaatcattctcccctcaaccaacccctcttgtagtctccgctcatccaccctcccttttctgttctcgacttgtgcagcgcagttgcataaagaaatggcgacttttcaaatctcttccactagcatgaccaccaaggcggttcttagaagccagccgaccaacaagctcatcgctaacaagagccagcaagtctcagttggatccgtcaagaaagtctcgagatcctttggcttgaaatgctcagccaattctggtgccactatgtcagctgtatacaaggtcaagctcataggacccgaaggcgaagaacacgagttcgaggttcaggacgaccagttcatattggacgcagctgaagaggcaggagttgacttgccttactcttgcagagccggagcctgttccacctgcgccggtcagatcgtgaaaggccaagttgaccagtctgaaggttcgtttcttgaggatgatcacttggagaaaggttttgtcttgacatgtgtggcttacccgcagtcggactgtgtgatccatacccacaaggaaactgaactcttctaagtcacggtggtagtgatgcccaattgtcatttgagttattgttattattgttatcagtttccttctacgaatttgggtgtgtttaattgtatgcttttgtatggaaacgtctcaggatatgccttttagtgttcatcagtcttcaccgggttgcaactggttaat

SEQ ID NO: 11502 - protein, 155 aa, Triticum aestivum
  peptide (1)..(155): Ceres Seq. ID no. 15225569
  misc_feature (66)..(142): Pfam Name: Pfam Description:  2Fe-2S iron-sulfur cluster binding domain
  misc_feature (1)..(155): NCBI GI NO: 15225888 NR Description: ferredoxin, putative [Arabidopsis thaliana]
  misc_feature (58)..(155): NCBI GI NO: 119952 NR Description: Ferredoxin, root R-B2
  misc_feature (1)..(154): NCBI GI NO: 2129915 NR Description: ferredoxin
  misc_feature (1)..(155): NCBI GI NO: 13182955 NR Description: ferredoxin [Impatiens balsamina]
  misc_feature (58)..(155): NCBI GI NO: 119934 NR Description: Ferredoxin, root R-B1
  misc_feature (8)..(155): NCBI GI NO: 119958 NR Description: Ferredoxin III, chloroplast precursor (Fd III)
  misc_feature (1)..(155): NCBI GI NO: 40714664 NR Description: putative ferredoxin
  misc_feature (27)..(155): NCBI GI NO: 7430754 NR Description: ferredoxin [2Fe-2S], root - rice
  misc_feature (1)..(155): NCBI GI NO: 6970498 NR Description: non-photosynthetic ferredoxin [Ipomoea nil]
  misc_feature (36)..(155): NCBI GI NO: 3023750 NR Description: Ferredoxin VI, chloroplast precursor (Fd VI)
MATFQISSTSMTTKAVLRSQPTNKLIANKSQQVSVGSVKKVSRSFGLKCSANSGATMSAVYKVKLIGPEGEEHEFEVQDDQFILDAAEEAGVDLPYSCRAGACSTCAGQIVKGQVDQSEGSFLEDDHLEKGFVLTCVAYPQSDCVIHTHKETELF

SEQ ID NO: 11503 - protein, 145 aa, Triticum aestivum
  peptide (1)..(145): Ceres Seq. ID no. 15225570
  misc_feature (56)..(132): Pfam Name: Pfam Description:  2Fe-2S iron-sulfur cluster binding domain
  misc_feature (1)..(145): NCBI GI NO: 15225888 NR Description: ferredoxin, putative [Arabidopsis thaliana]
  misc_feature (48)..(145): NCBI GI NO: 119952 NR Description: Ferredoxin, root R-B2
  misc_feature (1)..(144): NCBI GI NO: 2129915 NR Description: ferredoxin
  misc_feature (1)..(145): NCBI GI NO: 13182955 NR Description: ferredoxin [Impatiens balsamina]
  misc_feature (48)..(145): NCBI GI NO: 119934 NR Description: Ferredoxin, root R-B1
  misc_feature (1)..(145): NCBI GI NO: 119958 NR Description: Ferredoxin III, chloroplast precursor (Fd III)
  misc_feature (1)..(145): NCBI GI NO: 40714664 NR Description: putative ferredoxin
  misc_feature (17)..(145): NCBI GI NO: 7430754 NR Description: ferredoxin [2Fe-2S], root - rice
  misc_feature (1)..(145): NCBI GI NO: 6970498 NR Description: non-photosynthetic ferredoxin [Ipomoea nil]
  misc_feature (26)..(145): NCBI GI NO: 3023750 NR Description: Ferredoxin VI, chloroplast precursor (Fd VI)
MTTKAVLRSQPTNKLIANKSQQVSVGSVKKVSRSFGLKCSANSGATMSAVYKVKLIGPEGEEHEFEVQDDQFILDAAEEAGVDLPYSCRAGACSTCAGQIVKGQVDQSEGSFLEDDHLEKGFVLTCVAYPQSDCVIHTHKETELF

SEQ ID NO: 11504 - protein, 99 aa, Triticum aestivum
  peptide (1)..(99): Ceres Seq. ID no. 15225571
  misc_feature (10)..(86): Pfam Name: Pfam Description:  2Fe-2S iron-sulfur cluster binding domain
  misc_feature (1)..(99): NCBI GI NO: 15225888 NR Description: ferredoxin, putative [Arabidopsis thaliana]
  misc_feature (2)..(99): NCBI GI NO: 119952 NR Description: Ferredoxin, root R-B2
  misc_feature (1)..(98): NCBI GI NO: 2129915 NR Description: ferredoxin
  misc_feature (1)..(99): NCBI GI NO: 13182955 NR Description: ferredoxin [Impatiens balsamina]
  misc_feature (2)..(99): NCBI GI NO: 119934 NR Description: Ferredoxin, root R-B1
  misc_feature (1)..(99): NCBI GI NO: 119958 NR Description: Ferredoxin III, chloroplast precursor (Fd III)
  misc_feature (1)..(99): NCBI GI NO: 40714664 NR Description: putative ferredoxin
  misc_feature (1)..(99): NCBI GI NO: 7430754 NR Description: ferredoxin [2Fe-2S], root - rice
  misc_feature (1)..(99): NCBI GI NO: 6970498 NR Description: non-photosynthetic ferredoxin [Ipomoea nil]
  misc_feature (1)..(99): NCBI GI NO: 3023750 NR Description: Ferredoxin VI, chloroplast precursor (Fd VI)
MSAVYKVKLIGPEGEEHEFEVQDDQFILDAAEEAGVDLPYSCRAGACSTCAGQIVKGQVDQSEGSFLEDDHLEKGFVLTCVAYPQSDCVIHTHKETELF

SEQ ID NO: 11505 - DNA, 911 bp, Triticum aestivum
  misc_feature (1)..(911): Ceres Seq. ID no. 13661323
aaaacttcacctgtacacatagttatatagatatttactccggccatgattctgaaggtcctcacgctgggcgcgctcctcggctgccttgcctatggtaccaatggctgggagccagtgtgcggcgagaaggctggccgcatggagtgccccgacaacaagtgctgcagcaaggatgggcagtgtggcctaggccccgacttctgcggcgagggttgccaaagcggcgcctgctgcgtgagcttgcgctgtggctcgcagaacgacggcaagacgtgccccaacaaccagtgttgtggccaagacggggtatgcgggttcggcaacgagtactgcggctctggctgccagagcggcgcgtgctcgcagggcatgcaatgcggcagccacaggccatgccccgggaacttgtgctgcagccacgcaggttggtgcggtcttggccctcccttctgcgggactgggtgccagagcggagcctgttgcagctcggaccttaagccgtgcggcaacaggggctgtggccgagtgtgcgacaacaatctgtgttgcggcagggatggctactgcggtgacggcaagccctactgcggtggcggctgccagggcggtccatgctcctgcgccgctgccggcggcggtttcagctccactctactacggggactaggtgagtcatgatgagctcagcgtcgcctgcaatgttgcgccatggatggaagcactagatttgcaacgacgccaaataatatatggtagtaccagtttacattatcattactgccaaggtgtcggcgttttgatttcccacttttagttctctctccttgcaccatgtgaggttataatgggatcatatttataagtcgccagaattttatttttagtgtaaagtcacttttattgtgtgt

SEQ ID NO: 11506 - protein, 211 aa, Triticum aestivum
  peptide (1)..(211): Ceres Seq. ID no. 13661324
  misc_feature (66)..(106): Pfam Name: Pfam Description:  Chitin recognition protein
  misc_feature (1)..(205): NCBI GI NO: 113506 NR Description: Agglutinin isolectin 2 precursor
  misc_feature (26)..(205): NCBI GI NO: 220977 NR Description: agglutinin isolectin 2 precursor
  misc_feature (1)..(206): NCBI GI NO: 113505 NR Description: Agglutinin isolectin 1 precursor
  misc_feature (1)..(205): NCBI GI NO: 113508 NR Description: Root-specific lectin precursor
  misc_feature (26)..(205): NCBI GI NO: 113507 NR Description: Agglutinin isolectin 3 precursor (WGA3)
  misc_feature (26)..(205): NCBI GI NO: 1065091 NR Description: Chain A, Wheat Germ Agglutinin (Isolectin 3)
  misc_feature (26)..(191): NCBI GI NO: 230784 NR Description: Chain A, Wheat Germ Agglutinin
  misc_feature (26)..(191): NCBI GI NO: 230392 NR Description: Chain A, Wheat Germ Agglutinin
  misc_feature (26)..(204): NCBI GI NO: 4689400 NR Description: lectin [Oryza sativa subsp. japonica]
  misc_feature (1)..(204): NCBI GI NO: 113509 NR Description: Lectin precursor (Agglutinin)
MILKVLTLGALLGCLAYGTNGWEPVCGEKAGRMECPDNKCCSKDGQCGLGPDFCGEGCQSGACCVSLRCGSQNDGKTCPNNQCCGQDGVCGFGNEYCGSGCQSGACSQGMQCGSHRPCPGNLCCSHAGWCGLGPPFCGTGCQSGACCSSDLKPCGNRGCGRVCDNNLCCGRDGYCGDGKPYCGGGCQGGPCSCAAAGGGFSSTLLRGLGES

SEQ ID NO: 11507 - protein, 179 aa, Triticum aestivum
  peptide (1)..(179): Ceres Seq. ID no. 13661325
  misc_feature (34)..(74): Pfam Name: Pfam Description:  Chitin recognition protein
  misc_feature (1)..(173): NCBI GI NO: 113506 NR Description: Agglutinin isolectin 2 precursor
  misc_feature (1)..(173): NCBI GI NO: 220977 NR Description: agglutinin isolectin 2 precursor
  misc_feature (1)..(174): NCBI GI NO: 113505 NR Description: Agglutinin isolectin 1 precursor
  misc_feature (1)..(173): NCBI GI NO: 113508 NR Description: Root-specific lectin precursor
  misc_feature (1)..(173): NCBI GI NO: 113507 NR Description: Agglutinin isolectin 3 precursor (WGA3)
  misc_feature (1)..(173): NCBI GI NO: 1065091 NR Description: Chain A, Wheat Germ Agglutinin (Isolectin 3)
  misc_feature (1)..(159): NCBI GI NO: 230784 NR Description: Chain A, Wheat Germ Agglutinin
  misc_feature (1)..(159): NCBI GI NO: 230392 NR Description: Chain A, Wheat Germ Agglutinin
  misc_feature (1)..(172): NCBI GI NO: 4689400 NR Description: lectin [Oryza sativa subsp. japonica]
  misc_feature (1)..(172): NCBI GI NO: 113509 NR Description: Lectin precursor (Agglutinin)
MECPDNKCCSKDGQCGLGPDFCGEGCQSGACCVSLRCGSQNDGKTCPNNQCCGQDGVCGFGNEYCGSGCQSGACSQGMQCGSHRPCPGNLCCSHAGWCGLGPPFCGTGCQSGACCSSDLKPCGNRGCGRVCDNNLCCGRDGYCGDGKPYCGGGCQGGPCSCAAAGGGFSSTLLRGLGES

SEQ ID NO: 11508 - protein, 165 aa, Triticum aestivum
  peptide (1)..(165): Ceres Seq. ID no. 13661326
NFTCTHSYIDIYSGHDSEGPHAGRAPRLPCLWYQWLGASVRREGWPHGVPRQQVLQQGWAVWPRPRLLRRGLPKRRLLRELALWLAERRQDVPQQPVLWPRRGMRVRQRVLRLWLPERRVLAGHAMRQPQAMPRELVLQPRRLVRSWPSLLRDWVPERSLLQLGP

SEQ ID NO: 11509 - DNA, 1368 bp, Triticum aestivum
  misc_feature (1)..(1368): Ceres Seq. ID no. 14313354
atctctctctttactctgacgtgtttaccttcttcagtttctctccttcatctccggcgactttcgaggaagcgaagcttaagatttagggaactatggacagcttctggcaattgggcgatgagctccgaggtcagtcacgagcctcagaggatcacaaatggtccactgtcgcaaccaagctcgctgagcagactaggatgaaaggggaaaggatgaacaacctcgatctctccaagccctactctgagttcaggccaaccgacaagtttagtttccaggacaacaacaaccttaatttcaacatgttgaacctggacggcaagtatgtgcaaggcatgggcaaagctccgatgcagagcaatgtttacaacaacgtgaacaatgttttccagaagaacgacttcaagagtggaggcaacatgaaggttaacaagtacagtggcaatgttgttgctaacaaggagctgagcaacaacaacaacaagcacagcaataatgataatgtgaatatgaatgttgacaagaggtttaagactttgcctgcatcggagacgcttccgaggaatgaagttcttggcggctacatctttgtttgcaacaatgataccatgcaggaggacttgaaacgccacctatttggtttacctccaaggtacagggactctgtccgggcgataacacctgggttacctctgtttctttacaattacaccactcaccagctccatggtatctttgaggcaacaacttttggaggtactaatattgatgcgactgcctgggaagacaaaaagtgcaaaggagagtcaagatttccggctcaggtgaggatcagagtgaggaaaatatgcaaagccttggaagaggattccttcaggcctgttcttcaccactatgatggcccaaaattccgccttgagctctctgttcctgagacattggatctgctagatctgtgcgaacaagctggttctgcataagccgatcaaccctgcaatgccacgttgctaggggaagtgatctgaaatctatctatatatatgcatattaccataagagcgtaagcttttgggagttagataagagtcgaattcaaatgtatggtttactaagaagtgaggagttgtgtgcgtcttgaggcaagcaaaagggtgaagaagctctgccgaataagcgactacccttgttcttgttgtgtctaatgtgtgagtgtctgtgctttgtgagagatttgaaacaaacaatttatgtagagagaaagtgagactaaataacagagccaaaccaatggtatgagctactgtttgtgtttgctttgtgcaagggaaaaacaaatgttttaaatagcaagtttaacttttaagc

SEQ ID NO: 11510 - protein, 295 aa, Triticum aestivum
  peptide (1)..(295): Ceres Seq. ID no. 14313355
  misc_feature (1)..(295): NCBI GI NO: 15232081 NR Description: gda-1 -related [Arabidopsis thaliana]
  misc_feature (1)..(295): NCBI GI NO: 21592623 NR Description: gda-1, putative [Arabidopsis thaliana]
  misc_feature (1)..(295): NCBI GI NO: 2369766 NR Description: hypothetical protein [Citrus x paradisi]
  misc_feature (82)..(295): NCBI GI NO: 21665866 NR Description: GDA2 protein [Pisum sativum]
  misc_feature (47)..(288): NCBI GI NO: 18422167 NR Description: expressed protein [Arabidopsis thaliana]
  misc_feature (118)..(291): NCBI GI NO: 584825 NR Description: B2 PROTEIN
  misc_feature (97)..(288): NCBI GI NO: 9757950 NR Description: gene_id:MJC20
  misc_feature (63)..(282): NCBI GI NO: 34913876 NR Description: B1156H12.22
  misc_feature (173)..(284): NCBI GI NO: 7488804 NR Description: gda-1 protein - garden pea
  misc_feature (140)..(288): NCBI GI NO: 34896110 NR Description: P0701D05.9
MDSFWQLGDELRGQSRASEDHKWSTVATKLAEQTRMKGERMNNLDLSKPYSEFRPTDKFSFQDNNNLNFNMLNLDGKYVQGMGKAPMQSNVYNNVNNVFQKNDFKSGGNMKVNKYSGNVVANKELSNNNNKHSNNDNVNMNVDKRFKTLPASETLPRNEVLGGYIFVCNNDTMQEDLKRHLFGLPPRYRDSVRAITPGLPLFLYNYTTHQLHGIFEATTFGGTNIDATAWEDKKCKGESRFPAQVRIRVRKICKALEEDSFRPVLHHYDGPKFRLELSVPETLDLLDLCEQAGSA

SEQ ID NO: 11511 - protein, 260 aa, Triticum aestivum
  peptide (1)..(260): Ceres Seq. ID no. 14313356
  misc_feature (1)..(260): NCBI GI NO: 15232081 NR Description: gda-1 -related [Arabidopsis thaliana]
  misc_feature (1)..(260): NCBI GI NO: 21592623 NR Description: gda-1, putative [Arabidopsis thaliana]
  misc_feature (1)..(260): NCBI GI NO: 2369766 NR Description: hypothetical protein [Citrus x paradisi]
  misc_feature (47)..(260): NCBI GI NO: 21665866 NR Description: GDA2 protein [Pisum sativum]
  misc_feature (12)..(253): NCBI GI NO: 18422167 NR Description: expressed protein [Arabidopsis thaliana]
  misc_feature (83)..(256): NCBI GI NO: 584825 NR Description: B2 PROTEIN
  misc_feature (62)..(253): NCBI GI NO: 9757950 NR Description: gene_id:MJC20
  misc_feature (28)..(247): NCBI GI NO: 34913876 NR Description: B1156H12.22
  misc_feature (138)..(249): NCBI GI NO: 7488804 NR Description: gda-1 protein - garden pea
  misc_feature (105)..(253): NCBI GI NO: 34896110 NR Description: P0701D05.9
MKGERMNNLDLSKPYSEFRPTDKFSFQDNNNLNFNMLNLDGKYVQGMGKAPMQSNVYNNVNNVFQKNDFKSGGNMKVNKYSGNVVANKELSNNNNKHSNNDNVNMNVDKRFKTLPASETLPRNEVLGGYIFVCNNDTMQEDLKRHLFGLPPRYRDSVRAITPGLPLFLYNYTTHQLHGIFEATTFGGTNIDATAWEDKKCKGESRFPAQVRIRVRKICKALEEDSFRPVLHHYDGPKFRLELSVPETLDLLDLCEQAGSA

SEQ ID NO: 11512 - protein, 255 aa, Triticum aestivum
  peptide (1)..(255): Ceres Seq. ID no. 14313357
  misc_feature (1)..(255): NCBI GI NO: 15232081 NR Description: gda-1 -related [Arabidopsis thaliana]
  misc_feature (1)..(255): NCBI GI NO: 21592623 NR Description: gda-1, putative [Arabidopsis thaliana]
  misc_feature (1)..(255): NCBI GI NO: 2369766 NR Description: hypothetical protein [Citrus x paradisi]
  misc_feature (42)..(255): NCBI GI NO: 21665866 NR Description: GDA2 protein [Pisum sativum]
  misc_feature (7)..(248): NCBI GI NO: 18422167 NR Description: expressed protein [Arabidopsis thaliana]
  misc_feature (78)..(251): NCBI GI NO: 584825 NR Description: B2 PROTEIN
  misc_feature (57)..(248): NCBI GI NO: 9757950 NR Description: gene_id:MJC20
  misc_feature (23)..(242): NCBI GI NO: 34913876 NR Description: B1156H12.22
  misc_feature (133)..(244): NCBI GI NO: 7488804 NR Description: gda-1 protein - garden pea
  misc_feature (100)..(248): NCBI GI NO: 34896110 NR Description: P0701D05.9
MNNLDLSKPYSEFRPTDKFSFQDNNNLNFNMLNLDGKYVQGMGKAPMQSNVYNNVNNVFQKNDFKSGGNMKVNKYSGNVVANKELSNNNNKHSNNDNVNMNVDKRFKTLPASETLPRNEVLGGYIFVCNNDTMQEDLKRHLFGLPPRYRDSVRAITPGLPLFLYNYTTHQLHGIFEATTFGGTNIDATAWEDKKCKGESRFPAQVRIRVRKICKALEEDSFRPVLHHYDGPKFRLELSVPETLDLLDLCEQAGSA

SEQ ID NO: 11513 - DNA, 594 bp, Triticum aestivum
  misc_feature (1)..(594): Ceres Seq. ID no. 12624601
atctgcacaccgctgaatgctgatcagctgacatcgagttcttgaagacacaccactattcgctagaatacgatgggggatctgcagatcgtgctgtccggggggacgatcgaggcgcagcacgtggagatgaaggtgcccctctactcctacgggtgcgagaagaagatcaagaaggcgctgtcgaatctgaaagggattcactcggttcaggtggattaccaccagcagcaggtgatggtgtgggggatctgcacccggaacgacgtgctggccgccgtccggcggaagcggcgagcggcgcggttctggggcgcggaccacccggatctgggcgaggacgctaggctgggggacgcccagaagcactacctgcgggcgttcgccgcgtacaggagtaggaagtcgtggaagaagctcttccccatgatccggctgtaacagcagcagaccgcgagcgtgatgttttgtcgcaatgcttgctgcatgcgtggccgcgtgtgtgttgcactgcaggaatgtccaggagttgctagtagtttggtacagtagcgcatgatgttacatatcgaataaatgtgctctgttcttgtc

SEQ ID NO: 11514 - protein, 122 aa, Triticum aestivum
  peptide (1)..(122): Ceres Seq. ID no. 12624602
  misc_feature (1)..(122): NCBI GI NO: 38346796 NR Description: OSJNBa0088A01.3
  misc_feature (1)..(86): NCBI GI NO: 7487518 NR Description: hypothetical protein T29A15
  misc_feature (1)..(86): NCBI GI NO: 18417024 NR Description: Expressed protein; protein id: At4g27590
  misc_feature (20)..(86): NCBI GI NO: 21536757 NR Description: unknown [Arabidopsis thaliana]
  misc_feature (13)..(115): NCBI GI NO: 37536458 NR Description: hypothetical protein
  misc_feature (13)..(87): NCBI GI NO: 34902222 NR Description: Hypothetical protein
  misc_feature (13)..(86): NCBI GI NO: 15221451 NR Description: hypothetical protein; protein id: At1g06330.1
  misc_feature (13)..(86): NCBI GI NO: 25406916 NR Description: hypothetical protein
  misc_feature (5)..(80): NCBI GI NO: 21397273 NR Description: Putative atfp6-like protein
  misc_feature (20)..(86): NCBI GI NO: 15218813 NR Description: hypothetical protein; protein id: At1g29100.1
MGDLQIVLSGGTIEAQHVEMKVPLYSYGCEKKIKKALSNLKGIHSVQVDYHQQQVMVWGICTRNDVLAAVRRKRRAARFWGADHPDLGEDARLGDAQKHYLRAFAAYRSRKSWKKLFPMIRL

SEQ ID NO: 11515 - protein, 103 aa, Triticum aestivum
  peptide (1)..(103): Ceres Seq. ID no. 12624603
  misc_feature (1)..(103): NCBI GI NO: 38346796 NR Description: OSJNBa0088A01.3
  misc_feature (1)..(67): NCBI GI NO: 7487518 NR Description: hypothetical protein T29A15
  misc_feature (1)..(67): NCBI GI NO: 18417024 NR Description: Expressed protein; protein id: At4g27590
  misc_feature (1)..(67): NCBI GI NO: 21536757 NR Description: unknown [Arabidopsis thaliana]
  misc_feature (1)..(96): NCBI GI NO: 37536458 NR Description: hypothetical protein
  misc_feature (1)..(68): NCBI GI NO: 34902222 NR Description: Hypothetical protein
  misc_feature (1)..(67): NCBI GI NO: 15221451 NR Description: hypothetical protein; protein id: At1g06330.1
  misc_feature (1)..(67): NCBI GI NO: 25406916 NR Description: hypothetical protein
  misc_feature (1)..(61): NCBI GI NO: 21397273 NR Description: Putative atfp6-like protein
  misc_feature (1)..(67): NCBI GI NO: 15218813 NR Description: hypothetical protein; protein id: At1g29100.1
MKVPLYSYGCEKKIKKALSNLKGIHSVQVDYHQQQVMVWGICTRNDVLAAVRRKRRAARFWGADHPDLGEDARLGDAQKHYLRAFAAYRSRKSWKKLFPMIRL

SEQ ID NO: 11516 - protein, 67 aa, Triticum aestivum
  peptide (1)..(67): Ceres Seq. ID no. 12624604
  misc_feature (1)..(67): NCBI GI NO: 38346796 NR Description: OSJNBa0088A01.3
  misc_feature (1)..(31): NCBI GI NO: 7487518 NR Description: hypothetical protein T29A15
  misc_feature (1)..(31): NCBI GI NO: 18417024 NR Description: Expressed protein; protein id: At4g27590
  misc_feature (1)..(31): NCBI GI NO: 21536757 NR Description: unknown [Arabidopsis thaliana]
  misc_feature (1)..(60): NCBI GI NO: 37536458 NR Description: hypothetical protein
  misc_feature (1)..(32): NCBI GI NO: 34902222 NR Description: Hypothetical protein
  misc_feature (1)..(31): NCBI GI NO: 15221451 NR Description: hypothetical protein; protein id: At1g06330.1
  misc_feature (1)..(31): NCBI GI NO: 25406916 NR Description: hypothetical protein
  misc_feature (1)..(25): NCBI GI NO: 21397273 NR Description: Putative atfp6-like protein
  misc_feature (1)..(31): NCBI GI NO: 15218813 NR Description: hypothetical protein; protein id: At1g29100.1
MVWGICTRNDVLAAVRRKRRAARFWGADHPDLGEDARLGDAQKHYLRAFAAYRSRKSWKKLFPMIRL

SEQ ID NO: 11517 - DNA, 604 bp, Triticum aestivum
  misc_feature (1)..(604): Ceres Seq. ID no. 14301855
gagagatgagcgggaacgaggttgagaaggccaaggctgccgccggcggcggcgtaggggagtacgggacgttccatggtccgcccagctacccgcccccgcgcccgcccgtcgggcacccgcagcccgccccgccgcccggcctccacggccatcgcgagcccaactcgcgccaccgcggcggctaccaggccgggaacgctcaagatcacgaagcaggtgcgcgtggacatagacctgaccgccttccatgctgcggtattggcatgggctggtttctattcataatcggtttctttcttggtgccatcccctggtatgtcggagcatttctgttgtggtattctagagtggattacagggagaaaccaggatatgtggcatgcacaatagcggctgtccttgctacaattgccgtcatcatcggggcaaccgctggagctcacgtttattgatgtcagtctacattgtgtcactgtacatattgtacatttcatggatgaagaaagatgtcatgtcgcgtcttctgcactgtatttgattattaactttgaaatattcaatgtatgacgaggagaaccaagtccttgttatggtcacaaat

SEQ ID NO: 11518 - protein, 150 aa, Triticum aestivum
  peptide (1)..(150): Ceres Seq. ID no. 14301856
  misc_feature (2)..(147): NCBI GI NO: 18394436 NR Description: expressed protein [Arabidopsis thaliana]
  misc_feature (4)..(150): NCBI GI NO: 21554011 NR Description: unknown [Arabidopsis thaliana]
  misc_feature (4)..(150): NCBI GI NO: 18404524 NR Description: expressed protein [Arabidopsis thaliana]
  misc_feature (21)..(150): NCBI GI NO: 18397305 NR Description: expressed protein [Arabidopsis thaliana]
  misc_feature (21)..(150): NCBI GI NO: 21593837 NR Description: 60S ribosomal protein L18A, putative
  misc_feature (21)..(131): NCBI GI NO: 25518134 NR Description: probable 60S ribosomal protein L18A - Arabidopsisthaliana
  misc_feature (31)..(150): NCBI GI NO: 18400450 NR Description: expressed protein [Arabidopsis thaliana]
  misc_feature (31)..(150): NCBI GI NO: 21554784 NR Description: unknown [Arabidopsis thaliana]
  misc_feature (66)..(141): NCBI GI NO: 8777446 NR Description: gene_id:MHM17
  misc_feature (66)..(141): NCBI GI NO: 18423932 NR Description: expressed protein [Arabidopsis thaliana]
EMSGNEVEKAKAAAGGGVGEYGTFHGPPSYPPPRPPVGHPQPAPPPGLHGHREPNSRHRGGYQAGNAQDHEAGARGHRPDRLPCCGIGMGWFLFIIGFFLGAIPWYVGAFLLWYSRVDYREKPGYVACTIAAVLATIAVIIGATAGAHVY

SEQ ID NO: 11519 - protein, 149 aa, Triticum aestivum
  peptide (1)..(149): Ceres Seq. ID no. 14301857
  misc_feature (1)..(146): NCBI GI NO: 18394436 NR Description: expressed protein [Arabidopsis thaliana]
  misc_feature (3)..(149): NCBI GI NO: 21554011 NR Description: unknown [Arabidopsis thaliana]
  misc_feature (3)..(149): NCBI GI NO: 18404524 NR Description: expressed protein [Arabidopsis thaliana]
  misc_feature (20)..(149): NCBI GI NO: 18397305 NR Description: expressed protein [Arabidopsis thaliana]
  misc_feature (20)..(149): NCBI GI NO: 21593837 NR Description: 60S ribosomal protein L18A, putative
  misc_feature (20)..(130): NCBI GI NO: 25518134 NR Description: probable 60S ribosomal protein L18A - Arabidopsisthaliana
  misc_feature (30)..(149): NCBI GI NO: 18400450 NR Description: expressed protein [Arabidopsis thaliana]
  misc_feature (30)..(149): NCBI GI NO: 21554784 NR Description: unknown [Arabidopsis thaliana]
  misc_feature (65)..(140): NCBI GI NO: 8777446 NR Description: gene_id:MHM17
  misc_feature (65)..(140): NCBI GI NO: 18423932 NR Description: expressed protein [Arabidopsis thaliana]
MSGNEVEKAKAAAGGGVGEYGTFHGPPSYPPPRPPVGHPQPAPPPGLHGHREPNSRHRGGYQAGNAQDHEAGARGHRPDRLPCCGIGMGWFLFIIGFFLGAIPWYVGAFLLWYSRVDYREKPGYVACTIAAVLATIAVIIGATAGAHVY

SEQ ID NO: 11520 - DNA, 763 bp, Triticum aestivum
  misc_feature (1)..(763): Ceres Seq. ID no. 13598124
gggatttgctaggcttgcgcaaaagtacaaaaatgttacaagaaattcagagaaggggaaaaagacgaggggaaaatcagcattctgacagcgacttgatcggaccgatcggcacgcgtggcacaccttctttccacacctcccggctgaagctgctgtagaatcctcaaaccaatcaaccaccatccatcaccaaagagcagagcaaggaaatctgtggacgttctgcccgtccaccaaatcccttcagcgcgccgcctccctcgctcgcgaggactctgcggatctctctcagcggcagcaagcagagcggagagagcaatccgccatggccatggtcgcctccacctccatcgcccaccacaagccgcgtttgtcggtgctgtgcaggaagaaggaccgggacagggagctggagcgggagaaggagcacaagtaccccttcaaggtcgtcgagatcacgccgccaccgcgatgcctcggcgtccgctgcttccccacgaacatccactgcggggagagcgtgacgatcgaagggcaggcgtacaccgtgtcggcggtgacgcaccggtaccagctgcgcaaggggcggtacgagccgagcgagaagcgcctcgacgtcctctccaccggcagatacatcctcaacctctacctcgacagcctcctcgacaagtcctagactctctatgctctactctacactactagtacaaatttatttattctactacttcagcaaatttatttatgcctctactgc

SEQ ID NO: 11521 - protein, 117 aa, Triticum aestivum
  peptide (1)..(117): Ceres Seq. ID no. 13598125
  misc_feature (2)..(117): NCBI GI NO: 32488468 NR Description: OSJNBa0081L15.1
  misc_feature (15)..(117): NCBI GI NO: 22327475 NR Description: expressed protein [Arabidopsis thaliana]
MAMVASTSIAHHKPRLSVLCRKKDRDRELEREKEHKYPFKVVEITPPPRCLGVRCFPTNIHCGESVTIEGQAYTVSAVTHRYQLRKGRYEPSEKRLDVLSTGRYILNLYLDSLLDKS

SEQ ID NO: 11522 - protein, 115 aa, Triticum aestivum
  peptide (1)..(115): Ceres Seq. ID no. 13598126
  misc_feature (1)..(115): NCBI GI NO: 32488468 NR Description: OSJNBa0081L15.1
  misc_feature (13)..(115): NCBI GI NO: 22327475 NR Description: expressed protein [Arabidopsis thaliana]
MVASTSIAHHKPRLSVLCRKKDRDRELEREKEHKYPFKVVEITPPPRCLGVRCFPTNIHCGESVTIEGQAYTVSAVTHRYQLRKGRYEPSEKRLDVLSTGRYILNLYLDSLLDKS

SEQ ID NO: 11523 - protein, 78 aa, Triticum aestivum
  peptide (1)..(78): Ceres Seq. ID no. 13598127
MPRRPLLPHEHPLRGERDDRRAGVHRVGGDAPVPAAQGAVRAEREAPRRPLHRQIHPQPLPRQPPRQVLDSLCSTLHY

SEQ ID NO: 11524 - DNA, 785 bp, Triticum aestivum
  misc_feature (1)..(785): Ceres Seq. ID no. 12783998
acaccacaccatcttcatcccccctcacatcccacacctccacacgttcgaaccaccaccaccagaagcagcacccatggcacccaaggcggcagagaagaagctggcgccggccacggcagagaagacgacggcggggaagaagcccaaggcggagaagcgggcgccggcgaccaaggaggccggcggcgagggcaagacgaggggccggaagaagggcagcaaggccaagaagggcgtggagacgtacaagatctacatcttcaaggtgctcaagcaggtgcacccggacgtcggcatctcctccaaggccatgtccatcatgaactccttcatcaacgacatcttcgagaagctcgccggggagtccgccaagctggcgaggtacaacaagaagcccaccatcacgtcccgggagatccagacctccgtccgcctcgtcctccccggggagctcgccaagcacgccgtctccgagggcaccaaggccgtcaccaagttcacatcatcctaggctggcttcgtcgtcgtcgtttcatgagttgatggcggcaggcatcgtgtatgtagttggcagtagtatgatgttacaacctttgtaagaattgtgctgcttgcttgtgggactgaagaaacagtgatgttgctgtttaaatcaatgttcgtgtgtgcttgcgtgtcgcttcagagttcagactgactcctcttgatgccatttgtttatgtcagcaagtttctaccgtgatagtttatctagtaattttaatttgctgtcattttatctg

SEQ ID NO: 11525 - protein, 181 aa, Triticum aestivum
  peptide (1)..(181): Ceres Seq. ID no. 12783999
  misc_feature (54)..(168): NCBI GI NO: 17505204 NR Description: histone 1, H2bc; H2B histone family, member S
TPHHLHPPSHPTPPHVRTTTTRSSTHGTQGGREEAGAGHGREDDGGEEAQGGEAGAGDQGGRRRGQDEGPEEGQQGQEGRGDVQDLHLQGAQAGAPGRRHLLQGHVHHELLHQRHLREARRGVRQAGEVQQEAHHHVPGDPDLRPPRPPRGARQARRLRGHQGRHQVHIILGWLRRRRFMS

SEQ ID NO: 11526 - protein, 170 aa, Triticum aestivum
  peptide (1)..(170): Ceres Seq. ID no. 12784000
  misc_feature (40)..(170): Pfam Name: Pfam Description:  Core histone H2A/H2B/H3/H4
  misc_feature (25)..(170): NCBI GI NO: 122033 NR Description: HISTONE H2B.2
  misc_feature (19)..(170): NCBI GI NO: 34895900 NR Description: putative histone H2B
  misc_feature (19)..(170): NCBI GI NO: 122022 NR Description: Histone H2B
  misc_feature (19)..(170): NCBI GI NO: 34895838 NR Description: putative histone H2B
  misc_feature (19)..(170): NCBI GI NO: 34895896 NR Description: putative histone H2B
  misc_feature (19)..(170): NCBI GI NO: 34895888 NR Description: putative histone H2B
  misc_feature (19)..(170): NCBI GI NO: 34895832 NR Description: putative histone H2B
  misc_feature (19)..(170): NCBI GI NO: 3913804 NR Description: Histone H2B.3
  misc_feature (19)..(170): NCBI GI NO: 399854 NR Description: Histone H2B.2
  misc_feature (17)..(170): NCBI GI NO: 15231304 NR Description: histone H2B; protein id: At3g45980
HHTIFIPPHIPHLHTFEPPPPEAAPMAPKAAEKKLAPATAEKTTAGKKPKAEKRAPATKEAGGEGKTRGRKKGSKAKKGVETYKIYIFKVLKQVHPDVGISSKAMSIMNSFINDIFEKLAGESAKLARYNKKPTITSREIQTSVRLVLPGELAKHAVSEGTKAVTKFTSS

SEQ ID NO: 11527 - protein, 145 aa, Triticum aestivum
  peptide (1)..(145): Ceres Seq. ID no. 12784001
  misc_feature (15)..(145): Pfam Name: Pfam Description:  Core histone H2A/H2B/H3/H4
  misc_feature (1)..(145): NCBI GI NO: 122033 NR Description: HISTONE H2B.2
  misc_feature (1)..(145): NCBI GI NO: 34895900 NR Description: putative histone H2B
  misc_feature (1)..(145): NCBI GI NO: 122022 NR Description: Histone H2B
  misc_feature (1)..(145): NCBI GI NO: 34895838 NR Description: putative histone H2B
  misc_feature (1)..(145): NCBI GI NO: 34895896 NR Description: putative histone H2B
  misc_feature (1)..(145): NCBI GI NO: 34895888 NR Description: putative histone H2B
  misc_feature (1)..(145): NCBI GI NO: 34895832 NR Description: putative histone H2B
  misc_feature (1)..(145): NCBI GI NO: 3913804 NR Description: Histone H2B.3
  misc_feature (1)..(145): NCBI GI NO: 399854 NR Description: Histone H2B.2
  misc_feature (1)..(145): NCBI GI NO: 15231304 NR Description: histone H2B; protein id: At3g45980
MAPKAAEKKLAPATAEKTTAGKKPKAEKRAPATKEAGGEGKTRGRKKGSKAKKGVETYKIYIFKVLKQVHPDVGISSKAMSIMNSFINDIFEKLAGESAKLARYNKKPTITSREIQTSVRLVLPGELAKHAVSEGTKAVTKFTSS

SEQ ID NO: 11528 - DNA, 1203 bp, Triticum aestivum
  misc_feature (1)..(1203): Ceres Seq. ID no. 13662054
aatattcttctctgttttgtattcgtctgaggtgttttatcttcttcttcttcttcttagacgaagcagtgaaaggattcggattctctgtcaatttttcgagaagagaagtttctaacagtattgggatagagatagatagatagatgagttcatctctacctatgaggctcctcgtgcctctcacacttcccttgattcctcctccttcttcggattctctagctccgtctccgctcagatcgaaaaaccctaactttattctccgatcctcttcttctagtacctcctgttcatcttccctgtggcagctcttccccaggagatccagatcctcttctccttgtgttcccatgtgcacgaaagaccaagacatcacagatacttggagaaatgaagatgatcctattacatgtgggccgcttgaatctgatgaagattccggaggcctccggattcctactcaggctcaggccatcgttgaaggctccggttcagttgctgtctctgagctcagaccttcccctgatgttgattacattcaagagcttctggcgatacagcagcaagggcctagaaccattggcttctttgggactaggaacatgggtttcatgcatcaagaactcatcgagattcttagctacgccatggttattactaaaaatcatatatatacttcaggtgcatctggaactaatgcagctgttatcagaggtgcgttgagagctgagaggccagagcttcttacagtaatcttacctcaaagtttgaaaaaacaacctcctgagagccaagagctattgtctaaggtgcaaaacgtggtagaaaagccacacaatgatcatttgccattactagaagctagcaggctgtgtaatatggacatcatatcacaagtacagcaagtgatctgcttcgcgtttcatgacagtaggcttctcatggagacatgtcaagaagctaaaaatctccgcaagatcgtcactctcttctacctcgattgattcccactctcttctcctgggaacacaagaggatggatacaagtttctttgtaaattgtgaatctctcccccatcccaaaacatattttactattcttttgtctagattttgaaaactccatcattatgatttgtaggattaaattctcagctattttgtaactttacatgggttataaaatatttcttctcatct

SEQ ID NO: 11529 - protein, 286 aa, Triticum aestivum
  peptide (1)..(286): Ceres Seq. ID no. 13662055
  misc_feature (1)..(286): NCBI GI NO: 30689549 NR Description: predicted protein [Arabidopsis thaliana]
  misc_feature (1)..(286): NCBI GI NO: 21537298 NR Description: unknown [Arabidopsis thaliana]
  misc_feature (1)..(286): NCBI GI NO: 15232185 NR Description: expressed protein [Arabidopsis thaliana]
  misc_feature (1)..(262): NCBI GI NO: 7486491 NR Description: hypothetical protein At2g43940
  misc_feature (85)..(222): NCBI GI NO: 34894968 NR Description: B1088D01.6
  misc_feature (117)..(286): NCBI GI NO: 13812204 NR Description: hypothetical protein [Guillardia theta]
  misc_feature (119)..(286): NCBI GI NO: 16331173 NR Description: unknown protein [Synechocystis sp. PCC 6803]
  misc_feature (150)..(286): NCBI GI NO: 23043068 NR Description: hypothetical protein
  misc_feature (136)..(286): NCBI GI NO: 37522470 NR Description: hypothetical protein gll2901
  misc_feature (154)..(286): NCBI GI NO: 17232156 NR Description: hypothetical protein [Nostoc sp. PCC 7120]
MSSSLPMRLLVPLTLPLIPPPSSDSLAPSPLRSKNPNFILRSSSSSTSCSSSLWQLFPRRSRSSSPCVPMCTKDQDITDTWRNEDDPITCGPLESDEDSGGLRIPTQAQAIVEGSGSVAVSELRPSPDVDYIQELLAIQQQGPRTIGFFGTRNMGFMHQELIEILSYAMVITKNHIYTSGASGTNAAVIRGALRAERPELLTVILPQSLKKQPPESQELLSKVQNVVEKPHNDHLPLLEASRLCNMDIISQVQQVICFAFHDSRLLMETCQEAKNLRKIVTLFYLD

SEQ ID NO: 11530 - protein, 280 aa, Triticum aestivum
  peptide (1)..(280): Ceres Seq. ID no. 13662056
  misc_feature (1)..(280): NCBI GI NO: 30689549 NR Description: predicted protein [Arabidopsis thaliana]
  misc_feature (1)..(280): NCBI GI NO: 21537298 NR Description: unknown [Arabidopsis thaliana]
  misc_feature (1)..(280): NCBI GI NO: 15232185 NR Description: expressed protein [Arabidopsis thaliana]
  misc_feature (1)..(256): NCBI GI NO: 7486491 NR Description: hypothetical protein At2g43940
  misc_feature (79)..(216): NCBI GI NO: 34894968 NR Description: B1088D01.6
  misc_feature (111)..(280): NCBI GI NO: 13812204 NR Description: hypothetical protein [Guillardia theta]
  misc_feature (113)..(280): NCBI GI NO: 16331173 NR Description: unknown protein [Synechocystis sp. PCC 6803]
  misc_feature (144)..(280): NCBI GI NO: 23043068 NR Description: hypothetical protein
  misc_feature (130)..(280): NCBI GI NO: 37522470 NR Description: hypothetical protein gll2901
  misc_feature (148)..(280): NCBI GI NO: 17232156 NR Description: hypothetical protein [Nostoc sp. PCC 7120]
MRLLVPLTLPLIPPPSSDSLAPSPLRSKNPNFILRSSSSSTSCSSSLWQLFPRRSRSSSPCVPMCTKDQDITDTWRNEDDPITCGPLESDEDSGGLRIPTQAQAIVEGSGSVAVSELRPSPDVDYIQELLAIQQQGPRTIGFFGTRNMGFMHQELIEILSYAMVITKNHIYTSGASGTNAAVIRGALRAERPELLTVILPQSLKKQPPESQELLSKVQNVVEKPHNDHLPLLEASRLCNMDIISQVQQVICFAFHDSRLLMETCQEAKNLRKIVTLFYLD

SEQ ID NO: 11531 - protein, 217 aa, Triticum aestivum
  peptide (1)..(217): Ceres Seq. ID no. 13662057
  misc_feature (1)..(217): NCBI GI NO: 30689549 NR Description: predicted protein [Arabidopsis thaliana]
  misc_feature (1)..(217): NCBI GI NO: 21537298 NR Description: unknown [Arabidopsis thaliana]
  misc_feature (1)..(217): NCBI GI NO: 15232185 NR Description: expressed protein [Arabidopsis thaliana]
  misc_feature (1)..(193): NCBI GI NO: 7486491 NR Description: hypothetical protein At2g43940
  misc_feature (16)..(153): NCBI GI NO: 34894968 NR Description: B1088D01.6
  misc_feature (48)..(217): NCBI GI NO: 13812204 NR Description: hypothetical protein [Guillardia theta]
  misc_feature (50)..(217): NCBI GI NO: 16331173 NR Description: unknown protein [Synechocystis sp. PCC 6803]
  misc_feature (81)..(217): NCBI GI NO: 23043068 NR Description: hypothetical protein
  misc_feature (67)..(217): NCBI GI NO: 37522470 NR Description: hypothetical protein gll2901
  misc_feature (85)..(217): NCBI GI NO: 17232156 NR Description: hypothetical protein [Nostoc sp. PCC 7120]
MCTKDQDITDTWRNEDDPITCGPLESDEDSGGLRIPTQAQAIVEGSGSVAVSELRPSPDVDYIQELLAIQQQGPRTIGFFGTRNMGFMHQELIEILSYAMVITKNHIYTSGASGTNAAVIRGALRAERPELLTVILPQSLKKQPPESQELLSKVQNVVEKPHNDHLPLLEASRLCNMDIISQVQQVICFAFHDSRLLMETCQEAKNLRKIVTLFYLD

SEQ ID NO: 11532 - DNA, 1066 bp, Triticum aestivum
  misc_feature (1)..(1066): Ceres Seq. ID no. 12784852
agtcggccgcctcccccctccacctcctccccagcgtcgcctcccgttcggaaccccaagctcccccgccgccggcgaaatggccccgaagcgaggcggcaaggccccggtgccggcgaagaagaaggcggcggacaaggtggtgaacccgctgttcgagaagaggccgaagcagttcggcatcggcggggcgctgccgcccaagaaggacctccaccggttcgtcaagtggcccaaggtcgtccgcattcagcgccagcgccgcatcctcaagcagcgcctcaaggtgcccccggcgctccaccagttcacccgcaccctcgacaagaacctcgccaccaacctgtttaagatgcttctcaagtaccgccctgaggacaaggtggctaagaaggagaggcttctgaagagggcccaggctgaggctgaggggaaaaccgttgaggcctagaagccaattgttgtgaagtatggtcttaaccatgtcacttacctcatcgagcagagcaaggctcagctggtcgtcatcgctcatgatgttgacccaattgagctggttgtgtggctcccagccctgtgcaggaagatggaggtcccatactgcattgttaagggaaagtcacgccttggatcgatcgttcacaagaagactgcctcagttctgtgccttaccactgtgaagaacgaggacaagcttgagttcagcaagatcttggaggctatcaaggctaacttcaatgacaagttcgacgaggtcaggaagaagtggggcggtggtgtcatgggctccaagtcgcaggccaagaccaaggccagggaaaggctcatcgccaaggaggctgcgcagaggatgaactaagcctagccttatatgtcagagcatatgccatgtagtttccctttcagtgtgtcctgattttgacgaggaactcgaacccttttagcagcactgtggaatcgtattgtggttttctgattctctgttccgttcgccagacttatgcaaagatcagatgaggtttacccatgtttggattctatatagttttatgccctttgtcgagtc

SEQ ID NO: 11533 - protein, 149 aa, Triticum aestivum
  peptide (1)..(149): Ceres Seq. ID no. 12784853
  misc_feature (27)..(149): NCBI GI NO: 548774 NR Description: 60S RIBOSOMAL PROTEIN L7A
  misc_feature (27)..(149): NCBI GI NO: 15226635 NR Description: 60S ribosomal protein L7A; protein id: At2g47610
  misc_feature (27)..(149): NCBI GI NO: 15229338 NR Description: 60S RIBOSOMAL PROTEIN L7A protein
  misc_feature (19)..(149): NCBI GI NO: 20161741 NR Description: putative 60S ribosomal protein
  misc_feature (30)..(149): NCBI GI NO: 17530825 NR Description: Ribosomal protein L7A CG3314-PD
  misc_feature (30)..(149): NCBI GI NO: 1173062 NR Description: 60S RIBOSOMAL PROTEIN L7A
  misc_feature (1)..(149): NCBI GI NO: 34853132 NR Description: similar to 60S ribosomal protein L7a
  misc_feature (31)..(149): NCBI GI NO: 4506661 NR Description: ribosomal protein L7a
  misc_feature (31)..(149): NCBI GI NO: 7305443 NR Description: ribosomal protein L7a; surfeit 3 [Mus musculus]
  misc_feature (31)..(149): NCBI GI NO: 30410942 NR Description: Rpl7a protein [Mus musculus]
VGRLPPPPPPQRRLPFGTPSSPAAGEMAPKRGGKAPVPAKKKAADKVVNPLFEKRPKQFGIGGALPPKKDLHRFVKWPKVVRIQRQRRILKQRLKVPPALHQFTRTLDKNLATNLFKMLLKYRPEDKVAKKERLLKRAQAEAEGKTVEA

SEQ ID NO: 11534 - protein, 123 aa, Triticum aestivum
  peptide (1)..(123): Ceres Seq. ID no. 12784854
  misc_feature (1)..(123): NCBI GI NO: 548774 NR Description: 60S RIBOSOMAL PROTEIN L7A
  misc_feature (1)..(123): NCBI GI NO: 15226635 NR Description: 60S ribosomal protein L7A; protein id: At2g47610
  misc_feature (1)..(123): NCBI GI NO: 15229338 NR Description: 60S RIBOSOMAL PROTEIN L7A protein
  misc_feature (1)..(123): NCBI GI NO: 20161741 NR Description: putative 60S ribosomal protein
  misc_feature (4)..(123): NCBI GI NO: 17530825 NR Description: Ribosomal protein L7A CG3314-PD
  misc_feature (4)..(123): NCBI GI NO: 1173062 NR Description: 60S RIBOSOMAL PROTEIN L7A
  misc_feature (1)..(123): NCBI GI NO: 34853132 NR Description: similar to 60S ribosomal protein L7a
  misc_feature (5)..(123): NCBI GI NO: 4506661 NR Description: ribosomal protein L7a
  misc_feature (5)..(123): NCBI GI NO: 7305443 NR Description: ribosomal protein L7a; surfeit 3 [Mus musculus]
  misc_feature (5)..(123): NCBI GI NO: 30410942 NR Description: Rpl7a protein [Mus musculus]
MAPKRGGKAPVPAKKKAADKVVNPLFEKRPKQFGIGGALPPKKDLHRFVKWPKVVRIQRQRRILKQRLKVPPALHQFTRTLDKNLATNLFKMLLKYRPEDKVAKKERLLKRAQAEAEGKTVEA

SEQ ID NO: 11535 - protein, 116 aa, Triticum aestivum
  peptide (1)..(116): Ceres Seq. ID no. 12784855
SRPPPPSTSSPASPPVRNPKLPRRRRNGPEARRQGPGAGEEEGGGQGGEPAVREEAEAVRHRRGAAAQEGPPPVRQVAQGRPHSAPAPHPQAAPQGAPGAPPVHPHPRQEPRHQPV

SEQ ID NO: 11536 - DNA, 1182 bp, Triticum aestivum
  misc_feature (1)..(1182): Ceres Seq. ID no. 13662053
attctctctctctctctcgctgcctggccaggtagcttctctctctcctccacgctcctgccgacaaaaacaagaaacgacgtagcacggtagcagcaaagagaaagagagagagaccactggtagccaagggtgggagagaagcaggagtgccgctgccgatcgaccatggagccgggccccgacgcgcctcgcggcgagggagcgagcgcgccggaggagtctggaccgtcctcatcctcggtggccgtggagaaagctgaagagccacaggcacaagcgcagccgccggaaggaggaggccagcaagtcgcactgcaggagcacctgcagccgcagccgctgtcgcagcagccgccggtgccagcggggctgagccgctacgagtcgcagaagcgccgcgactggaacacgttcctgcagtacctgcgcaaccacaagccgccgctgacactcgcgcggtgcagcggcgcgcacgtcatcgagttcctcaagtacctggaccagttcggcaagaccaaggtgcacgccgacggctgcgcctacttcggccagcccaacccgccggctccgtgcgcgtgcccgctccgacaggcatggggcagcctcgacgcgctcattggccgcctgcgcgccgcctacgaggagtccggcggccgccctgagtccaaccccttcgccgcgcgcgccgtgcgcatctatctgcgcgaggtgcgcgaggcgcaggccaaggcgcgcgggataccctacgagaagaagaagcgcaagcgcggcagcacgtccgcccccgcggcgccgcctcccgttgtcaccgccgcggaggcggcagcgacctccggaggcggcgaggacgacgaggacgagccgtcacagtccgctgagcaacagcacacaacgccagcgtctcctccgactagaattagtagcgccggcgctactagtaccaccgcagcggcggcagccacaacgacgacgacgacaacgagagggaaggagaaggaagcggcagaaggatcagcgtgataagtgtagaccatcaaattacccttttgattattccatcgcatccaaattctaatctctgcaccatcataattttagttgtttgttattataattactgtgctgttatgatttgttggatatatatatatatataagagagaggtctaagtagttcgt

SEQ ID NO: 11537 - protein, 284 aa, Triticum aestivum
  peptide (1)..(284): Ceres Seq. ID no. 15220155
  misc_feature (63)..(185): Pfam Name: DUF640 Pfam Description: Protein of unknown function
  misc_feature (41)..(227): NCBI GI NO: 34907938 NR Description: B1088C09.17
  misc_feature (56)..(229): NCBI GI NO: 18390725 NR Description: expressed protein [Arabidopsis thaliana]
  misc_feature (70)..(225): NCBI GI NO: 15237680 NR Description: hypothetical protein [Arabidopsis thaliana]
  misc_feature (40)..(201): NCBI GI NO: 38344650 NR Description: OSJNBb0072M01.12
  misc_feature (57)..(209): NCBI GI NO: 18402578 NR Description: expressed protein [Arabidopsis thaliana]
  misc_feature (67)..(209): NCBI GI NO: 37535384 NR Description: hypothetical protein
  misc_feature (55)..(213): NCBI GI NO: 15241821 NR Description: expressed protein [Arabidopsis thaliana]
  misc_feature (51)..(213): NCBI GI NO: 15229310 NR Description: hypothetical protein [Arabidopsis thaliana]
  misc_feature (62)..(201): NCBI GI NO: 18406012 NR Description: expressed protein [Arabidopsis thaliana]
  misc_feature (42)..(201): NCBI GI NO: 18412120 NR Description: expressed protein [Arabidopsis thaliana]
MEPGPDAPRGEGASAPEESGPSSSSVAVEKAEEPQAQAQPPEGGGQQVALQEHLQPQPLSQQPPVPAGLSRYESQKRRDWNTFLQYLRNHKPPLTLARCSGAHVIEFLKYLDQFGKTKVHADGCAYFGQPNPPAPCACPLRQAWGSLDALIGRLRAAYEESGGRPESNPFAARAVRIYLREVREAQAKARGIPYEKKKRKRGSTSAPAAPPPVVTAAEAAATSGGGEDDEDEPSQSAEQQHTTPASPPTRISSAGATSTTAAAAATTTTTTTRGKEKEAAEGSA

SEQ ID NO: 11538 - DNA, 1423 bp, Triticum aestivum
  misc_feature (1)..(1423): Ceres Seq. ID no. 13661403
agacctcgaaatcatctagcgaggtcgtcgggctaatcgaagttgggcaccaccgtttattcactgaatggactcgaccaccaaccaattcgccggcgccgccgccgccgctggcgcgtcatcggcgaacacggcaccgctgccggccatgctcgctgacgcccttatcggcgccggagctggaggaggagatggggaccccagcgccgctctccaacggctggcggccctcggcgatcgcatggctgctgtccggcgcctcctcgtcgcctccatttctggggaatcgcagcccctctcctcctcggatattcagtccgtgtcctccgagatctcatctgccgctcacctcgtcgtcctcaacgccgcctccctcctttcttcgtccctcccttttcccgccccatctgccactcccgcccctcccgctcctatacaagagcttcccgcagcggcctccaccgccgatgtgcttccccaagaagctaccaagggctacgatgtcgtggagctcgatgccgacgagctgctcgcggagcatgcccacttctgcaatatctgcggcaagggcttccgccgcgacgccaacctcaggatgcacatgcgcgcgcacggcgaccgattcaagaccctggacgcgctctcccggcccggtcaggcaaagccagttgatggccgcgatgtgcgcttttcctgtcctttcacggggtgcaaccggaaccgtgcgcaccgccgcttccggccgctcaagtcagcggtgtgcgcgcgcaaccacttccgccgcagccactgccccaaactctacgcgtgtgagcgctgcggtggcaagaagcgttttgctgttcttgccgatctccgcggccacctccgccactgcggtgaggaggcacagtggcgctgctcctgcggcaccaccttctcccgcaaggacaagctgttcggccatctcgccctctttgaaggccatatgccagccatgtcccctccgaacaaggatgcagtgacaacgactacagaggcaccccttgatataatggatgaaggaggaatcgaagagcaggaagatggcggtgaaggtggttttgatccggagttcttcaaggagtggatggaggagctcaaagatgatggcgtgcctgctggtggcacagtctggcctggacgggcagcagctgggcaatagcctgtgttgcaagttctgtttggggtgtatggtaacagccgcaaggggcattggctgccaaagtgtctgaaagagcggtggggagatgcttctgaagaacagcacagaggtttctaacaagagcagtgggggcatgcccttgtttgtatggcacagtagtagtctggaatcactttgccagtctccttgtcgctccctcgttattctgtacctattgtcctgttggcagaagtacattcc

SEQ ID NO: 11539 - protein, 371 aa, Triticum aestivum
  peptide (1)..(371): Ceres Seq. ID no. 13661404
  misc_feature (160)..(182): Pfam Name: Pfam Description:  Zinc finger, C2H2 type
  misc_feature (144)..(319): NCBI GI NO: 34908682 NR Description: putative zinc finger protein
  misc_feature (145)..(329): NCBI GI NO: 38346456 NR Description: OSJNBa0019G23.4
  misc_feature (145)..(321): NCBI GI NO: 10241636 NR Description: putative zinc finger protein
  misc_feature (144)..(340): NCBI GI NO: 15218606 NR Description: zinc finger protein -related
  misc_feature (144)..(340): NCBI GI NO: 21593564 NR Description: zinc finger protein, putative
  misc_feature (144)..(319): NCBI GI NO: 28376689 NR Description: putative zinc finger protein
  misc_feature (144)..(313): NCBI GI NO: 10177236 NR Description: contains similarity to C2H2-type zinc fingerprotein~gene_id:MRN17
  misc_feature (144)..(313): NCBI GI NO: 30688719 NR Description: expressed protein [Arabidopsis thaliana]
  misc_feature (111)..(369): NCBI GI NO: 33146841 NR Description: zinc finger protein-like protein
  misc_feature (152)..(305): NCBI GI NO: 18376601 NR Description: WIP1 protein [Glycine max]
MDSTTNQFAGAAAAAGASSANTAPLPAMLADALIGAGAGGGDGDPSAALQRLAALGDRMAAVRRLLVASISGESQPLSSSDIQSVSSEISSAAHLVVLNAASLLSSSLPFPAPSATPAPPAPIQELPAAASTADVLPQEATKGYDVVELDADELLAEHAHFCNICGKGFRRDANLRMHMRAHGDRFKTLDALSRPGQAKPVDGRDVRFSCPFTGCNRNRAHRRFRPLKSAVCARNHFRRSHCPKLYACERCGGKKRFAVLADLRGHLRHCGEEAQWRCSCGTTFSRKDKLFGHLALFEGHMPAMSPPNKDAVTTTTEAPLDIMDEGGIEEQEDGGEGGFDPEFFKEWMEELKDDGVPAGGTVWPGRAAAGQ

SEQ ID NO: 11540 - protein, 344 aa, Triticum aestivum
  peptide (1)..(344): Ceres Seq. ID no. 13661405
  misc_feature (133)..(155): Pfam Name: Pfam Description:  Zinc finger, C2H2 type
  misc_feature (117)..(292): NCBI GI NO: 34908682 NR Description: putative zinc finger protein
  misc_feature (118)..(302): NCBI GI NO: 38346456 NR Description: OSJNBa0019G23.4
  misc_feature (118)..(294): NCBI GI NO: 10241636 NR Description: putative zinc finger protein
  misc_feature (117)..(313): NCBI GI NO: 15218606 NR Description: zinc finger protein -related
  misc_feature (117)..(313): NCBI GI NO: 21593564 NR Description: zinc finger protein, putative
  misc_feature (117)..(292): NCBI GI NO: 28376689 NR Description: putative zinc finger protein
  misc_feature (117)..(286): NCBI GI NO: 10177236 NR Description: contains similarity to C2H2-type zinc fingerprotein~gene_id:MRN17
  misc_feature (117)..(286): NCBI GI NO: 30688719 NR Description: expressed protein [Arabidopsis thaliana]
  misc_feature (84)..(342): NCBI GI NO: 33146841 NR Description: zinc finger protein-like protein
  misc_feature (125)..(278): NCBI GI NO: 18376601 NR Description: WIP1 protein [Glycine max]
MLADALIGAGAGGGDGDPSAALQRLAALGDRMAAVRRLLVASISGESQPLSSSDIQSVSSEISSAAHLVVLNAASLLSSSLPFPAPSATPAPPAPIQELPAAASTADVLPQEATKGYDVVELDADELLAEHAHFCNICGKGFRRDANLRMHMRAHGDRFKTLDALSRPGQAKPVDGRDVRFSCPFTGCNRNRAHRRFRPLKSAVCARNHFRRSHCPKLYACERCGGKKRFAVLADLRGHLRHCGEEAQWRCSCGTTFSRKDKLFGHLALFEGHMPAMSPPNKDAVTTTTEAPLDIMDEGGIEEQEDGGEGGFDPEFFKEWMEELKDDGVPAGGTVWPGRAAAGQ

SEQ ID NO: 11541 - protein, 333 aa, Triticum aestivum
  peptide (1)..(333): Ceres Seq. ID no. 13661406
  misc_feature (26)..(155): Pfam Name: Pfam Description:  Extensin-like region
  misc_feature (27)..(325): NCBI GI NO: 13592175 NR Description: ppg3 [Leishmania major]
  misc_feature (32)..(318): NCBI GI NO: 5420387 NR Description: proteophosphoglycan [Leishmania major]
  misc_feature (27)..(325): NCBI GI NO: 13592175 NR Description: ppg3 [Leishmania major]
  misc_feature (50)..(325): NCBI GI NO: 13592175 NR Description: ppg3 [Leishmania major]
  misc_feature (25)..(325): NCBI GI NO: 13592175 NR Description: ppg3 [Leishmania major]
  misc_feature (51)..(325): NCBI GI NO: 13592175 NR Description: ppg3 [Leishmania major]
  misc_feature (26)..(325): NCBI GI NO: 13592175 NR Description: ppg3 [Leishmania major]
  misc_feature (51)..(325): NCBI GI NO: 13592175 NR Description: ppg3 [Leishmania major]
  misc_feature (7)..(327): NCBI GI NO: 30984464 NR Description: very large tegument protein
  misc_feature (27)..(325): NCBI GI NO: 13592175 NR Description: ppg3 [Leishmania major]
TSKSSSEVVGLIEVGHHRLFTEWTRPPTNSPAPPPPLARHRRTRHRCRPCSLTPLSAPELEEEMGTPAPLSNGWRPSAIAWLLSGASSSPPFLGNRSPSPPRIFSPCPPRSHLPLTSSSSTPPPSFLRPSLFPPHLPLPPLPLLYKSFPQRPPPPMCFPKKLPRATMSWSSMPTSCSRSMPTSAISAARASAATPTSGCTCARTATDSRPWTRSPGPVRQSQLMAAMCAFPVLSRGATGTVRTAASGRSSQRCARATTSAAATAPNSTRVSAAVARSVLLFLPISAATSATAVRRHSGAAPAAPPSPARTSCSAISPSLKAICQPCPLRTRMQ

SEQ ID NO: 11542 - DNA, 905 bp, Triticum aestivum
  misc_feature (1)..(905): Ceres Seq. ID no. 13662000
gattcaccgctccccctccacctccacccggacccgcaagatcccgacccgccgcggcccccgctcctcgatcgattgatatcagacgcggccgggtgggcggaagaaggcggcggcggcggcgatgagcgcggtgaacatcaccaacgtggcggtgctggacaaccccaccgccttcctcaaccccttccagttcgagatctcctacgagtgcctcgtcccgctcgacgacgatctggaatggaagctcacatatgttggatcagctgaagacgaaacctatgatcagcaacttgagagcgtgcttgttggacctgtcaatgttgggacctaccgttttgtcttccaggctgacccaccggaccctttgaagatacgtgaagaagacatcattggtgtcaccgtgctgctgttgacatgctcctacgtgggtcaggagttcatgagggtgggttattatgtgaacaatgattacgacgaggagcagctgagagaagagcccccggcaaagctattacttgacagggtgcagagaaacattttggctgacaagccccgtgtcaccaagttcccaatcaacttccaccctgaacctggcacgagctcagaacagccgcaacaggatgcagaacagcagcagcagccgacttcaccggaaccacagacggctccagtagagccacatatggcgccactagagaatgtccccattgccgccgaccaatgatcagagttggggtgctaacggtctgttctccatgccttctatggtgtcttaatgttacgaatcgagagtggtggttctgcaatgtactgatctgttgtttacatttcacaatctgttctgtggcaaatgttgggtgtctagctatttcttgataaagagtacttctgcctattttgtt

SEQ ID NO: 11543 - protein, 200 aa, Triticum aestivum
  peptide (1)..(200): Ceres Seq. ID no. 13662001
  misc_feature (1)..(155): Pfam Name: Pfam Description:  Anti-silencing protein, ASF1-like
  misc_feature (1)..(186): NCBI GI NO: 15219729 NR Description: (ASF1a) anti-silencing function 1a protein
  misc_feature (1)..(174): NCBI GI NO: 15240842 NR Description: anti-silencing factor 1-related protein
  misc_feature (12)..(186): NCBI GI NO: 6069498 NR Description: S-locus protein 7 [Brassica rapa]
  misc_feature (25)..(178): NCBI GI NO: 34911252 NR Description: putative anti-silencing factor 1-like protein
  misc_feature (1)..(193): NCBI GI NO: 17737649 NR Description: anti-silencing factor 1 CG9383-PA
  misc_feature (1)..(157): NCBI GI NO: 31215032 NR Description: ENSANGP00000013594 [Anopheles gambiae]
  misc_feature (1)..(195): NCBI GI NO: 33416731 NR Description: Unknown (protein for MGC:69151) [Xenopus laevis]
  misc_feature (1)..(169): NCBI GI NO: 7661592 NR Description: ASF1 anti-silencing function 1 homolog A
  misc_feature (1)..(169): NCBI GI NO: 6841514 NR Description: HSPC146 [Homo sapiens]
  misc_feature (1)..(167): NCBI GI NO: 21313226 NR Description: ASF1 anti-silencing function 1 homolog B
MSAVNITNVAVLDNPTAFLNPFQFEISYECLVPLDDDLEWKLTYVGSAEDETYDQQLESVLVGPVNVGTYRFVFQADPPDPLKIREEDIIGVTVLLLTCSYVGQEFMRVGYYVNNDYDEEQLREEPPAKLLLDRVQRNILADKPRVTKFPINFHPEPGTSSEQPQQDAEQQQQPTSPEPQTAPVEPHMAPLENVPIAADQ

SEQ ID NO: 11544 - DNA, 888 bp, Triticum aestivum
  misc_feature (1)..(888): Ceres Seq. ID no. 13598758
atatcaggttcaggttcgggttctgcagccgccgtagaaccctagcgtgtctcattaaaccctcaacctccaccttccgacttgcttccagtaattcttccctccccaccaagaaaatcacagccgagaaatagccgaccgaccgcacccttccctcccttctcccccttcctcaagacaggccggaaccaaatcgtgaagctcgatggaccacgtgggctccatggaggagaggatcgtggcggaccggatccggaagaagctggaggaggtgaacgtcgccgcccagaagcacctcgagggcgtgcaggaccatgtcaacttcactctgcagaaagagtacttcaagtgtgcacatgactgctttgataggcgacggactcaagaggggatcaccagctgtgtagagaactgtggtgtgcccgctctttctgccaacaatgttgttgagactgagatggccaagttccaggaaaggttgaatcgctcgttgatggtctgccaagataagtttgaagcagcaaagctccagaagatgaagacagacgcaaccaatgagctggagtcgtgcgtgaacaggtccatcgatgacagcatcagggtcctgccccatctggttgagcagatcaagtccaccattaacatgaagtagaggaatcagaaactttcaaattgtcccccggctcgtttttgccatcgttagctgaatctatccagagtctctagcagcactagtgtaacatgctcattactgccatgagaaccatgtctagagaagagttttttgctgagagattagtgcgtctaaatggcgccgcgataccagactaaatgttgcaaacgtagcttttgcataacatcttaaaatcttaaaatcttttttttttc

SEQ ID NO: 11545 - protein, 148 aa, Triticum aestivum
  peptide (1)..(148): Ceres Seq. ID no. 13598759
  misc_feature (15)..(143): Pfam Name: DUF842 Pfam Description: Eukaryotic protein of unknown function
  misc_feature (1)..(147): NCBI GI NO: 18402744 NR Description: expressed protein [Arabidopsis thaliana]
  misc_feature (1)..(147): NCBI GI NO: 15221245 NR Description: hypothetical Protein [Arabidopsis thaliana]
  misc_feature (8)..(147): NCBI GI NO: 15224344 NR Description: expressed protein [Arabidopsis thaliana]
  misc_feature (1)..(124): NCBI GI NO: 15221247 NR Description: hypothetical protein [Arabidopsis thaliana]
  misc_feature (12)..(145): NCBI GI NO: 14249520 NR Description: hypothetical protein FLJ14668 [Homo sapiens]
  misc_feature (12)..(145): NCBI GI NO: 15929034 NR Description: hypothetical protein FLJ14668 [Homo sapiens]
  misc_feature (19)..(146): NCBI GI NO: 27712200 NR Description: similar to RIKEN cDNA 2010309E21
  misc_feature (15)..(146): NCBI GI NO: 37589716 NR Description: Unknown (protein for MGC:73247) [Danio rerio]
  misc_feature (19)..(146): NCBI GI NO: 13385042 NR Description: RIKEN cDNA 2010309E21 [Mus musculus]
  misc_feature (19)..(146): NCBI GI NO: 15489002 NR Description: 2010309E21Rik protein [Mus musculus]
MDHVGSMEERIVADRIRKKLEEVNVAAQKHLEGVQDHVNFTLQKEYFKCAHDCFDRRRTQEGITSCVENCGVPALSANNVVETEMAKFQERLNRSLMVCQDKFEAAKLQKMKTDATNELESCVNRSIDDSIRVLPHLVEQIKSTINMK

SEQ ID NO: 11546 - protein, 142 aa, Triticum aestivum
  peptide (1)..(142): Ceres Seq. ID no. 13598760
  misc_feature (9)..(137): Pfam Name: DUF842 Pfam Description: Eukaryotic protein of unknown function
  misc_feature (1)..(141): NCBI GI NO: 18402744 NR Description: expressed protein [Arabidopsis thaliana]
  misc_feature (1)..(141): NCBI GI NO: 15221245 NR Description: hypothetical Protein [Arabidopsis thaliana]
  misc_feature (2)..(141): NCBI GI NO: 15224344 NR Description: expressed protein [Arabidopsis thaliana]
  misc_feature (1)..(118): NCBI GI NO: 15221247 NR Description: hypothetical protein [Arabidopsis thaliana]
  misc_feature (6)..(139): NCBI GI NO: 14249520 NR Description: hypothetical protein FLJ14668 [Homo sapiens]
  misc_feature (6)..(139): NCBI GI NO: 15929034 NR Description: hypothetical protein FLJ14668 [Homo sapiens]
  misc_feature (13)..(140): NCBI GI NO: 27712200 NR Description: similar to RIKEN cDNA 2010309E21
  misc_feature (9)..(140): NCBI GI NO: 37589716 NR Description: Unknown (protein for MGC:73247) [Danio rerio]
  misc_feature (13)..(140): NCBI GI NO: 13385042 NR Description: RIKEN cDNA 2010309E21 [Mus musculus]
  misc_feature (13)..(140): NCBI GI NO: 15489002 NR Description: 2010309E21Rik protein [Mus musculus]
MEERIVADRIRKKLEEVNVAAQKHLEGVQDHVNFTLQKEYFKCAHDCFDRRRTQEGITSCVENCGVPALSANNVVETEMAKFQERLNRSLMVCQDKFEAAKLQKMKTDATNELESCVNRSIDDSIRVLPHLVEQIKSTINMK

SEQ ID NO: 11547 - DNA, 1296 bp, Triticum aestivum
  misc_feature (1)..(1296): Ceres Seq. ID no. 13664216
agaacatcctaatcgaaaaagtcgtctcccgccaccgcgtcgcccagcaccttcttaaccaacaccaagccaagtaggcaacccagagtcgagtcctcgggaccccgagctcttgcggatgggttgcctgcggcgccggccggagccggcggccatcgacatcacctgggtgtcgtgccggggcgtcaggtcgtcgctcccgttccacacgccgtgcctctacgcctccgtctccgtcacgccgtcgtctgccggcaagaacgtccgccgccaccgcgtcaagacccccaccgaccgcgccggcggcgagaaccccgagtgggacgagcgcctgcggctccgccttcccgacgacgcctcgctggcgtcagagcaggaagccgcggggaaaaagaaggacgggcacgttgaccacgacgacagcgtccttctcgtgcggttcgagctcaaggccgaggtggccgtcctcggggacgtgctcgccgcgtcggccgtcgtgccgctctccgacctcgtcgccgacggcaggacgcgccgcgtgtcctaccagcttgccgcgtccgcggacggcaggcarmcrcaayvdcgtyatctccttctcgtacgccttccaccacggaagcaccatcgacgacgaccaggaggaccgcagcagcgacggcgagccggtatcgcccgctagcccggcccctcccccgccgccgccgcctgagtcgacggtgtcgtcctccgggatgtacccggtgatggagtgggggccactggagcacctcgcggtttacccaccggtgaacgccgacacggtcacgtgctcaagctcaccggagccgattgcggtctacccaccgttgcaggagacatcgagccgtggaatttacccgatggtgggggagccggatagcagtttgtaccccacagtagactttgctccggtgagctgttacccgccgatgacggcgccgtactactacggtggtggttccgggtgtccggcagctcctgcatgggacgggcgatgtttgtacggttgaaacctcggtttccaccctgattttccagcgtttcgttggacggtgtgccggtggcttgtacttttttccgtaaaattcacgtggtgatgccgccatactaggcatccttggccggcgcagcagtgatgccgggattgtgctgtgcgttattggtggtattcgatatgttcgagccgataaaattcgtatgtatatttgtgaaatttgtgtatgttgtcacatgtgcttgataaattaaaggcacctttgatttgaaggttctttt

SEQ ID NO: 11548 - protein, 187 aa, Triticum aestivum
  peptide (1)..(187): Ceres Seq. ID no. 15220296
  misc_feature (153)..(153): Xaa is any aa, unknown or other
  misc_feature (154)..(154): Xaa is any aa, unknown or other
  misc_feature (156)..(156): Xaa is any aa, unknown or other
  misc_feature (158)..(158): Xaa is any aa, unknown or other
MGCLRRRPEPAAIDITWVSCRGVRSSLPFHTPCLYASVSVTPSSAGKNVRRHRVKTPTDRAGGENPEWDERLRLRLPDDASLASEQEAAGKKKDGHVDHDDSVLLVRFELKAEVAVLGDVLAASAVVPLSDLVADGRTRRVSYQLAASADGRXXQXRXLLLVRLPPRKHHRRRPGGPQQRRRAGIAR

SEQ ID NO: 11549 - protein, 98 aa, Triticum aestivum
  peptide (1)..(98): Ceres Seq. ID no. 15220297
  misc_feature (1)..(85): NCBI GI NO: 13592175 NR Description: ppg3 [Leishmania major]
MYPVMEWGPLEHLAVYPPVNADTVTCSSSPEPIAVYPPLQETSSRGIYPMVGEPDSSLYPTVDFAPVSCYPPMTAPYYYGGGSGCPAAPAWDGRCLYG

SEQ ID NO: 11550 - protein, 94 aa, Triticum aestivum
  peptide (1)..(94): Ceres Seq. ID no. 15220298
  misc_feature (1)..(81): NCBI GI NO: 13592175 NR Description: ppg3 [Leishmania major]
MEWGPLEHLAVYPPVNADTVTCSSSPEPIAVYPPLQETSSRGIYPMVGEPDSSLYPTVDFAPVSCYPPMTAPYYYGGGSGCPAAPAWDGRCLYG

SEQ ID NO: 11551 - DNA, 924 bp, Triticum aestivum
  misc_feature (1)..(924): Ceres Seq. ID no. 13598153
acacagtcgtaagggcaaacccgctctctctccccccaaatcgatggagtctgacggcgaggaggaggcggcggcgacgccggcggcggggcggctgaagggctgcccagagctgtcggtggagggggacatgcgggagatggccaagacggcggcctggagcgtcagctcctgcaagcccggcaacggcgtcgcctccctccgcgacgacagcctcgacacctactggcagtctgacggcgcgcagccgcacctggtcaacatccagttccagaagaaggtgcagctgcagcttgttgtgctctacgtggatttcaagctggacgagagctacacgcccagcaagatctccatccgggccggcgacggcttccacaatctcaaggaaattaaaacggtggaccttttgaagccagtaggatgggttcatatatcattatctggcactgatcccggagaaacattcattcatacatttatgctccaaatcgcggtgttggccaatcacctgaacgggagggacacccatgtccggcagatcaagatatatgggccacgaccgaaccccgttccccaccagcctttccacttcacttccagggaatgcatcatgtactccaccatcaggtgatggttcgtgaaccctggtcgcgtgggatcctccatatcagagacctttatcgtgtggcctgtgcgcttcagtcctccatgacaaacgagtcactgaagtatccagcatatgttatcatgtactactgtagattaagttgctgctgaagcattaggctgtctctctgaacatctaacacgtactaattcatgttgtattccattccatccatgtattcttggtagtacatctttttcctccatttaatgtaacatttcactatttctggaatggattggaagtttctcctggtt

SEQ ID NO: 11552 - protein, 209 aa, Triticum aestivum
  peptide (1)..(209): Ceres Seq. ID no. 13598154
  misc_feature (21)..(209): Pfam Name: APC10 Pfam Description: Anaphase-promoting complex, subunit 10
  misc_feature (15)..(209): NCBI GI NO: 5091606 NR Description: ESTs dbj|D15316 and dbj|C98044 come from this gene
  misc_feature (22)..(209): NCBI GI NO: 18398701 NR Description: expressed protein [Arabidopsis thaliana]
  misc_feature (22)..(209): NCBI GI NO: 21592739 NR Description: unknown [Arabidopsis thaliana]
  misc_feature (37)..(209): NCBI GI NO: 7657035 NR Description: anaphase-promoting complex subunit 10
  misc_feature (37)..(209): NCBI GI NO: 4836700 NR Description: anaphase promoting complex subunit 10
  misc_feature (37)..(209): NCBI GI NO: 34395509 NR Description: Anaphase promoting complex subunit 10
  misc_feature (37)..(185): NCBI GI NO: 16975123 NR Description: Chain A
  misc_feature (15)..(209): NCBI GI NO: 28573741 NR Description: CG11419-PA [Drosophila melanogaster]
  misc_feature (41)..(190): NCBI GI NO: 39595285 NR Description: Hypothetical protein CBG03913
  misc_feature (15)..(148): NCBI GI NO: 40746784 NR Description: hypothetical protein AN0911.2
HSRKGKPALSPPKSMESDGEEEAAATPAAGRLKGCPELSVEGDMREMAKTAAWSVSSCKPGNGVASLRDDSLDTYWQSDGAQPHLVNIQFQKKVQLQLVVLYVDFKLDESYTPSKISIRAGDGFHNLKEIKTVDLLKPVGWVHISLSGTDPGETFIHTFMLQIAVLANHLNGRDTHVRQIKIYGPRPNPVPHQPFHFTSRECIMYSTIR

SEQ ID NO: 11553 - protein, 195 aa, Triticum aestivum
  peptide (1)..(195): Ceres Seq. ID no. 13598155
  misc_feature (7)..(195): Pfam Name: APC10 Pfam Description: Anaphase-promoting complex, subunit 10
  misc_feature (1)..(195): NCBI GI NO: 5091606 NR Description: ESTs dbj|D15316 and dbj|C98044 come from this gene
  misc_feature (8)..(195): NCBI GI NO: 18398701 NR Description: expressed protein [Arabidopsis thaliana]
  misc_feature (8)..(195): NCBI GI NO: 21592739 NR Description: unknown [Arabidopsis thaliana]
  misc_feature (23)..(195): NCBI GI NO: 7657035 NR Description: anaphase-promoting complex subunit 10
  misc_feature (23)..(195): NCBI GI NO: 4836700 NR Description: anaphase promoting complex subunit 10
  misc_feature (23)..(195): NCBI GI NO: 34395509 NR Description: Anaphase promoting complex subunit 10
  misc_feature (23)..(171): NCBI GI NO: 16975123 NR Description: Chain A
  misc_feature (1)..(195): NCBI GI NO: 28573741 NR Description: CG11419-PA [Drosophila melanogaster]
  misc_feature (27)..(176): NCBI GI NO: 39595285 NR Description: Hypothetical protein CBG03913
  misc_feature (1)..(134): NCBI GI NO: 40746784 NR Description: hypothetical protein AN0911.2
MESDGEEEAAATPAAGRLKGCPELSVEGDMREMAKTAAWSVSSCKPGNGVASLRDDSLDTYWQSDGAQPHLVNIQFQKKVQLQLVVLYVDFKLDESYTPSKISIRAGDGFHNLKEIKTVDLLKPVGWVHISLSGTDPGETFIHTFMLQIAVLANHLNGRDTHVRQIKIYGPRPNPVPHQPFHFTSRECIMYSTIR

SEQ ID NO: 11554 - protein, 166 aa, Triticum aestivum
  peptide (1)..(166): Ceres Seq. ID no. 13598156
  misc_feature (1)..(166): Pfam Name: APC10 Pfam Description: Anaphase-promoting complex, subunit 10
  misc_feature (1)..(166): NCBI GI NO: 5091606 NR Description: ESTs dbj|D15316 and dbj|C98044 come from this gene
  misc_feature (1)..(166): NCBI GI NO: 18398701 NR Description: expressed protein [Arabidopsis thaliana]
  misc_feature (1)..(166): NCBI GI NO: 21592739 NR Description: unknown [Arabidopsis thaliana]
  misc_feature (1)..(166): NCBI GI NO: 7657035 NR Description: anaphase-promoting complex subunit 10
  misc_feature (1)..(166): NCBI GI NO: 4836700 NR Description: anaphase promoting complex subunit 10
  misc_feature (1)..(166): NCBI GI NO: 34395509 NR Description: Anaphase promoting complex subunit 10
  misc_feature (1)..(142): NCBI GI NO: 16975123 NR Description: Chain A
  misc_feature (1)..(166): NCBI GI NO: 28573741 NR Description: CG11419-PA [Drosophila melanogaster]
  misc_feature (1)..(147): NCBI GI NO: 39595285 NR Description: Hypothetical protein CBG03913
  misc_feature (1)..(105): NCBI GI NO: 40746784 NR Description: hypothetical protein AN0911.2
MREMAKTAAWSVSSCKPGNGVASLRDDSLDTYWQSDGAQPHLVNIQFQKKVQLQLVVLYVDFKLDESYTPSKISIRAGDGFHNLKEIKTVDLLKPVGWVHISLSGTDPGETFIHTFMLQIAVLANHLNGRDTHVRQIKIYGPRPNPVPHQPFHFTSRECIMYSTIR

SEQ ID NO: 11555 - DNA, 805 bp, Triticum aestivum
  misc_feature (1)..(805): Ceres Seq. ID no. 13662830
atcggtctagttagtgttgatctcggctggtgatttcactagtccgcgcaggtgcgaagccggattcggcccgctgctcccctctcgtctcccgtcgtcggacccccggcgacccctcttccaagccgccatcgtcctcacctccagcgcgacttcgtcttctccaccactcgacccagctcagcagcaaggcggcggacgggaggatgatgggaagcaacaaccccggcggcgcagggggagggggagggatggccccgggcacgggggccggcggcagcgacgggcggcatgacgacgaggccgtgctcaccgagttcctctcctccctcatggactacaatcccacgatcccggacgagctcgtggagcactacctcggccgaagcggcttccactgccccgacatacgcctaacaaggctggttgctgtagctgctcaaaagttcatttcagacattgcaagcgactctcttcagcactgcaaagccagggttgcagcacctatcaaagataacaagagcaaacaaccgaaggatagacgccttgtattgaccatggatgatctttcaaaagcattgcgtgagcatggtgttaatctgaaacatccagagtattttgcggacagcccatcagcagggatgcccccctcaacaagagaggagtagaatcgatcgctccttcaacaagagagggctagaatccattgtttcttatatgcgtacccagtgaatgggcgtgtccttccaactttatgtaacaaagccttataagcatgtatgcaatggcagttgatgtattatgg

SEQ ID NO: 11556 - protein, 153 aa, Triticum aestivum
  peptide (1)..(153): Ceres Seq. ID no. 13662831
  misc_feature (47)..(96): Pfam Name: Pfam Description:  Transcription initiation factor TFIID 23-30kDa subunit
  misc_feature (21)..(153): NCBI GI NO: 15236059 NR Description: Transcription factor II homolog
  misc_feature (21)..(153): NCBI GI NO: 26450720 NR Description: putative transcription factor II
  misc_feature (1)..(138): NCBI GI NO: 21619259 NR Description: Ilk protein [Mus musculus]
  misc_feature (1)..(138): NCBI GI NO: 26338586 NR Description: unnamed protein product [Mus musculus]
  misc_feature (3)..(138): NCBI GI NO: 9910576 NR Description: TAF10 RNA polymerase II, TATA box binding protein
  misc_feature (3)..(138): NCBI GI NO: 34859827 NR Description: similar to Ilk protein [Rattus norvegicus]
  misc_feature (3)..(138): NCBI GI NO: 2136293 NR Description: transcription factor IID 30k chain - human
  misc_feature (3)..(138): NCBI GI NO: 5454106 NR Description: TBP-related factor 10; TATA box binding protein
  misc_feature (7)..(138): NCBI GI NO: 20863106 NR Description: similar to Transcription initiation factor TFIID 30kDa subunit
  misc_feature (1)..(137): NCBI GI NO: 17137648 NR Description: TBP-associated factor 10b CG3069-PA
MMGSNNPGGAGGGGGMAPGTGAGGSDGRHDDEAVLTEFLSSLMDYNPTIPDELVEHYLGRSGFHCPDIRLTRLVAVAAQKFISDIASDSLQHCKARVAAPIKDNKSKQPKDRRLVLTMDDLSKALREHGVNLKHPEYFADSPSAGMPPSTREE

SEQ ID NO: 11557 - protein, 152 aa, Triticum aestivum
  peptide (1)..(152): Ceres Seq. ID no. 13662832
  misc_feature (46)..(95): Pfam Name: Pfam Description:  Transcription initiation factor TFIID 23-30kDa subunit
  misc_feature (20)..(152): NCBI GI NO: 15236059 NR Description: Transcription factor II homolog
  misc_feature (20)..(152): NCBI GI NO: 26450720 NR Description: putative transcription factor II
  misc_feature (1)..(137): NCBI GI NO: 21619259 NR Description: Ilk protein [Mus musculus]
  misc_feature (1)..(137): NCBI GI NO: 26338586 NR Description: unnamed protein product [Mus musculus]
  misc_feature (2)..(137): NCBI GI NO: 9910576 NR Description: TAF10 RNA polymerase II, TATA box binding protein
  misc_feature (2)..(137): NCBI GI NO: 34859827 NR Description: similar to Ilk protein [Rattus norvegicus]
  misc_feature (2)..(137): NCBI GI NO: 2136293 NR Description: transcription factor IID 30k chain - human
  misc_feature (2)..(137): NCBI GI NO: 5454106 NR Description: TBP-related factor 10; TATA box binding protein
  misc_feature (6)..(137): NCBI GI NO: 20863106 NR Description: similar to Transcription initiation factor TFIID 30kDa subunit
  misc_feature (1)..(136): NCBI GI NO: 17137648 NR Description: TBP-associated factor 10b CG3069-PA
MGSNNPGGAGGGGGMAPGTGAGGSDGRHDDEAVLTEFLSSLMDYNPTIPDELVEHYLGRSGFHCPDIRLTRLVAVAAQKFISDIASDSLQHCKARVAAPIKDNKSKQPKDRRLVLTMDDLSKALREHGVNLKHPEYFADSPSAGMPPSTREE

SEQ ID NO: 11558 - protein, 138 aa, Triticum aestivum
  peptide (1)..(138): Ceres Seq. ID no. 13662833
  misc_feature (32)..(81): Pfam Name: Pfam Description:  Transcription initiation factor TFIID 23-30kDa subunit
  misc_feature (6)..(138): NCBI GI NO: 15236059 NR Description: Transcription factor II homolog
  misc_feature (6)..(138): NCBI GI NO: 26450720 NR Description: putative transcription factor II
  misc_feature (1)..(123): NCBI GI NO: 21619259 NR Description: Ilk protein [Mus musculus]
  misc_feature (1)..(123): NCBI GI NO: 26338586 NR Description: unnamed protein product [Mus musculus]
  misc_feature (1)..(123): NCBI GI NO: 9910576 NR Description: TAF10 RNA polymerase II, TATA box binding protein
  misc_feature (1)..(123): NCBI GI NO: 34859827 NR Description: similar to Ilk protein [Rattus norvegicus]
  misc_feature (1)..(123): NCBI GI NO: 2136293 NR Description: transcription factor IID 30k chain - human
  misc_feature (1)..(123): NCBI GI NO: 5454106 NR Description: TBP-related factor 10; TATA box binding protein
  misc_feature (1)..(123): NCBI GI NO: 20863106 NR Description: similar to Transcription initiation factor TFIID 30kDa subunit
  misc_feature (1)..(122): NCBI GI NO: 17137648 NR Description: TBP-associated factor 10b CG3069-PA
MAPGTGAGGSDGRHDDEAVLTEFLSSLMDYNPTIPDELVEHYLGRSGFHCPDIRLTRLVAVAAQKFISDIASDSLQHCKARVAAPIKDNKSKQPKDRRLVLTMDDLSKALREHGVNLKHPEYFADSPSAGMPPSTREE

SEQ ID NO: 11559 - DNA, 749 bp, Triticum aestivum
  misc_feature (1)..(749): Ceres Seq. ID no. 13598157
actcaattcacccacaacatagctagtggaacagtgtcttctaaaaaatggcttcaagctccatagcccttttcttggctctcaacctcctgttcttcacaacaatctccgcatgcggtagctgcactccttgcggaggaggctgcccctctcccaagccgaagccaactcctaaaccaaccccaagccctagctctggcaagggaaagtgccctaaagataccctcaagcttggtgtctgcgccaatgtgctcaatggcctcctcgacttgaccctcggcaagccacctgtcaagccatgctgcagcctcatccaaggactcgctgatgttgaagcagccgtttgtctctgcaccgctcttaaggctaacgttcttggaatcaacttgaacctcccaatctctctaagtcttctcctcaatgtttgcagcaaacaagttcctcctggcttccagtgctaagcaaccgtatcatatgtaatttcaatacacaaatgtgtatatttatcttcttgttttggacagacaaggtggttctatttactcttaatattgtgaccctctatattggtgttcttattatagttttcttgttatggggttcactggagccaaattgtgtctctatctggatgatccttaagattcttcaagttcacagttccattatttcccgttactcttatgttggagtaattattgtattgtgatcctatgaattgataaatcaattatcttttatgttatgcg

SEQ ID NO: 11560 - protein, 137 aa, Triticum aestivum
  peptide (1)..(137): Ceres Seq. ID no. 13598158
  misc_feature (55)..(137): Pfam Name: Pfam Description:  Protease inhibitor/seed storage/LTP family
  misc_feature (1)..(137): NCBI GI NO: 15221201 NR Description: protease inhibitor/seed storage/lipid transfer
  misc_feature (1)..(136): NCBI GI NO: 13561927 NR Description: extensin-like protein [Brassica napus]
  misc_feature (3)..(137): NCBI GI NO: 15221484 NR Description: protease inhibitor/seed storage/lipid transfer
  misc_feature (4)..(137): NCBI GI NO: 629597 NR Description: proline-rich protein - rape
  misc_feature (2)..(137): NCBI GI NO: 7484770 NR Description: extensin like protein - black poplar
  misc_feature (3)..(137): NCBI GI NO: 10798758 NR Description: P-rich protein Nt-SubC29 [Nicotiana tabacum]
  misc_feature (3)..(132): NCBI GI NO: 21360370 NR Description: extensin-like protein [Citrus junos]
  misc_feature (2)..(137): NCBI GI NO: 4454097 NR Description: hybrid proline-rich protein [Catharanthus roseus]
  misc_feature (2)..(137): NCBI GI NO: 481236 NR Description: hypothetical protein - Madagascar periwinkle
  misc_feature (49)..(137): NCBI GI NO: 21693573 NR Description: extensin-like protein [Glycine max]
MASSSIALFLALNLLFFTTISACGSCTPCGGGCPSPKPKPTPKPTPSPSSGKGKCPKDTLKLGVCANVLNGLLDLTLGKPPVKPCCSLIQGLADVEAAVCLCTALKANVLGINLNLPISLSLLLNVCSKQVPPGFQC

SEQ ID NO: 11561 - protein, 71 aa, Triticum aestivum
  peptide (1)..(71): Ceres Seq. ID no. 13598159
MCIFIFLFWTDKVVLFTLNIVTLYIGVLIIVFLLWGSLEPNCVSIWMILKILQVHSSIISRYSYVGVIIVL

SEQ ID NO: 11562 - DNA, 661 bp, Triticum aestivum
  misc_feature (1)..(661): Ceres Seq. ID no. 12624252
aatccattccagccattgcaagtccccgcctccacctcctcactccccacttcaacacatctccagctcctaccagctcaaccacactagtagtggactagtggtatcaacttaccaaggcaggcaagtctccatggacgctcttgagtcctcgccgccgtcgctgcgccacaagctgcggaccaccgtatgcagctgcttcggctcgccgagcagcggcggggagaggccgcacaccggggtcggcaagagcaggtggaggcgacgcgtggcggccgcgggggagttccggtacgacccgctcagctacgcgctcaacttcgacgacggccccagcgacgacagcgacgccgatgcggacgacgccgccttccggcaccgcaacttcagctcgcgcctgccgccgtccccgacgccggcgccatagcctcaactcctgaatcgtgcatggtagcaaacgtccttagcttctgtagattccgtctctctgatttttcttctctctcttctctggccgagaatgaatcgctacttctgtaaaagcagtctatatatatatacggccgaggaaacgtacgtacgtacgtaccgagggaaagcaattaatggcatcatgtacttgtacacatataagaatcagtcagtctatttgaaatgttcc

SEQ ID NO: 11563 - protein, 141 aa, Triticum aestivum
  peptide (1)..(141): Ceres Seq. ID no. 12624253
  misc_feature (50)..(140): NCBI GI NO: 37532890 NR Description: hypothetical protein
  misc_feature (72)..(141): NCBI GI NO: 28564623 NR Description: OSJNBb0075O18.23
IHSSHCKSPPPPPHSPLQHISSSYQLNHTSSGLVVSTYQGRQVSMDALESSPPSLRHKLRTTVCSCFGSPSSGGERPHTGVGKSRWRRRVAAAGEFRYDPLSYALNFDDGPSDDSDADADDAAFRHRNFSSRLPPSPTPAP

SEQ ID NO: 11564 - protein, 116 aa, Triticum aestivum
  peptide (1)..(116): Ceres Seq. ID no. 12624254
MQLLRLAEQRRGEAAHRGRQEQVEATRGGRGGVPVRPAQLRAQLRRRPQRRQRRRCGRRRLPAPQLQLAPAAVPDAGAIASTPESCMVANVLSFCRFRLSDFSSLSSLAENESLLL

SEQ ID NO: 11565 - protein, 97 aa, Triticum aestivum
  peptide (1)..(97): Ceres Seq. ID no. 12624255
  misc_feature (6)..(96): NCBI GI NO: 37532890 NR Description: hypothetical protein
  misc_feature (28)..(97): NCBI GI NO: 28564623 NR Description: OSJNBb0075O18.23
MDALESSPPSLRHKLRTTVCSCFGSPSSGGERPHTGVGKSRWRRRVAAAGEFRYDPLSYALNFDDGPSDDSDADADDAAFRHRNFSSRLPPSPTPAP

SEQ ID NO: 11566 - DNA, 514 bp, Triticum aestivum
  misc_feature (1)..(514): Ceres Seq. ID no. 13598191
taggaaggaagttggcaggcaaccttcgatcgagtctcgatcaacacaagaaccagcaaattagcttcggtttcatagtcgtatactgtcatgtctagccttacgaccattagtggcggcgccatggaggagtcgcaggaagtagaggagctcgtcgacacaaggctgtccctcgtgatcggcgccgcgagccgtccgcccccgacggtcctggcgctgctgccggcggcatcaccggagaacgaagcggcggcacgcgggaagaggaagggagtcaagggaccagagaacggtgcgggcggtgccgctgctgcttcaagggagcatagcaagaggtccaagacggtgcacgacagcagcgacgtcgacgatgacgacagaggggacgcggccggcggcgacgggacgaggaagaagctcatgctcacggtggagcaggccgcgctcttggaggaaagcttccgtgcccacaacgtcctctctcacggcgagaagcacgatcttgcgaggcagc

SEQ ID NO: 11567 - protein, 141 aa, Triticum aestivum
  peptide (1)..(141): Ceres Seq. ID no. 13598192
  misc_feature (38)..(140): NCBI GI NO: 5006859 NR Description: homeodomain leucine zipper protein [Oryza sativa]
  misc_feature (38)..(140): NCBI GI NO: 33943624 NR Description: homeodomain leucine-zipper protein Hox7
  misc_feature (72)..(140): NCBI GI NO: 5006849 NR Description: homeodomain leucine zipper protein [Oryza sativa]
  misc_feature (72)..(140): NCBI GI NO: 28848940 NR Description: homeodomain leucine zipper protein
  misc_feature (36)..(140): NCBI GI NO: 27311238 NR Description: Hypothetical protein
MSSLTTISGGAMEESQEVEELVDTRLSLVIGAASRPPPTVLALLPAASPENEAAARGKRKGVKGPENGAGGAAAASREHSKRSKTVHDSSDVDDDDRGDAAGGDGTRKKLMLTVEQAALLEESFRAHNVLSHGEKHDLARQ

SEQ ID NO: 11568 - protein, 130 aa, Triticum aestivum
  peptide (1)..(130): Ceres Seq. ID no. 13598193
  misc_feature (27)..(129): NCBI GI NO: 5006859 NR Description: homeodomain leucine zipper protein [Oryza sativa]
  misc_feature (27)..(129): NCBI GI NO: 33943624 NR Description: homeodomain leucine-zipper protein Hox7
  misc_feature (61)..(129): NCBI GI NO: 5006849 NR Description: homeodomain leucine zipper protein [Oryza sativa]
  misc_feature (61)..(129): NCBI GI NO: 28848940 NR Description: homeodomain leucine zipper protein
  misc_feature (25)..(129): NCBI GI NO: 27311238 NR Description: Hypothetical protein
MEESQEVEELVDTRLSLVIGAASRPPPTVLALLPAASPENEAAARGKRKGVKGPENGAGGAAAASREHSKRSKTVHDSSDVDDDDRGDAAGGDGTRKKLMLTVEQAALLEESFRAHNVLSHGEKHDLARQ

SEQ ID NO: 11569 - DNA, 736 bp, Triticum aestivum
  misc_feature (1)..(736): Ceres Seq. ID no. 13662050
atcagagctcattctctctctctctctctatctctatctctatctctctctagctccaatgggctttcccgtaggctacacagaggtgtttctccctaagctcttcgtacaaacgctttcgatactcagtttcttcagaaccgtcgtcttctatctcttccgcttcttgggtctctccggcttcctcgaaacggatcaaacctggcccgactacacatcgtacccgacccgaatacccgaactccgctcacctttctccgccctactaatccgcgagatcttaccggttatcaaattcgaagacgtgacgagctccggcgaagaactaccaggaaactgcgccgtttgtctctacgagttcgaaggagaggaagagatccgacggctgagaaactgcagacatatattccaccggagctgtctcgaccgttggatggatcatgatcagaagacgtgtcctctttgtagaacaccgtttgttccagatgagatgcaagaagagtttaatcaacggttatgggctgcttctggtgttcatgacttccacatcgagtagagtcccttgtcgttactttagagaaagctacttttgtctccctccctccttgtgtcttttcttttctttttttactttttaccactgtacttttaattgtgctttttcacccttgctaacattagatttgccacttttatgtgtatatgaatgatatgagcaataaacacaaccaaattt

SEQ ID NO: 11570 - protein, 184 aa, Triticum aestivum
  peptide (1)..(184): Ceres Seq. ID no. 13662051
  misc_feature (113)..(155): Pfam Name: RING finger Pfam Description: Zinc finger, C3HC4 type
  misc_feature (20)..(182): NCBI GI NO: 15233117 NR Description: BRH1 RING finger protein [Arabidopsis thaliana]
  misc_feature (20)..(176): NCBI GI NO: 15222553 NR Description: RING-H2 finger protein, putative
  misc_feature (20)..(176): NCBI GI NO: 21554155 NR Description: RING zinc finger protein-like
  misc_feature (20)..(176): NCBI GI NO: 15238072 NR Description: RING-H2 zinc finger protein, putative
  misc_feature (77)..(184): NCBI GI NO: 32488512 NR Description: OSJNBa0011J08.19
  misc_feature (20)..(176): NCBI GI NO: 11358777 NR Description: RING-H2 finger protein RHA1b
  misc_feature (20)..(176): NCBI GI NO: 15233350 NR Description: RING-H2 finger protein RHA1b
  misc_feature (20)..(175): NCBI GI NO: 11358776 NR Description: RING-H2 finger protein RHA1a
  misc_feature (20)..(175): NCBI GI NO: 15233352 NR Description: RING-H2 finger protein, putative
  misc_feature (92)..(162): NCBI GI NO: 18411282 NR Description: zinc finger
SELILSLSLYLYLYLSLAPMGFPVGYTEVFLPKLFVQTLSILSFFRTVVFYLFRFLGLSGFLETDQTWPDYTSYPTRIPELRSPFSALLIREILPVIKFEDVTSSGEELPGNCAVCLYEFEGEEEIRRLRNCRHIFHRSCLDRWMDHDQKTCPLCRTPFVPDEMQEEFNQRLWAASGVHDFHIE

SEQ ID NO: 11571 - protein, 165 aa, Triticum aestivum
  peptide (1)..(165): Ceres Seq. ID no. 13662052
  misc_feature (94)..(136): Pfam Name: RING finger Pfam Description: Zinc finger, C3HC4 type
  misc_feature (1)..(163): NCBI GI NO: 15233117 NR Description: BRH1 RING finger protein [Arabidopsis thaliana]
  misc_feature (1)..(157): NCBI GI NO: 15222553 NR Description: RING-H2 finger protein, putative
  misc_feature (1)..(157): NCBI GI NO: 21554155 NR Description: RING zinc finger protein-like
  misc_feature (1)..(157): NCBI GI NO: 15238072 NR Description: RING-H2 zinc finger protein, putative
  misc_feature (58)..(165): NCBI GI NO: 32488512 NR Description: OSJNBa0011J08.19
  misc_feature (1)..(157): NCBI GI NO: 11358777 NR Description: RING-H2 finger protein RHA1b
  misc_feature (1)..(157): NCBI GI NO: 15233350 NR Description: RING-H2 finger protein RHA1b
  misc_feature (1)..(156): NCBI GI NO: 11358776 NR Description: RING-H2 finger protein RHA1a
  misc_feature (1)..(156): NCBI GI NO: 15233352 NR Description: RING-H2 finger protein, putative
  misc_feature (73)..(143): NCBI GI NO: 18411282 NR Description: zinc finger
MGFPVGYTEVFLPKLFVQTLSILSFFRTVVFYLFRFLGLSGFLETDQTWPDYTSYPTRIPELRSPFSALLIREILPVIKFEDVTSSGEELPGNCAVCLYEFEGEEEIRRLRNCRHIFHRSCLDRWMDHDQKTCPLCRTPFVPDEMQEEFNQRLWAASGVHDFHIE

SEQ ID NO: 11572 - DNA, 821 bp, Triticum aestivum
  misc_feature (1)..(821): Ceres Seq. ID no. 13661243
acaacccacgagctgtctgtcatccaaagcccaaagctacagacaacacttcaactcgcagtctggttcaggaaagagcagtagtaagatggagttccaagggcagcacgacaaccccgccaaccgcgtcgacgagtacggcaacccgttcccgctcggcggcgtcggaggagcgcacgccgctcccggcaccggcgggcagttccaggcccgcagggaggagcacaagaccggtgggatactgcatcggtccggcagctccagctccagctcgtcttcggaggacgacggcatgggcgggaggaagaagaagggaatgaaggagaagatcaaggagaagctccccggcggccacaaggacaaccagcagcacatggcgacggggacagggactggaggagcctacgggccgggaactggaactggtgcagcctacgggcagcaaggccacacaggaatggccggcgccggcactggcaccggcgagaagaagggaatcatggacaagatcaaggagaagctgtcgggacagcactgagccgccggctccggctggctgcttcctctgcatagctacgtgtcaaagccttccagttccacgtgatctttgttcaataataagatgaagctgaacgaaaagttgtctcttatcgcatccgtgtcagggacacttctctgcataaagcatgcgttgtgtttgttatgtttatgttgaaaaaaaattagtgtacgactatccctaaaaaaaatccctcaaaaaaaaaatagtgtacgactaaacttgtttctctctaaaggaaatcaggctctcctttctgttc

SEQ ID NO: 11573 - protein, 178 aa, Triticum aestivum
  peptide (1)..(178): Ceres Seq. ID no. 13661244
  misc_feature (40)..(178): Pfam Name: Pfam Description:  Dehydrin
  misc_feature (30)..(178): NCBI GI NO: 1181296 NR Description: dehydrin [Triticum turgidum subsp. durum]
  misc_feature (30)..(178): NCBI GI NO: 4105117 NR Description: dehydrin 9 [Hordeum vulgare]
  misc_feature (30)..(178): NCBI GI NO: 231983 NR Description: DEHYDRIN RAB 15
  misc_feature (30)..(178): NCBI GI NO: 1169279 NR Description: WATER-STRESS INDUCIBLE PROTEIN RAB21
  misc_feature (30)..(178): NCBI GI NO: 2970213 NR Description: dehydrin-/LEA group 2-like protein
  misc_feature (35)..(178): NCBI GI NO: 118487 NR Description: DEHYDRIN DHN3 (B17)
  misc_feature (35)..(178): NCBI GI NO: 4105107 NR Description: dehydrin 3 [Hordeum vulgare]
  misc_feature (35)..(178): NCBI GI NO: 6017932 NR Description: dehydrin; DHN3 [Hordeum vulgare]
  misc_feature (35)..(178): NCBI GI NO: 82684 NR Description: dehydrin 3 - maize
  misc_feature (53)..(178): NCBI GI NO: 118484 NR Description: DEHYDRIN DHN1 (M3) (RAB-17 PROTEIN)
QPTSCLSSKAQSYRQHFNSQSGSGKSSSKMEFQGQHDNPANRVDEYGNPFPLGGVGGAHAAPGTGGQFQARREEHKTGGILHRSGSSSSSSSSEDDGMGGRKKKGMKEKIKEKLPGGHKDNQQHMATGTGTGGAYGPGTGTGAAYGQQGHTGMAGAGTGTGEKKGIMDKIKEKLSGQH

SEQ ID NO: 11574 - protein, 149 aa, Triticum aestivum
  peptide (1)..(149): Ceres Seq. ID no. 13661245
  misc_feature (11)..(149): Pfam Name: Pfam Description:  Dehydrin
  misc_feature (1)..(149): NCBI GI NO: 1181296 NR Description: dehydrin [Triticum turgidum subsp. durum]
  misc_feature (1)..(149): NCBI GI NO: 4105117 NR Description: dehydrin 9 [Hordeum vulgare]
  misc_feature (1)..(149): NCBI GI NO: 231983 NR Description: DEHYDRIN RAB 15
  misc_feature (1)..(149): NCBI GI NO: 1169279 NR Description: WATER-STRESS INDUCIBLE PROTEIN RAB21
  misc_feature (1)..(149): NCBI GI NO: 2970213 NR Description: dehydrin-/LEA group 2-like protein
  misc_feature (6)..(149): NCBI GI NO: 118487 NR Description: DEHYDRIN DHN3 (B17)
  misc_feature (6)..(149): NCBI GI NO: 4105107 NR Description: dehydrin 3 [Hordeum vulgare]
  misc_feature (6)..(149): NCBI GI NO: 6017932 NR Description: dehydrin; DHN3 [Hordeum vulgare]
  misc_feature (6)..(149): NCBI GI NO: 82684 NR Description: dehydrin 3 - maize
  misc_feature (24)..(149): NCBI GI NO: 118484 NR Description: DEHYDRIN DHN1 (M3) (RAB-17 PROTEIN)
MEFQGQHDNPANRVDEYGNPFPLGGVGGAHAAPGTGGQFQARREEHKTGGILHRSGSSSSSSSSEDDGMGGRKKKGMKEKIKEKLPGGHKDNQQHMATGTGTGGAYGPGTGTGAAYGQQGHTGMAGAGTGTGEKKGIMDKIKEKLSGQH

SEQ ID NO: 11575 - protein, 105 aa, Triticum aestivum
  peptide (1)..(105): Ceres Seq. ID no. 13661246
NPRAVCHPKPKATDNTSTRSLVQERAVVRWSSKGSTTTPPTASTSTATRSRSAASEERTPLPAPAGSSRPAGRSTRPVGYCIGPAAPAPARLRRTTAWAGGRRRE

SEQ ID NO: 11576 - DNA, 936 bp, Triticum aestivum
  misc_feature (1)..(936): Ceres Seq. ID no. 12624280
atcagaatgagaagataaacggatccgatctaggtcgtctcttcttcttcttcttcttcttcttcgatatctatctccatcgtggatcgaagagctaaggtggaacatggacaaaggcaaagcagtgatgggtgctggccggagatgggccgtcgatttctccgatcaatctaccgttccatcttcccgcgacatcctcgatccgcctggcttctctcgtgctcctcccgaacaggatgattcagcaacgagccgccaaaagaaagacgctgaagctaattggaaacttcagaaagcatgggaagtagcgcagtcaccgtttaagaatctgatgatgatggggttcatgatgtggatggctgggaacactgttcacctctttagcattgggatcactttctctgctctttggcagcctctcagcgccctccagagtgttggcaagatttttgagccattcaaggataacaaggtggagctacttatgcccaaactagtgtttcttgcactaaaccttggagggctagctctgggtatctggaagctcaacactttggggcttcttccaacacatgcatcagattgggtttcatccttaccccctcctcaggaggttgaacactctggaggaggatatgttttccactgacaagcaagtctctctctctctctctctgtcttgtactttaaataatcagccaaaactggaagatgatgaagacattttttgtgagataacagccagagaaacttaaaccgccatgagggggaaagattcatatgaaccttctcatcttgtgatcttcatgtagcatttccaaaactcagaaaccatatagctttttcactttttcaagtatcatgttcattgttcatcattactacgaactgcattattatcaccaaagggacctattctcccagctttttgtttct

SEQ ID NO: 11577 - protein, 180 aa, Triticum aestivum
  peptide (1)..(180): Ceres Seq. ID no. 12624281
  misc_feature (1)..(180): NCBI GI NO: 18416375 NR Description: putative protein; protein id: At5g10780
  misc_feature (1)..(168): NCBI GI NO: 11358300 NR Description: hypothetical protein T30N20_50 - Arabidopsisthaliana
  misc_feature (3)..(176): NCBI GI NO: 7705997 NR Description: hypothetical protein LOC51234 [Homo sapiens]
  misc_feature (3)..(176): NCBI GI NO: 12834476 NR Description: unnamed protein product [Mus musculus]
  misc_feature (3)..(176): NCBI GI NO: 13386014 NR Description: RIKEN cDNA 2610318K02 [Mus musculus]
  misc_feature (7)..(176): NCBI GI NO: 37590930 NR Description: Unknown (protein for MGC:75691)
  misc_feature (13)..(173): NCBI GI NO: 39588364 NR Description: Hypothetical protein CBG19952
  misc_feature (12)..(175): NCBI GI NO: 28829924 NR Description: similar to ZK616.6.p
  misc_feature (14)..(173): NCBI GI NO: 17544614 NR Description: Putative protein of eukaryotic origin
  misc_feature (1)..(162): NCBI GI NO: 19075667 NR Description: hypothetical protein [Schizosaccharomyces pombe]
MDKGKAVMGAGRRWAVDFSDQSTVPSSRDILDPPGFSRAPPEQDDSATSRQKKDAEANWKLQKAWEVAQSPFKNLMMMGFMMWMAGNTVHLFSIGITFSALWQPLSALQSVGKIFEPFKDNKVELLMPKLVFLALNLGGLALGIWKLNTLGLLPTHASDWVSSLPPPQEVEHSGGGYVFH

SEQ ID NO: 11578 - protein, 173 aa, Triticum aestivum
  peptide (1)..(173): Ceres Seq. ID no. 12624282
  misc_feature (1)..(173): NCBI GI NO: 18416375 NR Description: putative protein; protein id: At5g10780
  misc_feature (1)..(161): NCBI GI NO: 11358300 NR Description: hypothetical protein T30N20_50 - Arabidopsisthaliana
  misc_feature (1)..(169): NCBI GI NO: 7705997 NR Description: hypothetical protein LOC51234 [Homo sapiens]
  misc_feature (1)..(169): NCBI GI NO: 12834476 NR Description: unnamed protein product [Mus musculus]
  misc_feature (1)..(169): NCBI GI NO: 13386014 NR Description: RIKEN cDNA 2610318K02 [Mus musculus]
  misc_feature (1)..(169): NCBI GI NO: 37590930 NR Description: Unknown (protein for MGC:75691)
  misc_feature (6)..(166): NCBI GI NO: 39588364 NR Description: Hypothetical protein CBG19952
  misc_feature (5)..(168): NCBI GI NO: 28829924 NR Description: similar to ZK616.6.p
  misc_feature (7)..(166): NCBI GI NO: 17544614 NR Description: Putative protein of eukaryotic origin
  misc_feature (1)..(155): NCBI GI NO: 19075667 NR Description: hypothetical protein [Schizosaccharomyces pombe]
MGAGRRWAVDFSDQSTVPSSRDILDPPGFSRAPPEQDDSATSRQKKDAEANWKLQKAWEVAQSPFKNLMMMGFMMWMAGNTVHLFSIGITFSALWQPLSALQSVGKIFEPFKDNKVELLMPKLVFLALNLGGLALGIWKLNTLGLLPTHASDWVSSLPPPQEVEHSGGGYVFH

SEQ ID NO: 11579 - protein, 105 aa, Triticum aestivum
  peptide (1)..(105): Ceres Seq. ID no. 12624283
  misc_feature (1)..(105): NCBI GI NO: 18416375 NR Description: putative protein; protein id: At5g10780
  misc_feature (1)..(93): NCBI GI NO: 11358300 NR Description: hypothetical protein T30N20_50 - Arabidopsisthaliana
  misc_feature (1)..(101): NCBI GI NO: 7705997 NR Description: hypothetical protein LOC51234 [Homo sapiens]
  misc_feature (1)..(101): NCBI GI NO: 13386014 NR Description: RIKEN cDNA 2610318K02 [Mus musculus]
  misc_feature (1)..(101): NCBI GI NO: 12834476 NR Description: unnamed protein product [Mus musculus]
  misc_feature (1)..(101): NCBI GI NO: 37590930 NR Description: Unknown (protein for MGC:75691)
  misc_feature (1)..(98): NCBI GI NO: 39588364 NR Description: Hypothetical protein CBG19952
  misc_feature (1)..(100): NCBI GI NO: 28829924 NR Description: similar to ZK616.6.p
  misc_feature (1)..(98): NCBI GI NO: 17544614 NR Description: Putative protein of eukaryotic origin
  misc_feature (1)..(87): NCBI GI NO: 19075667 NR Description: hypothetical protein [Schizosaccharomyces pombe]
MMMGFMMWMAGNTVHLFSIGITFSALWQPLSALQSVGKIFEPFKDNKVELLMPKLVFLALNLGGLALGIWKLNTLGLLPTHASDWVSSLPPPQEVEHSGGGYVFH

SEQ ID NO: 11580 - DNA, 838 bp, Triticum aestivum
  misc_feature (1)..(838): Ceres Seq. ID no. 13598227
gcataccccgaaggatcattgttcgctgacgccgcctcctttggtccttcctctcctcccgtcccctcccctccgccgcgatcgatcccaagagcacgaaaccctagccctagcccaacccatcttctccatggccaacagcaacctcccccgccgcatcatcaaggagacgcagcggctgctcagcgaaccagctcctgggatcagtgcttcaccatcagaggagaacatgcgctacttcaatgtcatgatccttggcccaactcagtcgccatatgaaggaggagtattcaaacttgagttgtttttacctgaagaatatccaatggctccgccaaaggttcgctttctcacaaaaatttaccatccaaacattgacaagcttgggaggatatgccttgatatcttaaaggacaagtggagtcctgcccttcagatccgaacagttcttttgagcattcaagcactcctcagcgctccaaatcctgacgatccgcttgctgacaatgtggcaaagcactggaaggccaacgaaacagaagctgtggaaacagccaaagagtggacccgtgtctacgctaatgatgcatgagctctgcatgctatgactgattgctcagtagtcttggcaaggtgaggcgaaatcgactatcaagtggtttaaaatggaggtccaactgatgaactagtgaaatgtgaagtttcctccttgcatcgcgtgtactgagtgtgatgtatattattaccctagttgggatgcgacggacccatgtgcatgtatattttgtttgagtgttgtaccgtaataaacatcctgaagtcatgtgtgccttttctg

SEQ ID NO: 11581 - protein, 196 aa, Triticum aestivum
  peptide (1)..(196): Ceres Seq. ID no. 13598228
  misc_feature (44)..(196): NCBI GI NO: 34911052 NR Description: ubiquitin-conjugating enzyme E2
  misc_feature (44)..(196): NCBI GI NO: 18394416 NR Description: ubiquitin-conjugating enzyme, putative
  misc_feature (44)..(196): NCBI GI NO: 18412149 NR Description: ubiquitin-conjugating enzyme, putative
  misc_feature (44)..(196): NCBI GI NO: 5381319 NR Description: ubiquitin-conjugating enzyme E2
  misc_feature (44)..(184): NCBI GI NO: 25293666 NR Description: hypothetical protein F9K20.8
  misc_feature (47)..(193): NCBI GI NO: 16758810 NR Description: ubiquitin-conjugating enzyme E2N
  misc_feature (47)..(193): NCBI GI NO: 4507793 NR Description: ubiquitin-conjugating enzyme E2N
  misc_feature (47)..(193): NCBI GI NO: 28174992 NR Description: similar to ubiquitin-conjugating enzyme E2N
  misc_feature (47)..(193): NCBI GI NO: 30583959 NR Description: Homo sapiens ubiquitin-conjugating enzyme E2N
  misc_feature (47)..(195): NCBI GI NO: 27882519 NR Description: Similar to ubiquitin-conjugating enzyme E2N
HTPKDHCSLTPPPLVLPLLPSPPLRRDRSQEHETLALAQPIFSMANSNLPRRIIKETQRLLSEPAPGISASPSEENMRYFNVMILGPTQSPYEGGVFKLELFLPEEYPMAPPKVRFLTKIYHPNIDKLGRICLDILKDKWSPALQIRTVLLSIQALLSAPNPDDPLADNVAKHWKANETEAVETAKEWTRVYANDA

SEQ ID NO: 11582 - protein, 153 aa, Triticum aestivum
  peptide (1)..(153): Ceres Seq. ID no. 13598229
  misc_feature (1)..(153): NCBI GI NO: 34911052 NR Description: ubiquitin-conjugating enzyme E2
  misc_feature (1)..(153): NCBI GI NO: 18394416 NR Description: ubiquitin-conjugating enzyme, putative
  misc_feature (1)..(153): NCBI GI NO: 18412149 NR Description: ubiquitin-conjugating enzyme, putative
  misc_feature (1)..(153): NCBI GI NO: 5381319 NR Description: ubiquitin-conjugating enzyme E2
  misc_feature (1)..(141): NCBI GI NO: 25293666 NR Description: hypothetical protein F9K20.8
  misc_feature (4)..(150): NCBI GI NO: 16758810 NR Description: ubiquitin-conjugating enzyme E2N
  misc_feature (4)..(150): NCBI GI NO: 4507793 NR Description: ubiquitin-conjugating enzyme E2N
  misc_feature (4)..(150): NCBI GI NO: 28174992 NR Description: similar to ubiquitin-conjugating enzyme E2N
  misc_feature (4)..(150): NCBI GI NO: 30583959 NR Description: Homo sapiens ubiquitin-conjugating enzyme E2N
  misc_feature (4)..(152): NCBI GI NO: 27882519 NR Description: Similar to ubiquitin-conjugating enzyme E2N
MANSNLPRRIIKETQRLLSEPAPGISASPSEENMRYFNVMILGPTQSPYEGGVFKLELFLPEEYPMAPPKVRFLTKIYHPNIDKLGRICLDILKDKWSPALQIRTVLLSIQALLSAPNPDDPLADNVAKHWKANETEAVETAKEWTRVYANDA

SEQ ID NO: 11583 - protein, 120 aa, Triticum aestivum
  peptide (1)..(120): Ceres Seq. ID no. 13598230
  misc_feature (1)..(120): NCBI GI NO: 34911052 NR Description: ubiquitin-conjugating enzyme E2
  misc_feature (1)..(120): NCBI GI NO: 18394416 NR Description: ubiquitin-conjugating enzyme, putative
  misc_feature (1)..(120): NCBI GI NO: 18412149 NR Description: ubiquitin-conjugating enzyme, putative
  misc_feature (1)..(120): NCBI GI NO: 5381319 NR Description: ubiquitin-conjugating enzyme E2
  misc_feature (1)..(108): NCBI GI NO: 25293666 NR Description: hypothetical protein F9K20.8
  misc_feature (1)..(117): NCBI GI NO: 16758810 NR Description: ubiquitin-conjugating enzyme E2N
  misc_feature (1)..(117): NCBI GI NO: 4507793 NR Description: ubiquitin-conjugating enzyme E2N
  misc_feature (1)..(117): NCBI GI NO: 28174992 NR Description: similar to ubiquitin-conjugating enzyme E2N
  misc_feature (1)..(117): NCBI GI NO: 30583959 NR Description: Homo sapiens ubiquitin-conjugating enzyme E2N
  misc_feature (1)..(119): NCBI GI NO: 27882519 NR Description: Similar to ubiquitin-conjugating enzyme E2N
MRYFNVMILGPTQSPYEGGVFKLELFLPEEYPMAPPKVRFLTKIYHPNIDKLGRICLDILKDKWSPALQIRTVLLSIQALLSAPNPDDPLADNVAKHWKANETEAVETAKEWTRVYANDA

SEQ ID NO: 11584 - DNA, 669 bp, Triticum aestivum
  misc_feature (1)..(669): Ceres Seq. ID no. 12624284
actacctactcctaacaaacaacaatgagcttcttcatcgaagattctggtctcatcgtcacacaacttctctaccaaatggcggtcttaatcaccctcttgagatggatctttacttggatcttacgctaccgatccagatctacctcctcctcttcttcatctactcctccgatctcgtcacaaaccatcaaagagagcctcgccgtgacgacgttccgtgacgccgcggatcggtctccggaactgatcagcgacacttgcgcggtgtgtcttggagatctggaagacggagacgaggtgagagagctcagaaactgtagccacgtgttccaccgagagtgtatcgacaggtggctggactacgagtgctgcggcggagatgataacgacggcgaggaagataaccaccgcacgtgtcctctttgtagaactccgcttcttgctgctaatacgtcgtcgtgtgcggattggccggttaagaacgaacctagctgggccgttgagcggcttctctacctcttcggagatgatcttcttgtctgactttttattttatttttctttcgatatttatttgattttagtggagattgaaattagttggtcaagttttgtaaattgggaatttaaagggtagaatagcatatataataatatatcaatttt

SEQ ID NO: 11585 - protein, 173 aa, Triticum aestivum
  peptide (1)..(173): Ceres Seq. ID no. 12624285
  misc_feature (80)..(135): Pfam Name: RING finger Pfam Description: Zinc finger, C3HC4 type
  misc_feature (1)..(173): NCBI GI NO: 18420336 NR Description: putative protein; protein id: At5g20885
  misc_feature (1)..(172): NCBI GI NO: 15229284 NR Description: putative protein; protein id: At3g43430
  misc_feature (31)..(140): NCBI GI NO: 15233117 NR Description: RING finger protein; protein id: At3g61460
  misc_feature (10)..(144): NCBI GI NO: 23451086 NR Description: RING-H2 protein [Medicago sativa]
  misc_feature (39)..(140): NCBI GI NO: 18411282 NR Description: similar to RING finger protein
  misc_feature (50)..(141): NCBI GI NO: 15238072 NR Description: RING zinc finger protein-like
  misc_feature (50)..(141): NCBI GI NO: 21554155 NR Description: RING zinc finger protein-like
  misc_feature (48)..(140): NCBI GI NO: 15222553 NR Description: putative RING zinc finger protein
  misc_feature (41)..(150): NCBI GI NO: 15233350 NR Description: RING-H2 finger protein RHA1b; protein id:At4g11360
  misc_feature (10)..(149): NCBI GI NO: 22324426 NR Description: hypothetical protein~predicted by FGENESH etc.
MSFFIEDSGLIVTQLLYQMAVLITLLRWIFTWILRYRSRSTSSSSSSTPPISSQTIKESLAVTTFRDAADRSPELISDTCAVCLGDLEDGDEVRELRNCSHVFHRECIDRWLDYECCGGDDNDGEEDNHRTCPLCRTPLLAANTSSCADWPVKNEPSWAVERLLYLFGDDLLV

SEQ ID NO: 11586 - protein, 155 aa, Triticum aestivum
  peptide (1)..(155): Ceres Seq. ID no. 12624286
  misc_feature (62)..(117): Pfam Name: RING finger Pfam Description: Zinc finger, C3HC4 type
  misc_feature (1)..(155): NCBI GI NO: 18420336 NR Description: putative protein; protein id: At5g20885
  misc_feature (1)..(154): NCBI GI NO: 15229284 NR Description: putative protein; protein id: At3g43430
  misc_feature (13)..(122): NCBI GI NO: 15233117 NR Description: RING finger protein; protein id: At3g61460
  misc_feature (1)..(126): NCBI GI NO: 23451086 NR Description: RING-H2 protein [Medicago sativa]
  misc_feature (21)..(122): NCBI GI NO: 18411282 NR Description: similar to RING finger protein
  misc_feature (32)..(123): NCBI GI NO: 15238072 NR Description: RING zinc finger protein-like
  misc_feature (32)..(123): NCBI GI NO: 21554155 NR Description: RING zinc finger protein-like
  misc_feature (30)..(122): NCBI GI NO: 15222553 NR Description: putative RING zinc finger protein
  misc_feature (23)..(132): NCBI GI NO: 15233350 NR Description: RING-H2 finger protein RHA1b; protein id:At4g11360
  misc_feature (1)..(131): NCBI GI NO: 22324426 NR Description: hypothetical protein~predicted by FGENESH etc.
MAVLITLLRWIFTWILRYRSRSTSSSSSSTPPISSQTIKESLAVTTFRDAADRSPELISDTCAVCLGDLEDGDEVRELRNCSHVFHRECIDRWLDYECCGGDDNDGEEDNHRTCPLCRTPLLAANTSSCADWPVKNEPSWAVERLLYLFGDDLLV

SEQ ID NO: 11587 - DNA, 902 bp, Triticum aestivum
  misc_feature (1)..(902): Ceres Seq. ID no. 13661642
aacaaaaaacactttaaaatccaaaaagaaagaaagagaaattaaacatcttatccaaaatcaagactctgttttcgtttcattcgatggatccattttacacttctttttcagattccttcctctcgatccccgaccacaggtctcctgtttctgacagtagtgagtgttctccaaagctagcttcgagctgtccgaagaaactagcagggagaaagaagtttcgtgagacacgtcatccgatttacagaggagttcgtcagagaaactcagggaaatgggtttgtgaagttagggagcctaataagaagtcgaggatttggttagggacttttccgacagtcgaaatggccgctcgtgctcacgacgtcgccgctttagcccttcgtggccgctccgcttgtcttaatttcgccgactcggcttggcgtctacggattcctgagtctacttgtcctaaagaaattcagagagctgcggctgaagctgcaatggcgtttcagaacaagacggctacgactgagacgactatggttgaggcagtgaaaccggcagaggagacggttgggcaaacgggtggggagaccatggaagagaacggtgtgttttatatggccgaagaagcggttttggggatgccaaggtttcttgagaatatgggggaggagatgctcttgccgccgccggaacttggatggaatcataacgacttggccggagatgctgacgtgtcactctggagtttttagaatttgaatcttctcttattattcagattttgtaagattttttgaatttctaggattggtcaaaagttcaactacctactttttattggtagactggtagtacgatacggaaagagaatggagatatacaaatctaataaattctatattact

SEQ ID NO: 11588 - protein, 220 aa, Triticum aestivum
  peptide (1)..(220): Ceres Seq. ID no. 13661643
  misc_feature (51)..(115): Pfam Name: Pfam Description:  AP2 domain
  misc_feature (1)..(220): NCBI GI NO: 15242244 NR Description: C-repeat/DRE binding protein, putative
  misc_feature (5)..(220): NCBI GI NO: 18416557 NR Description: DRE binding protein (DREB1C)
  misc_feature (6)..(220): NCBI GI NO: 4091984 NR Description: CRT/DRE binding factor 2 [Arabidopsis thaliana]
  misc_feature (5)..(220): NCBI GI NO: 1899058 NR Description: transcriptional activator CBF1
  misc_feature (5)..(220): NCBI GI NO: 18416562 NR Description: C-repeat/DRE binding factor 1 (CBF1) (DREB1B)
  misc_feature (6)..(220): NCBI GI NO: 5616086 NR Description: dehydration responsive element binding protein
  misc_feature (1)..(220): NCBI GI NO: 38683266 NR Description: Cbcbf [Capsella bursa-pastoris]
  misc_feature (6)..(220): NCBI GI NO: 20303013 NR Description: CBF-like protein CBF7 [Brassica napus]
  misc_feature (5)..(220): NCBI GI NO: 39983638 NR Description: CBF25 [Capsella bursa-pastoris]
  misc_feature (5)..(220): NCBI GI NO: 38426954 NR Description: DREB2-19 [Brassica napus]
MDPFYTSFSDSFLSIPDHRSPVSDSSECSPKLASSCPKKLAGRKKFRETRHPIYRGVRQRNSGKWVCEVREPNKKSRIWLGTFPTVEMAARAHDVAALALRGRSACLNFADSAWRLRIPESTCPKEIQRAAAEAAMAFQNKTATTETTMVEAVKPAEETVGQTGGETMEENGVFYMAEEAVLGMPRFLENMGEEMLLPPPELGWNHNDLAGDADVSLWSF

SEQ ID NO: 11589 - protein, 133 aa, Triticum aestivum
  peptide (1)..(133): Ceres Seq. ID no. 13661644
  misc_feature (1)..(133): NCBI GI NO: 15242244 NR Description: C-repeat/DRE binding protein, putative
  misc_feature (1)..(133): NCBI GI NO: 18416557 NR Description: DRE binding protein (DREB1C)
  misc_feature (1)..(133): NCBI GI NO: 4091984 NR Description: CRT/DRE binding factor 2 [Arabidopsis thaliana]
  misc_feature (1)..(133): NCBI GI NO: 1899058 NR Description: transcriptional activator CBF1
  misc_feature (1)..(133): NCBI GI NO: 18416562 NR Description: C-repeat/DRE binding factor 1 (CBF1) (DREB1B)
  misc_feature (1)..(133): NCBI GI NO: 5616086 NR Description: dehydration responsive element binding protein
  misc_feature (1)..(133): NCBI GI NO: 38683266 NR Description: Cbcbf [Capsella bursa-pastoris]
  misc_feature (1)..(133): NCBI GI NO: 20303013 NR Description: CBF-like protein CBF7 [Brassica napus]
  misc_feature (1)..(133): NCBI GI NO: 39983638 NR Description: CBF25 [Capsella bursa-pastoris]
  misc_feature (1)..(133): NCBI GI NO: 38426954 NR Description: DREB2-19 [Brassica napus]
MAARAHDVAALALRGRSACLNFADSAWRLRIPESTCPKEIQRAAAEAAMAFQNKTATTETTMVEAVKPAEETVGQTGGETMEENGVFYMAEEAVLGMPRFLENMGEEMLLPPPELGWNHNDLAGDADVSLWSF

SEQ ID NO: 11590 - DNA, 690 bp, Triticum aestivum
  misc_feature (1)..(690): Ceres Seq. ID no. 12627433
cttcaactccatcggtaattacctaatctaagcgtattgcatcagtttttttcacatgttatgattgtattgttcttgttgaaacagagagacagggttgaaggaagtgtttgggatcttcagcaaacagacagatctgattggtcaacaggaagctcggatccaaactcatggcaaccttttagtgatgaaccaaaacctgtgttggaaactccatcaaagtctgtgagaaccaaaagcaaaccagcttcgtcagctcctgctccagcaagccaaggttttgagccatgggggttcgagacagagtccttcagagctgctgcaacgtcttcagcgtctgcaacaccaaaatctgtaagttctggcaacagttcacagagatttgggaacacaaagatgagagataaccagaaagctgctcaacctgctggatgggctggcttctaaaaagctttcactctatctcaatgcttattgctattcctcgtattacagaatcttgaatctttttgtagatgaatgaccatcctctgtttttgtgttgctctctatatatatccactgtttctgtagattgtttaaaatttacagatttgtttttttttttttttggcggaatgtataacgtatttctgaaaatgatcaaacgattgatcatattaccttactggaaaaaaaaatatatttaag

SEQ ID NO: 11591 - protein, 128 aa, Triticum aestivum
  peptide (1)..(128): Ceres Seq. ID no. 12627434
  misc_feature (1)..(128): NCBI GI NO: 7487297 NR Description: probable serine/threonine protein kinase
  misc_feature (10)..(128): NCBI GI NO: 30685467 NR Description: protein kinase family [Arabidopsis thaliana]
  misc_feature (10)..(128): NCBI GI NO: 18176324 NR Description: putative serine/threonine protein kinase
  misc_feature (10)..(128): NCBI GI NO: 18403106 NR Description: putative serine threonine protein kinase
MIVLFLLKQRDRVEGSVWDLQQTDRSDWSTGSSDPNSWQPFSDEPKPVLETPSKSVRTKSKPASSAPAPASQGFEPWGFETESFRAAATSSASATPKSVSSGNSSQRFGNTKMRDNQKAAQPAGWAGF

SEQ ID NO: 11592 - DNA, 992 bp, Triticum aestivum
  misc_feature (1)..(992): Ceres Seq. ID no. 13664279
attattctctttgcattttgtgttcgttgacccgataacaaaaaaggcatcgaagatgaacgttagggttttgtttctggctctccttctccttgcatcgccgctgcttcaagttgctagatgtcaagtagatgccgaggatcattccagtatcgttgacgatgttgtgggagaacacagcgattctggtgctgaggaggatgatcaggatttggataatatcaacttgacctctgctccaggggttgagactgtctctgttttccccaaaaacagtgccaaagtggttccagctggagaagagactgagctccttgttgctctcaagaacgatggcaaatctagcgtaggtgtgatggggattagggccagcgtccatcttccttatgatcacaagctgttggttcagaatctcaccatgatgaggtacaacaatgcgtccatcccaacttctgttcaagcaacattcccttacatctttgcagtcagccagtacctgcagcctggagcgtttgatctggtgggttatattatctacgacgtggaggggaagccataccagagcgtcttctacaatggaaccatcgaggtagttgaatctggaggtcttctcagcggtgagtctgtcttccttataacacttggagttgctctcctcctcctcctcggtctatgggcatacagccaagtccagcgtctcactaagaaaaccaaaaaggtgtcaaaggtggaagtaggaaccaggtctaccgacgcatcgctggacgagtggctcgagggaactcatttggccaagacattgtctgggaaatcaaaaagcaagaagaactaagaaagaacgcagtgtttagagactcgacttttagcgttttgagagagtttacaagttttaaagttgagtcttgaggaactttagggtttataaacgttactttccttttttttgttcatgcatttgtactttttagacaatcttatcactctttcttgtc

SEQ ID NO: 11593 - protein, 276 aa, Triticum aestivum
  peptide (1)..(276): Ceres Seq. ID no. 13664280
  misc_feature (19)..(276): NCBI GI NO: 21555380 NR Description: putative signal sequence receptor, alpha subunit
  misc_feature (19)..(276): NCBI GI NO: 18399609 NR Description: signal sequence receptor, alpha subunit
  misc_feature (19)..(276): NCBI GI NO: 25335776 NR Description: hypothetical protein At2g21160
  misc_feature (23)..(276): NCBI GI NO: 547391 NR Description: alpha-subunit; putative
  misc_feature (143)..(275): NCBI GI NO: 15227250 NR Description: TRAP protein -related [Arabidopsis thaliana]
  misc_feature (23)..(258): NCBI GI NO: 4507237 NR Description: signal sequence receptor, alpha; TRAP alpha
  misc_feature (43)..(275): NCBI GI NO: 1174450 NR Description: TRANSLOCON-ASSOCIATED PROTEIN
  misc_feature (23)..(274): NCBI GI NO: 18921153 NR Description: CG32701-PA [Drosophila melanogaster]
  misc_feature (41)..(258): NCBI GI NO: 17510497 NR Description: Translocon-associated protein
LFSLHFVFVDPITKKASKMNVRVLFLALLLLASPLLQVARCQVDAEDHSSIVDDVVGEHSDSGAEEDDQDLDNINLTSAPGVETVSVFPKNSAKVVPAGEETELLVALKNDGKSSVGVMGIRASVHLPYDHKLLVQNLTMMRYNNASIPTSVQATFPYIFAVSQYLQPGAFDLVGYIIYDVEGKPYQSVFYNGTIEVVESGGLLSGESVFLITLGVALLLLLGLWAYSQVQRLTKKTKKVSKVEVGTRSTDASLDEWLEGTHLAKTLSGKSKSKKN

SEQ ID NO: 11594 - protein, 258 aa, Triticum aestivum
  peptide (1)..(258): Ceres Seq. ID no. 13664281
  misc_feature (1)..(258): NCBI GI NO: 21555380 NR Description: putative signal sequence receptor, alpha subunit
  misc_feature (1)..(258): NCBI GI NO: 18399609 NR Description: signal sequence receptor, alpha subunit
  misc_feature (1)..(258): NCBI GI NO: 25335776 NR Description: hypothetical protein At2g21160
  misc_feature (5)..(258): NCBI GI NO: 547391 NR Description: alpha-subunit; putative
  misc_feature (125)..(257): NCBI GI NO: 15227250 NR Description: TRAP protein -related [Arabidopsis thaliana]
  misc_feature (5)..(240): NCBI GI NO: 4507237 NR Description: signal sequence receptor, alpha; TRAP alpha
  misc_feature (25)..(257): NCBI GI NO: 1174450 NR Description: TRANSLOCON-ASSOCIATED PROTEIN
  misc_feature (5)..(256): NCBI GI NO: 18921153 NR Description: CG32701-PA [Drosophila melanogaster]
  misc_feature (23)..(240): NCBI GI NO: 17510497 NR Description: Translocon-associated protein
MNVRVLFLALLLLASPLLQVARCQVDAEDHSSIVDDVVGEHSDSGAEEDDQDLDNINLTSAPGVETVSVFPKNSAKVVPAGEETELLVALKNDGKSSVGVMGIRASVHLPYDHKLLVQNLTMMRYNNASIPTSVQATFPYIFAVSQYLQPGAFDLVGYIIYDVEGKPYQSVFYNGTIEVVESGGLLSGESVFLITLGVALLLLLGLWAYSQVQRLTKKTKKVSKVEVGTRSTDASLDEWLEGTHLAKTLSGKSKSKKN

SEQ ID NO: 11595 - protein, 158 aa, Triticum aestivum
  peptide (1)..(158): Ceres Seq. ID no. 13664282
  misc_feature (1)..(158): NCBI GI NO: 21555380 NR Description: putative signal sequence receptor, alpha subunit
  misc_feature (1)..(158): NCBI GI NO: 18399609 NR Description: signal sequence receptor, alpha subunit
  misc_feature (1)..(158): NCBI GI NO: 25335776 NR Description: hypothetical protein At2g21160
  misc_feature (1)..(158): NCBI GI NO: 547391 NR Description: alpha-subunit; putative
  misc_feature (25)..(157): NCBI GI NO: 15227250 NR Description: TRAP protein -related [Arabidopsis thaliana]
  misc_feature (1)..(140): NCBI GI NO: 4507237 NR Description: signal sequence receptor, alpha; TRAP alpha
  misc_feature (1)..(157): NCBI GI NO: 1174450 NR Description: TRANSLOCON-ASSOCIATED PROTEIN
  misc_feature (1)..(156): NCBI GI NO: 18921153 NR Description: CG32701-PA [Drosophila melanogaster]
  misc_feature (1)..(140): NCBI GI NO: 17510497 NR Description: Translocon-associated protein
MGIRASVHLPYDHKLLVQNLTMMRYNNASIPTSVQATFPYIFAVSQYLQPGAFDLVGYIIYDVEGKPYQSVFYNGTIEVVESGGLLSGESVFLITLGVALLLLLGLWAYSQVQRLTKKTKKVSKVEVGTRSTDASLDEWLEGTHLAKTLSGKSKSKKN

SEQ ID NO: 11596 - DNA, 893 bp, Triticum aestivum
  misc_feature (1)..(893): Ceres Seq. ID no. 13661656
caagaatcgaaactcctctctctctctgtcttttacacctcaccaagaacacacaaagagcaagagagagaagaaacccacaatggccacttccttctccgccgcgacgccttttgttttcatcctcctcctctccatctcctccgtcaccgttcacggcgcatctcaccaccacacggcggctccggctccggctgtagactgttcgactctcataatcaacatggcggattgtttggacttcgtcatggccggaggcacgtcggcgaaaccgaagagttcgtgttgcgcggggcttaagacagtgcttaaggctgacgcagagtgtctttgtgaggcgtttaaaaacagtgctgcttttggaatcaccttgaacatgaccaaggctgctacacttcccaccgcatgcaagcttcatgctccttctatttctaactgtggattgtctatgactcctactatggctccaggtcttgctccaggaggtgcggttgctgctggacccggcgcagctggaacaaccctagctccaaccccgtctcaggggaacgacggatcttccttgattccgatctcgttcaccaccctattcagcgctttattcttcgtattgttcttgtctcgtgtgtaaaagagcctgcgcctttctcactatctatagatttggatttatgatatgctttagggctttttaagactgagctttgtgtcttggagtgtcttctgttttagacaatttcgggtttctgcagtagttttactctcttaatttatgttattattttgtcgcacattgatcttttatattaatggtatctctcattccccwaagtgggaatctggaggggggctcattccccmaaaaaaaaaaaaaaaaagcttatcgataccgt

SEQ ID NO: 11597 - protein, 209 aa, Triticum aestivum
  peptide (1)..(209): Ceres Seq. ID no. 15220123
  misc_feature (68)..(146): Pfam Name: Pfam Description:  Protease inhibitor/seed storage/LTP family
  misc_feature (28)..(207): NCBI GI NO: 18424785 NR Description: protease inhibitor/seed storage/lipid transfer
  misc_feature (28)..(207): NCBI GI NO: 21618136 NR Description: nonspecific lipid-transfer protein-like protein
  misc_feature (28)..(207): NCBI GI NO: 10176956 NR Description: contains similarity to nonspecific lipid-transferprotein~gene_id:MHJ24
  misc_feature (65)..(200): NCBI GI NO: 15225509 NR Description: protease inhibitor/seed storage/lipid transfer
  misc_feature (65)..(200): NCBI GI NO: 27765012 NR Description: At2g13820 [Arabidopsis thaliana]
  misc_feature (32)..(192): NCBI GI NO: 30682659 NR Description: lipid transfer protein family
  misc_feature (32)..(156): NCBI GI NO: 18415958 NR Description: lipid transfer protein family
  misc_feature (38)..(207): NCBI GI NO: 7487610 NR Description: hypothetical protein T3F12
  misc_feature (38)..(190): NCBI GI NO: 30680828 NR Description: protease inhibitor/seed storage/lipid transfer
  misc_feature (41)..(205): NCBI GI NO: 25553595 NR Description: OJ1656_E11.26
KNRNSSLSLSFTPHQEHTKSKREKKPTMATSFSAATPFVFILLLSISSVTVHGASHHHTAAPAPAVDCSTLIINMADCLDFVMAGGTSAKPKSSCCAGLKTVLKADAECLCEAFKNSAAFGITLNMTKAATLPTACKLHAPSISNCGLSMTPTMAPGLAPGGAVAAGPGAAGTTLAPTPSQGNDGSSLIPISFTTLFSALFFVLFLSRV

SEQ ID NO: 11598 - protein, 182 aa, Triticum aestivum
  peptide (1)..(182): Ceres Seq. ID no. 15220124
  misc_feature (41)..(119): Pfam Name: Pfam Description:  Protease inhibitor/seed storage/LTP family
  misc_feature (1)..(180): NCBI GI NO: 18424785 NR Description: protease inhibitor/seed storage/lipid transfer
  misc_feature (1)..(180): NCBI GI NO: 21618136 NR Description: nonspecific lipid-transfer protein-like protein
  misc_feature (1)..(180): NCBI GI NO: 10176956 NR Description: contains similarity to nonspecific lipid-transferprotein~gene_id:MHJ24
  misc_feature (38)..(173): NCBI GI NO: 15225509 NR Description: protease inhibitor/seed storage/lipid transfer
  misc_feature (38)..(173): NCBI GI NO: 27765012 NR Description: At2g13820 [Arabidopsis thaliana]
  misc_feature (5)..(165): NCBI GI NO: 30682659 NR Description: lipid transfer protein family
  misc_feature (5)..(129): NCBI GI NO: 18415958 NR Description: lipid transfer protein family
  misc_feature (11)..(180): NCBI GI NO: 7487610 NR Description: hypothetical protein T3F12
  misc_feature (11)..(163): NCBI GI NO: 30680828 NR Description: protease inhibitor/seed storage/lipid transfer
  misc_feature (14)..(178): NCBI GI NO: 25553595 NR Description: OJ1656_E11.26
MATSFSAATPFVFILLLSISSVTVHGASHHHTAAPAPAVDCSTLIINMADCLDFVMAGGTSAKPKSSCCAGLKTVLKADAECLCEAFKNSAAFGITLNMTKAATLPTACKLHAPSISNCGLSMTPTMAPGLAPGGAVAAGPGAAGTTLAPTPSQGNDGSSLIPISFTTLFSALFFVLFLSRV

SEQ ID NO: 11599 - protein, 135 aa, Triticum aestivum
  peptide (1)..(135): Ceres Seq. ID no. 15220125
  misc_feature (1)..(72): Pfam Name: Pfam Description:  Protease inhibitor/seed storage/LTP family
  misc_feature (1)..(133): NCBI GI NO: 18424785 NR Description: protease inhibitor/seed storage/lipid transfer
  misc_feature (1)..(133): NCBI GI NO: 21618136 NR Description: nonspecific lipid-transfer protein-like protein
  misc_feature (1)..(133): NCBI GI NO: 10176956 NR Description: contains similarity to nonspecific lipid-transferprotein~gene_id:MHJ24
  misc_feature (1)..(126): NCBI GI NO: 15225509 NR Description: protease inhibitor/seed storage/lipid transfer
  misc_feature (1)..(126): NCBI GI NO: 27765012 NR Description: At2g13820 [Arabidopsis thaliana]
  misc_feature (1)..(118): NCBI GI NO: 30682659 NR Description: lipid transfer protein family
  misc_feature (1)..(82): NCBI GI NO: 18415958 NR Description: lipid transfer protein family
  misc_feature (1)..(133): NCBI GI NO: 7487610 NR Description: hypothetical protein T3F12
  misc_feature (1)..(116): NCBI GI NO: 30680828 NR Description: protease inhibitor/seed storage/lipid transfer
  misc_feature (1)..(131): NCBI GI NO: 25553595 NR Description: OJ1656_E11.26
MADCLDFVMAGGTSAKPKSSCCAGLKTVLKADAECLCEAFKNSAAFGITLNMTKAATLPTACKLHAPSISNCGLSMTPTMAPGLAPGGAVAAGPGAAGTTLAPTPSQGNDGSSLIPISFTTLFSALFFVLFLSRV

SEQ ID NO: 11600 - DNA, 683 bp, Triticum aestivum
  misc_feature (1)..(683): Ceres Seq. ID no. 13661859
aatcgtattagtcccactttggttggcttaggattgttcttgcatcatcttaaaaatggcttcgctttctttactcagcggcggtgctctccaggctcgttgcgcaagacatgcgcatgttagcccacgcgcggcgcatcctaccaaaccagctcctccgtcctcctctctaactggcgcctctcgcaggaacctgctgttttccctgacggcagcgacggtggtgacgggactgcagcctgcatcaatggcggagactattccgttgttcgggatcagaaagaagctgaagaaggcagaagaagaagcggtggagatcgtgaaggaaggcttcgagacggcggagaaaggactagagacggctgagaagggattagaggcggcggagaagggagtagagacggcggagaaagaaatcgagacggcggttagttataacggattgacgcaggcgggagcagttgtggcggctgagttcatcggagttcttgtcgcaacttcagtcgtcaacgggattttaggacctgaagcccagaagtcgtagacttttatcatttcaagactgaaagacatttgatctttaagtgtaatattgtgtctaaaagttgtgttaattaagcgttgaacgtatgtaatcttgattgagttttgataatatatagttttaatttattttcatttgg

SEQ ID NO: 11601 - protein, 162 aa, Triticum aestivum
  peptide (1)..(162): Ceres Seq. ID no. 15220705
  misc_feature (3)..(162): NCBI GI NO: 18400342 NR Description: expressed protein [Arabidopsis thaliana]
  misc_feature (3)..(162): NCBI GI NO: 21554083 NR Description: unknown [Arabidopsis thaliana]
MASLSLLSGGALQARCARHAHVSPRAAHPTKPAPPSSSLTGASRRNLLFSLTAATVVTGLQPASMAETIPLFGIRKKLKKAEEEAVEIVKEGFETAEKGLETAEKGLEAAEKGVETAEKEIETAVSYNGLTQAGAVVAAEFIGVLVATSVVNGILGPEAQKS

SEQ ID NO: 11602 - protein, 98 aa, Triticum aestivum
  peptide (1)..(98): Ceres Seq. ID no. 15220706
  misc_feature (1)..(98): NCBI GI NO: 18400342 NR Description: expressed protein [Arabidopsis thaliana]
  misc_feature (1)..(98): NCBI GI NO: 21554083 NR Description: unknown [Arabidopsis thaliana]
MAETIPLFGIRKKLKKAEEEAVEIVKEGFETAEKGLETAEKGLEAAEKGVETAEKEIETAVSYNGLTQAGAVVAAEFIGVLVATSVVNGILGPEAQKS

SEQ ID NO: 11603 - DNA, 1066 bp, Triticum aestivum
  misc_feature (1)..(1066): Ceres Seq. ID no. 13661330
gccgaatcacttcactaatcttgcgtccctcttccagctgcagctctgtccaagcgatcgatcgtccgctgtctgtccaacgagctctttctagctcgatcgaggcacgccattgccatggaagccgcacggatcgcgtcctttctgctcctcctcggggtcgtttggtcacgcgcacagcccggcgccgaggcggccggcacgacggtcttcacactgcgcaacaactgcaccttcacgatctggccggccacattgtccggcaacagcgccgtcgccgtcgggggcggcggcttcgagctcgcgccgggcgccaacgtgtcgttccccggcccgacgggctggtccggccggctctgggcgcgcaccggctgcgtcgccgccgcctccggcgcgtccctcgcctgcgccacgggcgactgcggcggcgccgtgcgctgcaccctgggcggggcgccccccgtcacgctcgccgagttcaccctcgggggcgcggacggcaaggacttctacgacgtgagcctggtggacgggtacaacgtcggcatcggcgtggcggccacgggcgccagggtgaactcctcgacatgcggctacgccgggtgcgtgggcgacgtgaacgcgctgtgccccgcggagctgcaggtggccggcaaggaaggggaccaggaggggaagacggtggcgtgccggagcgcgtgcgaggcgttcgggacggccgagtactgctgcacgggcgcgcacggcgggccgaacagctgcgggccgaccaagtactcgaggctgttcaaggcggcatgccccgccgcgtacagctacgcctacgacgatcccaccagcaccttcacctgcggcgccggagcgcagtacctcatcaccttttgcccggcgcagcagtagtccggcccttcgattttggctagtagtgtcgttcattcatcgttatggtgtctcgattttggttagtactatcgttcatccgaattaccagatgtttattggtttggtcgtgtcaatatgtatgcttttgattcattcatttcaaaaaaaaaagaaatatgctttt

SEQ ID NO: 11604 - protein, 306 aa, Triticum aestivum
  peptide (1)..(306): Ceres Seq. ID no. 13661331
  misc_feature (80)..(250): Pfam Name: Pfam Description:  HlyD family secretion protein
  misc_feature (52)..(271): NCBI GI NO: 11362193 NR Description: hypothetical protein
RITSLILRPSSSCSSVQAIDRPLSVQRALSSSIEARHCHGSRTDRVLSAPPRGRLVTRTARRRGGRHDGLHTAQQLHLHDLAGHIVRQQRRRRRGRRLRARAGRQRVVPRPDGLVRPALGAHRLRRRRLRRVPRLRHGRLRRRRALHPGRGAPRHARRVHPRGRGRQGLLRREPGGRVQRRHRRGGHGRQGELLDMRLRRVRGRRERAVPRGAAGGRQGRGPGGEDGGVPERVRGVRDGRVLLHGRARRAEQLRADQVLEAVQGGMPRRVQLRLRRSHQHLHLRRRSAVPHHLLPGAAVVRPFDFG

SEQ ID NO: 11605 - protein, 260 aa, Triticum aestivum
  peptide (1)..(260): Ceres Seq. ID no. 13661332
  misc_feature (36)..(257): Pfam Name: Pfam Description:  Thaumatin family
  misc_feature (1)..(260): NCBI GI NO: 20330768 NR Description: Putative thaumatin-like protein
  misc_feature (26)..(259): NCBI GI NO: 15222088 NR Description: thaumatin-like protein [Arabidopsis thaliana]
  misc_feature (26)..(259): NCBI GI NO: 2435406 NR Description: thaumatin-like protein [Arabidopsis thaliana]
  misc_feature (11)..(259): NCBI GI NO: 15222090 NR Description: thaumatin-like protein
  misc_feature (30)..(257): NCBI GI NO: 6273385 NR Description: SCUTL2 [Vitis vinifera]
  misc_feature (1)..(258): NCBI GI NO: 37531042 NR Description: putative thaumatin-like protein
  misc_feature (26)..(257): NCBI GI NO: 15222089 NR Description: pathogenesis-related protein 5 (PR-5)
  misc_feature (10)..(260): NCBI GI NO: 37531036 NR Description: putative thaumatin-like protein
  misc_feature (27)..(256): NCBI GI NO: 30686314 NR Description: thaumatin family [Arabidopsis thaliana]
  misc_feature (29)..(259): NCBI GI NO: 15238593 NR Description: thaumatin-like protein, putative
MEAARIASFLLLLGVVWSRAQPGAEAAGTTVFTLRNNCTFTIWPATLSGNSAVAVGGGGFELAPGANVSFPGPTGWSGRLWARTGCVAAASGASLACATGDCGGAVRCTLGGAPPVTLAEFTLGGADGKDFYDVSLVDGYNVGIGVAATGARVNSSTCGYAGCVGDVNALCPAELQVAGKEGDQEGKTVACRSACEAFGTAEYCCTGAHGGPNSCGPTKYSRLFKAACPAAYSYAYDDPTSTFTCGAGAQYLITFCPAQQ

SEQ ID NO: 11606 - DNA, 1002 bp, Triticum aestivum
  misc_feature (1)..(1002): Ceres Seq. ID no. 15224408
tctagcatcgctactgaaactgaatttatcttctgaatctttgacttcaattcccatacaacaatggtcatctctactgcgcctggatgtttggaactgtagcaaattaacaacagttgacttcactcctcgttccttaccagcagtaaaagtaatcacaattcgaaattgtgaagctttattgtctctacctggcgaaacgtttgtggagttctgttgtctagaggaattgatgatacgtgaatgtccaaatattgagtggagaggcttgacatttcctatatcgcttcgggagctgtacctcaatgactgtggagacatctcaccatgggttccgaactcactggagcacctcaaccacttaacccatctggcgttgatgaacctcaagtacatcaaatctatctctgcacaaatatgggcacagagtttgtcaaagctggaattcttgcagatctgtgagtgtcctcatctgcaagcgattggtggtcccaaaggaattgcaggcattactaatgcatttgttgaatcgtgtgacaagctaaagggtataaagcaacctttccggagaggtagaatggcccacttcggccacttttgacacatgttagctcctgcaggtggagtcgaaccagagagaaggcgtgaagtgccaaagtgaccctgaacctcctgaagcctgaagagggttaaacccctgtgacttgttactctgctttcttgctttggtggtccgagaggtgagagcaaatggcttaacaaacatgaagcctgacgttttttttccttggttttcttttggcgaagcaaagagcaccgtagcaggcaggcaatttccccgtaactgatactcttgcgttcctgcgctgtgatgtctggtggtgagtttaggacctttcccctgtgttgagcatatgcgctttggcccgcccaaaggtgatgacgcttttgctgttatggcaattggcaagtggtagcaaattgatgaactatttgtccttt

SEQ ID NO: 11607 - protein, 199 aa, Triticum aestivum
  peptide (1)..(199): Ceres Seq. ID no. 15224409
  misc_feature (11)..(164): NCBI GI NO: 38346678 NR Description: OSJNBa0069D17.9
  misc_feature (2)..(172): NCBI GI NO: 34909106 NR Description: putative NBS-LRR type resistance protein
  misc_feature (2)..(164): NCBI GI NO: 38346109 NR Description: OSJNBb0006N15.4
LASLLKLNLSSESLTSIPIQQWSSLLRLDVWNCSKLTTVDFTPRSLPAVKVITIRNCEALLSLPGETFVEFCCLEELMIRECPNIEWRGLTFPISLRELYLNDCGDISPWVPNSLEHLNHLTHLALMNLKYIKSISAQIWAQSLSKLEFLQICECPHLQAIGGPKGIAGITNAFVESCDKLKGIKQPFRRGRMAHFGHF

SEQ ID NO: 11608 - protein, 122 aa, Triticum aestivum
  peptide (1)..(122): Ceres Seq. ID no. 15224410
  misc_feature (1)..(87): NCBI GI NO: 38346678 NR Description: OSJNBa0069D17.9
  misc_feature (1)..(95): NCBI GI NO: 34909106 NR Description: putative NBS-LRR type resistance protein
  misc_feature (1)..(87): NCBI GI NO: 38346109 NR Description: OSJNBb0006N15.4
MIRECPNIEWRGLTFPISLRELYLNDCGDISPWVPNSLEHLNHLTHLALMNLKYIKSISAQIWAQSLSKLEFLQICECPHLQAIGGPKGIAGITNAFVESCDKLKGIKQPFRRGRMAHFGHF

SEQ ID NO: 11609 - DNA, 768 bp, Triticum aestivum
  misc_feature (1)..(768): Ceres Seq. ID no. 13661333
acctagaacatcctaatcgaaaaatattcgaaaaaagatcttcgttttctctgcgtctcctttcagcagtctttgacagcgtcttgattcagccatggctaacgcggcgtcgggaatggcagtccatgatgactgcaagctaaggttcctggaactgaaggcgaagaggacgcaccgtttcattgtttacaagatcgaggagaagcagaagcaagtgattgttgagaaagttggtgagcctattcaaacctacgaggactttgctgcgagcctccctgctgaagagtgccgatacgccatttatgacttcgactttgtcactgcggagaattgccagaagagcaagattttcttcattgcgtggtgtcctgacgtagcaaaggtgagaagcaagatgatctatgcgagctccaaggacaggttcaagcgtgagcttgatggaattcaagtggagcttcaagcgactgatccaactgagatggatcttgatgttttcaaaagccgtgtcaattaaaaaacaaatattctctctctctctctctctctctctttgaataagcttctttggctcttacagtttcctgcgactgtataaaaacataacgccctttattctatccttatctggtctcgtcttctgcgtcgttgttaccgaacagtgttttcatcttatattgaaagttatcccaacgtttgtgctgaaaaaaaaaaaaaaaaaagcttatcgataccgtcgactgtttaaacwcrataaagggggggcccggt

SEQ ID NO: 11610 - protein, 139 aa, Triticum aestivum
  peptide (1)..(139): Ceres Seq. ID no. 15218799
  misc_feature (12)..(139): Pfam Name: Pfam Description:  Cofilin/tropomyosin-type actin-binding protein
  misc_feature (1)..(139): NCBI GI NO: 30697300 NR Description: actin depolymerizing factor 4 - like protein
  misc_feature (1)..(139): NCBI GI NO: 4185511 NR Description: actin depolymerizing factor 4
  misc_feature (1)..(139): NCBI GI NO: 15231309 NR Description: actin depolymerizing factor 1 (ADF1)
  misc_feature (8)..(139): NCBI GI NO: 30697303 NR Description: actin depolymerizing factor 4 - like protein
  misc_feature (1)..(139): NCBI GI NO: 17366768 NR Description: Actin-depolymerizing factor 1 (ADF 1)
  misc_feature (1)..(139): NCBI GI NO: 30697295 NR Description: actin depolymerizing factor 3 - like protein
  misc_feature (1)..(137): NCBI GI NO: 17366765 NR Description: Actin-depolymerizing factor 2 (ADF 2)
  misc_feature (1)..(139): NCBI GI NO: 18408116 NR Description: actin depolymerizing factor 2 (ADF2)
  misc_feature (1)..(139): NCBI GI NO: 38564721 NR Description: putative actin-depolymerizing factor 2
  misc_feature (8)..(139): NCBI GI NO: 11276987 NR Description: actin depolymerizing factor 2
MANAASGMAVHDDCKLRFLELKAKRTHRFIVYKIEEKQKQVIVEKVGEPIQTYEDFAASLPAEECRYAIYDFDFVTAENCQKSKIFFIAWCPDVAKVRSKMIYASSKDRFKRELDGIQVELQATDPTEMDLDVFKSRVN

SEQ ID NO: 11611 - protein, 132 aa, Triticum aestivum
  peptide (1)..(132): Ceres Seq. ID no. 15218800
  misc_feature (5)..(132): Pfam Name: Pfam Description:  Cofilin/tropomyosin-type actin-binding protein
  misc_feature (1)..(132): NCBI GI NO: 30697300 NR Description: actin depolymerizing factor 4 - like protein
  misc_feature (1)..(132): NCBI GI NO: 4185511 NR Description: actin depolymerizing factor 4
  misc_feature (1)..(132): NCBI GI NO: 15231309 NR Description: actin depolymerizing factor 1 (ADF1)
  misc_feature (1)..(132): NCBI GI NO: 30697303 NR Description: actin depolymerizing factor 4 - like protein
  misc_feature (1)..(132): NCBI GI NO: 17366768 NR Description: Actin-depolymerizing factor 1 (ADF 1)
  misc_feature (1)..(132): NCBI GI NO: 30697295 NR Description: actin depolymerizing factor 3 - like protein
  misc_feature (1)..(130): NCBI GI NO: 17366765 NR Description: Actin-depolymerizing factor 2 (ADF 2)
  misc_feature (1)..(132): NCBI GI NO: 18408116 NR Description: actin depolymerizing factor 2 (ADF2)
  misc_feature (1)..(132): NCBI GI NO: 38564721 NR Description: putative actin-depolymerizing factor 2
  misc_feature (1)..(132): NCBI GI NO: 11276987 NR Description: actin depolymerizing factor 2
MAVHDDCKLRFLELKAKRTHRFIVYKIEEKQKQVIVEKVGEPIQTYEDFAASLPAEECRYAIYDFDFVTAENCQKSKIFFIAWCPDVAKVRSKMIYASSKDRFKRELDGIQVELQATDPTEMDLDVFKSRVN

SEQ ID NO: 11612 - DNA, 791 bp, Triticum aestivum
  misc_feature (1)..(791): Ceres Seq. ID no. 15224870
actctccaaaaccaccaaaatctccatcccctccgtgcaccggattccatccaactgctccaccactctaatctctctctcatggcgacggccaccgcgagtcggcccagcggcccggtcctgtcgatccccagctaccgctccgcctcgccaacccgcgtcaaggtcgccacccgcttgccgggcaagtccgtcagcgtctcctccccgtcctccaccaggagccatcggtcctcctgcatgtgctccccgacgaaccacccgggctcgttccgctgcagcctccacaaggagcgcaagcagccggcccacgctggcagcagcagcaggcccgcctccccgccttccccgccgtccacctcgaagagcacgggcggcgcgctggcgaggctcgtccccatggggagcgggcactgggcacgcagggcgctagcgccgtcccccgcggcgcagcagtcgctacagcaccggaggcgcgcgggcgggttccgcccccggccgagcaggctctccgccgtgtccacggccggcgacagccagtagacgaacagcgtctgacatgaagaattgcctgaagaaattgaagtttttagaaccaattcgatacctgcgtcgacatgccatggcaagatagtagagtagtgctagtagatagcaaagaaattgcctgaagaattggagtttttagaaccaattcgatacctgcctggagagttgatgagcccgtccgtaactgtacagaatgcatttttctagcaagcatgaatggcgttaattgagattcaagaagc

SEQ ID NO: 11613 - protein, 180 aa, Triticum aestivum
  peptide (1)..(180): Ceres Seq. ID no. 15224871
  misc_feature (47)..(179): NCBI GI NO: 15238947 NR Description: expressed protein [Arabidopsis thaliana]
  misc_feature (21)..(178): NCBI GI NO: 15238753 NR Description: serine-rich protein [Arabidopsis thaliana]
  misc_feature (21)..(178): NCBI GI NO: 21618161 NR Description: serine-rich protein [Arabidopsis thaliana]
  misc_feature (45)..(178): NCBI GI NO: 24461857 NR Description: CTV.15 [Poncirus trifoliata]
  misc_feature (47)..(169): NCBI GI NO: 15241329 NR Description: hypothetical protein [Arabidopsis thaliana]
TLQNHQNLHPLRAPDSIQLLHHSNLSLMATATASRPSGPVLSIPSYRSASPTRVKVATRLPGKSVSVSSPSSTRSHRSSCMCSPTNHPGSFRCSLHKERKQPAHAGSSSRPASPPSPPSTSKSTGGALARLVPMGSGHWARRALAPSPAAQQSLQHRRRAGGFRPRPSRLSAVSTAGDSQ

SEQ ID NO: 11614 - protein, 153 aa, Triticum aestivum
  peptide (1)..(153): Ceres Seq. ID no. 15224872
  misc_feature (20)..(152): NCBI GI NO: 15238947 NR Description: expressed protein [Arabidopsis thaliana]
  misc_feature (1)..(151): NCBI GI NO: 15238753 NR Description: serine-rich protein [Arabidopsis thaliana]
  misc_feature (1)..(151): NCBI GI NO: 21618161 NR Description: serine-rich protein [Arabidopsis thaliana]
  misc_feature (18)..(151): NCBI GI NO: 24461857 NR Description: CTV.15 [Poncirus trifoliata]
  misc_feature (20)..(142): NCBI GI NO: 15241329 NR Description: hypothetical protein [Arabidopsis thaliana]
MATATASRPSGPVLSIPSYRSASPTRVKVATRLPGKSVSVSSPSSTRSHRSSCMCSPTNHPGSFRCSLHKERKQPAHAGSSSRPASPPSPPSTSKSTGGALARLVPMGSGHWARRALAPSPAAQQSLQHRRRAGGFRPRPSRLSAVSTAGDSQ

SEQ ID NO: 11615 - protein, 143 aa, Triticum aestivum
  peptide (1)..(143): Ceres Seq. ID no. 15224873
  misc_feature (31)..(127): Pfam Name: rhodopsin family Pfam Description: 7 transmembrane receptor
  misc_feature (11)..(143): NCBI GI NO: 34536406 NR Description: unnamed protein product [Homo sapiens]
  misc_feature (31)..(143): NCBI GI NO: 27375632 NR Description: blr0521 [Bradyrhizobium japonicum]
  misc_feature (29)..(143): NCBI GI NO: 29247944 NR Description: GLP_26_54603_52153 [Giardia lamblia ATCC 50803]
  misc_feature (20)..(143): NCBI GI NO: 32422095 NR Description: predicted protein [Neurospora crassa]
  misc_feature (14)..(143): NCBI GI NO: 31239605 NR Description: ENSANGP00000009012 [Anopheles gambiae]
  misc_feature (10)..(142): NCBI GI NO: 7441829 NR Description: proline-rich cell wall protein - upland cotton
  misc_feature (6)..(143): NCBI GI NO: 81286 NR Description: extensin - Volvox carteri (fragment)
  misc_feature (29)..(143): NCBI GI NO: 11360318 NR Description: probable mucin DKFZp434C196.1 - human (fragment)
  misc_feature (31)..(143): NCBI GI NO: 22962211 NR Description: COG2885: Outer membrane protein and relatedpeptidoglycan-associated
  misc_feature (8)..(115): NCBI GI NO: 34901668 NR Description: P0640E12.29
LSKTTKISIPSVHRIPSNCSTTLISLSWRRPPRVGPAARSCRSPATAPPRQPASRSPPACRASPSASPPRPPPGAIGPPACAPRRTTRARSAAASTRSASSRPTLAAAAGPPPRLPRRPPRRARAARWRGSSPWGAGTGHAGR

SEQ ID NO: 11616 - DNA, 884 bp, Triticum aestivum
  misc_feature (1)..(884): Ceres Seq. ID no. 15226343
taataacatcaaaagctccatcaccaaaacccttccatattttcaagtaaagttttcaatgacttcatcaatggcgtcctcctccctttctcctgctactcagcttggttcgagcagaagctctttgttggcgatgtcgcgtgtgatgtttgtgaagccaacgaatcatcagatggtgaaaaaggagaagattggtctgagaattgcttgtcaagcgacgagtataccagcagacaatgttccagatatggaaaagaggaagcttttgaatcttcttcttgtcggggctctttctctccctactggcttcatgcttgtcccttacgctaccttctttgctcctcctggatccggaggtgggggtggtggtactccagccaaggatgcacttggaaacgatgtcgttgcagcagaatggcttaagactcatggtcccggtgatcgaaccttgacccaaggattaaagggagatccaacttacctagttgtggagaacgacaaaactctagcgacctacggtataaacgcagtgtgcactcatcttggatgtgttgtgccatggaacaaagctgagaacaagttcctatgcccttgccatggttcccaatacaacgcccaaggaagagtcgttagaggtccagcgccattgtcgcttgccttggctcacgccgatattgatgacagtggaaaggttctatttgttccatgggttgaaactgacttcaggactggtgatgctccatggtggtcttaaaactgtgcaacaactcttttgcctaatacttgtatgaatgttcttataatgtaaaagctatgtgtaaccatacatttcatggcattactctgtgaattcttccctcttatatgaattttatgttcattcg

SEQ ID NO: 11617 - protein, 250 aa, Triticum aestivum
  peptide (1)..(250): Ceres Seq. ID no. 15226344
  misc_feature (134)..(226): Pfam Name: Pfam Description:  Rieske [2Fe-2S] domain
  misc_feature (24)..(250): NCBI GI NO: 9843639 NR Description: Rieske FeS protein [Arabidopsis thaliana]
  misc_feature (24)..(250): NCBI GI NO: 15236275 NR Description: Rieske FeS protein
  misc_feature (43)..(250): NCBI GI NO: 30679426 NR Description: Rieske FeS protein
  misc_feature (24)..(250): NCBI GI NO: 401249 NR Description: Cytochrome B6-F complex iron-sulfur subunit 2
  misc_feature (24)..(250): NCBI GI NO: 401247 NR Description: Cytochrome B6-F complex iron-sulfur subunit 1
  misc_feature (24)..(250): NCBI GI NO: 19999 NR Description: Rieske Fe/S protein of cytochrome b6/f complex
  misc_feature (21)..(250): NCBI GI NO: 136712 NR Description: Cytochrome B6-F complex iron-sulfur subunit
  misc_feature (24)..(250): NCBI GI NO: 136707 NR Description: Cytochrome B6-F complex iron-sulfur subunit
  misc_feature (24)..(250): NCBI GI NO: 2921504 NR Description: cytochrome B6-F complex iron-sulfur subunitprecursor
  misc_feature (24)..(250): NCBI GI NO: 3885886 NR Description: Rieske Fe-S precursor protein [Oryza sativa]
NNIKSSITKTLPYFQVKFSMTSSMASSSLSPATQLGSSRSSLLAMSRVMFVKPTNHQMVKKEKIGLRIACQATSIPADNVPDMEKRKLLNLLLVGALSLPTGFMLVPYATFFAPPGSGGGGGGTPAKDALGNDVVAAEWLKTHGPGDRTLTQGLKGDPTYLVVENDKTLATYGINAVCTHLGCVVPWNKAENKFLCPCHGSQYNAQGRVVRGPAPLSLALAHADIDDSGKVLFVPWVETDFRTGDAPWWS

SEQ ID NO: 11618 - protein, 231 aa, Triticum aestivum
  peptide (1)..(231): Ceres Seq. ID no. 15226345
  misc_feature (115)..(207): Pfam Name: Pfam Description:  Rieske [2Fe-2S] domain
  misc_feature (5)..(231): NCBI GI NO: 9843639 NR Description: Rieske FeS protein [Arabidopsis thaliana]
  misc_feature (5)..(231): NCBI GI NO: 15236275 NR Description: Rieske FeS protein
  misc_feature (24)..(231): NCBI GI NO: 30679426 NR Description: Rieske FeS protein
  misc_feature (5)..(231): NCBI GI NO: 401249 NR Description: Cytochrome B6-F complex iron-sulfur subunit 2
  misc_feature (5)..(231): NCBI GI NO: 401247 NR Description: Cytochrome B6-F complex iron-sulfur subunit 1
  misc_feature (5)..(231): NCBI GI NO: 19999 NR Description: Rieske Fe/S protein of cytochrome b6/f complex
  misc_feature (2)..(231): NCBI GI NO: 136712 NR Description: Cytochrome B6-F complex iron-sulfur subunit
  misc_feature (5)..(231): NCBI GI NO: 136707 NR Description: Cytochrome B6-F complex iron-sulfur subunit
  misc_feature (5)..(231): NCBI GI NO: 2921504 NR Description: cytochrome B6-F complex iron-sulfur subunitprecursor
  misc_feature (5)..(231): NCBI GI NO: 3885886 NR Description: Rieske Fe-S precursor protein [Oryza sativa]
MTSSMASSSLSPATQLGSSRSSLLAMSRVMFVKPTNHQMVKKEKIGLRIACQATSIPADNVPDMEKRKLLNLLLVGALSLPTGFMLVPYATFFAPPGSGGGGGGTPAKDALGNDVVAAEWLKTHGPGDRTLTQGLKGDPTYLVVENDKTLATYGINAVCTHLGCVVPWNKAENKFLCPCHGSQYNAQGRVVRGPAPLSLALAHADIDDSGKVLFVPWVETDFRTGDAPWWS

SEQ ID NO: 11619 - protein, 227 aa, Triticum aestivum
  peptide (1)..(227): Ceres Seq. ID no. 15226346
  misc_feature (111)..(203): Pfam Name: Pfam Description:  Rieske [2Fe-2S] domain
  misc_feature (1)..(227): NCBI GI NO: 9843639 NR Description: Rieske FeS protein [Arabidopsis thaliana]
  misc_feature (1)..(227): NCBI GI NO: 15236275 NR Description: Rieske FeS protein
  misc_feature (20)..(227): NCBI GI NO: 30679426 NR Description: Rieske FeS protein
  misc_feature (1)..(227): NCBI GI NO: 401249 NR Description: Cytochrome B6-F complex iron-sulfur subunit 2
  misc_feature (1)..(227): NCBI GI NO: 401247 NR Description: Cytochrome B6-F complex iron-sulfur subunit 1
  misc_feature (1)..(227): NCBI GI NO: 19999 NR Description: Rieske Fe/S protein of cytochrome b6/f complex
  misc_feature (1)..(227): NCBI GI NO: 136712 NR Description: Cytochrome B6-F complex iron-sulfur subunit
  misc_feature (1)..(227): NCBI GI NO: 136707 NR Description: Cytochrome B6-F complex iron-sulfur subunit
  misc_feature (1)..(227): NCBI GI NO: 2921504 NR Description: cytochrome B6-F complex iron-sulfur subunitprecursor
  misc_feature (1)..(227): NCBI GI NO: 3885886 NR Description: Rieske Fe-S precursor protein [Oryza sativa]
MASSSLSPATQLGSSRSSLLAMSRVMFVKPTNHQMVKKEKIGLRIACQATSIPADNVPDMEKRKLLNLLLVGALSLPTGFMLVPYATFFAPPGSGGGGGGTPAKDALGNDVVAAEWLKTHGPGDRTLTQGLKGDPTYLVVENDKTLATYGINAVCTHLGCVVPWNKAENKFLCPCHGSQYNAQGRVVRGPAPLSLALAHADIDDSGKVLFVPWVETDFRTGDAPWWS

SEQ ID NO: 11620 - DNA, 1217 bp, Triticum aestivum
  misc_feature (1)..(1217): Ceres Seq. ID no. 15225659
aagcggacaaggccctatccatccatccatccccatcagatcacctccccacacatctgtgcgccacccgaacgaaagctaagccaccagcagccatggcatctcgcgacgccgccaccttccagctctaccggcccatggcaatgccgacggcgacgctcatgccccagacgatggcaatgcccggcttctcgtcggccgaggccgcggacgacgccgtggtgagagtgccggcgccgagaacggcgggggcggcgaagggcgccaaggaccggcacagcaaggtgaacgggcgcgggcggcgcgtgcgcatgccgatcgtgtgcgcggcgcgcgtgttccagctcacccgcgagctggggctcaagtcggacgggcagaccgtggagtggctgctccggcaggccgagccgtccatcctggccgccaccggctccggcaccaccccggccgtcttctcctgctcctccgcgccctccatcgccgccgtctccctcctcgggaagcggccgcgcgaggaccacgagcacgaggcggcgccgtcgttctgggaggcgctgcaggcccggcccgtaccctggggcctctccccgtcgctggaggcgcaggcgtacgcgtcgtcggtggcgcaggggcaccaccaccacctgaacctgctctccgcgctctccggcgcctccaggcggccagaggaggagtcccggtgaccgaccgccgctgcagctagcgccgagccgcgcgcgctctctacgtgatcgcatgcgctgacctgccagtgccctgctgcctaattcttggagccaagctagccaggtgttcctgcttgcttgcctgctgctgtgtggtgtggcttgccctacgtactttatcattttcttttgcttcctttctcctttgcgtgcaccgtgtgttttcttttgcgtggtttttggtctgggaagaaagaatggagaatctgggcagcatcagagattccaaggtagcaactgtagatacaagcctgctagagatcttaccaccccatctcgtcggatttgtgattgtgcttgtcactagttattactacagtgtattacgccactgccacggctctgccattccctgctgtctgtgacaagtcgattgatctatctaacacagtgccactcttgtaccactcgattgttgttttgcgtcaatggaagtccctctatctgtaggaatcgttttgccgatgc

SEQ ID NO: 11621 - protein, 234 aa, Triticum aestivum
  peptide (1)..(234): Ceres Seq. ID no. 15225660
  misc_feature (79)..(178): Pfam Name: Pfam Description:  TCP family transcription factor
  misc_feature (32)..(234): NCBI GI NO: 38344439 NR Description: OSJNBa0038O10.11
  misc_feature (79)..(178): NCBI GI NO: 15241596 NR Description: TCP family transcription factor, putative
  misc_feature (88)..(156): NCBI GI NO: 15237274 NR Description: TCP family transcription factor, putative
  misc_feature (88)..(156): NCBI GI NO: 26452377 NR Description: unknown protein [Arabidopsis thaliana]
  misc_feature (82)..(171): NCBI GI NO: 20975251 NR Description: transcription factor PCF3
  misc_feature (65)..(170): NCBI GI NO: 15217857 NR Description: TCP family transcription factor, putative
  misc_feature (45)..(233): NCBI GI NO: 18409345 NR Description: TCP family transcription factor, putative
  misc_feature (86)..(157): NCBI GI NO: 15218305 NR Description: TCP family transcription factor, putative
  misc_feature (44)..(151): NCBI GI NO: 15225538 NR Description: TCP family transcription factor, putative
  misc_feature (89)..(157): NCBI GI NO: 15232059 NR Description: TCP family transcription factor, putative
ADKALSIHPSPSDHLPTHLCATRTKAKPPAAMASRDAATFQLYRPMAMPTATLMPQTMAMPGFSSAEAADDAVVRVPAPRTAGAAKGAKDRHSKVNGRGRRVRMPIVCAARVFQLTRELGLKSDGQTVEWLLRQAEPSILAATGSGTTPAVFSCSSAPSIAAVSLLGKRPREDHEHEAAPSFWEALQARPVPWGLSPSLEAQAYASSVAQGHHHHLNLLSALSGASRRPEEESR

SEQ ID NO: 11622 - protein, 203 aa, Triticum aestivum
  peptide (1)..(203): Ceres Seq. ID no. 15225661
  misc_feature (48)..(147): Pfam Name: Pfam Description:  TCP family transcription factor
  misc_feature (1)..(203): NCBI GI NO: 38344439 NR Description: OSJNBa0038O10.11
  misc_feature (48)..(147): NCBI GI NO: 15241596 NR Description: TCP family transcription factor, putative
  misc_feature (57)..(125): NCBI GI NO: 15237274 NR Description: TCP family transcription factor, putative
  misc_feature (57)..(125): NCBI GI NO: 26452377 NR Description: unknown protein [Arabidopsis thaliana]
  misc_feature (51)..(140): NCBI GI NO: 20975251 NR Description: transcription factor PCF3
  misc_feature (34)..(139): NCBI GI NO: 15217857 NR Description: TCP family transcription factor, putative
  misc_feature (14)..(202): NCBI GI NO: 18409345 NR Description: TCP family transcription factor, putative
  misc_feature (55)..(126): NCBI GI NO: 15218305 NR Description: TCP family transcription factor, putative
  misc_feature (13)..(120): NCBI GI NO: 15225538 NR Description: TCP family transcription factor, putative
  misc_feature (58)..(126): NCBI GI NO: 15232059 NR Description: TCP family transcription factor, putative
MASRDAATFQLYRPMAMPTATLMPQTMAMPGFSSAEAADDAVVRVPAPRTAGAAKGAKDRHSKVNGRGRRVRMPIVCAARVFQLTRELGLKSDGQTVEWLLRQAEPSILAATGSGTTPAVFSCSSAPSIAAVSLLGKRPREDHEHEAAPSFWEALQARPVPWGLSPSLEAQAYASSVAQGHHHHLNLLSALSGASRRPEEESR

SEQ ID NO: 11623 - protein, 189 aa, Triticum aestivum
  peptide (1)..(189): Ceres Seq. ID no. 15225662
  misc_feature (34)..(133): Pfam Name: Pfam Description:  TCP family transcription factor
  misc_feature (1)..(189): NCBI GI NO: 38344439 NR Description: OSJNBa0038O10.11
  misc_feature (34)..(133): NCBI GI NO: 15241596 NR Description: TCP family transcription factor, putative
  misc_feature (43)..(111): NCBI GI NO: 15237274 NR Description: TCP family transcription factor, putative
  misc_feature (43)..(111): NCBI GI NO: 26452377 NR Description: unknown protein [Arabidopsis thaliana]
  misc_feature (37)..(126): NCBI GI NO: 20975251 NR Description: transcription factor PCF3
  misc_feature (20)..(125): NCBI GI NO: 15217857 NR Description: TCP family transcription factor, putative
  misc_feature (1)..(188): NCBI GI NO: 18409345 NR Description: TCP family transcription factor, putative
  misc_feature (41)..(112): NCBI GI NO: 15218305 NR Description: TCP family transcription factor, putative
  misc_feature (1)..(106): NCBI GI NO: 15225538 NR Description: TCP family transcription factor, putative
  misc_feature (44)..(112): NCBI GI NO: 15232059 NR Description: TCP family transcription factor, putative
MAMPTATLMPQTMAMPGFSSAEAADDAVVRVPAPRTAGAAKGAKDRHSKVNGRGRRVRMPIVCAARVFQLTRELGLKSDGQTVEWLLRQAEPSILAATGSGTTPAVFSCSSAPSIAAVSLLGKRPREDHEHEAAPSFWEALQARPVPWGLSPSLEAQAYASSVAQGHHHHLNLLSALSGASRRPEEESR

SEQ ID NO: 11624 - DNA, 761 bp, Triticum aestivum
  misc_feature (1)..(761): Ceres Seq. ID no. 14301649
aaaacatagctcctctcctcctgtgcgcgctcaccgctgcacagtatccacccataagagcatataggcgcagtgcaacaggatcatcagtacgggttgcactagcttattaggctagcggctagcgagggagtaggcaggcactgcgcaggagctgatccatggcgagcacggtggagtcgccgacgagctcgtgcgtgtcgtcggacacggaggaggaggccgcggcggtgacgaagccgatggtggtggtggggtgcccgcagtgcctcatgtacgtgatgctgtcgggggcggcggaggagcagcccaggtgcccccggtgcaagagccccgtgctgctgcacttcctccacggcgctgccgccgccgccgccgccagcaccaacaggcagcagcccagcaagagctagccagccaacatgctgctgcttggtcgctgcatgctgcttgctgatcagccgctagcttctcctgccatcgatctccaccatgttctaactcgtgtattctgctgcactatgtagctcttcttttttcccttttcgtcgacgatagtaatttccatgcgagtaactctcaagaagacaagaacgcaaatcttttacagcctggtgcaattggctcggttttactctcgcttagcagtggctgtccttctccaacaacctttagatgtatgcacgtgttctgcaccgtgaaggtcgatgtctgttttaatcccctccttaatttcggtttgaataagatgagatttcacg

SEQ ID NO: 11625 - protein, 83 aa, Triticum aestivum
  peptide (1)..(83): Ceres Seq. ID no. 14301650
  misc_feature (1)..(83): NCBI GI NO: 32488708 NR Description: OSJNBa0088H09.9
  misc_feature (1)..(79): NCBI GI NO: 18399295 NR Description: expressed protein [Arabidopsis thaliana]
  misc_feature (1)..(78): NCBI GI NO: 15239988 NR Description: B-type cyclin -related [Arabidopsis thaliana]
  misc_feature (1)..(63): NCBI GI NO: 34908532 NR Description: P0423B08.15
  misc_feature (1)..(82): NCBI GI NO: 32479729 NR Description: OJ991214_12.5
  misc_feature (2)..(66): NCBI GI NO: 15242196 NR Description: expressed protein [Arabidopsis thaliana]
  misc_feature (5)..(53): NCBI GI NO: 38637033 NR Description: unknown protein
  misc_feature (1)..(66): NCBI GI NO: 21593032 NR Description: unknown [Arabidopsis thaliana]
MASTVESPTSSCVSSDTEEEAAAVTKPMVVVGCPQCLMYVMLSGAAEEQPRCPRCKSPVLLHFLHGAAAAAAASTNRQQPSKS

SEQ ID NO: 11626 - protein, 56 aa, Triticum aestivum
  peptide (1)..(56): Ceres Seq. ID no. 14301651
  misc_feature (1)..(56): NCBI GI NO: 32488708 NR Description: OSJNBa0088H09.9
  misc_feature (1)..(52): NCBI GI NO: 18399295 NR Description: expressed protein [Arabidopsis thaliana]
  misc_feature (1)..(51): NCBI GI NO: 15239988 NR Description: B-type cyclin -related [Arabidopsis thaliana]
  misc_feature (1)..(36): NCBI GI NO: 34908532 NR Description: P0423B08.15
  misc_feature (1)..(55): NCBI GI NO: 32479729 NR Description: OJ991214_12.5
  misc_feature (1)..(39): NCBI GI NO: 15242196 NR Description: expressed protein [Arabidopsis thaliana]
  misc_feature (1)..(26): NCBI GI NO: 38637033 NR Description: unknown protein
  misc_feature (1)..(39): NCBI GI NO: 21593032 NR Description: unknown [Arabidopsis thaliana]
MVVVGCPQCLMYVMLSGAAEEQPRCPRCKSPVLLHFLHGAAAAAAASTNRQQPSKS

SEQ ID NO: 11627 - protein, 46 aa, Triticum aestivum
  peptide (1)..(46): Ceres Seq. ID no. 14301652
  misc_feature (1)..(46): NCBI GI NO: 32488708 NR Description: OSJNBa0088H09.9
  misc_feature (1)..(42): NCBI GI NO: 18399295 NR Description: expressed protein [Arabidopsis thaliana]
  misc_feature (1)..(41): NCBI GI NO: 15239988 NR Description: B-type cyclin -related [Arabidopsis thaliana]
  misc_feature (1)..(26): NCBI GI NO: 34908532 NR Description: P0423B08.15
  misc_feature (1)..(45): NCBI GI NO: 32479729 NR Description: OJ991214_12.5
  misc_feature (1)..(29): NCBI GI NO: 15242196 NR Description: expressed protein [Arabidopsis thaliana]
  misc_feature (1)..(16): NCBI GI NO: 38637033 NR Description: unknown protein
  misc_feature (1)..(29): NCBI GI NO: 21593032 NR Description: unknown [Arabidopsis thaliana]
MYVMLSGAAEEQPRCPRCKSPVLLHFLHGAAAAAAASTNRQQPSKS

SEQ ID NO: 11628 - DNA, 979 bp, Triticum aestivum
  misc_feature (1)..(979): Ceres Seq. ID no. 15226347
aataataataaaattcaacggaggccgccttcccttcaccggatcaccttccttcctttggatctatcttcccattccgacggttcttcgtttctcagagtatcaatctaccttggaacaatgactgaagtgtttaacggctacgagcgccaatactgcgacctctccgccaatctctccaagaaatgctcctctgctcttgcccttgacggagaacaaaagaagcagaagctctctgagataagatctggcctcgataatgctgaagcattgattaggaaaatggatgttgaggcgaggagccttccaccgagcattaggaccagcctccttgttaaactaagagagttcaagtctgatctcaacaacttcaaaagcgaagtcaagaggatcacatctgctaacttgaacgctgctgctcgcgacgagctgcttgaagctggtctggctgacacaaagacggcttcggctgatcaaagagcgagattgatgatgtcaaccgatcgattgggtcgaactactgacagaatcaaggacagtcgaagaatgatgattgagactgaagagcttggcgtttctgtcctccaagacttgcacagtcagagacagtctctccttcgcactggcgacacgcttagtggagtagacgaaaatgtcggaaagagcaagaagatcttgacaggcatgaccaggaggatgaacaggaacaagtggaccattggagccattatcaccgctttggtcgcggctattatcctcatcttgtacttcaaactcaccaagtaatccctctgtatctaaactctttgtcgctgaacaaatggtgtgcatcttttatttaatccttttctggctttctgtgtgataagttatgtctttgccaccttttctattatcacgttctcttgtttgcgtttgcgattacatttgtgtattttcatactaaatgatgcaaattgttttgttttattattattag

SEQ ID NO: 11629 - protein, 261 aa, Triticum aestivum
  peptide (1)..(261): Ceres Seq. ID no. 15226348
  misc_feature (81)..(236): Pfam Name: Pfam Description:  Vesicle transport v-SNARE protein
  misc_feature (41)..(261): NCBI GI NO: 15241780 NR Description: v-SNARE AtVTI1a (ZIG) [Arabidopsis thaliana]
  misc_feature (41)..(261): NCBI GI NO: 6690274 NR Description: v-SNARE AtVTI1a [Arabidopsis thaliana]
  misc_feature (41)..(261): NCBI GI NO: 15228600 NR Description: SNARE protein AtVTI13 [Arabidopsis thaliana]
  misc_feature (41)..(259): NCBI GI NO: 34910406 NR Description: putative vesicle transport v-SNARE protein
  misc_feature (95)..(261): NCBI GI NO: 26451552 NR Description: putative vesicle transport protein
  misc_feature (41)..(258): NCBI GI NO: 34914100 NR Description: similar to vesicle transport protein
  misc_feature (41)..(260): NCBI GI NO: 18396008 NR Description: v-SNARE protein AtVTI1b, putative
  misc_feature (41)..(260): NCBI GI NO: 6690276 NR Description: v-SNARE AtVTI1b [Arabidopsis thaliana]
  misc_feature (41)..(260): NCBI GI NO: 27805772 NR Description: Vesicle transport v-SNARE 12
  misc_feature (41)..(261): NCBI GI NO: 9758339 NR Description: v-SNARE AtVTI1a-like protein
NNNKIQRRPPSLHRITFLPLDLSSHSDGSSFLRVSIYLGTMTEVFNGYERQYCDLSANLSKKCSSALALDGEQKKQKLSEIRSGLDNAEALIRKMDVEARSLPPSIRTSLLVKLREFKSDLNNFKSEVKRITSANLNAAARDELLEAGLADTKTASADQRARLMMSTDRLGRTTDRIKDSRRMMIETEELGVSVLQDLHSQRQSLLRTGDTLSGVDENVGKSKKILTGMTRRMNRNKWTIGAIITALVAAIILILYFKLTK

SEQ ID NO: 11630 - protein, 221 aa, Triticum aestivum
  peptide (1)..(221): Ceres Seq. ID no. 15226349
  misc_feature (41)..(196): Pfam Name: Pfam Description:  Vesicle transport v-SNARE protein
  misc_feature (1)..(221): NCBI GI NO: 15241780 NR Description: v-SNARE AtVTI1a (ZIG) [Arabidopsis thaliana]
  misc_feature (1)..(221): NCBI GI NO: 6690274 NR Description: v-SNARE AtVTI1a [Arabidopsis thaliana]
  misc_feature (1)..(221): NCBI GI NO: 15228600 NR Description: SNARE protein AtVTI13 [Arabidopsis thaliana]
  misc_feature (1)..(219): NCBI GI NO: 34910406 NR Description: putative vesicle transport v-SNARE protein
  misc_feature (55)..(221): NCBI GI NO: 26451552 NR Description: putative vesicle transport protein
  misc_feature (1)..(218): NCBI GI NO: 34914100 NR Description: similar to vesicle transport protein
  misc_feature (1)..(220): NCBI GI NO: 18396008 NR Description: v-SNARE protein AtVTI1b, putative
  misc_feature (1)..(220): NCBI GI NO: 6690276 NR Description: v-SNARE AtVTI1b [Arabidopsis thaliana]
  misc_feature (1)..(220): NCBI GI NO: 27805772 NR Description: Vesicle transport v-SNARE 12
  misc_feature (1)..(221): NCBI GI NO: 9758339 NR Description: v-SNARE AtVTI1a-like protein
MTEVFNGYERQYCDLSANLSKKCSSALALDGEQKKQKLSEIRSGLDNAEALIRKMDVEARSLPPSIRTSLLVKLREFKSDLNNFKSEVKRITSANLNAAARDELLEAGLADTKTASADQRARLMMSTDRLGRTTDRIKDSRRMMIETEELGVSVLQDLHSQRQSLLRTGDTLSGVDENVGKSKKILTGMTRRMNRNKWTIGAIITALVAAIILILYFKLTK
